United States Patent Application Publication US 2016/0319361 A1 - sequence listing, part 10

SEQ ID NO: 249429 - DNA, 30 bp, Artificial Sequence
  Synthetic oligonucleotide
gattacgatacagcggtgaacctctgcaac

SEQ ID NO: 249430 - DNA, 30 bp, Artificial Sequence
  Synthetic oligonucleotide
cgagcggacacttggttagtaaccatcaac

SEQ ID NO: 249431 - DNA, 30 bp, Artificial Sequence
  Synthetic oligonucleotide
cgtggcgacacgggagccttcaggatcaac

SEQ ID NO: 249432 - DNA, 30 bp, Artificial Sequence
  Synthetic oligonucleotide
attcacccgaggccttaagaatgtatcaac

SEQ ID NO: 249433 - DNA, 29 bp, Artificial Sequence
  Synthetic oligonucleotide
gcccataacatgtaccgacatttatcaac

SEQ ID NO: 249434 - DNA, 30 bp, Artificial Sequence
  Synthetic oligonucleotide
aattgagcatccaacctcttcggactcaac

SEQ ID NO: 249435 - DNA, 30 bp, Artificial Sequence
  Synthetic oligonucleotide
gaaagtgttatgatcggagggtagctcaac

SEQ ID NO: 249436 - DNA, 30 bp, Artificial Sequence
  Synthetic oligonucleotide
aagaacggtcactctgcggattggctcaac

SEQ ID NO: 249437 - DNA, 30 bp, Artificial Sequence
  Synthetic oligonucleotide
acgcatagagtgtaatgttaacgagtcaac

SEQ ID NO: 249438 - DNA, 30 bp, Artificial Sequence
  Synthetic oligonucleotide
aagaccctacaaacagcaatcgaggtcaac

SEQ ID NO: 249439 - DNA, 30 bp, Artificial Sequence
  Synthetic oligonucleotide
gcataagttatccccaatgccccggtcaac

SEQ ID NO: 249440 - DNA, 30 bp, Artificial Sequence
  Synthetic oligonucleotide
gccagtccaatggccatacttgcggtcaac

SEQ ID NO: 249441 - DNA, 30 bp, Artificial Sequence
  Synthetic oligonucleotide
ctagtaaggtcatgatgagtagatgtcaac

SEQ ID NO: 249442 - DNA, 30 bp, Artificial Sequence
  Synthetic oligonucleotide
tgctatttactcgcccttcgcgatgtcaac

SEQ ID NO: 249443 - DNA, 30 bp, Artificial Sequence
  Synthetic oligonucleotide
gaaagaacggttcggagcacggctgtcaac

SEQ ID NO: 249444 - DNA, 30 bp, Artificial Sequence
  Synthetic oligonucleotide
cttattacaaaccacttaacatcattcaac

SEQ ID NO: 249445 - DNA, 30 bp, Artificial Sequence
  Synthetic oligonucleotide
ccgttgtgttcaagtgctatgtcattcaac

SEQ ID NO: 249446 - DNA, 30 bp, Artificial Sequence
  Synthetic oligonucleotide
gaataatagccggacgatatgaagttcaac

SEQ ID NO: 249447 - DNA, 30 bp, Artificial Sequence
  Synthetic oligonucleotide
ccagcgtctggcctaagccgtctcaagaac

SEQ ID NO: 249448 - DNA, 30 bp, Artificial Sequence
  Synthetic oligonucleotide
tatatgcacgacaggcaaacgtataagaac

SEQ ID NO: 249449 - DNA, 30 bp, Artificial Sequence
  Synthetic oligonucleotide
tgtattatgacaagatgctcgggccagaac

SEQ ID NO: 249450 - DNA, 30 bp, Artificial Sequence
  Synthetic oligonucleotide
gatgaggaaaagacccttgctgggcagaac

SEQ ID NO: 249451 - DNA, 30 bp, Artificial Sequence
  Synthetic oligonucleotide
acaccagcagaaagtcaacgcctgcagaac

SEQ ID NO: 249452 - DNA, 30 bp, Artificial Sequence
  Synthetic oligonucleotide
tttgccgacaggaaatttacagtgcagaac

SEQ ID NO: 249453 - DNA, 30 bp, Artificial Sequence
  Synthetic oligonucleotide
gtataagccttcaatactgccgctcagaac

SEQ ID NO: 249454 - DNA, 30 bp, Artificial Sequence
  Synthetic oligonucleotide
atagggtcaagcaagcgtttgcgtcagaac

SEQ ID NO: 249455 - DNA, 30 bp, Artificial Sequence
  Synthetic oligonucleotide
aggtcctatcgttttgttttagcagagaac

SEQ ID NO: 249456 - DNA, 30 bp, Artificial Sequence
  Synthetic oligonucleotide
agtgcttgatttactattagtagcgagaac

SEQ ID NO: 249457 - DNA, 30 bp, Artificial Sequence
  Synthetic oligonucleotide
gtaattcgaagatttattataggggagaac

SEQ ID NO: 249458 - DNA, 30 bp, Artificial Sequence
  Synthetic oligonucleotide
cgcctgtgggtgcagaagctagtggagaac

SEQ ID NO: 249459 - DNA, 30 bp, Artificial Sequence
  Synthetic oligonucleotide
ttcccatagggcggcggcttcgtggagaac

SEQ ID NO: 249460 - DNA, 30 bp, Artificial Sequence
  Synthetic oligonucleotide
gccgtgaagtgctatacctttgtggagaac

SEQ ID NO: 249461 - DNA, 30 bp, Artificial Sequence
  Synthetic oligonucleotide
tcctgtgaaaaacgatcgttcgatgagaac

SEQ ID NO: 249462 - DNA, 30 bp, Artificial Sequence
  Synthetic oligonucleotide
gacctaggggatatacaagcctgtgagaac

SEQ ID NO: 249463 - DNA, 30 bp, Artificial Sequence
  Synthetic oligonucleotide
agcacacctccgagaagggtgtgatagaac

SEQ ID NO: 249464 - DNA, 30 bp, Artificial Sequence
  Synthetic oligonucleotide
cccatggatagtccctacggcaagtagaac

SEQ ID NO: 249465 - DNA, 30 bp, Artificial Sequence
  Synthetic oligonucleotide
caccgcgcacagaaacggatctcgtagaac

SEQ ID NO: 249466 - DNA, 30 bp, Artificial Sequence
  Synthetic oligonucleotide
agtgaacttctgactttcttactaacgaac

SEQ ID NO: 249467 - DNA, 30 bp, Artificial Sequence
  Synthetic oligonucleotide
aacaattactatccaaactacgtaacgaac

SEQ ID NO: 249468 - DNA, 30 bp, Artificial Sequence
  Synthetic oligonucleotide
ctggtcttgataccggtgcaagacacgaac

SEQ ID NO: 249469 - DNA, 30 bp, Artificial Sequence
  Synthetic oligonucleotide
tgtaaaccaccgaatatttcggctacgaac

SEQ ID NO: 249470 - DNA, 30 bp, Artificial Sequence
  Synthetic oligonucleotide
agtggtctttataatcccgacagtacgaac

SEQ ID NO: 249471 - DNA, 30 bp, Artificial Sequence
  Synthetic oligonucleotide
caataggtaacctgcgaccacataccgaac

SEQ ID NO: 249472 - DNA, 30 bp, Artificial Sequence
  Synthetic oligonucleotide
tgataggagcttaaaaatgtcctaccgaac

SEQ ID NO: 249473 - DNA, 30 bp, Artificial Sequence
  Synthetic oligonucleotide
ataccccgccgtggtttgtgagttgcgaac

SEQ ID NO: 249474 - DNA, 30 bp, Artificial Sequence
  Synthetic oligonucleotide
cctccgacgagtcagtgtcaatttgcgaac

SEQ ID NO: 249475 - DNA, 30 bp, Artificial Sequence
  Synthetic oligonucleotide
gaaaagcataactggtgtcattgatcgaac

SEQ ID NO: 249476 - DNA, 30 bp, Artificial Sequence
  Synthetic oligonucleotide
ggcacagatgcgaggcgttgcgtatcgaac

SEQ ID NO: 249477 - DNA, 30 bp, Artificial Sequence
  Synthetic oligonucleotide
tttcacagctgggctgttacattatcgaac

SEQ ID NO: 249478 - DNA, 30 bp, Artificial Sequence
  Synthetic oligonucleotide
gtcgatgcataaactgtctgtgtgtcgaac

SEQ ID NO: 249479 - DNA, 30 bp, Artificial Sequence
  Synthetic oligonucleotide
gcctgaattaacaggccttacgtttcgaac

SEQ ID NO: 249480 - DNA, 30 bp, Artificial Sequence
  Synthetic oligonucleotide
actgatctgtcgtgttctcccgtttcgaac

SEQ ID NO: 249481 - DNA, 30 bp, Artificial Sequence
  Synthetic oligonucleotide
tcatgtaggtgttcgttgtaatcaaggaac

SEQ ID NO: 249482 - DNA, 30 bp, Artificial Sequence
  Synthetic oligonucleotide
ttgtcgtgccagtgtttaccttccaggaac

SEQ ID NO: 249483 - DNA, 30 bp, Artificial Sequence
  Synthetic oligonucleotide
atcccgcttgcacgtgtaatagggaggaac

SEQ ID NO: 249484 - DNA, 30 bp, Artificial Sequence
  Synthetic oligonucleotide
actcttagtacgctttaaggttagcggaac

SEQ ID NO: 249485 - DNA, 30 bp, Artificial Sequence
  Synthetic oligonucleotide
gaggctctggcctccccagtgcggcggaac

SEQ ID NO: 249486 - DNA, 30 bp, Artificial Sequence
  Synthetic oligonucleotide
ataaagtttatgccgtgtgggaatcggaac

SEQ ID NO: 249487 - DNA, 30 bp, Artificial Sequence
  Synthetic oligonucleotide
agtatcggagtggccacggaggatcggaac

SEQ ID NO: 249488 - DNA, 30 bp, Artificial Sequence
  Synthetic oligonucleotide
gcaacgacatacattaatcgtagtcggaac

SEQ ID NO: 249489 - DNA, 30 bp, Artificial Sequence
  Synthetic oligonucleotide
cgaagcataccattaaaatacgaagggaac

SEQ ID NO: 249490 - DNA, 30 bp, Artificial Sequence
  Synthetic oligonucleotide
ccattaggacacagtgtacagtaagggaac

SEQ ID NO: 249491 - DNA, 30 bp, Artificial Sequence
  Synthetic oligonucleotide
gcttgagtaccttcttgtaaatcagggaac

SEQ ID NO: 249492 - DNA, 30 bp, Artificial Sequence
  Synthetic oligonucleotide
aaaccgcagagtgggttatgcatcgggaac

SEQ ID NO: 249493 - DNA, 30 bp, Artificial Sequence
  Synthetic oligonucleotide
gaggtctgagtgtaccaggcaaaggggaac

SEQ ID NO: 249494 - DNA, 30 bp, Artificial Sequence
  Synthetic oligonucleotide
tgcctgacgtgtgtggtgatccaggggaac

SEQ ID NO: 249495 - DNA, 30 bp, Artificial Sequence
  Synthetic oligonucleotide
ggtgggtggaacatagcacatgcggggaac

SEQ ID NO: 249496 - DNA, 30 bp, Artificial Sequence
  Synthetic oligonucleotide
tgatttcgtagactttgccggggggggaac

SEQ ID NO: 249497 - DNA, 30 bp, Artificial Sequence
  Synthetic oligonucleotide
tctctgccatacaaaatctttcttgggaac

SEQ ID NO: 249498 - DNA, 30 bp, Artificial Sequence
  Synthetic oligonucleotide
gtcatagggtccacatgcgatgttgggaac

SEQ ID NO: 249499 - DNA, 30 bp, Artificial Sequence
  Synthetic oligonucleotide
tatgtacgtataggcttggtttcatggaac

SEQ ID NO: 249500 - DNA, 30 bp, Artificial Sequence
  Synthetic oligonucleotide
tcgtgacaatattgactgcgggtatggaac

SEQ ID NO: 249501 - DNA, 30 bp, Artificial Sequence
  Synthetic oligonucleotide
ctgcacaagatcccaggtaggtggtggaac

SEQ ID NO: 249502 - DNA, 30 bp, Artificial Sequence
  Synthetic oligonucleotide
cgtgtaccgtaaaaagcacggacttggaac

SEQ ID NO: 249503 - DNA, 30 bp, Artificial Sequence
  Synthetic oligonucleotide
atatgtcattgtgctagcgaaagttggaac

SEQ ID NO: 249504 - DNA, 30 bp, Artificial Sequence
  Synthetic oligonucleotide
agttggtgaaagataagggatggttggaac

SEQ ID NO: 249505 - DNA, 30 bp, Artificial Sequence
  Synthetic oligonucleotide
ctataagatattgcaatatgggaaatgaac

SEQ ID NO: 249506 - DNA, 30 bp, Artificial Sequence
  Synthetic oligonucleotide
acgatacgccctggcaactaatcaatgaac

SEQ ID NO: 249507 - DNA, 30 bp, Artificial Sequence
  Synthetic oligonucleotide
agaacactcgactggcgtaaattaatgaac

SEQ ID NO: 249508 - DNA, 30 bp, Artificial Sequence
  Synthetic oligonucleotide
tgaataaatgagttgatctgcaagatgaac

SEQ ID NO: 249509 - DNA, 30 bp, Artificial Sequence
  Synthetic oligonucleotide
cggaagtcatcgtcagggacatttatgaac

SEQ ID NO: 249510 - DNA, 30 bp, Artificial Sequence
  Synthetic oligonucleotide
ggcgagattcatggaagtacaaaactgaac

SEQ ID NO: 249511 - DNA, 30 bp, Artificial Sequence
  Synthetic oligonucleotide
ccctcccactctagatcaaatccactgaac

SEQ ID NO: 249512 - DNA, 30 bp, Artificial Sequence
  Synthetic oligonucleotide
gaatagactcggacgggtgtcagcctgaac

SEQ ID NO: 249513 - DNA, 30 bp, Artificial Sequence
  Synthetic oligonucleotide
tgctaggccggtgaactagcatgcctgaac

SEQ ID NO: 249514 - DNA, 30 bp, Artificial Sequence
  Synthetic oligonucleotide
atttgggcgaataacgacgcacaagtgaac

SEQ ID NO: 249515 - DNA, 29 bp, Artificial Sequence
  Synthetic oligonucleotide
atgcacgtgcgagtttgagcccagtgaac

SEQ ID NO: 249516 - DNA, 30 bp, Artificial Sequence
  Synthetic oligonucleotide
tcagaccctgtgggatgacgcgtagtgaac

SEQ ID NO: 249517 - DNA, 30 bp, Artificial Sequence
  Synthetic oligonucleotide
gctgcgtaaagtcaatcgcctcgggtgaac

SEQ ID NO: 249518 - DNA, 30 bp, Artificial Sequence
  Synthetic oligonucleotide
aatgcacagcaaaacacaggatctgtgaac

SEQ ID NO: 249519 - DNA, 30 bp, Artificial Sequence
  Synthetic oligonucleotide
aaatgccagaaatgtcggcccgcattgaac

SEQ ID NO: 249520 - DNA, 30 bp, Artificial Sequence
  Synthetic oligonucleotide
ctcccgaggaaagtaatgtgccatttgaac

SEQ ID NO: 249521 - DNA, 30 bp, Artificial Sequence
  Synthetic oligonucleotide
cagacaagttgtagagtcatcggtttgaac

SEQ ID NO: 249522 - DNA, 30 bp, Artificial Sequence
  Synthetic oligonucleotide
aggaaacgtcacaagcccatacttttgaac

SEQ ID NO: 249523 - DNA, 30 bp, Artificial Sequence
  Synthetic oligonucleotide
cggtatgaggggttacacaccgcaaataac

SEQ ID NO: 249524 - DNA, 30 bp, Artificial Sequence
  Synthetic oligonucleotide
gacggaatgtcaatgttcagcgacaataac

SEQ ID NO: 249525 - DNA, 30 bp, Artificial Sequence
  Synthetic oligonucleotide
aacaagcgattaccgcggccttataataac

SEQ ID NO: 249526 - DNA, 30 bp, Artificial Sequence
  Synthetic oligonucleotide
ataaccggcaagggactgaaataacataac

SEQ ID NO: 249527 - DNA, 30 bp, Artificial Sequence
  Synthetic oligonucleotide
gtccctattcaaataatgcaaccacataac

SEQ ID NO: 249528 - DNA, 30 bp, Artificial Sequence
  Synthetic oligonucleotide
tggtaagtgagcattcaacgccaccataac

SEQ ID NO: 249529 - DNA, 30 bp, Artificial Sequence
  Synthetic oligonucleotide
gagccgccaattaaagcagatcttcataac

SEQ ID NO: 249530 - DNA, 30 bp, Artificial Sequence
  Synthetic oligonucleotide
ttgtaacatattcccagagttacagataac

SEQ ID NO: 249531 - DNA, 30 bp, Artificial Sequence
  Synthetic oligonucleotide
gcttgataaagcagcgtgaaaagggataac

SEQ ID NO: 249532 - DNA, 30 bp, Artificial Sequence
  Synthetic oligonucleotide
cccattgaatataccagggctatggataac

SEQ ID NO: 249533 - DNA, 30 bp, Artificial Sequence
  Synthetic oligonucleotide
gaccgaaatggtgtgattatctatgataac

SEQ ID NO: 249534 - DNA, 30 bp, Artificial Sequence
  Synthetic oligonucleotide
agaactaaattggaggagaggggtgataac

SEQ ID NO: 249535 - DNA, 30 bp, Artificial Sequence
  Synthetic oligonucleotide
cgcctaaaagtgacgccgtaaaaatataac

SEQ ID NO: 249536 - DNA, 30 bp, Artificial Sequence
  Synthetic oligonucleotide
agaggatcctcgtggaagcttacatataac

SEQ ID NO: 249537 - DNA, 30 bp, Artificial Sequence
  Synthetic oligonucleotide
ccagaagcaaggtcttgccgaatatataac

SEQ ID NO: 249538 - DNA, 30 bp, Artificial Sequence
  Synthetic oligonucleotide
aacgcatggctagccgcctcattctataac

SEQ ID NO: 249539 - DNA, 30 bp, Artificial Sequence
  Synthetic oligonucleotide
cacctggaaggcgtactgaatgcgtataac

SEQ ID NO: 249540 - DNA, 30 bp, Artificial Sequence
  Synthetic oligonucleotide
cggagacctggcatataattggtgtataac

SEQ ID NO: 249541 - DNA, 30 bp, Artificial Sequence
  Synthetic oligonucleotide
caaacaattgatcataatgcggcttataac

SEQ ID NO: 249542 - DNA, 30 bp, Artificial Sequence
  Synthetic oligonucleotide
agcctcatgacattggcgctttcttataac

SEQ ID NO: 249543 - DNA, 30 bp, Artificial Sequence
  Synthetic oligonucleotide
cagaatcaagcaggctgttactgttataac

SEQ ID NO: 249544 - DNA, 30 bp, Artificial Sequence
  Synthetic oligonucleotide
ggtaatggtcgactatttgaatgcactaac

SEQ ID NO: 249545 - DNA, 30 bp, Artificial Sequence
  Synthetic oligonucleotide
gacgtttggtacacacagtaaccgactaac

SEQ ID NO: 249546 - DNA, 30 bp, Artificial Sequence
  Synthetic oligonucleotide
gaaatccaccggccttggatgattactaac

SEQ ID NO: 249547 - DNA, 30 bp, Artificial Sequence
  Synthetic oligonucleotide
gacgagaacagagtataggatgcacctaac

SEQ ID NO: 249548 - DNA, 30 bp, Artificial Sequence
  Synthetic oligonucleotide
tggaaagtgggctagaaggggggccctaac

SEQ ID NO: 249549 - DNA, 30 bp, Artificial Sequence
  Synthetic oligonucleotide
aacagcctcagagtggccactagagctaac

SEQ ID NO: 249550 - DNA, 30 bp, Artificial Sequence
  Synthetic oligonucleotide
tagggattttttaatagaagggaggctaac

SEQ ID NO: 249551 - DNA, 30 bp, Artificial Sequence
  Synthetic oligonucleotide
atgaatgactaaagaagcatcacggctaac

SEQ ID NO: 249552 - DNA, 30 bp, Artificial Sequence
  Synthetic oligonucleotide
atgaggtcctggggattttgctctgctaac

SEQ ID NO: 249553 - DNA, 30 bp, Artificial Sequence
  Synthetic oligonucleotide
ggcaggaagcacctttggtggagtgctaac

SEQ ID NO: 249554 - DNA, 30 bp, Artificial Sequence
  Synthetic oligonucleotide
taacatgccagatctgtccgactatctaac

SEQ ID NO: 249555 - DNA, 30 bp, Artificial Sequence
  Synthetic oligonucleotide
gagtatatgaagagcacgccgacgtctaac

SEQ ID NO: 249556 - DNA, 30 bp, Artificial Sequence
  Synthetic oligonucleotide
gaccacacatccacctatcccatttctaac

SEQ ID NO: 249557 - DNA, 30 bp, Artificial Sequence
  Synthetic oligonucleotide
agaacgcatgcttcggacgcgttcagtaac

SEQ ID NO: 249558 - DNA, 30 bp, Artificial Sequence
  Synthetic oligonucleotide
aacaatgatgaccggattgtatgtagtaac

SEQ ID NO: 249559 - DNA, 30 bp, Artificial Sequence
  Synthetic oligonucleotide
tgtgataggcatagaaatgtctttagtaac

SEQ ID NO: 249560 - DNA, 30 bp, Artificial Sequence
  Synthetic oligonucleotide
tgggtttcagaagacggcgttcagcgtaac

SEQ ID NO: 249561 - DNA, 30 bp, Artificial Sequence
  Synthetic oligonucleotide
gaaataaactcaatatcatccatgcgtaac

SEQ ID NO: 249562 - DNA, 30 bp, Artificial Sequence
  Synthetic oligonucleotide
aggtgttggtggcttaacgctctgcgtaac

SEQ ID NO: 249563 - DNA, 30 bp, Artificial Sequence
  Synthetic oligonucleotide
gtgctccatacaagcacccatctcggtaac

SEQ ID NO: 249564 - DNA, 30 bp, Artificial Sequence
  Synthetic oligonucleotide
cctaattcggaggattgcaggttcggtaac

SEQ ID NO: 249565 - DNA, 30 bp, Artificial Sequence
  Synthetic oligonucleotide
gtggacagttcaaggcaaggtacgggtaac

SEQ ID NO: 249566 - DNA, 30 bp, Artificial Sequence
  Synthetic oligonucleotide
ctgatccaaggggacttctcccggggtaac

SEQ ID NO: 249567 - DNA, 30 bp, Artificial Sequence
  Synthetic oligonucleotide
ttgcgtcctcgcggcgcgcattatggtaac

SEQ ID NO: 249568 - DNA, 31 bp, Artificial Sequence
  Synthetic oligonucleotide
ctttcccgagagtacgtaaacccctggtaac

SEQ ID NO: 249569 - DNA, 30 bp, Artificial Sequence
  Synthetic oligonucleotide
gcgtgtgcttgggatcaatagaaatgtaac

SEQ ID NO: 249570 - DNA, 30 bp, Artificial Sequence
  Synthetic oligonucleotide
gatcagacagtggtgatgatagcatgtaac

SEQ ID NO: 249571 - DNA, 30 bp, Artificial Sequence
  Synthetic oligonucleotide
taagtgaccatcctttcttaccgatgtaac

SEQ ID NO: 249572 - DNA, 30 bp, Artificial Sequence
  Synthetic oligonucleotide
taacgttcagttgctctcagtggatgtaac

SEQ ID NO: 249573 - DNA, 30 bp, Artificial Sequence
  Synthetic oligonucleotide
gtacataggctgcttagcacgtactgtaac

SEQ ID NO: 249574 - DNA, 30 bp, Artificial Sequence
  Synthetic oligonucleotide
gtgatatctcagggaacgcgcctctgtaac

SEQ ID NO: 249575 - DNA, 30 bp, Artificial Sequence
  Synthetic oligonucleotide
tatgaactgtaggtggttttcaggtgtaac

SEQ ID NO: 249576 - DNA, 30 bp, Artificial Sequence
  Synthetic oligonucleotide
ccaaagtagagtggccagatttggtgtaac

SEQ ID NO: 249577 - DNA, 30 bp, Artificial Sequence
  Synthetic oligonucleotide
ttgaatcccgtaattggggaagtttgtaac

SEQ ID NO: 249578 - DNA, 30 bp, Artificial Sequence
  Synthetic oligonucleotide
tcaagaaggcttcatttactatacattaac

SEQ ID NO: 249579 - DNA, 30 bp, Artificial Sequence
  Synthetic oligonucleotide
atgtaaaaacagtgcgatccgggcattaac

SEQ ID NO: 249580 - DNA, 30 bp, Artificial Sequence
  Synthetic oligonucleotide
tcccgcatctacgacaatgggtagattaac

SEQ ID NO: 249581 - DNA, 30 bp, Artificial Sequence
  Synthetic oligonucleotide
ggtggttttaaactggtaagaggtattaac

SEQ ID NO: 249582 - DNA, 30 bp, Artificial Sequence
  Synthetic oligonucleotide
gatggttagccactaaaaacctttattaac

SEQ ID NO: 249583 - DNA, 30 bp, Artificial Sequence
  Synthetic oligonucleotide
agccagagtctcccgaagggtaaacttaac

SEQ ID NO: 249584 - DNA, 30 bp, Artificial Sequence
  Synthetic oligonucleotide
ctgccaacgtttcggccacacaagcttaac

SEQ ID NO: 249585 - DNA, 30 bp, Artificial Sequence
  Synthetic oligonucleotide
attggataagtgccgatccagaatcttaac

SEQ ID NO: 249586 - DNA, 30 bp, Artificial Sequence
  Synthetic oligonucleotide
actattgggaactcaaacatacaagttaac

SEQ ID NO: 249587 - DNA, 30 bp, Artificial Sequence
  Synthetic oligonucleotide
aattgagtgcatcagagcttagaagttaac

SEQ ID NO: 249588 - DNA, 30 bp, Artificial Sequence
  Synthetic oligonucleotide
ggcgtcatgtttttcttgtatctagttaac

SEQ ID NO: 249589 - DNA, 29 bp, Artificial Sequence
  Synthetic oligonucleotide
gcgtcagaataacgaaatatggggttaac

SEQ ID NO: 249590 - DNA, 30 bp, Artificial Sequence
  Synthetic oligonucleotide
tataatgttcaagtgtcacctcgtgttaac

SEQ ID NO: 249591 - DNA, 30 bp, Artificial Sequence
  Synthetic oligonucleotide
atactgtcctgccaagtggtctgtgttaac

SEQ ID NO: 249592 - DNA, 30 bp, Artificial Sequence
  Synthetic oligonucleotide
accactcacaaacaattagagtgctttaac

SEQ ID NO: 249593 - DNA, 30 bp, Artificial Sequence
  Synthetic oligonucleotide
atcggatccaatagaccttgggattttaac

SEQ ID NO: 249594 - DNA, 30 bp, Artificial Sequence
  Synthetic oligonucleotide
cgcgtcgagcggaagagacatttttttaac

SEQ ID NO: 249595 - DNA, 30 bp, Artificial Sequence
  Synthetic oligonucleotide
tgcgatagcaccaccaattccggaaaacac

SEQ ID NO: 249596 - DNA, 30 bp, Artificial Sequence
  Synthetic oligonucleotide
ttgatgtgcaatcagataggagcgaaacac

SEQ ID NO: 249597 - DNA, 30 bp, Artificial Sequence
  Synthetic oligonucleotide
gtctgggctaaaccagggccctcgaaacac

SEQ ID NO: 249598 - DNA, 30 bp, Artificial Sequence
  Synthetic oligonucleotide
tttgtcagatctccaattccaatgaaacac

SEQ ID NO: 249599 - DNA, 30 bp, Artificial Sequence
  Synthetic oligonucleotide
aggtcactgacctagtaagtaatgaaacac

SEQ ID NO: 249600 - DNA, 30 bp, Artificial Sequence
  Synthetic oligonucleotide
caaaataccgccagttatagcgcacaacac

SEQ ID NO: 249601 - DNA, 30 bp, Artificial Sequence
  Synthetic oligonucleotide
aactcagaggaggaggaaaactcacaacac

SEQ ID NO: 249602 - DNA, 30 bp, Artificial Sequence
  Synthetic oligonucleotide
gcacagtcctcgccttcggttggacaacac

SEQ ID NO: 249603 - DNA, 30 bp, Artificial Sequence
  Synthetic oligonucleotide
tacatgttaggcttaaaccatgtacaacac

SEQ ID NO: 249604 - DNA, 30 bp, Artificial Sequence
  Synthetic oligonucleotide
gcctcctcacttgtactcgtcttccaacac

SEQ ID NO: 249605 - DNA, 30 bp, Artificial Sequence
  Synthetic oligonucleotide
cgtttccaaccgacgaggccttggcaacac

SEQ ID NO: 249606 - DNA, 30 bp, Artificial Sequence
  Synthetic oligonucleotide
gaacttgggggagctctatgacatcaacac

SEQ ID NO: 249607 - DNA, 30 bp, Artificial Sequence
  Synthetic oligonucleotide
aaccaaatagtttaaagattacgagaacac

SEQ ID NO: 249608 - DNA, 30 bp, Artificial Sequence
  Synthetic oligonucleotide
agtgctattgtgcttacggtcaacgaacac

SEQ ID NO: 249609 - DNA, 30 bp, Artificial Sequence
  Synthetic oligonucleotide
gactagagtctgttgtatgaagaggaacac

SEQ ID NO: 249610 - DNA, 35 bp, Artificial Sequence
  Synthetic oligonucleotide
taacggaaggcattgttaatatctgcgatgaacac

SEQ ID NO: 249611 - DNA, 30 bp, Artificial Sequence
  Synthetic oligonucleotide
tcggatgccctcgcggtaaacccctaacac

SEQ ID NO: 249612 - DNA, 30 bp, Artificial Sequence
  Synthetic oligonucleotide
tctggttatctgtacggtcgcgagtaacac

SEQ ID NO: 249613 - DNA, 30 bp, Artificial Sequence
  Synthetic oligonucleotide
gtattgaagttagggttgcgcatgtaacac

SEQ ID NO: 249614 - DNA, 30 bp, Artificial Sequence
  Synthetic oligonucleotide
cgacccgctgaatcaggcgtacattaacac

SEQ ID NO: 249615 - DNA, 30 bp, Artificial Sequence
  Synthetic oligonucleotide
gagcaaggcaacccggcttaagattaacac

SEQ ID NO: 249616 - DNA, 30 bp, Artificial Sequence
  Synthetic oligonucleotide
gatcgtaatactgaagtggtctaaacacac

SEQ ID NO: 249617 - DNA, 30 bp, Artificial Sequence
  Synthetic oligonucleotide
gaggagaaagtccgggattaagacacacac

SEQ ID NO: 249618 - DNA, 30 bp, Artificial Sequence
  Synthetic oligonucleotide
tgtatcgttaacatgtctgcacccacacac

SEQ ID NO: 249619 - DNA, 30 bp, Artificial Sequence
  Synthetic oligonucleotide
tgcaacgcaacctgatcaagattgacacac

SEQ ID NO: 249620 - DNA, 30 bp, Artificial Sequence
  Synthetic oligonucleotide
agtaagggcttccaatcctgccgaccacac

SEQ ID NO: 249621 - DNA, 30 bp, Artificial Sequence
  Synthetic oligonucleotide
gctggcaaactgaccaactttataccacac

SEQ ID NO: 249622 - DNA, 30 bp, Artificial Sequence
  Synthetic oligonucleotide
tccggcgcgcttgattcttcggagccacac

SEQ ID NO: 249623 - DNA, 30 bp, Artificial Sequence
  Synthetic oligonucleotide
ccagggactctgtaacgttttaaagcacac

SEQ ID NO: 249624 - DNA, 30 bp, Artificial Sequence
  Synthetic oligonucleotide
aggccagggtaaggttagcggcgatcacac

SEQ ID NO: 249625 - DNA, 30 bp, Artificial Sequence
  Synthetic oligonucleotide
ttcgtcctagtggtttgacatggctcacac

SEQ ID NO: 249626 - DNA, 30 bp, Artificial Sequence
  Synthetic oligonucleotide
aaggtgtataccgaatgacctttctcacac

SEQ ID NO: 249627 - DNA, 30 bp, Artificial Sequence
  Synthetic oligonucleotide
gagccgcgaaacagccgtactccgtcacac

SEQ ID NO: 249628 - DNA, 30 bp, Artificial Sequence
  Synthetic oligonucleotide
attccaggcatcaaggggtcgcggtcacac

SEQ ID NO: 249629 - DNA, 30 bp, Artificial Sequence
  Synthetic oligonucleotide
tttaccagagtcatgctcttagtgtcacac

SEQ ID NO: 249630 - DNA, 30 bp, Artificial Sequence
  Synthetic oligonucleotide
atctcggaattattagtttggtgttcacac

SEQ ID NO: 249631 - DNA, 30 bp, Artificial Sequence
  Synthetic oligonucleotide
aagctcgcgatgtcgtcattatgaagacac

SEQ ID NO: 249632 - DNA, 30 bp, Artificial Sequence
  Synthetic oligonucleotide
ctaataacatgaaatgtactcaccagacac

SEQ ID NO: 249633 - DNA, 30 bp, Artificial Sequence
  Synthetic oligonucleotide
accgagcgttctaaagcgcgaatcagacac

SEQ ID NO: 249634 - DNA, 30 bp, Artificial Sequence
  Synthetic oligonucleotide
gaggtagtgtacgatttatcgatcagacac

SEQ ID NO: 249635 - DNA, 30 bp, Artificial Sequence
  Synthetic oligonucleotide
tcgcgaactgtgctatgattggcgagacac

SEQ ID NO: 249636 - DNA, 30 bp, Artificial Sequence
  Synthetic oligonucleotide
gctagtgtaacgacgacggaactgagacac

SEQ ID NO: 249637 - DNA, 30 bp, Artificial Sequence
  Synthetic oligonucleotide
atcttgattatgcccccaagtgatagacac

SEQ ID NO: 249638 - DNA, 30 bp, Artificial Sequence
  Synthetic oligonucleotide
actactaatagtttagacggttcacgacac

SEQ ID NO: 249639 - DNA, 30 bp, Artificial Sequence
  Synthetic oligonucleotide
agaaccgaacgaccccgcttcagacgacac

SEQ ID NO: 249640 - DNA, 30 bp, Artificial Sequence
  Synthetic oligonucleotide
agctttaaatactaacaggaacggcgacac

SEQ ID NO: 249641 - DNA, 30 bp, Artificial Sequence
  Synthetic oligonucleotide
gggttacatcgccaagtccagcaaggacac

SEQ ID NO: 249642 - DNA, 30 bp, Artificial Sequence
  Synthetic oligonucleotide
ccagggtcaatgacgagcttgctcggacac

SEQ ID NO: 249643 - DNA, 30 bp, Artificial Sequence
  Synthetic oligonucleotide
aaaaactacgagccgtcaaggccgggacac

SEQ ID NO: 249644 - DNA, 30 bp, Artificial Sequence
  Synthetic oligonucleotide
cggagtcattatgagccgagagcgggacac

SEQ ID NO: 249645 - DNA, 30 bp, Artificial Sequence
  Synthetic oligonucleotide
actgaattgtgctacggggaaactggacac

SEQ ID NO: 249646 - DNA, 30 bp, Artificial Sequence
  Synthetic oligonucleotide
ggagctacgatgtcggctagtgctggacac

SEQ ID NO: 249647 - DNA, 30 bp, Artificial Sequence
  Synthetic oligonucleotide
gttattgatggccaaatgtctcgtggacac

SEQ ID NO: 249648 - DNA, 30 bp, Artificial Sequence
  Synthetic oligonucleotide
ctcccggagagctcgaatataagctgacac

SEQ ID NO: 249649 - DNA, 30 bp, Artificial Sequence
  Synthetic oligonucleotide
aattgtggctccacagaaatgtgctgacac

SEQ ID NO: 249650 - DNA, 30 bp, Artificial Sequence
  Synthetic oligonucleotide
acttgcagactcgatagaaaattctgacac

SEQ ID NO: 249651 - DNA, 30 bp, Artificial Sequence
  Synthetic oligonucleotide
aagcaccagtgtgaccaagagttgtgacac

SEQ ID NO: 249652 - DNA, 30 bp, Artificial Sequence
  Synthetic oligonucleotide
gcagggtttacttcattaagtggttgacac

SEQ ID NO: 249653 - DNA, 30 bp, Artificial Sequence
  Synthetic oligonucleotide
accacacgaaccttgtgggcacagatacac

SEQ ID NO: 249654 - DNA, 30 bp, Artificial Sequence
  Synthetic oligonucleotide
tcgcttgttcactgcgataaaatgatacac

SEQ ID NO: 249655 - DNA, 30 bp, Artificial Sequence
  Synthetic oligonucleotide
ttagcgtattgaatctctcctcctatacac

SEQ ID NO: 249656 - DNA, 30 bp, Artificial Sequence
  Synthetic oligonucleotide
gaggagtctcaaagagtacgttatctacac

SEQ ID NO: 249657 - DNA, 30 bp, Artificial Sequence
  Synthetic oligonucleotide
agggcaaatacgtacgtgcctacagtacac

SEQ ID NO: 249658 - DNA, 30 bp, Artificial Sequence
  Synthetic oligonucleotide
cactcgcggacgattttccactccgtacac

SEQ ID NO: 249659 - DNA, 30 bp, Artificial Sequence
  Synthetic oligonucleotide
acaggtgtaagactcaccaaggatgtacac

SEQ ID NO: 249660 - DNA, 30 bp, Artificial Sequence
  Synthetic oligonucleotide
agtgtaagtcagcagttctgctcattacac

SEQ ID NO: 249661 - DNA, 30 bp, Artificial Sequence
  Synthetic oligonucleotide
gtaacaagacggaaaggccgagccttacac

SEQ ID NO: 249662 - DNA, 30 bp, Artificial Sequence
  Synthetic oligonucleotide
gtccaaccggccgccatccgggtgttacac

SEQ ID NO: 249663 - DNA, 30 bp, Artificial Sequence
  Synthetic oligonucleotide
actacatttgggttaggacggtatttacac

SEQ ID NO: 249664 - DNA, 30 bp, Artificial Sequence
  Synthetic oligonucleotide
tctaggtacactagttacactgttttacac

SEQ ID NO: 249665 - DNA, 30 bp, Artificial Sequence
  Synthetic oligonucleotide
tacggcacggttcagagctatgcaaaccac

SEQ ID NO: 249666 - DNA, 30 bp, Artificial Sequence
  Synthetic oligonucleotide
cgctgaaactccccgcccctgagaaaccac

SEQ ID NO: 249667 - DNA, 30 bp, Artificial Sequence
  Synthetic oligonucleotide
taaacgcaatacatccatcacataaaccac

SEQ ID NO: 249668 - DNA, 30 bp, Artificial Sequence
  Synthetic oligonucleotide
agaagggttccgcgtattattataaaccac

SEQ ID NO: 249669 - DNA, 30 bp, Artificial Sequence
  Synthetic oligonucleotide
ggatggtgccgttgaagtcgttccaaccac

SEQ ID NO: 249670 - DNA, 30 bp, Artificial Sequence
  Synthetic oligonucleotide
gtaaatgtctaaggaaaagtagagaaccac

SEQ ID NO: 249671 - DNA, 30 bp, Artificial Sequence
  Synthetic oligonucleotide
accttggggttcgcgacctccgggaaccac

SEQ ID NO: 249672 - DNA, 30 bp, Artificial Sequence
  Synthetic oligonucleotide
cctcagaagatttaacaaacggataaccac

SEQ ID NO: 249673 - DNA, 30 bp, Artificial Sequence
  Synthetic oligonucleotide
tattagtcgaagggtccacttagtaaccac

SEQ ID NO: 249674 - DNA, 30 bp, Artificial Sequence
  Synthetic oligonucleotide
ctactacctagttcgcgtaagtttaaccac

SEQ ID NO: 249675 - DNA, 30 bp, Artificial Sequence
  Synthetic oligonucleotide
aggccttagccgaattacttcttacaccac

SEQ ID NO: 249676 - DNA, 30 bp, Artificial Sequence
  Synthetic oligonucleotide
gcgctacttaggcgaggcatagaccaccac

SEQ ID NO: 249677 - DNA, 30 bp, Artificial Sequence
  Synthetic oligonucleotide
aaggggccaggattctacccagcccaccac

SEQ ID NO: 249678 - DNA, 30 bp, Artificial Sequence
  Synthetic oligonucleotide
tctttaaggcgcgatttagcttcccaccac

SEQ ID NO: 249679 - DNA, 30 bp, Artificial Sequence
  Synthetic oligonucleotide
ggggggggcaaacctcacgagcggcaccac

SEQ ID NO: 249680 - DNA, 30 bp, Artificial Sequence
  Synthetic oligonucleotide
tttatcaacacgattatgtggattcaccac

SEQ ID NO: 249681 - DNA, 30 bp, Artificial Sequence
  Synthetic oligonucleotide
tccagtcacttctcgtgttcgcacgaccac

SEQ ID NO: 249682 - DNA, 30 bp, Artificial Sequence
  Synthetic oligonucleotide
ggtgggagcttctttggatagttcgaccac

SEQ ID NO: 249683 - DNA, 30 bp, Artificial Sequence
  Synthetic oligonucleotide
gaacattctcgggttggaggctaggaccac

SEQ ID NO: 249684 - DNA, 30 bp, Artificial Sequence
  Synthetic oligonucleotide
tctgcatctagggtgtataggggctaccac

SEQ ID NO: 249685 - DNA, 30 bp, Artificial Sequence
  Synthetic oligonucleotide
gtcggatacccttggatggattgctaccac

SEQ ID NO: 249686 - DNA, 30 bp, Artificial Sequence
  Synthetic oligonucleotide
gttaacgtaatgtgaaacactataacccac

SEQ ID NO: 249687 - DNA, 30 bp, Artificial Sequence
  Synthetic oligonucleotide
tcgcctctgattgcaacacctggcacccac

SEQ ID NO: 249688 - DNA, 30 bp, Artificial Sequence
  Synthetic oligonucleotide
gtacacgtttgtctcgactgggtgacccac

SEQ ID NO: 249689 - DNA, 30 bp, Artificial Sequence
  Synthetic oligonucleotide
acgattgggacgtatgttccagttacccac

SEQ ID NO: 249690 - DNA, 30 bp, Artificial Sequence
  Synthetic oligonucleotide
ggaacttatgccacagttggcgacccccac

SEQ ID NO: 249691 - DNA, 30 bp, Artificial Sequence
  Synthetic oligonucleotide
gctggcctcgattgtccctagagcccccac

SEQ ID NO: 249692 - DNA, 30 bp, Artificial Sequence
  Synthetic oligonucleotide
ggctaacctcgtgttaagggaacgccccac

SEQ ID NO: 249693 - DNA, 30 bp, Artificial Sequence
  Synthetic oligonucleotide
cgtcgtcgttaagatgtataggggccccac

SEQ ID NO: 249694 - DNA, 30 bp, Artificial Sequence
  Synthetic oligonucleotide
gtagacgataggcgggtgatatggccccac

SEQ ID NO: 249695 - DNA, 30 bp, Artificial Sequence
  Synthetic oligonucleotide
ttgttaactggctgttgagtcgtgccccac

SEQ ID NO: 249696 - DNA, 30 bp, Artificial Sequence
  Synthetic oligonucleotide
agactgctgtctggaagcagacaggcccac

SEQ ID NO: 249697 - DNA, 30 bp, Artificial Sequence
  Synthetic oligonucleotide
taatgttaacaattagcaacgccggcccac

SEQ ID NO: 249698 - DNA, 30 bp, Artificial Sequence
  Synthetic oligonucleotide
taacatatggtaacatcatcactctcccac

SEQ ID NO: 249699 - DNA, 30 bp, Artificial Sequence
  Synthetic oligonucleotide
aagtatcttctccgggaacccaacagccac

SEQ ID NO: 249700 - DNA, 30 bp, Artificial Sequence
  Synthetic oligonucleotide
gtaggacgatcttaactgtactccagccac

SEQ ID NO: 249701 - DNA, 30 bp, Artificial Sequence
  Synthetic oligonucleotide
gtgacgaagataagtcgcagcggcagccac

SEQ ID NO: 249702 - DNA, 30 bp, Artificial Sequence
  Synthetic oligonucleotide
acttcatacgaggggtcgcattagagccac

SEQ ID NO: 249703 - DNA, 30 bp, Artificial Sequence
  Synthetic oligonucleotide
ctcacctagcagcatcttgccatgagccac

SEQ ID NO: 249704 - DNA, 30 bp, Artificial Sequence
  Synthetic oligonucleotide
acagctcctaggtgaaccacggaaggccac

SEQ ID NO: 249705 - DNA, 30 bp, Artificial Sequence
  Synthetic oligonucleotide
aaatcagtggaaaagcgtcaatcaggccac

SEQ ID NO: 249706 - DNA, 30 bp, Artificial Sequence
  Synthetic oligonucleotide
atatatatacaactccggaaaatgggccac

SEQ ID NO: 249707 - DNA, 30 bp, Artificial Sequence
  Synthetic oligonucleotide
ggagtgtacaccgggtacgacttgggccac

SEQ ID NO: 249708 - DNA, 30 bp, Artificial Sequence
  Synthetic oligonucleotide
cacatatcgaaccacgctacgttgggccac

SEQ ID NO: 249709 - DNA, 30 bp, Artificial Sequence
  Synthetic oligonucleotide
cttgtacgcttaaaagcgagaaatggccac

SEQ ID NO: 249710 - DNA, 30 bp, Artificial Sequence
  Synthetic oligonucleotide
ttcaaaagttcctaaatacatgcatgccac

SEQ ID NO: 249711 - DNA, 30 bp, Artificial Sequence
  Synthetic oligonucleotide
tgcacagagcggacctacacgtcgtgccac

SEQ ID NO: 249712 - DNA, 30 bp, Artificial Sequence
  Synthetic oligonucleotide
tcaaggcagacaattgaactatatatccac

SEQ ID NO: 249713 - DNA, 30 bp, Artificial Sequence
  Synthetic oligonucleotide
atatgccagcggggcacgatccttatccac

SEQ ID NO: 249714 - DNA, 30 bp, Artificial Sequence
  Synthetic oligonucleotide
tcctgtcctaagggaggtacaagactccac

SEQ ID NO: 249715 - DNA, 30 bp, Artificial Sequence
  Synthetic oligonucleotide
ttcatgggagctcgatcggaacccctccac

SEQ ID NO: 249716 - DNA, 30 bp, Artificial Sequence
  Synthetic oligonucleotide
gcatgcttagattctgtcaaacgtctccac

SEQ ID NO: 249717 - DNA, 30 bp, Artificial Sequence
  Synthetic oligonucleotide
acgcgtcttatgcttaacgaaatcgtccac

SEQ ID NO: 249718 - DNA, 30 bp, Artificial Sequence
  Synthetic oligonucleotide
tatgataggatggctgcgtctaaggtccac

SEQ ID NO: 249719 - DNA, 30 bp, Artificial Sequence
  Synthetic oligonucleotide
gcacatagatgcgtggatgcatgggtccac

SEQ ID NO: 249720 - DNA, 30 bp, Artificial Sequence
  Synthetic oligonucleotide
ttcatgaatgtctccagcaactgggtccac

SEQ ID NO: 249721 - DNA, 30 bp, Artificial Sequence
  Synthetic oligonucleotide
acatcactagatctcttaccgggattccac

SEQ ID NO: 249722 - DNA, 30 bp, Artificial Sequence
  Synthetic oligonucleotide
ctattaaacggggccagtcacctattccac

SEQ ID NO: 249723 - DNA, 30 bp, Artificial Sequence
  Synthetic oligonucleotide
cagcgatttataactaatatcaacttccac

SEQ ID NO: 249724 - DNA, 30 bp, Artificial Sequence
  Synthetic oligonucleotide
tagtatcctggactccattagattttccac

SEQ ID NO: 249725 - DNA, 30 bp, Artificial Sequence
  Synthetic oligonucleotide
accagagacagcgtaggtgtactcaagcac

SEQ ID NO: 249726 - DNA, 30 bp, Artificial Sequence
  Synthetic oligonucleotide
taaagtagccacgcgatacttcataagcac

SEQ ID NO: 249727 - DNA, 30 bp, Artificial Sequence
  Synthetic oligonucleotide
ggcctgcacgtatcaaccattggtaagcac

SEQ ID NO: 249728 - DNA, 30 bp, Artificial Sequence
  Synthetic oligonucleotide
tgaaactgcgaggcgtgcttatgtaagcac

SEQ ID NO: 249729 - DNA, 30 bp, Artificial Sequence
  Synthetic oligonucleotide
taatacgtataattcccgtatacacagcac

SEQ ID NO: 249730 - DNA, 30 bp, Artificial Sequence
  Synthetic oligonucleotide
cgctggcaactgcgcctcgagctacagcac

SEQ ID NO: 249731 - DNA, 30 bp, Artificial Sequence
  Synthetic oligonucleotide
actatacgttaagacacccgaaaccagcac

SEQ ID NO: 249732 - DNA, 30 bp, Artificial Sequence
  Synthetic oligonucleotide
tacgtaggcccagtcatagtataagagcac

SEQ ID NO: 249733 - DNA, 30 bp, Artificial Sequence
  Synthetic oligonucleotide
gcctcgatagtgtgatgttatccagagcac

SEQ ID NO: 249734 - DNA, 30 bp, Artificial Sequence
  Synthetic oligonucleotide
gtacggacaatgaacttattgttggagcac

SEQ ID NO: 249735 - DNA, 30 bp, Artificial Sequence
  Synthetic oligonucleotide
tggcacacggcatatgaatgagcgtagcac

SEQ ID NO: 249736 - DNA, 30 bp, Artificial Sequence
  Synthetic oligonucleotide
ttccgtacactacggaaacaatcgtagcac

SEQ ID NO: 249737 - DNA, 30 bp, Artificial Sequence
  Synthetic oligonucleotide
ccaccatccaaagttgatcgttggtagcac

SEQ ID NO: 249738 - DNA, 30 bp, Artificial Sequence
  Synthetic oligonucleotide
atcattagtgcaataagccgtctgtagcac

SEQ ID NO: 249739 - DNA, 30 bp, Artificial Sequence
  Synthetic oligonucleotide
cgtggtggcgtgtagtttggcaatacgcac

SEQ ID NO: 249740 - DNA, 30 bp, Artificial Sequence
  Synthetic oligonucleotide
caataaccctaaggtggctcgagtacgcac

SEQ ID NO: 249741 - DNA, 30 bp, Artificial Sequence
  Synthetic oligonucleotide
cgagtttgtcctccggtttgtgttacgcac

SEQ ID NO: 249742 - DNA, 30 bp, Artificial Sequence
  Synthetic oligonucleotide
tggaactggcttaaagtctggacaccgcac

SEQ ID NO: 249743 - DNA, 30 bp, Artificial Sequence
  Synthetic oligonucleotide
aatgctgtacgtaagggctgtgtgccgcac

SEQ ID NO: 249744 - DNA, 30 bp, Artificial Sequence
  Synthetic oligonucleotide
ctcggtctggcggctccttgtatcgcgcac

SEQ ID NO: 249745 - DNA, 30 bp, Artificial Sequence
  Synthetic oligonucleotide
gatgagccgaagccaatagtttaggcgcac

SEQ ID NO: 249746 - DNA, 30 bp, Artificial Sequence
  Synthetic oligonucleotide
ccactaggaaaaaatacgtgatcggcgcac

SEQ ID NO: 249747 - DNA, 30 bp, Artificial Sequence
  Synthetic oligonucleotide
gttatgggcatttccagaagccgggcgcac

SEQ ID NO: 249748 - DNA, 30 bp, Artificial Sequence
  Synthetic oligonucleotide
aaaaatggcgtatgcaaccggtatgcgcac

SEQ ID NO: 249749 - DNA, 30 bp, Artificial Sequence
  Synthetic oligonucleotide
tcagaatcagactggccggtttatgcgcac

SEQ ID NO: 249750 - DNA, 30 bp, Artificial Sequence
  Synthetic oligonucleotide
tccctcgaattgaatttttcgaaatcgcac

SEQ ID NO: 249751 - DNA, 30 bp, Artificial Sequence
  Synthetic oligonucleotide
gaaggtggtaacaacgtgcgaggatcgcac

SEQ ID NO: 249752 - DNA, 30 bp, Artificial Sequence
  Synthetic oligonucleotide
gtataaactaacactcgacttggatcgcac

SEQ ID NO: 249753 - DNA, 30 bp, Artificial Sequence
  Synthetic oligonucleotide
gaaaggagagacgttggcgcagtatcgcac

SEQ ID NO: 249754 - DNA, 30 bp, Artificial Sequence
  Synthetic oligonucleotide
caggagcaggatttggccggctagtcgcac

SEQ ID NO: 249755 - DNA, 30 bp, Artificial Sequence
  Synthetic oligonucleotide
gacagtgtgaatagcgacctacattcgcac

SEQ ID NO: 249756 - DNA, 30 bp, Artificial Sequence
  Synthetic oligonucleotide
gctaccctttagtttccctagagaaggcac

SEQ ID NO: 249757 - DNA, 30 bp, Artificial Sequence
  Synthetic oligonucleotide
cagcacaacgtaccccagcttcgaaggcac

SEQ ID NO: 249758 - DNA, 30 bp, Artificial Sequence
  Synthetic oligonucleotide
gataagaggctttaaggaactcacaggcac

SEQ ID NO: 249759 - DNA, 30 bp, Artificial Sequence
  Synthetic oligonucleotide
gataaccatgtataggtcagtgacaggcac

SEQ ID NO: 249760 - DNA, 30 bp, Artificial Sequence
  Synthetic oligonucleotide
agggtctcactagggaatcccatgaggcac

SEQ ID NO: 249761 - DNA, 30 bp, Artificial Sequence
  Synthetic oligonucleotide
caactggaaccgatcgccgtgtataggcac

SEQ ID NO: 249762 - DNA, 30 bp, Artificial Sequence
  Synthetic oligonucleotide
cagtatttcttgggtgggtagattaggcac

SEQ ID NO: 249763 - DNA, 30 bp, Artificial Sequence
  Synthetic oligonucleotide
ggcttgatttaccattatcctatacggcac

SEQ ID NO: 249764 - DNA, 30 bp, Artificial Sequence
  Synthetic oligonucleotide
gcagaacggccatgtgttcggctacggcac

SEQ ID NO: 249765 - DNA, 30 bp, Artificial Sequence
  Synthetic oligonucleotide
tgctgtttggtcctacggtagagccggcac

SEQ ID NO: 249766 - DNA, 30 bp, Artificial Sequence
  Synthetic oligonucleotide
gttccgccaacgtgcaggatgggccggcac

SEQ ID NO: 249767 - DNA, 30 bp, Artificial Sequence
  Synthetic oligonucleotide
gaggtctttcatacaccagttttccggcac

SEQ ID NO: 249768 - DNA, 30 bp, Artificial Sequence
  Synthetic oligonucleotide
gggggatgatcagtggcgtaactgcggcac

SEQ ID NO: 249769 - DNA, 30 bp, Artificial Sequence
  Synthetic oligonucleotide
ggttacatcagacgcctacccccagggcac

SEQ ID NO: 249770 - DNA, 30 bp, Artificial Sequence
  Synthetic oligonucleotide
catgtgtgcacctcgcgcagaagagggcac

SEQ ID NO: 249771 - DNA, 30 bp, Artificial Sequence
  Synthetic oligonucleotide
atctgccaagattcggtaaatagagggcac

SEQ ID NO: 249772 - DNA, 30 bp, Artificial Sequence
  Synthetic oligonucleotide
attcaccttggtgggtaggagggagggcac

SEQ ID NO: 249773 - DNA, 30 bp, Artificial Sequence
  Synthetic oligonucleotide
atccgtgcatagagaggagagcccgggcac

SEQ ID NO: 249774 - DNA, 28 bp, Artificial Sequence
  Synthetic oligonucleotide
atcgtaggcagctttcaaccgcgggcac

SEQ ID NO: 249775 - DNA, 30 bp, Artificial Sequence
  Synthetic oligonucleotide
gcagttgtacaaatacacagcgcggggcac

SEQ ID NO: 249776 - DNA, 30 bp, Artificial Sequence
  Synthetic oligonucleotide
cattacgttcggcgcttttccggtgggcac

SEQ ID NO: 249777 - DNA, 30 bp, Artificial Sequence
  Synthetic oligonucleotide
gtgcttctcttaactcgcgtcgaatggcac

SEQ ID NO: 249778 - DNA, 30 bp, Artificial Sequence
  Synthetic oligonucleotide
taatcggggacaggcggattactatggcac

SEQ ID NO: 249779 - DNA, 30 bp, Artificial Sequence
  Synthetic oligonucleotide
taacgagatcagccctgacaaaagtggcac

SEQ ID NO: 249780 - DNA, 30 bp, Artificial Sequence
  Synthetic oligonucleotide
tccgggtagcttcttcaaaatcattggcac

SEQ ID NO: 249781 - DNA, 30 bp, Artificial Sequence
  Synthetic oligonucleotide
acagtgctccaaggacatatggcttggcac

SEQ ID NO: 249782 - DNA, 30 bp, Artificial Sequence
  Synthetic oligonucleotide
ttacgataaaggcaattggcctcttggcac

SEQ ID NO: 249783 - DNA, 30 bp, Artificial Sequence
  Synthetic oligonucleotide
gtacggaagcttcagaacggccgttggcac

SEQ ID NO: 249784 - DNA, 30 bp, Artificial Sequence
  Synthetic oligonucleotide
atagggaccggttcggggatctgttggcac

SEQ ID NO: 249785 - DNA, 30 bp, Artificial Sequence
  Synthetic oligonucleotide
cataactgacaatgatatgctcctatgcac

SEQ ID NO: 249786 - DNA, 29 bp, Artificial Sequence
  Synthetic oligonucleotide
gcgcgtgtggtatggggaagagtatgcac

SEQ ID NO: 249787 - DNA, 30 bp, Artificial Sequence
  Synthetic oligonucleotide
ctggtcgacaggtcttccgaccaactgcac

SEQ ID NO: 249788 - DNA, 30 bp, Artificial Sequence
  Synthetic oligonucleotide
ggtatttgactaaggcgtgggggactgcac

SEQ ID NO: 249789 - DNA, 30 bp, Artificial Sequence
  Synthetic oligonucleotide
agcggcctaaaggtggctaaagtagtgcac

SEQ ID NO: 249790 - DNA, 30 bp, Artificial Sequence
  Synthetic oligonucleotide
gaagcgcgcggaattgtccacgacgtgcac

SEQ ID NO: 249791 - DNA, 30 bp, Artificial Sequence
  Synthetic oligonucleotide
actgaaattgcagccacgatgaccgtgcac

SEQ ID NO: 249792 - DNA, 30 bp, Artificial Sequence
  Synthetic oligonucleotide
tcgagcaacggaaagaattcctccgtgcac

SEQ ID NO: 249793 - DNA, 30 bp, Artificial Sequence
  Synthetic oligonucleotide
cgtacggcgacgaccatgtatgtcgtgcac

SEQ ID NO: 249794 - DNA, 30 bp, Artificial Sequence
  Synthetic oligonucleotide
tgaattttccaaaggatcggtattgtgcac

SEQ ID NO: 249795 - DNA, 30 bp, Artificial Sequence
  Synthetic oligonucleotide
tcactgatgtaacgggtcattattgtgcac

SEQ ID NO: 249796 - DNA, 30 bp, Artificial Sequence
  Synthetic oligonucleotide
tgcacgagtgcagccccaacatcattgcac

SEQ ID NO: 249797 - DNA, 30 bp, Artificial Sequence
  Synthetic oligonucleotide
ccgcctgttctactcgaatcacccttgcac

SEQ ID NO: 249798 - DNA, 30 bp, Artificial Sequence
  Synthetic oligonucleotide
ttgggagtacagtacaaatgaggcttgcac

SEQ ID NO: 249799 - DNA, 30 bp, Artificial Sequence
  Synthetic oligonucleotide
gtctacactgcttgagccagtttcttgcac

SEQ ID NO: 249800 - DNA, 30 bp, Artificial Sequence
  Synthetic oligonucleotide
gcctgggacccaacctggagttaaaatcac

SEQ ID NO: 249801 - DNA, 30 bp, Artificial Sequence
  Synthetic oligonucleotide
aagatgaaaagctattaatatgcaaatcac

SEQ ID NO: 249802 - DNA, 30 bp, Artificial Sequence
  Synthetic oligonucleotide
tcctcaagggccctcccatggatgaatcac

SEQ ID NO: 249803 - DNA, 30 bp, Artificial Sequence
  Synthetic oligonucleotide
ttgtggaaggtcacttactggtataatcac

SEQ ID NO: 249804 - DNA, 30 bp, Artificial Sequence
  Synthetic oligonucleotide
taacactcgccatagttgagtcctcatcac

SEQ ID NO: 249805 - DNA, 30 bp, Artificial Sequence
  Synthetic oligonucleotide
tcatgttatccggcaaggggaggagatcac

SEQ ID NO: 249806 - DNA, 30 bp, Artificial Sequence
  Synthetic oligonucleotide
agtggagggcccatggctctgaacgatcac

SEQ ID NO: 249807 - DNA, 30 bp, Artificial Sequence
  Synthetic oligonucleotide
gacctgtgtacaggtttaaagcgcgatcac

SEQ ID NO: 249808 - DNA, 30 bp, Artificial Sequence
  Synthetic oligonucleotide
gaccgcggcccccgggtggatgtcgatcac

SEQ ID NO: 249809 - DNA, 30 bp, Artificial Sequence
  Synthetic oligonucleotide
ataacctacaaatgtccacatacggatcac

SEQ ID NO: 249810 - DNA, 30 bp, Artificial Sequence
  Synthetic oligonucleotide
ggtacagggttcccatttagctgggatcac

SEQ ID NO: 249811 - DNA, 30 bp, Artificial Sequence
  Synthetic oligonucleotide
gtggaattataagacacttagtatgatcac

SEQ ID NO: 249812 - DNA, 30 bp, Artificial Sequence
  Synthetic oligonucleotide
aataacatgatgaaaatacatagtgatcac

SEQ ID NO: 249813 - DNA, 30 bp, Artificial Sequence
  Synthetic oligonucleotide
ctaaggaacggcacactagtacaatatcac

SEQ ID NO: 249814 - DNA, 30 bp, Artificial Sequence
  Synthetic oligonucleotide
gtggacgagcaacgagaaattgcatatcac

SEQ ID NO: 249815 - DNA, 30 bp, Artificial Sequence
  Synthetic oligonucleotide
ttgcattcaagtgggacagatgtatatcac

SEQ ID NO: 249816 - DNA, 30 bp, Artificial Sequence
  Synthetic oligonucleotide
gggaaaacaatacgagctacgcactatcac

SEQ ID NO: 249817 - DNA, 30 bp, Artificial Sequence
  Synthetic oligonucleotide
tgcaggtaaggaagtaacacgaagtatcac

SEQ ID NO: 249818 - DNA, 30 bp, Artificial Sequence
  Synthetic oligonucleotide
aaaacttacgccagggaaatcccgtatcac

SEQ ID NO: 249819 - DNA, 30 bp, Artificial Sequence
  Synthetic oligonucleotide
cgcggcagcaagcgggaaaagcggtatcac

SEQ ID NO: 249820 - DNA, 30 bp, Artificial Sequence
  Synthetic oligonucleotide
gagattacaaaaggcgcccatatgtatcac

SEQ ID NO: 249821 - DNA, 30 bp, Artificial Sequence
  Synthetic oligonucleotide
atcattgagcgcggaggctttcaaactcac

SEQ ID NO: 249822 - DNA, 30 bp, Artificial Sequence
  Synthetic oligonucleotide
ttggagcccaggagatatcagatcactcac

SEQ ID NO: 249823 - DNA, 30 bp, Artificial Sequence
  Synthetic oligonucleotide
gcatccggcgacagcgcaaacggccctcac

SEQ ID NO: 249824 - DNA, 30 bp, Artificial Sequence
  Synthetic oligonucleotide
ctacgggggcaactctgctagcaagctcac

SEQ ID NO: 249825 - DNA, 30 bp, Artificial Sequence
  Synthetic oligonucleotide
tcaagctaataagggaccagaatagctcac

SEQ ID NO: 249826 - DNA, 30 bp, Artificial Sequence
  Synthetic oligonucleotide
tgcggcattcctctaaagttcgccgctcac

SEQ ID NO: 249827 - DNA, 30 bp, Artificial Sequence
  Synthetic oligonucleotide
agtgtgaacttaactaacgtactcgctcac

SEQ ID NO: 249828 - DNA, 30 bp, Artificial Sequence
  Synthetic oligonucleotide
tcgagaacggacttgatttcttaggctcac

SEQ ID NO: 249829 - DNA, 30 bp, Artificial Sequence
  Synthetic oligonucleotide
atcaaggtgcgtatatggttggcggctcac

SEQ ID NO: 249830 - DNA, 30 bp, Artificial Sequence
  Synthetic oligonucleotide
tctgtttatttggacgcgagcacctctcac

SEQ ID NO: 249831 - DNA, 30 bp, Artificial Sequence
  Synthetic oligonucleotide
tggtttcatctggtaaaggcctgttctcac

SEQ ID NO: 249832 - DNA, 30 bp, Artificial Sequence
  Synthetic oligonucleotide
gatggaatgctgggatagactcacagtcac

SEQ ID NO: 249833 - DNA, 30 bp, Artificial Sequence
  Synthetic oligonucleotide
ttacatctccgcatatcggctcccagtcac

SEQ ID NO: 249834 - DNA, 30 bp, Artificial Sequence
  Synthetic oligonucleotide
aagtacgcgagatttttctaaagccgtcac

SEQ ID NO: 249835 - DNA, 30 bp, Artificial Sequence
  Synthetic oligonucleotide
gctgacttaggagaggttagtgcgcgtcac

SEQ ID NO: 249836 - DNA, 30 bp, Artificial Sequence
  Synthetic oligonucleotide
agagctttagcggttccgaggtggcgtcac

SEQ ID NO: 249837 - DNA, 30 bp, Artificial Sequence
  Synthetic oligonucleotide
aaagagggtcgctgaaaatggccaggtcac

SEQ ID NO: 249838 - DNA, 30 bp, Artificial Sequence
  Synthetic oligonucleotide
ggactactagtatctccccatggaggtcac

SEQ ID NO: 249839 - DNA, 30 bp, Artificial Sequence
  Synthetic oligonucleotide
ctcgaattcacttaattacctataggtcac

SEQ ID NO: 249840 - DNA, 30 bp, Artificial Sequence
  Synthetic oligonucleotide
gggcagggcgacaggaatgcgcacggtcac

SEQ ID NO: 249841 - DNA, 30 bp, Artificial Sequence
  Synthetic oligonucleotide
actgtgatacactgtttttcagagtgtcac

SEQ ID NO: 249842 - DNA, 30 bp, Artificial Sequence
  Synthetic oligonucleotide
tgcgatagagcttcacaagcgacgtgtcac

SEQ ID NO: 249843 - DNA, 30 bp, Artificial Sequence
  Synthetic oligonucleotide
atcatccttcccataaacgcgcccattcac

SEQ ID NO: 249844 - DNA, 30 bp, Artificial Sequence
  Synthetic oligonucleotide
taggacacaacgaagccgccgggcattcac

SEQ ID NO: 249845 - DNA, 30 bp, Artificial Sequence
  Synthetic oligonucleotide
ctcataggctagctaggcgttctgattcac

SEQ ID NO: 249846 - DNA, 30 bp, Artificial Sequence
  Synthetic oligonucleotide
aagtcatcctataatatggcaaatattcac

SEQ ID NO: 249847 - DNA, 30 bp, Artificial Sequence
  Synthetic oligonucleotide
agctacagcttgatcgcgcgaaatattcac

SEQ ID NO: 249848 - DNA, 30 bp, Artificial Sequence
  Synthetic oligonucleotide
aacttagccttagtagaatatggtattcac

SEQ ID NO: 249849 - DNA, 30 bp, Artificial Sequence
  Synthetic oligonucleotide
tacgttaacgacgtgtgatgattacttcac

SEQ ID NO: 249850 - DNA, 30 bp, Artificial Sequence
  Synthetic oligonucleotide
gctcatccaaacgggtattgcgaccttcac

SEQ ID NO: 249851 - DNA, 30 bp, Artificial Sequence
  Synthetic oligonucleotide
gatctatagtcaccagccttcgcccttcac

SEQ ID NO: 249852 - DNA, 30 bp, Artificial Sequence
  Synthetic oligonucleotide
catgatagagacactccaaaaaagcttcac

SEQ ID NO: 249853 - DNA, 30 bp, Artificial Sequence
  Synthetic oligonucleotide
cgaagccgggataccattggtaggcttcac

SEQ ID NO: 249854 - DNA, 30 bp, Artificial Sequence
  Synthetic oligonucleotide
ggccaggtgtgtcgctgcttatgtcttcac

SEQ ID NO: 249855 - DNA, 30 bp, Artificial Sequence
  Synthetic oligonucleotide
caggctagatttaaaaatttctcagttcac

SEQ ID NO: 249856 - DNA, 31 bp, Artificial Sequence
  Synthetic oligonucleotide
ccagcccttcggaagcacatgcgaggttcac

SEQ ID NO: 249857 - DNA, 30 bp, Artificial Sequence
  Synthetic oligonucleotide
ctgggaactagccgggacggtagggttcac

SEQ ID NO: 249858 - DNA, 30 bp, Artificial Sequence
  Synthetic oligonucleotide
agaagactacggctctacgttgttgttcac

SEQ ID NO: 249859 - DNA, 30 bp, Artificial Sequence
  Synthetic oligonucleotide
cattacccaaagtgagttaggtgatttcac

SEQ ID NO: 249860 - DNA, 30 bp, Artificial Sequence
  Synthetic oligonucleotide
ggtacaaggagcacctctggttgttttcac

SEQ ID NO: 249861 - DNA, 30 bp, Artificial Sequence
  Synthetic oligonucleotide
tgtaccgtctcgagattaggtgaaaaagac

SEQ ID NO: 249862 - DNA, 30 bp, Artificial Sequence
  Synthetic oligonucleotide
ctacctaatgagcacatggcaacaaaagac

SEQ ID NO: 249863 - DNA, 34 bp, Artificial Sequence
  Synthetic oligonucleotide
gataatagaccaccacggtcccatcagaaaagac

SEQ ID NO: 249864 - DNA, 34 bp, Artificial Sequence
  Synthetic oligonucleotide
gatactagcccaccacgtggccatcagaaaagac

SEQ ID NO: 249865 - DNA, 34 bp, Artificial Sequence
  Synthetic oligonucleotide
gatacgagaccaccacgtgtccatcagaaaagac

SEQ ID NO: 249866 - DNA, 30 bp, Artificial Sequence
  Synthetic oligonucleotide
gctacccgttgtgtcttgtcccgaaaagac

SEQ ID NO: 249867 - DNA, 30 bp, Artificial Sequence
  Synthetic oligonucleotide
ggctggatgttattcgagcttataaaagac

SEQ ID NO: 249868 - DNA, 30 bp, Artificial Sequence
  Synthetic oligonucleotide
cgtccaagaaatcgcaattttgacaaagac

SEQ ID NO: 249869 - DNA, 30 bp, Artificial Sequence
  Synthetic oligonucleotide
tatccaaagtacacagtgtttttacaagac

SEQ ID NO: 249870 - DNA, 30 bp, Artificial Sequence
  Synthetic oligonucleotide
gtatgccacttaagtactaccacgcaagac

SEQ ID NO: 249871 - DNA, 30 bp, Artificial Sequence
  Synthetic oligonucleotide
tcagcaaacgtacatataaatagtcaagac

SEQ ID NO: 249872 - DNA, 30 bp, Artificial Sequence
  Synthetic oligonucleotide
tgagaacactccggagaagtttttcaagac

SEQ ID NO: 249873 - DNA, 30 bp, Artificial Sequence
  Synthetic oligonucleotide
gatggcatgcgctgctttatacgcgaagac

SEQ ID NO: 249874 - DNA, 30 bp, Artificial Sequence
  Synthetic oligonucleotide
cgcaaatcggttatggtatttagggaagac

SEQ ID NO: 249875 - DNA, 30 bp, Artificial Sequence
  Synthetic oligonucleotide
tagatcagggacaggggacggctggaagac

SEQ ID NO: 249876 - DNA, 30 bp, Artificial Sequence
  Synthetic oligonucleotide
tccacaatagactacggtttgaaataagac

SEQ ID NO: 249877 - DNA, 30 bp, Artificial Sequence
  Synthetic oligonucleotide
gtgcgatgcaagtatacctcttactaagac

SEQ ID NO: 249878 - DNA, 30 bp, Artificial Sequence
  Synthetic oligonucleotide
gcacctgacccgatgcttgtaagctaagac

SEQ ID NO: 249879 - DNA, 30 bp, Artificial Sequence
  Synthetic oligonucleotide
catatcagtatgggatcaaaccgctaagac

SEQ ID NO: 249880 - DNA, 30 bp, Artificial Sequence
  Synthetic oligonucleotide
ggtgacactcctaactcaaagcgctaagac

SEQ ID NO: 249881 - DNA, 30 bp, Artificial Sequence
  Synthetic oligonucleotide
tagcggtaaccaaggttatgctgctaagac

SEQ ID NO: 249882 - DNA, 30 bp, Artificial Sequence
  Synthetic oligonucleotide
agtggccgagtccaaaaactaatttaagac

SEQ ID NO: 249883 - DNA, 30 bp, Artificial Sequence
  Synthetic oligonucleotide
cgaaacttgatgcggttacagtgaacagac

SEQ ID NO: 249884 - DNA, 30 bp, Artificial Sequence
  Synthetic oligonucleotide
gaggtgggcagaagatcggcctagccagac

SEQ ID NO: 249885 - DNA, 30 bp, Artificial Sequence
  Synthetic oligonucleotide
gtgtggcactagtgttgacatgggccagac

SEQ ID NO: 249886 - DNA, 30 bp, Artificial Sequence
  Synthetic oligonucleotide
gccaccgaaagagtcctttcagcagcagac

SEQ ID NO: 249887 - DNA, 30 bp, Artificial Sequence
  Synthetic oligonucleotide
cgacaacgacgcgcattgataatagcagac

SEQ ID NO: 249888 - DNA, 30 bp, Artificial Sequence
  Synthetic oligonucleotide
tggattccccataatttgcaagttgcagac

SEQ ID NO: 249889 - DNA, 30 bp, Artificial Sequence
  Synthetic oligonucleotide
ccatcggccatttggcagttggttgcagac

SEQ ID NO: 249890 - DNA, 30 bp, Artificial Sequence
  Synthetic oligonucleotide
ccggagggactctaagtgttcctatcagac

SEQ ID NO: 249891 - DNA, 30 bp, Artificial Sequence
  Synthetic oligonucleotide
taccgtggcatacggtgtggggtatcagac

SEQ ID NO: 249892 - DNA, 30 bp, Artificial Sequence
  Synthetic oligonucleotide
ctatgaccgagatcaggtagtcgctcagac

SEQ ID NO: 249893 - DNA, 30 bp, Artificial Sequence
  Synthetic oligonucleotide
gtagtggatgagagtctgtcagtctcagac

SEQ ID NO: 249894 - DNA, 30 bp, Artificial Sequence
  Synthetic oligonucleotide
cacagtacccgaatgattttgtcgtcagac

SEQ ID NO: 249895 - DNA, 30 bp, Artificial Sequence
  Synthetic oligonucleotide
caaaacgattgatgtgccagggggtcagac

SEQ ID NO: 249896 - DNA, 30 bp, Artificial Sequence
  Synthetic oligonucleotide
agaaaatctaggatgactcatgtttcagac

SEQ ID NO: 249897 - DNA, 30 bp, Artificial Sequence
  Synthetic oligonucleotide
atgtatctggggcgtcgttgaagaagagac

SEQ ID NO: 249898 - DNA, 30 bp, Artificial Sequence
  Synthetic oligonucleotide
gagaagattcggcacttggttagaagagac

SEQ ID NO: 249899 - DNA, 30 bp, Artificial Sequence
  Synthetic oligonucleotide
aggaagttatgtcccgaccaatcgagagac

SEQ ID NO: 249900 - DNA, 30 bp, Artificial Sequence
  Synthetic oligonucleotide
ctgtggttccatttcaaggactcgcgagac

SEQ ID NO: 249901 - DNA, 30 bp, Artificial Sequence
  Synthetic oligonucleotide
tgataaggtacgtgctcccgagcaggagac

SEQ ID NO: 249902 - DNA, 30 bp, Artificial Sequence
  Synthetic oligonucleotide
gatttgtgggcgttgagcaaccgaggagac

SEQ ID NO: 249903 - DNA, 30 bp, Artificial Sequence
  Synthetic oligonucleotide
ggttctaatcttttgcaacatagcggagac

SEQ ID NO: 249904 - DNA, 30 bp, Artificial Sequence
  Synthetic oligonucleotide
ttgcatcccagcagacaaaggtttggagac

SEQ ID NO: 249905 - DNA, 30 bp, Artificial Sequence
  Synthetic oligonucleotide
aacataggtccggcccctctcaactgagac

SEQ ID NO: 249906 - DNA, 30 bp, Artificial Sequence
  Synthetic oligonucleotide
gaaacgaatagaggcggtgcaaagtgagac

SEQ ID NO: 249907 - DNA, 30 bp, Artificial Sequence
  Synthetic oligonucleotide
agggttaatacgcggactgtacagtgagac

SEQ ID NO: 249908 - DNA, 30 bp, Artificial Sequence
  Synthetic oligonucleotide
tggccaattggttgatgccgaatgtgagac

SEQ ID NO: 249909 - DNA, 30 bp, Artificial Sequence
  Synthetic oligonucleotide
ggactcggagtcccacgtagtgcttgagac

SEQ ID NO: 249910 - DNA, 30 bp, Artificial Sequence
  Synthetic oligonucleotide
cccagtaggattggcgggcaggtttgagac

SEQ ID NO: 249911 - DNA, 30 bp, Artificial Sequence
  Synthetic oligonucleotide
ccgaccggcaccaataacttataaatagac

SEQ ID NO: 249912 - DNA, 30 bp, Artificial Sequence
  Synthetic oligonucleotide
ttccccgacatgtgaccgactgtaatagac

SEQ ID NO: 249913 - DNA, 30 bp, Artificial Sequence
  Synthetic oligonucleotide
tgagacgctgacggagagcgggtcatagac

SEQ ID NO: 249914 - DNA, 30 bp, Artificial Sequence
  Synthetic oligonucleotide
ggagcatagagcatcggttttgtcatagac

SEQ ID NO: 249915 - DNA, 30 bp, Artificial Sequence
  Synthetic oligonucleotide
cggtgcacgtttgcggcgtcgtcactagac

SEQ ID NO: 249916 - DNA, 30 bp, Artificial Sequence
  Synthetic oligonucleotide
gcggcacgaggggaaaggcacggactagac

SEQ ID NO: 249917 - DNA, 30 bp, Artificial Sequence
  Synthetic oligonucleotide
atatggttcgctatgggcactagcctagac

SEQ ID NO: 249918 - DNA, 30 bp, Artificial Sequence
  Synthetic oligonucleotide
aagtggttttaaatggcagcgaatctagac

SEQ ID NO: 249919 - DNA, 30 bp, Artificial Sequence
  Synthetic oligonucleotide
ttacatcaacaagggtattaggaagtagac

SEQ ID NO: 249920 - DNA, 30 bp, Artificial Sequence
  Synthetic oligonucleotide
aacatttggggaatcgcggttcgcgtagac

SEQ ID NO: 249921 - DNA, 30 bp, Artificial Sequence
  Synthetic oligonucleotide
gtgctttaatgagaatcatgtagggtagac

SEQ ID NO: 249922 - DNA, 30 bp, Artificial Sequence
  Synthetic oligonucleotide
gctctttaggcgttgggaaaacgggtagac

SEQ ID NO: 249923 - DNA, 30 bp, Artificial Sequence
  Synthetic oligonucleotide
cccagtggtgacccatcgaacgaattagac

SEQ ID NO: 249924 - DNA, 30 bp, Artificial Sequence
  Synthetic oligonucleotide
gccagccacattctgactgtctcattagac

SEQ ID NO: 249925 - DNA, 30 bp, Artificial Sequence
  Synthetic oligonucleotide
ggatcacggagttcataataacgattagac

SEQ ID NO: 249926 - DNA, 30 bp, Artificial Sequence
  Synthetic oligonucleotide
gcgccgcaccctattgcggtctacttagac

SEQ ID NO: 249927 - DNA, 30 bp, Artificial Sequence
  Synthetic oligonucleotide
ggaagcgaatggtgattctagcccaacgac

SEQ ID NO: 249928 - DNA, 30 bp, Artificial Sequence
  Synthetic oligonucleotide
cgcaaaggatgtttgatgctgagtaacgac

SEQ ID NO: 249929 - DNA, 30 bp, Artificial Sequence
  Synthetic oligonucleotide
tatacgatctcgacgaatggtcgtaacgac

SEQ ID NO: 249930 - DNA, 30 bp, Artificial Sequence
  Synthetic oligonucleotide
tggtatagatagttccctcgcgcacacgac

SEQ ID NO: 249931 - DNA, 30 bp, Artificial Sequence
  Synthetic oligonucleotide
atgagttgaacgttcggattgcaccacgac

SEQ ID NO: 249932 - DNA, 30 bp, Artificial Sequence
  Synthetic oligonucleotide
cccgttagtttgatccaacaaacgcacgac

SEQ ID NO: 249933 - DNA, 30 bp, Artificial Sequence
  Synthetic oligonucleotide
taatgcagagctcaggtgtccgggcacgac

SEQ ID NO: 249934 - DNA, 30 bp, Artificial Sequence
  Synthetic oligonucleotide
aagtacgcgggctaccgtgagttgcacgac

SEQ ID NO: 249935 - DNA, 30 bp, Artificial Sequence
  Synthetic oligonucleotide
ccacattcaatcaaggtggcgcatcacgac

SEQ ID NO: 249936 - DNA, 30 bp, Artificial Sequence
  Synthetic oligonucleotide
tcgcacccagaggaggtgagtaaagacgac

SEQ ID NO: 249937 - DNA, 30 bp, Artificial Sequence
  Synthetic oligonucleotide
aaccggtagatttataatcgcagcgacgac

SEQ ID NO: 249938 - DNA, 30 bp, Artificial Sequence
  Synthetic oligonucleotide
aagaaccagggatttggacccgaggacgac

SEQ ID NO: 249939 - DNA, 30 bp, Artificial Sequence
  Synthetic oligonucleotide
cgtgagctcacggctatgccgctatacgac

SEQ ID NO: 249940 - DNA, 30 bp, Artificial Sequence
  Synthetic oligonucleotide
tggcaagcctgccatattactagctacgac

SEQ ID NO: 249941 - DNA, 30 bp, Artificial Sequence
  Synthetic oligonucleotide
agtgcaactctgtgtcatggatagtacgac

SEQ ID NO: 249942 - DNA, 30 bp, Artificial Sequence
  Synthetic oligonucleotide
atgtagaaagcgataaaattgacgtacgac

SEQ ID NO: 249943 - DNA, 31 bp, Artificial Sequence
  Synthetic oligonucleotide
gaaatcgcgtaggaggtatagccgttacgac

SEQ ID NO: 249944 - DNA, 30 bp, Artificial Sequence
  Synthetic oligonucleotide
cgcgccgcttttagatgtactctgaccgac

SEQ ID NO: 249945 - DNA, 30 bp, Artificial Sequence
  Synthetic oligonucleotide
gtggtaccattttgttatgtttctcccgac

SEQ ID NO: 249946 - DNA, 30 bp, Artificial Sequence
  Synthetic oligonucleotide
gcttccagaattgtcttgagaaaagccgac

SEQ ID NO: 249947 - DNA, 30 bp, Artificial Sequence
  Synthetic oligonucleotide
gtatagtcaagatcggcacatgccgccgac

SEQ ID NO: 249948 - DNA, 30 bp, Artificial Sequence
  Synthetic oligonucleotide
tcgtcctaactatactactggtaggccgac

SEQ ID NO: 249949 - DNA, 30 bp, Artificial Sequence
  Synthetic oligonucleotide
actaagactaggatcgtaacagtatccgac

SEQ ID NO: 249950 - DNA, 30 bp, Artificial Sequence
  Synthetic oligonucleotide
atatgttcgccgagaatcgaaatgtccgac

SEQ ID NO: 249951 - DNA, 30 bp, Artificial Sequence
  Synthetic oligonucleotide
tttggaagcttatacggaacagattccgac

SEQ ID NO: 249952 - DNA, 30 bp, Artificial Sequence
  Synthetic oligonucleotide
ccaaacaagggcgaaagggtactttccgac

SEQ ID NO: 249953 - DNA, 30 bp, Artificial Sequence
  Synthetic oligonucleotide
cccactattctgtatggaaacagcagcgac

SEQ ID NO: 249954 - DNA, 30 bp, Artificial Sequence
  Synthetic oligonucleotide
tgatatgtccggcagaccttacatagcgac

SEQ ID NO: 249955 - DNA, 30 bp, Artificial Sequence
  Synthetic oligonucleotide
catggaagcggtccgccgcgcgatagcgac

SEQ ID NO: 249956 - DNA, 30 bp, Artificial Sequence
  Synthetic oligonucleotide
aacggtaaagtcgaacattccattagcgac

SEQ ID NO: 249957 - DNA, 30 bp, Artificial Sequence
  Synthetic oligonucleotide
ctaatgatagtgcgtgggtgttagcgcgac

SEQ ID NO: 249958 - DNA, 30 bp, Artificial Sequence
  Synthetic oligonucleotide
ggtctgtgctaggattacgttcctcgcgac

SEQ ID NO: 249959 - DNA, 30 bp, Artificial Sequence
  Synthetic oligonucleotide
agcggccttaaagattaatgatctcgcgac

SEQ ID NO: 249960 - DNA, 30 bp, Artificial Sequence
  Synthetic oligonucleotide
actcgatgggccatcaggctctaaggcgac

SEQ ID NO: 249961 - DNA, 30 bp, Artificial Sequence
  Synthetic oligonucleotide
atcggcacggccatttgagggacaggcgac

SEQ ID NO: 249962 - DNA, 30 bp, Artificial Sequence
  Synthetic oligonucleotide
ctagcttgacacggtagagacgtcggcgac

SEQ ID NO: 249963 - DNA, 30 bp, Artificial Sequence
  Synthetic oligonucleotide
agaaatctagcgtttaacatggcgggcgac

SEQ ID NO: 249964 - DNA, 30 bp, Artificial Sequence
  Synthetic oligonucleotide
ttcatcgccgccgataatcacatgtgcgac

SEQ ID NO: 249965 - DNA, 30 bp, Artificial Sequence
  Synthetic oligonucleotide
ggtgttctggagggctaatggtgttgcgac

SEQ ID NO: 249966 - DNA, 30 bp, Artificial Sequence
  Synthetic oligonucleotide
cggtctattccaacgtttgtcttttgcgac

SEQ ID NO: 249967 - DNA, 30 bp, Artificial Sequence
  Synthetic oligonucleotide
aggccgagtaatttctcgccgcaaatcgac

SEQ ID NO: 249968 - DNA, 30 bp, Artificial Sequence
  Synthetic oligonucleotide
gggccgacctgtgtgggtatgataatcgac

SEQ ID NO: 249969 - DNA, 30 bp, Artificial Sequence
  Synthetic oligonucleotide
aaagtcatggtggactctgagcacatcgac

SEQ ID NO: 249970 - DNA, 30 bp, Artificial Sequence
  Synthetic oligonucleotide
aagtcgcaccttttcgtgggggtcatcgac

SEQ ID NO: 249971 - DNA, 30 bp, Artificial Sequence
  Synthetic oligonucleotide
ccttcgttgtcagatctggccgcgatcgac

SEQ ID NO: 249972 - DNA, 30 bp, Artificial Sequence
  Synthetic oligonucleotide
gcgttattttcgctttctctcgggatcgac

SEQ ID NO: 249973 - DNA, 30 bp, Artificial Sequence
  Synthetic oligonucleotide
tgttagcgcagttgataggccggactcgac

SEQ ID NO: 249974 - DNA, 30 bp, Artificial Sequence
  Synthetic oligonucleotide
tgccgacaatcgaattgtaggcaagtcgac

SEQ ID NO: 249975 - DNA, 30 bp, Artificial Sequence
  Synthetic oligonucleotide
cattcccgattgaggcacatcggggtcgac

SEQ ID NO: 249976 - DNA, 30 bp, Artificial Sequence
  Synthetic oligonucleotide
tgccatacgtacctgggatcagtggtcgac

SEQ ID NO: 249977 - DNA, 30 bp, Artificial Sequence
  Synthetic oligonucleotide
tcgtaaagacaacgtcttagatatgtcgac

SEQ ID NO: 249978 - DNA, 30 bp, Artificial Sequence
  Synthetic oligonucleotide
ccgtgcagatcctggggcagttttgtcgac

SEQ ID NO: 249979 - DNA, 30 bp, Artificial Sequence
  Synthetic oligonucleotide
ttttacggacaaaagtaggagcaattcgac

SEQ ID NO: 249980 - DNA, 30 bp, Artificial Sequence
  Synthetic oligonucleotide
ggcggcccgctagaagtaaccctgttcgac

SEQ ID NO: 249981 - DNA, 30 bp, Artificial Sequence
  Synthetic oligonucleotide
attgaccctggttcatctgccaaaaaggac

SEQ ID NO: 249982 - DNA, 30 bp, Artificial Sequence
  Synthetic oligonucleotide
cgttggcatgtggacagttttacaaaggac

SEQ ID NO: 249983 - DNA, 30 bp, Artificial Sequence
  Synthetic oligonucleotide
tggtccaaccttgggcgggacagaaaggac

SEQ ID NO: 249984 - DNA, 30 bp, Artificial Sequence
  Synthetic oligonucleotide
ttcggaatggcctcgactacgcgaaaggac

SEQ ID NO: 249985 - DNA, 30 bp, Artificial Sequence
  Synthetic oligonucleotide
tcggttagtgtaagcaccgggaacaaggac

SEQ ID NO: 249986 - DNA, 30 bp, Artificial Sequence
  Synthetic oligonucleotide
gatataaagatatacctcattcacaaggac

SEQ ID NO: 249987 - DNA, 30 bp, Artificial Sequence
  Synthetic oligonucleotide
tttgtcagagtagagaggagacccaaggac

SEQ ID NO: 249988 - DNA, 30 bp, Artificial Sequence
  Synthetic oligonucleotide
agcaagtaccttacctgcaaccccaaggac

SEQ ID NO: 249989 - DNA, 30 bp, Artificial Sequence
  Synthetic oligonucleotide
gactagccatctctacggtcatctaaggac

SEQ ID NO: 249990 - DNA, 30 bp, Artificial Sequence
  Synthetic oligonucleotide
ggaggtatgtatcccatgcaggtccaggac

SEQ ID NO: 249991 - DNA, 30 bp, Artificial Sequence
  Synthetic oligonucleotide
ttatacctcacgttaatcccattccaggac

SEQ ID NO: 249992 - DNA, 30 bp, Artificial Sequence
  Synthetic oligonucleotide
agcggtgcttccgtgactaaattgcaggac

SEQ ID NO: 249993 - DNA, 30 bp, Artificial Sequence
  Synthetic oligonucleotide
cagtaaacgtgcaagctggttggtcaggac

SEQ ID NO: 249994 - DNA, 30 bp, Artificial Sequence
  Synthetic oligonucleotide
aggtagtgcgcatatagcgaggcagaggac

SEQ ID NO: 249995 - DNA, 30 bp, Artificial Sequence
  Synthetic oligonucleotide
ggtgtcaaaggtaagcggctacacgaggac

SEQ ID NO: 249996 - DNA, 30 bp, Artificial Sequence
  Synthetic oligonucleotide
tatctgaagccttacggtaagctcgaggac

SEQ ID NO: 249997 - DNA, 30 bp, Artificial Sequence
  Synthetic oligonucleotide
gttacgacaacattgattcgaacggaggac

SEQ ID NO: 249998 - DNA, 30 bp, Artificial Sequence
  Synthetic oligonucleotide
gcaaaaatatccagtctcgtcccggaggac

SEQ ID NO: 249999 - DNA, 30 bp, Artificial Sequence
  Synthetic oligonucleotide
ttggtgcctagtcgcatgccttcggaggac

SEQ ID NO: 250000 - DNA, 30 bp, Artificial Sequence
  Synthetic oligonucleotide
cgccgatacggtgagagcaccatggaggac

SEQ ID NO: 250001 - DNA, 30 bp, Artificial Sequence
  Synthetic oligonucleotide
caagtcaatcttcccgcgccccatgaggac

SEQ ID NO: 250002 - DNA, 30 bp, Artificial Sequence
  Synthetic oligonucleotide
ggaaagtcgttcgaattggagagataggac

SEQ ID NO: 250003 - DNA, 30 bp, Artificial Sequence
  Synthetic oligonucleotide
aagatttcagggaggatgaggatgtaggac

SEQ ID NO: 250004 - DNA, 30 bp, Artificial Sequence
  Synthetic oligonucleotide
tgggggcacgataatgccatctgaacggac

SEQ ID NO: 250005 - DNA, 30 bp, Artificial Sequence
  Synthetic oligonucleotide
gcaacaataaaacatgtatgttccacggac

SEQ ID NO: 250006 - DNA, 30 bp, Artificial Sequence
  Synthetic oligonucleotide
ttattactcgcaagcgcagagaagacggac

SEQ ID NO: 250007 - DNA, 30 bp, Artificial Sequence
  Synthetic oligonucleotide
aacaaggtctgttctaacccgacgacggac

SEQ ID NO: 250008 - DNA, 30 bp, Artificial Sequence
  Synthetic oligonucleotide
aacagtagagtatggtagtgtccgacggac

SEQ ID NO: 250009 - DNA, 30 bp, Artificial Sequence
  Synthetic oligonucleotide
ctcattagtgtattctagcttaatacggac

SEQ ID NO: 250010 - DNA, 30 bp, Artificial Sequence
  Synthetic oligonucleotide
agtggcctcaaagcctcggagtctacggac

SEQ ID NO: 250011 - DNA, 30 bp, Artificial Sequence
  Synthetic oligonucleotide
aactttaaaggtgcgtaggctcaaccggac

SEQ ID NO: 250012 - DNA, 30 bp, Artificial Sequence
  Synthetic oligonucleotide
ttatacctgaaagattgagatgtaccggac

SEQ ID NO: 250013 - DNA, 30 bp, Artificial Sequence
  Synthetic oligonucleotide
gctaggtattgcggggagtttagcccggac

SEQ ID NO: 250014 - DNA, 30 bp, Artificial Sequence
  Synthetic oligonucleotide
ctttgtgggccggcagctatatagccggac

SEQ ID NO: 250015 - DNA, 29 bp, Artificial Sequence
  Synthetic oligonucleotide
actaccagctccactagtcgattccggac

SEQ ID NO: 250016 - DNA, 30 bp, Artificial Sequence
  Synthetic oligonucleotide
gcatgattacgcaagcgagcaacagcggac

SEQ ID NO: 250017 - DNA, 30 bp, Artificial Sequence
  Synthetic oligonucleotide
ttgattacatggctcagaacgcacgcggac

SEQ ID NO: 250018 - DNA, 30 bp, Artificial Sequence
  Synthetic oligonucleotide
acgcgtaaacagctgccgtcgggggcggac

SEQ ID NO: 250019 - DNA, 30 bp, Artificial Sequence
  Synthetic oligonucleotide
gtaattctcaccgataataggactgcggac

SEQ ID NO: 250020 - DNA, 30 bp, Artificial Sequence
  Synthetic oligonucleotide
aggctataaagctaaagatattgctcggac

SEQ ID NO: 250021 - DNA, 30 bp, Artificial Sequence
  Synthetic oligonucleotide
atcgaatggtgtgagcttataatctcggac

SEQ ID NO: 250022 - DNA, 30 bp, Artificial Sequence
  Synthetic oligonucleotide
ggacaagaaggcctatcactcgggtcggac

SEQ ID NO: 250023 - DNA, 30 bp, Artificial Sequence
  Synthetic oligonucleotide
ggtaatgggatctcgtcattgcattcggac

SEQ ID NO: 250024 - DNA, 30 bp, Artificial Sequence
  Synthetic oligonucleotide
tgtcggacgtagacccaatgtcgttcggac

SEQ ID NO: 250025 - DNA, 30 bp, Artificial Sequence
  Synthetic oligonucleotide
cagtggtgtccggctaaaactggaagggac

SEQ ID NO: 250026 - DNA, 30 bp, Artificial Sequence
  Synthetic oligonucleotide
actaagcggggggagaattctggaagggac

SEQ ID NO: 250027 - DNA, 30 bp, Artificial Sequence
  Synthetic oligonucleotide
taatggggtggtgtgtatttggtaagggac

SEQ ID NO: 250028 - DNA, 30 bp, Artificial Sequence
  Synthetic oligonucleotide
agggtatctcattgtcctaacttaagggac

SEQ ID NO: 250029 - DNA, 30 bp, Artificial Sequence
  Synthetic oligonucleotide
aactatcttggtatggagttacacagggac

SEQ ID NO: 250030 - DNA, 30 bp, Artificial Sequence
  Synthetic oligonucleotide
gtggaagccaagatggaatatacacgggac

SEQ ID NO: 250031 - DNA, 30 bp, Artificial Sequence
  Synthetic oligonucleotide
agtacacatccagacgttgtggcacgggac

SEQ ID NO: 250032 - DNA, 30 bp, Artificial Sequence
  Synthetic oligonucleotide
gcgaaaattttattcgttattagtcgggac

SEQ ID NO: 250033 - DNA, 30 bp, Artificial Sequence
  Synthetic oligonucleotide
ccctagggagcggaaagcaaaccaggggac

SEQ ID NO: 250034 - DNA, 30 bp, Artificial Sequence
  Synthetic oligonucleotide
tcatgcctgggtactatttaccacggggac

SEQ ID NO: 250035 - DNA, 30 bp, Artificial Sequence
  Synthetic oligonucleotide
gagataagtaccgggtgacaaaccggggac

SEQ ID NO: 250036 - DNA, 30 bp, Artificial Sequence
  Synthetic oligonucleotide
acgtcgcgctggaatgggattcccggggac

SEQ ID NO: 250037 - DNA, 30 bp, Artificial Sequence
  Synthetic oligonucleotide
atcagttacccatactttgccagcggggac

SEQ ID NO: 250038 - DNA, 30 bp, Artificial Sequence
  Synthetic oligonucleotide
cgcaggtattgcgaatttcaactcggggac

SEQ ID NO: 250039 - DNA, 30 bp, Artificial Sequence
  Synthetic oligonucleotide
cgaccagagctgcagtcgttcgctggggac

SEQ ID NO: 250040 - DNA, 30 bp, Artificial Sequence
  Synthetic oligonucleotide
aatatgtttaggcatgtcaaagaatgggac

SEQ ID NO: 250041 - DNA, 30 bp, Artificial Sequence
  Synthetic oligonucleotide
gtggctggtttcaccagggttgaatgggac

SEQ ID NO: 250042 - DNA, 30 bp, Artificial Sequence
  Synthetic oligonucleotide
acactccctagatgaggaacaatctgggac

SEQ ID NO: 250043 - DNA, 30 bp, Artificial Sequence
  Synthetic oligonucleotide
aaaatctcggtacgccacttgacgtgggac

SEQ ID NO: 250044 - DNA, 30 bp, Artificial Sequence
  Synthetic oligonucleotide
cgccattaagagattcacgacccgtgggac

SEQ ID NO: 250045 - DNA, 30 bp, Artificial Sequence
  Synthetic oligonucleotide
catattttctcgttatgccataattgggac

SEQ ID NO: 250046 - DNA, 30 bp, Artificial Sequence
  Synthetic oligonucleotide
agtcgggtggtggcatcaaattgaatggac

SEQ ID NO: 250047 - DNA, 30 bp, Artificial Sequence
  Synthetic oligonucleotide
tcctatattcttatgccgctacgactggac

SEQ ID NO: 250048 - DNA, 30 bp, Artificial Sequence
  Synthetic oligonucleotide
atagtcacctgcgacggactccgactggac

SEQ ID NO: 250049 - DNA, 30 bp, Artificial Sequence
  Synthetic oligonucleotide
atcatgaatattcggtgagcttacctggac

SEQ ID NO: 250050 - DNA, 30 bp, Artificial Sequence
  Synthetic oligonucleotide
atataagacaccagttcgtgaatagtggac

SEQ ID NO: 250051 - DNA, 30 bp, Artificial Sequence
  Synthetic oligonucleotide
gctagatgatcaaatagttttaaggtggac

SEQ ID NO: 250052 - DNA, 30 bp, Artificial Sequence
  Synthetic oligonucleotide
atctagccatccgcaccattagaggtggac

SEQ ID NO: 250053 - DNA, 30 bp, Artificial Sequence
  Synthetic oligonucleotide
aagcgtacagtattatttgtcattgtggac

SEQ ID NO: 250054 - DNA, 30 bp, Artificial Sequence
  Synthetic oligonucleotide
tgttaagatgaatggcacccctaattggac

SEQ ID NO: 250055 - DNA, 30 bp, Artificial Sequence
  Synthetic oligonucleotide
ctatagtgtagagtaggcgttggattggac

SEQ ID NO: 250056 - DNA, 30 bp, Artificial Sequence
  Synthetic oligonucleotide
aagccgggcacggccacacagttattggac

SEQ ID NO: 250057 - DNA, 30 bp, Artificial Sequence
  Synthetic oligonucleotide
tgatatatcaggttgaagagggggttggac

SEQ ID NO: 250058 - DNA, 30 bp, Artificial Sequence
  Synthetic oligonucleotide
tgatggtggaatgctactattactttggac

SEQ ID NO: 250059 - DNA, 30 bp, Artificial Sequence
  Synthetic oligonucleotide
agcattaacaccacccagtgtcgtttggac

SEQ ID NO: 250060 - DNA, 30 bp, Artificial Sequence
  Synthetic oligonucleotide
ggttgatctggtttttctcggacgaatgac

SEQ ID NO: 250061 - DNA, 30 bp, Artificial Sequence
  Synthetic oligonucleotide
agccgtgtgcgatcaacgacaagtaatgac

SEQ ID NO: 250062 - DNA, 30 bp, Artificial Sequence
  Synthetic oligonucleotide
acctctattgcgtcagcatgtcttaatgac

SEQ ID NO: 250063 - DNA, 30 bp, Artificial Sequence
  Synthetic oligonucleotide
tccgtacattcgatggtatctggacatgac

SEQ ID NO: 250064 - DNA, 30 bp, Artificial Sequence
  Synthetic oligonucleotide
tgagtgacggtagaacccacgagtcatgac

SEQ ID NO: 250065 - DNA, 30 bp, Artificial Sequence
  Synthetic oligonucleotide
gcggccttggcccatatggcaagggatgac

SEQ ID NO: 250066 - DNA, 30 bp, Artificial Sequence
  Synthetic oligonucleotide
ctaggatggcttgcaacgactcgggatgac

SEQ ID NO: 250067 - DNA, 30 bp, Artificial Sequence
  Synthetic oligonucleotide
gaataatattccccgtatgcctgggatgac

SEQ ID NO: 250068 - DNA, 30 bp, Artificial Sequence
  Synthetic oligonucleotide
aatcaagccatttgaggcaatactgatgac

SEQ ID NO: 250069 - DNA, 30 bp, Artificial Sequence
  Synthetic oligonucleotide
cgagcgtgtgcacgtgtacttatatatgac

SEQ ID NO: 250070 - DNA, 30 bp, Artificial Sequence
  Synthetic oligonucleotide
gccacaaacaaggagttcctccgttatgac

SEQ ID NO: 250071 - DNA, 30 bp, Artificial Sequence
  Synthetic oligonucleotide
tggaaactggactaaggaaaactttatgac

SEQ ID NO: 250072 - DNA, 30 bp, Artificial Sequence
  Synthetic oligonucleotide
ctgtcggaaaatcgagattgagtttatgac

SEQ ID NO: 250073 - DNA, 30 bp, Artificial Sequence
  Synthetic oligonucleotide
gaaataacctttcgccaaagaagaactgac

SEQ ID NO: 250074 - DNA, 30 bp, Artificial Sequence
  Synthetic oligonucleotide
ggcaaatgggtctagggtggttacactgac

SEQ ID NO: 250075 - DNA, 30 bp, Artificial Sequence
  Synthetic oligonucleotide
ggcggagaaattaagaaaaagaccactgac

SEQ ID NO: 250076 - DNA, 30 bp, Artificial Sequence
  Synthetic oligonucleotide
ctatagagttcgtgtgatcaagccactgac

SEQ ID NO: 250077 - DNA, 30 bp, Artificial Sequence
  Synthetic oligonucleotide
tgacagtggcaataatctggcttcactgac

SEQ ID NO: 250078 - DNA, 30 bp, Artificial Sequence
  Synthetic oligonucleotide
gagatctgtgagaagttgttagagactgac

SEQ ID NO: 250079 - DNA, 30 bp, Artificial Sequence
  Synthetic oligonucleotide
cggccgttgacgacagaggttccgactgac

SEQ ID NO: 250080 - DNA, 30 bp, Artificial Sequence
  Synthetic oligonucleotide
agatgagccatgcgcgtccccagtactgac

SEQ ID NO: 250081 - DNA, 30 bp, Artificial Sequence
  Synthetic oligonucleotide
ctagggcccgtttgcctttcaggtactgac

SEQ ID NO: 250082 - DNA, 30 bp, Artificial Sequence
  Synthetic oligonucleotide
gaatgtaccggttccctagggcgccctgac

SEQ ID NO: 250083 - DNA, 30 bp, Artificial Sequence
  Synthetic oligonucleotide
ataggaggttccctggtggcgtgccctgac

SEQ ID NO: 250084 - DNA, 30 bp, Artificial Sequence
  Synthetic oligonucleotide
agttacactgtcatcttgggattccctgac

SEQ ID NO: 250085 - DNA, 30 bp, Artificial Sequence
  Synthetic oligonucleotide
gacatatcgtatttacagtcagatcctgac

SEQ ID NO: 250086 - DNA, 30 bp, Artificial Sequence
  Synthetic oligonucleotide
agtgatcatctgaacactaagaaagctgac

SEQ ID NO: 250087 - DNA, 30 bp, Artificial Sequence
  Synthetic oligonucleotide
atacccactattctatctcacaccgctgac

SEQ ID NO: 250088 - DNA, 30 bp, Artificial Sequence
  Synthetic oligonucleotide
gaagggagcgtctttaagagaacggctgac

SEQ ID NO: 250089 - DNA, 30 bp, Artificial Sequence
  Synthetic oligonucleotide
gcggaaaaggtgaaaagtgtttgatctgac

SEQ ID NO: 250090 - DNA, 30 bp, Artificial Sequence
  Synthetic oligonucleotide
atgctttgggaaggaggtggtcggtctgac

SEQ ID NO: 250091 - DNA, 30 bp, Artificial Sequence
  Synthetic oligonucleotide
acgatggaaaccgagatggtgttgtctgac

SEQ ID NO: 250092 - DNA, 30 bp, Artificial Sequence
  Synthetic oligonucleotide
tttgcaaacagaaaattatgagcaagtgac

SEQ ID NO: 250093 - DNA, 30 bp, Artificial Sequence
  Synthetic oligonucleotide
taggtttagtccccttgaggagtcagtgac

SEQ ID NO: 250094 - DNA, 30 bp, Artificial Sequence
  Synthetic oligonucleotide
tgacacgtagtggtccttgcacggagtgac

SEQ ID NO: 250095 - DNA, 30 bp, Artificial Sequence
  Synthetic oligonucleotide
tatctaacacagcgaccgtatgtgagtgac

SEQ ID NO: 250096 - DNA, 30 bp, Artificial Sequence
  Synthetic oligonucleotide
atagcgatcggataaggtattgttagtgac

SEQ ID NO: 250097 - DNA, 30 bp, Artificial Sequence
  Synthetic oligonucleotide
gctagaagtcctcgaattctcatacgtgac

SEQ ID NO: 250098 - DNA, 30 bp, Artificial Sequence
  Synthetic oligonucleotide
catagatccgataagttagacacccgtgac

SEQ ID NO: 250099 - DNA, 30 bp, Artificial Sequence
  Synthetic oligonucleotide
aacgtccaaggggatacccaagtccgtgac

SEQ ID NO: 250100 - DNA, 30 bp, Artificial Sequence
  Synthetic oligonucleotide
cgacgcatcgcacaaggtgttgtccgtgac

SEQ ID NO: 250101 - DNA, 30 bp, Artificial Sequence
  Synthetic oligonucleotide
ggaattgcgaattactggcctttccgtgac

SEQ ID NO: 250102 - DNA, 30 bp, Artificial Sequence
  Synthetic oligonucleotide
accatatcccttctccgaggaacgcgtgac

SEQ ID NO: 250103 - DNA, 30 bp, Artificial Sequence
  Synthetic oligonucleotide
ctagttgctgcgctgctcattcttcgtgac

SEQ ID NO: 250104 - DNA, 30 bp, Artificial Sequence
  Synthetic oligonucleotide
acgtgtttcgtggatcgagtttaaggtgac

SEQ ID NO: 250105 - DNA, 30 bp, Artificial Sequence
  Synthetic oligonucleotide
gataggggaaaagtatctaagcacggtgac

SEQ ID NO: 250106 - DNA, 30 bp, Artificial Sequence
  Synthetic oligonucleotide
tgatcgcgaacatcctcaaccgggggtgac

SEQ ID NO: 250107 - DNA, 30 bp, Artificial Sequence
  Synthetic oligonucleotide
cccccataataggccagtccgcatggtgac

SEQ ID NO: 250108 - DNA, 30 bp, Artificial Sequence
  Synthetic oligonucleotide
aaaagcttaactgaagctccgcgtggtgac

SEQ ID NO: 250109 - DNA, 30 bp, Artificial Sequence
  Synthetic oligonucleotide
ggtaaacgcttgccgccgccatactgtgac

SEQ ID NO: 250110 - DNA, 30 bp, Artificial Sequence
  Synthetic oligonucleotide
agaacatgtttaagaaagaatacctgtgac

SEQ ID NO: 250111 - DNA, 30 bp, Artificial Sequence
  Synthetic oligonucleotide
gaacgggccacaaaacgagatatctgtgac

SEQ ID NO: 250112 - DNA, 30 bp, Artificial Sequence
  Synthetic oligonucleotide
cccatgtggataaagcatgtgtaaattgac

SEQ ID NO: 250113 - DNA, 30 bp, Artificial Sequence
  Synthetic oligonucleotide
gcgtatacagatccatgatccatcattgac

SEQ ID NO: 250114 - DNA, 30 bp, Artificial Sequence
  Synthetic oligonucleotide
tagagcacggtcgagcaatcggagattgac

SEQ ID NO: 250115 - DNA, 30 bp, Artificial Sequence
  Synthetic oligonucleotide
agaaacggaatttccgggtagtcacttgac

SEQ ID NO: 250116 - DNA, 30 bp, Artificial Sequence
  Synthetic oligonucleotide
catggtagtttaagacctgctgcgcttgac

SEQ ID NO: 250117 - DNA, 30 bp, Artificial Sequence
  Synthetic oligonucleotide
gtaatcctcaaactcatagtatggcttgac

SEQ ID NO: 250118 - DNA, 30 bp, Artificial Sequence
  Synthetic oligonucleotide
tttctaatgccaaatcgatagtctcttgac

SEQ ID NO: 250119 - DNA, 30 bp, Artificial Sequence
  Synthetic oligonucleotide
gtggttcctcgtcagcctccagcagttgac

SEQ ID NO: 250120 - DNA, 30 bp, Artificial Sequence
  Synthetic oligonucleotide
cgcacaaaaccggaaggggacgcggttgac

SEQ ID NO: 250121 - DNA, 30 bp, Artificial Sequence
  Synthetic oligonucleotide
ggagttatgaaaaatgcctagaatgttgac

SEQ ID NO: 250122 - DNA, 30 bp, Artificial Sequence
  Synthetic oligonucleotide
aaatgaaaggcaacacttacccgtgttgac

SEQ ID NO: 250123 - DNA, 30 bp, Artificial Sequence
  Synthetic oligonucleotide
caaaccgtgcacctctgcctgggatttgac

SEQ ID NO: 250124 - DNA, 30 bp, Artificial Sequence
  Synthetic oligonucleotide
gatctgaggtagtaacaaatagtatttgac

SEQ ID NO: 250125 - DNA, 30 bp, Artificial Sequence
  Synthetic oligonucleotide
agctccagttgagtgctcccgcagtttgac

SEQ ID NO: 250126 - DNA, 30 bp, Artificial Sequence
  Synthetic oligonucleotide
gatggagacggcaaagctgcacggtttgac

SEQ ID NO: 250127 - DNA, 31 bp, Artificial Sequence
  Synthetic oligonucleotide
gttagtcgggaagttagatatgaaaaaatac

SEQ ID NO: 250128 - DNA, 30 bp, Artificial Sequence
  Synthetic oligonucleotide
tttgagcactatgtggatcccgaaaaatac

SEQ ID NO: 250129 - DNA, 30 bp, Artificial Sequence
  Synthetic oligonucleotide
aatggcgattgcgcagatgcgccaaaatac

SEQ ID NO: 250130 - DNA, 30 bp, Artificial Sequence
  Synthetic oligonucleotide
cgtaagtttcggtataagatctcaaaatac

SEQ ID NO: 250131 - DNA, 30 bp, Artificial Sequence
  Synthetic oligonucleotide
taagagccgggcacggaacgctgtaaatac

SEQ ID NO: 250132 - DNA, 30 bp, Artificial Sequence
  Synthetic oligonucleotide
agaactgtacatttgatgacttaacaatac

SEQ ID NO: 250133 - DNA, 30 bp, Artificial Sequence
  Synthetic oligonucleotide
aacacagtgggaaagcttataaaccaatac

SEQ ID NO: 250134 - DNA, 30 bp, Artificial Sequence
  Synthetic oligonucleotide
gtgtggaaaccatcacgtatcaggcaatac

SEQ ID NO: 250135 - DNA, 30 bp, Artificial Sequence
  Synthetic oligonucleotide
agtgccctacttccccaccgttggcaatac

SEQ ID NO: 250136 - DNA, 30 bp, Artificial Sequence
  Synthetic oligonucleotide
agaacccggtgtgcaaaagcttctcaatac

SEQ ID NO: 250137 - DNA, 30 bp, Artificial Sequence
  Synthetic oligonucleotide
cagtacactcacgagaccttaattcaatac

SEQ ID NO: 250138 - DNA, 30 bp, Artificial Sequence
  Synthetic oligonucleotide
tgcaacaataacgtattccaggcagaatac

SEQ ID NO: 250139 - DNA, 30 bp, Artificial Sequence
  Synthetic oligonucleotide
ccctagtataagatggtgttgggagaatac

SEQ ID NO: 250140 - DNA, 30 bp, Artificial Sequence
  Synthetic oligonucleotide
gtgcccccgcggcgtgtggcgtacgaatac

SEQ ID NO: 250141 - DNA, 30 bp, Artificial Sequence
  Synthetic oligonucleotide
tttgcatgaatagatgacccaagcgaatac

SEQ ID NO: 250142 - DNA, 30 bp, Artificial Sequence
  Synthetic oligonucleotide
acaattgcttctaggagaccgagtgaatac

SEQ ID NO: 250143 - DNA, 30 bp, Artificial Sequence
  Synthetic oligonucleotide
ttcgaaccgggtctgtctgtggaataatac

SEQ ID NO: 250144 - DNA, 30 bp, Artificial Sequence
  Synthetic oligonucleotide
gcgaaaataatctagacaagttcataatac

SEQ ID NO: 250145 - DNA, 30 bp, Artificial Sequence
  Synthetic oligonucleotide
aagaacagctgaaaaacttacaggtaatac

SEQ ID NO: 250146 - DNA, 30 bp, Artificial Sequence
  Synthetic oligonucleotide
gaacgaaatcaaacggcgcagaattaatac

SEQ ID NO: 250147 - DNA, 30 bp, Artificial Sequence
  Synthetic oligonucleotide
tcaaagagtgcgcgtggtattggttaatac

SEQ ID NO: 250148 - DNA, 30 bp, Artificial Sequence
  Synthetic oligonucleotide
taagatcctgcacatgcaaattaaacatac

SEQ ID NO: 250149 - DNA, 30 bp, Artificial Sequence
  Synthetic oligonucleotide
ggccggacctggagatcggttatcacatac

SEQ ID NO: 250150 - DNA, 30 bp, Artificial Sequence
  Synthetic oligonucleotide
cggttccggataaaggggagtcagacatac

SEQ ID NO: 250151 - DNA, 30 bp, Artificial Sequence
  Synthetic oligonucleotide
gaacctcaaggctaatttccagatacatac

SEQ ID NO: 250152 - DNA, 30 bp, Artificial Sequence
  Synthetic oligonucleotide
agtaatctgcaccctcgtacatttacatac

SEQ ID NO: 250153 - DNA, 30 bp, Artificial Sequence
  Synthetic oligonucleotide
accatgctcataggaggcatgtcaccatac

SEQ ID NO: 250154 - DNA, 30 bp, Artificial Sequence
  Synthetic oligonucleotide
tcttatttcacagcgcctcgttgcccatac

SEQ ID NO: 250155 - DNA, 30 bp, Artificial Sequence
  Synthetic oligonucleotide
gccgatgtcaccgagtgtgatcaagcatac

SEQ ID NO: 250156 - DNA, 30 bp, Artificial Sequence
  Synthetic oligonucleotide
gcatgtattcgtgcaatcgagtcagcatac

SEQ ID NO: 250157 - DNA, 30 bp, Artificial Sequence
  Synthetic oligonucleotide
ggggccctcagtcggcgatcaggagcatac

SEQ ID NO: 250158 - DNA, 30 bp, Artificial Sequence
  Synthetic oligonucleotide
ataggtaattcggcggccttatgcgcatac

SEQ ID NO: 250159 - DNA, 30 bp, Artificial Sequence
  Synthetic oligonucleotide
ctacataaaagctctgacatgctcgcatac

SEQ ID NO: 250160 - DNA, 30 bp, Artificial Sequence
  Synthetic oligonucleotide
gtatcaaacttgcaggccacagctgcatac

SEQ ID NO: 250161 - DNA, 30 bp, Artificial Sequence
  Synthetic oligonucleotide
aagctactgcacacgtgagtttttgcatac

SEQ ID NO: 250162 - DNA, 30 bp, Artificial Sequence
  Synthetic oligonucleotide
tctcagttgcctccctagttagagtcatac

SEQ ID NO: 250163 - DNA, 30 bp, Artificial Sequence
  Synthetic oligonucleotide
gtgaaaccaggagggccatacatgtcatac

SEQ ID NO: 250164 - DNA, 30 bp, Artificial Sequence
  Synthetic oligonucleotide
cgcgggaatgccatctagcagataagatac

SEQ ID NO: 250165 - DNA, 30 bp, Artificial Sequence
  Synthetic oligonucleotide
ctcgaaacgtcgactttgatccttagatac

SEQ ID NO: 250166 - DNA, 30 bp, Artificial Sequence
  Synthetic oligonucleotide
gtacagtcccccccttcggttgttagatac

SEQ ID NO: 250167 - DNA, 30 bp, Artificial Sequence
  Synthetic oligonucleotide
ccaactgagagctctcgtgataaacgatac

SEQ ID NO: 250168 - DNA, 30 bp, Artificial Sequence
  Synthetic oligonucleotide
agactaatctctatcctgttgaatcgatac

SEQ ID NO: 250169 - DNA, 30 bp, Artificial Sequence
  Synthetic oligonucleotide
gggttaaggtttttgaaataagatcgatac

SEQ ID NO: 250170 - DNA, 30 bp, Artificial Sequence
  Synthetic oligonucleotide
gtagtcttggaaaatcggtgatctcgatac

SEQ ID NO: 250171 - DNA, 30 bp, Artificial Sequence
  Synthetic oligonucleotide
ggactatcacctgtttgaaccagaggatac

SEQ ID NO: 250172 - DNA, 30 bp, Artificial Sequence
  Synthetic oligonucleotide
tccaatagcccgaggcggatacgcggatac

SEQ ID NO: 250173 - DNA, 30 bp, Artificial Sequence
  Synthetic oligonucleotide
gggctctgcgtcaacgatttcttcggatac

SEQ ID NO: 250174 - DNA, 30 bp, Artificial Sequence
  Synthetic oligonucleotide
ttttaggttaaatccaacactttcggatac

SEQ ID NO: 250175 - DNA, 30 bp, Artificial Sequence
  Synthetic oligonucleotide
gccgcctagtaagatctagcgtgtggatac

SEQ ID NO: 250176 - DNA, 30 bp, Artificial Sequence
  Synthetic oligonucleotide
tacacattgaaggacttgtgatcatgatac

SEQ ID NO: 250177 - DNA, 30 bp, Artificial Sequence
  Synthetic oligonucleotide
atgcttggaataaaagcgcattgatgatac

SEQ ID NO: 250178 - DNA, 30 bp, Artificial Sequence
  Synthetic oligonucleotide
taacccatttccgatactcctatatgatac

SEQ ID NO: 250179 - DNA, 30 bp, Artificial Sequence
  Synthetic oligonucleotide
ggtaaatttggaccatgccaaccgtgatac

SEQ ID NO: 250180 - DNA, 30 bp, Artificial Sequence
  Synthetic oligonucleotide
gaagcgtgcgggtcagggcataattgatac

SEQ ID NO: 250181 - DNA, 30 bp, Artificial Sequence
  Synthetic oligonucleotide
agaaattaaggcgttaatgacagttgatac

SEQ ID NO: 250182 - DNA, 30 bp, Artificial Sequence
  Synthetic oligonucleotide
actgcggaatggagggcatggaaaatatac

SEQ ID NO: 250183 - DNA, 30 bp, Artificial Sequence
  Synthetic oligonucleotide
caacagccgattctgcgggtaaacatatac

SEQ ID NO: 250184 - DNA, 30 bp, Artificial Sequence
  Synthetic oligonucleotide
catcagctaccaaacgtcacctccatatac

SEQ ID NO: 250185 - DNA, 30 bp, Artificial Sequence
  Synthetic oligonucleotide
tcggcccggccatttcagagagagatatac

SEQ ID NO: 250186 - DNA, 30 bp, Artificial Sequence
  Synthetic oligonucleotide
gaaggaggttttcataggcgtgagatatac

SEQ ID NO: 250187 - DNA, 30 bp, Artificial Sequence
  Synthetic oligonucleotide
gcgccaagagacgtgtgctgatggatatac

SEQ ID NO: 250188 - DNA, 30 bp, Artificial Sequence
  Synthetic oligonucleotide
aatcatgagtatacagatctaggactatac

SEQ ID NO: 250189 - DNA, 30 bp, Artificial Sequence
  Synthetic oligonucleotide
acaaatttacgggcgtttgtggggctatac

SEQ ID NO: 250190 - DNA, 30 bp, Artificial Sequence
  Synthetic oligonucleotide
agcagtggacacaatagttaattgctatac

SEQ ID NO: 250191 - DNA, 30 bp, Artificial Sequence
  Synthetic oligonucleotide
tagtatcgcgattggtctcggacagtatac

SEQ ID NO: 250192 - DNA, 30 bp, Artificial Sequence
  Synthetic oligonucleotide
cgaacgggttaacggaatagttacgtatac

SEQ ID NO: 250193 - DNA, 30 bp, Artificial Sequence
  Synthetic oligonucleotide
taggatggtgtgtatattttttacgtatac

SEQ ID NO: 250194 - DNA, 30 bp, Artificial Sequence
  Synthetic oligonucleotide
acctgtgcaagaacattagggaaggtatac

SEQ ID NO: 250195 - DNA, 30 bp, Artificial Sequence
  Synthetic oligonucleotide
aaagggtgcttgggtccagattcggtatac

SEQ ID NO: 250196 - DNA, 30 bp, Artificial Sequence
  Synthetic oligonucleotide
atatgtggtacacggcttagtgcattatac

SEQ ID NO: 250197 - DNA, 30 bp, Artificial Sequence
  Synthetic oligonucleotide
tattataccatgtgataaagttcattatac

SEQ ID NO: 250198 - DNA, 30 bp, Artificial Sequence
  Synthetic oligonucleotide
ttttaaccaaatcatagactagggttatac

SEQ ID NO: 250199 - DNA, 30 bp, Artificial Sequence
  Synthetic oligonucleotide
cgcagaaggacttggagtagcggaaactac

SEQ ID NO: 250200 - DNA, 30 bp, Artificial Sequence
  Synthetic oligonucleotide
cgaaaagaccaaaaagcgtccgtaaactac

SEQ ID NO: 250201 - DNA, 30 bp, Artificial Sequence
  Synthetic oligonucleotide
aggcgttagagtctcgtgatcggcaactac

SEQ ID NO: 250202 - DNA, 30 bp, Artificial Sequence
  Synthetic oligonucleotide
tgctctagttgctggaaacgccggaactac

SEQ ID NO: 250203 - DNA, 30 bp, Artificial Sequence
  Synthetic oligonucleotide
tacgttgtaagatctaggctcaataactac

SEQ ID NO: 250204 - DNA, 30 bp, Artificial Sequence
  Synthetic oligonucleotide
gaacattcttcttctaaacgccataactac

SEQ ID NO: 250205 - DNA, 30 bp, Artificial Sequence
  Synthetic oligonucleotide
gccctcccttcagaatatgccgttaactac

SEQ ID NO: 250206 - DNA, 30 bp, Artificial Sequence
  Synthetic oligonucleotide
tgagtcaaaattctagcgtatagacactac

SEQ ID NO: 250207 - DNA, 30 bp, Artificial Sequence
  Synthetic oligonucleotide
catcctttgactatggtcacctgacactac

SEQ ID NO: 250208 - DNA, 30 bp, Artificial Sequence
  Synthetic oligonucleotide
ggattgcgtatctatctggggttacactac

SEQ ID NO: 250209 - DNA, 30 bp, Artificial Sequence
  Synthetic oligonucleotide
tagtatggcgtgaaattcattcaccactac

SEQ ID NO: 250210 - DNA, 30 bp, Artificial Sequence
  Synthetic oligonucleotide
cgcaaatgcgtcaagtgccaacgccactac

SEQ ID NO: 250211 - DNA, 30 bp, Artificial Sequence
  Synthetic oligonucleotide
tctttcctaacactgatttcgggccactac

SEQ ID NO: 250212 - DNA, 30 bp, Artificial Sequence
  Synthetic oligonucleotide
atactatgctgtttacgaaggatgcactac

SEQ ID NO: 250213 - DNA, 30 bp, Artificial Sequence
  Synthetic oligonucleotide
ccttgattcgattcttatcgttaagactac

SEQ ID NO: 250214 - DNA, 30 bp, Artificial Sequence
  Synthetic oligonucleotide
gtgggtaaaagtacgttccatcgcgactac

SEQ ID NO: 250215 - DNA, 30 bp, Artificial Sequence
  Synthetic oligonucleotide
aactttagatggtgcattatttgcgactac

SEQ ID NO: 250216 - DNA, 30 bp, Artificial Sequence
  Synthetic oligonucleotide
aaaatctgcctagcgtagtattcggactac

SEQ ID NO: 250217 - DNA, 30 bp, Artificial Sequence
  Synthetic oligonucleotide
acgcctctttacgcgtggttggactactac

SEQ ID NO: 250218 - DNA, 30 bp, Artificial Sequence
  Synthetic oligonucleotide
tggtaaagcactaacaccttatcctactac

SEQ ID NO: 250219 - DNA, 30 bp, Artificial Sequence
  Synthetic oligonucleotide
cctaacgacatgaccaccggcgtgtactac

SEQ ID NO: 250220 - DNA, 30 bp, Artificial Sequence
  Synthetic oligonucleotide
agcagaacccaccggcaggggttcacctac

SEQ ID NO: 250221 - DNA, 30 bp, Artificial Sequence
  Synthetic oligonucleotide
cagtagaccaaccacagtcactccccctac

SEQ ID NO: 250222 - DNA, 30 bp, Artificial Sequence
  Synthetic oligonucleotide
ttcttcgggcggtgtgacgtgtcagcctac

SEQ ID NO: 250223 - DNA, 30 bp, Artificial Sequence
  Synthetic oligonucleotide
tgcggatctgaactccatcttcctgcctac

SEQ ID NO: 250224 - DNA, 30 bp, Artificial Sequence
  Synthetic oligonucleotide
ggagatgaatctaggtcgtaatcatcctac

SEQ ID NO: 250225 - DNA, 30 bp, Artificial Sequence
  Synthetic oligonucleotide
taagacgttggattggttccggactcctac

SEQ ID NO: 250226 - DNA, 30 bp, Artificial Sequence
  Synthetic oligonucleotide
agagttcacacatgctgaatcacctcctac

SEQ ID NO: 250227 - DNA, 30 bp, Artificial Sequence
  Synthetic oligonucleotide
gtgattaatagacaggctagcgtgtcctac

SEQ ID NO: 250228 - DNA, 30 bp, Artificial Sequence
  Synthetic oligonucleotide
tacgccttaaccggaatttctaaaagctac

SEQ ID NO: 250229 - DNA, 30 bp, Artificial Sequence
  Synthetic oligonucleotide
acggattgcttttcccaccggacaagctac

SEQ ID NO: 250230 - DNA, 30 bp, Artificial Sequence
  Synthetic oligonucleotide
gacacgcgaccgattagcacgcccagctac

SEQ ID NO: 250231 - DNA, 30 bp, Artificial Sequence
  Synthetic oligonucleotide
cggaaggggggccaaagttcaggtagctac

SEQ ID NO: 250232 - DNA, 30 bp, Artificial Sequence
  Synthetic oligonucleotide
tccacggagaagtgcgctttgggtagctac

SEQ ID NO: 250233 - DNA, 30 bp, Artificial Sequence
  Synthetic oligonucleotide
tcaacggttgtgcactgcacagcccgctac

SEQ ID NO: 250234 - DNA, 30 bp, Artificial Sequence
  Synthetic oligonucleotide
aactgtacacagtcatattgcatgcgctac

SEQ ID NO: 250235 - DNA, 30 bp, Artificial Sequence
  Synthetic oligonucleotide
tttaaactgtaaagtcacggtacaggctac

SEQ ID NO: 250236 - DNA, 30 bp, Artificial Sequence
  Synthetic oligonucleotide
cacggattttctgagtggtataccggctac

SEQ ID NO: 250237 - DNA, 30 bp, Artificial Sequence
  Synthetic oligonucleotide
ttagcgcgcacgcaaatatgttgcggctac

SEQ ID NO: 250238 - DNA, 30 bp, Artificial Sequence
  Synthetic oligonucleotide
tccattggtcaaatggggtgcatcggctac

SEQ ID NO: 250239 - DNA, 30 bp, Artificial Sequence
  Synthetic oligonucleotide
acaatactcgttaccgtaacagggggctac

SEQ ID NO: 250240 - DNA, 30 bp, Artificial Sequence
  Synthetic oligonucleotide
atctcccctactcggagtgaatatggctac

SEQ ID NO: 250241 - DNA, 30 bp, Artificial Sequence
  Synthetic oligonucleotide
taggggatgctggatcaccagcgatgctac

SEQ ID NO: 250242 - DNA, 30 bp, Artificial Sequence
  Synthetic oligonucleotide
ggttacctagggatcctgagacactgctac

SEQ ID NO: 250243 - DNA, 30 bp, Artificial Sequence
  Synthetic oligonucleotide
tacagcccgatcggggatcgacactgctac

SEQ ID NO: 250244 - DNA, 30 bp, Artificial Sequence
  Synthetic oligonucleotide
ttacgtccccgaaggttatcggcgtgctac

SEQ ID NO: 250245 - DNA, 30 bp, Artificial Sequence
  Synthetic oligonucleotide
tcgaaacgcccaagggtaaacgtttgctac

SEQ ID NO: 250246 - DNA, 30 bp, Artificial Sequence
  Synthetic oligonucleotide
gagctgtactgagaaccacgatagatctac

SEQ ID NO: 250247 - DNA, 30 bp, Artificial Sequence
  Synthetic oligonucleotide
acgttcgctgttcacgggctttcgatctac

SEQ ID NO: 250248 - DNA, 30 bp, Artificial Sequence
  Synthetic oligonucleotide
gggagcatccgggcgtacataaatatctac

SEQ ID NO: 250249 - DNA, 30 bp, Artificial Sequence
  Synthetic oligonucleotide
gagatatctcaaatccaagtctgcctctac

SEQ ID NO: 250250 - DNA, 30 bp, Artificial Sequence
  Synthetic oligonucleotide
acttggtattagcttgcgaatggtctctac

SEQ ID NO: 250251 - DNA, 30 bp, Artificial Sequence
  Synthetic oligonucleotide
agcttgacgtcccctccttgaaaagtctac

SEQ ID NO: 250252 - DNA, 30 bp, Artificial Sequence
  Synthetic oligonucleotide
tcatgaagccttcataatcgcgcagtctac

SEQ ID NO: 250253 - DNA, 31 bp, Artificial Sequence
  Synthetic oligonucleotide
caaaatcacactgtatcctacacctgtctac

SEQ ID NO: 250254 - DNA, 30 bp, Artificial Sequence
  Synthetic oligonucleotide
tcgtctgatctgcctcaggtacaattctac

SEQ ID NO: 250255 - DNA, 30 bp, Artificial Sequence
  Synthetic oligonucleotide
ctgtatggagagatcaggtagtcgttctac

SEQ ID NO: 250256 - DNA, 30 bp, Artificial Sequence
  Synthetic oligonucleotide
taaccataagcggcataatagaggttctac

SEQ ID NO: 250257 - DNA, 30 bp, Artificial Sequence
  Synthetic oligonucleotide
aatagtctgcgacaagcttgtttgttctac

SEQ ID NO: 250258 - DNA, 30 bp, Artificial Sequence
  Synthetic oligonucleotide
cacaggagaaccaagcaatgtcgtttctac

SEQ ID NO: 250259 - DNA, 30 bp, Artificial Sequence
  Synthetic oligonucleotide
ctgtttcgtgaaagcgcgcgtttaaagtac

SEQ ID NO: 250260 - DNA, 30 bp, Artificial Sequence
  Synthetic oligonucleotide
cagtccgagtccctcgggaacgggaagtac

SEQ ID NO: 250261 - DNA, 30 bp, Artificial Sequence
  Synthetic oligonucleotide
agctttgtgtgcaaagagggttggaagtac

SEQ ID NO: 250262 - DNA, 30 bp, Artificial Sequence
  Synthetic oligonucleotide
gtgagactggataaaaggagcgtgaagtac

SEQ ID NO: 250263 - DNA, 30 bp, Artificial Sequence
  Synthetic oligonucleotide
cctaaactcggggtttaggtcttgaagtac

SEQ ID NO: 250264 - DNA, 30 bp, Artificial Sequence
  Synthetic oligonucleotide
gtcacacttggaaaatagatgtataagtac

SEQ ID NO: 250265 - DNA, 30 bp, Artificial Sequence
  Synthetic oligonucleotide
gggaaggttgtttgttgttctcttaagtac

SEQ ID NO: 250266 - DNA, 30 bp, Artificial Sequence
  Synthetic oligonucleotide
ctattactacggatattcggtgttaagtac

SEQ ID NO: 250267 - DNA, 30 bp, Artificial Sequence
  Synthetic oligonucleotide
ccaccaatcgccatgcgcggagtacagtac

SEQ ID NO: 250268 - DNA, 30 bp, Artificial Sequence
  Synthetic oligonucleotide
agttgcccgtaacttactagctaccagtac

SEQ ID NO: 250269 - DNA, 30 bp, Artificial Sequence
  Synthetic oligonucleotide
agactttgttaagggctcataccagagtac

SEQ ID NO: 250270 - DNA, 30 bp, Artificial Sequence
  Synthetic oligonucleotide
ccggtagattgtgctgaagttctagagtac

SEQ ID NO: 250271 - DNA, 30 bp, Artificial Sequence
  Synthetic oligonucleotide
ggatctgatcggggctagcccgccgagtac

SEQ ID NO: 250272 - DNA, 30 bp, Artificial Sequence
  Synthetic oligonucleotide
tatgtcaacacatgattagctatcgagtac

SEQ ID NO: 250273 - DNA, 30 bp, Artificial Sequence
  Synthetic oligonucleotide
cccccaacgatgctgacaggacaggagtac

SEQ ID NO: 250274 - DNA, 30 bp, Artificial Sequence
  Synthetic oligonucleotide
cggcaccttaccggtaatcatggggagtac

SEQ ID NO: 250275 - DNA, 30 bp, Artificial Sequence
  Synthetic oligonucleotide
atgggtgtaggcattcttggggttgagtac

SEQ ID NO: 250276 - DNA, 30 bp, Artificial Sequence
  Synthetic oligonucleotide
gacttgagagagtggcgggaatttgagtac

SEQ ID NO: 250277 - DNA, 30 bp, Artificial Sequence
  Synthetic oligonucleotide
aagtcccgtctacccgcctatatctagtac

SEQ ID NO: 250278 - DNA, 30 bp, Artificial Sequence
  Synthetic oligonucleotide
gttgacttcatgggtataataaggtagtac

SEQ ID NO: 250279 - DNA, 30 bp, Artificial Sequence
  Synthetic oligonucleotide
agccaaaagtggtacgcgacagggtagtac

SEQ ID NO: 250280 - DNA, 30 bp, Artificial Sequence
  Synthetic oligonucleotide
ccaggcacttcggcaatcgtgtggtagtac

SEQ ID NO: 250281 - DNA, 30 bp, Artificial Sequence
  Synthetic oligonucleotide
tgggggtagacagcggccccaggttagtac

SEQ ID NO: 250282 - DNA, 30 bp, Artificial Sequence
  Synthetic oligonucleotide
gaacgactagccataacgggtaccacgtac

SEQ ID NO: 250283 - DNA, 30 bp, Artificial Sequence
  Synthetic oligonucleotide
cggaactcatggatttgcaggtagacgtac

SEQ ID NO: 250284 - DNA, 30 bp, Artificial Sequence
  Synthetic oligonucleotide
agtagtagggcggaccgcagcgcgacgtac

SEQ ID NO: 250285 - DNA, 30 bp, Artificial Sequence
  Synthetic oligonucleotide
ggaacaccgcatgtatctagtatgacgtac

SEQ ID NO: 250286 - DNA, 30 bp, Artificial Sequence
  Synthetic oligonucleotide
ctcgtgacagggtgacccgcttagccgtac

SEQ ID NO: 250287 - DNA, 30 bp, Artificial Sequence
  Synthetic oligonucleotide
ttgcattcagaacgtcgacccgatccgtac

SEQ ID NO: 250288 - DNA, 30 bp, Artificial Sequence
  Synthetic oligonucleotide
catcgaacaagcagtgttacgtatccgtac

SEQ ID NO: 250289 - DNA, 30 bp, Artificial Sequence
  Synthetic oligonucleotide
agggtgagtgtttgaagtatgattccgtac

SEQ ID NO: 250290 - DNA, 30 bp, Artificial Sequence
  Synthetic oligonucleotide
ttataaaaacgcggatcatcgatagcgtac

SEQ ID NO: 250291 - DNA, 30 bp, Artificial Sequence
  Synthetic oligonucleotide
cgccgaggcgatagatgtacctatgcgtac

SEQ ID NO: 250292 - DNA, 30 bp, Artificial Sequence
  Synthetic oligonucleotide
gcagcgtgaagggcaaggacggttgcgtac

SEQ ID NO: 250293 - DNA, 30 bp, Artificial Sequence
  Synthetic oligonucleotide
cataatagctgtaggaacaagtgatcgtac

SEQ ID NO: 250294 - DNA, 30 bp, Artificial Sequence
  Synthetic oligonucleotide
gtagcctatagaatagctgttcgctcgtac

SEQ ID NO: 250295 - DNA, 30 bp, Artificial Sequence
  Synthetic oligonucleotide
tgtggtggaagctacaatagaggctcgtac

SEQ ID NO: 250296 - DNA, 30 bp, Artificial Sequence
  Synthetic oligonucleotide
tcatcctaatatgggttgtttgggtcgtac

SEQ ID NO: 250297 - DNA, 30 bp, Artificial Sequence
  Synthetic oligonucleotide
tgtcagtttataatgcgagtgttgtcgtac

SEQ ID NO: 250298 - DNA, 30 bp, Artificial Sequence
  Synthetic oligonucleotide
ttggtgcagtgagaaggagggatttcgtac

SEQ ID NO: 250299 - DNA, 30 bp, Artificial Sequence
  Synthetic oligonucleotide
agatcggtcaggggacggtgccacaggtac

SEQ ID NO: 250300 - DNA, 30 bp, Artificial Sequence
  Synthetic oligonucleotide
cgctaaagcgtggagagtccgtccaggtac

SEQ ID NO: 250301 - DNA, 30 bp, Artificial Sequence
  Synthetic oligonucleotide
gggttggttagtgatgtaactcgcaggtac

SEQ ID NO: 250302 - DNA, 30 bp, Artificial Sequence
  Synthetic oligonucleotide
attatgcgccggatcatgatggtcaggtac

SEQ ID NO: 250303 - DNA, 30 bp, Artificial Sequence
  Synthetic oligonucleotide
aaacggccacttgaattgaaaacgaggtac

SEQ ID NO: 250304 - DNA, 30 bp, Artificial Sequence
  Synthetic oligonucleotide
actttcgtaacataaaggacatggaggtac

SEQ ID NO: 250305 - DNA, 30 bp, Artificial Sequence
  Synthetic oligonucleotide
ggtgccagcgtttgactataccataggtac

SEQ ID NO: 250306 - DNA, 30 bp, Artificial Sequence
  Synthetic oligonucleotide
cgtgacaggagcacgcttcaagctaggtac

SEQ ID NO: 250307 - DNA, 30 bp, Artificial Sequence
  Synthetic oligonucleotide
tgacactaataacagatctttagacggtac

SEQ ID NO: 250308 - DNA, 30 bp, Artificial Sequence
  Synthetic oligonucleotide
tggagtgatcgggtctctgagaaccggtac

SEQ ID NO: 250309 - DNA, 30 bp, Artificial Sequence
  Synthetic oligonucleotide
acgcgattgctccccgattttaaccggtac

SEQ ID NO: 250310 - DNA, 30 bp, Artificial Sequence
  Synthetic oligonucleotide
aactatatagctaggtatgcttagcggtac

SEQ ID NO: 250311 - DNA, 30 bp, Artificial Sequence
  Synthetic oligonucleotide
tactctggtagtatatagagtagtcggtac

SEQ ID NO: 250312 - DNA, 30 bp, Artificial Sequence
  Synthetic oligonucleotide
tttcgaaccatgacgtcccagtgtcggtac

SEQ ID NO: 250313 - DNA, 30 bp, Artificial Sequence
  Synthetic oligonucleotide
ctaacctgtcagtatcgcataaccgggtac

SEQ ID NO: 250314 - DNA, 30 bp, Artificial Sequence
  Synthetic oligonucleotide
acgtggacacaggttcagcatagggggtac

SEQ ID NO: 250315 - DNA, 30 bp, Artificial Sequence
  Synthetic oligonucleotide
atccgataaaattacgaactcgctgggtac

SEQ ID NO: 250316 - DNA, 30 bp, Artificial Sequence
  Synthetic oligonucleotide
ctctctcgacaaatcaagttacgtgggtac

SEQ ID NO: 250317 - DNA, 30 bp, Artificial Sequence
  Synthetic oligonucleotide
catagggggaagtagggcgtttgatggtac

SEQ ID NO: 250318 - DNA, 30 bp, Artificial Sequence
  Synthetic oligonucleotide
tctcgggtgtaatagcgaggagcctggtac

SEQ ID NO: 250319 - DNA, 30 bp, Artificial Sequence
  Synthetic oligonucleotide
tgtgtcatttctggacaagggtcctggtac

SEQ ID NO: 250320 - DNA, 30 bp, Artificial Sequence
  Synthetic oligonucleotide
ccctcgtcgatgaagtttgtgcattggtac

SEQ ID NO: 250321 - DNA, 30 bp, Artificial Sequence
  Synthetic oligonucleotide
ggaagaagttatgcacagttatattggtac

SEQ ID NO: 250322 - DNA, 30 bp, Artificial Sequence
  Synthetic oligonucleotide
aggctagtctattcgggtcctgcttggtac

SEQ ID NO: 250323 - DNA, 30 bp, Artificial Sequence
  Synthetic oligonucleotide
ctgcccatgacaaaccggggacaaatgtac

SEQ ID NO: 250324 - DNA, 30 bp, Artificial Sequence
  Synthetic oligonucleotide
ccttgcggcagtcttacactctaaatgtac

SEQ ID NO: 250325 - DNA, 30 bp, Artificial Sequence
  Synthetic oligonucleotide
cctacaaatgaatccgacgaggtaatgtac

SEQ ID NO: 250326 - DNA, 30 bp, Artificial Sequence
  Synthetic oligonucleotide
tccagtgtgatgcggtccctaaatatgtac

SEQ ID NO: 250327 - DNA, 30 bp, Artificial Sequence
  Synthetic oligonucleotide
tgtagctgaaggattacgtccggactgtac

SEQ ID NO: 250328 - DNA, 30 bp, Artificial Sequence
  Synthetic oligonucleotide
ctagttacttggagatgatggctactgtac

SEQ ID NO: 250329 - DNA, 30 bp, Artificial Sequence
  Synthetic oligonucleotide
cacacagattcagcgtatgcccccctgtac

SEQ ID NO: 250330 - DNA, 30 bp, Artificial Sequence
  Synthetic oligonucleotide
ggtggtcatcaacctatccgagccctgtac

SEQ ID NO: 250331 - DNA, 30 bp, Artificial Sequence
  Synthetic oligonucleotide
agctgaaccgtaatggtctaggcgctgtac

SEQ ID NO: 250332 - DNA, 30 bp, Artificial Sequence
  Synthetic oligonucleotide
ggcatggacttaccccgatagattgtgtac

SEQ ID NO: 250333 - DNA, 30 bp, Artificial Sequence
  Synthetic oligonucleotide
ccagtaagaaccgcagtgctttcattgtac

SEQ ID NO: 250334 - DNA, 30 bp, Artificial Sequence
  Synthetic oligonucleotide
agtcccctgatacattgttctagcttgtac

SEQ ID NO: 250335 - DNA, 30 bp, Artificial Sequence
  Synthetic oligonucleotide
agaacaaaccataaattacggggcttgtac

SEQ ID NO: 250336 - DNA, 30 bp, Artificial Sequence
  Synthetic oligonucleotide
acccaccagggttatgtacaacttttgtac

SEQ ID NO: 250337 - DNA, 30 bp, Artificial Sequence
  Synthetic oligonucleotide
gtacagatacacgggccgcgctacaattac

SEQ ID NO: 250338 - DNA, 30 bp, Artificial Sequence
  Synthetic oligonucleotide
tgccagtgccgtggtcccattaagaattac

SEQ ID NO: 250339 - DNA, 30 bp, Artificial Sequence
  Synthetic oligonucleotide
atgtagggataagcctatttaacgaattac

SEQ ID NO: 250340 - DNA, 30 bp, Artificial Sequence
  Synthetic oligonucleotide
tgcgcgagaaccatcgtacagtatcattac

SEQ ID NO: 250341 - DNA, 30 bp, Artificial Sequence
  Synthetic oligonucleotide
ttggggcgcgagttattcctagttcattac

SEQ ID NO: 250342 - DNA, 30 bp, Artificial Sequence
  Synthetic oligonucleotide
tccgactgaaagactcattccttcgattac

SEQ ID NO: 250343 - DNA, 30 bp, Artificial Sequence
  Synthetic oligonucleotide
gttacagcgacgaccatgactgaggattac

SEQ ID NO: 250344 - DNA, 30 bp, Artificial Sequence
  Synthetic oligonucleotide
ttacctcctaaagacgacttttgggattac

SEQ ID NO: 250345 - DNA, 30 bp, Artificial Sequence
  Synthetic oligonucleotide
atagttcatgtgtcatctcatggtgattac

SEQ ID NO: 250346 - DNA, 30 bp, Artificial Sequence
  Synthetic oligonucleotide
ggactaagatctcgaccttctgtatattac

SEQ ID NO: 250347 - DNA, 30 bp, Artificial Sequence
  Synthetic oligonucleotide
agaataatacgcctttcacattgctattac

SEQ ID NO: 250348 - DNA, 30 bp, Artificial Sequence
  Synthetic oligonucleotide
gcgtgtcattccataactcatatctattac

SEQ ID NO: 250349 - DNA, 30 bp, Artificial Sequence
  Synthetic oligonucleotide
ctgaggtcaattcaactcggggggtattac

SEQ ID NO: 250350 - DNA, 30 bp, Artificial Sequence
  Synthetic oligonucleotide
aactatccgagtcgcgacttttcttattac

SEQ ID NO: 250351 - DNA, 30 bp, Artificial Sequence
  Synthetic oligonucleotide
ggctgcggccgcatcctcgtactcacttac

SEQ ID NO: 250352 - DNA, 30 bp, Artificial Sequence
  Synthetic oligonucleotide
agtccgggtccgaattaaatctctacttac

SEQ ID NO: 250353 - DNA, 30 bp, Artificial Sequence
  Synthetic oligonucleotide
tcattatacatatgggccgcatcgccttac

SEQ ID NO: 250354 - DNA, 30 bp, Artificial Sequence
  Synthetic oligonucleotide
accgcctctattaaagcgaaacggccttac

SEQ ID NO: 250355 - DNA, 30 bp, Artificial Sequence
  Synthetic oligonucleotide
ctcatcaaaagaatttttaagtggccttac

SEQ ID NO: 250356 - DNA, 30 bp, Artificial Sequence
  Synthetic oligonucleotide
agcaagagttgctggtgcgctatgccttac

SEQ ID NO: 250357 - DNA, 30 bp, Artificial Sequence
  Synthetic oligonucleotide
caccgacgagtaagtttatgtatgccttac

SEQ ID NO: 250358 - DNA, 30 bp, Artificial Sequence
  Synthetic oligonucleotide
agccgaaagtaaaccccagattaggcttac

SEQ ID NO: 250359 - DNA, 30 bp, Artificial Sequence
  Synthetic oligonucleotide
aggaacgcggtaacaggatagatggcttac

SEQ ID NO: 250360 - DNA, 30 bp, Artificial Sequence
  Synthetic oligonucleotide
aggcggagtcagaaccccaaatgctcttac

SEQ ID NO: 250361 - DNA, 30 bp, Artificial Sequence
  Synthetic oligonucleotide
ttaaaacggacgtaacctatccattcttac

SEQ ID NO: 250362 - DNA, 30 bp, Artificial Sequence
  Synthetic oligonucleotide
agcaccgtcgtgcgatgagttacttcttac

SEQ ID NO: 250363 - DNA, 30 bp, Artificial Sequence
  Synthetic oligonucleotide
ttgtacacacagatgcgagagccaagttac

SEQ ID NO: 250364 - DNA, 30 bp, Artificial Sequence
  Synthetic oligonucleotide
gtgatgaagatcgtccgcaaatcaagttac

SEQ ID NO: 250365 - DNA, 30 bp, Artificial Sequence
  Synthetic oligonucleotide
tggcaaaatggccatggtctaccgagttac

SEQ ID NO: 250366 - DNA, 30 bp, Artificial Sequence
  Synthetic oligonucleotide
gacagaatcagctggcccaggctgagttac

SEQ ID NO: 250367 - DNA, 30 bp, Artificial Sequence
  Synthetic oligonucleotide
tgtagtttgaatgagcgtaagtctcgttac

SEQ ID NO: 250368 - DNA, 30 bp, Artificial Sequence
  Synthetic oligonucleotide
aaaatagaaaccgattgtgtgggtcgttac

SEQ ID NO: 250369 - DNA, 30 bp, Artificial Sequence
  Synthetic oligonucleotide
tatataggaacaaagtgcgccataggttac

SEQ ID NO: 250370 - DNA, 30 bp, Artificial Sequence
  Synthetic oligonucleotide
tacaacgtcattagtccctgtttaggttac

SEQ ID NO: 250371 - DNA, 30 bp, Artificial Sequence
  Synthetic oligonucleotide
taggctagcctgtgcgctttccagggttac

SEQ ID NO: 250372 - DNA, 30 bp, Artificial Sequence
  Synthetic oligonucleotide
gcaattttcggaaacggttgcaggggttac

SEQ ID NO: 250373 - DNA, 30 bp, Artificial Sequence
  Synthetic oligonucleotide
tgcctgatgaacgtccggactattggttac

SEQ ID NO: 250374 - DNA, 30 bp, Artificial Sequence
  Synthetic oligonucleotide
acggtcgttgttgtattctatacatgttac

SEQ ID NO: 250375 - DNA, 30 bp, Artificial Sequence
  Synthetic oligonucleotide
cctgtaaacggcattttgatgcgatgttac

SEQ ID NO: 250376 - DNA, 30 bp, Artificial Sequence
  Synthetic oligonucleotide
ttgactaacacctgcggggacatatgttac

SEQ ID NO: 250377 - DNA, 30 bp, Artificial Sequence
  Synthetic oligonucleotide
aaaccttgggatcatcgagcatagtgttac

SEQ ID NO: 250378 - DNA, 30 bp, Artificial Sequence
  Synthetic oligonucleotide
tgacgcacgagggtcgccggctagtgttac

SEQ ID NO: 250379 - DNA, 30 bp, Artificial Sequence
  Synthetic oligonucleotide
ctgtagtaatcttgctttcaccattgttac

SEQ ID NO: 250380 - DNA, 30 bp, Artificial Sequence
  Synthetic oligonucleotide
aacaaccggcaccatatattccaaatttac

SEQ ID NO: 250381 - DNA, 30 bp, Artificial Sequence
  Synthetic oligonucleotide
cggagattctgggacatcatcggaatttac

SEQ ID NO: 250382 - DNA, 30 bp, Artificial Sequence
  Synthetic oligonucleotide
agatttcaccatcgggacctagtcatttac

SEQ ID NO: 250383 - DNA, 30 bp, Artificial Sequence
  Synthetic oligonucleotide
ctgcatcattgggagacgacggcgatttac

SEQ ID NO: 250384 - DNA, 30 bp, Artificial Sequence
  Synthetic oligonucleotide
cagtaagcggaatccactagggcgatttac

SEQ ID NO: 250385 - DNA, 30 bp, Artificial Sequence
  Synthetic oligonucleotide
cagagcggccattaacttggatcgatttac

SEQ ID NO: 250386 - DNA, 30 bp, Artificial Sequence
  Synthetic oligonucleotide
ggaggggcttaggagccctagtcgatttac

SEQ ID NO: 250387 - DNA, 30 bp, Artificial Sequence
  Synthetic oligonucleotide
ccgcaccctgtaacaggtatgaatatttac

SEQ ID NO: 250388 - DNA, 31 bp, Artificial Sequence
  Synthetic oligonucleotide
tagcgtaccaatcccgcaggtgtgactttac

SEQ ID NO: 250389 - DNA, 30 bp, Artificial Sequence
  Synthetic oligonucleotide
gccgttatgttaaagtgcccttaagtttac

SEQ ID NO: 250390 - DNA, 30 bp, Artificial Sequence
  Synthetic oligonucleotide
gcgcatgatcaggcattatcgacggtttac

SEQ ID NO: 250391 - DNA, 30 bp, Artificial Sequence
  Synthetic oligonucleotide
acacatcagcgaggctagagttttgtttac

SEQ ID NO: 250392 - DNA, 30 bp, Artificial Sequence
  Synthetic oligonucleotide
aggctaaacgcccaagacagccacttttac

SEQ ID NO: 250393 - DNA, 30 bp, Artificial Sequence
  Synthetic oligonucleotide
tctgtatgcgctctaagtttacccaaaacc

SEQ ID NO: 250394 - DNA, 30 bp, Artificial Sequence
  Synthetic oligonucleotide
ccaaacgaattcagttagtttagcaaaacc

SEQ ID NO: 250395 - DNA, 30 bp, Artificial Sequence
  Synthetic oligonucleotide
gtcacggcaaaaaacttcccgaagaaaacc

SEQ ID NO: 250396 - DNA, 30 bp, Artificial Sequence
  Synthetic oligonucleotide
cgtgtgcgtttcgttcataagcagaaaacc

SEQ ID NO: 250397 - DNA, 30 bp, Artificial Sequence
  Synthetic oligonucleotide
atcacgcgtcgcgggcgtaacaggaaaacc

SEQ ID NO: 250398 - DNA, 30 bp, Artificial Sequence
  Synthetic oligonucleotide
ggggtacacatatttagggatatgaaaacc

SEQ ID NO: 250399 - DNA, 30 bp, Artificial Sequence
  Synthetic oligonucleotide
gaccatccggccctgaactgccctaaaacc

SEQ ID NO: 250400 - DNA, 30 bp, Artificial Sequence
  Synthetic oligonucleotide
aacgtgtcttggctgaccgccgaacaaacc

SEQ ID NO: 250401 - DNA, 30 bp, Artificial Sequence
  Synthetic oligonucleotide
aaatcgaaaaacctgagggagctacaaacc

SEQ ID NO: 250402 - DNA, 30 bp, Artificial Sequence
  Synthetic oligonucleotide
ccagcagacgtcatttacggcgaccaaacc

SEQ ID NO: 250403 - DNA, 30 bp, Artificial Sequence
  Synthetic oligonucleotide
ttcagtgacagcagttgatccagccaaacc

SEQ ID NO: 250404 - DNA, 30 bp, Artificial Sequence
  Synthetic oligonucleotide
agtgcgacttatataaacagttcgcaaacc

SEQ ID NO: 250405 - DNA, 30 bp, Artificial Sequence
  Synthetic oligonucleotide
gaacgtcggagttaagcacttttgcaaacc

SEQ ID NO: 250406 - DNA, 30 bp, Artificial Sequence
  Synthetic oligonucleotide
gtcaggtgccatagcgtaataaatcaaacc

SEQ ID NO: 250407 - DNA, 30 bp, Artificial Sequence
  Synthetic oligonucleotide
gcttagttcgcgcgtcaaacggatcaaacc

SEQ ID NO: 250408 - DNA, 30 bp, Artificial Sequence
  Synthetic oligonucleotide
gcttgccaaatgggttctttgcgtcaaacc

SEQ ID NO: 250409 - DNA, 30 bp, Artificial Sequence
  Synthetic oligonucleotide
gtgcccggacctcttatgtgtcttcaaacc

SEQ ID NO: 250410 - DNA, 30 bp, Artificial Sequence
  Synthetic oligonucleotide
gggaaggggagctgtgcgatcaatgaaacc

SEQ ID NO: 250411 - DNA, 30 bp, Artificial Sequence
  Synthetic oligonucleotide
ggcttgacggcccgacctcgcgctgaaacc

SEQ ID NO: 250412 - DNA, 30 bp, Artificial Sequence
  Synthetic oligonucleotide
agcgtccttaggattacgtgttctgaaacc

SEQ ID NO: 250413 - DNA, 30 bp, Artificial Sequence
  Synthetic oligonucleotide
cggatagattacgatctacaattataaacc

SEQ ID NO: 250414 - DNA, 30 bp, Artificial Sequence
  Synthetic oligonucleotide
agatggagttagtgcagtaatgtttaaacc

SEQ ID NO: 250415 - DNA, 30 bp, Artificial Sequence
  Synthetic oligonucleotide
cggcggtgagacggtctaactgacacaacc

SEQ ID NO: 250416 - DNA, 30 bp, Artificial Sequence
  Synthetic oligonucleotide
ggggtaccctatgacgagagaagcacaacc

SEQ ID NO: 250417 - DNA, 30 bp, Artificial Sequence
  Synthetic oligonucleotide
ttgtacctgggcgctatgacacatacaacc

SEQ ID NO: 250418 - DNA, 30 bp, Artificial Sequence
  Synthetic oligonucleotide
cgccattgtcctgtagagggcaccccaacc

SEQ ID NO: 250419 - DNA, 30 bp, Artificial Sequence
  Synthetic oligonucleotide
ctcgttaagtttacgagcgatttgccaacc

SEQ ID NO: 250420 - DNA, 30 bp, Artificial Sequence
  Synthetic oligonucleotide
tcctatataagggtaacggcagctccaacc

SEQ ID NO: 250421 - DNA, 30 bp, Artificial Sequence
  Synthetic oligonucleotide
tcacccggcgttcatgagctgtcagcaacc

SEQ ID NO: 250422 - DNA, 30 bp, Artificial Sequence
  Synthetic oligonucleotide
aacaggcgagtgagtcagggagacgcaacc

SEQ ID NO: 250423 - DNA, 30 bp, Artificial Sequence
  Synthetic oligonucleotide
tattatattggctagtaataagtcgcaacc

SEQ ID NO: 250424 - DNA, 30 bp, Artificial Sequence
  Synthetic oligonucleotide
aaccgttcaccgcgtgggcattgggcaacc

SEQ ID NO: 250425 - DNA, 30 bp, Artificial Sequence
  Synthetic oligonucleotide
gcggcattaagtcctcgggtcgaatcaacc

SEQ ID NO: 250426 - DNA, 30 bp, Artificial Sequence
  Synthetic oligonucleotide
gtatgggctgcggcgtcggagccatcaacc

SEQ ID NO: 250427 - DNA, 30 bp, Artificial Sequence
  Synthetic oligonucleotide
acggtgctgggggctcagagtgcatcaacc

SEQ ID NO: 250428 - DNA, 30 bp, Artificial Sequence
  Synthetic oligonucleotide
atgagatacgtagattattactcatcaacc

SEQ ID NO: 250429 - DNA, 30 bp, Artificial Sequence
  Synthetic oligonucleotide
gttctaaaccgagccggtctaaagtcaacc

SEQ ID NO: 250430 - DNA, 30 bp, Artificial Sequence
  Synthetic oligonucleotide
gtagtcatccgagcagatcattcgtcaacc

SEQ ID NO: 250431 - DNA, 30 bp, Artificial Sequence
  Synthetic oligonucleotide
ttgatgcattatagttacttcggcagaacc

SEQ ID NO: 250432 - DNA, 30 bp, Artificial Sequence
  Synthetic oligonucleotide
ggcttcataaaaacgcccttccagagaacc

SEQ ID NO: 250433 - DNA, 30 bp, Artificial Sequence
  Synthetic oligonucleotide
aaccgacaacggggctcgactgagagaacc

SEQ ID NO: 250434 - DNA, 30 bp, Artificial Sequence
  Synthetic oligonucleotide
cggagctgaatcaactatctaaatagaacc

SEQ ID NO: 250435 - DNA, 30 bp, Artificial Sequence
  Synthetic oligonucleotide
atgaagccacactcttggtctttacgaacc

SEQ ID NO: 250436 - DNA, 30 bp, Artificial Sequence
  Synthetic oligonucleotide
tgcatgtccgagaagttaatttcccgaacc

SEQ ID NO: 250437 - DNA, 30 bp, Artificial Sequence
  Synthetic oligonucleotide
catctaacgtaacttacacggcggcgaacc

SEQ ID NO: 250438 - DNA, 30 bp, Artificial Sequence
  Synthetic oligonucleotide
tttcccatgaaacatgactgcgatcgaacc

SEQ ID NO: 250439 - DNA, 30 bp, Artificial Sequence
  Synthetic oligonucleotide
ggtataaccaatataacctccattcgaacc

SEQ ID NO: 250440 - DNA, 30 bp, Artificial Sequence
  Synthetic oligonucleotide
ttcagtggcagcgccgctacgctcggaacc

SEQ ID NO: 250441 - DNA, 30 bp, Artificial Sequence
  Synthetic oligonucleotide
tgttggtgtgcgtaccgacagaagggaacc

SEQ ID NO: 250442 - DNA, 30 bp, Artificial Sequence
  Synthetic oligonucleotide
gactacagatctcaccctgataggggaacc

SEQ ID NO: 250443 - DNA, 30 bp, Artificial Sequence
  Synthetic oligonucleotide
tcgccacactacgagcgtcagtggggaacc

SEQ ID NO: 250444 - DNA, 30 bp, Artificial Sequence
  Synthetic oligonucleotide
tatagtgagtggtacgaacgtgtgggaacc

SEQ ID NO: 250445 - DNA, 30 bp, Artificial Sequence
  Synthetic oligonucleotide
ggttgagcaagggacatgccttcatgaacc

SEQ ID NO: 250446 - DNA, 30 bp, Artificial Sequence
  Synthetic oligonucleotide
gcggacatgacctaagaccgccgatgaacc

SEQ ID NO: 250447 - DNA, 30 bp, Artificial Sequence
  Synthetic oligonucleotide
ccgttacggaaaagttagtgagcgtgaacc

SEQ ID NO: 250448 - DNA, 30 bp, Artificial Sequence
  Synthetic oligonucleotide
ccgaagtcgtaagagacatagcattgaacc

SEQ ID NO: 250449 - DNA, 30 bp, Artificial Sequence
  Synthetic oligonucleotide
atcgctggtgtgcgtgaaggtgattgaacc

SEQ ID NO: 250450 - DNA, 30 bp, Artificial Sequence
  Synthetic oligonucleotide
ccatctaattacttggcgagcccttgaacc

SEQ ID NO: 250451 - DNA, 30 bp, Artificial Sequence
  Synthetic oligonucleotide
ttaagaaatgatggcggctctacaataacc

SEQ ID NO: 250452 - DNA, 30 bp, Artificial Sequence
  Synthetic oligonucleotide
gacgtgctcacaacaggcgtcttaataacc

SEQ ID NO: 250453 - DNA, 30 bp, Artificial Sequence
  Synthetic oligonucleotide
aacaagtgagaggcacattctaacataacc

SEQ ID NO: 250454 - DNA, 30 bp, Artificial Sequence
  Synthetic oligonucleotide
tggaaagttaggactagttgtagtataacc

SEQ ID NO: 250455 - DNA, 30 bp, Artificial Sequence
  Synthetic oligonucleotide
gttaggtaatcgctttcgagcacactaacc

SEQ ID NO: 250456 - DNA, 30 bp, Artificial Sequence
  Synthetic oligonucleotide
atggggacacgacggggggatctcctaacc

SEQ ID NO: 250457 - DNA, 30 bp, Artificial Sequence
  Synthetic oligonucleotide
agatggacgtcggtttccaaccgagtaacc

SEQ ID NO: 250458 - DNA, 30 bp, Artificial Sequence
  Synthetic oligonucleotide
aactagggaaccttatgcgccacggtaacc

SEQ ID NO: 250459 - DNA, 30 bp, Artificial Sequence
  Synthetic oligonucleotide
gtccccaggaatacggaagacgtggtaacc

SEQ ID NO: 250460 - DNA, 30 bp, Artificial Sequence
  Synthetic oligonucleotide
tgttttatagggaaatcgggtgctgtaacc

SEQ ID NO: 250461 - DNA, 30 bp, Artificial Sequence
  Synthetic oligonucleotide
gtgaacgtacttgcgtaggatggtgtaacc

SEQ ID NO: 250462 - DNA, 30 bp, Artificial Sequence
  Synthetic oligonucleotide
gctaatccagaccactattctgcattaacc

SEQ ID NO: 250463 - DNA, 30 bp, Artificial Sequence
  Synthetic oligonucleotide
tgggcgtatgagcctccgcactcattaacc

SEQ ID NO: 250464 - DNA, 30 bp, Artificial Sequence
  Synthetic oligonucleotide
gggcttggttagaaggagatataaaacacc

SEQ ID NO: 250465 - DNA, 30 bp, Artificial Sequence
  Synthetic oligonucleotide
agatttccaaatatactaattcagaacacc

SEQ ID NO: 250466 - DNA, 30 bp, Artificial Sequence
  Synthetic oligonucleotide
agtgcgggtttatagtgggatatgaacacc

SEQ ID NO: 250467 - DNA, 30 bp, Artificial Sequence
  Synthetic oligonucleotide
caaggcagctcgtcaggttcgcaacacacc

SEQ ID NO: 250468 - DNA, 30 bp, Artificial Sequence
  Synthetic oligonucleotide
gaagccccaggaaatcgtttgccccacacc

SEQ ID NO: 250469 - DNA, 30 bp, Artificial Sequence
  Synthetic oligonucleotide
ggattcgcgggcgttaagaggcagcacacc

SEQ ID NO: 250470 - DNA, 30 bp, Artificial Sequence
  Synthetic oligonucleotide
tcagaaattatgtcgacaagcggtcacacc

SEQ ID NO: 250471 - DNA, 30 bp, Artificial Sequence
  Synthetic oligonucleotide
gctgggagaaactgccaccctggtcacacc

SEQ ID NO: 250472 - DNA, 29 bp, Artificial Sequence
  Synthetic oligonucleotide
actttagggcagcagactaacgagacacc

SEQ ID NO: 250473 - DNA, 30 bp, Artificial Sequence
  Synthetic oligonucleotide
taaataagatacgcaaggctatgagacacc

SEQ ID NO: 250474 - DNA, 30 bp, Artificial Sequence
  Synthetic oligonucleotide
cttatatagccgagaggatctggcgacacc

SEQ ID NO: 250475 - DNA, 30 bp, Artificial Sequence
  Synthetic oligonucleotide
tagttcgggcggtggtcttccacggacacc

SEQ ID NO: 250476 - DNA, 30 bp, Artificial Sequence
  Synthetic oligonucleotide
actaagatgacttgcaatgctagatacacc

SEQ ID NO: 250477 - DNA, 30 bp, Artificial Sequence
  Synthetic oligonucleotide
ggcctactggaatggcgatgccgatacacc

SEQ ID NO: 250478 - DNA, 31 bp, Artificial Sequence
  Synthetic oligonucleotide
gctacggtcggcgcatacagagtgaaccacc

SEQ ID NO: 250479 - DNA, 30 bp, Artificial Sequence
  Synthetic oligonucleotide
ggctccactgtcataagggtagataccacc

SEQ ID NO: 250480 - DNA, 30 bp, Artificial Sequence
  Synthetic oligonucleotide
ctcgcagtttgcaaccgtgattgccccacc

SEQ ID NO: 250481 - DNA, 30 bp, Artificial Sequence
  Synthetic oligonucleotide
ttcaggagtcgacaatttctcaagcccacc

SEQ ID NO: 250482 - DNA, 30 bp, Artificial Sequence
  Synthetic oligonucleotide
gcttagctcggctggttgatgccgcccacc

SEQ ID NO: 250483 - DNA, 30 bp, Artificial Sequence
  Synthetic oligonucleotide
cactctctaatgcaagcgcatgctcccacc

SEQ ID NO: 250484 - DNA, 30 bp, Artificial Sequence
  Synthetic oligonucleotide
tctggagtatgaatggtgagtgccgccacc

SEQ ID NO: 250485 - DNA, 30 bp, Artificial Sequence
  Synthetic oligonucleotide
cgaagcttgctaggttagtagctcgccacc

SEQ ID NO: 250486 - DNA, 30 bp, Artificial Sequence
  Synthetic oligonucleotide
gactaaaccggaccgtcagacagggccacc

SEQ ID NO: 250487 - DNA, 30 bp, Artificial Sequence
  Synthetic oligonucleotide
ggtatcgccaccttgatccgcccctccacc

SEQ ID NO: 250488 - DNA, 30 bp, Artificial Sequence
  Synthetic oligonucleotide
gttaaggtcatactaaccgtaagctccacc

SEQ ID NO: 250489 - DNA, 30 bp, Artificial Sequence
  Synthetic oligonucleotide
gagacttggcgacaccgacagtcttccacc

SEQ ID NO: 250490 - DNA, 30 bp, Artificial Sequence
  Synthetic oligonucleotide
ttgaagagcaccccgtacgataacagcacc

SEQ ID NO: 250491 - DNA, 30 bp, Artificial Sequence
  Synthetic oligonucleotide
cagtaacgtctgttccgtgctggtagcacc

SEQ ID NO: 250492 - DNA, 30 bp, Artificial Sequence
  Synthetic oligonucleotide
taaggattttgcgtgggtgacatacgcacc

SEQ ID NO: 250493 - DNA, 30 bp, Artificial Sequence
  Synthetic oligonucleotide
cgaaccatgccgtcgcttgatctccgcacc

SEQ ID NO: 250494 - DNA, 30 bp, Artificial Sequence
  Synthetic oligonucleotide
ccgccttcccgcaccgcgcagaggcgcacc

SEQ ID NO: 250495 - DNA, 30 bp, Artificial Sequence
  Synthetic oligonucleotide
gaaagcatcaagaaaccctaccggcgcacc

SEQ ID NO: 250496 - DNA, 30 bp, Artificial Sequence
  Synthetic oligonucleotide
ttggcgtgacctattaccagaattcgcacc

SEQ ID NO: 250497 - DNA, 30 bp, Artificial Sequence
  Synthetic oligonucleotide
taatagcattagggtgagaggagaggcacc

SEQ ID NO: 250498 - DNA, 30 bp, Artificial Sequence
  Synthetic oligonucleotide
gtgagtccaggacctggccagccgggcacc

SEQ ID NO: 250499 - DNA, 30 bp, Artificial Sequence
  Synthetic oligonucleotide
cgggacaaagtgggactgacaggtggcacc

SEQ ID NO: 250500 - DNA, 30 bp, Artificial Sequence
  Synthetic oligonucleotide
tgaccatcgtcactggtctgcgaatgcacc

SEQ ID NO: 250501 - DNA, 30 bp, Artificial Sequence
  Synthetic oligonucleotide
agacctaacctggaaatagaaatctgcacc

SEQ ID NO: 250502 - DNA, 30 bp, Artificial Sequence
  Synthetic oligonucleotide
gaactacattgcgatggaatatgttgcacc

SEQ ID NO: 250503 - DNA, 30 bp, Artificial Sequence
  Synthetic oligonucleotide
aatcgaagacgtagggggtcgacaatcacc

SEQ ID NO: 250504 - DNA, 30 bp, Artificial Sequence
  Synthetic oligonucleotide
gagtagttgaaccttgcttgaaacatcacc

SEQ ID NO: 250505 - DNA, 30 bp, Artificial Sequence
  Synthetic oligonucleotide
caggtgcacatggtaagttagaacatcacc

SEQ ID NO: 250506 - DNA, 30 bp, Artificial Sequence
  Synthetic oligonucleotide
tggctcgcttaaaataactaggtcatcacc

SEQ ID NO: 250507 - DNA, 30 bp, Artificial Sequence
  Synthetic oligonucleotide
actagctgttgaggaacggtgtgcctcacc

SEQ ID NO: 250508 - DNA, 30 bp, Artificial Sequence
  Synthetic oligonucleotide
gtaatgaattcgtacaagtgttcgctcacc

SEQ ID NO: 250509 - DNA, 30 bp, Artificial Sequence
  Synthetic oligonucleotide
gctctagttattaatccgtaagggctcacc

SEQ ID NO: 250510 - DNA, 30 bp, Artificial Sequence
  Synthetic oligonucleotide
attaacgctcatcacattgcgggtctcacc

SEQ ID NO: 250511 - DNA, 30 bp, Artificial Sequence
  Synthetic oligonucleotide
ttcttgctcagtaaccatagctcagtcacc

SEQ ID NO: 250512 - DNA, 30 bp, Artificial Sequence
  Synthetic oligonucleotide
ctgagagagcgtgtaatgaagtcggtcacc

SEQ ID NO: 250513 - DNA, 30 bp, Artificial Sequence
  Synthetic oligonucleotide
ttggaaattatggatagtgttctattcacc

SEQ ID NO: 250514 - DNA, 30 bp, Artificial Sequence
  Synthetic oligonucleotide
gacaaattgtttggagtctacagcttcacc

SEQ ID NO: 250515 - DNA, 30 bp, Artificial Sequence
  Synthetic oligonucleotide
aataaggcgtaatccttgtttaggttcacc

SEQ ID NO: 250516 - DNA, 30 bp, Artificial Sequence
  Synthetic oligonucleotide
ggaacattttatcaggacgcgtgtttcacc

SEQ ID NO: 250517 - DNA, 30 bp, Artificial Sequence
  Synthetic oligonucleotide
gacaggccatagctccagcaatagaagacc

SEQ ID NO: 250518 - DNA, 30 bp, Artificial Sequence
  Synthetic oligonucleotide
tacgttggacaaaccagcaggaataagacc

SEQ ID NO: 250519 - DNA, 30 bp, Artificial Sequence
  Synthetic oligonucleotide
ccgtaacatggatcatgcgaggctaagacc

SEQ ID NO: 250520 - DNA, 30 bp, Artificial Sequence
  Synthetic oligonucleotide
gaaaaatcgaagagggatctgcttaagacc

SEQ ID NO: 250521 - DNA, 30 bp, Artificial Sequence
  Synthetic oligonucleotide
gttaggcggaatgaaaaagatttccagacc

SEQ ID NO: 250522 - DNA, 30 bp, Artificial Sequence
  Synthetic oligonucleotide
atcgaggccaatgacaatcgggcgcagacc

SEQ ID NO: 250523 - DNA, 30 bp, Artificial Sequence
  Synthetic oligonucleotide
taagaggatcaacgcttcgttggtcagacc

SEQ ID NO: 250524 - DNA, 30 bp, Artificial Sequence
  Synthetic oligonucleotide
cgtaggcgtggcgtgttctcccttcagacc

SEQ ID NO: 250525 - DNA, 30 bp, Artificial Sequence
  Synthetic oligonucleotide
tgaacgttgcaagtaaacatcatagagacc

SEQ ID NO: 250526 - DNA, 30 bp, Artificial Sequence
  Synthetic oligonucleotide
gccagccggtcagtggagccgcgatagacc

SEQ ID NO: 250527 - DNA, 30 bp, Artificial Sequence
  Synthetic oligonucleotide
ggcaaaggtctgctttagggttcctagacc

SEQ ID NO: 250528 - DNA, 30 bp, Artificial Sequence
  Synthetic oligonucleotide
ataggatgattcaaaggcggtatgtagacc

SEQ ID NO: 250529 - DNA, 30 bp, Artificial Sequence
  Synthetic oligonucleotide
gttctatcctcacgaagtacaatttagacc

SEQ ID NO: 250530 - DNA, 30 bp, Artificial Sequence
  Synthetic oligonucleotide
gaggacccaattgcatttcagttttagacc

SEQ ID NO: 250531 - DNA, 30 bp, Artificial Sequence
  Synthetic oligonucleotide
ccctgctacacacccccagtcgcaacgacc

SEQ ID NO: 250532 - DNA, 30 bp, Artificial Sequence
  Synthetic oligonucleotide
tcatctgtatccaggagattctcaacgacc

SEQ ID NO: 250533 - DNA, 30 bp, Artificial Sequence
  Synthetic oligonucleotide
tttacaatagcgccgtaagacagcacgacc

SEQ ID NO: 250534 - DNA, 30 bp, Artificial Sequence
  Synthetic oligonucleotide
gactctgtaggaacggaagccctgacgacc

SEQ ID NO: 250535 - DNA, 30 bp, Artificial Sequence
  Synthetic oligonucleotide
aggtttcttacaaggaatcgcgttccgacc

SEQ ID NO: 250536 - DNA, 30 bp, Artificial Sequence
  Synthetic oligonucleotide
aagtgacatatctgcaaggtcccagcgacc

SEQ ID NO: 250537 - DNA, 30 bp, Artificial Sequence
  Synthetic oligonucleotide
cctatgcaattactttgttaagcagcgacc

SEQ ID NO: 250538 - DNA, 30 bp, Artificial Sequence
  Synthetic oligonucleotide
gtgttgaggattggtaaggatagatcgacc

SEQ ID NO: 250539 - DNA, 30 bp, Artificial Sequence
  Synthetic oligonucleotide
tcacatactgcaagatgtacgggctcgacc

SEQ ID NO: 250540 - DNA, 30 bp, Artificial Sequence
  Synthetic oligonucleotide
gggccagatccgacttgcggcatctcgacc

SEQ ID NO: 250541 - DNA, 30 bp, Artificial Sequence
  Synthetic oligonucleotide
aagcaaaatgggggagtatatgcttcgacc

SEQ ID NO: 250542 - DNA, 30 bp, Artificial Sequence
  Synthetic oligonucleotide
gtcccggttgtgacaagagcggcaaggacc

SEQ ID NO: 250543 - DNA, 30 bp, Artificial Sequence
  Synthetic oligonucleotide
tgacttaaacttaattcattccacaggacc

SEQ ID NO: 250544 - DNA, 30 bp, Artificial Sequence
  Synthetic oligonucleotide
cagcgattcggcttccgtccttgcaggacc

SEQ ID NO: 250545 - DNA, 30 bp, Artificial Sequence
  Synthetic oligonucleotide
agttgataacgtgatacgtacctcaggacc

SEQ ID NO: 250546 - DNA, 30 bp, Artificial Sequence
  Synthetic oligonucleotide
tacgaagggccatgtcatagcctccggacc

SEQ ID NO: 250547 - DNA, 30 bp, Artificial Sequence
  Synthetic oligonucleotide
acagtaagtataaggtctggtctgcggacc

SEQ ID NO: 250548 - DNA, 30 bp, Artificial Sequence
  Synthetic oligonucleotide
aaaacggacgacactttacaaaaggggacc

SEQ ID NO: 250549 - DNA, 30 bp, Artificial Sequence
  Synthetic oligonucleotide
cgttggctgcagcgtctggctccggggacc

SEQ ID NO: 250550 - DNA, 30 bp, Artificial Sequence
  Synthetic oligonucleotide
gggagcagcatgtttggctccacatggacc

SEQ ID NO: 250551 - DNA, 30 bp, Artificial Sequence
  Synthetic oligonucleotide
agagggcgatgtcggaccctcatatggacc

SEQ ID NO: 250552 - DNA, 30 bp, Artificial Sequence
  Synthetic oligonucleotide
tgatacagttaagcacgtcaaacgtggacc

SEQ ID NO: 250553 - DNA, 30 bp, Artificial Sequence
  Synthetic oligonucleotide
tggcgtacatgttagaaaaatcggtggacc

SEQ ID NO: 250554 - DNA, 30 bp, Artificial Sequence
  Synthetic oligonucleotide
tgatcatcctaagcatacaggtcaatgacc

SEQ ID NO: 250555 - DNA, 30 bp, Artificial Sequence
  Synthetic oligonucleotide
tgtgtgggtgtcgggcataaatccatgacc

SEQ ID NO: 250556 - DNA, 30 bp, Artificial Sequence
  Synthetic oligonucleotide
atggggtaagagttgaactcactgatgacc

SEQ ID NO: 250557 - DNA, 30 bp, Artificial Sequence
  Synthetic oligonucleotide
agtaatgttaaccagttagttgatatgacc

SEQ ID NO: 250558 - DNA, 30 bp, Artificial Sequence
  Synthetic oligonucleotide
accacaggcgattgatgtttggttatgacc

SEQ ID NO: 250559 - DNA, 30 bp, Artificial Sequence
  Synthetic oligonucleotide
cttgtggcttggcacgtttcctaactgacc

SEQ ID NO: 250560 - DNA, 30 bp, Artificial Sequence
  Synthetic oligonucleotide
cggtatattgaaagggtaaagttactgacc

SEQ ID NO: 250561 - DNA, 30 bp, Artificial Sequence
  Synthetic oligonucleotide
actcaaccggacgtgcgcagacggctgacc

SEQ ID NO: 250562 - DNA, 30 bp, Artificial Sequence
  Synthetic oligonucleotide
ccgagaaagccaggtaccgacgctctgacc

SEQ ID NO: 250563 - DNA, 30 bp, Artificial Sequence
  Synthetic oligonucleotide
taggagcactgctagttaccatctctgacc

SEQ ID NO: 250564 - DNA, 30 bp, Artificial Sequence
  Synthetic oligonucleotide
ttaggtgtgtcggtggtttttggtctgacc

SEQ ID NO: 250565 - DNA, 30 bp, Artificial Sequence
  Synthetic oligonucleotide
atattagcgcatcgaagcaatctagtgacc

SEQ ID NO: 250566 - DNA, 30 bp, Artificial Sequence
  Synthetic oligonucleotide
aaaggatccgtgagtactcctagcgtgacc

SEQ ID NO: 250567 - DNA, 30 bp, Artificial Sequence
  Synthetic oligonucleotide
cgcgtagagtctctctggaccgcggtgacc

SEQ ID NO: 250568 - DNA, 30 bp, Artificial Sequence
  Synthetic oligonucleotide
cacaatgtgtagcgcaaatggagggtgacc

SEQ ID NO: 250569 - DNA, 30 bp, Artificial Sequence
  Synthetic oligonucleotide
agggggcagtagtctgctagccttgtgacc

SEQ ID NO: 250570 - DNA, 30 bp, Artificial Sequence
  Synthetic oligonucleotide
ttacatgatcagtccatgaacggattgacc

SEQ ID NO: 250571 - DNA, 30 bp, Artificial Sequence
  Synthetic oligonucleotide
cgtgaatagttaaggcgattaggcttgacc

SEQ ID NO: 250572 - DNA, 30 bp, Artificial Sequence
  Synthetic oligonucleotide
attgtattgagtgtaagctgtcgaaatacc

SEQ ID NO: 250573 - DNA, 30 bp, Artificial Sequence
  Synthetic oligonucleotide
aaagattgagagtatggtcacctaaatacc

SEQ ID NO: 250574 - DNA, 30 bp, Artificial Sequence
  Synthetic oligonucleotide
tggacacgttataagttcggctggaatacc

SEQ ID NO: 250575 - DNA, 30 bp, Artificial Sequence
  Synthetic oligonucleotide
aggatatgcgtaattatggcgttgaatacc

SEQ ID NO: 250576 - DNA, 30 bp, Artificial Sequence
  Synthetic oligonucleotide
tgctggtcgccaatcgctatagctaatacc

SEQ ID NO: 250577 - DNA, 30 bp, Artificial Sequence
  Synthetic oligonucleotide
cagaagaagggagacttagtgtcacatacc

SEQ ID NO: 250578 - DNA, 27 bp, Artificial Sequence
  Synthetic oligonucleotide
gccagctgaggaaccgggggccatacc

SEQ ID NO: 250579 - DNA, 30 bp, Artificial Sequence
  Synthetic oligonucleotide
cgtacaaacgcttagggggaattccatacc

SEQ ID NO: 250580 - DNA, 30 bp, Artificial Sequence
  Synthetic oligonucleotide
gttctctggcatgggagaaatcagcatacc

SEQ ID NO: 250581 - DNA, 30 bp, Artificial Sequence
  Synthetic oligonucleotide
caccgatatatcgacagagattagcatacc

SEQ ID NO: 250582 - DNA, 30 bp, Artificial Sequence
  Synthetic oligonucleotide
gaaacgtaacttgtgtaacggcaagatacc

SEQ ID NO: 250583 - DNA, 30 bp, Artificial Sequence
  Synthetic oligonucleotide
taatctcgtcgctatattgagcgggatacc

SEQ ID NO: 250584 - DNA, 30 bp, Artificial Sequence
  Synthetic oligonucleotide
actgcacagtacctgggtggtaggtatacc

SEQ ID NO: 250585 - DNA, 30 bp, Artificial Sequence
  Synthetic oligonucleotide
tcagctgtggaatttacgagcatttatacc

SEQ ID NO: 250586 - DNA, 30 bp, Artificial Sequence
  Synthetic oligonucleotide
ccaattctatgaaacatgttctcaactacc

SEQ ID NO: 250587 - DNA, 30 bp, Artificial Sequence
  Synthetic oligonucleotide
tggacttatagcacgtaataggggactacc

SEQ ID NO: 250588 - DNA, 30 bp, Artificial Sequence
  Synthetic oligonucleotide
gagtagttcgaaaaattcgtagctactacc

SEQ ID NO: 250589 - DNA, 30 bp, Artificial Sequence
  Synthetic oligonucleotide
attacgggttggaaaactgagacccctacc

SEQ ID NO: 250590 - DNA, 30 bp, Artificial Sequence
  Synthetic oligonucleotide
gcacccatcgactagtgttccgtccctacc

SEQ ID NO: 250591 - DNA, 30 bp, Artificial Sequence
  Synthetic oligonucleotide
ttgtcaccagaggatcgccgggctcctacc

SEQ ID NO: 250592 - DNA, 30 bp, Artificial Sequence
  Synthetic oligonucleotide
cggacgctgggccttaacaagaccgctacc

SEQ ID NO: 250593 - DNA, 30 bp, Artificial Sequence
  Synthetic oligonucleotide
ctggtccagtggtgttcctataaggctacc

SEQ ID NO: 250594 - DNA, 30 bp, Artificial Sequence
  Synthetic oligonucleotide
taaaacgtcattattggccccacggctacc

SEQ ID NO: 250595 - DNA, 30 bp, Artificial Sequence
  Synthetic oligonucleotide
ttgcctcctaaaggtctgtccgatgctacc

SEQ ID NO: 250596 - DNA, 30 bp, Artificial Sequence
  Synthetic oligonucleotide
cggcttaagcaattaacaatgtcatctacc

SEQ ID NO: 250597 - DNA, 30 bp, Artificial Sequence
  Synthetic oligonucleotide
ggacgtagcgcgattcgaacatagtctacc

SEQ ID NO: 250598 - DNA, 30 bp, Artificial Sequence
  Synthetic oligonucleotide
ccactcggggatacctcgatgaaaagtacc

SEQ ID NO: 250599 - DNA, 30 bp, Artificial Sequence
  Synthetic oligonucleotide
gtgttcacagttaactactaccacagtacc

SEQ ID NO: 250600 - DNA, 30 bp, Artificial Sequence
  Synthetic oligonucleotide
aggctaagccaatatgtttcaagcagtacc

SEQ ID NO: 250601 - DNA, 30 bp, Artificial Sequence
  Synthetic oligonucleotide
gctgcaccttgcgtaaaacgtagcagtacc

SEQ ID NO: 250602 - DNA, 30 bp, Artificial Sequence
  Synthetic oligonucleotide
gcatcgtcctgcatcccgaatccgcgtacc

SEQ ID NO: 250603 - DNA, 30 bp, Artificial Sequence
  Synthetic oligonucleotide
agcgacatcgccatgtaacctatgcgtacc

SEQ ID NO: 250604 - DNA, 30 bp, Artificial Sequence
  Synthetic oligonucleotide
atgcctgccgtattagcaagccatcgtacc

SEQ ID NO: 250605 - DNA, 30 bp, Artificial Sequence
  Synthetic oligonucleotide
aagctatatgccgacggttgggttcgtacc

SEQ ID NO: 250606 - DNA, 30 bp, Artificial Sequence
  Synthetic oligonucleotide
gcattaaatcaaagtttcccgaacggtacc

SEQ ID NO: 250607 - DNA, 30 bp, Artificial Sequence
  Synthetic oligonucleotide
aacacaagtaggtaaccaagtcggggtacc

SEQ ID NO: 250608 - DNA, 30 bp, Artificial Sequence
  Synthetic oligonucleotide
atcacgtgacaagactcgatcatgggtacc

SEQ ID NO: 250609 - DNA, 30 bp, Artificial Sequence
  Synthetic oligonucleotide
gaggtactgtggaattcatgatatggtacc

SEQ ID NO: 250610 - DNA, 30 bp, Artificial Sequence
  Synthetic oligonucleotide
gacgtcttaaagtcaagcaaaggtggtacc

SEQ ID NO: 250611 - DNA, 30 bp, Artificial Sequence
  Synthetic oligonucleotide
accatggagactgagtgctacgtctgtacc

SEQ ID NO: 250612 - DNA, 30 bp, Artificial Sequence
  Synthetic oligonucleotide
cagtgggtccaagtttacgtatggtgtacc

SEQ ID NO: 250613 - DNA, 30 bp, Artificial Sequence
  Synthetic oligonucleotide
gttacccggagaatttcacaagaaattacc

SEQ ID NO: 250614 - DNA, 30 bp, Artificial Sequence
  Synthetic oligonucleotide
taccggcatatcaagaaaatctgaattacc

SEQ ID NO: 250615 - DNA, 30 bp, Artificial Sequence
  Synthetic oligonucleotide
acgctggccacaatatgatacataattacc

SEQ ID NO: 250616 - DNA, 30 bp, Artificial Sequence
  Synthetic oligonucleotide
tgggggtgcggtcccccaaagcgcattacc

SEQ ID NO: 250617 - DNA, 30 bp, Artificial Sequence
  Synthetic oligonucleotide
gataagcacgcggcaatcagcgagattacc

SEQ ID NO: 250618 - DNA, 30 bp, Artificial Sequence
  Synthetic oligonucleotide
tggtgcactttcactacgtgtccacttacc

SEQ ID NO: 250619 - DNA, 30 bp, Artificial Sequence
  Synthetic oligonucleotide
tagattggtaaggctcctcaagtacttacc

SEQ ID NO: 250620 - DNA, 30 bp, Artificial Sequence
  Synthetic oligonucleotide
gcctagccttgagacaacgatacccttacc

SEQ ID NO: 250621 - DNA, 30 bp, Artificial Sequence
  Synthetic oligonucleotide
acttgtaccaggtgtgtaagctaagttacc

SEQ ID NO: 250622 - DNA, 30 bp, Artificial Sequence
  Synthetic oligonucleotide
gggactaacactatggattcgaaggttacc

SEQ ID NO: 250623 - DNA, 30 bp, Artificial Sequence
  Synthetic oligonucleotide
aatattcatatgcagggtgaaagggttacc

SEQ ID NO: 250624 - DNA, 30 bp, Artificial Sequence
  Synthetic oligonucleotide
gcgggctgaaggccggagaagcgggttacc

SEQ ID NO: 250625 - DNA, 30 bp, Artificial Sequence
  Synthetic oligonucleotide
gtgtaagtcaagtggtataacgcatttacc

SEQ ID NO: 250626 - DNA, 30 bp, Artificial Sequence
  Synthetic oligonucleotide
acgcgactggccagagagggcacttttacc

SEQ ID NO: 250627 - DNA, 30 bp, Artificial Sequence
  Synthetic oligonucleotide
cacatgggaacatatcaatttgtttttacc

SEQ ID NO: 250628 - DNA, 30 bp, Artificial Sequence
  Synthetic oligonucleotide
aatgaagcctagacgctggggctacaaccc

SEQ ID NO: 250629 - DNA, 30 bp, Artificial Sequence
  Synthetic oligonucleotide
aggccatgtgattaagccctatatcaaccc

SEQ ID NO: 250630 - DNA, 30 bp, Artificial Sequence
  Synthetic oligonucleotide
ctgatttggggtggtgtcatgtatcaaccc

SEQ ID NO: 250631 - DNA, 30 bp, Artificial Sequence
  Synthetic oligonucleotide
tgctaacaggtattgtacagcggagaaccc

SEQ ID NO: 250632 - DNA, 30 bp, Artificial Sequence
  Synthetic oligonucleotide
ctgtgcaggggtgatgaacgtaccgaaccc

SEQ ID NO: 250633 - DNA, 30 bp, Artificial Sequence
  Synthetic oligonucleotide
ttcattcgaggcataatctatatcgaaccc

SEQ ID NO: 250634 - DNA, 30 bp, Artificial Sequence
  Synthetic oligonucleotide
ttgcgtttggtggaatttatgcaggaaccc

SEQ ID NO: 250635 - DNA, 30 bp, Artificial Sequence
  Synthetic oligonucleotide
tctccgggaaagccgttacatgaggaaccc

SEQ ID NO: 250636 - DNA, 30 bp, Artificial Sequence
  Synthetic oligonucleotide
cacagatccacggggaccaatagggaaccc

SEQ ID NO: 250637 - DNA, 30 bp, Artificial Sequence
  Synthetic oligonucleotide
gcagtgttaaaacagtcactttatgaaccc

SEQ ID NO: 250638 - DNA, 30 bp, Artificial Sequence
  Synthetic oligonucleotide
cgctattggtgggttttgagggctgaaccc

SEQ ID NO: 250639 - DNA, 30 bp, Artificial Sequence
  Synthetic oligonucleotide
ctatatatggaagaggggcaatctgaaccc

SEQ ID NO: 250640 - DNA, 30 bp, Artificial Sequence
  Synthetic oligonucleotide
tggatcttagcactgctaatatgataaccc

SEQ ID NO: 250641 - DNA, 30 bp, Artificial Sequence
  Synthetic oligonucleotide
gctggacgtccggaacggtttcactaaccc

SEQ ID NO: 250642 - DNA, 30 bp, Artificial Sequence
  Synthetic oligonucleotide
gttgggtggaaattcttcagcatctaaccc

SEQ ID NO: 250643 - DNA, 30 bp, Artificial Sequence
  Synthetic oligonucleotide
acaaacatgaagttgaacgtcaagtaaccc

SEQ ID NO: 250644 - DNA, 30 bp, Artificial Sequence
  Synthetic oligonucleotide
cagccatcgctgtaacgaactaggtaaccc

SEQ ID NO: 250645 - DNA, 30 bp, Artificial Sequence
  Synthetic oligonucleotide
ctaagatttcagaacataccacgttaaccc

SEQ ID NO: 250646 - DNA, 30 bp, Artificial Sequence
  Synthetic oligonucleotide
gtaaaagctcatgcaccgtgacccacaccc

SEQ ID NO: 250647 - DNA, 30 bp, Artificial Sequence
  Synthetic oligonucleotide
ttgctacacagacaaaacttacggacaccc

SEQ ID NO: 250648 - DNA, 30 bp, Artificial Sequence
  Synthetic oligonucleotide
gccgacggcctgtttcgtggtctgacaccc

SEQ ID NO: 250649 - DNA, 30 bp, Artificial Sequence
  Synthetic oligonucleotide
tcagacctttattcaagggcaagtacaccc

SEQ ID NO: 250650 - DNA, 30 bp, Artificial Sequence
  Synthetic oligonucleotide
cctgcggctacggtcacgctagcagcaccc

SEQ ID NO: 250651 - DNA, 30 bp, Artificial Sequence
  Synthetic oligonucleotide
ccgaatcaagccaggacttggcgagcaccc

SEQ ID NO: 250652 - DNA, 30 bp, Artificial Sequence
  Synthetic oligonucleotide
gttgcgcagactcgctatgacagtgcaccc

SEQ ID NO: 250653 - DNA, 30 bp, Artificial Sequence
  Synthetic oligonucleotide
cgctgcgtgccggaccgattatttgcaccc

SEQ ID NO: 250654 - DNA, 30 bp, Artificial Sequence
  Synthetic oligonucleotide
tgaattgaccgctaaatacacttatcaccc

SEQ ID NO: 250655 - DNA, 30 bp, Artificial Sequence
  Synthetic oligonucleotide
aataggcggccaggacccatcaaaagaccc

SEQ ID NO: 250656 - DNA, 30 bp, Artificial Sequence
  Synthetic oligonucleotide
tcggaatgagttatgtcttcttaaagaccc

SEQ ID NO: 250657 - DNA, 30 bp, Artificial Sequence
  Synthetic oligonucleotide
gcgggccctctgcgaatctacggaagaccc

SEQ ID NO: 250658 - DNA, 31 bp, Artificial Sequence
  Synthetic oligonucleotide
accaatggataggtgagcttgcaccagaccc

SEQ ID NO: 250659 - DNA, 30 bp, Artificial Sequence
  Synthetic oligonucleotide
aaaacggtattgtgtaaccaaccgagaccc

SEQ ID NO: 250660 - DNA, 30 bp, Artificial Sequence
  Synthetic oligonucleotide
tacgtcttagcggtgagcggccctagaccc

SEQ ID NO: 250661 - DNA, 30 bp, Artificial Sequence
  Synthetic oligonucleotide
ttgctgtacggtaagctattaggtagaccc

SEQ ID NO: 250662 - DNA, 30 bp, Artificial Sequence
  Synthetic oligonucleotide
tccccacatgaatcaattgggcgacgaccc

SEQ ID NO: 250663 - DNA, 30 bp, Artificial Sequence
  Synthetic oligonucleotide
aagagcaccgaccggtatacggtacgaccc

SEQ ID NO: 250664 - DNA, 30 bp, Artificial Sequence
  Synthetic oligonucleotide
atggcgtatcgattgtgtcttaggcgaccc

SEQ ID NO: 250665 - DNA, 30 bp, Artificial Sequence
  Synthetic oligonucleotide
atagcttatgctaccgacgtccggcgaccc

SEQ ID NO: 250666 - DNA, 30 bp, Artificial Sequence
  Synthetic oligonucleotide
gctctgacaggcctaaacccattgcgaccc

SEQ ID NO: 250667 - DNA, 30 bp, Artificial Sequence
  Synthetic oligonucleotide
tgtccgccatacccaggtgggggtcgaccc

SEQ ID NO: 250668 - DNA, 30 bp, Artificial Sequence
  Synthetic oligonucleotide
ccgcacgtagtatgcacgagtccaggaccc

SEQ ID NO: 250669 - DNA, 30 bp, Artificial Sequence
  Synthetic oligonucleotide
gcacaaaaaggtggaaagggtataggaccc

SEQ ID NO: 250670 - DNA, 30 bp, Artificial Sequence
  Synthetic oligonucleotide
aaggcccaatacacggagatgtccggaccc

SEQ ID NO: 250671 - DNA, 30 bp, Artificial Sequence
  Synthetic oligonucleotide
agttagcgcaggtcttacggcacatgaccc

SEQ ID NO: 250672 - DNA, 30 bp, Artificial Sequence
  Synthetic oligonucleotide
gaacgtatctcaagtattccttgctgaccc

SEQ ID NO: 250673 - DNA, 30 bp, Artificial Sequence
  Synthetic oligonucleotide
ctgggtactccgatccgtggagggtgaccc

SEQ ID NO: 250674 - DNA, 30 bp, Artificial Sequence
  Synthetic oligonucleotide
gtaattaacgcgcacattcagcacataccc

SEQ ID NO: 250675 - DNA, 30 bp, Artificial Sequence
  Synthetic oligonucleotide
agcgatgccgagatcagcatagacataccc

SEQ ID NO: 250676 - DNA, 30 bp, Artificial Sequence
  Synthetic oligonucleotide
gaacattagggtattacaaagtccataccc

SEQ ID NO: 250677 - DNA, 30 bp, Artificial Sequence
  Synthetic oligonucleotide
tacatttaacggtacctgggatgcataccc

SEQ ID NO: 250678 - DNA, 30 bp, Artificial Sequence
  Synthetic oligonucleotide
ctacaccagaatcacggcgggaagataccc

SEQ ID NO: 250679 - DNA, 30 bp, Artificial Sequence
  Synthetic oligonucleotide
tcttcaagtagatcgaagatggtgataccc

SEQ ID NO: 250680 - DNA, 30 bp, Artificial Sequence
  Synthetic oligonucleotide
cgagaacaccttatatttccaaatataccc

SEQ ID NO: 250681 - DNA, 30 bp, Artificial Sequence
  Synthetic oligonucleotide
gaacgtgttacggagtgtgaatctataccc

SEQ ID NO: 250682 - DNA, 30 bp, Artificial Sequence
  Synthetic oligonucleotide
cgttgaacattccgctggaatgtcgtaccc

SEQ ID NO: 250683 - DNA, 30 bp, Artificial Sequence
  Synthetic oligonucleotide
aaaacttccggattgccgatcacggtaccc

SEQ ID NO: 250684 - DNA, 30 bp, Artificial Sequence
  Synthetic oligonucleotide
ggcataaagtcctcatttagaccggtaccc

SEQ ID NO: 250685 - DNA, 30 bp, Artificial Sequence
  Synthetic oligonucleotide
cgtccgaccgctctcagccaaacaaacccc

SEQ ID NO: 250686 - DNA, 30 bp, Artificial Sequence
  Synthetic oligonucleotide
acacgcaacgaaacaggccttagaaacccc

SEQ ID NO: 250687 - DNA, 30 bp, Artificial Sequence
  Synthetic oligonucleotide
aattgggatgacactattctaggcaacccc

SEQ ID NO: 250688 - DNA, 30 bp, Artificial Sequence
  Synthetic oligonucleotide
cagaagattcgactctttaaccctaacccc

SEQ ID NO: 250689 - DNA, 30 bp, Artificial Sequence
  Synthetic oligonucleotide
gtagtgggcggactttgccatttacacccc

SEQ ID NO: 250690 - DNA, 30 bp, Artificial Sequence
  Synthetic oligonucleotide
actgtggggagagcgagcttacaccacccc

SEQ ID NO: 250691 - DNA, 30 bp, Artificial Sequence
  Synthetic oligonucleotide
ggaacgtcagagcagttccgactgcacccc

SEQ ID NO: 250692 - DNA, 30 bp, Artificial Sequence
  Synthetic oligonucleotide
taaaatagtagcccaaattcaagagacccc

SEQ ID NO: 250693 - DNA, 30 bp, Artificial Sequence
  Synthetic oligonucleotide
ctgcatccaagtgttacatctgtagacccc

SEQ ID NO: 250694 - DNA, 30 bp, Artificial Sequence
  Synthetic oligonucleotide
acgtcatccaaggtcatgacgggatacccc

SEQ ID NO: 250695 - DNA, 30 bp, Artificial Sequence
  Synthetic oligonucleotide
agggtgataaaaacggttggagactacccc

SEQ ID NO: 250696 - DNA, 30 bp, Artificial Sequence
  Synthetic oligonucleotide
tcgcgagagtgcacgggtaccgactacccc

SEQ ID NO: 250697 - DNA, 30 bp, Artificial Sequence
  Synthetic oligonucleotide
gtccatttttaaggaacagagagctacccc

SEQ ID NO: 250698 - DNA, 30 bp, Artificial Sequence
  Synthetic oligonucleotide
aggaatttccgtaaacacgcaggcaccccc

SEQ ID NO: 250699 - DNA, 30 bp, Artificial Sequence
  Synthetic oligonucleotide
gatgtccctttcaggattgcaggcaccccc

SEQ ID NO: 250700 - DNA, 30 bp, Artificial Sequence
  Synthetic oligonucleotide
cgtcttctgatgtagttgtcatgccccccc

SEQ ID NO: 250701 - DNA, 30 bp, Artificial Sequence
  Synthetic oligonucleotide
accgactacaagtggataccagagcccccc

SEQ ID NO: 250702 - DNA, 30 bp, Artificial Sequence
  Synthetic oligonucleotide
ccaatatcagttagtggtcccagagccccc

SEQ ID NO: 250703 - DNA, 30 bp, Artificial Sequence
  Synthetic oligonucleotide
gctgtggacagcgagggtgatctcgccccc

SEQ ID NO: 250704 - DNA, 30 bp, Artificial Sequence
  Synthetic oligonucleotide
gacgtgtaccttgacgatgctgttgccccc

SEQ ID NO: 250705 - DNA, 30 bp, Artificial Sequence
  Synthetic oligonucleotide
ggtccggcaccaatagtcatcggctccccc

SEQ ID NO: 250706 - DNA, 30 bp, Artificial Sequence
  Synthetic oligonucleotide
accaagttgctagacaaagattgctccccc

SEQ ID NO: 250707 - DNA, 30 bp, Artificial Sequence
  Synthetic oligonucleotide
cactttagaagccgaaacttcggaagcccc

SEQ ID NO: 250708 - DNA, 30 bp, Artificial Sequence
  Synthetic oligonucleotide
tagatcaaagcccccaggtaggcgagcccc

SEQ ID NO: 250709 - DNA, 30 bp, Artificial Sequence
  Synthetic oligonucleotide
gttatggttaggacgtatggcttacgcccc

SEQ ID NO: 250710 - DNA, 30 bp, Artificial Sequence
  Synthetic oligonucleotide
tatgccgaagtctgtctgtatcaccgcccc

SEQ ID NO: 250711 - DNA, 30 bp, Artificial Sequence
  Synthetic oligonucleotide
gcggtttgagtgccgtcactaacgcgcccc

SEQ ID NO: 250712 - DNA, 30 bp, Artificial Sequence
  Synthetic oligonucleotide
tacgcgagctttaagcttggaaatcgcccc

SEQ ID NO: 250713 - DNA, 30 bp, Artificial Sequence
  Synthetic oligonucleotide
ggagctggtttctcggattgatcaggcccc

SEQ ID NO: 250714 - DNA, 30 bp, Artificial Sequence
  Synthetic oligonucleotide
gacaaatgactaagattaaggtggggcccc

SEQ ID NO: 250715 - DNA, 30 bp, Artificial Sequence
  Synthetic oligonucleotide
ggatggaacgacacgtccctgtactgcccc

SEQ ID NO: 250716 - DNA, 30 bp, Artificial Sequence
  Synthetic oligonucleotide
gctaaagtcctcgatacagggggttgcccc

SEQ ID NO: 250717 - DNA, 30 bp, Artificial Sequence
  Synthetic oligonucleotide
aggagctcatatcgtagacgacgcatcccc

SEQ ID NO: 250718 - DNA, 30 bp, Artificial Sequence
  Synthetic oligonucleotide
atggcgtcggcattatgtgcagctatcccc

SEQ ID NO: 250719 - DNA, 30 bp, Artificial Sequence
  Synthetic oligonucleotide
aactgctatgtcgtggacgggtttatcccc

SEQ ID NO: 250720 - DNA, 30 bp, Artificial Sequence
  Synthetic oligonucleotide
tccgaaatgggtattatacaacaactcccc

SEQ ID NO: 250721 - DNA, 30 bp, Artificial Sequence
  Synthetic oligonucleotide
gcctgctaggtatgtagattatagctcccc

SEQ ID NO: 250722 - DNA, 30 bp, Artificial Sequence
  Synthetic oligonucleotide
atcacggttacagcacgaggaaacgtcccc

SEQ ID NO: 250723 - DNA, 31 bp, Artificial Sequence
  Synthetic oligonucleotide
gtggattctagtgtaatagcagcaattcccc

SEQ ID NO: 250724 - DNA, 30 bp, Artificial Sequence
  Synthetic oligonucleotide
gcagtatctaggatgacagaataattcccc

SEQ ID NO: 250725 - DNA, 30 bp, Artificial Sequence
  Synthetic oligonucleotide
gcgggttacagctatttcgaaccattcccc

SEQ ID NO: 250726 - DNA, 30 bp, Artificial Sequence
  Synthetic oligonucleotide
atagcacggagctcactgtacaagttcccc

SEQ ID NO: 250727 - DNA, 30 bp, Artificial Sequence
  Synthetic oligonucleotide
tagagaccacactcgggtggatatttcccc

SEQ ID NO: 250728 - DNA, 30 bp, Artificial Sequence
  Synthetic oligonucleotide
gacgaaactctgtacttctcttaaaagccc

SEQ ID NO: 250729 - DNA, 30 bp, Artificial Sequence
  Synthetic oligonucleotide
catcgtgcggggaaagataaatcaaagccc

SEQ ID NO: 250730 - DNA, 30 bp, Artificial Sequence
  Synthetic oligonucleotide
tatggccaagactggaatgtatacaagccc

SEQ ID NO: 250731 - DNA, 30 bp, Artificial Sequence
  Synthetic oligonucleotide
cgggcactcacactagtgaaacccaagccc

SEQ ID NO: 250732 - DNA, 30 bp, Artificial Sequence
  Synthetic oligonucleotide
cagaatgattgctgagtgttgatacagccc

SEQ ID NO: 250733 - DNA, 30 bp, Artificial Sequence
  Synthetic oligonucleotide
aggttctgtgaggggtaccgtcgccagccc

SEQ ID NO: 250734 - DNA, 30 bp, Artificial Sequence
  Synthetic oligonucleotide
atggccttaccagcggtccccaagcagccc

SEQ ID NO: 250735 - DNA, 30 bp, Artificial Sequence
  Synthetic oligonucleotide
gacgttgtacaaacgaccaaaattcagccc

SEQ ID NO: 250736 - DNA, 30 bp, Artificial Sequence
  Synthetic oligonucleotide
gtgtcgcttcgaaaacacattgttcagccc

SEQ ID NO: 250737 - DNA, 30 bp, Artificial Sequence
  Synthetic oligonucleotide
gacgagtctaaatgttaggaagcagagccc

SEQ ID NO: 250738 - DNA, 30 bp, Artificial Sequence
  Synthetic oligonucleotide
tacacggcgccccgcacctagcaatagccc

SEQ ID NO: 250739 - DNA, 30 bp, Artificial Sequence
  Synthetic oligonucleotide
ataagcttaatttcagacatttgctagccc

SEQ ID NO: 250740 - DNA, 30 bp, Artificial Sequence
  Synthetic oligonucleotide
ctaaacaaatattcgtataggccttagccc

SEQ ID NO: 250741 - DNA, 30 bp, Artificial Sequence
  Synthetic oligonucleotide
tctgcattgcctcgatccattcgttagccc

SEQ ID NO: 250742 - DNA, 30 bp, Artificial Sequence
  Synthetic oligonucleotide
tacgtcatcacaaagagctgactttagccc

SEQ ID NO: 250743 - DNA, 30 bp, Artificial Sequence
  Synthetic oligonucleotide
gggaggcagaccgcaaaacagctttagccc

SEQ ID NO: 250744 - DNA, 30 bp, Artificial Sequence
  Synthetic oligonucleotide
gacaaacgagtgcccttgcctgccacgccc

SEQ ID NO: 250745 - DNA, 30 bp, Artificial Sequence
  Synthetic oligonucleotide
ctgcgggtaagagtgtataagtccacgccc

SEQ ID NO: 250746 - DNA, 30 bp, Artificial Sequence
  Synthetic oligonucleotide
agcaggttaggcctagtcattggcacgccc

SEQ ID NO: 250747 - DNA, 30 bp, Artificial Sequence
  Synthetic oligonucleotide
ataaccctctaagttcgctgcccgacgccc

SEQ ID NO: 250748 - DNA, 30 bp, Artificial Sequence
  Synthetic oligonucleotide
tcataattatcgtacatccattttccgccc

SEQ ID NO: 250749 - DNA, 30 bp, Artificial Sequence
  Synthetic oligonucleotide
gcaatcttacactattgcccttaagcgccc

SEQ ID NO: 250750 - DNA, 30 bp, Artificial Sequence
  Synthetic oligonucleotide
acctacgcattaacatgtcaaagagcgccc

SEQ ID NO: 250751 - DNA, 30 bp, Artificial Sequence
  Synthetic oligonucleotide
tggcatgatttagtagtagcgatagcgccc

SEQ ID NO: 250752 - DNA, 30 bp, Artificial Sequence
  Synthetic oligonucleotide
gctttgagcatttcaaacttctccgcgccc

SEQ ID NO: 250753 - DNA, 30 bp, Artificial Sequence
  Synthetic oligonucleotide
agaaaactagaacgagtcaaccgcgcgccc

SEQ ID NO: 250754 - DNA, 30 bp, Artificial Sequence
  Synthetic oligonucleotide
ggttcttggtggaccttagtgctcgcgccc

SEQ ID NO: 250755 - DNA, 30 bp, Artificial Sequence
  Synthetic oligonucleotide
attagaaatatgtactagcctttcgcgccc

SEQ ID NO: 250756 - DNA, 30 bp, Artificial Sequence
  Synthetic oligonucleotide
cggcaactacccttagacacaaaggcgccc

SEQ ID NO: 250757 - DNA, 30 bp, Artificial Sequence
  Synthetic oligonucleotide
gccttaaggcaatggagcggggcggcgccc

SEQ ID NO: 250758 - DNA, 30 bp, Artificial Sequence
  Synthetic oligonucleotide
cgcgccgtataagacatttcggaatcgccc

SEQ ID NO: 250759 - DNA, 30 bp, Artificial Sequence
  Synthetic oligonucleotide
atgacagtcgtcagagtctaacgatcgccc

SEQ ID NO: 250760 - DNA, 30 bp, Artificial Sequence
  Synthetic oligonucleotide
aaaggcttacgtaacgagggactatcgccc

SEQ ID NO: 250761 - DNA, 30 bp, Artificial Sequence
  Synthetic oligonucleotide
aaggtgaacgcatccaagttgtggtcgccc

SEQ ID NO: 250762 - DNA, 30 bp, Artificial Sequence
  Synthetic oligonucleotide
cctggggaagtcgctgtgctatgttcgccc

SEQ ID NO: 250763 - DNA, 30 bp, Artificial Sequence
  Synthetic oligonucleotide
aacatctaagcagaacgtaaagtttcgccc

SEQ ID NO: 250764 - DNA, 30 bp, Artificial Sequence
  Synthetic oligonucleotide
cttcggtggtaggccctgcacttttcgccc

SEQ ID NO: 250765 - DNA, 30 bp, Artificial Sequence
  Synthetic oligonucleotide
cagtgtaatgggattcctgtttttaggccc

SEQ ID NO: 250766 - DNA, 30 bp, Artificial Sequence
  Synthetic oligonucleotide
gaatctcttgggaattatccgaccgggccc

SEQ ID NO: 250767 - DNA, 30 bp, Artificial Sequence
  Synthetic oligonucleotide
gggtccaaccagattaagcgtcatgggccc

SEQ ID NO: 250768 - DNA, 30 bp, Artificial Sequence
  Synthetic oligonucleotide
gcttgacctgacacataataaggtgggccc

SEQ ID NO: 250769 - DNA, 30 bp, Artificial Sequence
  Synthetic oligonucleotide
actaccgggatgatactccttcaatggccc

SEQ ID NO: 250770 - DNA, 30 bp, Artificial Sequence
  Synthetic oligonucleotide
tcgtgcacgtcgagcgtgttcttatggccc

SEQ ID NO: 250771 - DNA, 30 bp, Artificial Sequence
  Synthetic oligonucleotide
ccggggcttggtattcgtgggcggtggccc

SEQ ID NO: 250772 - DNA, 30 bp, Artificial Sequence
  Synthetic oligonucleotide
gggttgatccggcaattttacagttggccc

SEQ ID NO: 250773 - DNA, 30 bp, Artificial Sequence
  Synthetic oligonucleotide
cgaacggaatgactctggtctggttggccc

SEQ ID NO: 250774 - DNA, 30 bp, Artificial Sequence
  Synthetic oligonucleotide
gcgtaaaggcgccctttagatctaatgccc

SEQ ID NO: 250775 - DNA, 30 bp, Artificial Sequence
  Synthetic oligonucleotide
gtggtgtaatagaaggtagaagacatgccc

SEQ ID NO: 250776 - DNA, 30 bp, Artificial Sequence
  Synthetic oligonucleotide
cgtattaccagcgggcccggggacatgccc

SEQ ID NO: 250777 - DNA, 30 bp, Artificial Sequence
  Synthetic oligonucleotide
cggctataacaatcattgactcccatgccc

SEQ ID NO: 250778 - DNA, 30 bp, Artificial Sequence
  Synthetic oligonucleotide
gttagcacttcgtaatgattgtgcatgccc

SEQ ID NO: 250779 - DNA, 30 bp, Artificial Sequence
  Synthetic oligonucleotide
tatgtgattgacccgatatgagcgatgccc

SEQ ID NO: 250780 - DNA, 30 bp, Artificial Sequence
  Synthetic oligonucleotide
tcgtcatcaagtagacgcatgccactgccc

SEQ ID NO: 250781 - DNA, 30 bp, Artificial Sequence
  Synthetic oligonucleotide
ggtctgcaatttggatcgggaacgctgccc

SEQ ID NO: 250782 - DNA, 30 bp, Artificial Sequence
  Synthetic oligonucleotide
taggtcgggtcatttattgcgtatctgccc

SEQ ID NO: 250783 - DNA, 30 bp, Artificial Sequence
  Synthetic oligonucleotide
gggtctacttcccctcgtactcaggtgccc

SEQ ID NO: 250784 - DNA, 30 bp, Artificial Sequence
  Synthetic oligonucleotide
ttgtcgaggcttctagaacttacggtgccc

SEQ ID NO: 250785 - DNA, 30 bp, Artificial Sequence
  Synthetic oligonucleotide
cttaaaatacaggttttcccagaattgccc

SEQ ID NO: 250786 - DNA, 30 bp, Artificial Sequence
  Synthetic oligonucleotide
tgccgcggtaaccctcgcatcgtattgccc

SEQ ID NO: 250787 - DNA, 30 bp, Artificial Sequence
  Synthetic oligonucleotide
caccccaggctggaggccgcaaacttgccc

SEQ ID NO: 250788 - DNA, 30 bp, Artificial Sequence
  Synthetic oligonucleotide
aaggactgctctagatgaggcggaaatccc

SEQ ID NO: 250789 - DNA, 30 bp, Artificial Sequence
  Synthetic oligonucleotide
gggcatctcgtggcgcttgagctaaatccc

SEQ ID NO: 250790 - DNA, 30 bp, Artificial Sequence
  Synthetic oligonucleotide
gcgtgtagaaactggagtaaccgcaatccc

SEQ ID NO: 250791 - DNA, 30 bp, Artificial Sequence
  Synthetic oligonucleotide
agatgcttgagtcatactaccttcaatccc

SEQ ID NO: 250792 - DNA, 30 bp, Artificial Sequence
  Synthetic oligonucleotide
agaagggtacaccacctcctggtgaatccc

SEQ ID NO: 250793 - DNA, 30 bp, Artificial Sequence
  Synthetic oligonucleotide
catcagctgactgcacttgcaaaacatccc

SEQ ID NO: 250794 - DNA, 30 bp, Artificial Sequence
  Synthetic oligonucleotide
gcccaaagacaacgtcgcggaaaacatccc

SEQ ID NO: 250795 - DNA, 30 bp, Artificial Sequence
  Synthetic oligonucleotide
cctattatacaactggtatgtcaacatccc

SEQ ID NO: 250796 - DNA, 30 bp, Artificial Sequence
  Synthetic oligonucleotide
gccatgccatgtctaccacagtcacatccc

SEQ ID NO: 250797 - DNA, 30 bp, Artificial Sequence
  Synthetic oligonucleotide
actccagagagaccacatatggtacatccc

SEQ ID NO: 250798 - DNA, 30 bp, Artificial Sequence
  Synthetic oligonucleotide
tcttggtaagtcactggaaatcagcatccc

SEQ ID NO: 250799 - DNA, 30 bp, Artificial Sequence
  Synthetic oligonucleotide
caacatgtgaggacttggtgatatcatccc

SEQ ID NO: 250800 - DNA, 30 bp, Artificial Sequence
  Synthetic oligonucleotide
aagccgtatcgtgtcttacatggtcatccc

SEQ ID NO: 250801 - DNA, 30 bp, Artificial Sequence
  Synthetic oligonucleotide
cagaaagcgggagtaaaaaatggagatccc

SEQ ID NO: 250802 - DNA, 30 bp, Artificial Sequence
  Synthetic oligonucleotide
ggtctgtcattagcaaaagggtgagatccc

SEQ ID NO: 250803 - DNA, 30 bp, Artificial Sequence
  Synthetic oligonucleotide
gtgtacggtcagttccctatgacctatccc

SEQ ID NO: 250804 - DNA, 30 bp, Artificial Sequence
  Synthetic oligonucleotide
gccgagaacgttttgcttatatcctatccc

SEQ ID NO: 250805 - DNA, 30 bp, Artificial Sequence
  Synthetic oligonucleotide
caaggtagttaaggctgtgggccaactccc

SEQ ID NO: 250806 - DNA, 30 bp, Artificial Sequence
  Synthetic oligonucleotide
gcgggaagactgaataactgaagaactccc

SEQ ID NO: 250807 - DNA, 30 bp, Artificial Sequence
  Synthetic oligonucleotide
tgcacgggcggaatatctggtaacactccc

SEQ ID NO: 250808 - DNA, 30 bp, Artificial Sequence
  Synthetic oligonucleotide
tatctcatggcaaacggcgtcaaacctccc

SEQ ID NO: 250809 - DNA, 30 bp, Artificial Sequence
  Synthetic oligonucleotide
atgttactcaacactaccaggtggcctccc

SEQ ID NO: 250810 - DNA, 30 bp, Artificial Sequence
  Synthetic oligonucleotide
tctgaaatggtggactaggattggcctccc

SEQ ID NO: 250811 - DNA, 30 bp, Artificial Sequence
  Synthetic oligonucleotide
ggagctggatgactccgggtttcagctccc

SEQ ID NO: 250812 - DNA, 30 bp, Artificial Sequence
  Synthetic oligonucleotide
actttgttaaagtgtacgaggatagctccc

SEQ ID NO: 250813 - DNA, 30 bp, Artificial Sequence
  Synthetic oligonucleotide
cctttccaaataggatctggttactctccc

SEQ ID NO: 250814 - DNA, 30 bp, Artificial Sequence
  Synthetic oligonucleotide
ccgcgacagattcggattcgtccctctccc

SEQ ID NO: 250815 - DNA, 30 bp, Artificial Sequence
  Synthetic oligonucleotide
tcagtagggaaataatatctgagctctccc

SEQ ID NO: 250816 - DNA, 30 bp, Artificial Sequence
  Synthetic oligonucleotide
gaatagaaccttaatccacacgtctctccc

SEQ ID NO: 250817 - DNA, 30 bp, Artificial Sequence
  Synthetic oligonucleotide
gtgagctcttcgacaactaaatggtctccc

SEQ ID NO: 250818 - DNA, 30 bp, Artificial Sequence
  Synthetic oligonucleotide
tggtaaggttggtttcgcaccatttctccc

SEQ ID NO: 250819 - DNA, 30 bp, Artificial Sequence
  Synthetic oligonucleotide
agggtgccacacgattttatcgacagtccc

SEQ ID NO: 250820 - DNA, 30 bp, Artificial Sequence
  Synthetic oligonucleotide
ggagcaacggctgtcagttctttgagtccc

SEQ ID NO: 250821 - DNA, 30 bp, Artificial Sequence
  Synthetic oligonucleotide
ggtgcttatatggtgcacataggaggtccc

SEQ ID NO: 250822 - DNA, 30 bp, Artificial Sequence
  Synthetic oligonucleotide
gaagtcgcaaattacgctggctccggtccc

SEQ ID NO: 250823 - DNA, 30 bp, Artificial Sequence
  Synthetic oligonucleotide
caaacaaagttgtccacaaaaacgggtccc

SEQ ID NO: 250824 - DNA, 30 bp, Artificial Sequence
  Synthetic oligonucleotide
aagaccctgtttttgccgtccacatgtccc

SEQ ID NO: 250825 - DNA, 30 bp, Artificial Sequence
  Synthetic oligonucleotide
ccgtcacggagtattaaatagacatgtccc

SEQ ID NO: 250826 - DNA, 30 bp, Artificial Sequence
  Synthetic oligonucleotide
ctaatttggatctcggggggcttgtgtccc

SEQ ID NO: 250827 - DNA, 30 bp, Artificial Sequence
  Synthetic oligonucleotide
atgttaagagacaatggataaaagattccc

SEQ ID NO: 250828 - DNA, 30 bp, Artificial Sequence
  Synthetic oligonucleotide
ataagccttttcggcagacttggacttccc

SEQ ID NO: 250829 - DNA, 30 bp, Artificial Sequence
  Synthetic oligonucleotide
ccatttggttacatgtatagagcccttccc

SEQ ID NO: 250830 - DNA, 30 bp, Artificial Sequence
  Synthetic oligonucleotide
ggcacaatcaaggacaccgtgagccttccc

SEQ ID NO: 250831 - DNA, 30 bp, Artificial Sequence
  Synthetic oligonucleotide
cggagccaatcgctcaacgtatggcttccc

SEQ ID NO: 250832 - DNA, 30 bp, Artificial Sequence
  Synthetic oligonucleotide
tgaggtaggtcaccattattctaagttccc

SEQ ID NO: 250833 - DNA, 30 bp, Artificial Sequence
  Synthetic oligonucleotide
ggcaattttatcttgacagatatcgttccc

SEQ ID NO: 250834 - DNA, 30 bp, Artificial Sequence
  Synthetic oligonucleotide
gggcagaaggacactatcccctaggttccc

SEQ ID NO: 250835 - DNA, 30 bp, Artificial Sequence
  Synthetic oligonucleotide
gggaggaacaatatagttgttgcggttccc

SEQ ID NO: 250836 - DNA, 30 bp, Artificial Sequence
  Synthetic oligonucleotide
tcaccagctgtatccagccacactgttccc

SEQ ID NO: 250837 - DNA, 30 bp, Artificial Sequence
  Synthetic oligonucleotide
tcaccagcatggagggagtgctctgttccc

SEQ ID NO: 250838 - DNA, 30 bp, Artificial Sequence
  Synthetic oligonucleotide
agggataaaatacagggtcatgaatttccc

SEQ ID NO: 250839 - DNA, 30 bp, Artificial Sequence
  Synthetic oligonucleotide
aaactattgtagcgtgggccgacatttccc

SEQ ID NO: 250840 - DNA, 30 bp, Artificial Sequence
  Synthetic oligonucleotide
ccggaagggactgggccttcgacaaaagcc

SEQ ID NO: 250841 - DNA, 30 bp, Artificial Sequence
  Synthetic oligonucleotide
tcaccaccgtagagatgttcttacaaagcc

SEQ ID NO: 250842 - DNA, 31 bp, Artificial Sequence
  Synthetic oligonucleotide
gaaatcgaaccgctgtatatgttagaaagcc

SEQ ID NO: 250843 - DNA, 30 bp, Artificial Sequence
  Synthetic oligonucleotide
ggacgtgagaatgcgggattgtcgcaagcc

SEQ ID NO: 250844 - DNA, 30 bp, Artificial Sequence
  Synthetic oligonucleotide
gcagttcaggttctaccaattccagaagcc

SEQ ID NO: 250845 - DNA, 30 bp, Artificial Sequence
  Synthetic oligonucleotide
aaaaagggtcaaccaagcgtccccgaagcc

SEQ ID NO: 250846 - DNA, 30 bp, Artificial Sequence
  Synthetic oligonucleotide
gggggcatccggtctgctaccggcgaagcc

SEQ ID NO: 250847 - DNA, 30 bp, Artificial Sequence
  Synthetic oligonucleotide
ggtggcacccccggcagtgccaaggaagcc

SEQ ID NO: 250848 - DNA, 30 bp, Artificial Sequence
  Synthetic oligonucleotide
atatacatcgaaacgcgagtggaggaagcc

SEQ ID NO: 250849 - DNA, 30 bp, Artificial Sequence
  Synthetic oligonucleotide
cagccctggcaggggagttttatggaagcc

SEQ ID NO: 250850 - DNA, 30 bp, Artificial Sequence
  Synthetic oligonucleotide
tgtgatagagcctacgcaagaagtgaagcc

SEQ ID NO: 250851 - DNA, 30 bp, Artificial Sequence
  Synthetic oligonucleotide
aatagggtatctccaccaataagctaagcc

SEQ ID NO: 250852 - DNA, 30 bp, Artificial Sequence
  Synthetic oligonucleotide
ggtatccagaaatacaatatttcgtaagcc

SEQ ID NO: 250853 - DNA, 30 bp, Artificial Sequence
  Synthetic oligonucleotide
tgattcgaccactataacttaatgtaagcc

SEQ ID NO: 250854 - DNA, 30 bp, Artificial Sequence
  Synthetic oligonucleotide
gaccaataggggatggctcagatttaagcc

SEQ ID NO: 250855 - DNA, 30 bp, Artificial Sequence
  Synthetic oligonucleotide
caaatagagggctagattagataaacagcc

SEQ ID NO: 250856 - DNA, 30 bp, Artificial Sequence
  Synthetic oligonucleotide
gggtagtactatgtacgcgtgcacacagcc

SEQ ID NO: 250857 - DNA, 30 bp, Artificial Sequence
  Synthetic oligonucleotide
agcaccgatgctaagtgtgttttgacagcc

SEQ ID NO: 250858 - DNA, 30 bp, Artificial Sequence
  Synthetic oligonucleotide
tgaaaagagccattgtattaaactacagcc

SEQ ID NO: 250859 - DNA, 30 bp, Artificial Sequence
  Synthetic oligonucleotide
tagggtggatgatttcgtagacgtacagcc

SEQ ID NO: 250860 - DNA, 30 bp, Artificial Sequence
  Synthetic oligonucleotide
atagcccgggtctcagaccctactccagcc

SEQ ID NO: 250861 - DNA, 30 bp, Artificial Sequence
  Synthetic oligonucleotide
cggtaggcctaagtggcgtcgcctccagcc

SEQ ID NO: 250862 - DNA, 30 bp, Artificial Sequence
  Synthetic oligonucleotide
ctcggtccaacagtggtaaaccacgcagcc

SEQ ID NO: 250863 - DNA, 30 bp, Artificial Sequence
  Synthetic oligonucleotide
aacgggcttgtgtggggatccaaggcagcc

SEQ ID NO: 250864 - DNA, 30 bp, Artificial Sequence
  Synthetic oligonucleotide
aggcgatctagactatcgataggtgcagcc

SEQ ID NO: 250865 - DNA, 30 bp, Artificial Sequence
  Synthetic oligonucleotide
cacatcgcgtcagagggaaaccaatcagcc

SEQ ID NO: 250866 - DNA, 30 bp, Artificial Sequence
  Synthetic oligonucleotide
aggttcgataggcttatgaaggaatcagcc

SEQ ID NO: 250867 - DNA, 30 bp, Artificial Sequence
  Synthetic oligonucleotide
caaattctcttaagggtaaatcgatcagcc

SEQ ID NO: 250868 - DNA, 30 bp, Artificial Sequence
  Synthetic oligonucleotide
gacgcaagagaacaccgaaaattctcagcc

SEQ ID NO: 250869 - DNA, 30 bp, Artificial Sequence
  Synthetic oligonucleotide
aggttcacattgggcgtcgcggggtcagcc

SEQ ID NO: 250870 - DNA, 30 bp, Artificial Sequence
  Synthetic oligonucleotide
cagaagaaaagacattaatgtctgtcagcc

SEQ ID NO: 250871 - DNA, 30 bp, Artificial Sequence
  Synthetic oligonucleotide
taaaatatggtggcgagacgagcttcagcc

SEQ ID NO: 250872 - DNA, 30 bp, Artificial Sequence
  Synthetic oligonucleotide
catgaagctaatttgggcttgtgaagagcc

SEQ ID NO: 250873 - DNA, 30 bp, Artificial Sequence
  Synthetic oligonucleotide
cagagttacctcaaggtgcggggcagagcc

SEQ ID NO: 250874 - DNA, 30 bp, Artificial Sequence
  Synthetic oligonucleotide
agaagttccgggagtgcgcttatcagagcc

SEQ ID NO: 250875 - DNA, 30 bp, Artificial Sequence
  Synthetic oligonucleotide
tgagtggggagagtctctagttgtagagcc

SEQ ID NO: 250876 - DNA, 30 bp, Artificial Sequence
  Synthetic oligonucleotide
gaaaaccataacatcaaggatgtccgagcc

SEQ ID NO: 250877 - DNA, 30 bp, Artificial Sequence
  Synthetic oligonucleotide
gtaatagactgaagactattacgcggagcc

SEQ ID NO: 250878 - DNA, 30 bp, Artificial Sequence
  Synthetic oligonucleotide
tctagtaggcttaacgtatcggagggagcc

SEQ ID NO: 250879 - DNA, 30 bp, Artificial Sequence
  Synthetic oligonucleotide
acggttgcgtccagttatttaactggagcc

SEQ ID NO: 250880 - DNA, 30 bp, Artificial Sequence
  Synthetic oligonucleotide
cctccagcgaggtatctctattgtggagcc

SEQ ID NO: 250881 - DNA, 30 bp, Artificial Sequence
  Synthetic oligonucleotide
ccgagtggggtttcggtaaacggatgagcc

SEQ ID NO: 250882 - DNA, 30 bp, Artificial Sequence
  Synthetic oligonucleotide
aaagagtcacgtcataaccagcactgagcc

SEQ ID NO: 250883 - DNA, 30 bp, Artificial Sequence
  Synthetic oligonucleotide
atccgcgttggatatgccacttcctgagcc

SEQ ID NO: 250884 - DNA, 30 bp, Artificial Sequence
  Synthetic oligonucleotide
tgcgtgttgtaaccgtggggcgagtgagcc

SEQ ID NO: 250885 - DNA, 30 bp, Artificial Sequence
  Synthetic oligonucleotide
cagttggcgccagagagaattataatagcc

SEQ ID NO: 250886 - DNA, 30 bp, Artificial Sequence
  Synthetic oligonucleotide
taggctgtcggggagccgatgctaatagcc

SEQ ID NO: 250887 - DNA, 30 bp, Artificial Sequence
  Synthetic oligonucleotide
cctcgcctagggcgcctcttttacatagcc

SEQ ID NO: 250888 - DNA, 30 bp, Artificial Sequence
  Synthetic oligonucleotide
gactggtaaccctaacctgatattatagcc

SEQ ID NO: 250889 - DNA, 30 bp, Artificial Sequence
  Synthetic oligonucleotide
gcagccctagcaagaacactgagactagcc

SEQ ID NO: 250890 - DNA, 30 bp, Artificial Sequence
  Synthetic oligonucleotide
tcctactgaacacgcgccagcaacgtagcc

SEQ ID NO: 250891 - DNA, 30 bp, Artificial Sequence
  Synthetic oligonucleotide
gtaacaaaccatgaacgactgcgggtagcc

SEQ ID NO: 250892 - DNA, 30 bp, Artificial Sequence
  Synthetic oligonucleotide
ctcgcgaacatcggattcggcagattagcc

SEQ ID NO: 250893 - DNA, 30 bp, Artificial Sequence
  Synthetic oligonucleotide
ttggctgtttaccggttcgcattattagcc

SEQ ID NO: 250894 - DNA, 30 bp, Artificial Sequence
  Synthetic oligonucleotide
catctttcgaacttcgtttcgaccttagcc

SEQ ID NO: 250895 - DNA, 30 bp, Artificial Sequence
  Synthetic oligonucleotide
ctggagggacccagctaacaactcttagcc

SEQ ID NO: 250896 - DNA, 30 bp, Artificial Sequence
  Synthetic oligonucleotide
cgatcgaacggtgcaatggaaaggttagcc

SEQ ID NO: 250897 - DNA, 30 bp, Artificial Sequence
  Synthetic oligonucleotide
aaagatcgtcgtcccgaccgatggttagcc

SEQ ID NO: 250898 - DNA, 30 bp, Artificial Sequence
  Synthetic oligonucleotide
gccaatgtccagacgtggcacaggaacgcc

SEQ ID NO: 250899 - DNA, 30 bp, Artificial Sequence
  Synthetic oligonucleotide
cgtaaacatgacgtacggaactataacgcc

SEQ ID NO: 250900 - DNA, 30 bp, Artificial Sequence
  Synthetic oligonucleotide
ctacaggagagggaccacatgtcacacgcc

SEQ ID NO: 250901 - DNA, 30 bp, Artificial Sequence
  Synthetic oligonucleotide
gtggcgccgtttatgttagagagacacgcc

SEQ ID NO: 250902 - DNA, 30 bp, Artificial Sequence
  Synthetic oligonucleotide
tggcccaagcatctctagacctgacacgcc

SEQ ID NO: 250903 - DNA, 30 bp, Artificial Sequence
  Synthetic oligonucleotide
cctgctccgcgatgttccgacagtcacgcc

SEQ ID NO: 250904 - DNA, 30 bp, Artificial Sequence
  Synthetic oligonucleotide
atgatcttgagaaacaggacctgagacgcc

SEQ ID NO: 250905 - DNA, 30 bp, Artificial Sequence
  Synthetic oligonucleotide
agattcatcgagtcgggatgtgtcgacgcc

SEQ ID NO: 250906 - DNA, 30 bp, Artificial Sequence
  Synthetic oligonucleotide
ttgcagggacggatagatcagacggacgcc

SEQ ID NO: 250907 - DNA, 30 bp, Artificial Sequence
  Synthetic oligonucleotide
ctacacgtagcctcgcttacgctggacgcc

SEQ ID NO: 250908 - DNA, 30 bp, Artificial Sequence
  Synthetic oligonucleotide
cacaaacagtcggcagtgttacgctacgcc

SEQ ID NO: 250909 - DNA, 30 bp, Artificial Sequence
  Synthetic oligonucleotide
accattatggacatacacttactctacgcc

SEQ ID NO: 250910 - DNA, 30 bp, Artificial Sequence
  Synthetic oligonucleotide
aacgccgattgttatagaggttcgtacgcc

SEQ ID NO: 250911 - DNA, 30 bp, Artificial Sequence
  Synthetic oligonucleotide
gcaccggaagcacaaggctgggggtacgcc

SEQ ID NO: 250912 - DNA, 30 bp, Artificial Sequence
  Synthetic oligonucleotide
taagtttaaggtcgtatacatgggtacgcc

SEQ ID NO: 250913 - DNA, 30 bp, Artificial Sequence
  Synthetic oligonucleotide
acatcctattggaagtgtggtgattacgcc

SEQ ID NO: 250914 - DNA, 30 bp, Artificial Sequence
  Synthetic oligonucleotide
ggactcgaatttactaaaaggcgaaccgcc

SEQ ID NO: 250915 - DNA, 30 bp, Artificial Sequence
  Synthetic oligonucleotide
tgggattattacgttaaaaccatgaccgcc

SEQ ID NO: 250916 - DNA, 30 bp, Artificial Sequence
  Synthetic oligonucleotide
gcgcgggcttacgttgaccagatccccgcc

SEQ ID NO: 250917 - DNA, 30 bp, Artificial Sequence
  Synthetic oligonucleotide
ccgacctgatcaatttcgcgaaagcccgcc

SEQ ID NO: 250918 - DNA, 30 bp, Artificial Sequence
  Synthetic oligonucleotide
aggagtcggcgtcgtgcctcatcggccgcc

SEQ ID NO: 250919 - DNA, 30 bp, Artificial Sequence
  Synthetic oligonucleotide
tgttggaataggggcttgtacgtggccgcc

SEQ ID NO: 250920 - DNA, 30 bp, Artificial Sequence
  Synthetic oligonucleotide
tctcctgttgcgagttgacgggtggccgcc

SEQ ID NO: 250921 - DNA, 30 bp, Artificial Sequence
  Synthetic oligonucleotide
ccatcgggggcctagttaagagatgccgcc

SEQ ID NO: 250922 - DNA, 30 bp, Artificial Sequence
  Synthetic oligonucleotide
tcagacggcgtacacaatcaccctgccgcc

SEQ ID NO: 250923 - DNA, 30 bp, Artificial Sequence
  Synthetic oligonucleotide
taggcaaatgaaacctatggaaaatccgcc

SEQ ID NO: 250924 - DNA, 30 bp, Artificial Sequence
  Synthetic oligonucleotide
cgtcaatcacagaggacagtataatccgcc

SEQ ID NO: 250925 - DNA, 30 bp, Artificial Sequence
  Synthetic oligonucleotide
actagcacctggacccggctcggatccgcc

SEQ ID NO: 250926 - DNA, 30 bp, Artificial Sequence
  Synthetic oligonucleotide
ggaggggccagtcgctgtcgctcctccgcc

SEQ ID NO: 250927 - DNA, 30 bp, Artificial Sequence
  Synthetic oligonucleotide
tagaccggacttatcggtctacggtccgcc

SEQ ID NO: 250928 - DNA, 30 bp, Artificial Sequence
  Synthetic oligonucleotide
gcctcggcccggaaatcgagaaattccgcc

SEQ ID NO: 250929 - DNA, 30 bp, Artificial Sequence
  Synthetic oligonucleotide
ccgttagactgagagagtgggcattccgcc

SEQ ID NO: 250930 - DNA, 30 bp, Artificial Sequence
  Synthetic oligonucleotide
ggcatgattggatatctattcccaagcgcc

SEQ ID NO: 250931 - DNA, 30 bp, Artificial Sequence
  Synthetic oligonucleotide
atgcgcaacgtagtgcgagcttcaagcgcc

SEQ ID NO: 250932 - DNA, 30 bp, Artificial Sequence
  Synthetic oligonucleotide
gagacattgaaaagcggtagttggagcgcc

SEQ ID NO: 250933 - DNA, 30 bp, Artificial Sequence
  Synthetic oligonucleotide
aattagactgatttgttgttcgaaggcgcc

SEQ ID NO: 250934 - DNA, 30 bp, Artificial Sequence
  Synthetic oligonucleotide
acacgttaaggcatcgagcacataggcgcc

SEQ ID NO: 250935 - DNA, 30 bp, Artificial Sequence
  Synthetic oligonucleotide
cggaatcgctgcaactgaatgtggggcgcc

SEQ ID NO: 250936 - DNA, 30 bp, Artificial Sequence
  Synthetic oligonucleotide
gccgcttgtaatagaaaaacgccatgcgcc

SEQ ID NO: 250937 - DNA, 30 bp, Artificial Sequence
  Synthetic oligonucleotide
gatttctaccgccgcgagtaatcctgcgcc

SEQ ID NO: 250938 - DNA, 30 bp, Artificial Sequence
  Synthetic oligonucleotide
ttgcctaaaaaattgacacattggtgcgcc

SEQ ID NO: 250939 - DNA, 30 bp, Artificial Sequence
  Synthetic oligonucleotide
gtggaggtatcacaggtatttttgtgcgcc

SEQ ID NO: 250940 - DNA, 30 bp, Artificial Sequence
  Synthetic oligonucleotide
tggaggcgcgtttttgtgctaagttgcgcc

SEQ ID NO: 250941 - DNA, 30 bp, Artificial Sequence
  Synthetic oligonucleotide
tggaccgtacgagattaggaaacaatcgcc

SEQ ID NO: 250942 - DNA, 30 bp, Artificial Sequence
  Synthetic oligonucleotide
ggcggcttgtagatccgagcttcaatcgcc

SEQ ID NO: 250943 - DNA, 30 bp, Artificial Sequence
  Synthetic oligonucleotide
tatgggaaacatagcgatgggctaatcgcc

SEQ ID NO: 250944 - DNA, 30 bp, Artificial Sequence
  Synthetic oligonucleotide
ccggtcataaatccgtaattaagtatcgcc

SEQ ID NO: 250945 - DNA, 30 bp, Artificial Sequence
  Synthetic oligonucleotide
ctattaagcagacataccttgaaactcgcc

SEQ ID NO: 250946 - DNA, 30 bp, Artificial Sequence
  Synthetic oligonucleotide
tacacctcggttgagttccggttactcgcc

SEQ ID NO: 250947 - DNA, 30 bp, Artificial Sequence
  Synthetic oligonucleotide
gtaatgggtttcactgaaagaaggctcgcc

SEQ ID NO: 250948 - DNA, 30 bp, Artificial Sequence
  Synthetic oligonucleotide
cggaatttgtggtactaaggaatgctcgcc

SEQ ID NO: 250949 - DNA, 30 bp, Artificial Sequence
  Synthetic oligonucleotide
tgggtcagtgtttgaaaacgcgaagtcgcc

SEQ ID NO: 250950 - DNA, 30 bp, Artificial Sequence
  Synthetic oligonucleotide
aaggtcatttcactagtatacggggtcgcc

SEQ ID NO: 250951 - DNA, 30 bp, Artificial Sequence
  Synthetic oligonucleotide
atcggtcaattagttcgcctgcatgtcgcc

SEQ ID NO: 250952 - DNA, 30 bp, Artificial Sequence
  Synthetic oligonucleotide
gcactgaatgacgagtgcgtggtcttcgcc

SEQ ID NO: 250953 - DNA, 30 bp, Artificial Sequence
  Synthetic oligonucleotide
actatgatccactgccgccgagatttcgcc

SEQ ID NO: 250954 - DNA, 30 bp, Artificial Sequence
  Synthetic oligonucleotide
ggtgcatttccgacggtggaacctttcgcc

SEQ ID NO: 250955 - DNA, 30 bp, Artificial Sequence
  Synthetic oligonucleotide
gcaagctgatccttcaaccacgcaaaggcc

SEQ ID NO: 250956 - DNA, 30 bp, Artificial Sequence
  Synthetic oligonucleotide
gttgttgtgattccaggtgtacgaaaggcc

SEQ ID NO: 250957 - DNA, 30 bp, Artificial Sequence
  Synthetic oligonucleotide
gtcggcataggcgaatattgcggaaaggcc

SEQ ID NO: 250958 - DNA, 30 bp, Artificial Sequence
  Synthetic oligonucleotide
tatcgcacaaactcgtagtctgttaaggcc

SEQ ID NO: 250959 - DNA, 30 bp, Artificial Sequence
  Synthetic oligonucleotide
cgacgtgcgctatgaacccgtccgcaggcc

SEQ ID NO: 250960 - DNA, 30 bp, Artificial Sequence
  Synthetic oligonucleotide
aggagtggtgcttggactggaatgcaggcc

SEQ ID NO: 250961 - DNA, 30 bp, Artificial Sequence
  Synthetic oligonucleotide
ttaacagctacatcaggcgacggtcaggcc

SEQ ID NO: 250962 - DNA, 30 bp, Artificial Sequence
  Synthetic oligonucleotide
ggacgactagaggtctacggctcagaggcc

SEQ ID NO: 250963 - DNA, 30 bp, Artificial Sequence
  Synthetic oligonucleotide
gtattgatattgccatcggcgtgcgaggcc

SEQ ID NO: 250964 - DNA, 30 bp, Artificial Sequence
  Synthetic oligonucleotide
tgtgcacgaatcgattggcccaaggaggcc

SEQ ID NO: 250965 - DNA, 30 bp, Artificial Sequence
  Synthetic oligonucleotide
gaagcggcgacacgcgtggcgatggaggcc

SEQ ID NO: 250966 - DNA, 30 bp, Artificial Sequence
  Synthetic oligonucleotide
agcgattggttaaaggccaatctggaggcc

SEQ ID NO: 250967 - DNA, 30 bp, Artificial Sequence
  Synthetic oligonucleotide
atcaggatagcagggccctgtcgctaggcc

SEQ ID NO: 250968 - DNA, 30 bp, Artificial Sequence
  Synthetic oligonucleotide
agcgtcgtcgttacgctggaactctaggcc

SEQ ID NO: 250969 - DNA, 30 bp, Artificial Sequence
  Synthetic oligonucleotide
tcacagggggtgctgtccaatagaacggcc

SEQ ID NO: 250970 - DNA, 30 bp, Artificial Sequence
  Synthetic oligonucleotide
gatggttaacacgcaaatccaataacggcc

SEQ ID NO: 250971 - DNA, 30 bp, Artificial Sequence
  Synthetic oligonucleotide
gacccttctgagacaaaaccaagcacggcc

SEQ ID NO: 250972 - DNA, 30 bp, Artificial Sequence
  Synthetic oligonucleotide
gacgaaaacggtgcggtgcgaatcacggcc

SEQ ID NO: 250973 - DNA, 30 bp, Artificial Sequence
  Synthetic oligonucleotide
ttgtcgacgtcgggccatctaaagacggcc

SEQ ID NO: 250974 - DNA, 30 bp, Artificial Sequence
  Synthetic oligonucleotide
gccgatttcaagcgaattgaatagacggcc

SEQ ID NO: 250975 - DNA, 30 bp, Artificial Sequence
  Synthetic oligonucleotide
gatcggcggatgaggttaggtgtcccggcc

SEQ ID NO: 250976 - DNA, 30 bp, Artificial Sequence
  Synthetic oligonucleotide
tacagtatatgtaatcatcggttgccggcc

SEQ ID NO: 250977 - DNA, 30 bp, Artificial Sequence
  Synthetic oligonucleotide
aacggcggtcgacattacgtggaagcggcc

SEQ ID NO: 250978 - DNA, 30 bp, Artificial Sequence
  Synthetic oligonucleotide
aatcgggggatcaagtattaggtggcggcc

SEQ ID NO: 250979 - DNA, 30 bp, Artificial Sequence
  Synthetic oligonucleotide
cgcgggctgcgctatgaagacacatcggcc

SEQ ID NO: 250980 - DNA, 30 bp, Artificial Sequence
  Synthetic oligonucleotide
tgctgaacagtagcggtattagcatcggcc

SEQ ID NO: 250981 - DNA, 30 bp, Artificial Sequence
  Synthetic oligonucleotide
cgataaatgcggtggcgattatagtcggcc

SEQ ID NO: 250982 - DNA, 30 bp, Artificial Sequence
  Synthetic oligonucleotide
actgtgaaactatgggccctcgtttcggcc

SEQ ID NO: 250983 - DNA, 30 bp, Artificial Sequence
  Synthetic oligonucleotide
atacatacttaccacttgacgagaagggcc

SEQ ID NO: 250984 - DNA, 30 bp, Artificial Sequence
  Synthetic oligonucleotide
ctgaccaaaaatcatttcaagggtagggcc

SEQ ID NO: 250985 - DNA, 30 bp, Artificial Sequence
  Synthetic oligonucleotide
gatctcagacactaatcgctgtgtagggcc

SEQ ID NO: 250986 - DNA, 30 bp, Artificial Sequence
  Synthetic oligonucleotide
agtatatgttcaacgcaaacaaaccgggcc

SEQ ID NO: 250987 - DNA, 30 bp, Artificial Sequence
  Synthetic oligonucleotide
tcggcactcagtcttaaggctcagcgggcc

SEQ ID NO: 250988 - DNA, 30 bp, Artificial Sequence
  Synthetic oligonucleotide
gctctagactaaatcaaatgcaccggggcc

SEQ ID NO: 250989 - DNA, 30 bp, Artificial Sequence
  Synthetic oligonucleotide
atcgacgtactggagcagttatgcggggcc

SEQ ID NO: 250990 - DNA, 30 bp, Artificial Sequence
  Synthetic oligonucleotide
cctttggacctactctcgtgattcggggcc

SEQ ID NO: 250991 - DNA, 30 bp, Artificial Sequence
  Synthetic oligonucleotide
agcatgagggaggatgggtcgtggggggcc

SEQ ID NO: 250992 - DNA, 30 bp, Artificial Sequence
  Synthetic oligonucleotide
cgcacgcatgactttgggtgatttggggcc

SEQ ID NO: 250993 - DNA, 30 bp, Artificial Sequence
  Synthetic oligonucleotide
ctacgtataaaagttaggtacgcatgggcc

SEQ ID NO: 250994 - DNA, 30 bp, Artificial Sequence
  Synthetic oligonucleotide
ggcgccaaccaagcgccaagaatatgggcc

SEQ ID NO: 250995 - DNA, 31 bp, Artificial Sequence
  Synthetic oligonucleotide
aacatctatcaacaaacacaaccggtgggcc

SEQ ID NO: 250996 - DNA, 30 bp, Artificial Sequence
  Synthetic oligonucleotide
tagaagcgacttcactgggtgagttgggcc

SEQ ID NO: 250997 - DNA, 30 bp, Artificial Sequence
  Synthetic oligonucleotide
gctcaggtctttctcgcgcttgtttgggcc

SEQ ID NO: 250998 - DNA, 30 bp, Artificial Sequence
  Synthetic oligonucleotide
ggaataacatcagttactatgggaatggcc

SEQ ID NO: 250999 - DNA, 30 bp, Artificial Sequence
  Synthetic oligonucleotide
cctaatagctcatatatcgtccgcatggcc

SEQ ID NO: 251000 - DNA, 30 bp, Artificial Sequence
  Synthetic oligonucleotide
aagctccgcgggcacaagtgggccctggcc

SEQ ID NO: 251001 - DNA, 30 bp, Artificial Sequence
  Synthetic oligonucleotide
taggtcccgcgaacgtggctgccagtggcc

SEQ ID NO: 251002 - DNA, 30 bp, Artificial Sequence
  Synthetic oligonucleotide
tccaaacggactacagtgacggcagtggcc

SEQ ID NO: 251003 - DNA, 30 bp, Artificial Sequence
  Synthetic oligonucleotide
tacgggggcttgttcatatgaatagtggcc

SEQ ID NO: 251004 - DNA, 30 bp, Artificial Sequence
  Synthetic oligonucleotide
gttcgctctgatttggagaccaacgtggcc

SEQ ID NO: 251005 - DNA, 30 bp, Artificial Sequence
  Synthetic oligonucleotide
ctgcacagcactcatggatcaagcgtggcc

SEQ ID NO: 251006 - DNA, 30 bp, Artificial Sequence
  Synthetic oligonucleotide
cgcactatcataatgtgaatgccggtggcc

SEQ ID NO: 251007 - DNA, 30 bp, Artificial Sequence
  Synthetic oligonucleotide
tagttcacattcctagaattcagggtggcc

SEQ ID NO: 251008 - DNA, 30 bp, Artificial Sequence
  Synthetic oligonucleotide
ccgacaatgatgcatacgcgccatgtggcc

SEQ ID NO: 251009 - DNA, 30 bp, Artificial Sequence
  Synthetic oligonucleotide
cagaaaattatccaaaatccacgtgtggcc

SEQ ID NO: 251010 - DNA, 30 bp, Artificial Sequence
  Synthetic oligonucleotide
cgtaggggtgctgtagcgggcaaattggcc

SEQ ID NO: 251011 - DNA, 30 bp, Artificial Sequence
  Synthetic oligonucleotide
ttggttactgggtcccttgattcattggcc

SEQ ID NO: 251012 - DNA, 30 bp, Artificial Sequence
  Synthetic oligonucleotide
tttgctaagtaacaatcaaggcacttggcc

SEQ ID NO: 251013 - DNA, 30 bp, Artificial Sequence
  Synthetic oligonucleotide
tgggcgccgacatcatttaatgagttggcc

SEQ ID NO: 251014 - DNA, 30 bp, Artificial Sequence
  Synthetic oligonucleotide
ccactcatctgatgtgacagatggttggcc

SEQ ID NO: 251015 - DNA, 30 bp, Artificial Sequence
  Synthetic oligonucleotide
cgaattgcgcgcgcccaatacggaaatgcc

SEQ ID NO: 251016 - DNA, 30 bp, Artificial Sequence
  Synthetic oligonucleotide
ctgtcaatcatgtttggtcgtggcaatgcc

SEQ ID NO: 251017 - DNA, 30 bp, Artificial Sequence
  Synthetic oligonucleotide
gtatgtgtgcgttgcgtgcgctagaatgcc

SEQ ID NO: 251018 - DNA, 30 bp, Artificial Sequence
  Synthetic oligonucleotide
gccacatggaacatccagctgtagaatgcc

SEQ ID NO: 251019 - DNA, 30 bp, Artificial Sequence
  Synthetic oligonucleotide
gcggccgcctcagcgtgccaacggaatgcc

SEQ ID NO: 251020 - DNA, 30 bp, Artificial Sequence
  Synthetic oligonucleotide
aatgtaaggaattgagctccccggaatgcc

SEQ ID NO: 251021 - DNA, 30 bp, Artificial Sequence
  Synthetic oligonucleotide
atggcaacgtaggttgcacggtctaatgcc

SEQ ID NO: 251022 - DNA, 30 bp, Artificial Sequence
  Synthetic oligonucleotide
ggggcaggttatacgatagtacatcatgcc

SEQ ID NO: 251023 - DNA, 30 bp, Artificial Sequence
  Synthetic oligonucleotide
aggaacccttccgacccttgtaaagatgcc

SEQ ID NO: 251024 - DNA, 30 bp, Artificial Sequence
  Synthetic oligonucleotide
gcaccgcaaagacggatatccggcgatgcc

SEQ ID NO: 251025 - DNA, 30 bp, Artificial Sequence
  Synthetic oligonucleotide
agttgatgcattgcgagcctccaggatgcc

SEQ ID NO: 251026 - DNA, 30 bp, Artificial Sequence
  Synthetic oligonucleotide
ggccatcgattggcaacgttagtctatgcc

SEQ ID NO: 251027 - DNA, 30 bp, Artificial Sequence
  Synthetic oligonucleotide
aaggcttttacgccagtggactggtatgcc

SEQ ID NO: 251028 - DNA, 30 bp, Artificial Sequence
  Synthetic oligonucleotide
cattgtcgccactaaccggcagtgtatgcc

SEQ ID NO: 251029 - DNA, 31 bp, Artificial Sequence
  Synthetic oligonucleotide
tctcgactaacgacgtatgggggtgtatgcc

SEQ ID NO: 251030 - DNA, 30 bp, Artificial Sequence
  Synthetic oligonucleotide
gagacttagccagaaatagggggttatgcc

SEQ ID NO: 251031 - DNA, 30 bp, Artificial Sequence
  Synthetic oligonucleotide
gggacgacttgccggcgagaggcaactgcc

SEQ ID NO: 251032 - DNA, 30 bp, Artificial Sequence
  Synthetic oligonucleotide
tctgcctaacccgccctcgaattaactgcc

SEQ ID NO: 251033 - DNA, 30 bp, Artificial Sequence
  Synthetic oligonucleotide
gcttttagggagtaagttgcagccactgcc

SEQ ID NO: 251034 - DNA, 30 bp, Artificial Sequence
  Synthetic oligonucleotide
caaaggagtgtggttaggagacaacctgcc

SEQ ID NO: 251035 - DNA, 30 bp, Artificial Sequence
  Synthetic oligonucleotide
tgtcaggcggatacttgccatgagcctgcc

SEQ ID NO: 251036 - DNA, 30 bp, Artificial Sequence
  Synthetic oligonucleotide
ccagggagcgtaaggtctacatcagctgcc

SEQ ID NO: 251037 - DNA, 30 bp, Artificial Sequence
  Synthetic oligonucleotide
gaggaccattccatcgtcgactcagctgcc

SEQ ID NO: 251038 - DNA, 30 bp, Artificial Sequence
  Synthetic oligonucleotide
cttctagaggggattggagtacccgctgcc

SEQ ID NO: 251039 - DNA, 30 bp, Artificial Sequence
  Synthetic oligonucleotide
tgagccttccgtatctgatttacatctgcc

SEQ ID NO: 251040 - DNA, 30 bp, Artificial Sequence
  Synthetic oligonucleotide
aggcagtgggagcagcttgccccatctgcc

SEQ ID NO: 251041 - DNA, 30 bp, Artificial Sequence
  Synthetic oligonucleotide
aggctcgccaagggtgtgggctgatctgcc

SEQ ID NO: 251042 - DNA, 30 bp, Artificial Sequence
  Synthetic oligonucleotide
tgaagcacaacgggcaaggtcgcttctgcc

SEQ ID NO: 251043 - DNA, 30 bp, Artificial Sequence
  Synthetic oligonucleotide
gatataggatccggctaggtacgaagtgcc

SEQ ID NO: 251044 - DNA, 30 bp, Artificial Sequence
  Synthetic oligonucleotide
gccagagaaagtaccacctttcgaagtgcc

SEQ ID NO: 251045 - DNA, 30 bp, Artificial Sequence
  Synthetic oligonucleotide
gtagcctctgcacgggtgagggacagtgcc

SEQ ID NO: 251046 - DNA, 30 bp, Artificial Sequence
  Synthetic oligonucleotide
gagcccagtacagactatagaacgcgtgcc

SEQ ID NO: 251047 - DNA, 30 bp, Artificial Sequence
  Synthetic oligonucleotide
tgaggagattcagtggcgtacgccggtgcc

SEQ ID NO: 251048 - DNA, 30 bp, Artificial Sequence
  Synthetic oligonucleotide
tacataattaacattttgttgaagggtgcc

SEQ ID NO: 251049 - DNA, 30 bp, Artificial Sequence
  Synthetic oligonucleotide
cggttccgttcggcgggggcgtggggtgcc

SEQ ID NO: 251050 - DNA, 30 bp, Artificial Sequence
  Synthetic oligonucleotide
aactaagtataggtatgccgaattggtgcc

SEQ ID NO: 251051 - DNA, 30 bp, Artificial Sequence
  Synthetic oligonucleotide
aaacgcttaaagtagtagttgtaatgtgcc

SEQ ID NO: 251052 - DNA, 30 bp, Artificial Sequence
  Synthetic oligonucleotide
aaaaggcctgcatcagaaagggactgtgcc

SEQ ID NO: 251053 - DNA, 30 bp, Artificial Sequence
  Synthetic oligonucleotide
gatataagacccgttgagatatactgtgcc

SEQ ID NO: 251054 - DNA, 30 bp, Artificial Sequence
  Synthetic oligonucleotide
acctggaaaggtatccattcccagtgtgcc

SEQ ID NO: 251055 - DNA, 30 bp, Artificial Sequence
  Synthetic oligonucleotide
atgtctgggttacgtttggtattttgtgcc

SEQ ID NO: 251056 - DNA, 30 bp, Artificial Sequence
  Synthetic oligonucleotide
agcgctcatgtactggaggagataattgcc

SEQ ID NO: 251057 - DNA, 30 bp, Artificial Sequence
  Synthetic oligonucleotide
ttctaaatgtccggggtcggtttcattgcc

SEQ ID NO: 251058 - DNA, 30 bp, Artificial Sequence
  Synthetic oligonucleotide
agatctatagacatagctttaaagattgcc

SEQ ID NO: 251059 - DNA, 30 bp, Artificial Sequence
  Synthetic oligonucleotide
ctctcaccctatgcgaggactgagattgcc

SEQ ID NO: 251060 - DNA, 30 bp, Artificial Sequence
  Synthetic oligonucleotide
taagcgcataatcatgactagattattgcc

SEQ ID NO: 251061 - DNA, 30 bp, Artificial Sequence
  Synthetic oligonucleotide
cggtgaggattgaatcgtcacacacttgcc

SEQ ID NO: 251062 - DNA, 30 bp, Artificial Sequence
  Synthetic oligonucleotide
gggtaattccaatagccggaagctcttgcc

SEQ ID NO: 251063 - DNA, 30 bp, Artificial Sequence
  Synthetic oligonucleotide
agattgtacgcgactattgtgcgtcttgcc

SEQ ID NO: 251064 - DNA, 30 bp, Artificial Sequence
  Synthetic oligonucleotide
caattactccccagtttgaggtttcttgcc

SEQ ID NO: 251065 - DNA, 30 bp, Artificial Sequence
  Synthetic oligonucleotide
atgctacgcgggagctatcctgacgttgcc

SEQ ID NO: 251066 - DNA, 30 bp, Artificial Sequence
  Synthetic oligonucleotide
gagcggagctaatcccctttaagcgttgcc

SEQ ID NO: 251067 - DNA, 30 bp, Artificial Sequence
  Synthetic oligonucleotide
gtcgcaacgttttatggcttgcaggttgcc

SEQ ID NO: 251068 - DNA, 30 bp, Artificial Sequence
  Synthetic oligonucleotide
ctgccggaacgattctaaagtcaggttgcc

SEQ ID NO: 251069 - DNA, 30 bp, Artificial Sequence
  Synthetic oligonucleotide
ccctagcagtccctttgtagcagtgttgcc

SEQ ID NO: 251070 - DNA, 30 bp, Artificial Sequence
  Synthetic oligonucleotide
tgctcaccgttagtggttccagcatttgcc

SEQ ID NO: 251071 - DNA, 30 bp, Artificial Sequence
  Synthetic oligonucleotide
agttgacaccgtgagaaatgcggctttgcc

SEQ ID NO: 251072 - DNA, 30 bp, Artificial Sequence
  Synthetic oligonucleotide
gctttgcctgctaccaattaacagtttgcc

SEQ ID NO: 251073 - DNA, 30 bp, Artificial Sequence
  Synthetic oligonucleotide
gttcccactgtaacttcggtccggtttgcc

SEQ ID NO: 251074 - DNA, 30 bp, Artificial Sequence
  Synthetic oligonucleotide
tgggcggtacgtgtatctagtgattttgcc

SEQ ID NO: 251075 - DNA, 30 bp, Artificial Sequence
  Synthetic oligonucleotide
ggctgataacctccgacccctagttttgcc

SEQ ID NO: 251076 - DNA, 30 bp, Artificial Sequence
  Synthetic oligonucleotide
ggctctcgcaagaattggacaacaaaatcc

SEQ ID NO: 251077 - DNA, 30 bp, Artificial Sequence
  Synthetic oligonucleotide
cgcataaaaacggttaaagggtcaaaatcc

SEQ ID NO: 251078 - DNA, 30 bp, Artificial Sequence
  Synthetic oligonucleotide
accaattgaaggccgttcaatgcgaaatcc

SEQ ID NO: 251079 - DNA, 30 bp, Artificial Sequence
  Synthetic oligonucleotide
taggttggatatcttggccactgtaaatcc

SEQ ID NO: 251080 - DNA, 30 bp, Artificial Sequence
  Synthetic oligonucleotide
agtctggccgcgatagtttgaagccaatcc

SEQ ID NO: 251081 - DNA, 30 bp, Artificial Sequence
  Synthetic oligonucleotide
agagcccgggacgcatattcggcgcaatcc

SEQ ID NO: 251082 - DNA, 30 bp, Artificial Sequence
  Synthetic oligonucleotide
cagcgatcgccccaacggcgttggcaatcc

SEQ ID NO: 251083 - DNA, 30 bp, Artificial Sequence
  Synthetic oligonucleotide
tttgcacttgccgacgacgcaattcaatcc

SEQ ID NO: 251084 - DNA, 30 bp, Artificial Sequence
  Synthetic oligonucleotide
aggccatgtactcttgggcgggaggaatcc

SEQ ID NO: 251085 - DNA, 30 bp, Artificial Sequence
  Synthetic oligonucleotide
gattgtaacgcctagggagattcggaatcc

SEQ ID NO: 251086 - DNA, 30 bp, Artificial Sequence
  Synthetic oligonucleotide
gggtactgaatgttggcgtagagtgaatcc

SEQ ID NO: 251087 - DNA, 30 bp, Artificial Sequence
  Synthetic oligonucleotide
cgttgagtctgttcagatgggcgtgaatcc

SEQ ID NO: 251088 - DNA, 30 bp, Artificial Sequence
  Synthetic oligonucleotide
gcggggatctgtgggcaccctagataatcc

SEQ ID NO: 251089 - DNA, 30 bp, Artificial Sequence
  Synthetic oligonucleotide
cgctatgtggtaggaaaaactttctaatcc

SEQ ID NO: 251090 - DNA, 30 bp, Artificial Sequence
  Synthetic oligonucleotide
tcgctgatgtttgaacaccggttgtaatcc

SEQ ID NO: 251091 - DNA, 30 bp, Artificial Sequence
  Synthetic oligonucleotide
taggccaaaggggcttataatgattaatcc

SEQ ID NO: 251092 - DNA, 30 bp, Artificial Sequence
  Synthetic oligonucleotide
attaatttgtgagccgttctctcaacatcc

SEQ ID NO: 251093 - DNA, 30 bp, Artificial Sequence
  Synthetic oligonucleotide
agaatatgtttctgtggagtgctaacatcc

SEQ ID NO: 251094 - DNA, 30 bp, Artificial Sequence
  Synthetic oligonucleotide
cctttcacaacgcggactaagtacacatcc

SEQ ID NO: 251095 - DNA, 30 bp, Artificial Sequence
  Synthetic oligonucleotide
ctttagactgcacacacgtatgccacatcc

SEQ ID NO: 251096 - DNA, 30 bp, Artificial Sequence
  Synthetic oligonucleotide
gggtgaatagtcaggcgtggttccacatcc

SEQ ID NO: 251097 - DNA, 30 bp, Artificial Sequence
  Synthetic oligonucleotide
tgctgataaggggcataggttggcacatcc

SEQ ID NO: 251098 - DNA, 30 bp, Artificial Sequence
  Synthetic oligonucleotide
gcaatgttcaagctctggtgggtaccatcc

SEQ ID NO: 251099 - DNA, 30 bp, Artificial Sequence
  Synthetic oligonucleotide
ttgttacaatagatagtgaataccccatcc

SEQ ID NO: 251100 - DNA, 30 bp, Artificial Sequence
  Synthetic oligonucleotide
cgtacaggttccggatacctctccccatcc

SEQ ID NO: 251101 - DNA, 30 bp, Artificial Sequence
  Synthetic oligonucleotide
taatgtcgtcgtagggagactcgagcatcc

SEQ ID NO: 251102 - DNA, 30 bp, Artificial Sequence
  Synthetic oligonucleotide
atcgccacaagtcagtggggacccgcatcc

SEQ ID NO: 251103 - DNA, 30 bp, Artificial Sequence
  Synthetic oligonucleotide
caggggctgtttcgtcccctatcggcatcc

SEQ ID NO: 251104 - DNA, 30 bp, Artificial Sequence
  Synthetic oligonucleotide
cgggtgtggatgaatgtaactgtggcatcc

SEQ ID NO: 251105 - DNA, 30 bp, Artificial Sequence
  Synthetic oligonucleotide
ccgcggtcgtggatctctcaaacctcatcc

SEQ ID NO: 251106 - DNA, 30 bp, Artificial Sequence
  Synthetic oligonucleotide
gcgtcagaggccccaactagattgtcatcc

SEQ ID NO: 251107 - DNA, 30 bp, Artificial Sequence
  Synthetic oligonucleotide
cgtttattcgggaaaaccaacgattcatcc

SEQ ID NO: 251108 - DNA, 30 bp, Artificial Sequence
  Synthetic oligonucleotide
gggagccttcctttagagattgaaagatcc

SEQ ID NO: 251109 - DNA, 30 bp, Artificial Sequence
  Synthetic oligonucleotide
gagatgaaatatgtccgctagacaagatcc

SEQ ID NO: 251110 - DNA, 30 bp, Artificial Sequence
  Synthetic oligonucleotide
aagtatcaagaggtaatgaatcacagatcc

SEQ ID NO: 251111 - DNA, 30 bp, Artificial Sequence
  Synthetic oligonucleotide
accttcccttttaggtggctgggcagatcc

SEQ ID NO: 251112 - DNA, 30 bp, Artificial Sequence
  Synthetic oligonucleotide
cctcaacctaagggaaactgtcggagatcc

SEQ ID NO: 251113 - DNA, 30 bp, Artificial Sequence
  Synthetic oligonucleotide
tcacggtttcctgagctatgggtgagatcc

SEQ ID NO: 251114 - DNA, 30 bp, Artificial Sequence
  Synthetic oligonucleotide
gggtgtatcacagtcaaggtgcatagatcc

SEQ ID NO: 251115 - DNA, 30 bp, Artificial Sequence
  Synthetic oligonucleotide
tctgacgtcttgtcgcgcctatgtagatcc

SEQ ID NO: 251116 - DNA, 30 bp, Artificial Sequence
  Synthetic oligonucleotide
gcaccaaacgtatgggtgacttagcgatcc

SEQ ID NO: 251117 - DNA, 30 bp, Artificial Sequence
  Synthetic oligonucleotide
gactcccccaaactaggatgctttcgatcc

SEQ ID NO: 251118 - DNA, 30 bp, Artificial Sequence
  Synthetic oligonucleotide
aacgcctggcatccggcaaagcgaggatcc

SEQ ID NO: 251119 - DNA, 30 bp, Artificial Sequence
  Synthetic oligonucleotide
atcgaagatgtcacgactgtagagggatcc

SEQ ID NO: 251120 - DNA, 30 bp, Artificial Sequence
  Synthetic oligonucleotide
tctggtctgcgtgtaggcttggcgggatcc

SEQ ID NO: 251121 - DNA, 30 bp, Artificial Sequence
  Synthetic oligonucleotide
atctaaggagctcacattgacgatggatcc

SEQ ID NO: 251122 - DNA, 30 bp, Artificial Sequence
  Synthetic oligonucleotide
aagggcgacaacgccgcggctttatgatcc

SEQ ID NO: 251123 - DNA, 30 bp, Artificial Sequence
  Synthetic oligonucleotide
ctgtaaacggggcgatgaatggtctgatcc

SEQ ID NO: 251124 - DNA, 30 bp, Artificial Sequence
  Synthetic oligonucleotide
tggaatgtttgcggcacccaagagtgatcc

SEQ ID NO: 251125 - DNA, 30 bp, Artificial Sequence
  Synthetic oligonucleotide
atagaccgaatctatcgggtggcgtgatcc

SEQ ID NO: 251126 - DNA, 30 bp, Artificial Sequence
  Synthetic oligonucleotide
cagcgactgttaaactgatttaattgatcc

SEQ ID NO: 251127 - DNA, 30 bp, Artificial Sequence
  Synthetic oligonucleotide
acggtaatagatactagagagtcaatatcc

SEQ ID NO: 251128 - DNA, 30 bp, Artificial Sequence
  Synthetic oligonucleotide
tattaggaactgggaggcgaaacgatatcc

SEQ ID NO: 251129 - DNA, 30 bp, Artificial Sequence
  Synthetic oligonucleotide
gcgttacattaccaagcctctgcgatatcc

SEQ ID NO: 251130 - DNA, 30 bp, Artificial Sequence
  Synthetic oligonucleotide
tagttgatatgtgcgtcctgtgatatatcc

SEQ ID NO: 251131 - DNA, 30 bp, Artificial Sequence
  Synthetic oligonucleotide
aacttgggttggacattgttggaactatcc

SEQ ID NO: 251132 - DNA, 30 bp, Artificial Sequence
  Synthetic oligonucleotide
tgatgattcggaaatgagcgatcactatcc

SEQ ID NO: 251133 - DNA, 30 bp, Artificial Sequence
  Synthetic oligonucleotide
aagactctccaacaacagtgtagactatcc

SEQ ID NO: 251134 - DNA, 30 bp, Artificial Sequence
  Synthetic oligonucleotide
agtccaggaccacggatgtggaacctatcc

SEQ ID NO: 251135 - DNA, 30 bp, Artificial Sequence
  Synthetic oligonucleotide
ctctcgttggtccgatatcagaacgtatcc

SEQ ID NO: 251136 - DNA, 30 bp, Artificial Sequence
  Synthetic oligonucleotide
ggtatgtgaagccagctaattgctgtatcc

SEQ ID NO: 251137 - DNA, 30 bp, Artificial Sequence
  Synthetic oligonucleotide
cacagtgctgggtaaagaagtgcattatcc

SEQ ID NO: 251138 - DNA, 30 bp, Artificial Sequence
  Synthetic oligonucleotide
tacgttcgtcggagtatgccagtattatcc

SEQ ID NO: 251139 - DNA, 30 bp, Artificial Sequence
  Synthetic oligonucleotide
ggggcaggggatggggtactgacgttatcc

SEQ ID NO: 251140 - DNA, 30 bp, Artificial Sequence
  Synthetic oligonucleotide
gttagcgaatgaaatcgcgacctgttatcc

SEQ ID NO: 251141 - DNA, 30 bp, Artificial Sequence
  Synthetic oligonucleotide
tcgtttaaggcgcggtcgcggtgtttatcc

SEQ ID NO: 251142 - DNA, 30 bp, Artificial Sequence
  Synthetic oligonucleotide
gcttaacccgttaattgtaagcttttatcc

SEQ ID NO: 251143 - DNA, 30 bp, Artificial Sequence
  Synthetic oligonucleotide
catcgttgaccgtgacacgtaaaaaactcc

SEQ ID NO: 251144 - DNA, 30 bp, Artificial Sequence
  Synthetic oligonucleotide
catttcggcactgacgaatgcaccaactcc

SEQ ID NO: 251145 - DNA, 30 bp, Artificial Sequence
  Synthetic oligonucleotide
agacacgaattgggtgtcctatggaactcc

SEQ ID NO: 251146 - DNA, 30 bp, Artificial Sequence
  Synthetic oligonucleotide
gtgggatcagcgggacaacaaaataactcc

SEQ ID NO: 251147 - DNA, 30 bp, Artificial Sequence
  Synthetic oligonucleotide
ccaagggagctccactcttgtaataactcc

SEQ ID NO: 251148 - DNA, 30 bp, Artificial Sequence
  Synthetic oligonucleotide
tctgtatcggcttgagcagggcctcactcc

SEQ ID NO: 251149 - DNA, 30 bp, Artificial Sequence
  Synthetic oligonucleotide
atgtagaagctccatgtattgctggactcc

SEQ ID NO: 251150 - DNA, 30 bp, Artificial Sequence
  Synthetic oligonucleotide
gcgtgtatgcaaggacggatatttgactcc

SEQ ID NO: 251151 - DNA, 30 bp, Artificial Sequence
  Synthetic oligonucleotide
tcgaccttccttcagacgtaattatactcc

SEQ ID NO: 251152 - DNA, 30 bp, Artificial Sequence
  Synthetic oligonucleotide
tcgcgcggactaagggcacgcggcacctcc

SEQ ID NO: 251153 - DNA, 30 bp, Artificial Sequence
  Synthetic oligonucleotide
ggtcgggatcgtggttaggcgaaaccctcc

SEQ ID NO: 251154 - DNA, 30 bp, Artificial Sequence
  Synthetic oligonucleotide
accattgaatggaactccgttggaccctcc

SEQ ID NO: 251155 - DNA, 30 bp, Artificial Sequence
  Synthetic oligonucleotide
taaacgtagcggcggaactgcattccctcc

SEQ ID NO: 251156 - DNA, 30 bp, Artificial Sequence
  Synthetic oligonucleotide
taatcgcactcggtgataaagacagcctcc

SEQ ID NO: 251157 - DNA, 30 bp, Artificial Sequence
  Synthetic oligonucleotide
gtagaaattggagttatatagcgcgcctcc

SEQ ID NO: 251158 - DNA, 30 bp, Artificial Sequence
  Synthetic oligonucleotide
tcaagatacgtgcgatcatggcttgcctcc

SEQ ID NO: 251159 - DNA, 30 bp, Artificial Sequence
  Synthetic oligonucleotide
taggtagtgaaagctcctttgcactcctcc

SEQ ID NO: 251160 - DNA, 30 bp, Artificial Sequence
  Synthetic oligonucleotide
ccagccttgacaaagtgaggggactcctcc

SEQ ID NO: 251161 - DNA, 30 bp, Artificial Sequence
  Synthetic oligonucleotide
cgtggccagcggcgatgacccaagtcctcc

SEQ ID NO: 251162 - DNA, 30 bp, Artificial Sequence
  Synthetic oligonucleotide
tgaggctaagaaggaaccaagagttcctcc

SEQ ID NO: 251163 - DNA, 30 bp, Artificial Sequence
  Synthetic oligonucleotide
atagaggtcaggtttatggctcgaagctcc

SEQ ID NO: 251164 - DNA, 30 bp, Artificial Sequence
  Synthetic oligonucleotide
ttgtgcaggggtttgcttagcaccagctcc

SEQ ID NO: 251165 - DNA, 30 bp, Artificial Sequence
  Synthetic oligonucleotide
gacgtgtttcgtgtaatgaatttgagctcc

SEQ ID NO: 251166 - DNA, 30 bp, Artificial Sequence
  Synthetic oligonucleotide
agtaaaatagattttcaacgcgtacgctcc

SEQ ID NO: 251167 - DNA, 30 bp, Artificial Sequence
  Synthetic oligonucleotide
aaagatgacgggcacgcgaaccaaggctcc

SEQ ID NO: 251168 - DNA, 30 bp, Artificial Sequence
  Synthetic oligonucleotide
gacgtgtataggttgttcacttgcggctcc

SEQ ID NO: 251169 - DNA, 30 bp, Artificial Sequence
  Synthetic oligonucleotide
catcagatcataaaacaatacattggctcc

SEQ ID NO: 251170 - DNA, 30 bp, Artificial Sequence
  Synthetic oligonucleotide
aggggagctgggacaagtcccaggtgctcc

SEQ ID NO: 251171 - DNA, 30 bp, Artificial Sequence
  Synthetic oligonucleotide
gatgtcgctcacgtccgtagtcaaatctcc

SEQ ID NO: 251172 - DNA, 30 bp, Artificial Sequence
  Synthetic oligonucleotide
agacccccgttggacgctggtgcaatctcc

SEQ ID NO: 251173 - DNA, 30 bp, Artificial Sequence
  Synthetic oligonucleotide
gtttacattgctaaggacctccacatctcc

SEQ ID NO: 251174 - DNA, 30 bp, Artificial Sequence
  Synthetic oligonucleotide
cctacagttaacttttaaaattccatctcc

SEQ ID NO: 251175 - DNA, 30 bp, Artificial Sequence
  Synthetic oligonucleotide
caggctccgtatggcaccgtgctcatctcc

SEQ ID NO: 251176 - DNA, 30 bp, Artificial Sequence
  Synthetic oligonucleotide
agggagacttggaaaatcctccagatctcc

SEQ ID NO: 251177 - DNA, 30 bp, Artificial Sequence
  Synthetic oligonucleotide
tggggttacttgtcctacgagcggatctcc

SEQ ID NO: 251178 - DNA, 30 bp, Artificial Sequence
  Synthetic oligonucleotide
tgaatgttaattagactggatcctatctcc

SEQ ID NO: 251179 - DNA, 30 bp, Artificial Sequence
  Synthetic oligonucleotide
gaaccgggtagaacccatgtacttatctcc

SEQ ID NO: 251180 - DNA, 30 bp, Artificial Sequence
  Synthetic oligonucleotide
aagtgggtgctgctatgagagtcactctcc

SEQ ID NO: 251181 - DNA, 30 bp, Artificial Sequence
  Synthetic oligonucleotide
gcatatctgtatggtaagtcgttactctcc

SEQ ID NO: 251182 - DNA, 30 bp, Artificial Sequence
  Synthetic oligonucleotide
ggggtcgcattttaaatggtgaaagtctcc

SEQ ID NO: 251183 - DNA, 30 bp, Artificial Sequence
  Synthetic oligonucleotide
gaagggtcttctaggcgtgggaatgtctcc

SEQ ID NO: 251184 - DNA, 30 bp, Artificial Sequence
  Synthetic oligonucleotide
ataatggagattgaataggtcagattctcc

SEQ ID NO: 251185 - DNA, 30 bp, Artificial Sequence
  Synthetic oligonucleotide
acctataaaattgtcctagcgcgattctcc

SEQ ID NO: 251186 - DNA, 30 bp, Artificial Sequence
  Synthetic oligonucleotide
gcccgctgcctgctgagggaacacttctcc

SEQ ID NO: 251187 - DNA, 30 bp, Artificial Sequence
  Synthetic oligonucleotide
cgccgttcggaaggccagtagtaaaagtcc

SEQ ID NO: 251188 - DNA, 31 bp, Artificial Sequence
  Synthetic oligonucleotide
cgcgtcgtccagtggcaggcgctacaagtcc

SEQ ID NO: 251189 - DNA, 31 bp, Artificial Sequence
  Synthetic oligonucleotide
ttcgtgggatgaagttgccacgaccaagtcc

SEQ ID NO: 251190 - DNA, 30 bp, Artificial Sequence
  Synthetic oligonucleotide
acgtgttcatgtcattaaagaatgaagtcc

SEQ ID NO: 251191 - DNA, 30 bp, Artificial Sequence
  Synthetic oligonucleotide
gtaaagtactccggtgagaccatgaagtcc

SEQ ID NO: 251192 - DNA, 30 bp, Artificial Sequence
  Synthetic oligonucleotide
gcatcaagggttatacggtaggtgaagtcc

SEQ ID NO: 251193 - DNA, 30 bp, Artificial Sequence
  Synthetic oligonucleotide
cgacgcattaacctctcgctgactaagtcc

SEQ ID NO: 251194 - DNA, 30 bp, Artificial Sequence
  Synthetic oligonucleotide
agtagggggaaactgatatcatgtaagtcc

SEQ ID NO: 251195 - DNA, 30 bp, Artificial Sequence
  Synthetic oligonucleotide
tagacatcaatacgtacatatggacagtcc

SEQ ID NO: 251196 - DNA, 30 bp, Artificial Sequence
  Synthetic oligonucleotide
aggtagtagggtagatgtataatgcagtcc

SEQ ID NO: 251197 - DNA, 30 bp, Artificial Sequence
  Synthetic oligonucleotide
ggaccggtttgacctagagctatgcagtcc

SEQ ID NO: 251198 - DNA, 30 bp, Artificial Sequence
  Synthetic oligonucleotide
cgaattacttggtgaataaggctgcagtcc

SEQ ID NO: 251199 - DNA, 30 bp, Artificial Sequence
  Synthetic oligonucleotide
ggggatagattctgggaagggtatcagtcc

SEQ ID NO: 251200 - DNA, 30 bp, Artificial Sequence
  Synthetic oligonucleotide
aaaacccagtgtacaggtgtttaagagtcc

SEQ ID NO: 251201 - DNA, 30 bp, Artificial Sequence
  Synthetic oligonucleotide
cccgatggtacaggtgagaaagcagagtcc

SEQ ID NO: 251202 - DNA, 30 bp, Artificial Sequence
  Synthetic oligonucleotide
gcctccgagagctacatgcaaaaggagtcc

SEQ ID NO: 251203 - DNA, 30 bp, Artificial Sequence
  Synthetic oligonucleotide
ggtaggtagccagcaggaacaaaggagtcc

SEQ ID NO: 251204 - DNA, 30 bp, Artificial Sequence
  Synthetic oligonucleotide
gaaaagttaaaagattggtgcgatgagtcc

SEQ ID NO: 251205 - DNA, 30 bp, Artificial Sequence
  Synthetic oligonucleotide
ttgcgacagatagaaaagcctagatagtcc

SEQ ID NO: 251206 - DNA, 30 bp, Artificial Sequence
  Synthetic oligonucleotide
gccggtgcagttaaaaccacctagtagtcc

SEQ ID NO: 251207 - DNA, 30 bp, Artificial Sequence
  Synthetic oligonucleotide
ggggccgccatgttattatgttagtagtcc

SEQ ID NO: 251208 - DNA, 30 bp, Artificial Sequence
  Synthetic oligonucleotide
gttgggacacaaggctttaccgggtagtcc

SEQ ID NO: 251209 - DNA, 30 bp, Artificial Sequence
  Synthetic oligonucleotide
agagagccgggagacatccccatttagtcc

SEQ ID NO: 251210 - DNA, 30 bp, Artificial Sequence
  Synthetic oligonucleotide
gccagttaagtgcttgcacgaaaaacgtcc

SEQ ID NO: 251211 - DNA, 30 bp, Artificial Sequence
  Synthetic oligonucleotide
tccataagcaaggtctatctaattacgtcc

SEQ ID NO: 251212 - DNA, 30 bp, Artificial Sequence
  Synthetic oligonucleotide
gctccgctttacacgttgtaggggccgtcc

SEQ ID NO: 251213 - DNA, 30 bp, Artificial Sequence
  Synthetic oligonucleotide
ggaaatggcatgatatggttgctcgcgtcc

SEQ ID NO: 251214 - DNA, 30 bp, Artificial Sequence
  Synthetic oligonucleotide
tggtctaatggtagcggaacccaggcgtcc

SEQ ID NO: 251215 - DNA, 30 bp, Artificial Sequence
  Synthetic oligonucleotide
gagtcagaaggtcggttaatcgcggcgtcc

SEQ ID NO: 251216 - DNA, 30 bp, Artificial Sequence
  Synthetic oligonucleotide
cgcgtatttaagcctaagcggtcaaggtcc

SEQ ID NO: 251217 - DNA, 30 bp, Artificial Sequence
  Synthetic oligonucleotide
gccactgaccgcggtcaactcataaggtcc

SEQ ID NO: 251218 - DNA, 30 bp, Artificial Sequence
  Synthetic oligonucleotide
acacgtcgattttaagcaatgtagaggtcc

SEQ ID NO: 251219 - DNA, 30 bp, Artificial Sequence
  Synthetic oligonucleotide
acgtagtctacaaggctgactacgaggtcc

SEQ ID NO: 251220 - DNA, 30 bp, Artificial Sequence
  Synthetic oligonucleotide
ttccgagccgtggagactcaattgaggtcc

SEQ ID NO: 251221 - DNA, 30 bp, Artificial Sequence
  Synthetic oligonucleotide
tttaatgtgcataccggtaaggataggtcc

SEQ ID NO: 251222 - DNA, 30 bp, Artificial Sequence
  Synthetic oligonucleotide
tgggctttcgttaggtaaaaccttaggtcc

SEQ ID NO: 251223 - DNA, 30 bp, Artificial Sequence
  Synthetic oligonucleotide
tctgaatgcggtaaggttcagaaacggtcc

SEQ ID NO: 251224 - DNA, 30 bp, Artificial Sequence
  Synthetic oligonucleotide
gggacaaattgaaggcacccacgacggtcc

SEQ ID NO: 251225 - DNA, 30 bp, Artificial Sequence
  Synthetic oligonucleotide
acaagcggggtggatgtcggacctcggtcc

SEQ ID NO: 251226 - DNA, 30 bp, Artificial Sequence
  Synthetic oligonucleotide
ggcttggctttaatataagtgacagggtcc

SEQ ID NO: 251227 - DNA, 30 bp, Artificial Sequence
  Synthetic oligonucleotide
taacgacgagtccttgacgtgagagggtcc

SEQ ID NO: 251228 - DNA, 30 bp, Artificial Sequence
  Synthetic oligonucleotide
gaccaaatcgaaattacagggctagggtcc

SEQ ID NO: 251229 - DNA, 30 bp, Artificial Sequence
  Synthetic oligonucleotide
ctagcttgtcgaacagtgccatccgggtcc

SEQ ID NO: 251230 - DNA, 30 bp, Artificial Sequence
  Synthetic oligonucleotide
ctgcgcgtggcgtgggtgggcgctgggtcc

SEQ ID NO: 251231 - DNA, 30 bp, Artificial Sequence
  Synthetic oligonucleotide
ggacaacaccctaagtggtaccttgggtcc

SEQ ID NO: 251232 - DNA, 30 bp, Artificial Sequence
  Synthetic oligonucleotide
tggattcctgtgaaggatggggtatggtcc

SEQ ID NO: 251233 - DNA, 30 bp, Artificial Sequence
  Synthetic oligonucleotide
ttgcgaacatagggagagatgctctggtcc

SEQ ID NO: 251234 - DNA, 30 bp, Artificial Sequence
  Synthetic oligonucleotide
gccacctctatagttccgaagtcgtggtcc

SEQ ID NO: 251235 - DNA, 30 bp, Artificial Sequence
  Synthetic oligonucleotide
ctggcgcattttaggtgtcctatgtggtcc

SEQ ID NO: 251236 - DNA, 30 bp, Artificial Sequence
  Synthetic oligonucleotide
tacaagggggtagtgggcagggtaatgtcc

SEQ ID NO: 251237 - DNA, 30 bp, Artificial Sequence
  Synthetic oligonucleotide
tctttcaaagcagtgagttgctccatgtcc

SEQ ID NO: 251238 - DNA, 30 bp, Artificial Sequence
  Synthetic oligonucleotide
ttaaggagggaatggtagttggagatgtcc

SEQ ID NO: 251239 - DNA, 30 bp, Artificial Sequence
  Synthetic oligonucleotide
ctataagactggcaatgtctgcatatgtcc

SEQ ID NO: 251240 - DNA, 30 bp, Artificial Sequence
  Synthetic oligonucleotide
caaatggaatcaatgatagggaaactgtcc

SEQ ID NO: 251241 - DNA, 30 bp, Artificial Sequence
  Synthetic oligonucleotide
ttttgcacagtgaatcgcaaggcactgtcc

SEQ ID NO: 251242 - DNA, 30 bp, Artificial Sequence
  Synthetic oligonucleotide
atactcggaatgggcaggcgaaagctgtcc

SEQ ID NO: 251243 - DNA, 30 bp, Artificial Sequence
  Synthetic oligonucleotide
aagtcgaacctctgatttgggatgctgtcc

SEQ ID NO: 251244 - DNA, 30 bp, Artificial Sequence
  Synthetic oligonucleotide
gtagggcaatgaacgagacgggaagtgtcc

SEQ ID NO: 251245 - DNA, 30 bp, Artificial Sequence
  Synthetic oligonucleotide
tcggatcaccgcgaaggggatgaagtgtcc

SEQ ID NO: 251246 - DNA, 30 bp, Artificial Sequence
  Synthetic oligonucleotide
tactggaattgtcgaacacggtaagtgtcc

SEQ ID NO: 251247 - DNA, 30 bp, Artificial Sequence
  Synthetic oligonucleotide
tggttccgatcgtctggcttaacggtgtcc

SEQ ID NO: 251248 - DNA, 30 bp, Artificial Sequence
  Synthetic oligonucleotide
gcgtgaccaagacacttggttcgtgtgtcc

SEQ ID NO: 251249 - DNA, 30 bp, Artificial Sequence
  Synthetic oligonucleotide
tagggttccgacggtgattcgcttgtgtcc

SEQ ID NO: 251250 - DNA, 30 bp, Artificial Sequence
  Synthetic oligonucleotide
tggcttgagcacatcgatagcgttgtgtcc

SEQ ID NO: 251251 - DNA, 30 bp, Artificial Sequence
  Synthetic oligonucleotide
agtcgcccaggatgacaggactagttgtcc

SEQ ID NO: 251252 - DNA, 30 bp, Artificial Sequence
  Synthetic oligonucleotide
ttattggtgcatgagtgcccaaggttgtcc

SEQ ID NO: 251253 - DNA, 30 bp, Artificial Sequence
  Synthetic oligonucleotide
caattgtgagtctacgaaggctaaaattcc

SEQ ID NO: 251254 - DNA, 30 bp, Artificial Sequence
  Synthetic oligonucleotide
gagaggccgcacccaaaaagtagaaattcc

SEQ ID NO: 251255 - DNA, 30 bp, Artificial Sequence
  Synthetic oligonucleotide
cccgacggaacgtgcatgggatgcaattcc

SEQ ID NO: 251256 - DNA, 30 bp, Artificial Sequence
  Synthetic oligonucleotide
ccctgttaagtaagagataggtgcaattcc

SEQ ID NO: 251257 - DNA, 30 bp, Artificial Sequence
  Synthetic oligonucleotide
taagcaggtagcacgctgaaaattaattcc

SEQ ID NO: 251258 - DNA, 30 bp, Artificial Sequence
  Synthetic oligonucleotide
gtggatgatttctttatgaaaagacattcc

SEQ ID NO: 251259 - DNA, 30 bp, Artificial Sequence
  Synthetic oligonucleotide
gggaccattcagaaattatcggagcattcc

SEQ ID NO: 251260 - DNA, 30 bp, Artificial Sequence
  Synthetic oligonucleotide
ggtaacacactgagtacgaagactcattcc

SEQ ID NO: 251261 - DNA, 30 bp, Artificial Sequence
  Synthetic oligonucleotide
tacacaattgctccagtctactctcattcc

SEQ ID NO: 251262 - DNA, 30 bp, Artificial Sequence
  Synthetic oligonucleotide
cagagtccgcaagtagacatcaacgattcc

SEQ ID NO: 251263 - DNA, 30 bp, Artificial Sequence
  Synthetic oligonucleotide
aagaagcaggcgtttggtacctgggattcc

SEQ ID NO: 251264 - DNA, 30 bp, Artificial Sequence
  Synthetic oligonucleotide
accataatacgaggtcgtggtggtgattcc

SEQ ID NO: 251265 - DNA, 30 bp, Artificial Sequence
  Synthetic oligonucleotide
acttgcactaggcgagtgttttttgattcc

SEQ ID NO: 251266 - DNA, 30 bp, Artificial Sequence
  Synthetic oligonucleotide
aacacgtaacagagaggcagagggtattcc

SEQ ID NO: 251267 - DNA, 30 bp, Artificial Sequence
  Synthetic oligonucleotide
atgaccaaagtgagggcattagcttattcc

SEQ ID NO: 251268 - DNA, 30 bp, Artificial Sequence
  Synthetic oligonucleotide
tagtcagggctgggtctgcaccagacttcc

SEQ ID NO: 251269 - DNA, 30 bp, Artificial Sequence
  Synthetic oligonucleotide
attagatggacacaaaagcggtttacttcc

SEQ ID NO: 251270 - DNA, 30 bp, Artificial Sequence
  Synthetic oligonucleotide
ggtggttgagcatgccaaagcacaccttcc

SEQ ID NO: 251271 - DNA, 30 bp, Artificial Sequence
  Synthetic oligonucleotide
actattcgacatcggcacttcttaccttcc

SEQ ID NO: 251272 - DNA, 30 bp, Artificial Sequence
  Synthetic oligonucleotide
atcttgatggattataagagccagccttcc

SEQ ID NO: 251273 - DNA, 30 bp, Artificial Sequence
  Synthetic oligonucleotide
tggtagacctagtggacttttatagcttcc

SEQ ID NO: 251274 - DNA, 30 bp, Artificial Sequence
  Synthetic oligonucleotide
aagttggctagtcctgtctaccagtcttcc

SEQ ID NO: 251275 - DNA, 30 bp, Artificial Sequence
  Synthetic oligonucleotide
cctaataacggcatacagcgccaaagttcc

SEQ ID NO: 251276 - DNA, 30 bp, Artificial Sequence
  Synthetic oligonucleotide
ctggtagtagcaaatgtcttcgaaagttcc

SEQ ID NO: 251277 - DNA, 30 bp, Artificial Sequence
  Synthetic oligonucleotide
tagctttggtagaatatacaatcaagttcc

SEQ ID NO: 251278 - DNA, 30 bp, Artificial Sequence
  Synthetic oligonucleotide
caaattgacgatcgataagtgcgcagttcc

SEQ ID NO: 251279 - DNA, 29 bp, Artificial Sequence
  Synthetic oligonucleotide
aacaggttagtgcactttgagtcagttcc

SEQ ID NO: 251280 - DNA, 30 bp, Artificial Sequence
  Synthetic oligonucleotide
gggcggacaaacggaatatcaatgagttcc

SEQ ID NO: 251281 - DNA, 30 bp, Artificial Sequence
  Synthetic oligonucleotide
catacggagggcaggtttcagattagttcc

SEQ ID NO: 251282 - DNA, 30 bp, Artificial Sequence
  Synthetic oligonucleotide
aggccgatagggtgattatagattagttcc

SEQ ID NO: 251283 - DNA, 30 bp, Artificial Sequence
  Synthetic oligonucleotide
cagggaatagctaagggttcccatcgttcc

SEQ ID NO: 251284 - DNA, 30 bp, Artificial Sequence
  Synthetic oligonucleotide
gtacggaacaaggggtcgtatcatcgttcc

SEQ ID NO: 251285 - DNA, 30 bp, Artificial Sequence
  Synthetic oligonucleotide
agcatcgtaggagtccgtggatgtcgttcc

SEQ ID NO: 251286 - DNA, 30 bp, Artificial Sequence
  Synthetic oligonucleotide
gtttggaaatagctgggtgagcttcgttcc

SEQ ID NO: 251287 - DNA, 30 bp, Artificial Sequence
  Synthetic oligonucleotide
agttcttgagagaaaattaacgacggttcc

SEQ ID NO: 251288 - DNA, 30 bp, Artificial Sequence
  Synthetic oligonucleotide
cctgttgtacgtttatacggaaagggttcc

SEQ ID NO: 251289 - DNA, 30 bp, Artificial Sequence
  Synthetic oligonucleotide
tggagcgtggttaacgcctataagggttcc

SEQ ID NO: 251290 - DNA, 30 bp, Artificial Sequence
  Synthetic oligonucleotide
ccagctggacgtatctaactgatgggttcc

SEQ ID NO: 251291 - DNA, 30 bp, Artificial Sequence
  Synthetic oligonucleotide
cagtgtttatgatacataccatatggttcc

SEQ ID NO: 251292 - DNA, 30 bp, Artificial Sequence
  Synthetic oligonucleotide
gagattcaggtgaaaacttcgtaatgttcc

SEQ ID NO: 251293 - DNA, 30 bp, Artificial Sequence
  Synthetic oligonucleotide
tagtggacaccgcaaacaaacacatgttcc

SEQ ID NO: 251294 - DNA, 30 bp, Artificial Sequence
  Synthetic oligonucleotide
caaattaacgtaaaaacctgtgcctgttcc

SEQ ID NO: 251295 - DNA, 30 bp, Artificial Sequence
  Synthetic oligonucleotide
acccaggagggtaagcgtgttccgtgttcc

SEQ ID NO: 251296 - DNA, 30 bp, Artificial Sequence
  Synthetic oligonucleotide
tagtgcatggcaaggatatactcgtgttcc

SEQ ID NO: 251297 - DNA, 30 bp, Artificial Sequence
  Synthetic oligonucleotide
aaagcgagggtccggccggtcaggtgttcc

SEQ ID NO: 251298 - DNA, 30 bp, Artificial Sequence
  Synthetic oligonucleotide
gatgcggtaggatgtactagataaatttcc

SEQ ID NO: 251299 - DNA, 30 bp, Artificial Sequence
  Synthetic oligonucleotide
tgcgtttaagactcattcaaactcatttcc

SEQ ID NO: 251300 - DNA, 30 bp, Artificial Sequence
  Synthetic oligonucleotide
ctattcagtacaaaatccgaacggatttcc

SEQ ID NO: 251301 - DNA, 30 bp, Artificial Sequence
  Synthetic oligonucleotide
gatcgcatcagatctattagggggatttcc

SEQ ID NO: 251302 - DNA, 30 bp, Artificial Sequence
  Synthetic oligonucleotide
ataaggatataatttgaagactgtatttcc

SEQ ID NO: 251303 - DNA, 31 bp, Artificial Sequence
  Synthetic oligonucleotide
gtcgtcggtacactccggtccggccctttcc

SEQ ID NO: 251304 - DNA, 30 bp, Artificial Sequence
  Synthetic oligonucleotide
agctatatggcccggattcttctcctttcc

SEQ ID NO: 251305 - DNA, 30 bp, Artificial Sequence
  Synthetic oligonucleotide
cgttacaaactctggtagtcagaggtttcc

SEQ ID NO: 251306 - DNA, 30 bp, Artificial Sequence
  Synthetic oligonucleotide
aaacagcattatataggctaggaggtttcc

SEQ ID NO: 251307 - DNA, 30 bp, Artificial Sequence
  Synthetic oligonucleotide
agaacgttcgcggcgtttaaagcggtttcc

SEQ ID NO: 251308 - DNA, 30 bp, Artificial Sequence
  Synthetic oligonucleotide
gcacagctgtatgatgattcggtattttcc

SEQ ID NO: 251309 - DNA, 30 bp, Artificial Sequence
  Synthetic oligonucleotide
ctagtcggtttgcgcctgggacccttttcc

SEQ ID NO: 251310 - DNA, 30 bp, Artificial Sequence
  Synthetic oligonucleotide
gaggaaggttttgggctaaaggggttttcc

SEQ ID NO: 251311 - DNA, 30 bp, Artificial Sequence
  Synthetic oligonucleotide
taacattcggacgcgaatcgatctttttcc

SEQ ID NO: 251312 - DNA, 30 bp, Artificial Sequence
  Synthetic oligonucleotide
tcagtttatatctgacaggcggaaaaaagc

SEQ ID NO: 251313 - DNA, 30 bp, Artificial Sequence
  Synthetic oligonucleotide
gtcagcttcgaccaattgctcagaaaaagc

SEQ ID NO: 251314 - DNA, 30 bp, Artificial Sequence
  Synthetic oligonucleotide
agctatgcacattgtgggcactccaaaagc

SEQ ID NO: 251315 - DNA, 30 bp, Artificial Sequence
  Synthetic oligonucleotide
aaggccttccccggccaactccgcaaaagc

SEQ ID NO: 251316 - DNA, 30 bp, Artificial Sequence
  Synthetic oligonucleotide
cgggtgtgtggaagacgacttacacaaagc

SEQ ID NO: 251317 - DNA, 30 bp, Artificial Sequence
  Synthetic oligonucleotide
gagaacgagtgagtgaaatgggtccaaagc

SEQ ID NO: 251318 - DNA, 30 bp, Artificial Sequence
  Synthetic oligonucleotide
aatggggggatggccactaacacgcaaagc

SEQ ID NO: 251319 - DNA, 30 bp, Artificial Sequence
  Synthetic oligonucleotide
tacccgaaacaagtctgcgtcgctcaaagc

SEQ ID NO: 251320 - DNA, 30 bp, Artificial Sequence
  Synthetic oligonucleotide
gggacacagtgtcggggcatagcagaaagc

SEQ ID NO: 251321 - DNA, 27 bp, Artificial Sequence
  Synthetic oligonucleotide
agtcgcgctcacgtgcgacgagaaagc

SEQ ID NO: 251322 - DNA, 30 bp, Artificial Sequence
  Synthetic oligonucleotide
ttttcatggcaacccggcaatcgagaaagc

SEQ ID NO: 251323 - DNA, 30 bp, Artificial Sequence
  Synthetic oligonucleotide
aggtcagcagtccctcacatgtgcgaaagc

SEQ ID NO: 251324 - DNA, 30 bp, Artificial Sequence
  Synthetic oligonucleotide
tgaggctgcccccacactggactcgaaagc

SEQ ID NO: 251325 - DNA, 30 bp, Artificial Sequence
  Synthetic oligonucleotide
ttaaataaaccggttaggcgccgtgaaagc

SEQ ID NO: 251326 - DNA, 30 bp, Artificial Sequence
  Synthetic oligonucleotide
gccaagtgctcatgggtaattgttgaaagc

SEQ ID NO: 251327 - DNA, 30 bp, Artificial Sequence
  Synthetic oligonucleotide
gctgtctcgggaaaggcaaattcataaagc

SEQ ID NO: 251328 - DNA, 30 bp, Artificial Sequence
  Synthetic oligonucleotide
gagaagaaggataaatagtggggataaagc

SEQ ID NO: 251329 - DNA, 30 bp, Artificial Sequence
  Synthetic oligonucleotide
catcggctagccggaagagccatctaaagc

SEQ ID NO: 251330 - DNA, 30 bp, Artificial Sequence
  Synthetic oligonucleotide
ctcgacgaactatcgacatttaagtaaagc

SEQ ID NO: 251331 - DNA, 30 bp, Artificial Sequence
  Synthetic oligonucleotide
caacgtggtatcagtatcaatacttaaagc

SEQ ID NO: 251332 - DNA, 30 bp, Artificial Sequence
  Synthetic oligonucleotide
gtagcatcgaggccttgtccaacaacaagc

SEQ ID NO: 251333 - DNA, 30 bp, Artificial Sequence
  Synthetic oligonucleotide
tgtaacgcatagcgggcatctggcacaagc

SEQ ID NO: 251334 - DNA, 30 bp, Artificial Sequence
  Synthetic oligonucleotide
gtttcgtgcactgtaaacctctcgacaagc

SEQ ID NO: 251335 - DNA, 30 bp, Artificial Sequence
  Synthetic oligonucleotide
tcttggtgtatctcgaaaaaacatacaagc

SEQ ID NO: 251336 - DNA, 30 bp, Artificial Sequence
  Synthetic oligonucleotide
acggtttttaagttagcgtaggcaccaagc

SEQ ID NO: 251337 - DNA, 30 bp, Artificial Sequence
  Synthetic oligonucleotide
aagctgcttaagatttcggcgcacccaagc

SEQ ID NO: 251338 - DNA, 30 bp, Artificial Sequence
  Synthetic oligonucleotide
taaatttagggttagtcttcgtgcccaagc

SEQ ID NO: 251339 - DNA, 30 bp, Artificial Sequence
  Synthetic oligonucleotide
gctcctgtagtgagtgctacttacgcaagc

SEQ ID NO: 251340 - DNA, 30 bp, Artificial Sequence
  Synthetic oligonucleotide
ttaggcgtcctggagcagggggccgcaagc

SEQ ID NO: 251341 - DNA, 30 bp, Artificial Sequence
  Synthetic oligonucleotide
aaagtcacgaaagccgcgcctaatgcaagc

SEQ ID NO: 251342 - DNA, 30 bp, Artificial Sequence
  Synthetic oligonucleotide
ccgactcacatattgacaataagtgcaagc

SEQ ID NO: 251343 - DNA, 30 bp, Artificial Sequence
  Synthetic oligonucleotide
tgcccgttaagatcccattcgaaatcaagc

SEQ ID NO: 251344 - DNA, 30 bp, Artificial Sequence
  Synthetic oligonucleotide
caacataaagggcgtatgttgttatcaagc

SEQ ID NO: 251345 - DNA, 30 bp, Artificial Sequence
  Synthetic oligonucleotide
gtgggattggttccatatggtcgaagaagc

SEQ ID NO: 251346 - DNA, 30 bp, Artificial Sequence
  Synthetic oligonucleotide
attgatatcggtgcgtggatattaagaagc

SEQ ID NO: 251347 - DNA, 30 bp, Artificial Sequence
  Synthetic oligonucleotide
ggcatctgcgaaacaatgtaagtcagaagc

SEQ ID NO: 251348 - DNA, 30 bp, Artificial Sequence
  Synthetic oligonucleotide
cagtatatttggggaaacggcaatagaagc

SEQ ID NO: 251349 - DNA, 30 bp, Artificial Sequence
  Synthetic oligonucleotide
ggtggatgggcattggctgtgtctagaagc

SEQ ID NO: 251350 - DNA, 30 bp, Artificial Sequence
  Synthetic oligonucleotide
atatatgctgaaggtgtgtagggtagaagc

SEQ ID NO: 251351 - DNA, 30 bp, Artificial Sequence
  Synthetic oligonucleotide
cgttattgcgaaggtttaataagacgaagc

SEQ ID NO: 251352 - DNA, 30 bp, Artificial Sequence
  Synthetic oligonucleotide
agtcggcgagaggagggtatcgcccgaagc

SEQ ID NO: 251353 - DNA, 30 bp, Artificial Sequence
  Synthetic oligonucleotide
gacgggtcctacctaaccgttctgcgaagc

SEQ ID NO: 251354 - DNA, 30 bp, Artificial Sequence
  Synthetic oligonucleotide
caatgcagcggggataactagttgcgaagc

SEQ ID NO: 251355 - DNA, 30 bp, Artificial Sequence
  Synthetic oligonucleotide
ttggcttcagaggtgcgggcaaatcgaagc

SEQ ID NO: 251356 - DNA, 30 bp, Artificial Sequence
  Synthetic oligonucleotide
atggttacagacgtcgacatgcatcgaagc

SEQ ID NO: 251357 - DNA, 30 bp, Artificial Sequence
  Synthetic oligonucleotide
acccctaacggtgcatcattacctcgaagc

SEQ ID NO: 251358 - DNA, 30 bp, Artificial Sequence
  Synthetic oligonucleotide
cattgaggttgaaatgtttggtgtcgaagc

SEQ ID NO: 251359 - DNA, 30 bp, Artificial Sequence
  Synthetic oligonucleotide
tccaaggagaactgcgcggcacaaggaagc

SEQ ID NO: 251360 - DNA, 30 bp, Artificial Sequence
  Synthetic oligonucleotide
gcctacggcctatttgggaatcaaggaagc

SEQ ID NO: 251361 - DNA, 30 bp, Artificial Sequence
  Synthetic oligonucleotide
ggtgaccagcaacagttgttcaagggaagc

SEQ ID NO: 251362 - DNA, 30 bp, Artificial Sequence
  Synthetic oligonucleotide
gcgccttgcggggagtacatgaagggaagc

SEQ ID NO: 251363 - DNA, 30 bp, Artificial Sequence
  Synthetic oligonucleotide
atccaccccgtgcatcgtagttagggaagc

SEQ ID NO: 251364 - DNA, 30 bp, Artificial Sequence
  Synthetic oligonucleotide
agtgtagagagcagcgctaaaccatgaagc

SEQ ID NO: 251365 - DNA, 30 bp, Artificial Sequence
  Synthetic oligonucleotide
gtcgggtacaaatagtcaacatgatgaagc

SEQ ID NO: 251366 - DNA, 30 bp, Artificial Sequence
  Synthetic oligonucleotide
gctctcatggagggctaaatctgatgaagc

SEQ ID NO: 251367 - DNA, 30 bp, Artificial Sequence
  Synthetic oligonucleotide
gcgctgaactcaggcgcgaaacgctgaagc

SEQ ID NO: 251368 - DNA, 30 bp, Artificial Sequence
  Synthetic oligonucleotide
ctatctggagatataggagaatgctgaagc

SEQ ID NO: 251369 - DNA, 30 bp, Artificial Sequence
  Synthetic oligonucleotide
ccgtatacctaaccaggtacagtctgaagc

SEQ ID NO: 251370 - DNA, 30 bp, Artificial Sequence
  Synthetic oligonucleotide
tggatcctagtatggcttgccaggataagc

SEQ ID NO: 251371 - DNA, 30 bp, Artificial Sequence
  Synthetic oligonucleotide
ctatatagcgcatacgacttccggataagc

SEQ ID NO: 251372 - DNA, 30 bp, Artificial Sequence
  Synthetic oligonucleotide
ttatagagcgagattggccgaatgataagc

SEQ ID NO: 251373 - DNA, 30 bp, Artificial Sequence
  Synthetic oligonucleotide
ggaatgggtcaccactgaggccatataagc

SEQ ID NO: 251374 - DNA, 30 bp, Artificial Sequence
  Synthetic oligonucleotide
ccgggggcgtcatactcgctggatataagc

SEQ ID NO: 251375 - DNA, 30 bp, Artificial Sequence
  Synthetic oligonucleotide
ccctgcatccagggcattcggggtataagc

SEQ ID NO: 251376 - DNA, 31 bp, Artificial Sequence
  Synthetic oligonucleotide
caaagtccagctttatacgttccttataagc

SEQ ID NO: 251377 - DNA, 30 bp, Artificial Sequence
  Synthetic oligonucleotide
cgttgggcgctgttgaatcctgcactaagc

SEQ ID NO: 251378 - DNA, 30 bp, Artificial Sequence
  Synthetic oligonucleotide
ctagtcctattcggcttactatacctaagc

SEQ ID NO: 251379 - DNA, 30 bp, Artificial Sequence
  Synthetic oligonucleotide
accaccgggtttaaacgtaaaatgctaagc

SEQ ID NO: 251380 - DNA, 30 bp, Artificial Sequence
  Synthetic oligonucleotide
tctggctgcagtcttcccgaactgctaagc

SEQ ID NO: 251381 - DNA, 30 bp, Artificial Sequence
  Synthetic oligonucleotide
agaaatccaattcccgcggaagctctaagc

SEQ ID NO: 251382 - DNA, 30 bp, Artificial Sequence
  Synthetic oligonucleotide
attgaaaatagttggcatattggtctaagc

SEQ ID NO: 251383 - DNA, 30 bp, Artificial Sequence
  Synthetic oligonucleotide
gccagtgtcttgttcatggtccaagtaagc

SEQ ID NO: 251384 - DNA, 30 bp, Artificial Sequence
  Synthetic oligonucleotide
agttcccagcgaattggttaataagtaagc

SEQ ID NO: 251385 - DNA, 30 bp, Artificial Sequence
  Synthetic oligonucleotide
agcaggttggtacgtttcgccagggtaagc

SEQ ID NO: 251386 - DNA, 30 bp, Artificial Sequence
  Synthetic oligonucleotide
cagcaagatttgcgtagtaagcagttaagc

SEQ ID NO: 251387 - DNA, 30 bp, Artificial Sequence
  Synthetic oligonucleotide
catgctgaacagccctccacggagttaagc

SEQ ID NO: 251388 - DNA, 30 bp, Artificial Sequence
  Synthetic oligonucleotide
tgtccacatgtaggttttggaacgttaagc

SEQ ID NO: 251389 - DNA, 30 bp, Artificial Sequence
  Synthetic oligonucleotide
cgggggtgctaggccgcgtagatgttaagc

SEQ ID NO: 251390 - DNA, 30 bp, Artificial Sequence
  Synthetic oligonucleotide
ggcatgctttgatcccaccgacacaacagc

SEQ ID NO: 251391 - DNA, 30 bp, Artificial Sequence
  Synthetic oligonucleotide
cgctccaaattatatattgaaagcaacagc

SEQ ID NO: 251392 - DNA, 30 bp, Artificial Sequence
  Synthetic oligonucleotide
atgaatataggcccaaggggcatcaacagc

SEQ ID NO: 251393 - DNA, 30 bp, Artificial Sequence
  Synthetic oligonucleotide
cagtaccactatgtattggttaagaacagc

SEQ ID NO: 251394 - DNA, 30 bp, Artificial Sequence
  Synthetic oligonucleotide
agtgagcaccaggcaagggctgctaacagc

SEQ ID NO: 251395 - DNA, 30 bp, Artificial Sequence
  Synthetic oligonucleotide
aggtgattcatagtgggggtgagccacagc

SEQ ID NO: 251396 - DNA, 30 bp, Artificial Sequence
  Synthetic oligonucleotide
ggcttgcattccggcgacccgaggcacagc

SEQ ID NO: 251397 - DNA, 30 bp, Artificial Sequence
  Synthetic oligonucleotide
tcaattacgaagattgactgggcagacagc

SEQ ID NO: 251398 - DNA, 30 bp, Artificial Sequence
  Synthetic oligonucleotide
ccggcaattctgaatggtagattggacagc

SEQ ID NO: 251399 - DNA, 30 bp, Artificial Sequence
  Synthetic oligonucleotide
ctaggaaaccttcatcgtcagcactacagc

SEQ ID NO: 251400 - DNA, 30 bp, Artificial Sequence
  Synthetic oligonucleotide
ggcgaaacacgttggtggaaattctacagc

SEQ ID NO: 251401 - DNA, 30 bp, Artificial Sequence
  Synthetic oligonucleotide
agaggtcgtctatcgtggttcaaaaccagc

SEQ ID NO: 251402 - DNA, 27 bp, Artificial Sequence
  Synthetic oligonucleotide
cgttcatatgttaaaatctgaaccagc

SEQ ID NO: 251403 - DNA, 30 bp, Artificial Sequence
  Synthetic oligonucleotide
aactgtacaagctatatcgccctcaccagc

SEQ ID NO: 251404 - DNA, 30 bp, Artificial Sequence
  Synthetic oligonucleotide
ttggggaacaaggccagaggggcacccagc

SEQ ID NO: 251405 - DNA, 30 bp, Artificial Sequence
  Synthetic oligonucleotide
caccttgacaagggggagtgtggccccagc

SEQ ID NO: 251406 - DNA, 30 bp, Artificial Sequence
  Synthetic oligonucleotide
gctaagttcgcaattcgaatatagcccagc

SEQ ID NO: 251407 - DNA, 30 bp, Artificial Sequence
  Synthetic oligonucleotide
ctagaaactctaattccccgatttcccagc

SEQ ID NO: 251408 - DNA, 30 bp, Artificial Sequence
  Synthetic oligonucleotide
gtaagatatgatgttcgtcaaaaagccagc

SEQ ID NO: 251409 - DNA, 30 bp, Artificial Sequence
  Synthetic oligonucleotide
gttgcagcaaatggtgagtgacaagccagc

SEQ ID NO: 251410 - DNA, 30 bp, Artificial Sequence
  Synthetic oligonucleotide
taaccgagaaatgaagcatagtcagccagc

SEQ ID NO: 251411 - DNA, 30 bp, Artificial Sequence
  Synthetic oligonucleotide
cgctatagccgtaagcaaggacgcgccagc

SEQ ID NO: 251412 - DNA, 30 bp, Artificial Sequence
  Synthetic oligonucleotide
tagttaacgacttaaaaagcccgcgccagc

SEQ ID NO: 251413 - DNA, 30 bp, Artificial Sequence
  Synthetic oligonucleotide
ggggtgcactgtttggacatagcggccagc

SEQ ID NO: 251414 - DNA, 30 bp, Artificial Sequence
  Synthetic oligonucleotide
gagtaggggtcaagggtactggatgccagc

SEQ ID NO: 251415 - DNA, 30 bp, Artificial Sequence
  Synthetic oligonucleotide
catagattagcctgtagacttaaatccagc

SEQ ID NO: 251416 - DNA, 30 bp, Artificial Sequence
  Synthetic oligonucleotide
accaattgtcgagtccttcccgcatccagc

SEQ ID NO: 251417 - DNA, 30 bp, Artificial Sequence
  Synthetic oligonucleotide
tagggaccgggttatatacgtgactccagc

SEQ ID NO: 251418 - DNA, 30 bp, Artificial Sequence
  Synthetic oligonucleotide
ggtagcggatctgaaaaccatgcttccagc

SEQ ID NO: 251419 - DNA, 30 bp, Artificial Sequence
  Synthetic oligonucleotide
gaaccccagttgagattgcctcaaagcagc

SEQ ID NO: 251420 - DNA, 30 bp, Artificial Sequence
  Synthetic oligonucleotide
gggtcctcatctagcttaagacttagcagc

SEQ ID NO: 251421 - DNA, 30 bp, Artificial Sequence
  Synthetic oligonucleotide
gtaagaaacatttgtcgagcctttagcagc

SEQ ID NO: 251422 - DNA, 30 bp, Artificial Sequence
  Synthetic oligonucleotide
aacacttggtgcggattaggaacgcgcagc

SEQ ID NO: 251423 - DNA, 30 bp, Artificial Sequence
  Synthetic oligonucleotide
ggcctagatttttacgacgaatcgcgcagc

SEQ ID NO: 251424 - DNA, 30 bp, Artificial Sequence
  Synthetic oligonucleotide
ccctaattgaaatgcaaccatcgtcgcagc

SEQ ID NO: 251425 - DNA, 30 bp, Artificial Sequence
  Synthetic oligonucleotide
ccggagtgacgaatattcggagcgggcagc

SEQ ID NO: 251426 - DNA, 30 bp, Artificial Sequence
  Synthetic oligonucleotide
agctcataatgagaggtttggccatgcagc

SEQ ID NO: 251427 - DNA, 30 bp, Artificial Sequence
  Synthetic oligonucleotide
aaccgtacttcggtcttaccatgatgcagc

SEQ ID NO: 251428 - DNA, 30 bp, Artificial Sequence
  Synthetic oligonucleotide
agaccgatgcggacatcggacgtctgcagc

SEQ ID NO: 251429 - DNA, 30 bp, Artificial Sequence
  Synthetic oligonucleotide
aacggccccgacaattacggccggtgcagc

SEQ ID NO: 251430 - DNA, 30 bp, Artificial Sequence
  Synthetic oligonucleotide
ggtcccaatatatcatttccactttgcagc

SEQ ID NO: 251431 - DNA, 30 bp, Artificial Sequence
  Synthetic oligonucleotide
gggattatttaaaacagtggacaaatcagc

SEQ ID NO: 251432 - DNA, 30 bp, Artificial Sequence
  Synthetic oligonucleotide
gaagaccactggaaaggacgtaccatcagc

SEQ ID NO: 251433 - DNA, 30 bp, Artificial Sequence
  Synthetic oligonucleotide
ctcggaatgtgacgtgtaaaatggatcagc

SEQ ID NO: 251434 - DNA, 30 bp, Artificial Sequence
  Synthetic oligonucleotide
agaggtatggccatgcgaaaattgatcagc

SEQ ID NO: 251435 - DNA, 30 bp, Artificial Sequence
  Synthetic oligonucleotide
acggccagtgtattgcggttacatatcagc

SEQ ID NO: 251436 - DNA, 30 bp, Artificial Sequence
  Synthetic oligonucleotide
ccgcgttcttcaagaggtggtcctatcagc

SEQ ID NO: 251437 - DNA, 30 bp, Artificial Sequence
  Synthetic oligonucleotide
taggcgccactgatgattgaacctctcagc

SEQ ID NO: 251438 - DNA, 30 bp, Artificial Sequence
  Synthetic oligonucleotide
ggcactggccatgatttcgcggaagtcagc

SEQ ID NO: 251439 - DNA, 30 bp, Artificial Sequence
  Synthetic oligonucleotide
gtatcgagagcatttgctgcaagcgtcagc

SEQ ID NO: 251440 - DNA, 30 bp, Artificial Sequence
  Synthetic oligonucleotide
gacaaggaattaatcacagtcacggtcagc

SEQ ID NO: 251441 - DNA, 30 bp, Artificial Sequence
  Synthetic oligonucleotide
gagaactaagagagagtttagtgggtcagc

SEQ ID NO: 251442 - DNA, 30 bp, Artificial Sequence
  Synthetic oligonucleotide
tcctgggcacacctccggagcagtgtcagc

SEQ ID NO: 251443 - DNA, 30 bp, Artificial Sequence
  Synthetic oligonucleotide
atgaagactgcgaccagaatataattcagc

SEQ ID NO: 251444 - DNA, 30 bp, Artificial Sequence
  Synthetic oligonucleotide
gaccgagtagtgggatgtggacacttcagc

SEQ ID NO: 251445 - DNA, 29 bp, Artificial Sequence
  Synthetic oligonucleotide
aggcacaaagtttgaaagtgaggttcagc

SEQ ID NO: 251446 - DNA, 30 bp, Artificial Sequence
  Synthetic oligonucleotide
ggggcaatactcaggcatcgtactttcagc

SEQ ID NO: 251447 - DNA, 30 bp, Artificial Sequence
  Synthetic oligonucleotide
gactgatattaaccacctaatataaagagc

SEQ ID NO: 251448 - DNA, 30 bp, Artificial Sequence
  Synthetic oligonucleotide
acccccgaccggacacataattagaagagc

SEQ ID NO: 251449 - DNA, 30 bp, Artificial Sequence
  Synthetic oligonucleotide
caaatatagctcgaccagtcccggaagagc

SEQ ID NO: 251450 - DNA, 30 bp, Artificial Sequence
  Synthetic oligonucleotide
tcattgattatgaaccgcaagtggaagagc

SEQ ID NO: 251451 - DNA, 30 bp, Artificial Sequence
  Synthetic oligonucleotide
ttgcgagtttattgaatctcgtggaagagc

SEQ ID NO: 251452 - DNA, 30 bp, Artificial Sequence
  Synthetic oligonucleotide
atacattaggaagacctcagatataagagc

SEQ ID NO: 251453 - DNA, 30 bp, Artificial Sequence
  Synthetic oligonucleotide
tggcaggcagttgaggtaatggaacagagc

SEQ ID NO: 251454 - DNA, 30 bp, Artificial Sequence
  Synthetic oligonucleotide
cttggagctgtgtggaatgtcgcacagagc

SEQ ID NO: 251455 - DNA, 30 bp, Artificial Sequence
  Synthetic oligonucleotide
cgcgtgcttttcgcctggcgggatcagagc

SEQ ID NO: 251456 - DNA, 30 bp, Artificial Sequence
  Synthetic oligonucleotide
gcctgacaccctggcgagagcccagagagc

SEQ ID NO: 251457 - DNA, 30 bp, Artificial Sequence
  Synthetic oligonucleotide
tgtccaccctgcacatactcaggggagagc

SEQ ID NO: 251458 - DNA, 30 bp, Artificial Sequence
  Synthetic oligonucleotide
tctacttcatgggctagttatctggagagc

SEQ ID NO: 251459 - DNA, 30 bp, Artificial Sequence
  Synthetic oligonucleotide
tgtagtatcggtaagcgtaatgttgagagc

SEQ ID NO: 251460 - DNA, 40 bp, Artificial Sequence
  Synthetic oligonucleotide
aatcagctctaccgacgggttgggttcaagtgttgagagc

SEQ ID NO: 251461 - DNA, 30 bp, Artificial Sequence
  Synthetic oligonucleotide
gcacaggttgccgggctcgtatgatagagc

SEQ ID NO: 251462 - DNA, 30 bp, Artificial Sequence
  Synthetic oligonucleotide
caaacgctggcgaagcataaggtatagagc

SEQ ID NO: 251463 - DNA, 30 bp, Artificial Sequence
  Synthetic oligonucleotide
tctatggtaactaccccacatggctagagc

SEQ ID NO: 251464 - DNA, 30 bp, Artificial Sequence
  Synthetic oligonucleotide
atagtctttgcacctgagtaatgttagagc

SEQ ID NO: 251465 - DNA, 30 bp, Artificial Sequence
  Synthetic oligonucleotide
gcgcgtcacatgggcaattagctttagagc

SEQ ID NO: 251466 - DNA, 30 bp, Artificial Sequence
  Synthetic oligonucleotide
cttaacaggcagtgggtgttcgtaacgagc

SEQ ID NO: 251467 - DNA, 30 bp, Artificial Sequence
  Synthetic oligonucleotide
tggaagcctctttccatgcccttcacgagc

SEQ ID NO: 251468 - DNA, 30 bp, Artificial Sequence
  Synthetic oligonucleotide
aatatacagtcagaggctgataggacgagc

SEQ ID NO: 251469 - DNA, 30 bp, Artificial Sequence
  Synthetic oligonucleotide
ttacggaaagacgatcgaccgcgtacgagc

SEQ ID NO: 251470 - DNA, 30 bp, Artificial Sequence
  Synthetic oligonucleotide
tcaaaaagatacagttaggtgtgtacgagc

SEQ ID NO: 251471 - DNA, 30 bp, Artificial Sequence
  Synthetic oligonucleotide
agtcaggaggagattgtggacggaccgagc

SEQ ID NO: 251472 - DNA, 30 bp, Artificial Sequence
  Synthetic oligonucleotide
ctaatttcccttattcggagttggccgagc

SEQ ID NO: 251473 - DNA, 30 bp, Artificial Sequence
  Synthetic oligonucleotide
tacctaattgccacagtagttagtccgagc

SEQ ID NO: 251474 - DNA, 30 bp, Artificial Sequence
  Synthetic oligonucleotide
gtatcgtaggggcccggctcgaacgcgagc

SEQ ID NO: 251475 - DNA, 30 bp, Artificial Sequence
  Synthetic oligonucleotide
accatcaacgaactcacattgaatgcgagc

SEQ ID NO: 251476 - DNA, 30 bp, Artificial Sequence
  Synthetic oligonucleotide
ttcatgggttgctgagcgagcgagaggagc

SEQ ID NO: 251477 - DNA, 30 bp, Artificial Sequence
  Synthetic oligonucleotide
ccgtttctacagtcggtaattctccggagc

SEQ ID NO: 251478 - DNA, 30 bp, Artificial Sequence
  Synthetic oligonucleotide
gttactcagagttggctataaagtcggagc

SEQ ID NO: 251479 - DNA, 30 bp, Artificial Sequence
  Synthetic oligonucleotide
ttctgcgctctggttaggacacttcggagc

SEQ ID NO: 251480 - DNA, 30 bp, Artificial Sequence
  Synthetic oligonucleotide
acttgtttagggtgatagcaatttcggagc

SEQ ID NO: 251481 - DNA, 30 bp, Artificial Sequence
  Synthetic oligonucleotide
cgggggtgttgctggcttaggcaagggagc

SEQ ID NO: 251482 - DNA, 30 bp, Artificial Sequence
  Synthetic oligonucleotide
gaacattttggattcgccattagcgggagc

SEQ ID NO: 251483 - DNA, 30 bp, Artificial Sequence
  Synthetic oligonucleotide
gcaggctaggagcagatgcctatggggagc

SEQ ID NO: 251484 - DNA, 30 bp, Artificial Sequence
  Synthetic oligonucleotide
cctaagtgagggattccctcaccatggagc

SEQ ID NO: 251485 - DNA, 29 bp, Artificial Sequence
  Synthetic oligonucleotide
atgacccggctgttagtaatttctggagc

SEQ ID NO: 251486 - DNA, 30 bp, Artificial Sequence
  Synthetic oligonucleotide
ttgagctgcatgtaggatcctacgtggagc

SEQ ID NO: 251487 - DNA, 30 bp, Artificial Sequence
  Synthetic oligonucleotide
tgaatgagctcatccggttacaattggagc

SEQ ID NO: 251488 - DNA, 30 bp, Artificial Sequence
  Synthetic oligonucleotide
tatttcggacaactaggggccttaatgagc

SEQ ID NO: 251489 - DNA, 30 bp, Artificial Sequence
  Synthetic oligonucleotide
ttaggttggtctgcacttacatcgatgagc

SEQ ID NO: 251490 - DNA, 30 bp, Artificial Sequence
  Synthetic oligonucleotide
ggcatgacttgaggtaaagacattatgagc

SEQ ID NO: 251491 - DNA, 30 bp, Artificial Sequence
  Synthetic oligonucleotide
ataacgaacgttggctaagaattagtgagc

SEQ ID NO: 251492 - DNA, 30 bp, Artificial Sequence
  Synthetic oligonucleotide
gccataaattagttgggttcgttagtgagc

SEQ ID NO: 251493 - DNA, 30 bp, Artificial Sequence
  Synthetic oligonucleotide
gttttacaagactcgggtacgatcgtgagc

SEQ ID NO: 251494 - DNA, 30 bp, Artificial Sequence
  Synthetic oligonucleotide
ggtaataattggacagtgtcaaacttgagc

SEQ ID NO: 251495 - DNA, 30 bp, Artificial Sequence
  Synthetic oligonucleotide
acgtcaccggtttcttggaaaggcttgagc

SEQ ID NO: 251496 - DNA, 30 bp, Artificial Sequence
  Synthetic oligonucleotide
taataccgtggacggtaagtttgcttgagc

SEQ ID NO: 251497 - DNA, 30 bp, Artificial Sequence
  Synthetic oligonucleotide
tgggtccggtccgcggatgctctgttgagc

SEQ ID NO: 251498 - DNA, 30 bp, Artificial Sequence
  Synthetic oligonucleotide
actaagtccagtagtcgactgccaaatagc

SEQ ID NO: 251499 - DNA, 30 bp, Artificial Sequence
  Synthetic oligonucleotide
acatgatgacttcagaattcgggaaatagc

SEQ ID NO: 251500 - DNA, 30 bp, Artificial Sequence
  Synthetic oligonucleotide
gcaacggtttgagttcgaaacgtcaatagc

SEQ ID NO: 251501 - DNA, 30 bp, Artificial Sequence
  Synthetic oligonucleotide
tggacccgcgcgttatgccggaggaatagc

SEQ ID NO: 251502 - DNA, 30 bp, Artificial Sequence
  Synthetic oligonucleotide
ggtcattcctagaaacataagttgaatagc

SEQ ID NO: 251503 - DNA, 30 bp, Artificial Sequence
  Synthetic oligonucleotide
gaacgctcagttgtgcatagtcaccatagc

SEQ ID NO: 251504 - DNA, 30 bp, Artificial Sequence
  Synthetic oligonucleotide
taaagagcgagtgcgcttgaggcgcatagc

SEQ ID NO: 251505 - DNA, 30 bp, Artificial Sequence
  Synthetic oligonucleotide
cactagtgtatttgagatacttcgcatagc

SEQ ID NO: 251506 - DNA, 30 bp, Artificial Sequence
  Synthetic oligonucleotide
tgctgaaaacgttgcccgtctcggcatagc

SEQ ID NO: 251507 - DNA, 30 bp, Artificial Sequence
  Synthetic oligonucleotide
gaccttgaaacaacattcgttctgcatagc

SEQ ID NO: 251508 - DNA, 30 bp, Artificial Sequence
  Synthetic oligonucleotide
gacccatgggttagctcgttccgtcatagc

SEQ ID NO: 251509 - DNA, 30 bp, Artificial Sequence
  Synthetic oligonucleotide
atagggacgcggtctaaatggtttcatagc

SEQ ID NO: 251510 - DNA, 30 bp, Artificial Sequence
  Synthetic oligonucleotide
cagttgaattggactctctattgagatagc

SEQ ID NO: 251511 - DNA, 30 bp, Artificial Sequence
  Synthetic oligonucleotide
cctcgttttactttgccggtcttagatagc

SEQ ID NO: 251512 - DNA, 30 bp, Artificial Sequence
  Synthetic oligonucleotide
agggtatggtcttaggagcacgtcgatagc

SEQ ID NO: 251513 - DNA, 30 bp, Artificial Sequence
  Synthetic oligonucleotide
atcaaccagagaagtaactgttgggatagc

SEQ ID NO: 251514 - DNA, 30 bp, Artificial Sequence
  Synthetic oligonucleotide
ggctagtcgtgtgtattgcccaaatatagc

SEQ ID NO: 251515 - DNA, 30 bp, Artificial Sequence
  Synthetic oligonucleotide
agctgaaataaagtcattgggtgatatagc

SEQ ID NO: 251516 - DNA, 30 bp, Artificial Sequence
  Synthetic oligonucleotide
cggaagcggtgcactgctcgggactatagc

SEQ ID NO: 251517 - DNA, 30 bp, Artificial Sequence
  Synthetic oligonucleotide
cccttgctggctagggcttaaaagtatagc

SEQ ID NO: 251518 - DNA, 30 bp, Artificial Sequence
  Synthetic oligonucleotide
ggttcaggctcaaaatgtcgcgcgtatagc

SEQ ID NO: 251519 - DNA, 30 bp, Artificial Sequence
  Synthetic oligonucleotide
gggccgtaatatgttaggctgatttatagc

SEQ ID NO: 251520 - DNA, 30 bp, Artificial Sequence
  Synthetic oligonucleotide
gtagaaaacaatttcaatcataaaactagc

SEQ ID NO: 251521 - DNA, 30 bp, Artificial Sequence
  Synthetic oligonucleotide
accaaagtcagttcagggtgatacactagc

SEQ ID NO: 251522 - DNA, 30 bp, Artificial Sequence
  Synthetic oligonucleotide
gctacattcacttatggttccttgactagc

SEQ ID NO: 251523 - DNA, 30 bp, Artificial Sequence
  Synthetic oligonucleotide
tttcacacgccaaaagtctataagcctagc

SEQ ID NO: 251524 - DNA, 30 bp, Artificial Sequence
  Synthetic oligonucleotide
gtaatctcgttgtcaccgggagcgcctagc

SEQ ID NO: 251525 - DNA, 30 bp, Artificial Sequence
  Synthetic oligonucleotide
gagaattagaatccctatcgtcccgctagc

SEQ ID NO: 251526 - DNA, 30 bp, Artificial Sequence
  Synthetic oligonucleotide
agcgtgagatccggctgtaaggccgctagc

SEQ ID NO: 251527 - DNA, 30 bp, Artificial Sequence
  Synthetic oligonucleotide
aagacgggcaggacggctaacgcggctagc

SEQ ID NO: 251528 - DNA, 30 bp, Artificial Sequence
  Synthetic oligonucleotide
atattcagcggagatatagtcgatgctagc

SEQ ID NO: 251529 - DNA, 30 bp, Artificial Sequence
  Synthetic oligonucleotide
aaagatagacggtatcattggtgtgctagc

SEQ ID NO: 251530 - DNA, 30 bp, Artificial Sequence
  Synthetic oligonucleotide
ggagcatacgggaagtattctattgctagc

SEQ ID NO: 251531 - DNA, 30 bp, Artificial Sequence
  Synthetic oligonucleotide
tgctgcaaaccagcccaacctcaatctagc

SEQ ID NO: 251532 - DNA, 30 bp, Artificial Sequence
  Synthetic oligonucleotide
acattccgaatgactaggaaagcatctagc

SEQ ID NO: 251533 - DNA, 30 bp, Artificial Sequence
  Synthetic oligonucleotide
cggttacttctcagaaaaccgtggtctagc

SEQ ID NO: 251534 - DNA, 30 bp, Artificial Sequence
  Synthetic oligonucleotide
ttggagagttagggcatgggcctgtctagc

SEQ ID NO: 251535 - DNA, 30 bp, Artificial Sequence
  Synthetic oligonucleotide
catatatctacgtcaagaggaggaagtagc

SEQ ID NO: 251536 - DNA, 30 bp, Artificial Sequence
  Synthetic oligonucleotide
caacaatctaaactgagattaaccagtagc

SEQ ID NO: 251537 - DNA, 30 bp, Artificial Sequence
  Synthetic oligonucleotide
gaagcggaacgccaatcatggcgcagtagc

SEQ ID NO: 251538 - DNA, 30 bp, Artificial Sequence
  Synthetic oligonucleotide
cagtcgtgggcggcgagtctgtagagtagc

SEQ ID NO: 251539 - DNA, 30 bp, Artificial Sequence
  Synthetic oligonucleotide
gaatgagcgcgcaagccaaggtcgagtagc

SEQ ID NO: 251540 - DNA, 30 bp, Artificial Sequence
  Synthetic oligonucleotide
atataatcctactgggtccacaggagtagc

SEQ ID NO: 251541 - DNA, 30 bp, Artificial Sequence
  Synthetic oligonucleotide
tggtgtaatatttcgagcttacgtagtagc

SEQ ID NO: 251542 - DNA, 30 bp, Artificial Sequence
  Synthetic oligonucleotide
aacaggtactagagaaatggtcttagtagc

SEQ ID NO: 251543 - DNA, 30 bp, Artificial Sequence
  Synthetic oligonucleotide
gcgtatggtttcaatccgtatgaacgtagc

SEQ ID NO: 251544 - DNA, 30 bp, Artificial Sequence
  Synthetic oligonucleotide
tacccagaaggcacccgtgtagcacgtagc

SEQ ID NO: 251545 - DNA, 30 bp, Artificial Sequence
  Synthetic oligonucleotide
gttcgccgcgtcggattagaacggcgtagc

SEQ ID NO: 251546 - DNA, 30 bp, Artificial Sequence
  Synthetic oligonucleotide
tcatactgcacatcgcaacagatgcgtagc

SEQ ID NO: 251547 - DNA, 30 bp, Artificial Sequence
  Synthetic oligonucleotide
gtaaggcccgaaaagacgttccctcgtagc

SEQ ID NO: 251548 - DNA, 30 bp, Artificial Sequence
  Synthetic oligonucleotide
aggtacaaaaataagccgttctttcgtagc

SEQ ID NO: 251549 - DNA, 30 bp, Artificial Sequence
  Synthetic oligonucleotide
tcaatcattatgtgataaccgagaggtagc

SEQ ID NO: 251550 - DNA, 30 bp, Artificial Sequence
  Synthetic oligonucleotide
ctgtgtaggtgctcgattttgagaggtagc

SEQ ID NO: 251551 - DNA, 30 bp, Artificial Sequence
  Synthetic oligonucleotide
tgaaatgcgatagcattgaggaccggtagc

SEQ ID NO: 251552 - DNA, 30 bp, Artificial Sequence
  Synthetic oligonucleotide
gagctggaatgggtcaggctacccggtagc

SEQ ID NO: 251553 - DNA, 30 bp, Artificial Sequence
  Synthetic oligonucleotide
tatcagccttacgagattaacagcggtagc

SEQ ID NO: 251554 - DNA, 30 bp, Artificial Sequence
  Synthetic oligonucleotide
cggggaaaggccacaatccccgtcggtagc

SEQ ID NO: 251555 - DNA, 30 bp, Artificial Sequence
  Synthetic oligonucleotide
agccttttcacaagagattcaccgggtagc

SEQ ID NO: 251556 - DNA, 30 bp, Artificial Sequence
  Synthetic oligonucleotide
ccatccattggaaacattgtatggggtagc

SEQ ID NO: 251557 - DNA, 30 bp, Artificial Sequence
  Synthetic oligonucleotide
gctaagtcggtttctaggtcatgatgtagc

SEQ ID NO: 251558 - DNA, 30 bp, Artificial Sequence
  Synthetic oligonucleotide
ttgcgcttattattagtaagattatgtagc

SEQ ID NO: 251559 - DNA, 30 bp, Artificial Sequence
  Synthetic oligonucleotide
cgcccttggcggatttcccagtgctgtagc

SEQ ID NO: 251560 - DNA, 30 bp, Artificial Sequence
  Synthetic oligonucleotide
aatcatacgggcacgtaggccaggtgtagc

SEQ ID NO: 251561 - DNA, 30 bp, Artificial Sequence
  Synthetic oligonucleotide
agaagaacactccggtagtacttcattagc

SEQ ID NO: 251562 - DNA, 30 bp, Artificial Sequence
  Synthetic oligonucleotide
tttgcccgttaacgacatcccaggattagc

SEQ ID NO: 251563 - DNA, 30 bp, Artificial Sequence
  Synthetic oligonucleotide
tctgagtctgggtattagatcactattagc

SEQ ID NO: 251564 - DNA, 30 bp, Artificial Sequence
  Synthetic oligonucleotide
tgtaagtagtaaacactgagatctattagc

SEQ ID NO: 251565 - DNA, 30 bp, Artificial Sequence
  Synthetic oligonucleotide
ggtagcatattgctagcaatggaacttagc

SEQ ID NO: 251566 - DNA, 30 bp, Artificial Sequence
  Synthetic oligonucleotide
gcgattaactcccgttttcgtgaacttagc

SEQ ID NO: 251567 - DNA, 30 bp, Artificial Sequence
  Synthetic oligonucleotide
tcgcggatctaatctcgtaattcacttagc

SEQ ID NO: 251568 - DNA, 30 bp, Artificial Sequence
  Synthetic oligonucleotide
ggtgtgcaatgccaaaatggtgtacttagc

SEQ ID NO: 251569 - DNA, 30 bp, Artificial Sequence
  Synthetic oligonucleotide
gcaggtatacaaatgtatcatttacttagc

SEQ ID NO: 251570 - DNA, 30 bp, Artificial Sequence
  Synthetic oligonucleotide
aaaaagctaccgagaatacacaggcttagc

SEQ ID NO: 251571 - DNA, 30 bp, Artificial Sequence
  Synthetic oligonucleotide
acctaaaccgaatattttacgctgcttagc

SEQ ID NO: 251572 - DNA, 30 bp, Artificial Sequence
  Synthetic oligonucleotide
tcacaactagattcagggcgaattcttagc

SEQ ID NO: 251573 - DNA, 30 bp, Artificial Sequence
  Synthetic oligonucleotide
gtatccatgacgggtatttcagacgttagc

SEQ ID NO: 251574 - DNA, 30 bp, Artificial Sequence
  Synthetic oligonucleotide
actttctcgggcattggtgcagtaaaacgc

SEQ ID NO: 251575 - DNA, 30 bp, Artificial Sequence
  Synthetic oligonucleotide
tctccgaatagcgtctagcaagtcaaacgc

SEQ ID NO: 251576 - DNA, 30 bp, Artificial Sequence
  Synthetic oligonucleotide
gacaccgcaggataaaatggtacgaaacgc

SEQ ID NO: 251577 - DNA, 30 bp, Artificial Sequence
  Synthetic oligonucleotide
cgctcttatgctaaaaaacttatgaaacgc

SEQ ID NO: 251578 - DNA, 30 bp, Artificial Sequence
  Synthetic oligonucleotide
tgaggaggcttgttaggtgcgaaacaacgc

SEQ ID NO: 251579 - DNA, 30 bp, Artificial Sequence
  Synthetic oligonucleotide
agtttgtacaggatccgtacagaacaacgc

SEQ ID NO: 251580 - DNA, 30 bp, Artificial Sequence
  Synthetic oligonucleotide
ttgtaaactagaacggtgggaaaccaacgc

SEQ ID NO: 251581 - DNA, 30 bp, Artificial Sequence
  Synthetic oligonucleotide
cgtatctggcaagcggcccccccccaacgc

SEQ ID NO: 251582 - DNA, 30 bp, Artificial Sequence
  Synthetic oligonucleotide
aacgacgtctatgaatcccctgcgcaacgc

SEQ ID NO: 251583 - DNA, 30 bp, Artificial Sequence
  Synthetic oligonucleotide
agaatagttactacacggcgtgcgcaacgc

SEQ ID NO: 251584 - DNA, 30 bp, Artificial Sequence
  Synthetic oligonucleotide
ggccccaaaggacgaaggtcacggcaacgc

SEQ ID NO: 251585 - DNA, 30 bp, Artificial Sequence
  Synthetic oligonucleotide
gatccttagccaccaagaggacatcaacgc

SEQ ID NO: 251586 - DNA, 30 bp, Artificial Sequence
  Synthetic oligonucleotide
cttcaagcagccgatacaaaagacgaacgc

SEQ ID NO: 251587 - DNA, 30 bp, Artificial Sequence
  Synthetic oligonucleotide
cgtaagaagtaaacaccaccattggaacgc

SEQ ID NO: 251588 - DNA, 30 bp, Artificial Sequence
  Synthetic oligonucleotide
cgacaacttttggattaccggagtgaacgc

SEQ ID NO: 251589 - DNA, 30 bp, Artificial Sequence
  Synthetic oligonucleotide
tgaatataggtacagtcaactgtctaacgc

SEQ ID NO: 251590 - DNA, 30 bp, Artificial Sequence
  Synthetic oligonucleotide
cataaaatagcgatgggcatgaggtaacgc

SEQ ID NO: 251591 - DNA, 30 bp, Artificial Sequence
  Synthetic oligonucleotide
cagcttagtagagcgctgaatgtgtaacgc

SEQ ID NO: 251592 - DNA, 30 bp, Artificial Sequence
  Synthetic oligonucleotide
caatagggcgatcggacaaatagttaacgc

SEQ ID NO: 251593 - DNA, 30 bp, Artificial Sequence
  Synthetic oligonucleotide
tgtatagacaggcaaaaacgtccaacacgc

SEQ ID NO: 251594 - DNA, 30 bp, Artificial Sequence
  Synthetic oligonucleotide
gatggatcgtccgtgatacttctcacacgc

SEQ ID NO: 251595 - DNA, 30 bp, Artificial Sequence
  Synthetic oligonucleotide
gcaaaaattccctggcccatccttacacgc

SEQ ID NO: 251596 - DNA, 30 bp, Artificial Sequence
  Synthetic oligonucleotide
taataaatctaaaatcagccggaaccacgc

SEQ ID NO: 251597 - DNA, 30 bp, Artificial Sequence
  Synthetic oligonucleotide
ttaggggggaatggtgctatgtgcccacgc

SEQ ID NO: 251598 - DNA, 30 bp, Artificial Sequence
  Synthetic oligonucleotide
aggacctgagagtggcgtacgtggccacgc

SEQ ID NO: 251599 - DNA, 30 bp, Artificial Sequence
  Synthetic oligonucleotide
gcaattaaaagggggtcatgttgagcacgc

SEQ ID NO: 251600 - DNA, 30 bp, Artificial Sequence
  Synthetic oligonucleotide
catctacatggctagctggaccgcgcacgc

SEQ ID NO: 251601 - DNA, 30 bp, Artificial Sequence
  Synthetic oligonucleotide
ccccctagcattgaaacgggaccggcacgc

SEQ ID NO: 251602 - DNA, 30 bp, Artificial Sequence
  Synthetic oligonucleotide
gtattcaactggttctacgagcgggcacgc

SEQ ID NO: 251603 - DNA, 30 bp, Artificial Sequence
  Synthetic oligonucleotide
cggatctcttgggtaatatgtcgggcacgc

SEQ ID NO: 251604 - DNA, 30 bp, Artificial Sequence
  Synthetic oligonucleotide
taatgcggctgcaaattcaagtgggcacgc

SEQ ID NO: 251605 - DNA, 30 bp, Artificial Sequence
  Synthetic oligonucleotide
agggaagggcttaatccgcacgctgcacgc

SEQ ID NO: 251606 - DNA, 30 bp, Artificial Sequence
  Synthetic oligonucleotide
atgcagataaaaagagatccgttttcacgc

SEQ ID NO: 251607 - DNA, 30 bp, Artificial Sequence
  Synthetic oligonucleotide
cgtaccaccaatacaacaacgttgagacgc

SEQ ID NO: 251608 - DNA, 30 bp, Artificial Sequence
  Synthetic oligonucleotide
ccctactaggtggaagggaaataccgacgc

SEQ ID NO: 251609 - DNA, 30 bp, Artificial Sequence
  Synthetic oligonucleotide
cacagggatcaagggcacacactgcgacgc

SEQ ID NO: 251610 - DNA, 30 bp, Artificial Sequence
  Synthetic oligonucleotide
ggctcgaagttggcgcctgatggcggacgc

SEQ ID NO: 251611 - DNA, 30 bp, Artificial Sequence
  Synthetic oligonucleotide
atgtgattagcgtatacatgggctggacgc

SEQ ID NO: 251612 - DNA, 30 bp, Artificial Sequence
  Synthetic oligonucleotide
ggcatccctaaagcagcaagttgtggacgc

SEQ ID NO: 251613 - DNA, 30 bp, Artificial Sequence
  Synthetic oligonucleotide
aggaggcgttggtgggagctcctaatacgc

SEQ ID NO: 251614 - DNA, 30 bp, Artificial Sequence
  Synthetic oligonucleotide
gtatggtcaatgtacccaacattaatacgc

SEQ ID NO: 251615 - DNA, 30 bp, Artificial Sequence
  Synthetic oligonucleotide
ggttgatagctagtgcacagtaggatacgc

SEQ ID NO: 251616 - DNA, 30 bp, Artificial Sequence
  Synthetic oligonucleotide
ccagctgccaccaccgctcgtgtcctacgc

SEQ ID NO: 251617 - DNA, 30 bp, Artificial Sequence
  Synthetic oligonucleotide
agggattatttcgggaagaatcagctacgc

SEQ ID NO: 251618 - DNA, 30 bp, Artificial Sequence
  Synthetic oligonucleotide
tttgcaaggtcagagtgatcgccagtacgc

SEQ ID NO: 251619 - DNA, 30 bp, Artificial Sequence
  Synthetic oligonucleotide
ggggtgcgataagattgcgctagagtacgc

SEQ ID NO: 251620 - DNA, 30 bp, Artificial Sequence
  Synthetic oligonucleotide
tgcctgacggctggatattcgagattacgc

SEQ ID NO: 251621 - DNA, 30 bp, Artificial Sequence
  Synthetic oligonucleotide
tagccttgagcgtcgagaggttagttacgc

SEQ ID NO: 251622 - DNA, 30 bp, Artificial Sequence
  Synthetic oligonucleotide
caactatacaacggcccaaatcctttacgc

SEQ ID NO: 251623 - DNA, 30 bp, Artificial Sequence
  Synthetic oligonucleotide
gaccgcgggattccgcgcaaaagtttacgc

SEQ ID NO: 251624 - DNA, 30 bp, Artificial Sequence
  Synthetic oligonucleotide
cgcgccgttattgctaacgtaagaaaccgc

SEQ ID NO: 251625 - DNA, 30 bp, Artificial Sequence
  Synthetic oligonucleotide
agggtccgagagctccatgggacgaaccgc

SEQ ID NO: 251626 - DNA, 30 bp, Artificial Sequence
  Synthetic oligonucleotide
atgttccggcggcaaacaaggtgtaaccgc

SEQ ID NO: 251627 - DNA, 30 bp, Artificial Sequence
  Synthetic oligonucleotide
gatctagactgactctggcggagccaccgc

SEQ ID NO: 251628 - DNA, 30 bp, Artificial Sequence
  Synthetic oligonucleotide
cgtgtgagccatatcgtgattcgccaccgc

SEQ ID NO: 251629 - DNA, 30 bp, Artificial Sequence
  Synthetic oligonucleotide
caattatagcaatcgatagtatctcaccgc

SEQ ID NO: 251630 - DNA, 30 bp, Artificial Sequence
  Synthetic oligonucleotide
aagaaaggaactttgcgggtaagagaccgc

SEQ ID NO: 251631 - DNA, 29 bp, Artificial Sequence
  Synthetic oligonucleotide
caagggattaccaggcaagatacgaccgc

SEQ ID NO: 251632 - DNA, 30 bp, Artificial Sequence
  Synthetic oligonucleotide
agggctcgcagttggatttaagccgaccgc

SEQ ID NO: 251633 - DNA, 30 bp, Artificial Sequence
  Synthetic oligonucleotide
ggtgagattctaagatcgatgtcggaccgc

SEQ ID NO: 251634 - DNA, 30 bp, Artificial Sequence
  Synthetic oligonucleotide
ccggtaagtctgcggttttgaatggaccgc

SEQ ID NO: 251635 - DNA, 30 bp, Artificial Sequence
  Synthetic oligonucleotide
tactacatgaactacggtgactctgaccgc

SEQ ID NO: 251636 - DNA, 30 bp, Artificial Sequence
  Synthetic oligonucleotide
agtccgctgacactcttaggggttgaccgc

SEQ ID NO: 251637 - DNA, 30 bp, Artificial Sequence
  Synthetic oligonucleotide
gacatttagcgaggtggagttggataccgc

SEQ ID NO: 251638 - DNA, 30 bp, Artificial Sequence
  Synthetic oligonucleotide
gttaattaacagttggcaatgagttaccgc

SEQ ID NO: 251639 - DNA, 30 bp, Artificial Sequence
  Synthetic oligonucleotide
gcacctttatccgacttgaagttttaccgc

SEQ ID NO: 251640 - DNA, 30 bp, Artificial Sequence
  Synthetic oligonucleotide
cgtaggatgcttcgatttttgagaacccgc

SEQ ID NO: 251641 - DNA, 30 bp, Artificial Sequence
  Synthetic oligonucleotide
tgtgccagcgcaactcaccagcgaacccgc

SEQ ID NO: 251642 - DNA, 30 bp, Artificial Sequence
  Synthetic oligonucleotide
acgccgtcgagaaagtcgtgaaatacccgc

SEQ ID NO: 251643 - DNA, 30 bp, Artificial Sequence
  Synthetic oligonucleotide
tccaacatggcgggtattaacggtacccgc

SEQ ID NO: 251644 - DNA, 30 bp, Artificial Sequence
  Synthetic oligonucleotide
cgtgccagttgcagacagatgataccccgc

SEQ ID NO: 251645 - DNA, 30 bp, Artificial Sequence
  Synthetic oligonucleotide
ggacaggctgctcgcggacccatcccccgc

SEQ ID NO: 251646 - DNA, 30 bp, Artificial Sequence
  Synthetic oligonucleotide
ggggaacgtaattcaacgttgggagcccgc

SEQ ID NO: 251647 - DNA, 30 bp, Artificial Sequence
  Synthetic oligonucleotide
ggtgtcgttaatgtagatacaatagcccgc

SEQ ID NO: 251648 - DNA, 30 bp, Artificial Sequence
  Synthetic oligonucleotide
ataatgaattttgccgtcgacaaggcccgc

SEQ ID NO: 251649 - DNA, 30 bp, Artificial Sequence
  Synthetic oligonucleotide
attatatgtacgatgacatatgaggcccgc

SEQ ID NO: 251650 - DNA, 30 bp, Artificial Sequence
  Synthetic oligonucleotide
catatgccggtacctggttaaactgcccgc

SEQ ID NO: 251651 - DNA, 30 bp, Artificial Sequence
  Synthetic oligonucleotide
gtcacaaaagcgcttggtcataagtcccgc

SEQ ID NO: 251652 - DNA, 30 bp, Artificial Sequence
  Synthetic oligonucleotide
tatcgtcaccatttgtaatcaaattcccgc

SEQ ID NO: 251653 - DNA, 30 bp, Artificial Sequence
  Synthetic oligonucleotide
gacaaccctgggcggaatggtgtttcccgc

SEQ ID NO: 251654 - DNA, 30 bp, Artificial Sequence
  Synthetic oligonucleotide
tagaagaaatgatgtccgagtcaaagccgc

SEQ ID NO: 251655 - DNA, 30 bp, Artificial Sequence
  Synthetic oligonucleotide
cttttagttctcatcatgaaagaaagccgc

SEQ ID NO: 251656 - DNA, 30 bp, Artificial Sequence
  Synthetic oligonucleotide
cggttgggcactcgtcttcttggcagccgc

SEQ ID NO: 251657 - DNA, 30 bp, Artificial Sequence
  Synthetic oligonucleotide
atgccgtccaacgctagcacttctagccgc

SEQ ID NO: 251658 - DNA, 30 bp, Artificial Sequence
  Synthetic oligonucleotide
gctctgtttcgaggggtagattttagccgc

SEQ ID NO: 251659 - DNA, 30 bp, Artificial Sequence
  Synthetic oligonucleotide
attttgctccggtctgaaaggaaacgccgc

SEQ ID NO: 251660 - DNA, 30 bp, Artificial Sequence
  Synthetic oligonucleotide
agtattagtccacattgcagtttacgccgc

SEQ ID NO: 251661 - DNA, 30 bp, Artificial Sequence
  Synthetic oligonucleotide
caagctggacggagttgtaaagatcgccgc

SEQ ID NO: 251662 - DNA, 30 bp, Artificial Sequence
  Synthetic oligonucleotide
gtcttagctcggaacatggatgatcgccgc

SEQ ID NO: 251663 - DNA, 30 bp, Artificial Sequence
  Synthetic oligonucleotide
tttgccaggaactgaggagcacgtggccgc

SEQ ID NO: 251664 - DNA, 30 bp, Artificial Sequence
  Synthetic oligonucleotide
cactaaccggcacacggagatatatgccgc

SEQ ID NO: 251665 - DNA, 30 bp, Artificial Sequence
  Synthetic oligonucleotide
atgtcatcacgtcttatgttgagctgccgc

SEQ ID NO: 251666 - DNA, 30 bp, Artificial Sequence
  Synthetic oligonucleotide
agcgtaatgagagggcagcatgtaatccgc

SEQ ID NO: 251667 - DNA, 30 bp, Artificial Sequence
  Synthetic oligonucleotide
acgcctgtagacacctggattaacatccgc

SEQ ID NO: 251668 - DNA, 30 bp, Artificial Sequence
  Synthetic oligonucleotide
aactttatttcgtgaaagtaataactccgc

SEQ ID NO: 251669 - DNA, 30 bp, Artificial Sequence
  Synthetic oligonucleotide
cttgaatatgtttatcttacactgctccgc

SEQ ID NO: 251670 - DNA, 30 bp, Artificial Sequence
  Synthetic oligonucleotide
ggcaccacattgtcaagtagtggtctccgc

SEQ ID NO: 251671 - DNA, 30 bp, Artificial Sequence
  Synthetic oligonucleotide
gtagccaagtcgtgcagatcacaagtccgc

SEQ ID NO: 251672 - DNA, 30 bp, Artificial Sequence
  Synthetic oligonucleotide
gagtgggggttcagtatcgagtaagtccgc

SEQ ID NO: 251673 - DNA, 30 bp, Artificial Sequence
  Synthetic oligonucleotide
cggatcggacagttcagctagagagtccgc

SEQ ID NO: 251674 - DNA, 30 bp, Artificial Sequence
  Synthetic oligonucleotide
cttagctctaggtgttaagcatgcgtccgc

SEQ ID NO: 251675 - DNA, 30 bp, Artificial Sequence
  Synthetic oligonucleotide
cccgagcggtcagtcccccttcaggtccgc

SEQ ID NO: 251676 - DNA, 30 bp, Artificial Sequence
  Synthetic oligonucleotide
aatcgctttcccactggcgtgccggtccgc

SEQ ID NO: 251677 - DNA, 30 bp, Artificial Sequence
  Synthetic oligonucleotide
ctggtatcggatgactgtagaaatgtccgc

SEQ ID NO: 251678 - DNA, 30 bp, Artificial Sequence
  Synthetic oligonucleotide
agtaatcaccgtattgaaacgtgtgtccgc

SEQ ID NO: 251679 - DNA, 31 bp, Artificial Sequence
  Synthetic oligonucleotide
cgcggagtgcttctcgaatcctggattccgc

SEQ ID NO: 251680 - DNA, 30 bp, Artificial Sequence
  Synthetic oligonucleotide
tattctcgtcatgcgataaagcccttccgc

SEQ ID NO: 251681 - DNA, 30 bp, Artificial Sequence
  Synthetic oligonucleotide
gtctagcacacgaaggactacacaaagcgc

SEQ ID NO: 251682 - DNA, 30 bp, Artificial Sequence
  Synthetic oligonucleotide
ctgtagttttatatacttgtatgaaagcgc

SEQ ID NO: 251683 - DNA, 30 bp, Artificial Sequence
  Synthetic oligonucleotide
cacatcgaaaggcttttctaactaaagcgc

SEQ ID NO: 251684 - DNA, 30 bp, Artificial Sequence
  Synthetic oligonucleotide
gccggtctaatgcccaattatagcaagcgc

SEQ ID NO: 251685 - DNA, 30 bp, Artificial Sequence
  Synthetic oligonucleotide
attacggattgcgtgcttatcggcaagcgc

SEQ ID NO: 251686 - DNA, 30 bp, Artificial Sequence
  Synthetic oligonucleotide
tgcgcgtgtttgagaatggtatttaagcgc

SEQ ID NO: 251687 - DNA, 30 bp, Artificial Sequence
  Synthetic oligonucleotide
cattctgttaccacttggtaaggacagcgc

SEQ ID NO: 251688 - DNA, 30 bp, Artificial Sequence
  Synthetic oligonucleotide
gtgcagacgtgctacttggggtgccagcgc

SEQ ID NO: 251689 - DNA, 30 bp, Artificial Sequence
  Synthetic oligonucleotide
ccgtcacgtgataagtgctctgtccagcgc

SEQ ID NO: 251690 - DNA, 30 bp, Artificial Sequence
  Synthetic oligonucleotide
caagttgcgcaaacgatcgggtggcagcgc

SEQ ID NO: 251691 - DNA, 30 bp, Artificial Sequence
  Synthetic oligonucleotide
ataaccggggaccggggcaacttgcagcgc

SEQ ID NO: 251692 - DNA, 30 bp, Artificial Sequence
  Synthetic oligonucleotide
attggtgtaaaaagataagtcttagagcgc

SEQ ID NO: 251693 - DNA, 30 bp, Artificial Sequence
  Synthetic oligonucleotide
atgaccagcgttcatagaggacccgagcgc

SEQ ID NO: 251694 - DNA, 30 bp, Artificial Sequence
  Synthetic oligonucleotide
cgatcatgctcaatgaggttgacatagcgc

SEQ ID NO: 251695 - DNA, 30 bp, Artificial Sequence
  Synthetic oligonucleotide
acacgccgaattaaaaattcttgctagcgc

SEQ ID NO: 251696 - DNA, 30 bp, Artificial Sequence
  Synthetic oligonucleotide
tatcagctagattatgtccaaaagtagcgc

SEQ ID NO: 251697 - DNA, 30 bp, Artificial Sequence
  Synthetic oligonucleotide
cgactacacaaactaggaggcggttagcgc

SEQ ID NO: 251698 - DNA, 30 bp, Artificial Sequence
  Synthetic oligonucleotide
actggtgaaatcaaaggtccacaaacgcgc

SEQ ID NO: 251699 - DNA, 30 bp, Artificial Sequence
  Synthetic oligonucleotide
gtgaatggttcggagattaagtaaacgcgc

SEQ ID NO: 251700 - DNA, 30 bp, Artificial Sequence
  Synthetic oligonucleotide
caaatcggttcatccgtattcgacacgcgc

SEQ ID NO: 251701 - DNA, 30 bp, Artificial Sequence
  Synthetic oligonucleotide
atcgtagcgcaatggttgctaatcacgcgc

SEQ ID NO: 251702 - DNA, 30 bp, Artificial Sequence
  Synthetic oligonucleotide
taataatagtgattgccgcctgagccgcgc

SEQ ID NO: 251703 - DNA, 30 bp, Artificial Sequence
  Synthetic oligonucleotide
gctgtagtccgagggcgttggaggccgcgc

SEQ ID NO: 251704 - DNA, 30 bp, Artificial Sequence
  Synthetic oligonucleotide
tcgtaatttgcttcaacatttgggccgcgc

SEQ ID NO: 251705 - DNA, 30 bp, Artificial Sequence
  Synthetic oligonucleotide
ccggaccgacgaactttgagagttccgcgc

SEQ ID NO: 251706 - DNA, 30 bp, Artificial Sequence
  Synthetic oligonucleotide
ccgaataggatgtaggctaattaagcgcgc

SEQ ID NO: 251707 - DNA, 30 bp, Artificial Sequence
  Synthetic oligonucleotide
gagacacaatgcgcgggcgactaggcgcgc

SEQ ID NO: 251708 - DNA, 30 bp, Artificial Sequence
  Synthetic oligonucleotide
agagtggatacagaacgtcggttggcgcgc

SEQ ID NO: 251709 - DNA, 30 bp, Artificial Sequence
  Synthetic oligonucleotide
ggtccgtttgtgcccgtggaacctgcgcgc

SEQ ID NO: 251710 - DNA, 30 bp, Artificial Sequence
  Synthetic oligonucleotide
ttaatcctcgccgatcatgagcttgcgcgc

SEQ ID NO: 251711 - DNA, 30 bp, Artificial Sequence
  Synthetic oligonucleotide
gttatgagtacatcaagttgttttgcgcgc

SEQ ID NO: 251712 - DNA, 30 bp, Artificial Sequence
  Synthetic oligonucleotide
tatctccaggcagatagcaggttatcgcgc

SEQ ID NO: 251713 - DNA, 30 bp, Artificial Sequence
  Synthetic oligonucleotide
agagtgcggagcatttgtaaaagttcgcgc

SEQ ID NO: 251714 - DNA, 30 bp, Artificial Sequence
  Synthetic oligonucleotide
ggaagtggccatctcggtgccatttcgcgc

SEQ ID NO: 251715 - DNA, 30 bp, Artificial Sequence
  Synthetic oligonucleotide
aactccaaacacagtactgatataaggcgc

SEQ ID NO: 251716 - DNA, 30 bp, Artificial Sequence
  Synthetic oligonucleotide
caccgtaaaaaactgttagctgacaggcgc

SEQ ID NO: 251717 - DNA, 30 bp, Artificial Sequence
  Synthetic oligonucleotide
ctatacaccttgaaagactgatgtaggcgc

SEQ ID NO: 251718 - DNA, 30 bp, Artificial Sequence
  Synthetic oligonucleotide
tctggcagcggtggacaacttacccggcgc

SEQ ID NO: 251719 - DNA, 30 bp, Artificial Sequence
  Synthetic oligonucleotide
acggtcataagagtgttgacaagccggcgc

SEQ ID NO: 251720 - DNA, 30 bp, Artificial Sequence
  Synthetic oligonucleotide
gaggttctcgaagccgtatgcaaagggcgc

SEQ ID NO: 251721 - DNA, 30 bp, Artificial Sequence
  Synthetic oligonucleotide
cttgtgaacaacgattacttctaggggcgc

SEQ ID NO: 251722 - DNA, 30 bp, Artificial Sequence
  Synthetic oligonucleotide
tcgaccgcaatccggggtataagggggcgc

SEQ ID NO: 251723 - DNA, 30 bp, Artificial Sequence
  Synthetic oligonucleotide
acgagccctgtttgagtttcgagggggcgc

SEQ ID NO: 251724 - DNA, 30 bp, Artificial Sequence
  Synthetic oligonucleotide
ctctcacgatggtccgcccgctgggggcgc

SEQ ID NO: 251725 - DNA, 30 bp, Artificial Sequence
  Synthetic oligonucleotide
ctgctacgtgattgatgcttggctgggcgc

SEQ ID NO: 251726 - DNA, 30 bp, Artificial Sequence
  Synthetic oligonucleotide
tcgaacagttccgataaaacatctgggcgc

SEQ ID NO: 251727 - DNA, 30 bp, Artificial Sequence
  Synthetic oligonucleotide
agcgcgctgagccgcgagcctggtgggcgc

SEQ ID NO: 251728 - DNA, 30 bp, Artificial Sequence
  Synthetic oligonucleotide
cgaggttcacatatgaatcgacgatggcgc

SEQ ID NO: 251729 - DNA, 30 bp, Artificial Sequence
  Synthetic oligonucleotide
cgaaaaatggttttcatggagagttggcgc

SEQ ID NO: 251730 - DNA, 30 bp, Artificial Sequence
  Synthetic oligonucleotide
gcagcttgaataaagccacatgggatgcgc

SEQ ID NO: 251731 - DNA, 30 bp, Artificial Sequence
  Synthetic oligonucleotide
gctgatatcaggcaatgggcgtgcctgcgc

SEQ ID NO: 251732 - DNA, 30 bp, Artificial Sequence
  Synthetic oligonucleotide
aacgaaattgttcccgcaaatacgctgcgc

SEQ ID NO: 251733 - DNA, 30 bp, Artificial Sequence
  Synthetic oligonucleotide
gtgatatagcgccaactctttccgctgcgc

SEQ ID NO: 251734 - DNA, 30 bp, Artificial Sequence
  Synthetic oligonucleotide
cagtccattgctctatcgttcgggctgcgc

SEQ ID NO: 251735 - DNA, 30 bp, Artificial Sequence
  Synthetic oligonucleotide
ttgtcgcgggcgttcgtcaagacagtgcgc

SEQ ID NO: 251736 - DNA, 30 bp, Artificial Sequence
  Synthetic oligonucleotide
cttgagtcatggggaggtgaggtagtgcgc

SEQ ID NO: 251737 - DNA, 30 bp, Artificial Sequence
  Synthetic oligonucleotide
tgtgcatgtgtatctgaatgaagcgtgcgc

SEQ ID NO: 251738 - DNA, 30 bp, Artificial Sequence
  Synthetic oligonucleotide
gggcatttacccaagtccgtaaccttgcgc

SEQ ID NO: 251739 - DNA, 30 bp, Artificial Sequence
  Synthetic oligonucleotide
gtgaaactttaatcgtcgtctttgttgcgc

SEQ ID NO: 251740 - DNA, 30 bp, Artificial Sequence
  Synthetic oligonucleotide
cgaaactccggccatcatgtaggtttgcgc

SEQ ID NO: 251741 - DNA, 30 bp, Artificial Sequence
  Synthetic oligonucleotide
tcgtacgttaatcgaatcgggccaaatcgc

SEQ ID NO: 251742 - DNA, 30 bp, Artificial Sequence
  Synthetic oligonucleotide
aactgcaggttaggttcaggcagaaatcgc

SEQ ID NO: 251743 - DNA, 30 bp, Artificial Sequence
  Synthetic oligonucleotide
agtatcgccctctattcaggtgacaatcgc

SEQ ID NO: 251744 - DNA, 30 bp, Artificial Sequence
  Synthetic oligonucleotide
ttggttccattggagcactgctagaatcgc

SEQ ID NO: 251745 - DNA, 30 bp, Artificial Sequence
  Synthetic oligonucleotide
acagtggacgctaatagtgacaataatcgc

SEQ ID NO: 251746 - DNA, 30 bp, Artificial Sequence
  Synthetic oligonucleotide
gatataacgtgaaggaaagaccaacatcgc

SEQ ID NO: 251747 - DNA, 30 bp, Artificial Sequence
  Synthetic oligonucleotide
gcataacattgcgtcgagtcgctacatcgc

SEQ ID NO: 251748 - DNA, 30 bp, Artificial Sequence
  Synthetic oligonucleotide
cgtgttccggaggtccctatgatccatcgc

SEQ ID NO: 251749 - DNA, 30 bp, Artificial Sequence
  Synthetic oligonucleotide
aactacgggactcttcttaccttccatcgc

SEQ ID NO: 251750 - DNA, 30 bp, Artificial Sequence
  Synthetic oligonucleotide
cagtccgttgcttgcaaagatctagatcgc

SEQ ID NO: 251751 - DNA, 30 bp, Artificial Sequence
  Synthetic oligonucleotide
accagaggcatactgccacattaatatcgc

SEQ ID NO: 251752 - DNA, 30 bp, Artificial Sequence
  Synthetic oligonucleotide
tgaggttcaccgatatacgtagactatcgc

SEQ ID NO: 251753 - DNA, 30 bp, Artificial Sequence
  Synthetic oligonucleotide
cgtcaatccatgcctaccgggccctatcgc

SEQ ID NO: 251754 - DNA, 30 bp, Artificial Sequence
  Synthetic oligonucleotide
taccctggacggctaaatgcatagtatcgc

SEQ ID NO: 251755 - DNA, 30 bp, Artificial Sequence
  Synthetic oligonucleotide
aggactcggagcggagcggtaacgtatcgc

SEQ ID NO: 251756 - DNA, 30 bp, Artificial Sequence
  Synthetic oligonucleotide
ccttaagggcaaaaccccgtgtcttatcgc

SEQ ID NO: 251757 - DNA, 30 bp, Artificial Sequence
  Synthetic oligonucleotide
agaggtgataaaaatgctagcctgactcgc

SEQ ID NO: 251758 - DNA, 30 bp, Artificial Sequence
  Synthetic oligonucleotide
aagcctggcaggctagagtaagatactcgc

SEQ ID NO: 251759 - DNA, 30 bp, Artificial Sequence
  Synthetic oligonucleotide
tgtggttgtgaaaggctataatatactcgc

SEQ ID NO: 251760 - DNA, 30 bp, Artificial Sequence
  Synthetic oligonucleotide
gccaagtgaatcactggacttactactcgc

SEQ ID NO: 251761 - DNA, 30 bp, Artificial Sequence
  Synthetic oligonucleotide
agttctcctggatatgaaaacaagcctcgc

SEQ ID NO: 251762 - DNA, 30 bp, Artificial Sequence
  Synthetic oligonucleotide
ctactctatcaccatgagaatatgcctcgc

SEQ ID NO: 251763 - DNA, 30 bp, Artificial Sequence
  Synthetic oligonucleotide
caaaatgcccatggaactgggctgcctcgc

SEQ ID NO: 251764 - DNA, 30 bp, Artificial Sequence
  Synthetic oligonucleotide
tttccgataaaataaatttacagcgctcgc

SEQ ID NO: 251765 - DNA, 30 bp, Artificial Sequence
  Synthetic oligonucleotide
ataatattcgtctatcccaaactcgctcgc

SEQ ID NO: 251766 - DNA, 30 bp, Artificial Sequence
  Synthetic oligonucleotide
ggacctttcggagtattagatgaatctcgc

SEQ ID NO: 251767 - DNA, 30 bp, Artificial Sequence
  Synthetic oligonucleotide
tgcgatcttcgcgaggggggggcatctcgc

SEQ ID NO: 251768 - DNA, 29 bp, Artificial Sequence
  Synthetic oligonucleotide
ttatgaccctacgttatactcagtctcgc

SEQ ID NO: 251769 - DNA, 30 bp, Artificial Sequence
  Synthetic oligonucleotide
tcctttgtttgtgtcaagactgcaagtcgc

SEQ ID NO: 251770 - DNA, 30 bp, Artificial Sequence
  Synthetic oligonucleotide
gccttcgctgcaacatgccggcacagtcgc

SEQ ID NO: 251771 - DNA, 30 bp, Artificial Sequence
  Synthetic oligonucleotide
agcgtaattcgcaaggaaccccccagtcgc

SEQ ID NO: 251772 - DNA, 30 bp, Artificial Sequence
  Synthetic oligonucleotide
acattcaaggtacgacctaatcccagtcgc

SEQ ID NO: 251773 - DNA, 30 bp, Artificial Sequence
  Synthetic oligonucleotide
aagctgatcctgtatttcctatcgagtcgc

SEQ ID NO: 251774 - DNA, 30 bp, Artificial Sequence
  Synthetic oligonucleotide
atccgccgtctccgttgtatggtgagtcgc

SEQ ID NO: 251775 - DNA, 31 bp, Artificial Sequence
  Synthetic oligonucleotide
agctaccagcggagcaaacgtaaatcgtcgc

SEQ ID NO: 251776 - DNA, 30 bp, Artificial Sequence
  Synthetic oligonucleotide
tgtagtttagtgatggtcaaagatcgtcgc

SEQ ID NO: 251777 - DNA, 30 bp, Artificial Sequence
  Synthetic oligonucleotide
agccttgagctgtcgcatcttgatcgtcgc

SEQ ID NO: 251778 - DNA, 30 bp, Artificial Sequence
  Synthetic oligonucleotide
actaacgcgcgtgcagcctaatttcgtcgc

SEQ ID NO: 251779 - DNA, 30 bp, Artificial Sequence
  Synthetic oligonucleotide
gtgggagatcccagtagagacaacggtcgc

SEQ ID NO: 251780 - DNA, 30 bp, Artificial Sequence
  Synthetic oligonucleotide
gcagacaggaacacacgtccggtcggtcgc

SEQ ID NO: 251781 - DNA, 30 bp, Artificial Sequence
  Synthetic oligonucleotide
tggaggctattacaattagtcaagggtcgc

SEQ ID NO: 251782 - DNA, 30 bp, Artificial Sequence
  Synthetic oligonucleotide
acagaccacgggtcctattgaaggggtcgc

SEQ ID NO: 251783 - DNA, 30 bp, Artificial Sequence
  Synthetic oligonucleotide
acatactctgtccggaggtctttgggtcgc

SEQ ID NO: 251784 - DNA, 30 bp, Artificial Sequence
  Synthetic oligonucleotide
caatagggtaagcaataaattaactgtcgc

SEQ ID NO: 251785 - DNA, 30 bp, Artificial Sequence
  Synthetic oligonucleotide
ccagtaataaggtgatcacttacctgtcgc

SEQ ID NO: 251786 - DNA, 30 bp, Artificial Sequence
  Synthetic oligonucleotide
tttgcagtccgtgtatgtgttgagtgtcgc

SEQ ID NO: 251787 - DNA, 30 bp, Artificial Sequence
  Synthetic oligonucleotide
ccccatacgaatgcctccaagccttgtcgc

SEQ ID NO: 251788 - DNA, 30 bp, Artificial Sequence
  Synthetic oligonucleotide
ggtaggaagcaacagattcttatttgtcgc

SEQ ID NO: 251789 - DNA, 30 bp, Artificial Sequence
  Synthetic oligonucleotide
taaacgttcggccctgcacagtgcattcgc

SEQ ID NO: 251790 - DNA, 30 bp, Artificial Sequence
  Synthetic oligonucleotide
caggaagagttactaccagttgcccttcgc

SEQ ID NO: 251791 - DNA, 30 bp, Artificial Sequence
  Synthetic oligonucleotide
acacagctaggagtaatatgacggcttcgc

SEQ ID NO: 251792 - DNA, 30 bp, Artificial Sequence
  Synthetic oligonucleotide
aaaggttgctgggagctaggactgcttcgc

SEQ ID NO: 251793 - DNA, 30 bp, Artificial Sequence
  Synthetic oligonucleotide
gccgggttaaataaggcaggtcatcttcgc

SEQ ID NO: 251794 - DNA, 30 bp, Artificial Sequence
  Synthetic oligonucleotide
ctctaagcattaagaaagattgatcttcgc

SEQ ID NO: 251795 - DNA, 30 bp, Artificial Sequence
  Synthetic oligonucleotide
ataggaggatctgagaattcttgagttcgc

SEQ ID NO: 251796 - DNA, 30 bp, Artificial Sequence
  Synthetic oligonucleotide
cgatgctttgtgttgaagagggtcgttcgc

SEQ ID NO: 251797 - DNA, 30 bp, Artificial Sequence
  Synthetic oligonucleotide
tggtagacactccagtccagccaggttcgc

SEQ ID NO: 251798 - DNA, 30 bp, Artificial Sequence
  Synthetic oligonucleotide
tagagattagagggggctaacagggttcgc

SEQ ID NO: 251799 - DNA, 30 bp, Artificial Sequence
  Synthetic oligonucleotide
tttatcgacaacacatcaggcttggttcgc

SEQ ID NO: 251800 - DNA, 30 bp, Artificial Sequence
  Synthetic oligonucleotide
acctcactaagactgtatgaagatgttcgc

SEQ ID NO: 251801 - DNA, 30 bp, Artificial Sequence
  Synthetic oligonucleotide
gcatgaatgggacccgatccgattgttcgc

SEQ ID NO: 251802 - DNA, 30 bp, Artificial Sequence
  Synthetic oligonucleotide
gcgcttacatctcataggtggcgttttcgc

SEQ ID NO: 251803 - DNA, 30 bp, Artificial Sequence
  Synthetic oligonucleotide
taggcttgtcaacacaaagaacaaaaaggc

SEQ ID NO: 251804 - DNA, 30 bp, Artificial Sequence
  Synthetic oligonucleotide
gaacagtatcaccaatggaagctaaaaggc

SEQ ID NO: 251805 - DNA, 30 bp, Artificial Sequence
  Synthetic oligonucleotide
cggagaatcgcttctcgcacagtaaaaggc

SEQ ID NO: 251806 - DNA, 30 bp, Artificial Sequence
  Synthetic oligonucleotide
tggactgggtatcgtccgtgtgtaaaaggc

SEQ ID NO: 251807 - DNA, 30 bp, Artificial Sequence
  Synthetic oligonucleotide
aaccagggcgggctcgcaatgttaaaaggc

SEQ ID NO: 251808 - DNA, 30 bp, Artificial Sequence
  Synthetic oligonucleotide
aatggaaacagctatgggtccgacaaaggc

SEQ ID NO: 251809 - DNA, 30 bp, Artificial Sequence
  Synthetic oligonucleotide
gcactaccaattaagtttagcgacaaaggc

SEQ ID NO: 251810 - DNA, 30 bp, Artificial Sequence
  Synthetic oligonucleotide
cgctttttttagcaatactgccgcaaaggc

SEQ ID NO: 251811 - DNA, 30 bp, Artificial Sequence
  Synthetic oligonucleotide
tcgtgttacacgttgacagaagtcaaaggc

SEQ ID NO: 251812 - DNA, 30 bp, Artificial Sequence
  Synthetic oligonucleotide
gtatatggtaggaggctcggtaagaaaggc

SEQ ID NO: 251813 - DNA, 30 bp, Artificial Sequence
  Synthetic oligonucleotide
aatgtgcaaaacaccgaatcagcgaaaggc

SEQ ID NO: 251814 - DNA, 30 bp, Artificial Sequence
  Synthetic oligonucleotide
agggaattggactggaatagaatgaaaggc

SEQ ID NO: 251815 - DNA, 30 bp, Artificial Sequence
  Synthetic oligonucleotide
ttttcggcaactacgcggtaaagtaaaggc

SEQ ID NO: 251816 - DNA, 30 bp, Artificial Sequence
  Synthetic oligonucleotide
gttacgtaagctcctcggaggggtaaaggc

SEQ ID NO: 251817 - DNA, 30 bp, Artificial Sequence
  Synthetic oligonucleotide
tggttgtatttaaatacggcttgccaaggc

SEQ ID NO: 251818 - DNA, 30 bp, Artificial Sequence
  Synthetic oligonucleotide
ccgaaaactgaacaaggttacgggcaaggc

SEQ ID NO: 251819 - DNA, 30 bp, Artificial Sequence
  Synthetic oligonucleotide
atagctgcactgtggtacccataagaaggc

SEQ ID NO: 251820 - DNA, 30 bp, Artificial Sequence
  Synthetic oligonucleotide
gaacctttgtgatcgttttataaggaaggc

SEQ ID NO: 251821 - DNA, 30 bp, Artificial Sequence
  Synthetic oligonucleotide
tcgataatggcgttttcgtctaaggaaggc

SEQ ID NO: 251822 - DNA, 30 bp, Artificial Sequence
  Synthetic oligonucleotide
aacccctgaaacgacatcgcagttgaaggc

SEQ ID NO: 251823 - DNA, 30 bp, Artificial Sequence
  Synthetic oligonucleotide
cctgcctgctatttctattttcaataaggc

SEQ ID NO: 251824 - DNA, 30 bp, Artificial Sequence
  Synthetic oligonucleotide
agttatcgactaagccaaaattaataaggc

SEQ ID NO: 251825 - DNA, 30 bp, Artificial Sequence
  Synthetic oligonucleotide
attgacggtgtttattcccgcacataaggc

SEQ ID NO: 251826 - DNA, 30 bp, Artificial Sequence
  Synthetic oligonucleotide
agtttggcataatttaggcatgcataaggc

SEQ ID NO: 251827 - DNA, 30 bp, Artificial Sequence
  Synthetic oligonucleotide
ggtacgacttgtaacctcctggtataaggc

SEQ ID NO: 251828 - DNA, 30 bp, Artificial Sequence
  Synthetic oligonucleotide
ggcgtgacggcgctatgtgtcaggtaaggc

SEQ ID NO: 251829 - DNA, 30 bp, Artificial Sequence
  Synthetic oligonucleotide
gcatgaggggggcgtgagatggattaaggc

SEQ ID NO: 251830 - DNA, 30 bp, Artificial Sequence
  Synthetic oligonucleotide
gatagggatcaagccgtgtattcttaaggc

SEQ ID NO: 251831 - DNA, 30 bp, Artificial Sequence
  Synthetic oligonucleotide
aggacgcgacgactatggtatggttaaggc

SEQ ID NO: 251832 - DNA, 30 bp, Artificial Sequence
  Synthetic oligonucleotide
ctaggcggtaatacaggatatctttaaggc

SEQ ID NO: 251833 - DNA, 30 bp, Artificial Sequence
  Synthetic oligonucleotide
aaacgagggtttgggacctagtgaacaggc

SEQ ID NO: 251834 - DNA, 30 bp, Artificial Sequence
  Synthetic oligonucleotide
gactagttattcggcaaaagattgacaggc

SEQ ID NO: 251835 - DNA, 30 bp, Artificial Sequence
  Synthetic oligonucleotide
agtctaggtcgctgcatttagtcgccaggc

SEQ ID NO: 251836 - DNA, 30 bp, Artificial Sequence
  Synthetic oligonucleotide
caccacaccagggactgtcgacggccaggc

SEQ ID NO: 251837 - DNA, 30 bp, Artificial Sequence
  Synthetic oligonucleotide
gtctggctgagaaaaccattgcggccaggc

SEQ ID NO: 251838 - DNA, 30 bp, Artificial Sequence
  Synthetic oligonucleotide
gcgcagatgacagagttaaacatgccaggc

SEQ ID NO: 251839 - DNA, 30 bp, Artificial Sequence
  Synthetic oligonucleotide
atccgcaaagtagcacaccgttatccaggc

SEQ ID NO: 251840 - DNA, 30 bp, Artificial Sequence
  Synthetic oligonucleotide
agtagccttaactcgaacgccagtccaggc

SEQ ID NO: 251841 - DNA, 30 bp, Artificial Sequence
  Synthetic oligonucleotide
gcgtgggaacaccatgtataataggcaggc

SEQ ID NO: 251842 - DNA, 30 bp, Artificial Sequence
  Synthetic oligonucleotide
gttatcacgtacggcaatatatgggcaggc

SEQ ID NO: 251843 - DNA, 30 bp, Artificial Sequence
  Synthetic oligonucleotide
caagaagagactcggcaaggtatggcaggc

SEQ ID NO: 251844 - DNA, 30 bp, Artificial Sequence
  Synthetic oligonucleotide
agagatttgtggggtaaatcgattgcaggc

SEQ ID NO: 251845 - DNA, 30 bp, Artificial Sequence
  Synthetic oligonucleotide
gcgaagcatgtcggcaggctgcgctcaggc

SEQ ID NO: 251846 - DNA, 30 bp, Artificial Sequence
  Synthetic oligonucleotide
gccgagcccctcgatgggatagtctcaggc

SEQ ID NO: 251847 - DNA, 30 bp, Artificial Sequence
  Synthetic oligonucleotide
tgaggcttaatgctcgattcgtggtcaggc

SEQ ID NO: 251848 - DNA, 30 bp, Artificial Sequence
  Synthetic oligonucleotide
agtttcactcgcattgtaggaggttcaggc

SEQ ID NO: 251849 - DNA, 30 bp, Artificial Sequence
  Synthetic oligonucleotide
ttggcgttatggctgttccattcaagaggc

SEQ ID NO: 251850 - DNA, 30 bp, Artificial Sequence
  Synthetic oligonucleotide
tgcatagagaattttgaattgcggagaggc

SEQ ID NO: 251851 - DNA, 30 bp, Artificial Sequence
  Synthetic oligonucleotide
aatcggttgggcgcaagttagaatagaggc

SEQ ID NO: 251852 - DNA, 30 bp, Artificial Sequence
  Synthetic oligonucleotide
gcaccaggagttacatatgtgtaccgaggc

SEQ ID NO: 251853 - DNA, 30 bp, Artificial Sequence
  Synthetic oligonucleotide
gtatctgtccgatgtgtatacgggcgaggc

SEQ ID NO: 251854 - DNA, 30 bp, Artificial Sequence
  Synthetic oligonucleotide
gattgaatcacctgcgtattgcgtcgaggc

SEQ ID NO: 251855 - DNA, 30 bp, Artificial Sequence
  Synthetic oligonucleotide
atagacatccggacggaatgctgtcgaggc

SEQ ID NO: 251856 - DNA, 30 bp, Artificial Sequence
  Synthetic oligonucleotide
tgtgttacgggaatatagcggtttcgaggc

SEQ ID NO: 251857 - DNA, 30 bp, Artificial Sequence
  Synthetic oligonucleotide
ggtgacgtagtggaccacatggaaggaggc

SEQ ID NO: 251858 - DNA, 30 bp, Artificial Sequence
  Synthetic oligonucleotide
tgaccaccatgagagcattaaaacggaggc

SEQ ID NO: 251859 - DNA, 29 bp, Artificial Sequence
  Synthetic oligonucleotide
atgaaggctattcaggggagttcggaggc

SEQ ID NO: 251860 - DNA, 29 bp, Artificial Sequence
  Synthetic oligonucleotide
tcaccgtgagaggccagccgcagggaggc

SEQ ID NO: 251861 - DNA, 30 bp, Artificial Sequence
  Synthetic oligonucleotide
ctttaacctactgggaaattgaggggaggc

SEQ ID NO: 251862 - DNA, 30 bp, Artificial Sequence
  Synthetic oligonucleotide
ggttcggtgtctgcgtccgtgttgggaggc

SEQ ID NO: 251863 - DNA, 30 bp, Artificial Sequence
  Synthetic oligonucleotide
aacgattcagcgtcggcaaccggtggaggc

SEQ ID NO: 251864 - DNA, 30 bp, Artificial Sequence
  Synthetic oligonucleotide
gggaggggttgttatctgtcagtatgaggc

SEQ ID NO: 251865 - DNA, 30 bp, Artificial Sequence
  Synthetic oligonucleotide
ggtcaaacacagaagtctaccgagtgaggc

SEQ ID NO: 251866 - DNA, 30 bp, Artificial Sequence
  Synthetic oligonucleotide
tggtgtctatcaaccctcgggaggtgaggc

SEQ ID NO: 251867 - DNA, 30 bp, Artificial Sequence
  Synthetic oligonucleotide
aaatgatgtcacttaggactagattgaggc

SEQ ID NO: 251868 - DNA, 30 bp, Artificial Sequence
  Synthetic oligonucleotide
actatggagaagtcccaagcacaaataggc

SEQ ID NO: 251869 - DNA, 30 bp, Artificial Sequence
  Synthetic oligonucleotide
aaacagttacgagtcgactcctgaataggc

SEQ ID NO: 251870 - DNA, 30 bp, Artificial Sequence
  Synthetic oligonucleotide
gtcggatatctcgtggcaaagtccataggc

SEQ ID NO: 251871 - DNA, 30 bp, Artificial Sequence
  Synthetic oligonucleotide
tagtacactaccaatgatctcctcataggc

SEQ ID NO: 251872 - DNA, 31 bp, Artificial Sequence
  Synthetic oligonucleotide
acggaaattggctttctttagaatgataggc

SEQ ID NO: 251873 - DNA, 30 bp, Artificial Sequence
  Synthetic oligonucleotide
ttgagatggtatccacctgctttgataggc

SEQ ID NO: 251874 - DNA, 30 bp, Artificial Sequence
  Synthetic oligonucleotide
ttccacgggccaggtttacgtaatataggc

SEQ ID NO: 251875 - DNA, 30 bp, Artificial Sequence
  Synthetic oligonucleotide
cctcctgcgagccctcaaagttatataggc

SEQ ID NO: 251876 - DNA, 30 bp, Artificial Sequence
  Synthetic oligonucleotide
cttcctggtctggagtatctgcgactaggc

SEQ ID NO: 251877 - DNA, 30 bp, Artificial Sequence
  Synthetic oligonucleotide
agacgactggtcttgccttttagcctaggc

SEQ ID NO: 251878 - DNA, 30 bp, Artificial Sequence
  Synthetic oligonucleotide
tgtaccggcgacaaagaacgccgcctaggc

SEQ ID NO: 251879 - DNA, 30 bp, Artificial Sequence
  Synthetic oligonucleotide
tcctcgaagcgaagagacactaagctaggc

SEQ ID NO: 251880 - DNA, 30 bp, Artificial Sequence
  Synthetic oligonucleotide
gtgcaatcgtctgaaagatgatcgctaggc

SEQ ID NO: 251881 - DNA, 30 bp, Artificial Sequence
  Synthetic oligonucleotide
ggaaccatatttgatgcaaacgaggtaggc

SEQ ID NO: 251882 - DNA, 30 bp, Artificial Sequence
  Synthetic oligonucleotide
gaatgtggagacacatgctatgaggtaggc

SEQ ID NO: 251883 - DNA, 30 bp, Artificial Sequence
  Synthetic oligonucleotide
gggcgaccaacagagggtacaacggtaggc

SEQ ID NO: 251884 - DNA, 30 bp, Artificial Sequence
  Synthetic oligonucleotide
ctgcaaacgatgctgtgctgtcaattaggc

SEQ ID NO: 251885 - DNA, 30 bp, Artificial Sequence
  Synthetic oligonucleotide
ccggcaatttagcgggtagatgcattaggc

SEQ ID NO: 251886 - DNA, 30 bp, Artificial Sequence
  Synthetic oligonucleotide
actttcctggattacagtacgtacttaggc

SEQ ID NO: 251887 - DNA, 30 bp, Artificial Sequence
  Synthetic oligonucleotide
ccaatacacagtggggcacttctcttaggc

SEQ ID NO: 251888 - DNA, 30 bp, Artificial Sequence
  Synthetic oligonucleotide
attaaatagggggaaaacttagtcttaggc

SEQ ID NO: 251889 - DNA, 30 bp, Artificial Sequence
  Synthetic oligonucleotide
ctagtctttgaatgcaaggcgaagttaggc

SEQ ID NO: 251890 - DNA, 30 bp, Artificial Sequence
  Synthetic oligonucleotide
gtttggccgcttgatgcaatttaaaacggc

SEQ ID NO: 251891 - DNA, 30 bp, Artificial Sequence
  Synthetic oligonucleotide
ggaagtgaacatcgacgctgaggaaacggc

SEQ ID NO: 251892 - DNA, 30 bp, Artificial Sequence
  Synthetic oligonucleotide
cctcatatactcgtcctacgaagcaacggc

SEQ ID NO: 251893 - DNA, 30 bp, Artificial Sequence
  Synthetic oligonucleotide
ctcgcattagagtttcgcagaatcaacggc

SEQ ID NO: 251894 - DNA, 30 bp, Artificial Sequence
  Synthetic oligonucleotide
atgcgattactttcacggttcctgaacggc

SEQ ID NO: 251895 - DNA, 30 bp, Artificial Sequence
  Synthetic oligonucleotide
gctccggtatcaatcagaaaaagtaacggc

SEQ ID NO: 251896 - DNA, 30 bp, Artificial Sequence
  Synthetic oligonucleotide
cgctatgccataggtgatctgcgtaacggc

SEQ ID NO: 251897 - DNA, 30 bp, Artificial Sequence
  Synthetic oligonucleotide
atcgacttctagagaccagagcaccacggc

SEQ ID NO: 251898 - DNA, 30 bp, Artificial Sequence
  Synthetic oligonucleotide
gaatacagggtcaaagaggataggcacggc

SEQ ID NO: 251899 - DNA, 30 bp, Artificial Sequence
  Synthetic oligonucleotide
tacttcaccaccccgttacctactcacggc

SEQ ID NO: 251900 - DNA, 30 bp, Artificial Sequence
  Synthetic oligonucleotide
aactacctgcgactatacgaagttcacggc

SEQ ID NO: 251901 - DNA, 30 bp, Artificial Sequence
  Synthetic oligonucleotide
ggtagtcgtgagttaatcgattttcacggc

SEQ ID NO: 251902 - DNA, 30 bp, Artificial Sequence
  Synthetic oligonucleotide
ccgtgaccgggctggatgtattacgacggc

SEQ ID NO: 251903 - DNA, 30 bp, Artificial Sequence
  Synthetic oligonucleotide
atagtatattgagctgtagcgatggacggc

SEQ ID NO: 251904 - DNA, 30 bp, Artificial Sequence
  Synthetic oligonucleotide
ctaaacgcgttagcactcaaccaatacggc

SEQ ID NO: 251905 - DNA, 30 bp, Artificial Sequence
  Synthetic oligonucleotide
ttcggtctgaaaaatagccgtcaatacggc

SEQ ID NO: 251906 - DNA, 30 bp, Artificial Sequence
  Synthetic oligonucleotide
atcgctttcatcagggcaactgaatacggc

SEQ ID NO: 251907 - DNA, 30 bp, Artificial Sequence
  Synthetic oligonucleotide
tgggatcgttccatatgttaggcatacggc

SEQ ID NO: 251908 - DNA, 30 bp, Artificial Sequence
  Synthetic oligonucleotide
gtcatgtgacctttatcttgggtatacggc

SEQ ID NO: 251909 - DNA, 30 bp, Artificial Sequence
  Synthetic oligonucleotide
tgggaacaaaagttagttggcccctacggc

SEQ ID NO: 251910 - DNA, 30 bp, Artificial Sequence
  Synthetic oligonucleotide
ctttagccctagagataacatcagtacggc

SEQ ID NO: 251911 - DNA, 30 bp, Artificial Sequence
  Synthetic oligonucleotide
aaaagacttgggagataaagtccgtacggc

SEQ ID NO: 251912 - DNA, 30 bp, Artificial Sequence
  Synthetic oligonucleotide
tcccactacaatatactgataacttacggc

SEQ ID NO: 251913 - DNA, 30 bp, Artificial Sequence
  Synthetic oligonucleotide
caggatattactacaatcttcggttacggc

SEQ ID NO: 251914 - DNA, 30 bp, Artificial Sequence
  Synthetic oligonucleotide
gcaggcctgcaattcgtctggcacaccggc

SEQ ID NO: 251915 - DNA, 30 bp, Artificial Sequence
  Synthetic oligonucleotide
ggtctcgccgttagtgggaaggtcaccggc

SEQ ID NO: 251916 - DNA, 30 bp, Artificial Sequence
  Synthetic oligonucleotide
cgtggtccaaatctatggcaagtacccggc

SEQ ID NO: 251917 - DNA, 30 bp, Artificial Sequence
  Synthetic oligonucleotide
gcactgatgttttggactgttgaccccggc

SEQ ID NO: 251918 - DNA, 30 bp, Artificial Sequence
  Synthetic oligonucleotide
gctctggtgtagtctttggacaggcccggc

SEQ ID NO: 251919 - DNA, 30 bp, Artificial Sequence
  Synthetic oligonucleotide
cggtattttataccgggggcaaaagccggc

SEQ ID NO: 251920 - DNA, 30 bp, Artificial Sequence
  Synthetic oligonucleotide
cgtacctaagtaaaaatttttgaatccggc

SEQ ID NO: 251921 - DNA, 30 bp, Artificial Sequence
  Synthetic oligonucleotide
tggagtgctgtctcagttgattaatccggc

SEQ ID NO: 251922 - DNA, 30 bp, Artificial Sequence
  Synthetic oligonucleotide
atcgtactcgaaaagttcttatactccggc

SEQ ID NO: 251923 - DNA, 30 bp, Artificial Sequence
  Synthetic oligonucleotide
cgtggggggtcgtaggtggactattccggc

SEQ ID NO: 251924 - DNA, 30 bp, Artificial Sequence
  Synthetic oligonucleotide
tcagcaaacaatctccctagacgttccggc

SEQ ID NO: 251925 - DNA, 30 bp, Artificial Sequence
  Synthetic oligonucleotide
ggctaacttcgttcgagcaaataaagcggc

SEQ ID NO: 251926 - DNA, 30 bp, Artificial Sequence
  Synthetic oligonucleotide
cttctaataacgagtctgcaaccaagcggc

SEQ ID NO: 251927 - DNA, 30 bp, Artificial Sequence
  Synthetic oligonucleotide
ctcggcagatgcgccaatagcaacagcggc

SEQ ID NO: 251928 - DNA, 30 bp, Artificial Sequence
  Synthetic oligonucleotide
acctcggtgcacgattgttcaaggcgcggc

SEQ ID NO: 251929 - DNA, 30 bp, Artificial Sequence
  Synthetic oligonucleotide
ccactgttgccatgcttttcactgcgcggc

SEQ ID NO: 251930 - DNA, 30 bp, Artificial Sequence
  Synthetic oligonucleotide
gtacagggctccaggggtgctttgcgcggc

SEQ ID NO: 251931 - DNA, 30 bp, Artificial Sequence
  Synthetic oligonucleotide
ctgcttactagcttgcccgaccgtcgcggc

SEQ ID NO: 251932 - DNA, 30 bp, Artificial Sequence
  Synthetic oligonucleotide
cgatagtatttacacgaggcgtaaggcggc

SEQ ID NO: 251933 - DNA, 30 bp, Artificial Sequence
  Synthetic oligonucleotide
tgggacttttcagcaacctaaataggcggc

SEQ ID NO: 251934 - DNA, 30 bp, Artificial Sequence
  Synthetic oligonucleotide
taaaaggccaggatacgcagtggcggcggc

SEQ ID NO: 251935 - DNA, 30 bp, Artificial Sequence
  Synthetic oligonucleotide
cccaaccgggcgtgaggacgatgcggcggc

SEQ ID NO: 251936 - DNA, 30 bp, Artificial Sequence
  Synthetic oligonucleotide
cgcgagactgatggtgtccaattctgcggc

SEQ ID NO: 251937 - DNA, 30 bp, Artificial Sequence
  Synthetic oligonucleotide
atactataatattaaaccacagaaatcggc

SEQ ID NO: 251938 - DNA, 30 bp, Artificial Sequence
  Synthetic oligonucleotide
catggtagcgccgaaaggcctggtatcggc

SEQ ID NO: 251939 - DNA, 30 bp, Artificial Sequence
  Synthetic oligonucleotide
cggtcttatgttactgggcgaacactcggc

SEQ ID NO: 251940 - DNA, 30 bp, Artificial Sequence
  Synthetic oligonucleotide
gaaatagcgcttagtatgttgtagctcggc

SEQ ID NO: 251941 - DNA, 30 bp, Artificial Sequence
  Synthetic oligonucleotide
cacccgaacagcggactctatgcgctcggc

SEQ ID NO: 251942 - DNA, 30 bp, Artificial Sequence
  Synthetic oligonucleotide
atacgctctgggtcaacagagatgctcggc

SEQ ID NO: 251943 - DNA, 30 bp, Artificial Sequence
  Synthetic oligonucleotide
aaacataacgtgtaggacgagagtctcggc

SEQ ID NO: 251944 - DNA, 30 bp, Artificial Sequence
  Synthetic oligonucleotide
gccaaaacggtaaagctgggttgtctcggc

SEQ ID NO: 251945 - DNA, 30 bp, Artificial Sequence
  Synthetic oligonucleotide
gattcgtattgactggattagggcgtcggc

SEQ ID NO: 251946 - DNA, 30 bp, Artificial Sequence
  Synthetic oligonucleotide
atatgccgtgtgttattgtacggtgtcggc

SEQ ID NO: 251947 - DNA, 30 bp, Artificial Sequence
  Synthetic oligonucleotide
tacccaaaatttgagagtaggaatttcggc

SEQ ID NO: 251948 - DNA, 30 bp, Artificial Sequence
  Synthetic oligonucleotide
cgattaacccccacgcatccatgaaagggc

SEQ ID NO: 251949 - DNA, 30 bp, Artificial Sequence
  Synthetic oligonucleotide
ggggtgtccagtgacccacgccccaagggc

SEQ ID NO: 251950 - DNA, 30 bp, Artificial Sequence
  Synthetic oligonucleotide
tacttgcgggctaagacaatagaacagggc

SEQ ID NO: 251951 - DNA, 30 bp, Artificial Sequence
  Synthetic oligonucleotide
ggcagtggcgccattacaccgacacagggc

SEQ ID NO: 251952 - DNA, 30 bp, Artificial Sequence
  Synthetic oligonucleotide
tgagtccggcaattatgtacttgacagggc

SEQ ID NO: 251953 - DNA, 31 bp, Artificial Sequence
  Synthetic oligonucleotide
tggtaacgatgatatctctgaataccagggc

SEQ ID NO: 251954 - DNA, 30 bp, Artificial Sequence
  Synthetic oligonucleotide
gttgccgaaaaccaggcgcaaaagcagggc

SEQ ID NO: 251955 - DNA, 30 bp, Artificial Sequence
  Synthetic oligonucleotide
accggctgggcaaagaaaagacagcagggc

SEQ ID NO: 251956 - DNA, 30 bp, Artificial Sequence
  Synthetic oligonucleotide
ctccctccgtaaattaaaaacgagcagggc

SEQ ID NO: 251957 - DNA, 30 bp, Artificial Sequence
  Synthetic oligonucleotide
ggaccccgtccactaacctctcctcagggc

SEQ ID NO: 251958 - DNA, 30 bp, Artificial Sequence
  Synthetic oligonucleotide
tcacttataagacggttgtataaagagggc

SEQ ID NO: 251959 - DNA, 30 bp, Artificial Sequence
  Synthetic oligonucleotide
ctgacgacatgacgtgctccgcaagagggc

SEQ ID NO: 251960 - DNA, 30 bp, Artificial Sequence
  Synthetic oligonucleotide
gcaggctcaaccaataacgaccgcgagggc

SEQ ID NO: 251961 - DNA, 30 bp, Artificial Sequence
  Synthetic oligonucleotide
cgtgacgggcaacgactaccttcatagggc

SEQ ID NO: 251962 - DNA, 30 bp, Artificial Sequence
  Synthetic oligonucleotide
aaaaaccgctttgcctgaatacggtagggc

SEQ ID NO: 251963 - DNA, 30 bp, Artificial Sequence
  Synthetic oligonucleotide
caccccctgcttggagatagtggttagggc

SEQ ID NO: 251964 - DNA, 30 bp, Artificial Sequence
  Synthetic oligonucleotide
cacccgggcgggtctaatcgtggttagggc

SEQ ID NO: 251965 - DNA, 30 bp, Artificial Sequence
  Synthetic oligonucleotide
atgttgggcgtactagaagtttaaacgggc

SEQ ID NO: 251966 - DNA, 30 bp, Artificial Sequence
  Synthetic oligonucleotide
acgtctaagaatgtagaaccaacaccgggc

SEQ ID NO: 251967 - DNA, 30 bp, Artificial Sequence
  Synthetic oligonucleotide
cacttaataggtgccgagactaacccgggc

SEQ ID NO: 251968 - DNA, 30 bp, Artificial Sequence
  Synthetic oligonucleotide
cagtatagctgagtgctggtgcgtccgggc

SEQ ID NO: 251969 - DNA, 30 bp, Artificial Sequence
  Synthetic oligonucleotide
cagtctaagttgataattgcaaaagcgggc

SEQ ID NO: 251970 - DNA, 30 bp, Artificial Sequence
  Synthetic oligonucleotide
cgctacggtagcattcgtcataaagcgggc

SEQ ID NO: 251971 - DNA, 30 bp, Artificial Sequence
  Synthetic oligonucleotide
acaaacccaggtgtatacgaggaagcgggc

SEQ ID NO: 251972 - DNA, 30 bp, Artificial Sequence
  Synthetic oligonucleotide
ctgttcgactatgggccgaggtcagcgggc

SEQ ID NO: 251973 - DNA, 30 bp, Artificial Sequence
  Synthetic oligonucleotide
aagcattcaataattgatcaccccgcgggc

SEQ ID NO: 251974 - DNA, 30 bp, Artificial Sequence
  Synthetic oligonucleotide
ttggtcgttgtacccctatattcggcgggc

SEQ ID NO: 251975 - DNA, 30 bp, Artificial Sequence
  Synthetic oligonucleotide
taaggggaccggttacatatgagggcgggc

SEQ ID NO: 251976 - DNA, 30 bp, Artificial Sequence
  Synthetic oligonucleotide
gaataacgcggaagtaacgtttgggcgggc

SEQ ID NO: 251977 - DNA, 30 bp, Artificial Sequence
  Synthetic oligonucleotide
ccaaggcggcaacagattccatgtgcgggc

SEQ ID NO: 251978 - DNA, 30 bp, Artificial Sequence
  Synthetic oligonucleotide
ttgggcacctagcttactctgccatcgggc

SEQ ID NO: 251979 - DNA, 30 bp, Artificial Sequence
  Synthetic oligonucleotide
atgcatcgtccggataaagagacctcgggc

SEQ ID NO: 251980 - DNA, 30 bp, Artificial Sequence
  Synthetic oligonucleotide
tcctacaagttgtttggagggccctcgggc

SEQ ID NO: 251981 - DNA, 30 bp, Artificial Sequence
  Synthetic oligonucleotide
cgcaaatgtacagccgagctaaagtcgggc

SEQ ID NO: 251982 - DNA, 30 bp, Artificial Sequence
  Synthetic oligonucleotide
tgtatcagttagcaatagtagtgttcgggc

SEQ ID NO: 251983 - DNA, 30 bp, Artificial Sequence
  Synthetic oligonucleotide
aggcattcgtgatgattgggtttttcgggc

SEQ ID NO: 251984 - DNA, 30 bp, Artificial Sequence
  Synthetic oligonucleotide
gtctggaaatacttgggtcctagaaggggc

SEQ ID NO: 251985 - DNA, 30 bp, Artificial Sequence
  Synthetic oligonucleotide
caaagactactctcggggaattacaggggc

SEQ ID NO: 251986 - DNA, 30 bp, Artificial Sequence
  Synthetic oligonucleotide
tccccggagaaattgcacatgccgaggggc

SEQ ID NO: 251987 - DNA, 30 bp, Artificial Sequence
  Synthetic oligonucleotide
gtgtataacgccttatgctctttgaggggc

SEQ ID NO: 251988 - DNA, 30 bp, Artificial Sequence
  Synthetic oligonucleotide
gcaactgggcccctataccgtctacggggc

SEQ ID NO: 251989 - DNA, 30 bp, Artificial Sequence
  Synthetic oligonucleotide
agagagcagctccactgttaaacccggggc

SEQ ID NO: 251990 - DNA, 30 bp, Artificial Sequence
  Synthetic oligonucleotide
agcaaacagcttgtagtcttattccggggc

SEQ ID NO: 251991 - DNA, 30 bp, Artificial Sequence
  Synthetic oligonucleotide
gcgcctcagcaagacataaagcagcggggc

SEQ ID NO: 251992 - DNA, 30 bp, Artificial Sequence
  Synthetic oligonucleotide
gtaaagttgcatagtgaactgacgcggggc

SEQ ID NO: 251993 - DNA, 30 bp, Artificial Sequence
  Synthetic oligonucleotide
ggtaagatgtgaacctcctggaggcggggc

SEQ ID NO: 251994 - DNA, 30 bp, Artificial Sequence
  Synthetic oligonucleotide
atcaccttaggattcgccaagcatcggggc

SEQ ID NO: 251995 - DNA, 29 bp, Artificial Sequence
  Synthetic oligonucleotide
atcggacatacgtactccttcacgggggc

SEQ ID NO: 251996 - DNA, 30 bp, Artificial Sequence
  Synthetic oligonucleotide
accaggggtggtcaagtgataggcgggggc

SEQ ID NO: 251997 - DNA, 30 bp, Artificial Sequence
  Synthetic oligonucleotide
agtaggaggtatggcttagcgagtgggggc

SEQ ID NO: 251998 - DNA, 35 bp, Artificial Sequence
  Synthetic oligonucleotide
ccgaccacaggcacgtctggtacacgggtgggggc

SEQ ID NO: 251999 - DNA, 30 bp, Artificial Sequence
  Synthetic oligonucleotide
gacggatctacacaatcgctatttgggggc

SEQ ID NO: 252000 - DNA, 30 bp, Artificial Sequence
  Synthetic oligonucleotide
agtcccacgcgctatgtatacctctggggc

SEQ ID NO: 252001 - DNA, 30 bp, Artificial Sequence
  Synthetic oligonucleotide
aaactggcaatccaaggcgctttgtggggc

SEQ ID NO: 252002 - DNA, 30 bp, Artificial Sequence
  Synthetic oligonucleotide
aattgaaggagaaatatcaccaattggggc

SEQ ID NO: 252003 - DNA, 30 bp, Artificial Sequence
  Synthetic oligonucleotide
atggggcgctttatttactgatattggggc

SEQ ID NO: 252004 - DNA, 30 bp, Artificial Sequence
  Synthetic oligonucleotide
cacgagataggctgcaccgcatgaatgggc

SEQ ID NO: 252005 - DNA, 30 bp, Artificial Sequence
  Synthetic oligonucleotide
agagttacacacagttagagccccatgggc

SEQ ID NO: 252006 - DNA, 30 bp, Artificial Sequence
  Synthetic oligonucleotide
ttaagtgttatctgaagcggctagatgggc

SEQ ID NO: 252007 - DNA, 30 bp, Artificial Sequence
  Synthetic oligonucleotide
gggccgctttggcttaagaataggatgggc

SEQ ID NO: 252008 - DNA, 30 bp, Artificial Sequence
  Synthetic oligonucleotide
ataagggacctgaggttagtccatatgggc

SEQ ID NO: 252009 - DNA, 30 bp, Artificial Sequence
  Synthetic oligonucleotide
caaaaaataggcggtaagattcatatgggc

SEQ ID NO: 252010 - DNA, 30 bp, Artificial Sequence
  Synthetic oligonucleotide
ccgctaagataggtggttcattgtatgggc

SEQ ID NO: 252011 - DNA, 30 bp, Artificial Sequence
  Synthetic oligonucleotide
caagcaccgtcaacggcaaccggactgggc

SEQ ID NO: 252012 - DNA, 30 bp, Artificial Sequence
  Synthetic oligonucleotide
acgcaagtagactcaaagggtaacctgggc

SEQ ID NO: 252013 - DNA, 30 bp, Artificial Sequence
  Synthetic oligonucleotide
gtcgctcgcaacaagctggccgtgctgggc

SEQ ID NO: 252014 - DNA, 30 bp, Artificial Sequence
  Synthetic oligonucleotide
tatggtggtcgttatggcgctcctctgggc

SEQ ID NO: 252015 - DNA, 30 bp, Artificial Sequence
  Synthetic oligonucleotide
ggtctgtgggaagcgtaatattctctgggc

SEQ ID NO: 252016 - DNA, 30 bp, Artificial Sequence
  Synthetic oligonucleotide
cgtgcggaagctcggcctaggttagtgggc

SEQ ID NO: 252017 - DNA, 30 bp, Artificial Sequence
  Synthetic oligonucleotide
tctggcaaatcgggcggtggcgacgtgggc

SEQ ID NO: 252018 - DNA, 30 bp, Artificial Sequence
  Synthetic oligonucleotide
ccaccggaatcgctagacagataggtgggc

SEQ ID NO: 252019 - DNA, 30 bp, Artificial Sequence
  Synthetic oligonucleotide
ggggaacgaaatgcgggttcaggattgggc

SEQ ID NO: 252020 - DNA, 30 bp, Artificial Sequence
  Synthetic oligonucleotide
cacacacctgtgcggatttgtgtattgggc

SEQ ID NO: 252021 - DNA, 30 bp, Artificial Sequence
  Synthetic oligonucleotide
ggagcggttgttgattgggctgacttgggc

SEQ ID NO: 252022 - DNA, 30 bp, Artificial Sequence
  Synthetic oligonucleotide
aaagataaatgtcctatacgcgccttgggc

SEQ ID NO: 252023 - DNA, 30 bp, Artificial Sequence
  Synthetic oligonucleotide
gaaagtccatagttctaattgcggttgggc

SEQ ID NO: 252024 - DNA, 30 bp, Artificial Sequence
  Synthetic oligonucleotide
tgtctatcattactatcggttcggttgggc

SEQ ID NO: 252025 - DNA, 30 bp, Artificial Sequence
  Synthetic oligonucleotide
catggtgctgctgggaggaacggtttgggc

SEQ ID NO: 252026 - DNA, 30 bp, Artificial Sequence
  Synthetic oligonucleotide
ttatgcacttactcttgtgatataaatggc

SEQ ID NO: 252027 - DNA, 30 bp, Artificial Sequence
  Synthetic oligonucleotide
cgcgcatggtacctgggtcaaaggaatggc

SEQ ID NO: 252028 - DNA, 30 bp, Artificial Sequence
  Synthetic oligonucleotide
gtggggtagtagactggggggatgaatggc

SEQ ID NO: 252029 - DNA, 30 bp, Artificial Sequence
  Synthetic oligonucleotide
gtccaccacggcgaaaactttcgtaatggc

SEQ ID NO: 252030 - DNA, 30 bp, Artificial Sequence
  Synthetic oligonucleotide
gcggtccatcctgaggtatacgaacatggc

SEQ ID NO: 252031 - DNA, 30 bp, Artificial Sequence
  Synthetic oligonucleotide
agagtcagctcggttcgaagcgcacatggc

SEQ ID NO: 252032 - DNA, 30 bp, Artificial Sequence
  Synthetic oligonucleotide
gaataagtgtggggtctgaggctacatggc

SEQ ID NO: 252033 - DNA, 30 bp, Artificial Sequence
  Synthetic oligonucleotide
aagtgcgaacggccgtgaaaactccatggc

SEQ ID NO: 252034 - DNA, 30 bp, Artificial Sequence
  Synthetic oligonucleotide
caaaaaggggtgtttcggaatgtgcatggc

SEQ ID NO: 252035 - DNA, 30 bp, Artificial Sequence
  Synthetic oligonucleotide
aacgctagctcaagcgcgggggatcatggc

SEQ ID NO: 252036 - DNA, 30 bp, Artificial Sequence
  Synthetic oligonucleotide
cactggatccgcgcagttagtgttcatggc

SEQ ID NO: 252037 - DNA, 30 bp, Artificial Sequence
  Synthetic oligonucleotide
taaaagctcagacgcccgacgtgggatggc

SEQ ID NO: 252038 - DNA, 30 bp, Artificial Sequence
  Synthetic oligonucleotide
ataagagtccattagtcctgtgtggatggc

SEQ ID NO: 252039 - DNA, 30 bp, Artificial Sequence
  Synthetic oligonucleotide
aaaacgagagtaccgagaggttgtgatggc

SEQ ID NO: 252040 - DNA, 30 bp, Artificial Sequence
  Synthetic oligonucleotide
atggattgatggggaaatactgaatatggc

SEQ ID NO: 252041 - DNA, 30 bp, Artificial Sequence
  Synthetic oligonucleotide
atcacagttgttcacagggcctggtatggc

SEQ ID NO: 252042 - DNA, 30 bp, Artificial Sequence
  Synthetic oligonucleotide
gtacctgatcttagccacaaaccttatggc

SEQ ID NO: 252043 - DNA, 30 bp, Artificial Sequence
  Synthetic oligonucleotide
agtagacagttgattgatagctcaactggc

SEQ ID NO: 252044 - DNA, 30 bp, Artificial Sequence
  Synthetic oligonucleotide
aaagcacgtcgtgccgtaagtagaactggc

SEQ ID NO: 252045 - DNA, 30 bp, Artificial Sequence
  Synthetic oligonucleotide
gctaagtggagtagattgcgcagcactggc

SEQ ID NO: 252046 - DNA, 30 bp, Artificial Sequence
  Synthetic oligonucleotide
atgacgcaccaatgatggcttcttactggc

SEQ ID NO: 252047 - DNA, 30 bp, Artificial Sequence
  Synthetic oligonucleotide
ctcacggcaactaagactgcgtcccctggc

SEQ ID NO: 252048 - DNA, 30 bp, Artificial Sequence
  Synthetic oligonucleotide
tgcgttacacactgctatgataagcctggc

SEQ ID NO: 252049 - DNA, 30 bp, Artificial Sequence
  Synthetic oligonucleotide
gtaaagagcctgtggctgcgtaccgctggc

SEQ ID NO: 252050 - DNA, 30 bp, Artificial Sequence
  Synthetic oligonucleotide
gtccgggcgaggcgacacgcacgtgctggc

SEQ ID NO: 252051 - DNA, 30 bp, Artificial Sequence
  Synthetic oligonucleotide
taaggctgcggtcgagaaggggcatctggc

SEQ ID NO: 252052 - DNA, 30 bp, Artificial Sequence
  Synthetic oligonucleotide
acgtgccttcagaagtttacaatatctggc

SEQ ID NO: 252053 - DNA, 30 bp, Artificial Sequence
  Synthetic oligonucleotide
gtcacttcaatcaggagtagcttatctggc

SEQ ID NO: 252054 - DNA, 30 bp, Artificial Sequence
  Synthetic oligonucleotide
tctacgcattccagcagttggtactctggc

SEQ ID NO: 252055 - DNA, 30 bp, Artificial Sequence
  Synthetic oligonucleotide
gcccaggagttcggtctctacggctctggc

SEQ ID NO: 252056 - DNA, 30 bp, Artificial Sequence
  Synthetic oligonucleotide
tgattggtcgctggggacggccggtctggc

SEQ ID NO: 252057 - DNA, 30 bp, Artificial Sequence
  Synthetic oligonucleotide
ccgcggcatctgatgtgactgttgtctggc

SEQ ID NO: 252058 - DNA, 30 bp, Artificial Sequence
  Synthetic oligonucleotide
agtcacaacatgtcgcgtgaagaaagtggc

SEQ ID NO: 252059 - DNA, 30 bp, Artificial Sequence
  Synthetic oligonucleotide
aaattaccttactattggggttaaagtggc

SEQ ID NO: 252060 - DNA, 30 bp, Artificial Sequence
  Synthetic oligonucleotide
cacataggtccctcggaccattgcagtggc

SEQ ID NO: 252061 - DNA, 30 bp, Artificial Sequence
  Synthetic oligonucleotide
gggagaatgttaacgtttccttcgagtggc

SEQ ID NO: 252062 - DNA, 30 bp, Artificial Sequence
  Synthetic oligonucleotide
gggaaaatgctctctcaatacatacgtggc

SEQ ID NO: 252063 - DNA, 30 bp, Artificial Sequence
  Synthetic oligonucleotide
acctaactcagatatatttacattcgtggc

SEQ ID NO: 252064 - DNA, 30 bp, Artificial Sequence
  Synthetic oligonucleotide
aaagggaagaggtctcttttctcaggtggc

SEQ ID NO: 252065 - DNA, 30 bp, Artificial Sequence
  Synthetic oligonucleotide
gctttccggattcaaatttaactaggtggc

SEQ ID NO: 252066 - DNA, 30 bp, Artificial Sequence
  Synthetic oligonucleotide
cggctcgttggccaatggggtgtaggtggc

SEQ ID NO: 252067 - DNA, 30 bp, Artificial Sequence
  Synthetic oligonucleotide
acgacctatggtagtgttcctgcgggtggc

SEQ ID NO: 252068 - DNA, 30 bp, Artificial Sequence
  Synthetic oligonucleotide
tcaatacggtctatcctatctgcgggtggc

SEQ ID NO: 252069 - DNA, 30 bp, Artificial Sequence
  Synthetic oligonucleotide
gcactacgcacttgtgcaaccctgggtggc

SEQ ID NO: 252070 - DNA, 30 bp, Artificial Sequence
  Synthetic oligonucleotide
cggggtgcccatgatgtgataattggtggc

SEQ ID NO: 252071 - DNA, 30 bp, Artificial Sequence
  Synthetic oligonucleotide
gacgtctgttaattctataaggtatgtggc

SEQ ID NO: 252072 - DNA, 30 bp, Artificial Sequence
  Synthetic oligonucleotide
gatacgggggagcggtcagggctctgtggc

SEQ ID NO: 252073 - DNA, 30 bp, Artificial Sequence
  Synthetic oligonucleotide
tttactgacgtaagagttccgtggattggc

SEQ ID NO: 252074 - DNA, 30 bp, Artificial Sequence
  Synthetic oligonucleotide
taaccggtgaagcgttcgcagcgtattggc

SEQ ID NO: 252075 - DNA, 30 bp, Artificial Sequence
  Synthetic oligonucleotide
gggccggactactggagacgtacacttggc

SEQ ID NO: 252076 - DNA, 30 bp, Artificial Sequence
  Synthetic oligonucleotide
aatcgcaaacgcccttcaggagtacttggc

SEQ ID NO: 252077 - DNA, 30 bp, Artificial Sequence
  Synthetic oligonucleotide
tgaagtaagataacggagacgcaccttggc

SEQ ID NO: 252078 - DNA, 30 bp, Artificial Sequence
  Synthetic oligonucleotide
cggctaccaaccacgagcgaaccccttggc

SEQ ID NO: 252079 - DNA, 30 bp, Artificial Sequence
  Synthetic oligonucleotide
ctacgtgaatgtcgtatttgtgatcttggc

SEQ ID NO: 252080 - DNA, 30 bp, Artificial Sequence
  Synthetic oligonucleotide
tttggaaagggcatagtcttggttcttggc

SEQ ID NO: 252081 - DNA, 30 bp, Artificial Sequence
  Synthetic oligonucleotide
atcaccgtagaccacctgtaaaaagttggc

SEQ ID NO: 252082 - DNA, 30 bp, Artificial Sequence
  Synthetic oligonucleotide
atttagctgtggatctgcgaggaagttggc

SEQ ID NO: 252083 - DNA, 30 bp, Artificial Sequence
  Synthetic oligonucleotide
accagcgttgcggagttattccgagttggc

SEQ ID NO: 252084 - DNA, 30 bp, Artificial Sequence
  Synthetic oligonucleotide
gaagaacacacagttggttgacaggttggc

SEQ ID NO: 252085 - DNA, 30 bp, Artificial Sequence
  Synthetic oligonucleotide
agttggataccaacaccatccactgttggc

SEQ ID NO: 252086 - DNA, 30 bp, Artificial Sequence
  Synthetic oligonucleotide
ttctgaagattactgctggatagtgttggc

SEQ ID NO: 252087 - DNA, 30 bp, Artificial Sequence
  Synthetic oligonucleotide
tacacaaactgtggaccatacaaatttggc

SEQ ID NO: 252088 - DNA, 30 bp, Artificial Sequence
  Synthetic oligonucleotide
cacgccaggaatgtgaggaagcgctttggc

SEQ ID NO: 252089 - DNA, 30 bp, Artificial Sequence
  Synthetic oligonucleotide
gctatgcggttcgggggtaagccgtttggc

SEQ ID NO: 252090 - DNA, 30 bp, Artificial Sequence
  Synthetic oligonucleotide
cccaaggaggggatttgggcgccgtttggc

SEQ ID NO: 252091 - DNA, 30 bp, Artificial Sequence
  Synthetic oligonucleotide
agatcaacagaacggtatagacggtttggc

SEQ ID NO: 252092 - DNA, 30 bp, Artificial Sequence
  Synthetic oligonucleotide
cgaaacatgctgtgccctcaatccaaatgc

SEQ ID NO: 252093 - DNA, 30 bp, Artificial Sequence
  Synthetic oligonucleotide
gtatatatccatcgagtacagcagaaatgc

SEQ ID NO: 252094 - DNA, 30 bp, Artificial Sequence
  Synthetic oligonucleotide
agatcaccacctgcgaggggttctaaatgc

SEQ ID NO: 252095 - DNA, 30 bp, Artificial Sequence
  Synthetic oligonucleotide
cacaaagatcattgcctacttcgtaaatgc

SEQ ID NO: 252096 - DNA, 30 bp, Artificial Sequence
  Synthetic oligonucleotide
ttaaataggttgggcgttacaggtaaatgc

SEQ ID NO: 252097 - DNA, 30 bp, Artificial Sequence
  Synthetic oligonucleotide
aggacgcgtatacttaaacggggtaaatgc

SEQ ID NO: 252098 - DNA, 30 bp, Artificial Sequence
  Synthetic oligonucleotide
cgcgttttatcacagtgcccttaccaatgc

SEQ ID NO: 252099 - DNA, 30 bp, Artificial Sequence
  Synthetic oligonucleotide
ttaggtcagggccattctcagtgccaatgc

SEQ ID NO: 252100 - DNA, 30 bp, Artificial Sequence
  Synthetic oligonucleotide
gcgcatgtcgtagctcggattcctcaatgc

SEQ ID NO: 252101 - DNA, 30 bp, Artificial Sequence
  Synthetic oligonucleotide
gggcactccggggttgcgtggcgagaatgc

SEQ ID NO: 252102 - DNA, 30 bp, Artificial Sequence
  Synthetic oligonucleotide
ttgacaaattgtttctgtatgaacgaatgc

SEQ ID NO: 252103 - DNA, 30 bp, Artificial Sequence
  Synthetic oligonucleotide
tccgtgatcgtgtacggcatgagcgaatgc

SEQ ID NO: 252104 - DNA, 30 bp, Artificial Sequence
  Synthetic oligonucleotide
catgataagcccggatattccaaggaatgc

SEQ ID NO: 252105 - DNA, 30 bp, Artificial Sequence
  Synthetic oligonucleotide
ccttaccataaggctaggcactaggaatgc

SEQ ID NO: 252106 - DNA, 30 bp, Artificial Sequence
  Synthetic oligonucleotide
ggcaggacctggttgaggacaacggaatgc

SEQ ID NO: 252107 - DNA, 30 bp, Artificial Sequence
  Synthetic oligonucleotide
acagagtaggacctggtgccaagggaatgc

SEQ ID NO: 252108 - DNA, 30 bp, Artificial Sequence
  Synthetic oligonucleotide
gtgggacatctcaggacaagctaataatgc

SEQ ID NO: 252109 - DNA, 30 bp, Artificial Sequence
  Synthetic oligonucleotide
ccatataagttcatcaggggttaataatgc

SEQ ID NO: 252110 - DNA, 30 bp, Artificial Sequence
  Synthetic oligonucleotide
tcgtcggtattacgatcgataaactaatgc

SEQ ID NO: 252111 - DNA, 30 bp, Artificial Sequence
  Synthetic oligonucleotide
gctaacaactgctaggattcgaagtaatgc

SEQ ID NO: 252112 - DNA, 30 bp, Artificial Sequence
  Synthetic oligonucleotide
gtgggcgggaccttaaggtaggggtaatgc

SEQ ID NO: 252113 - DNA, 30 bp, Artificial Sequence
  Synthetic oligonucleotide
cccttccgcgtgtgtaaggcgcgttaatgc

SEQ ID NO: 252114 - DNA, 30 bp, Artificial Sequence
  Synthetic oligonucleotide
ctttgtgcgtaagggccttgggcaacatgc

SEQ ID NO: 252115 - DNA, 30 bp, Artificial Sequence
  Synthetic oligonucleotide
gaaggactgcagcttaagcactgaacatgc

SEQ ID NO: 252116 - DNA, 30 bp, Artificial Sequence
  Synthetic oligonucleotide
gtcccttgtgaaataaaacagttcacatgc

SEQ ID NO: 252117 - DNA, 30 bp, Artificial Sequence
  Synthetic oligonucleotide
cagataatggaattaatactccagacatgc

SEQ ID NO: 252118 - DNA, 30 bp, Artificial Sequence
  Synthetic oligonucleotide
gtaaacaccgcagacctaagatggacatgc

SEQ ID NO: 252119 - DNA, 30 bp, Artificial Sequence
  Synthetic oligonucleotide
gtccgtcttcaggaattcgcccctacatgc

SEQ ID NO: 252120 - DNA, 30 bp, Artificial Sequence
  Synthetic oligonucleotide
acgcgacgtcacctgatgagagctacatgc

SEQ ID NO: 252121 - DNA, 30 bp, Artificial Sequence
  Synthetic oligonucleotide
aacaggaagacggccccataacggccatgc

SEQ ID NO: 252122 - DNA, 30 bp, Artificial Sequence
  Synthetic oligonucleotide
tcgtcagaatcatgttttaccaatccatgc

SEQ ID NO: 252123 - DNA, 30 bp, Artificial Sequence
  Synthetic oligonucleotide
taaggtgtaccgtcctggaagcctccatgc

SEQ ID NO: 252124 - DNA, 30 bp, Artificial Sequence
  Synthetic oligonucleotide
agcatcttagcagggaaaatttaggcatgc

SEQ ID NO: 252125 - DNA, 30 bp, Artificial Sequence
  Synthetic oligonucleotide
ggtgtactgcagaagacagtttaggcatgc

SEQ ID NO: 252126 - DNA, 30 bp, Artificial Sequence
  Synthetic oligonucleotide
gccagagtgcgtatcgtgtaaatggcatgc

SEQ ID NO: 252127 - DNA, 30 bp, Artificial Sequence
  Synthetic oligonucleotide
cctgtgtgcgatggcttacgcgatgcatgc

SEQ ID NO: 252128 - DNA, 30 bp, Artificial Sequence
  Synthetic oligonucleotide
gacctcaggcatcgtaacatgctatcatgc

SEQ ID NO: 252129 - DNA, 30 bp, Artificial Sequence
  Synthetic oligonucleotide
tgcaggtgctcgagagtcgcgttatcatgc

SEQ ID NO: 252130 - DNA, 30 bp, Artificial Sequence
  Synthetic oligonucleotide
gtggacattggtgggaggagactctcatgc

SEQ ID NO: 252131 - DNA, 30 bp, Artificial Sequence
  Synthetic oligonucleotide
tggttcgatcatgcgggcgcgctctcatgc

SEQ ID NO: 252132 - DNA, 30 bp, Artificial Sequence
  Synthetic oligonucleotide
tacttaacgccagtgtcggttccgtcatgc

SEQ ID NO: 252133 - DNA, 30 bp, Artificial Sequence
  Synthetic oligonucleotide
gttaaagtgacgaaattacaacggtcatgc

SEQ ID NO: 252134 - DNA, 30 bp, Artificial Sequence
  Synthetic oligonucleotide
atatagttcaggtcatgggcccaaagatgc

SEQ ID NO: 252135 - DNA, 30 bp, Artificial Sequence
  Synthetic oligonucleotide
cgtcatgtggaattgactcgcgcaagatgc

SEQ ID NO: 252136 - DNA, 30 bp, Artificial Sequence
  Synthetic oligonucleotide
ggtaatagccaatgacgttacaacagatgc

SEQ ID NO: 252137 - DNA, 30 bp, Artificial Sequence
  Synthetic oligonucleotide
agatgcatcattagatgcttacagagatgc

SEQ ID NO: 252138 - DNA, 30 bp, Artificial Sequence
  Synthetic oligonucleotide
tgctaggaagcaattagatccgggagatgc

SEQ ID NO: 252139 - DNA, 30 bp, Artificial Sequence
  Synthetic oligonucleotide
ttgcggtcgaagggaggccatttgagatgc

SEQ ID NO: 252140 - DNA, 30 bp, Artificial Sequence
  Synthetic oligonucleotide
actataggcgtgctcacccatcatagatgc

SEQ ID NO: 252141 - DNA, 30 bp, Artificial Sequence
  Synthetic oligonucleotide
gatgcttcccaggggaattcaagtagatgc

SEQ ID NO: 252142 - DNA, 30 bp, Artificial Sequence
  Synthetic oligonucleotide
ggtaataccaaagcatttcatagacgatgc

SEQ ID NO: 252143 - DNA, 30 bp, Artificial Sequence
  Synthetic oligonucleotide
ataactgcctttccggatctgtgccgatgc

SEQ ID NO: 252144 - DNA, 30 bp, Artificial Sequence
  Synthetic oligonucleotide
cgttcgggtagcaagcgcgatataggatgc

SEQ ID NO: 252145 - DNA, 30 bp, Artificial Sequence
  Synthetic oligonucleotide
gatctgtggcaactgttcacgacgggatgc

SEQ ID NO: 252146 - DNA, 30 bp, Artificial Sequence
  Synthetic oligonucleotide
taccgtcttagtagggggcggtatggatgc

SEQ ID NO: 252147 - DNA, 30 bp, Artificial Sequence
  Synthetic oligonucleotide
agtaatgatgtaagtatttctggatgatgc

SEQ ID NO: 252148 - DNA, 30 bp, Artificial Sequence
  Synthetic oligonucleotide
ctaagggccataacttagtattcttgatgc

SEQ ID NO: 252149 - DNA, 30 bp, Artificial Sequence
  Synthetic oligonucleotide
ggggatcggcataatgctaacacaatatgc

SEQ ID NO: 252150 - DNA, 30 bp, Artificial Sequence
  Synthetic oligonucleotide
aatcacttgttccaggaaggtgacatatgc

SEQ ID NO: 252151 - DNA, 30 bp, Artificial Sequence
  Synthetic oligonucleotide
tcagcgagaaacgatctcgtggccatatgc

SEQ ID NO: 252152 - DNA, 30 bp, Artificial Sequence
  Synthetic oligonucleotide
cagccgttgggactacctagcctcatatgc

SEQ ID NO: 252153 - DNA, 30 bp, Artificial Sequence
  Synthetic oligonucleotide
tcaatgtgaccctgggtcgacacgatatgc

SEQ ID NO: 252154 - DNA, 30 bp, Artificial Sequence
  Synthetic oligonucleotide
ggctttgcgagtctacttctatcgatatgc

SEQ ID NO: 252155 - DNA, 30 bp, Artificial Sequence
  Synthetic oligonucleotide
ccggaggcaggttatacagccgggatatgc

SEQ ID NO: 252156 - DNA, 30 bp, Artificial Sequence
  Synthetic oligonucleotide
cggctcgtgactcagtacttctctatatgc

SEQ ID NO: 252157 - DNA, 30 bp, Artificial Sequence
  Synthetic oligonucleotide
tccgaaatcgatgacgaaaccgggctatgc

SEQ ID NO: 252158 - DNA, 30 bp, Artificial Sequence
  Synthetic oligonucleotide
gtctccagggttaagggacacatgctatgc

SEQ ID NO: 252159 - DNA, 30 bp, Artificial Sequence
  Synthetic oligonucleotide
ttcaagtcaacttgaagctggctgctatgc

SEQ ID NO: 252160 - DNA, 30 bp, Artificial Sequence
  Synthetic oligonucleotide
tttatctacgagaaggaaggtacagtatgc

SEQ ID NO: 252161 - DNA, 30 bp, Artificial Sequence
  Synthetic oligonucleotide
gttataatggaagacttatatcgagtatgc

SEQ ID NO: 252162 - DNA, 30 bp, Artificial Sequence
  Synthetic oligonucleotide
ctatcagttgaaagcggtagcctagtatgc

SEQ ID NO: 252163 - DNA, 30 bp, Artificial Sequence
  Synthetic oligonucleotide
gatcctggactcagggtttagtccgtatgc

SEQ ID NO: 252164 - DNA, 30 bp, Artificial Sequence
  Synthetic oligonucleotide
gctgttatgacgtacaagaggtgggtatgc

SEQ ID NO: 252165 - DNA, 30 bp, Artificial Sequence
  Synthetic oligonucleotide
tctaacgtggtaatcccagcctgtgtatgc

SEQ ID NO: 252166 - DNA, 30 bp, Artificial Sequence
  Synthetic oligonucleotide
atgatcggtgagaccgtttgtcttgtatgc

SEQ ID NO: 252167 - DNA, 30 bp, Artificial Sequence
  Synthetic oligonucleotide
cctagaaggccttaccgatatacattatgc

SEQ ID NO: 252168 - DNA, 30 bp, Artificial Sequence
  Synthetic oligonucleotide
ttaaaaataaatcgcatgttcctattatgc

SEQ ID NO: 252169 - DNA, 30 bp, Artificial Sequence
  Synthetic oligonucleotide
tgaagtgattggccaggcgagccgttatgc

SEQ ID NO: 252170 - DNA, 30 bp, Artificial Sequence
  Synthetic oligonucleotide
ctttgctctatggatgtgcgcgcgttatgc

SEQ ID NO: 252171 - DNA, 30 bp, Artificial Sequence
  Synthetic oligonucleotide
aggcatgctcgtcagaggcactcgttatgc

SEQ ID NO: 252172 - DNA, 30 bp, Artificial Sequence
  Synthetic oligonucleotide
tcgggcgcgtcaatagtcaagttgttatgc

SEQ ID NO: 252173 - DNA, 30 bp, Artificial Sequence
  Synthetic oligonucleotide
gagaacgcggtaacgactgtgaatttatgc

SEQ ID NO: 252174 - DNA, 30 bp, Artificial Sequence
  Synthetic oligonucleotide
ttcattaagtgggacggttgtattttatgc

SEQ ID NO: 252175 - DNA, 30 bp, Artificial Sequence
  Synthetic oligonucleotide
aataatgagggtcaaatcctgcgaaactgc

SEQ ID NO: 252176 - DNA, 30 bp, Artificial Sequence
  Synthetic oligonucleotide
cacgcttgtcaatctttatgtgggaactgc

SEQ ID NO: 252177 - DNA, 30 bp, Artificial Sequence
  Synthetic oligonucleotide
acttttcctcagagagaaatcagacactgc

SEQ ID NO: 252178 - DNA, 30 bp, Artificial Sequence
  Synthetic oligonucleotide
atcacggtgaccggagagacggaggactgc

SEQ ID NO: 252179 - DNA, 30 bp, Artificial Sequence
  Synthetic oligonucleotide
gttcagacctcccgtattatgagggactgc

SEQ ID NO: 252180 - DNA, 30 bp, Artificial Sequence
  Synthetic oligonucleotide
atggacgagggttttgaatatagggactgc

SEQ ID NO: 252181 - DNA, 30 bp, Artificial Sequence
  Synthetic oligonucleotide
cgccgcactctgtgtgtccgaaatgactgc

SEQ ID NO: 252182 - DNA, 30 bp, Artificial Sequence
  Synthetic oligonucleotide
aagtacggaccgcacggccctcgtgactgc

SEQ ID NO: 252183 - DNA, 30 bp, Artificial Sequence
  Synthetic oligonucleotide
tgctcaagatattgtgtaaggcaatactgc

SEQ ID NO: 252184 - DNA, 30 bp, Artificial Sequence
  Synthetic oligonucleotide
aacgaattgcagaaggcattgagatactgc

SEQ ID NO: 252185 - DNA, 30 bp, Artificial Sequence
  Synthetic oligonucleotide
ttacgggaacacgaagggtttatatactgc

SEQ ID NO: 252186 - DNA, 30 bp, Artificial Sequence
  Synthetic oligonucleotide
catcgcgcgagcgtgccgcacgtatactgc

SEQ ID NO: 252187 - DNA, 30 bp, Artificial Sequence
  Synthetic oligonucleotide
caaaggcggcgcagagatgcatgttactgc

SEQ ID NO: 252188 - DNA, 30 bp, Artificial Sequence
  Synthetic oligonucleotide
taaagacttcctcgcaaggggggtacctgc

SEQ ID NO: 252189 - DNA, 30 bp, Artificial Sequence
  Synthetic oligonucleotide
tcgagaatctacacgtgatccgacccctgc

SEQ ID NO: 252190 - DNA, 30 bp, Artificial Sequence
  Synthetic oligonucleotide
ccgttagtggttaccgcgcatgggccctgc

SEQ ID NO: 252191 - DNA, 30 bp, Artificial Sequence
  Synthetic oligonucleotide
gcccgccgtcaatttatgataatgccctgc

SEQ ID NO: 252192 - DNA, 29 bp, Artificial Sequence
  Synthetic oligonucleotide
acgagtctatataggcttaagaagcctgc

SEQ ID NO: 252193 - DNA, 30 bp, Artificial Sequence
  Synthetic oligonucleotide
gtctagccgataccacttctgtaagcctgc

SEQ ID NO: 252194 - DNA, 30 bp, Artificial Sequence
  Synthetic oligonucleotide
gaccctgataacgccccggaatgagcctgc

SEQ ID NO: 252195 - DNA, 30 bp, Artificial Sequence
  Synthetic oligonucleotide
aagaccccccacataaaaaggcgctcctgc

SEQ ID NO: 252196 - DNA, 30 bp, Artificial Sequence
  Synthetic oligonucleotide
caggggacacgatattaccgccggtcctgc

SEQ ID NO: 252197 - DNA, 30 bp, Artificial Sequence
  Synthetic oligonucleotide
cgaaatagttaaaacatacactgttcctgc

SEQ ID NO: 252198 - DNA, 30 bp, Artificial Sequence
  Synthetic oligonucleotide
cagtggcaactttgagaaggcccaagctgc

SEQ ID NO: 252199 - DNA, 30 bp, Artificial Sequence
  Synthetic oligonucleotide
aacgaaacccctgggaaatggctcagctgc

SEQ ID NO: 252200 - DNA, 30 bp, Artificial Sequence
  Synthetic oligonucleotide
acgcagtgaaaaacatcgcgtcgtagctgc

SEQ ID NO: 252201 - DNA, 30 bp, Artificial Sequence
  Synthetic oligonucleotide
cgtcctatcagggaggaccggtgccgctgc

SEQ ID NO: 252202 - DNA, 30 bp, Artificial Sequence
  Synthetic oligonucleotide
tgtcgattgggtatcttgtgctcgcgctgc

SEQ ID NO: 252203 - DNA, 30 bp, Artificial Sequence
  Synthetic oligonucleotide
gcgggcgtactccacagtcacaggcgctgc

SEQ ID NO: 252204 - DNA, 30 bp, Artificial Sequence
  Synthetic oligonucleotide
taaattccggccacccgctgatatcgctgc

SEQ ID NO: 252205 - DNA, 30 bp, Artificial Sequence
  Synthetic oligonucleotide
gcgtagtggtgtgtaggtctggtaggctgc

SEQ ID NO: 252206 - DNA, 30 bp, Artificial Sequence
  Synthetic oligonucleotide
ggcctaataaggacgcatcacacgggctgc

SEQ ID NO: 252207 - DNA, 30 bp, Artificial Sequence
  Synthetic oligonucleotide
tctaaccgataattgctccttgaatgctgc

SEQ ID NO: 252208 - DNA, 30 bp, Artificial Sequence
  Synthetic oligonucleotide
ggtgccacatcttcaggattcgcttgctgc

SEQ ID NO: 252209 - DNA, 30 bp, Artificial Sequence
  Synthetic oligonucleotide
tgggcgaaatatcctgtggtcctttgctgc

SEQ ID NO: 252210 - DNA, 30 bp, Artificial Sequence
  Synthetic oligonucleotide
agtccccgggtacaacgccgtttaatctgc

SEQ ID NO: 252211 - DNA, 30 bp, Artificial Sequence
  Synthetic oligonucleotide
gcggcaagtgagcaataggagaaactctgc

SEQ ID NO: 252212 - DNA, 30 bp, Artificial Sequence
  Synthetic oligonucleotide
tcctgcacgattgaatgcggttgcctctgc

SEQ ID NO: 252213 - DNA, 30 bp, Artificial Sequence
  Synthetic oligonucleotide
ggtataaaataaccgtacgaagtcctctgc

SEQ ID NO: 252214 - DNA, 30 bp, Artificial Sequence
  Synthetic oligonucleotide
tattactgaccgccgactttatggctctgc

SEQ ID NO: 252215 - DNA, 30 bp, Artificial Sequence
  Synthetic oligonucleotide
gtcgcagtagggggtacgaccatgctctgc

SEQ ID NO: 252216 - DNA, 30 bp, Artificial Sequence
  Synthetic oligonucleotide
agtggatagggtaaatcttatgtgctctgc

SEQ ID NO: 252217 - DNA, 30 bp, Artificial Sequence
  Synthetic oligonucleotide
ccccagcgccctatgggcagtaatctctgc

SEQ ID NO: 252218 - DNA, 30 bp, Artificial Sequence
  Synthetic oligonucleotide
gaccgcgaaagggtcatctagaaagtctgc

SEQ ID NO: 252219 - DNA, 30 bp, Artificial Sequence
  Synthetic oligonucleotide
tattgaggagtccataaggataaagtctgc

SEQ ID NO: 252220 - DNA, 30 bp, Artificial Sequence
  Synthetic oligonucleotide
tgccgtatgcgtacttgtcgacaagtctgc

SEQ ID NO: 252221 - DNA, 30 bp, Artificial Sequence
  Synthetic oligonucleotide
ggacgaagcctcagggtaagacacgtctgc

SEQ ID NO: 252222 - DNA, 30 bp, Artificial Sequence
  Synthetic oligonucleotide
taaggcattggtcgtttgatcttggtctgc

SEQ ID NO: 252223 - DNA, 31 bp, Artificial Sequence
  Synthetic oligonucleotide
aatacaagacgaggctaagtcgcctgtctgc

SEQ ID NO: 252224 - DNA, 30 bp, Artificial Sequence
  Synthetic oligonucleotide
gctgggggagacctgctttcgtacttctgc

SEQ ID NO: 252225 - DNA, 30 bp, Artificial Sequence
  Synthetic oligonucleotide
accaatgattgattgggggcccgaaagtgc

SEQ ID NO: 252226 - DNA, 30 bp, Artificial Sequence
  Synthetic oligonucleotide
agcgtttgagtaatacttgggcgaaagtgc

SEQ ID NO: 252227 - DNA, 30 bp, Artificial Sequence
  Synthetic oligonucleotide
acaacccgtagatctctcgaacgcaagtgc

SEQ ID NO: 252228 - DNA, 30 bp, Artificial Sequence
  Synthetic oligonucleotide
atggtagccgaggttttagccgtcaagtgc

SEQ ID NO: 252229 - DNA, 30 bp, Artificial Sequence
  Synthetic oligonucleotide
aataaggcacggttcgtcgaaacacagtgc

SEQ ID NO: 252230 - DNA, 30 bp, Artificial Sequence
  Synthetic oligonucleotide
tcggtcattccgcttgatcgtacccagtgc

SEQ ID NO: 252231 - DNA, 30 bp, Artificial Sequence
  Synthetic oligonucleotide
ttacttcgttagaaccagggatagcagtgc

SEQ ID NO: 252232 - DNA, 30 bp, Artificial Sequence
  Synthetic oligonucleotide
attggtatgctagaatcgacagggcagtgc

SEQ ID NO: 252233 - DNA, 30 bp, Artificial Sequence
  Synthetic oligonucleotide
tcgagtcaagactgcccgcgtagtcagtgc

SEQ ID NO: 252234 - DNA, 30 bp, Artificial Sequence
  Synthetic oligonucleotide
agtccacgcactaacaaataccacgagtgc

SEQ ID NO: 252235 - DNA, 30 bp, Artificial Sequence
  Synthetic oligonucleotide
gaggcactctcttcacgtcaaacggagtgc

SEQ ID NO: 252236 - DNA, 30 bp, Artificial Sequence
  Synthetic oligonucleotide
aatcgagcaaatttctgcgtgacctagtgc

SEQ ID NO: 252237 - DNA, 30 bp, Artificial Sequence
  Synthetic oligonucleotide
agcgtaaggtttatgcggagcttctagtgc

SEQ ID NO: 252238 - DNA, 30 bp, Artificial Sequence
  Synthetic oligonucleotide
agtaggctcacgtcgcagagtaagtagtgc

SEQ ID NO: 252239 - DNA, 30 bp, Artificial Sequence
  Synthetic oligonucleotide
aagacctaggtgctgggcgttttgtagtgc

SEQ ID NO: 252240 - DNA, 30 bp, Artificial Sequence
  Synthetic oligonucleotide
aggcagaagagccctgaaatgtattagtgc

SEQ ID NO: 252241 - DNA, 30 bp, Artificial Sequence
  Synthetic oligonucleotide
aagacaccgaaaagcgcggtcagcacgtgc

SEQ ID NO: 252242 - DNA, 30 bp, Artificial Sequence
  Synthetic oligonucleotide
atgtcgcgtatcctctaagggtagacgtgc

SEQ ID NO: 252243 - DNA, 30 bp, Artificial Sequence
  Synthetic oligonucleotide
ttggaggggggacatccgatgtatacgtgc

SEQ ID NO: 252244 - DNA, 30 bp, Artificial Sequence
  Synthetic oligonucleotide
aatggccaactccgatttactgttacgtgc

SEQ ID NO: 252245 - DNA, 30 bp, Artificial Sequence
  Synthetic oligonucleotide
ggtgattgttattctcgggaaacaccgtgc

SEQ ID NO: 252246 - DNA, 30 bp, Artificial Sequence
  Synthetic oligonucleotide
catctggcttctctgattcgatcaccgtgc

SEQ ID NO: 252247 - DNA, 30 bp, Artificial Sequence
  Synthetic oligonucleotide
atcactgggtgagtgaggatcgtaccgtgc

SEQ ID NO: 252248 - DNA, 30 bp, Artificial Sequence
  Synthetic oligonucleotide
gatgtatacaggcatctacataagccgtgc

SEQ ID NO: 252249 - DNA, 30 bp, Artificial Sequence
  Synthetic oligonucleotide
cggcgcccgagagcaaatatgactgcgtgc

SEQ ID NO: 252250 - DNA, 30 bp, Artificial Sequence
  Synthetic oligonucleotide
tggaacaaatgtgtacatttggaatcgtgc

SEQ ID NO: 252251 - DNA, 30 bp, Artificial Sequence
  Synthetic oligonucleotide
tggaacataaaggaagtataatgttcgtgc

SEQ ID NO: 252252 - DNA, 30 bp, Artificial Sequence
  Synthetic oligonucleotide
attattaaggaccgctgagcggtttcgtgc

SEQ ID NO: 252253 - DNA, 30 bp, Artificial Sequence
  Synthetic oligonucleotide
cgattggtagcggatctgaccataaggtgc

SEQ ID NO: 252254 - DNA, 30 bp, Artificial Sequence
  Synthetic oligonucleotide
aggcgggtattgagactctagataaggtgc

SEQ ID NO: 252255 - DNA, 30 bp, Artificial Sequence
  Synthetic oligonucleotide
gcagtctcatctgtcgcatttaacaggtgc

SEQ ID NO: 252256 - DNA, 30 bp, Artificial Sequence
  Synthetic oligonucleotide
ggcgctcaacccggttgtttgtagaggtgc

SEQ ID NO: 252257 - DNA, 30 bp, Artificial Sequence
  Synthetic oligonucleotide
aacgacttgacgaagttaatacctaggtgc

SEQ ID NO: 252258 - DNA, 30 bp, Artificial Sequence
  Synthetic oligonucleotide
tggggctggagagtgaggtatgaacggtgc

SEQ ID NO: 252259 - DNA, 30 bp, Artificial Sequence
  Synthetic oligonucleotide
ccctcgtgctactcgattaaggtacggtgc

SEQ ID NO: 252260 - DNA, 30 bp, Artificial Sequence
  Synthetic oligonucleotide
tagctcgccttatatgatcggtcgcggtgc

SEQ ID NO: 252261 - DNA, 30 bp, Artificial Sequence
  Synthetic oligonucleotide
ccgtcaattgaatacaaacactgtcggtgc

SEQ ID NO: 252262 - DNA, 30 bp, Artificial Sequence
  Synthetic oligonucleotide
cctaatgacggaaacgtcctattggggtgc

SEQ ID NO: 252263 - DNA, 30 bp, Artificial Sequence
  Synthetic oligonucleotide
gcgtttgatgaactacgtctgtatgggtgc

SEQ ID NO: 252264 - DNA, 30 bp, Artificial Sequence
  Synthetic oligonucleotide
cggtaatgcgccggaaaagcgggtgggtgc

SEQ ID NO: 252265 - DNA, 30 bp, Artificial Sequence
  Synthetic oligonucleotide
aaggcccccattacaaagcacccatggtgc

SEQ ID NO: 252266 - DNA, 30 bp, Artificial Sequence
  Synthetic oligonucleotide
ctaagtgcgagggtccggcacaagtggtgc

SEQ ID NO: 252267 - DNA, 30 bp, Artificial Sequence
  Synthetic oligonucleotide
gtcccataactgggatgtggcgggtggtgc

SEQ ID NO: 252268 - DNA, 30 bp, Artificial Sequence
  Synthetic oligonucleotide
acaggaagaagggaagtagactcttggtgc

SEQ ID NO: 252269 - DNA, 30 bp, Artificial Sequence
  Synthetic oligonucleotide
cctcagatacgagaaatgaacaccatgtgc

SEQ ID NO: 252270 - DNA, 30 bp, Artificial Sequence
  Synthetic oligonucleotide
cgtatcacaatccgcatgacacgcatgtgc

SEQ ID NO: 252271 - DNA, 30 bp, Artificial Sequence
  Synthetic oligonucleotide
ggtgaatgtgcttgactactaaggatgtgc

SEQ ID NO: 252272 - DNA, 30 bp, Artificial Sequence
  Synthetic oligonucleotide
ggtcgaagcaacgagaccgcgcatatgtgc

SEQ ID NO: 252273 - DNA, 30 bp, Artificial Sequence
  Synthetic oligonucleotide
gacccgtagttaagtgttaaaagtatgtgc

SEQ ID NO: 252274 - DNA, 30 bp, Artificial Sequence
  Synthetic oligonucleotide
tccggaccaaggtcaaatttggcactgtgc

SEQ ID NO: 252275 - DNA, 30 bp, Artificial Sequence
  Synthetic oligonucleotide
gaggttatccactcggattaaacgctgtgc

SEQ ID NO: 252276 - DNA, 30 bp, Artificial Sequence
  Synthetic oligonucleotide
gacagcaaggatgcaaaacggtcgctgtgc

SEQ ID NO: 252277 - DNA, 30 bp, Artificial Sequence
  Synthetic oligonucleotide
gagaaaagcttaagtgaatgcgctctgtgc

SEQ ID NO: 252278 - DNA, 30 bp, Artificial Sequence
  Synthetic oligonucleotide
tccaataatgggtcgtatcgggcggtgtgc

SEQ ID NO: 252279 - DNA, 30 bp, Artificial Sequence
  Synthetic oligonucleotide
gatgtatcgtggaatgctcattcggtgtgc

SEQ ID NO: 252280 - DNA, 30 bp, Artificial Sequence
  Synthetic oligonucleotide
tccagattttgaaccgctcgccgattgtgc

SEQ ID NO: 252281 - DNA, 30 bp, Artificial Sequence
  Synthetic oligonucleotide
ctgccataatatggagtagtatgaaattgc

SEQ ID NO: 252282 - DNA, 30 bp, Artificial Sequence
  Synthetic oligonucleotide
gaggggctcctaatcatgagtaccaattgc

SEQ ID NO: 252283 - DNA, 30 bp, Artificial Sequence
  Synthetic oligonucleotide
caggggctgcacaggcgcccgctcaattgc

SEQ ID NO: 252284 - DNA, 29 bp, Artificial Sequence
  Synthetic oligonucleotide
gattccaagatttgcaggacaggaattgc

SEQ ID NO: 252285 - DNA, 30 bp, Artificial Sequence
  Synthetic oligonucleotide
cattatgtttttttcagtccgggacattgc

SEQ ID NO: 252286 - DNA, 30 bp, Artificial Sequence
  Synthetic oligonucleotide
ttcctcactaatagtaccgcgctccattgc

SEQ ID NO: 252287 - DNA, 30 bp, Artificial Sequence
  Synthetic oligonucleotide
gttcactcgggaatagagcgattccattgc

SEQ ID NO: 252288 - DNA, 30 bp, Artificial Sequence
  Synthetic oligonucleotide
ttctgtcaagatgagtgtttttggcattgc

SEQ ID NO: 252289 - DNA, 30 bp, Artificial Sequence
  Synthetic oligonucleotide
gaggagcttccatgtggtacgatgcattgc

SEQ ID NO: 252290 - DNA, 30 bp, Artificial Sequence
  Synthetic oligonucleotide
ttttcagccacaactatcagcgctcattgc

SEQ ID NO: 252291 - DNA, 30 bp, Artificial Sequence
  Synthetic oligonucleotide
gggttgttgctagagctaaattttcattgc

SEQ ID NO: 252292 - DNA, 30 bp, Artificial Sequence
  Synthetic oligonucleotide
ccatgcggcgctaataaataaagagattgc

SEQ ID NO: 252293 - DNA, 30 bp, Artificial Sequence
  Synthetic oligonucleotide
gtgggcactatacacggagcctgagattgc

SEQ ID NO: 252294 - DNA, 30 bp, Artificial Sequence
  Synthetic oligonucleotide
aattacgtggctatgtccgtgtccgattgc

SEQ ID NO: 252295 - DNA, 30 bp, Artificial Sequence
  Synthetic oligonucleotide
actcttcggctgtagacatgggtcgattgc

SEQ ID NO: 252296 - DNA, 30 bp, Artificial Sequence
  Synthetic oligonucleotide
cgtttttctcaccaagtacagaaggattgc

SEQ ID NO: 252297 - DNA, 30 bp, Artificial Sequence
  Synthetic oligonucleotide
ggactagcttcagaggcaatagtggattgc

SEQ ID NO: 252298 - DNA, 30 bp, Artificial Sequence
  Synthetic oligonucleotide
ggatagtactgaagcgtcgtatatgattgc

SEQ ID NO: 252299 - DNA, 30 bp, Artificial Sequence
  Synthetic oligonucleotide
accactgaagtcgtagacaatagatattgc

SEQ ID NO: 252300 - DNA, 30 bp, Artificial Sequence
  Synthetic oligonucleotide
ttgctccacgcaattctgagaaactattgc

SEQ ID NO: 252301 - DNA, 30 bp, Artificial Sequence
  Synthetic oligonucleotide
gagacatctaaggtgttcgataggtattgc

SEQ ID NO: 252302 - DNA, 30 bp, Artificial Sequence
  Synthetic oligonucleotide
caataaagaaaaggtcggtcgcggtattgc

SEQ ID NO: 252303 - DNA, 30 bp, Artificial Sequence
  Synthetic oligonucleotide
atgcgccatggtgcccgcgtggattattgc

SEQ ID NO: 252304 - DNA, 30 bp, Artificial Sequence
  Synthetic oligonucleotide
agcaggttcaaggattttgctcgttattgc

SEQ ID NO: 252305 - DNA, 30 bp, Artificial Sequence
  Synthetic oligonucleotide
gaagagaagttccggtactctgtttattgc

SEQ ID NO: 252306 - DNA, 30 bp, Artificial Sequence
  Synthetic oligonucleotide
tcatggcaggtgggttcgaacccaacttgc

SEQ ID NO: 252307 - DNA, 30 bp, Artificial Sequence
  Synthetic oligonucleotide
cacgggcccgaatagcaatctctcacttgc

SEQ ID NO: 252308 - DNA, 30 bp, Artificial Sequence
  Synthetic oligonucleotide
aatagacgttgtgaattgccacagacttgc

SEQ ID NO: 252309 - DNA, 30 bp, Artificial Sequence
  Synthetic oligonucleotide
tgcgtggtaacaccatggtggcctacttgc

SEQ ID NO: 252310 - DNA, 30 bp, Artificial Sequence
  Synthetic oligonucleotide
gccacgatgctgcatacactcgtaccttgc

SEQ ID NO: 252311 - DNA, 30 bp, Artificial Sequence
  Synthetic oligonucleotide
tattagctggagagcgagggagaggcttgc

SEQ ID NO: 252312 - DNA, 30 bp, Artificial Sequence
  Synthetic oligonucleotide
cactgagcgtccattgtctacacggcttgc

SEQ ID NO: 252313 - DNA, 30 bp, Artificial Sequence
  Synthetic oligonucleotide
cgattgacgtattactctccgcatgcttgc

SEQ ID NO: 252314 - DNA, 30 bp, Artificial Sequence
  Synthetic oligonucleotide
gcagaaacgtacatagcaggctatgcttgc

SEQ ID NO: 252315 - DNA, 30 bp, Artificial Sequence
  Synthetic oligonucleotide
tacgacacctagagggcctcaactgcttgc

SEQ ID NO: 252316 - DNA, 30 bp, Artificial Sequence
  Synthetic oligonucleotide
tggatggacgagggcgcacctccatcttgc

SEQ ID NO: 252317 - DNA, 30 bp, Artificial Sequence
  Synthetic oligonucleotide
tgccacccggattaggatggagggtcttgc

SEQ ID NO: 252318 - DNA, 30 bp, Artificial Sequence
  Synthetic oligonucleotide
catcacgactgacgtttagtaaattcttgc

SEQ ID NO: 252319 - DNA, 30 bp, Artificial Sequence
  Synthetic oligonucleotide
ttcctcagattaattcgtagtgcttcttgc

SEQ ID NO: 252320 - DNA, 30 bp, Artificial Sequence
  Synthetic oligonucleotide
cgaggctattatgtggtagtaggttcttgc

SEQ ID NO: 252321 - DNA, 30 bp, Artificial Sequence
  Synthetic oligonucleotide
agcttccgagccgcaaacggatcgagttgc

SEQ ID NO: 252322 - DNA, 30 bp, Artificial Sequence
  Synthetic oligonucleotide
ccgactatgaagaaaggccggggtagttgc

SEQ ID NO: 252323 - DNA, 30 bp, Artificial Sequence
  Synthetic oligonucleotide
taaggcggacaatacactttctaacgttgc

SEQ ID NO: 252324 - DNA, 30 bp, Artificial Sequence
  Synthetic oligonucleotide
cggtccgtgagagtgacaattagacgttgc

SEQ ID NO: 252325 - DNA, 30 bp, Artificial Sequence
  Synthetic oligonucleotide
ggctagacgtcacttctaattctacgttgc

SEQ ID NO: 252326 - DNA, 30 bp, Artificial Sequence
  Synthetic oligonucleotide
cgtactttccgttggttgtgccaccgttgc

SEQ ID NO: 252327 - DNA, 30 bp, Artificial Sequence
  Synthetic oligonucleotide
ggttatgacccggaactacttgaccgttgc

SEQ ID NO: 252328 - DNA, 30 bp, Artificial Sequence
  Synthetic oligonucleotide
ttcaagcagccccggcgtagtctgcgttgc

SEQ ID NO: 252329 - DNA, 30 bp, Artificial Sequence
  Synthetic oligonucleotide
tgtgcgcagcaaaaccacttgaatcgttgc

SEQ ID NO: 252330 - DNA, 30 bp, Artificial Sequence
  Synthetic oligonucleotide
catttcaacagttatcccaaaacaggttgc

SEQ ID NO: 252331 - DNA, 30 bp, Artificial Sequence
  Synthetic oligonucleotide
cgataaaagtccgcaagggttataggttgc

SEQ ID NO: 252332 - DNA, 30 bp, Artificial Sequence
  Synthetic oligonucleotide
tggcctgacgatcaaccccctctgggttgc

SEQ ID NO: 252333 - DNA, 30 bp, Artificial Sequence
  Synthetic oligonucleotide
agcataatccatacaggggacacttgttgc

SEQ ID NO: 252334 - DNA, 30 bp, Artificial Sequence
  Synthetic oligonucleotide
tagctatatttttcggaagggtgcatttgc

SEQ ID NO: 252335 - DNA, 30 bp, Artificial Sequence
  Synthetic oligonucleotide
tcttgagcatactttgacgtcgcgatttgc

SEQ ID NO: 252336 - DNA, 30 bp, Artificial Sequence
  Synthetic oligonucleotide
tggtcccgttgttggcgtggtgtgatttgc

SEQ ID NO: 252337 - DNA, 30 bp, Artificial Sequence
  Synthetic oligonucleotide
aacgattgagccatcaaagagttgatttgc

SEQ ID NO: 252338 - DNA, 31 bp, Artificial Sequence
  Synthetic oligonucleotide
tttcggtacgtcaacggtgcgatgtatttgc

SEQ ID NO: 252339 - DNA, 30 bp, Artificial Sequence
  Synthetic oligonucleotide
acgtctaaggatccgcgacgaagcctttgc

SEQ ID NO: 252340 - DNA, 30 bp, Artificial Sequence
  Synthetic oligonucleotide
ccgtattgtactgagagatcatcgctttgc

SEQ ID NO: 252341 - DNA, 30 bp, Artificial Sequence
  Synthetic oligonucleotide
gaggcatgtcctcgataggacaggctttgc

SEQ ID NO: 252342 - DNA, 30 bp, Artificial Sequence
  Synthetic oligonucleotide
aagctgtaaatgttaagtcctcggctttgc

SEQ ID NO: 252343 - DNA, 30 bp, Artificial Sequence
  Synthetic oligonucleotide
aaatgattatagtaaggtacgatgctttgc

SEQ ID NO: 252344 - DNA, 30 bp, Artificial Sequence
  Synthetic oligonucleotide
atctgctgaatcgacaacacagaagtttgc

SEQ ID NO: 252345 - DNA, 30 bp, Artificial Sequence
  Synthetic oligonucleotide
aagtgcaacatttgcccttcattggtttgc

SEQ ID NO: 252346 - DNA, 30 bp, Artificial Sequence
  Synthetic oligonucleotide
ggttgctccaacatagtactatcattttgc

SEQ ID NO: 252347 - DNA, 30 bp, Artificial Sequence
  Synthetic oligonucleotide
acacataagacggctcgtggtaccttttgc

SEQ ID NO: 252348 - DNA, 30 bp, Artificial Sequence
  Synthetic oligonucleotide
aacacaaggcatagtacgttgactttttgc

SEQ ID NO: 252349 - DNA, 30 bp, Artificial Sequence
  Synthetic oligonucleotide
ccagagcgccgttgttcgtcaagaaaaatc

SEQ ID NO: 252350 - DNA, 30 bp, Artificial Sequence
  Synthetic oligonucleotide
ggagcgtgagtataccgtcagggaaaaatc

SEQ ID NO: 252351 - DNA, 30 bp, Artificial Sequence
  Synthetic oligonucleotide
actttccgccacatctctctgttaaaaatc

SEQ ID NO: 252352 - DNA, 30 bp, Artificial Sequence
  Synthetic oligonucleotide
ttgggaaaaccctgctaattatacaaaatc

SEQ ID NO: 252353 - DNA, 30 bp, Artificial Sequence
  Synthetic oligonucleotide
cgttttgaatggaaccatgccaccaaaatc

SEQ ID NO: 252354 - DNA, 30 bp, Artificial Sequence
  Synthetic oligonucleotide
atgattcggccccacggaaagggcaaaatc

SEQ ID NO: 252355 - DNA, 30 bp, Artificial Sequence
  Synthetic oligonucleotide
gggaccggatcatgccgtttccggaaaatc

SEQ ID NO: 252356 - DNA, 30 bp, Artificial Sequence
  Synthetic oligonucleotide
tccgaaaaattactaatggccatgaaaatc

SEQ ID NO: 252357 - DNA, 30 bp, Artificial Sequence
  Synthetic oligonucleotide
ctaagttgcatttacacgaagcctaaaatc

SEQ ID NO: 252358 - DNA, 30 bp, Artificial Sequence
  Synthetic oligonucleotide
cgtatcaaggaaccccatattccacaaatc

SEQ ID NO: 252359 - DNA, 30 bp, Artificial Sequence
  Synthetic oligonucleotide
accggatcggtgaccttaagtacgcaaatc

SEQ ID NO: 252360 - DNA, 30 bp, Artificial Sequence
  Synthetic oligonucleotide
tgacggaatctgtaagggttcgaagaaatc

SEQ ID NO: 252361 - DNA, 30 bp, Artificial Sequence
  Synthetic oligonucleotide
tagaggatacacacgccataaccagaaatc

SEQ ID NO: 252362 - DNA, 30 bp, Artificial Sequence
  Synthetic oligonucleotide
ggggaagagtctggtagcacgattgaaatc

SEQ ID NO: 252363 - DNA, 30 bp, Artificial Sequence
  Synthetic oligonucleotide
caatcaaggatatggaggcatcaataaatc

SEQ ID NO: 252364 - DNA, 30 bp, Artificial Sequence
  Synthetic oligonucleotide
atacattttccagtaggccgtcaataaatc

SEQ ID NO: 252365 - DNA, 30 bp, Artificial Sequence
  Synthetic oligonucleotide
ctaagcacggattctttgcagtcgtaaatc

SEQ ID NO: 252366 - DNA, 30 bp, Artificial Sequence
  Synthetic oligonucleotide
aaacgtcctagcgaccgtgaaacttaaatc

SEQ ID NO: 252367 - DNA, 30 bp, Artificial Sequence
  Synthetic oligonucleotide
caatctattagtttcatgtgtcacacaatc

SEQ ID NO: 252368 - DNA, 30 bp, Artificial Sequence
  Synthetic oligonucleotide
aaatttgcggggtgtggtaagggcacaatc

SEQ ID NO: 252369 - DNA, 30 bp, Artificial Sequence
  Synthetic oligonucleotide
aggattctgtcggaaaacattacgacaatc

SEQ ID NO: 252370 - DNA, 30 bp, Artificial Sequence
  Synthetic oligonucleotide
cgattgcaaatttctgtctgcccgacaatc

SEQ ID NO: 252371 - DNA, 30 bp, Artificial Sequence
  Synthetic oligonucleotide
ctcaccgattctgtgacaaacaatacaatc

SEQ ID NO: 252372 - DNA, 30 bp, Artificial Sequence
  Synthetic oligonucleotide
ccgtgagcgtccctgaataagcacccaatc

SEQ ID NO: 252373 - DNA, 30 bp, Artificial Sequence
  Synthetic oligonucleotide
aaacatcgcgactagaacattggcccaatc

SEQ ID NO: 252374 - DNA, 30 bp, Artificial Sequence
  Synthetic oligonucleotide
gaggctcgaaagtaatgcgtattcccaatc

SEQ ID NO: 252375 - DNA, 30 bp, Artificial Sequence
  Synthetic oligonucleotide
acattacgatttgatcacggagctccaatc

SEQ ID NO: 252376 - DNA, 30 bp, Artificial Sequence
  Synthetic oligonucleotide
cgaagattcattttgccttgctgtccaatc

SEQ ID NO: 252377 - DNA, 30 bp, Artificial Sequence
  Synthetic oligonucleotide
gtacaaatcgatacagttaacattccaatc

SEQ ID NO: 252378 - DNA, 30 bp, Artificial Sequence
  Synthetic oligonucleotide
gaatacgttaaccacctgcggccagcaatc

SEQ ID NO: 252379 - DNA, 30 bp, Artificial Sequence
  Synthetic oligonucleotide
cacagaagaggggctctagggaccgcaatc

SEQ ID NO: 252380 - DNA, 30 bp, Artificial Sequence
  Synthetic oligonucleotide
cctctttccgataggaaaaaggccgcaatc

SEQ ID NO: 252381 - DNA, 30 bp, Artificial Sequence
  Synthetic oligonucleotide
acaattctacagaagcacgttatggcaatc

SEQ ID NO: 252382 - DNA, 30 bp, Artificial Sequence
  Synthetic oligonucleotide
gaccgaacagcccttgagtggcttgcaatc

SEQ ID NO: 252383 - DNA, 30 bp, Artificial Sequence
  Synthetic oligonucleotide
gggagtaaaactaaaacgggatttgcaatc

SEQ ID NO: 252384 - DNA, 30 bp, Artificial Sequence
  Synthetic oligonucleotide
atcttgagactgaaggtagagaactcaatc

SEQ ID NO: 252385 - DNA, 30 bp, Artificial Sequence
  Synthetic oligonucleotide
ctactacactgcgtcacgagacattcaatc

SEQ ID NO: 252386 - DNA, 30 bp, Artificial Sequence
  Synthetic oligonucleotide
gaacgggagcacgtttggtgtcacagaatc

SEQ ID NO: 252387 - DNA, 30 bp, Artificial Sequence
  Synthetic oligonucleotide
cagacctggtggcaatagttcgccagaatc

SEQ ID NO: 252388 - DNA, 30 bp, Artificial Sequence
  Synthetic oligonucleotide
agtcacatggcggcgcgggtgatcagaatc

SEQ ID NO: 252389 - DNA, 30 bp, Artificial Sequence
  Synthetic oligonucleotide
ttagtgaaaaaacgtctcatcgtgagaatc

SEQ ID NO: 252390 - DNA, 30 bp, Artificial Sequence
  Synthetic oligonucleotide
agcacaggtacagttcgacagtaacgaatc

SEQ ID NO: 252391 - DNA, 30 bp, Artificial Sequence
  Synthetic oligonucleotide
agctcggatcggtctagctgatgccgaatc

SEQ ID NO: 252392 - DNA, 30 bp, Artificial Sequence
  Synthetic oligonucleotide
gctaaccacgcgtacagttggctgcgaatc

SEQ ID NO: 252393 - DNA, 30 bp, Artificial Sequence
  Synthetic oligonucleotide
gggttgttactccatttaggccgtcgaatc

SEQ ID NO: 252394 - DNA, 30 bp, Artificial Sequence
  Synthetic oligonucleotide
agtgctgtatacagaagtggtattcgaatc

SEQ ID NO: 252395 - DNA, 31 bp, Artificial Sequence
  Synthetic oligonucleotide
gttaattactcacagcttggcttaaggaatc

SEQ ID NO: 252396 - DNA, 30 bp, Artificial Sequence
  Synthetic oligonucleotide
cgacgttgggtccagattggctccggaatc

SEQ ID NO: 252397 - DNA, 30 bp, Artificial Sequence
  Synthetic oligonucleotide
gtcgcagttcgagctccactttccggaatc

SEQ ID NO: 252398 - DNA, 30 bp, Artificial Sequence
  Synthetic oligonucleotide
cgctgacgatatagcaagggaatcggaatc

SEQ ID NO: 252399 - DNA, 30 bp, Artificial Sequence
  Synthetic oligonucleotide
acgatggcatactgcgcattggagggaatc

SEQ ID NO: 252400 - DNA, 30 bp, Artificial Sequence
  Synthetic oligonucleotide
ttgtcagtctacttgcaagttcggggaatc

SEQ ID NO: 252401 - DNA, 30 bp, Artificial Sequence
  Synthetic oligonucleotide
aggctaatttatgatcaggaacaatgaatc

SEQ ID NO: 252402 - DNA, 30 bp, Artificial Sequence
  Synthetic oligonucleotide
tcgatcctgttttttggaggattatgaatc

SEQ ID NO: 252403 - DNA, 30 bp, Artificial Sequence
  Synthetic oligonucleotide
tcgcgtctagctgctgaaaccccctgaatc

SEQ ID NO: 252404 - DNA, 30 bp, Artificial Sequence
  Synthetic oligonucleotide
attctaccccagatggaaagtcagtgaatc

SEQ ID NO: 252405 - DNA, 30 bp, Artificial Sequence
  Synthetic oligonucleotide
gatgaggtacacccctaggggtagtgaatc

SEQ ID NO: 252406 - DNA, 30 bp, Artificial Sequence
  Synthetic oligonucleotide
acgcttcataattgttgtttcccttgaatc

SEQ ID NO: 252407 - DNA, 30 bp, Artificial Sequence
  Synthetic oligonucleotide
taccgcttagtgtggcgccgtcaaataatc

SEQ ID NO: 252408 - DNA, 30 bp, Artificial Sequence
  Synthetic oligonucleotide
gtgtcgtgatacgtcctactcacaataatc

SEQ ID NO: 252409 - DNA, 30 bp, Artificial Sequence
  Synthetic oligonucleotide
aatcattgcgggcggtgtaagttaataatc

SEQ ID NO: 252410 - DNA, 30 bp, Artificial Sequence
  Synthetic oligonucleotide
ccagtgttcgctaacaagcgccgcataatc

SEQ ID NO: 252411 - DNA, 30 bp, Artificial Sequence
  Synthetic oligonucleotide
tgcaacacagcggttgaaaaactcataatc

SEQ ID NO: 252412 - DNA, 30 bp, Artificial Sequence
  Synthetic oligonucleotide
gctctagagatcccgtatctggtcataatc

SEQ ID NO: 252413 - DNA, 30 bp, Artificial Sequence
  Synthetic oligonucleotide
taagtaacgggatcatgttagaagataatc

SEQ ID NO: 252414 - DNA, 30 bp, Artificial Sequence
  Synthetic oligonucleotide
cgattggtacctgtaccatcggccctaatc

SEQ ID NO: 252415 - DNA, 30 bp, Artificial Sequence
  Synthetic oligonucleotide
caaacaccgttcgtccagaaacgcctaatc

SEQ ID NO: 252416 - DNA, 30 bp, Artificial Sequence
  Synthetic oligonucleotide
atccttcattggggagcgagaatcctaatc

SEQ ID NO: 252417 - DNA, 30 bp, Artificial Sequence
  Synthetic oligonucleotide
ccgtcattacgatataaggccctgctaatc

SEQ ID NO: 252418 - DNA, 30 bp, Artificial Sequence
  Synthetic oligonucleotide
agtcatccagtaggaaccagacctctaatc

SEQ ID NO: 252419 - DNA, 30 bp, Artificial Sequence
  Synthetic oligonucleotide
gggcatatagatggtactgcaggcgtaatc

SEQ ID NO: 252420 - DNA, 30 bp, Artificial Sequence
  Synthetic oligonucleotide
ctcactagacgctggaaagaggcattaatc

SEQ ID NO: 252421 - DNA, 30 bp, Artificial Sequence
  Synthetic oligonucleotide
tcgtggagacgtggaagtaaagtattaatc

SEQ ID NO: 252422 - DNA, 30 bp, Artificial Sequence
  Synthetic oligonucleotide
gtacgtagtgctggattgcagaacttaatc

SEQ ID NO: 252423 - DNA, 30 bp, Artificial Sequence
  Synthetic oligonucleotide
gcgcttgatcacgagtccgacaggttaatc

SEQ ID NO: 252424 - DNA, 30 bp, Artificial Sequence
  Synthetic oligonucleotide
attataacaaacttggataatgggttaatc

SEQ ID NO: 252425 - DNA, 30 bp, Artificial Sequence
  Synthetic oligonucleotide
aaacaagcctggcattaatttgaaaacatc

SEQ ID NO: 252426 - DNA, 30 bp, Artificial Sequence
  Synthetic oligonucleotide
aacgggccagccctttcacacagcaacatc

SEQ ID NO: 252427 - DNA, 30 bp, Artificial Sequence
  Synthetic oligonucleotide
ttagacaggagtggttcagagatgaacatc

SEQ ID NO: 252428 - DNA, 30 bp, Artificial Sequence
  Synthetic oligonucleotide
gggccgtgggtatgtgttgcgttgaacatc

SEQ ID NO: 252429 - DNA, 30 bp, Artificial Sequence
  Synthetic oligonucleotide
tatgtacatgggcagctttaacgtaacatc

SEQ ID NO: 252430 - DNA, 30 bp, Artificial Sequence
  Synthetic oligonucleotide
tcgtgaggcaattagatttgacaacacatc

SEQ ID NO: 252431 - DNA, 30 bp, Artificial Sequence
  Synthetic oligonucleotide
tctaatgacgcaacttctttgggacacatc

SEQ ID NO: 252432 - DNA, 30 bp, Artificial Sequence
  Synthetic oligonucleotide
gcgacgccactattagccgtaggccacatc

SEQ ID NO: 252433 - DNA, 30 bp, Artificial Sequence
  Synthetic oligonucleotide
atcggtaaaactgataggaagttagacatc

SEQ ID NO: 252434 - DNA, 30 bp, Artificial Sequence
  Synthetic oligonucleotide
cggagtttttataaatctagccccgacatc

SEQ ID NO: 252435 - DNA, 30 bp, Artificial Sequence
  Synthetic oligonucleotide
ggattcggtgtaaatcggtatgtcgacatc

SEQ ID NO: 252436 - DNA, 30 bp, Artificial Sequence
  Synthetic oligonucleotide
caaatatggtatatgcggctcagggacatc

SEQ ID NO: 252437 - DNA, 30 bp, Artificial Sequence
  Synthetic oligonucleotide
gttggaggccggatgaacgagttggacatc

SEQ ID NO: 252438 - DNA, 30 bp, Artificial Sequence
  Synthetic oligonucleotide
ccgaaggcggtaaggggctgtcctgacatc

SEQ ID NO: 252439 - DNA, 30 bp, Artificial Sequence
  Synthetic oligonucleotide
cccaagcgaccagttggttccaagtacatc

SEQ ID NO: 252440 - DNA, 30 bp, Artificial Sequence
  Synthetic oligonucleotide
ttcagggagattacaccggcttcgtacatc

SEQ ID NO: 252441 - DNA, 30 bp, Artificial Sequence
  Synthetic oligonucleotide
cagggaactgggagtaagatgggtaccatc

SEQ ID NO: 252442 - DNA, 30 bp, Artificial Sequence
  Synthetic oligonucleotide
tgcgggcatctttctggttatgcccccatc

SEQ ID NO: 252443 - DNA, 30 bp, Artificial Sequence
  Synthetic oligonucleotide
tcatacttaacagtgggagctagtcccatc

SEQ ID NO: 252444 - DNA, 30 bp, Artificial Sequence
  Synthetic oligonucleotide
attaagtggctctcttcgaatattcccatc

SEQ ID NO: 252445 - DNA, 30 bp, Artificial Sequence
  Synthetic oligonucleotide
agtgtcgaaagaagaaggttcgaggccatc

SEQ ID NO: 252446 - DNA, 30 bp, Artificial Sequence
  Synthetic oligonucleotide
tgctagatcgggtgtccgaaacgggccatc

SEQ ID NO: 252447 - DNA, 30 bp, Artificial Sequence
  Synthetic oligonucleotide
gagaattcgatcgaagggacgggggccatc

SEQ ID NO: 252448 - DNA, 30 bp, Artificial Sequence
  Synthetic oligonucleotide
tacggaactagaagctttaaaggtgccatc

SEQ ID NO: 252449 - DNA, 30 bp, Artificial Sequence
  Synthetic oligonucleotide
atcatccatgaccaggcataacttgccatc

SEQ ID NO: 252450 - DNA, 30 bp, Artificial Sequence
  Synthetic oligonucleotide
gggggaagggattaaactatctcatccatc

SEQ ID NO: 252451 - DNA, 30 bp, Artificial Sequence
  Synthetic oligonucleotide
cgataacgacggcggaccgagaactccatc

SEQ ID NO: 252452 - DNA, 30 bp, Artificial Sequence
  Synthetic oligonucleotide
ccgttggactgcggtcggtatgagtccatc

SEQ ID NO: 252453 - DNA, 30 bp, Artificial Sequence
  Synthetic oligonucleotide
aggcacccgcttgatagcgtatagtccatc

SEQ ID NO: 252454 - DNA, 30 bp, Artificial Sequence
  Synthetic oligonucleotide
aaggaagatcggtattccatctagtccatc

SEQ ID NO: 252455 - DNA, 30 bp, Artificial Sequence
  Synthetic oligonucleotide
gagactcctggccaactatttacgtccatc

SEQ ID NO: 252456 - DNA, 30 bp, Artificial Sequence
  Synthetic oligonucleotide
agccatctggatagcgagtgatggtccatc

SEQ ID NO: 252457 - DNA, 30 bp, Artificial Sequence
  Synthetic oligonucleotide
gactgctccattccttaagtgctttccatc

SEQ ID NO: 252458 - DNA, 30 bp, Artificial Sequence
  Synthetic oligonucleotide
gaaacgcgccccgcgtcaataacaagcatc

SEQ ID NO: 252459 - DNA, 30 bp, Artificial Sequence
  Synthetic oligonucleotide
cgtacaggctcaacaggccgcgcaagcatc

SEQ ID NO: 252460 - DNA, 30 bp, Artificial Sequence
  Synthetic oligonucleotide
cagcgtcaaggtgggtagattagcagcatc

SEQ ID NO: 252461 - DNA, 30 bp, Artificial Sequence
  Synthetic oligonucleotide
tgagtgcctacgtcttaagctcgcagcatc

SEQ ID NO: 252462 - DNA, 30 bp, Artificial Sequence
  Synthetic oligonucleotide
tggcttgcccagaattagggaatgagcatc

SEQ ID NO: 252463 - DNA, 30 bp, Artificial Sequence
  Synthetic oligonucleotide
atcatatgagaagggtcgactttgagcatc

SEQ ID NO: 252464 - DNA, 30 bp, Artificial Sequence
  Synthetic oligonucleotide
acgttctgggcgaatatttccaaccgcatc

SEQ ID NO: 252465 - DNA, 30 bp, Artificial Sequence
  Synthetic oligonucleotide
attaattgcattgcactaaagttgcgcatc

SEQ ID NO: 252466 - DNA, 30 bp, Artificial Sequence
  Synthetic oligonucleotide
ggctcgaccccacgtcttgtgttgcgcatc

SEQ ID NO: 252467 - DNA, 30 bp, Artificial Sequence
  Synthetic oligonucleotide
gacaatagtggtaattgtatgtcaggcatc

SEQ ID NO: 252468 - DNA, 30 bp, Artificial Sequence
  Synthetic oligonucleotide
agaagccaaatagcttctttatgaggcatc

SEQ ID NO: 252469 - DNA, 30 bp, Artificial Sequence
  Synthetic oligonucleotide
acgtataggtagcacgaatccgacggcatc

SEQ ID NO: 252470 - DNA, 30 bp, Artificial Sequence
  Synthetic oligonucleotide
tgaatatcataaacagacaccaccggcatc

SEQ ID NO: 252471 - DNA, 31 bp, Artificial Sequence
  Synthetic oligonucleotide
cccgtcatcgccaacatccgtgcggggcatc

SEQ ID NO: 252472 - DNA, 30 bp, Artificial Sequence
  Synthetic oligonucleotide
gcacttgaaaaggccagacacaatggcatc

SEQ ID NO: 252473 - DNA, 30 bp, Artificial Sequence
  Synthetic oligonucleotide
gtgaaatattgtacgttaacaagtggcatc

SEQ ID NO: 252474 - DNA, 30 bp, Artificial Sequence
  Synthetic oligonucleotide
gtggcgaggtgacggtaaaaccttggcatc

SEQ ID NO: 252475 - DNA, 30 bp, Artificial Sequence
  Synthetic oligonucleotide
tccggcaccactgcgtatgtaacctgcatc

SEQ ID NO: 252476 - DNA, 30 bp, Artificial Sequence
  Synthetic oligonucleotide
ggctaccctccatcttttaacttttgcatc

SEQ ID NO: 252477 - DNA, 30 bp, Artificial Sequence
  Synthetic oligonucleotide
gttcagacagggagatcccaagaaatcatc

SEQ ID NO: 252478 - DNA, 30 bp, Artificial Sequence
  Synthetic oligonucleotide
tatcgaaaggcgggttcgcaattcatcatc

SEQ ID NO: 252479 - DNA, 30 bp, Artificial Sequence
  Synthetic oligonucleotide
ccgcatagtacggatgtcggtttcatcatc

SEQ ID NO: 252480 - DNA, 30 bp, Artificial Sequence
  Synthetic oligonucleotide
ttatctgaataggccgagggcaatatcatc

SEQ ID NO: 252481 - DNA, 30 bp, Artificial Sequence
  Synthetic oligonucleotide
tgcgttgtgatcggggcgctatatatcatc

SEQ ID NO: 252482 - DNA, 30 bp, Artificial Sequence
  Synthetic oligonucleotide
cgatgaccgcacgattaagccagtatcatc

SEQ ID NO: 252483 - DNA, 30 bp, Artificial Sequence
  Synthetic oligonucleotide
gcgtgcgactatgtcgccgatctcctcatc

SEQ ID NO: 252484 - DNA, 30 bp, Artificial Sequence
  Synthetic oligonucleotide
aggttcgatgactggatcagcttcctcatc

SEQ ID NO: 252485 - DNA, 29 bp, Artificial Sequence
  Synthetic oligonucleotide
ccaaagcatccgagaggtcggcgctcatc

SEQ ID NO: 252486 - DNA, 30 bp, Artificial Sequence
  Synthetic oligonucleotide
tcggttcctagtctcatcctactgctcatc

SEQ ID NO: 252487 - DNA, 29 bp, Artificial Sequence
  Synthetic oligonucleotide
gtgcgtttccctcgcgcaatcaggtcatc

SEQ ID NO: 252488 - DNA, 30 bp, Artificial Sequence
  Synthetic oligonucleotide
ggggttatctgcatgtgtttgtcggtcatc

SEQ ID NO: 252489 - DNA, 30 bp, Artificial Sequence
  Synthetic oligonucleotide
gagagcggtttttctattcatggggtcatc

SEQ ID NO: 252490 - DNA, 30 bp, Artificial Sequence
  Synthetic oligonucleotide
caacggacggagtcctcgtggcctgtcatc

SEQ ID NO: 252491 - DNA, 30 bp, Artificial Sequence
  Synthetic oligonucleotide
caaacacaataatcgttcattattgtcatc

SEQ ID NO: 252492 - DNA, 30 bp, Artificial Sequence
  Synthetic oligonucleotide
ccatgataggaaatgatgagtcagttcatc

SEQ ID NO: 252493 - DNA, 30 bp, Artificial Sequence
  Synthetic oligonucleotide
agtacaagcgcggtacttacgtggttcatc

SEQ ID NO: 252494 - DNA, 30 bp, Artificial Sequence
  Synthetic oligonucleotide
ggtgcacttaaacgatcccttgtgttcatc

SEQ ID NO: 252495 - DNA, 30 bp, Artificial Sequence
  Synthetic oligonucleotide
ccgattttaaatcaagtttgaatcaagatc

SEQ ID NO: 252496 - DNA, 30 bp, Artificial Sequence
  Synthetic oligonucleotide
tgttagtaacagattgtcccctggaagatc

SEQ ID NO: 252497 - DNA, 30 bp, Artificial Sequence
  Synthetic oligonucleotide
gtgctctggatcgcctgtagcgtgaagatc

SEQ ID NO: 252498 - DNA, 30 bp, Artificial Sequence
  Synthetic oligonucleotide
acacgcgtggggggtcttgatattaagatc

SEQ ID NO: 252499 - DNA, 30 bp, Artificial Sequence
  Synthetic oligonucleotide
tcgaggcctcgctattcggcgatacagatc

SEQ ID NO: 252500 - DNA, 30 bp, Artificial Sequence
  Synthetic oligonucleotide
agtgccacaaaggctttcgctgtacagatc

SEQ ID NO: 252501 - DNA, 30 bp, Artificial Sequence
  Synthetic oligonucleotide
cttgtggtcacaagacaacactaagagatc

SEQ ID NO: 252502 - DNA, 30 bp, Artificial Sequence
  Synthetic oligonucleotide
agaatctgaagaggtagaacgacagagatc

SEQ ID NO: 252503 - DNA, 30 bp, Artificial Sequence
  Synthetic oligonucleotide
atgattgggcgagagcatgtgtgagagatc

SEQ ID NO: 252504 - DNA, 30 bp, Artificial Sequence
  Synthetic oligonucleotide
ttagtataaatttattagggattagagatc

SEQ ID NO: 252505 - DNA, 30 bp, Artificial Sequence
  Synthetic oligonucleotide
tgcgagtcatatatttaacacttagagatc

SEQ ID NO: 252506 - DNA, 30 bp, Artificial Sequence
  Synthetic oligonucleotide
aacgtatcgatcgcagagtttactgagatc

SEQ ID NO: 252507 - DNA, 30 bp, Artificial Sequence
  Synthetic oligonucleotide
gtttatgcggatgtgactaatcttgagatc

SEQ ID NO: 252508 - DNA, 31 bp, Artificial Sequence
  Synthetic oligonucleotide
ataaagggcttgtagttgtgcgtttgagatc

SEQ ID NO: 252509 - DNA, 30 bp, Artificial Sequence
  Synthetic oligonucleotide
aaccccaattctccttttgcgaactagatc

SEQ ID NO: 252510 - DNA, 30 bp, Artificial Sequence
  Synthetic oligonucleotide
ggcacatacggtcactgaatatcttagatc

SEQ ID NO: 252511 - DNA, 30 bp, Artificial Sequence
  Synthetic oligonucleotide
actggctagccgtgattatagatttagatc

SEQ ID NO: 252512 - DNA, 30 bp, Artificial Sequence
  Synthetic oligonucleotide
ggtggttctagagggattacggccacgatc

SEQ ID NO: 252513 - DNA, 30 bp, Artificial Sequence
  Synthetic oligonucleotide
caatacgcttaaggccataacatgacgatc

SEQ ID NO: 252514 - DNA, 30 bp, Artificial Sequence
  Synthetic oligonucleotide
tagtacgacaaacagttccgattgacgatc

SEQ ID NO: 252515 - DNA, 30 bp, Artificial Sequence
  Synthetic oligonucleotide
gcctagatggttcgcgtccaatatacgatc

SEQ ID NO: 252516 - DNA, 30 bp, Artificial Sequence
  Synthetic oligonucleotide
accaagtgcccatgctctaaagccccgatc

SEQ ID NO: 252517 - DNA, 30 bp, Artificial Sequence
  Synthetic oligonucleotide
tatcgctccggcatgatgagttagccgatc

SEQ ID NO: 252518 - DNA, 30 bp, Artificial Sequence
  Synthetic oligonucleotide
gtaaagaccaacaaacattgggggccgatc

SEQ ID NO: 252519 - DNA, 31 bp, Artificial Sequence
  Synthetic oligonucleotide
tcgtcttcaagggcaacggatggggccgatc

SEQ ID NO: 252520 - DNA, 30 bp, Artificial Sequence
  Synthetic oligonucleotide
ggctacatttgtcggtagagttatccgatc

SEQ ID NO: 252521 - DNA, 30 bp, Artificial Sequence
  Synthetic oligonucleotide
taagaatatgccgagttcccgggagcgatc

SEQ ID NO: 252522 - DNA, 30 bp, Artificial Sequence
  Synthetic oligonucleotide
gcagctaaagagagccacgacaacgcgatc

SEQ ID NO: 252523 - DNA, 30 bp, Artificial Sequence
  Synthetic oligonucleotide
atgcctggctggcgaagaatggtggcgatc

SEQ ID NO: 252524 - DNA, 30 bp, Artificial Sequence
  Synthetic oligonucleotide
tatgacatgtacgactacgggtatgcgatc

SEQ ID NO: 252525 - DNA, 30 bp, Artificial Sequence
  Synthetic oligonucleotide
gggtcgttcattccgtggttctgtgcgatc

SEQ ID NO: 252526 - DNA, 30 bp, Artificial Sequence
  Synthetic oligonucleotide
gcgctaaagggggctgacgatcttgcgatc

SEQ ID NO: 252527 - DNA, 30 bp, Artificial Sequence
  Synthetic oligonucleotide
attacggcgggtggtgtcgaccattcgatc

SEQ ID NO: 252528 - DNA, 30 bp, Artificial Sequence
  Synthetic oligonucleotide
gtctatgggcgttattaatcaggaaggatc

SEQ ID NO: 252529 - DNA, 30 bp, Artificial Sequence
  Synthetic oligonucleotide
tagacattgaattaccatatcggtaggatc

SEQ ID NO: 252530 - DNA, 30 bp, Artificial Sequence
  Synthetic oligonucleotide
gacgtatcctgagaaaaaaagttacggatc

SEQ ID NO: 252531 - DNA, 30 bp, Artificial Sequence
  Synthetic oligonucleotide
gcagacgcattgccatacacgcatcggatc

SEQ ID NO: 252532 - DNA, 30 bp, Artificial Sequence
  Synthetic oligonucleotide
aggcttcgtgaggccattcgagctcggatc

SEQ ID NO: 252533 - DNA, 30 bp, Artificial Sequence
  Synthetic oligonucleotide
ggtctttaatttatgaaacttaccgggatc

SEQ ID NO: 252534 - DNA, 30 bp, Artificial Sequence
  Synthetic oligonucleotide
gtaaattgcggaaaattgtttcaggggatc

SEQ ID NO: 252535 - DNA, 30 bp, Artificial Sequence
  Synthetic oligonucleotide
gaggcaaagccgggaccttactcggggatc

SEQ ID NO: 252536 - DNA, 30 bp, Artificial Sequence
  Synthetic oligonucleotide
ggacaaaaggaggaactggagatggggatc

SEQ ID NO: 252537 - DNA, 30 bp, Artificial Sequence
  Synthetic oligonucleotide
acagaattagtaggaagcttcctggggatc

SEQ ID NO: 252538 - DNA, 30 bp, Artificial Sequence
  Synthetic oligonucleotide
ttcggaatcggaggttatactcatgggatc

SEQ ID NO: 252539 - DNA, 30 bp, Artificial Sequence
  Synthetic oligonucleotide
tcacctaacacccgatgttaacctgggatc

SEQ ID NO: 252540 - DNA, 30 bp, Artificial Sequence
  Synthetic oligonucleotide
atgggattggtgcactgtgtttttgggatc

SEQ ID NO: 252541 - DNA, 30 bp, Artificial Sequence
  Synthetic oligonucleotide
agaacacgctcacttatataggcgtggatc

SEQ ID NO: 252542 - DNA, 30 bp, Artificial Sequence
  Synthetic oligonucleotide
cgattgagacggccacgtcacccttggatc

SEQ ID NO: 252543 - DNA, 30 bp, Artificial Sequence
  Synthetic oligonucleotide
gtgaactggtgagtatcccgaatttggatc

SEQ ID NO: 252544 - DNA, 30 bp, Artificial Sequence
  Synthetic oligonucleotide
tactctcactctccccgtccttaaatgatc

SEQ ID NO: 252545 - DNA, 30 bp, Artificial Sequence
  Synthetic oligonucleotide
gattgagataaaatatcaccaagaatgatc

SEQ ID NO: 252546 - DNA, 30 bp, Artificial Sequence
  Synthetic oligonucleotide
ctagagattcatgttcaagataagatgatc

SEQ ID NO: 252547 - DNA, 30 bp, Artificial Sequence
  Synthetic oligonucleotide
gtgtcccttttgaaacgagccggactgatc

SEQ ID NO: 252548 - DNA, 30 bp, Artificial Sequence
  Synthetic oligonucleotide
acaacggtaacgcatcacgctcacctgatc

SEQ ID NO: 252549 - DNA, 30 bp, Artificial Sequence
  Synthetic oligonucleotide
ctgtcagtgactgcgctagtgcccctgatc

SEQ ID NO: 252550 - DNA, 30 bp, Artificial Sequence
  Synthetic oligonucleotide
acacaactagttatttaggctaagctgatc

SEQ ID NO: 252551 - DNA, 30 bp, Artificial Sequence
  Synthetic oligonucleotide
tagtgcgaccttatcgccgtgcagctgatc

SEQ ID NO: 252552 - DNA, 30 bp, Artificial Sequence
  Synthetic oligonucleotide
gcacatccgtgaggtaaatcgtggctgatc

SEQ ID NO: 252553 - DNA, 30 bp, Artificial Sequence
  Synthetic oligonucleotide
tatgttgcaacatccatcctggatctgatc

SEQ ID NO: 252554 - DNA, 30 bp, Artificial Sequence
  Synthetic oligonucleotide
tcagaagacagggtggtttttcgggtgatc

SEQ ID NO: 252555 - DNA, 30 bp, Artificial Sequence
  Synthetic oligonucleotide
tgccggatatcagtgccaagattggtgatc

SEQ ID NO: 252556 - DNA, 30 bp, Artificial Sequence
  Synthetic oligonucleotide
gagaaggagtgcgctacgcgatatgtgatc

SEQ ID NO: 252557 - DNA, 30 bp, Artificial Sequence
  Synthetic oligonucleotide
ggcgacgggtagctttaattataattgatc

SEQ ID NO: 252558 - DNA, 30 bp, Artificial Sequence
  Synthetic oligonucleotide
aatactcctgagaaggatagccgcttgatc

SEQ ID NO: 252559 - DNA, 30 bp, Artificial Sequence
  Synthetic oligonucleotide
gatcggttgagcaggaaggggaatttgatc

SEQ ID NO: 252560 - DNA, 30 bp, Artificial Sequence
  Synthetic oligonucleotide
ataacgtcaattagttcatattttttgatc

SEQ ID NO: 252561 - DNA, 30 bp, Artificial Sequence
  Synthetic oligonucleotide
acatttagcacctcagagacaagaaatatc

SEQ ID NO: 252562 - DNA, 30 bp, Artificial Sequence
  Synthetic oligonucleotide
ggtgggcgggtaaatgcagagcggaatatc

SEQ ID NO: 252563 - DNA, 30 bp, Artificial Sequence
  Synthetic oligonucleotide
ctcaccgggtttagtgaccagtataatatc

SEQ ID NO: 252564 - DNA, 30 bp, Artificial Sequence
  Synthetic oligonucleotide
agaccgtccgaaatactcatgtgtaatatc

SEQ ID NO: 252565 - DNA, 30 bp, Artificial Sequence
  Synthetic oligonucleotide
tatgacacactgcgtcagagatttaatatc

SEQ ID NO: 252566 - DNA, 30 bp, Artificial Sequence
  Synthetic oligonucleotide
attaccggaaggatgcgtcgttaacatatc

SEQ ID NO: 252567 - DNA, 30 bp, Artificial Sequence
  Synthetic oligonucleotide
ggcaaatcgtgagaatttgaccgacatatc

SEQ ID NO: 252568 - DNA, 30 bp, Artificial Sequence
  Synthetic oligonucleotide
ttaggtaaaagattccaccctcaccatatc

SEQ ID NO: 252569 - DNA, 30 bp, Artificial Sequence
  Synthetic oligonucleotide
acaggctagtaaccaaataccagtcatatc

SEQ ID NO: 252570 - DNA, 30 bp, Artificial Sequence
  Synthetic oligonucleotide
atcagtgaacgaggcaatcggcaagatatc

SEQ ID NO: 252571 - DNA, 30 bp, Artificial Sequence
  Synthetic oligonucleotide
ccctcacggacaaggtttagagacgatatc

SEQ ID NO: 252572 - DNA, 30 bp, Artificial Sequence
  Synthetic oligonucleotide
tccatcacgacagcgtcctcgtaatatatc

SEQ ID NO: 252573 - DNA, 30 bp, Artificial Sequence
  Synthetic oligonucleotide
gtcgcgctactcgatcccggcctatatatc

SEQ ID NO: 252574 - DNA, 30 bp, Artificial Sequence
  Synthetic oligonucleotide
cagtagccgtaataacgctgtgggtatatc

SEQ ID NO: 252575 - DNA, 30 bp, Artificial Sequence
  Synthetic oligonucleotide
catatgtgatggggcaagcggaattatatc

SEQ ID NO: 252576 - DNA, 30 bp, Artificial Sequence
  Synthetic oligonucleotide
taacaggtgtgtacatcggctccaactatc

SEQ ID NO: 252577 - DNA, 30 bp, Artificial Sequence
  Synthetic oligonucleotide
caaaaggatggtcacccgggcgtaactatc

SEQ ID NO: 252578 - DNA, 30 bp, Artificial Sequence
  Synthetic oligonucleotide
tccagactgtcgttgttacatagcactatc

SEQ ID NO: 252579 - DNA, 30 bp, Artificial Sequence
  Synthetic oligonucleotide
tatgcttatgctaggtcaacgcggactatc

SEQ ID NO: 252580 - DNA, 30 bp, Artificial Sequence
  Synthetic oligonucleotide
caaatatcctagcgaattgcagtgactatc

SEQ ID NO: 252581 - DNA, 30 bp, Artificial Sequence
  Synthetic oligonucleotide
cgaggattaacttcggaattttaacctatc

SEQ ID NO: 252582 - DNA, 30 bp, Artificial Sequence
  Synthetic oligonucleotide
gcgtcgaccataacggcagctcgacctatc

SEQ ID NO: 252583 - DNA, 30 bp, Artificial Sequence
  Synthetic oligonucleotide
gatacggctagaaaaccgtaccgccctatc

SEQ ID NO: 252584 - DNA, 30 bp, Artificial Sequence
  Synthetic oligonucleotide
taagtgcaaaaccgcgggtcgctccctatc

SEQ ID NO: 252585 - DNA, 30 bp, Artificial Sequence
  Synthetic oligonucleotide
acaaacagtattgacggccaaccgcctatc

SEQ ID NO: 252586 - DNA, 30 bp, Artificial Sequence
  Synthetic oligonucleotide
tggcgggaaccctacgaggtcgtgcctatc

SEQ ID NO: 252587 - DNA, 30 bp, Artificial Sequence
  Synthetic oligonucleotide
acatatgtcactggtgcagaggccgctatc

SEQ ID NO: 252588 - DNA, 30 bp, Artificial Sequence
  Synthetic oligonucleotide
aaggtcataaatctaagatgttgcgctatc

SEQ ID NO: 252589 - DNA, 30 bp, Artificial Sequence
  Synthetic oligonucleotide
ctcctataacactcgctaaggtatgctatc

SEQ ID NO: 252590 - DNA, 30 bp, Artificial Sequence
  Synthetic oligonucleotide
gcctcgttttcttttagtgcctgtgctatc

SEQ ID NO: 252591 - DNA, 30 bp, Artificial Sequence
  Synthetic oligonucleotide
tgtgaggtagtcagtcggggaattgctatc

SEQ ID NO: 252592 - DNA, 30 bp, Artificial Sequence
  Synthetic oligonucleotide
gacggtgatccgtcacaaactgttgctatc

SEQ ID NO: 252593 - DNA, 30 bp, Artificial Sequence
  Synthetic oligonucleotide
agcgggctgcctcttcctatggagtctatc

SEQ ID NO: 252594 - DNA, 30 bp, Artificial Sequence
  Synthetic oligonucleotide
attctgtatgagccagatgccttcagtatc

SEQ ID NO: 252595 - DNA, 30 bp, Artificial Sequence
  Synthetic oligonucleotide
cagtttccacagattgacatgttgagtatc

SEQ ID NO: 252596 - DNA, 30 bp, Artificial Sequence
  Synthetic oligonucleotide
tataggggaggtacgaacatgggtagtatc

SEQ ID NO: 252597 - DNA, 30 bp, Artificial Sequence
  Synthetic oligonucleotide
tatataggcgtgaacgatcacagccgtatc

SEQ ID NO: 252598 - DNA, 30 bp, Artificial Sequence
  Synthetic oligonucleotide
tgtgtatcttgaggatcttcaaagcgtatc

SEQ ID NO: 252599 - DNA, 30 bp, Artificial Sequence
  Synthetic oligonucleotide
tttgggcagttaagtcactaggagcgtatc

SEQ ID NO: 252600 - DNA, 30 bp, Artificial Sequence
  Synthetic oligonucleotide
acataaacaattaatacgaaataaggtatc

SEQ ID NO: 252601 - DNA, 30 bp, Artificial Sequence
  Synthetic oligonucleotide
agaggattacggtagcagccctcaggtatc

SEQ ID NO: 252602 - DNA, 30 bp, Artificial Sequence
  Synthetic oligonucleotide
gcctctggaatgagtctggttataggtatc

SEQ ID NO: 252603 - DNA, 30 bp, Artificial Sequence
  Synthetic oligonucleotide
tctagacgtgatctttagagaaagggtatc

SEQ ID NO: 252604 - DNA, 30 bp, Artificial Sequence
  Synthetic oligonucleotide
gcggattcagactaagtgggaaatggtatc

SEQ ID NO: 252605 - DNA, 30 bp, Artificial Sequence
  Synthetic oligonucleotide
tacttggagtatctattgtcatgatgtatc

SEQ ID NO: 252606 - DNA, 30 bp, Artificial Sequence
  Synthetic oligonucleotide
ggatctccggaggagcaggtatcctgtatc

SEQ ID NO: 252607 - DNA, 30 bp, Artificial Sequence
  Synthetic oligonucleotide
gcgggttaaagagcgtatggtaagtgtatc

SEQ ID NO: 252608 - DNA, 30 bp, Artificial Sequence
  Synthetic oligonucleotide
cgtgtgcattctagcaacagtatgtgtatc

SEQ ID NO: 252609 - DNA, 30 bp, Artificial Sequence
  Synthetic oligonucleotide
atgatggtgtgccttgttattcaaattatc

SEQ ID NO: 252610 - DNA, 30 bp, Artificial Sequence
  Synthetic oligonucleotide
gaattcaactacgaataagcgaacattatc

SEQ ID NO: 252611 - DNA, 30 bp, Artificial Sequence
  Synthetic oligonucleotide
agaatacggactctagtggacaaccttatc

SEQ ID NO: 252612 - DNA, 30 bp, Artificial Sequence
  Synthetic oligonucleotide
agtgttagcttaacagaaggcgcccttatc

SEQ ID NO: 252613 - DNA, 30 bp, Artificial Sequence
  Synthetic oligonucleotide
gaataataaacaccaaaaaaggagcttatc

SEQ ID NO: 252614 - DNA, 30 bp, Artificial Sequence
  Synthetic oligonucleotide
ggattttagcaattagggaggacgcttatc

SEQ ID NO: 252615 - DNA, 30 bp, Artificial Sequence
  Synthetic oligonucleotide
aaacagcctcagagccttgcacggcttatc

SEQ ID NO: 252616 - DNA, 30 bp, Artificial Sequence
  Synthetic oligonucleotide
gatcacgactcgcagattacacatgttatc

SEQ ID NO: 252617 - DNA, 30 bp, Artificial Sequence
  Synthetic oligonucleotide
aatatgcgaagcaggtgcgccgttgttatc

SEQ ID NO: 252618 - DNA, 30 bp, Artificial Sequence
  Synthetic oligonucleotide
ggcaaacaggcttagcatttgaactttatc

SEQ ID NO: 252619 - DNA, 30 bp, Artificial Sequence
  Synthetic oligonucleotide
ttgatttacacaaagtaccacccctttatc

SEQ ID NO: 252620 - DNA, 30 bp, Artificial Sequence
  Synthetic oligonucleotide
ctttttaaccccagcaatttcaagtttatc

SEQ ID NO: 252621 - DNA, 30 bp, Artificial Sequence
  Synthetic oligonucleotide
cagtagtgatacaagaatattaagtttatc

SEQ ID NO: 252622 - DNA, 30 bp, Artificial Sequence
  Synthetic oligonucleotide
acgcaaagtgacttgaaacgactgtttatc

SEQ ID NO: 252623 - DNA, 30 bp, Artificial Sequence
  Synthetic oligonucleotide
caaagatgatgtcaaatactcaattttatc

SEQ ID NO: 252624 - DNA, 30 bp, Artificial Sequence
  Synthetic oligonucleotide
tgttcgtgaggaacagggggagattttatc

SEQ ID NO: 252625 - DNA, 30 bp, Artificial Sequence
  Synthetic oligonucleotide
taagtataggttccattcccatattttatc

SEQ ID NO: 252626 - DNA, 30 bp, Artificial Sequence
  Synthetic oligonucleotide
agtatcattagctacctgggtgaaaaactc

SEQ ID NO: 252627 - DNA, 30 bp, Artificial Sequence
  Synthetic oligonucleotide
cacctggatatacaagattattaaaaactc

SEQ ID NO: 252628 - DNA, 30 bp, Artificial Sequence
  Synthetic oligonucleotide
taagtcggacgagaaacaattgtaaaactc

SEQ ID NO: 252629 - DNA, 30 bp, Artificial Sequence
  Synthetic oligonucleotide
ttgtagacgcaatgtgacaaatataaactc

SEQ ID NO: 252630 - DNA, 30 bp, Artificial Sequence
  Synthetic oligonucleotide
ccacggctgctctgacctgagcctaaactc

SEQ ID NO: 252631 - DNA, 30 bp, Artificial Sequence
  Synthetic oligonucleotide
ccatgacaggccatgaatccagctaaactc

SEQ ID NO: 252632 - DNA, 30 bp, Artificial Sequence
  Synthetic oligonucleotide
atatctcgaaggaatcctgtagaacaactc

SEQ ID NO: 252633 - DNA, 30 bp, Artificial Sequence
  Synthetic oligonucleotide
ccgacagtcgttcaagcaatcatacaactc

SEQ ID NO: 252634 - DNA, 30 bp, Artificial Sequence
  Synthetic oligonucleotide
tgtggacaatggtattggacctggcaactc

SEQ ID NO: 252635 - DNA, 30 bp, Artificial Sequence
  Synthetic oligonucleotide
agtgacacatagggcgtcagcatagaactc

SEQ ID NO: 252636 - DNA, 30 bp, Artificial Sequence
  Synthetic oligonucleotide
gtctacggtatacggagatcactagaactc

SEQ ID NO: 252637 - DNA, 30 bp, Artificial Sequence
  Synthetic oligonucleotide
gggtcttagatgctccacgtgcacgaactc

SEQ ID NO: 252638 - DNA, 30 bp, Artificial Sequence
  Synthetic oligonucleotide
atctaaatccggctacatgttagataactc

SEQ ID NO: 252639 - DNA, 30 bp, Artificial Sequence
  Synthetic oligonucleotide
tgtcagtcaacaggtatgacgcgataactc

SEQ ID NO: 252640 - DNA, 30 bp, Artificial Sequence
  Synthetic oligonucleotide
ggaagtatgtgaataaccagttagtaactc

SEQ ID NO: 252641 - DNA, 30 bp, Artificial Sequence
  Synthetic oligonucleotide
gcaacgcacaagcgaagtgaagtgtaactc

SEQ ID NO: 252642 - DNA, 30 bp, Artificial Sequence
  Synthetic oligonucleotide
gcgacgttgagcgtcatagaagattaactc

SEQ ID NO: 252643 - DNA, 30 bp, Artificial Sequence
  Synthetic oligonucleotide
ctcctaggtaaaagcctcgtttcaacactc

SEQ ID NO: 252644 - DNA, 30 bp, Artificial Sequence
  Synthetic oligonucleotide
agtccagcgacggacacgcctacgccactc

SEQ ID NO: 252645 - DNA, 30 bp, Artificial Sequence
  Synthetic oligonucleotide
acttaagcgttctccggggctagagcactc

SEQ ID NO: 252646 - DNA, 30 bp, Artificial Sequence
  Synthetic oligonucleotide
cacgtgtggtccgagatttgatgtgcactc

SEQ ID NO: 252647 - DNA, 30 bp, Artificial Sequence
  Synthetic oligonucleotide
tttcgccgttcggggatacgttgtgcactc

SEQ ID NO: 252648 - DNA, 30 bp, Artificial Sequence
  Synthetic oligonucleotide
tgattcccaggagacagccgcagatcactc

SEQ ID NO: 252649 - DNA, 30 bp, Artificial Sequence
  Synthetic oligonucleotide
atagcacttaatatcactgccatatcactc

SEQ ID NO: 252650 - DNA, 30 bp, Artificial Sequence
  Synthetic oligonucleotide
tctacatatgtgaaaagcgcggcgtcactc

SEQ ID NO: 252651 - DNA, 30 bp, Artificial Sequence
  Synthetic oligonucleotide
gtggcataggcttatttacacggaagactc

SEQ ID NO: 252652 - DNA, 30 bp, Artificial Sequence
  Synthetic oligonucleotide
ttcggtagacgatgctttggcctgagactc

SEQ ID NO: 252653 - DNA, 30 bp, Artificial Sequence
  Synthetic oligonucleotide
aaccggagattggatgtcgtgaatagactc

SEQ ID NO: 252654 - DNA, 30 bp, Artificial Sequence
  Synthetic oligonucleotide
tcacaaatgaagatagttacttctagactc

SEQ ID NO: 252655 - DNA, 30 bp, Artificial Sequence
  Synthetic oligonucleotide
ggctgcctttggtagtaacggatgcgactc

SEQ ID NO: 252656 - DNA, 30 bp, Artificial Sequence
  Synthetic oligonucleotide
agaagcaacacatagttgctggtgcgactc

SEQ ID NO: 252657 - DNA, 30 bp, Artificial Sequence
  Synthetic oligonucleotide
accaacgctggagaggcatgtaccggactc

SEQ ID NO: 252658 - DNA, 30 bp, Artificial Sequence
  Synthetic oligonucleotide
gaccagctggaaactagctctgccggactc

SEQ ID NO: 252659 - DNA, 30 bp, Artificial Sequence
  Synthetic oligonucleotide
tagatgtacggagcatctgaggagggactc

SEQ ID NO: 252660 - DNA, 30 bp, Artificial Sequence
  Synthetic oligonucleotide
agagcccacagccgtaaagactagggactc

SEQ ID NO: 252661 - DNA, 30 bp, Artificial Sequence
  Synthetic oligonucleotide
aacacgccagtacggagttcaggtggactc

SEQ ID NO: 252662 - DNA, 30 bp, Artificial Sequence
  Synthetic oligonucleotide
gctaaaccagcggactagaacatttgactc

SEQ ID NO: 252663 - DNA, 30 bp, Artificial Sequence
  Synthetic oligonucleotide
atgatatgattctttaggtttacaatactc

SEQ ID NO: 252664 - DNA, 30 bp, Artificial Sequence
  Synthetic oligonucleotide
gtcatagcaaattttatctgaccaatactc

SEQ ID NO: 252665 - DNA, 30 bp, Artificial Sequence
  Synthetic oligonucleotide
taccacctaacttacagtgatagaatactc

SEQ ID NO: 252666 - DNA, 30 bp, Artificial Sequence
  Synthetic oligonucleotide
gaaggtaaagtcccaatatgcgccatactc

SEQ ID NO: 252667 - DNA, 30 bp, Artificial Sequence
  Synthetic oligonucleotide
ctttgaaagggcattatgtgcaagatactc

SEQ ID NO: 252668 - DNA, 30 bp, Artificial Sequence
  Synthetic oligonucleotide
aaataaacaggtcaccatattaagatactc

SEQ ID NO: 252669 - DNA, 30 bp, Artificial Sequence
  Synthetic oligonucleotide
aatcgtaaacgggttaccatgaatatactc

SEQ ID NO: 252670 - DNA, 30 bp, Artificial Sequence
  Synthetic oligonucleotide
atgggctgtattttatcggcaactatactc

SEQ ID NO: 252671 - DNA, 30 bp, Artificial Sequence
  Synthetic oligonucleotide
ctcctcgcggccggcgatggtcttatactc

SEQ ID NO: 252672 - DNA, 30 bp, Artificial Sequence
  Synthetic oligonucleotide
ggggctgcgtatatcgtcatgatactactc

SEQ ID NO: 252673 - DNA, 30 bp, Artificial Sequence
  Synthetic oligonucleotide
aggcggttagtgcatagggggttactactc

SEQ ID NO: 252674 - DNA, 30 bp, Artificial Sequence
  Synthetic oligonucleotide
tacatcttaagttatggctctagcctactc

SEQ ID NO: 252675 - DNA, 30 bp, Artificial Sequence
  Synthetic oligonucleotide
tggacaactttaggttgttagcgcctactc

SEQ ID NO: 252676 - DNA, 30 bp, Artificial Sequence
  Synthetic oligonucleotide
gagttatggtataagaagggaggcctactc

SEQ ID NO: 252677 - DNA, 30 bp, Artificial Sequence
  Synthetic oligonucleotide
ggcaagattcggcagtaggggtatctactc

SEQ ID NO: 252678 - DNA, 30 bp, Artificial Sequence
  Synthetic oligonucleotide
aaggacttagtcgccagacacggagtactc

SEQ ID NO: 252679 - DNA, 30 bp, Artificial Sequence
  Synthetic oligonucleotide
cgtttcaggcattcgaaggatcccgtactc

SEQ ID NO: 252680 - DNA, 30 bp, Artificial Sequence
  Synthetic oligonucleotide
gtaggacgccgtagtatcttcatggtactc

SEQ ID NO: 252681 - DNA, 30 bp, Artificial Sequence
  Synthetic oligonucleotide
agtcaccatattccactaagatatgtactc

SEQ ID NO: 252682 - DNA, 30 bp, Artificial Sequence
  Synthetic oligonucleotide
ccaggggggcaatccatgcgacctgtactc

SEQ ID NO: 252683 - DNA, 30 bp, Artificial Sequence
  Synthetic oligonucleotide
taccgcatttgttcggcgtccggtgtactc

SEQ ID NO: 252684 - DNA, 30 bp, Artificial Sequence
  Synthetic oligonucleotide
ataactctcttatggagcgggcaattactc

SEQ ID NO: 252685 - DNA, 30 bp, Artificial Sequence
  Synthetic oligonucleotide
atcacgacttcaaatgcagactccttactc

SEQ ID NO: 252686 - DNA, 30 bp, Artificial Sequence
  Synthetic oligonucleotide
catcgccttgtccggtgttggtagttactc

SEQ ID NO: 252687 - DNA, 30 bp, Artificial Sequence
  Synthetic oligonucleotide
acgagccttccagatactcacattttactc

SEQ ID NO: 252688 - DNA, 30 bp, Artificial Sequence
  Synthetic oligonucleotide
gcgttcaaggaccgaggtggaagaaacctc

SEQ ID NO: 252689 - DNA, 30 bp, Artificial Sequence
  Synthetic oligonucleotide
ggtactaacgtattcatgtcatgcaacctc

SEQ ID NO: 252690 - DNA, 30 bp, Artificial Sequence
  Synthetic oligonucleotide
cccctaatcagtttcgtctatatcaacctc

SEQ ID NO: 252691 - DNA, 30 bp, Artificial Sequence
  Synthetic oligonucleotide
acaggtaggggacctccggctaggaacctc

SEQ ID NO: 252692 - DNA, 30 bp, Artificial Sequence
  Synthetic oligonucleotide
gccacggcgaacggagtgtcaatgaacctc

SEQ ID NO: 252693 - DNA, 30 bp, Artificial Sequence
  Synthetic oligonucleotide
gcggagcgtcaggaaatgatggtacacctc

SEQ ID NO: 252694 - DNA, 30 bp, Artificial Sequence
  Synthetic oligonucleotide
acagagagggtaaacgcatgggtccacctc

SEQ ID NO: 252695 - DNA, 30 bp, Artificial Sequence
  Synthetic oligonucleotide
gagggcagtccatcgcaagtaacgcacctc

SEQ ID NO: 252696 - DNA, 30 bp, Artificial Sequence
  Synthetic oligonucleotide
catatggagagactgagttaaaaggacctc

SEQ ID NO: 252697 - DNA, 30 bp, Artificial Sequence
  Synthetic oligonucleotide
gaaggggactctgccccgttaacgtacctc

SEQ ID NO: 252698 - DNA, 30 bp, Artificial Sequence
  Synthetic oligonucleotide
ccttaaaagcgtaagaaggtgggttacctc

SEQ ID NO: 252699 - DNA, 30 bp, Artificial Sequence
  Synthetic oligonucleotide
ccgaggagccacagctcaatgataaccctc

SEQ ID NO: 252700 - DNA, 30 bp, Artificial Sequence
  Synthetic oligonucleotide
tggacttatataccaagaggtgacaccctc

SEQ ID NO: 252701 - DNA, 29 bp, Artificial Sequence
  Synthetic oligonucleotide
agaggagaaaacggtcgcgactcaccctc

SEQ ID NO: 252702 - DNA, 30 bp, Artificial Sequence
  Synthetic oligonucleotide
gacgcagatctgtccgtcgccttcaccctc

SEQ ID NO: 252703 - DNA, 30 bp, Artificial Sequence
  Synthetic oligonucleotide
acagcgtttgcagaaaattactggaccctc

SEQ ID NO: 252704 - DNA, 30 bp, Artificial Sequence
  Synthetic oligonucleotide
cccatcagccaacgatagcgggttaccctc

SEQ ID NO: 252705 - DNA, 30 bp, Artificial Sequence
  Synthetic oligonucleotide
taggttggagggattaggggtcaacccctc

SEQ ID NO: 252706 - DNA, 30 bp, Artificial Sequence
  Synthetic oligonucleotide
gtggagataccccctaaccgctaccccctc

SEQ ID NO: 252707 - DNA, 30 bp, Artificial Sequence
  Synthetic oligonucleotide
ccttgctctaactttgggggtcagcccctc

SEQ ID NO: 252708 - DNA, 30 bp, Artificial Sequence
  Synthetic oligonucleotide
cactcgtacatcggcggccccagtgccctc

SEQ ID NO: 252709 - DNA, 30 bp, Artificial Sequence
  Synthetic oligonucleotide
gaaacacccaatgtacagacgaagtccctc

SEQ ID NO: 252710 - DNA, 30 bp, Artificial Sequence
  Synthetic oligonucleotide
tgttgggttctttcttcagccctgtccctc

SEQ ID NO: 252711 - DNA, 30 bp, Artificial Sequence
  Synthetic oligonucleotide
aatatagagaccagagcgacacaaagcctc

SEQ ID NO: 252712 - DNA, 30 bp, Artificial Sequence
  Synthetic oligonucleotide
gtgcaaatagtacctttcactactagcctc

SEQ ID NO: 252713 - DNA, 30 bp, Artificial Sequence
  Synthetic oligonucleotide
gcgcctaagaacacggttactacaggcctc

SEQ ID NO: 252714 - DNA, 30 bp, Artificial Sequence
  Synthetic oligonucleotide
attaaaccgatcgcgtccttaagaggcctc

SEQ ID NO: 252715 - DNA, 30 bp, Artificial Sequence
  Synthetic oligonucleotide
atcaaccgacagatatacgtggcgggcctc

SEQ ID NO: 252716 - DNA, 30 bp, Artificial Sequence
  Synthetic oligonucleotide
acaccacgtgcagtaccacgatctggcctc

SEQ ID NO: 252717 - DNA, 30 bp, Artificial Sequence
  Synthetic oligonucleotide
cacgagtatttcatggtgagctgtggcctc

SEQ ID NO: 252718 - DNA, 30 bp, Artificial Sequence
  Synthetic oligonucleotide
agtaatgagagctctagagtcagctgcctc

SEQ ID NO: 252719 - DNA, 30 bp, Artificial Sequence
  Synthetic oligonucleotide
ggaagtgtgccatgtagtataaagtgcctc

SEQ ID NO: 252720 - DNA, 30 bp, Artificial Sequence
  Synthetic oligonucleotide
cactggggacccaggctcacactgtgcctc

SEQ ID NO: 252721 - DNA, 30 bp, Artificial Sequence
  Synthetic oligonucleotide
acgacaactaatatggccgctctttgcctc

SEQ ID NO: 252722 - DNA, 30 bp, Artificial Sequence
  Synthetic oligonucleotide
ttcaagaccatgtagaatagggcaatcctc

SEQ ID NO: 252723 - DNA, 30 bp, Artificial Sequence
  Synthetic oligonucleotide
ttaacaagtaagttcccggtaaagatcctc

SEQ ID NO: 252724 - DNA, 30 bp, Artificial Sequence
  Synthetic oligonucleotide
tctaattgggacggatactacgatatcctc

SEQ ID NO: 252725 - DNA, 30 bp, Artificial Sequence
  Synthetic oligonucleotide
aattcgcacctaatctttaggctcctcctc

SEQ ID NO: 252726 - DNA, 30 bp, Artificial Sequence
  Synthetic oligonucleotide
actacccattgtgttatgtggcggctcctc

SEQ ID NO: 252727 - DNA, 30 bp, Artificial Sequence
  Synthetic oligonucleotide
ttgcatatgtgttgatgaatccatctcctc

SEQ ID NO: 252728 - DNA, 30 bp, Artificial Sequence
  Synthetic oligonucleotide
tcgtcggatccacggcaccgaggtctcctc

SEQ ID NO: 252729 - DNA, 30 bp, Artificial Sequence
  Synthetic oligonucleotide
tggtgcacgcggagcagacacgtagtcctc

SEQ ID NO: 252730 - DNA, 30 bp, Artificial Sequence
  Synthetic oligonucleotide
gaagttaaaaaccctgaatcttgcgtcctc

SEQ ID NO: 252731 - DNA, 30 bp, Artificial Sequence
  Synthetic oligonucleotide
ctaacaagcgagcgtatcaagtgcttcctc

SEQ ID NO: 252732 - DNA, 30 bp, Artificial Sequence
  Synthetic oligonucleotide
caattatatggtcatgttgataggttcctc

SEQ ID NO: 252733 - DNA, 30 bp, Artificial Sequence
  Synthetic oligonucleotide
tcaaactaccacagtccaggcttgttcctc

SEQ ID NO: 252734 - DNA, 30 bp, Artificial Sequence
  Synthetic oligonucleotide
ccgatgttaaatagggtgttatttttcctc

SEQ ID NO: 252735 - DNA, 30 bp, Artificial Sequence
  Synthetic oligonucleotide
attgccttatcagtgaagatccgaaagctc

SEQ ID NO: 252736 - DNA, 30 bp, Artificial Sequence
  Synthetic oligonucleotide
cgggcccggccatatacatccggcaagctc

SEQ ID NO: 252737 - DNA, 30 bp, Artificial Sequence
  Synthetic oligonucleotide
ggaggttgcccagtaactgggcagaagctc

SEQ ID NO: 252738 - DNA, 30 bp, Artificial Sequence
  Synthetic oligonucleotide
aaggcacgctgagggcgcctcgcgaagctc

SEQ ID NO: 252739 - DNA, 30 bp, Artificial Sequence
  Synthetic oligonucleotide
ctcccgttcggaggagcggacaggaagctc

SEQ ID NO: 252740 - DNA, 30 bp, Artificial Sequence
  Synthetic oligonucleotide
tggacacagtttaaaacatcccggaagctc

SEQ ID NO: 252741 - DNA, 30 bp, Artificial Sequence
  Synthetic oligonucleotide
tatactagagaaggtcattcgcggaagctc

SEQ ID NO: 252742 - DNA, 30 bp, Artificial Sequence
  Synthetic oligonucleotide
cgttgatcttacgctatgtcggctaagctc

SEQ ID NO: 252743 - DNA, 30 bp, Artificial Sequence
  Synthetic oligonucleotide
gtttcacttgtatgagtatcgagtaagctc

SEQ ID NO: 252744 - DNA, 30 bp, Artificial Sequence
  Synthetic oligonucleotide
tctagctgttccacagtgcgccgtaagctc

SEQ ID NO: 252745 - DNA, 30 bp, Artificial Sequence
  Synthetic oligonucleotide
atcttaccgactaaaacgaccgtacagctc

SEQ ID NO: 252746 - DNA, 30 bp, Artificial Sequence
  Synthetic oligonucleotide
ggcttcgacatgttcagacaaagccagctc

SEQ ID NO: 252747 - DNA, 30 bp, Artificial Sequence
  Synthetic oligonucleotide
acctcggagtgcgaagttccacagcagctc

SEQ ID NO: 252748 - DNA, 30 bp, Artificial Sequence
  Synthetic oligonucleotide
cgctactaggattcaagtttaaggcagctc

SEQ ID NO: 252749 - DNA, 30 bp, Artificial Sequence
  Synthetic oligonucleotide
cggtctcctatgatcaaatcacaagagctc

SEQ ID NO: 252750 - DNA, 30 bp, Artificial Sequence
  Synthetic oligonucleotide
ttaaatcgccgtttcgatttaccagagctc

SEQ ID NO: 252751 - DNA, 30 bp, Artificial Sequence
  Synthetic oligonucleotide
acaatgtcctaccagcgacgaggagagctc

SEQ ID NO: 252752 - DNA, 30 bp, Artificial Sequence
  Synthetic oligonucleotide
ccctgtggtgcgggacactacgacgagctc

SEQ ID NO: 252753 - DNA, 30 bp, Artificial Sequence
  Synthetic oligonucleotide
tgggcacagtctgtattcatttaggagctc

SEQ ID NO: 252754 - DNA, 30 bp, Artificial Sequence
  Synthetic oligonucleotide
tctagccgccggggcggtttaggggagctc

SEQ ID NO: 252755 - DNA, 30 bp, Artificial Sequence
  Synthetic oligonucleotide
accgtaaaccgtaagtcattaatggagctc

SEQ ID NO: 252756 - DNA, 30 bp, Artificial Sequence
  Synthetic oligonucleotide
tagagggtgtggtcatcattgctggagctc

SEQ ID NO: 252757 - DNA, 30 bp, Artificial Sequence
  Synthetic oligonucleotide
agtagcaagtaccttggggcggcatagctc

SEQ ID NO: 252758 - DNA, 30 bp, Artificial Sequence
  Synthetic oligonucleotide
tacgaatccgtggacatctgatcatagctc

SEQ ID NO: 252759 - DNA, 30 bp, Artificial Sequence
  Synthetic oligonucleotide
aactaagtatgccaaggattattctagctc

SEQ ID NO: 252760 - DNA, 30 bp, Artificial Sequence
  Synthetic oligonucleotide
cgcccggctatcaaggatgccacgtagctc

SEQ ID NO: 252761 - DNA, 30 bp, Artificial Sequence
  Synthetic oligonucleotide
tcacttaaaggtttcgcaacgcggtagctc

SEQ ID NO: 252762 - DNA, 30 bp, Artificial Sequence
  Synthetic oligonucleotide
tggataaggcaccgaggctttacttagctc

SEQ ID NO: 252763 - DNA, 30 bp, Artificial Sequence
  Synthetic oligonucleotide
taatgacgagaaccattttcgtaaacgctc

SEQ ID NO: 252764 - DNA, 30 bp, Artificial Sequence
  Synthetic oligonucleotide
ccaaaatttccttaataagacggaacgctc

SEQ ID NO: 252765 - DNA, 30 bp, Artificial Sequence
  Synthetic oligonucleotide
cgtaatctcatcggcgtaatcggaacgctc

SEQ ID NO: 252766 - DNA, 30 bp, Artificial Sequence
  Synthetic oligonucleotide
ctaggtttaagaatggttagaatcacgctc

SEQ ID NO: 252767 - DNA, 30 bp, Artificial Sequence
  Synthetic oligonucleotide
acagaagatgccgtttaagggtcgacgctc

SEQ ID NO: 252768 - DNA, 30 bp, Artificial Sequence
  Synthetic oligonucleotide
taagaataccagttccaaatgaacccgctc

SEQ ID NO: 252769 - DNA, 30 bp, Artificial Sequence
  Synthetic oligonucleotide
gtcactacccagatagcactatgcccgctc

SEQ ID NO: 252770 - DNA, 30 bp, Artificial Sequence
  Synthetic oligonucleotide
atgaatgcttatatgattacaaggccgctc

SEQ ID NO: 252771 - DNA, 30 bp, Artificial Sequence
  Synthetic oligonucleotide
ggctgtacaaagtaaggacttgatccgctc

SEQ ID NO: 252772 - DNA, 30 bp, Artificial Sequence
  Synthetic oligonucleotide
accaggctatgctagctaatagcagcgctc

SEQ ID NO: 252773 - DNA, 30 bp, Artificial Sequence
  Synthetic oligonucleotide
ttctcagagacgtgggaggtgcgagcgctc

SEQ ID NO: 252774 - DNA, 30 bp, Artificial Sequence
  Synthetic oligonucleotide
atagggcattggcctcgcaggctcgcgctc

SEQ ID NO: 252775 - DNA, 30 bp, Artificial Sequence
  Synthetic oligonucleotide
tatacatgcgtaagcacccgtactgcgctc

SEQ ID NO: 252776 - DNA, 30 bp, Artificial Sequence
  Synthetic oligonucleotide
tggggtgtggggtgcctcagagctgcgctc

SEQ ID NO: 252777 - DNA, 30 bp, Artificial Sequence
  Synthetic oligonucleotide
atggagcaacacatggcactggcatcgctc

SEQ ID NO: 252778 - DNA, 30 bp, Artificial Sequence
  Synthetic oligonucleotide
tgacgacacaatggcgaactttgctcgctc

SEQ ID NO: 252779 - DNA, 30 bp, Artificial Sequence
  Synthetic oligonucleotide
gaccgcgcggtttcttgatggctctcgctc

SEQ ID NO: 252780 - DNA, 30 bp, Artificial Sequence
  Synthetic oligonucleotide
aacgtgtgtgtccgtgatatatattcgctc

SEQ ID NO: 252781 - DNA, 30 bp, Artificial Sequence
  Synthetic oligonucleotide
gacaccaaagatataggatccgcaaggctc

SEQ ID NO: 252782 - DNA, 30 bp, Artificial Sequence
  Synthetic oligonucleotide
acaacattttatagattcaggtgaaggctc

SEQ ID NO: 252783 - DNA, 30 bp, Artificial Sequence
  Synthetic oligonucleotide
cctgcgtttctaattattggtgtaaggctc

SEQ ID NO: 252784 - DNA, 30 bp, Artificial Sequence
  Synthetic oligonucleotide
gttcgaaaaaatcgtgttaacccgaggctc

SEQ ID NO: 252785 - DNA, 30 bp, Artificial Sequence
  Synthetic oligonucleotide
ttacaatgcggcaaggtttgcgtgaggctc

SEQ ID NO: 252786 - DNA, 30 bp, Artificial Sequence
  Synthetic oligonucleotide
ctactatggcgaacagatatttgtaggctc

SEQ ID NO: 252787 - DNA, 30 bp, Artificial Sequence
  Synthetic oligonucleotide
aactagactaaagagtattggcttaggctc

SEQ ID NO: 252788 - DNA, 30 bp, Artificial Sequence
  Synthetic oligonucleotide
gttggcaatctctataatccgttccggctc

SEQ ID NO: 252789 - DNA, 30 bp, Artificial Sequence
  Synthetic oligonucleotide
gatcaagaaaaggcattgaccagagggctc

SEQ ID NO: 252790 - DNA, 30 bp, Artificial Sequence
  Synthetic oligonucleotide
tagaatacaattcgtatccgggtagggctc

SEQ ID NO: 252791 - DNA, 30 bp, Artificial Sequence
  Synthetic oligonucleotide
gctgccggccgaaacggggggcacgggctc

SEQ ID NO: 252792 - DNA, 30 bp, Artificial Sequence
  Synthetic oligonucleotide
aggaactggtcggtcagccaccccgggctc

SEQ ID NO: 252793 - DNA, 30 bp, Artificial Sequence
  Synthetic oligonucleotide
cgaaccattctctccgcttcgctcgggctc

SEQ ID NO: 252794 - DNA, 30 bp, Artificial Sequence
  Synthetic oligonucleotide
gataaactcttaagatcgctcttcgggctc

SEQ ID NO: 252795 - DNA, 30 bp, Artificial Sequence
  Synthetic oligonucleotide
acaacggctaccactgttgttcaatggctc

SEQ ID NO: 252796 - DNA, 30 bp, Artificial Sequence
  Synthetic oligonucleotide
tttggaccggcgaatctgagttgatggctc

SEQ ID NO: 252797 - DNA, 30 bp, Artificial Sequence
  Synthetic oligonucleotide
gtaaacggcgaagtgcaatatatttggctc

SEQ ID NO: 252798 - DNA, 30 bp, Artificial Sequence
  Synthetic oligonucleotide
cgggggattgtacgaaggtccctaatgctc

SEQ ID NO: 252799 - DNA, 30 bp, Artificial Sequence
  Synthetic oligonucleotide
gatcaatcctaggagggtccaggcatgctc

SEQ ID NO: 252800 - DNA, 30 bp, Artificial Sequence
  Synthetic oligonucleotide
cagacagccgccaggtaagattagatgctc

SEQ ID NO: 252801 - DNA, 30 bp, Artificial Sequence
  Synthetic oligonucleotide
tagagaaccaatggcctgtgaatgatgctc

SEQ ID NO: 252802 - DNA, 30 bp, Artificial Sequence
  Synthetic oligonucleotide
actagagaacttaattgtaaacacctgctc

SEQ ID NO: 252803 - DNA, 30 bp, Artificial Sequence
  Synthetic oligonucleotide
ggacaggcaagtttaagggtatcagtgctc

SEQ ID NO: 252804 - DNA, 30 bp, Artificial Sequence
  Synthetic oligonucleotide
gttgcgtcacaggtaaaactgggcgtgctc

SEQ ID NO: 252805 - DNA, 30 bp, Artificial Sequence
  Synthetic oligonucleotide
tcgtccgagaaatttacctacccggtgctc

SEQ ID NO: 252806 - DNA, 30 bp, Artificial Sequence
  Synthetic oligonucleotide
catcacagaaattggtctgaataattgctc

SEQ ID NO: 252807 - DNA, 30 bp, Artificial Sequence
  Synthetic oligonucleotide
ctatcgagttggctagagtaaaggttgctc

SEQ ID NO: 252808 - DNA, 30 bp, Artificial Sequence
  Synthetic oligonucleotide
gccaagactgtcatcgacctatggttgctc

SEQ ID NO: 252809 - DNA, 30 bp, Artificial Sequence
  Synthetic oligonucleotide
cgtttttgctgtgtgccaccccagcatctc

SEQ ID NO: 252810 - DNA, 30 bp, Artificial Sequence
  Synthetic oligonucleotide
tatacgactaccaaaacgatatagcatctc

SEQ ID NO: 252811 - DNA, 30 bp, Artificial Sequence
  Synthetic oligonucleotide
gtggaacgccaagggcggaaaagtcatctc

SEQ ID NO: 252812 - DNA, 30 bp, Artificial Sequence
  Synthetic oligonucleotide
catggaaaatacttctaaacgaaagatctc

SEQ ID NO: 252813 - DNA, 30 bp, Artificial Sequence
  Synthetic oligonucleotide
aaagccgggccacattagacctgcgatctc

SEQ ID NO: 252814 - DNA, 30 bp, Artificial Sequence
  Synthetic oligonucleotide
aggaaagcattcattgtgcaggtcgatctc

SEQ ID NO: 252815 - DNA, 30 bp, Artificial Sequence
  Synthetic oligonucleotide
acctcacatgctcggcgacaaccggatctc

SEQ ID NO: 252816 - DNA, 30 bp, Artificial Sequence
  Synthetic oligonucleotide
ggattattgggtagcagaaggtatgatctc

SEQ ID NO: 252817 - DNA, 30 bp, Artificial Sequence
  Synthetic oligonucleotide
cagcatcagagagtagaatccccatatctc

SEQ ID NO: 252818 - DNA, 30 bp, Artificial Sequence
  Synthetic oligonucleotide
cgaagaacgcgtctaatccttggctatctc

SEQ ID NO: 252819 - DNA, 30 bp, Artificial Sequence
  Synthetic oligonucleotide
caagggagttcgggcgcagggttctatctc

SEQ ID NO: 252820 - DNA, 30 bp, Artificial Sequence
  Synthetic oligonucleotide
ccgttacgtgggaaccgtggcgggtatctc

SEQ ID NO: 252821 - DNA, 30 bp, Artificial Sequence
  Synthetic oligonucleotide
atcctagaataaccatagccattttatctc

SEQ ID NO: 252822 - DNA, 30 bp, Artificial Sequence
  Synthetic oligonucleotide
tcgctgcggtcgtcggtatgtaaaactctc

SEQ ID NO: 252823 - DNA, 30 bp, Artificial Sequence
  Synthetic oligonucleotide
aggatggccgtgtcagtcctgttaactctc

SEQ ID NO: 252824 - DNA, 30 bp, Artificial Sequence
  Synthetic oligonucleotide
tttagacgacgtcacaaatagcagactctc

SEQ ID NO: 252825 - DNA, 30 bp, Artificial Sequence
  Synthetic oligonucleotide
ctcagaatccggtagttatacgggactctc

SEQ ID NO: 252826 - DNA, 30 bp, Artificial Sequence
  Synthetic oligonucleotide
taccgttaatgttcatgagtcagtactctc

SEQ ID NO: 252827 - DNA, 30 bp, Artificial Sequence
  Synthetic oligonucleotide
gtaggggaactagttacttgggtcgctctc

SEQ ID NO: 252828 - DNA, 30 bp, Artificial Sequence
  Synthetic oligonucleotide
tcgtaaataagtgtaaggtcgagggctctc

SEQ ID NO: 252829 - DNA, 30 bp, Artificial Sequence
  Synthetic oligonucleotide
tgggcgccattaaggatatggttttctctc

SEQ ID NO: 252830 - DNA, 30 bp, Artificial Sequence
  Synthetic oligonucleotide
tataccacccggcgaccataacaaagtctc

SEQ ID NO: 252831 - DNA, 30 bp, Artificial Sequence
  Synthetic oligonucleotide
ctagaggaggaggtagaccagttgagtctc

SEQ ID NO: 252832 - DNA, 30 bp, Artificial Sequence
  Synthetic oligonucleotide
ctacaaacgacgagctcgggtttgagtctc

SEQ ID NO: 252833 - DNA, 30 bp, Artificial Sequence
  Synthetic oligonucleotide
aaacgttagaatctgcttatggatagtctc

SEQ ID NO: 252834 - DNA, 30 bp, Artificial Sequence
  Synthetic oligonucleotide
cgctatccgggacatattatacaacgtctc

SEQ ID NO: 252835 - DNA, 30 bp, Artificial Sequence
  Synthetic oligonucleotide
gtttcggatggggcggagtattgacgtctc

SEQ ID NO: 252836 - DNA, 30 bp, Artificial Sequence
  Synthetic oligonucleotide
ctcgcggctcagaaactaggatggcgtctc

SEQ ID NO: 252837 - DNA, 30 bp, Artificial Sequence
  Synthetic oligonucleotide
tgccttgataatttcggaacttatcgtctc

SEQ ID NO: 252838 - DNA, 30 bp, Artificial Sequence
  Synthetic oligonucleotide
tgtcccgtaggattaggtcacgtgggtctc

SEQ ID NO: 252839 - DNA, 30 bp, Artificial Sequence
  Synthetic oligonucleotide
cattcgacaatgccacctctttatggtctc

SEQ ID NO: 252840 - DNA, 30 bp, Artificial Sequence
  Synthetic oligonucleotide
ggatggggaaggtaacaaggcagctgtctc

SEQ ID NO: 252841 - DNA, 30 bp, Artificial Sequence
  Synthetic oligonucleotide
ctaacccgtgcctagaaggcgttctgtctc

SEQ ID NO: 252842 - DNA, 30 bp, Artificial Sequence
  Synthetic oligonucleotide
gtagattgcgaatcactagctctgtgtctc

SEQ ID NO: 252843 - DNA, 30 bp, Artificial Sequence
  Synthetic oligonucleotide
agcgttttacagctcattcaacgttgtctc

SEQ ID NO: 252844 - DNA, 30 bp, Artificial Sequence
  Synthetic oligonucleotide
ggatccagataccagcctgaagtgattctc

SEQ ID NO: 252845 - DNA, 30 bp, Artificial Sequence
  Synthetic oligonucleotide
ttcgacagggcgtatgtctattatattctc

SEQ ID NO: 252846 - DNA, 30 bp, Artificial Sequence
  Synthetic oligonucleotide
gctgaacggtcaaccaaggaagtacttctc

SEQ ID NO: 252847 - DNA, 30 bp, Artificial Sequence
  Synthetic oligonucleotide
acacctttagcttagaagtttctccttctc

SEQ ID NO: 252848 - DNA, 30 bp, Artificial Sequence
  Synthetic oligonucleotide
tgcaatggtggaagtggggtacggcttctc

SEQ ID NO: 252849 - DNA, 30 bp, Artificial Sequence
  Synthetic oligonucleotide
gagcagaaaggggcgttaggcgggcttctc

SEQ ID NO: 252850 - DNA, 30 bp, Artificial Sequence
  Synthetic oligonucleotide
ccataaaggaagtttgtgaggtggcttctc

SEQ ID NO: 252851 - DNA, 30 bp, Artificial Sequence
  Synthetic oligonucleotide
cgaaaggcgtcgctagcataccaggttctc

SEQ ID NO: 252852 - DNA, 30 bp, Artificial Sequence
  Synthetic oligonucleotide
tgaggctcggctgcacaaaccacggttctc

SEQ ID NO: 252853 - DNA, 30 bp, Artificial Sequence
  Synthetic oligonucleotide
ctagttaaaaagatcaggggtgctgttctc

SEQ ID NO: 252854 - DNA, 30 bp, Artificial Sequence
  Synthetic oligonucleotide
ccgtgggggcaagaagtcggagttgttctc

SEQ ID NO: 252855 - DNA, 30 bp, Artificial Sequence
  Synthetic oligonucleotide
ttgagtagagccttaactcgacaatttctc

SEQ ID NO: 252856 - DNA, 30 bp, Artificial Sequence
  Synthetic oligonucleotide
gcattgggctgggcttcgcgtcaatttctc

SEQ ID NO: 252857 - DNA, 30 bp, Artificial Sequence
  Synthetic oligonucleotide
gaagagcccatgatttgaaatcagtttctc

SEQ ID NO: 252858 - DNA, 30 bp, Artificial Sequence
  Synthetic oligonucleotide
cgaccacaggccgccacttaaccttttctc

SEQ ID NO: 252859 - DNA, 30 bp, Artificial Sequence
  Synthetic oligonucleotide
aacgggcagcgtagggcccctataaaagtc

SEQ ID NO: 252860 - DNA, 30 bp, Artificial Sequence
  Synthetic oligonucleotide
aggcaagcataggcatggctaaagaaagtc

SEQ ID NO: 252861 - DNA, 30 bp, Artificial Sequence
  Synthetic oligonucleotide
cgtttgaagtaacgagttcgctataaagtc

SEQ ID NO: 252862 - DNA, 30 bp, Artificial Sequence
  Synthetic oligonucleotide
tttaacgtagatgtgtaccagcctaaagtc

SEQ ID NO: 252863 - DNA, 30 bp, Artificial Sequence
  Synthetic oligonucleotide
acagcaatggtgtgtttgtcaccccaagtc

SEQ ID NO: 252864 - DNA, 30 bp, Artificial Sequence
  Synthetic oligonucleotide
gggagctcggtgggatgctttgcccaagtc

SEQ ID NO: 252865 - DNA, 31 bp, Artificial Sequence
  Synthetic oligonucleotide
ttgtggggggatcgccagctagatagaagtc

SEQ ID NO: 252866 - DNA, 30 bp, Artificial Sequence
  Synthetic oligonucleotide
cagtgactctcagaagcgtgaaacgaagtc

SEQ ID NO: 252867 - DNA, 30 bp, Artificial Sequence
  Synthetic oligonucleotide
gaagacagcgcaccctggacagctgaagtc

SEQ ID NO: 252868 - DNA, 30 bp, Artificial Sequence
  Synthetic oligonucleotide
tatgtccgaattttcaaaatatgctaagtc

SEQ ID NO: 252869 - DNA, 30 bp, Artificial Sequence
  Synthetic oligonucleotide
cgtaatgatgacagtgcctcaccgtaagtc

SEQ ID NO: 252870 - DNA, 30 bp, Artificial Sequence
  Synthetic oligonucleotide
ccaaatggggtggtaagttctcgttaagtc

SEQ ID NO: 252871 - DNA, 30 bp, Artificial Sequence
  Synthetic oligonucleotide
gtggcgaggggtagaggagtaccgacagtc

SEQ ID NO: 252872 - DNA, 30 bp, Artificial Sequence
  Synthetic oligonucleotide
aagcatttaagtcccacgcgaaatacagtc

SEQ ID NO: 252873 - DNA, 30 bp, Artificial Sequence
  Synthetic oligonucleotide
gaaagaaggcggttcggcgatagtacagtc

SEQ ID NO: 252874 - DNA, 30 bp, Artificial Sequence
  Synthetic oligonucleotide
gtcgtgagtaacgggttgttaattacagtc

SEQ ID NO: 252875 - DNA, 30 bp, Artificial Sequence
  Synthetic oligonucleotide
tcacgatctctggctgcgaaggcaccagtc

SEQ ID NO: 252876 - DNA, 30 bp, Artificial Sequence
  Synthetic oligonucleotide
gctaggatagtcactaccaaaagaccagtc

SEQ ID NO: 252877 - DNA, 30 bp, Artificial Sequence
  Synthetic oligonucleotide
tgcttccgaagttttgatgtgaccccagtc

SEQ ID NO: 252878 - DNA, 30 bp, Artificial Sequence
  Synthetic oligonucleotide
tgtcaataaaataattctggaccgccagtc

SEQ ID NO: 252879 - DNA, 30 bp, Artificial Sequence
  Synthetic oligonucleotide
gggaatgtggtagcctgcattgcagcagtc

SEQ ID NO: 252880 - DNA, 30 bp, Artificial Sequence
  Synthetic oligonucleotide
gcgtatacaaatggccggcaatccgcagtc

SEQ ID NO: 252881 - DNA, 30 bp, Artificial Sequence
  Synthetic oligonucleotide
ctgccaaggtttagacagcgaggtgcagtc

SEQ ID NO: 252882 - DNA, 30 bp, Artificial Sequence
  Synthetic oligonucleotide
gagattgaggtatccaagaatatatcagtc

SEQ ID NO: 252883 - DNA, 29 bp, Artificial Sequence
  Synthetic oligonucleotide
cagaaaacggtgggctggcctgctcagtc

SEQ ID NO: 252884 - DNA, 30 bp, Artificial Sequence
  Synthetic oligonucleotide
ttatgtggtcccgaggtcacgagttcagtc

SEQ ID NO: 252885 - DNA, 30 bp, Artificial Sequence
  Synthetic oligonucleotide
tgcaaggctgtagggacaggtctttcagtc

SEQ ID NO: 252886 - DNA, 30 bp, Artificial Sequence
  Synthetic oligonucleotide
aaagaggttttgtccttagagtacagagtc

SEQ ID NO: 252887 - DNA, 30 bp, Artificial Sequence
  Synthetic oligonucleotide
aggtgtgcgcaagtattggaactgagagtc

SEQ ID NO: 252888 - DNA, 30 bp, Artificial Sequence
  Synthetic oligonucleotide
tggcgtgatttctttccacccaaacgagtc

SEQ ID NO: 252889 - DNA, 30 bp, Artificial Sequence
  Synthetic oligonucleotide
atagcgagggacgacggtgcgagacgagtc

SEQ ID NO: 252890 - DNA, 30 bp, Artificial Sequence
  Synthetic oligonucleotide
tgccatcctgttgagaaatataggcgagtc

SEQ ID NO: 252891 - DNA, 30 bp, Artificial Sequence
  Synthetic oligonucleotide
tcggtgttggagtaattcccttatcgagtc

SEQ ID NO: 252892 - DNA, 30 bp, Artificial Sequence
  Synthetic oligonucleotide
agaagcattcgcggatgggatgttcgagtc

SEQ ID NO: 252893 - DNA, 30 bp, Artificial Sequence
  Synthetic oligonucleotide
tcgcctcttcaagaggggtactaaggagtc

SEQ ID NO: 252894 - DNA, 30 bp, Artificial Sequence
  Synthetic oligonucleotide
caagcgaaggtgcttgaacgacacggagtc

SEQ ID NO: 252895 - DNA, 30 bp, Artificial Sequence
  Synthetic oligonucleotide
aatttaacgtcctcaactggaagcggagtc

SEQ ID NO: 252896 - DNA, 30 bp, Artificial Sequence
  Synthetic oligonucleotide
ctaacatgattcgaaatcccatttggagtc

SEQ ID NO: 252897 - DNA, 30 bp, Artificial Sequence
  Synthetic oligonucleotide
ggatcatgacctaatgcgtaaccatgagtc

SEQ ID NO: 252898 - DNA, 30 bp, Artificial Sequence
  Synthetic oligonucleotide
tatgtaatgtggcctaattgctgatgagtc

SEQ ID NO: 252899 - DNA, 30 bp, Artificial Sequence
  Synthetic oligonucleotide
aatcagtctacggcctctcggcagtgagtc

SEQ ID NO: 252900 - DNA, 30 bp, Artificial Sequence
  Synthetic oligonucleotide
aatgacggcctatcagatatagggtgagtc

SEQ ID NO: 252901 - DNA, 30 bp, Artificial Sequence
  Synthetic oligonucleotide
cgtttcgttcttaggggatgaaaaatagtc

SEQ ID NO: 252902 - DNA, 30 bp, Artificial Sequence
  Synthetic oligonucleotide
cgtctatgtacttagttatgataaatagtc

SEQ ID NO: 252903 - DNA, 30 bp, Artificial Sequence
  Synthetic oligonucleotide
atcggttggcattactgcctataaatagtc

SEQ ID NO: 252904 - DNA, 30 bp, Artificial Sequence
  Synthetic oligonucleotide
gatcccccaagataagttaagataatagtc

SEQ ID NO: 252905 - DNA, 30 bp, Artificial Sequence
  Synthetic oligonucleotide
acatgctggacgcgtgaaaactacatagtc

SEQ ID NO: 252906 - DNA, 30 bp, Artificial Sequence
  Synthetic oligonucleotide
gagctagataaaagaaatgctaaactagtc

SEQ ID NO: 252907 - DNA, 30 bp, Artificial Sequence
  Synthetic oligonucleotide
gacatgctggcacatcctggagagctagtc

SEQ ID NO: 252908 - DNA, 30 bp, Artificial Sequence
  Synthetic oligonucleotide
ttatgatgagtcatacttgttgtagtagtc

SEQ ID NO: 252909 - DNA, 30 bp, Artificial Sequence
  Synthetic oligonucleotide
cggcgttttaagcgttaggaagacgtagtc

SEQ ID NO: 252910 - DNA, 30 bp, Artificial Sequence
  Synthetic oligonucleotide
gaaacggtcacctgggctaatatggtagtc

SEQ ID NO: 252911 - DNA, 30 bp, Artificial Sequence
  Synthetic oligonucleotide
gcacggttcgtattgtaggtgctggtagtc

SEQ ID NO: 252912 - DNA, 30 bp, Artificial Sequence
  Synthetic oligonucleotide
aaagtcataaaagcgagtggacatgtagtc

SEQ ID NO: 252913 - DNA, 30 bp, Artificial Sequence
  Synthetic oligonucleotide
gtaaatgttgaatatcgattccgtgtagtc

SEQ ID NO: 252914 - DNA, 30 bp, Artificial Sequence
  Synthetic oligonucleotide
tgtaacgctatagggttaagctttgtagtc

SEQ ID NO: 252915 - DNA, 30 bp, Artificial Sequence
  Synthetic oligonucleotide
aagctgtggagtcgatacctgtatttagtc

SEQ ID NO: 252916 - DNA, 30 bp, Artificial Sequence
  Synthetic oligonucleotide
tagacatgcggaaaccatccggtaaacgtc

SEQ ID NO: 252917 - DNA, 30 bp, Artificial Sequence
  Synthetic oligonucleotide
caatgggagaacgaacgtcaaacgaacgtc

SEQ ID NO: 252918 - DNA, 30 bp, Artificial Sequence
  Synthetic oligonucleotide
gtttcatgccggaacttcgtgaataacgtc

SEQ ID NO: 252919 - DNA, 30 bp, Artificial Sequence
  Synthetic oligonucleotide
tgcagactattatgaatatgacgccacgtc

SEQ ID NO: 252920 - DNA, 30 bp, Artificial Sequence
  Synthetic oligonucleotide
tcctttacataatcgaaggtgtagcacgtc

SEQ ID NO: 252921 - DNA, 30 bp, Artificial Sequence
  Synthetic oligonucleotide
gtcggacgtcaagagattaatcggcacgtc

SEQ ID NO: 252922 - DNA, 30 bp, Artificial Sequence
  Synthetic oligonucleotide
agactacttgatcctctggtggaagacgtc

SEQ ID NO: 252923 - DNA, 30 bp, Artificial Sequence
  Synthetic oligonucleotide
gtgcacagcggtgccccattaatcgacgtc

SEQ ID NO: 252924 - DNA, 30 bp, Artificial Sequence
  Synthetic oligonucleotide
tatctccacggtattcaccattcggacgtc

SEQ ID NO: 252925 - DNA, 30 bp, Artificial Sequence
  Synthetic oligonucleotide
cacgctatccgttcgcgccgcctggacgtc

SEQ ID NO: 252926 - DNA, 30 bp, Artificial Sequence
  Synthetic oligonucleotide
ggtgcgaaatggcgtttgcggaatgacgtc

SEQ ID NO: 252927 - DNA, 30 bp, Artificial Sequence
  Synthetic oligonucleotide
cgcagacccgagtccatgactagtgacgtc

SEQ ID NO: 252928 - DNA, 30 bp, Artificial Sequence
  Synthetic oligonucleotide
taaaagtacttcccttcgagtattgacgtc

SEQ ID NO: 252929 - DNA, 30 bp, Artificial Sequence
  Synthetic oligonucleotide
gacgagcgtcgcggagcggcggttgacgtc

SEQ ID NO: 252930 - DNA, 30 bp, Artificial Sequence
  Synthetic oligonucleotide
ccgagtaagcggtcccaagtcatgtacgtc

SEQ ID NO: 252931 - DNA, 30 bp, Artificial Sequence
  Synthetic oligonucleotide
tgttactgagggaactgtggcatttacgtc

SEQ ID NO: 252932 - DNA, 30 bp, Artificial Sequence
  Synthetic oligonucleotide
accacagtgggcggctatcgtctttacgtc

SEQ ID NO: 252933 - DNA, 30 bp, Artificial Sequence
  Synthetic oligonucleotide
tatattgctgtttcaagggggcaaaccgtc

SEQ ID NO: 252934 - DNA, 30 bp, Artificial Sequence
  Synthetic oligonucleotide
tctataaccaaagagtgtaaataaaccgtc

SEQ ID NO: 252935 - DNA, 30 bp, Artificial Sequence
  Synthetic oligonucleotide
gcgtaaacattcgtttgggcaggcaccgtc

SEQ ID NO: 252936 - DNA, 30 bp, Artificial Sequence
  Synthetic oligonucleotide
gcgtatggggtctttcccgcgtggaccgtc

SEQ ID NO: 252937 - DNA, 30 bp, Artificial Sequence
  Synthetic oligonucleotide
atcaaaatggaactatcgtctatgaccgtc

SEQ ID NO: 252938 - DNA, 30 bp, Artificial Sequence
  Synthetic oligonucleotide
tcacatccatcgcggataggcttacccgtc

SEQ ID NO: 252939 - DNA, 30 bp, Artificial Sequence
  Synthetic oligonucleotide
tcctccttttccctggagtacaaccccgtc

SEQ ID NO: 252940 - DNA, 30 bp, Artificial Sequence
  Synthetic oligonucleotide
gttcggcagaggaccgttgtgcgccccgtc

SEQ ID NO: 252941 - DNA, 30 bp, Artificial Sequence
  Synthetic oligonucleotide
agtatagctcgtcatggacaattccccgtc

SEQ ID NO: 252942 - DNA, 30 bp, Artificial Sequence
  Synthetic oligonucleotide
gagtgcgagtagtccactaagttccccgtc

SEQ ID NO: 252943 - DNA, 30 bp, Artificial Sequence
  Synthetic oligonucleotide
tttacggccagatcaggtcaaccgcccgtc

SEQ ID NO: 252944 - DNA, 30 bp, Artificial Sequence
  Synthetic oligonucleotide
gaaacactattgccacgtccagtgcccgtc

SEQ ID NO: 252945 - DNA, 30 bp, Artificial Sequence
  Synthetic oligonucleotide
agatcatagggcagagtgataagagccgtc

SEQ ID NO: 252946 - DNA, 30 bp, Artificial Sequence
  Synthetic oligonucleotide
gttccggtatatactgagcgagacgccgtc

SEQ ID NO: 252947 - DNA, 30 bp, Artificial Sequence
  Synthetic oligonucleotide
cacggaaagttacctgaaagtgtggccgtc

SEQ ID NO: 252948 - DNA, 30 bp, Artificial Sequence
  Synthetic oligonucleotide
gattgcgattgattaacaggtgaatccgtc

SEQ ID NO: 252949 - DNA, 30 bp, Artificial Sequence
  Synthetic oligonucleotide
aaaacccctgcgattgcacacacatccgtc

SEQ ID NO: 252950 - DNA, 30 bp, Artificial Sequence
  Synthetic oligonucleotide
agttctcagcaggatcttatagtatccgtc

SEQ ID NO: 252951 - DNA, 30 bp, Artificial Sequence
  Synthetic oligonucleotide
gtaccacaaggtttcttctcccactccgtc

SEQ ID NO: 252952 - DNA, 30 bp, Artificial Sequence
  Synthetic oligonucleotide
tataaagtccaggacgactgagattccgtc

SEQ ID NO: 252953 - DNA, 30 bp, Artificial Sequence
  Synthetic oligonucleotide
ggctgggtaccggtagctctatcaagcgtc

SEQ ID NO: 252954 - DNA, 30 bp, Artificial Sequence
  Synthetic oligonucleotide
tggttatgcgtggggagaagtcccagcgtc

SEQ ID NO: 252955 - DNA, 30 bp, Artificial Sequence
  Synthetic oligonucleotide
cggacagtgaacacacatggattcagcgtc

SEQ ID NO: 252956 - DNA, 30 bp, Artificial Sequence
  Synthetic oligonucleotide
tgggacgggactgaagctctaactagcgtc

SEQ ID NO: 252957 - DNA, 30 bp, Artificial Sequence
  Synthetic oligonucleotide
acatgatttgcacctgactccagtagcgtc

SEQ ID NO: 252958 - DNA, 30 bp, Artificial Sequence
  Synthetic oligonucleotide
agaacgtttgagagcaatagccttagcgtc

SEQ ID NO: 252959 - DNA, 30 bp, Artificial Sequence
  Synthetic oligonucleotide
atgctgattttgtgtgcatgctaacgcgtc

SEQ ID NO: 252960 - DNA, 30 bp, Artificial Sequence
  Synthetic oligonucleotide
ccgagacgtcgaaaggttgccgcacgcgtc

SEQ ID NO: 252961 - DNA, 30 bp, Artificial Sequence
  Synthetic oligonucleotide
gtcaagccccacgactgaagccgacgcgtc

SEQ ID NO: 252962 - DNA, 30 bp, Artificial Sequence
  Synthetic oligonucleotide
gtcgcgggaagatcgtatgaagcccgcgtc

SEQ ID NO: 252963 - DNA, 31 bp, Artificial Sequence
  Synthetic oligonucleotide
tctccagtaaggagcaggcttacatcgcgtc

SEQ ID NO: 252964 - DNA, 30 bp, Artificial Sequence
  Synthetic oligonucleotide
tgaatccatacgtaccgccttgtcggcgtc

SEQ ID NO: 252965 - DNA, 30 bp, Artificial Sequence
  Synthetic oligonucleotide
ccttggcgacgggtccgtaggccgggcgtc

SEQ ID NO: 252966 - DNA, 30 bp, Artificial Sequence
  Synthetic oligonucleotide
acgcatcgggaacgccgagcgatatgcgtc

SEQ ID NO: 252967 - DNA, 30 bp, Artificial Sequence
  Synthetic oligonucleotide
cggatgctagcgcttcttagtccgtgcgtc

SEQ ID NO: 252968 - DNA, 30 bp, Artificial Sequence
  Synthetic oligonucleotide
tgatgctgacatctgatcaaacaaatcgtc

SEQ ID NO: 252969 - DNA, 30 bp, Artificial Sequence
  Synthetic oligonucleotide
ttggacctcacgaatgacagacccatcgtc

SEQ ID NO: 252970 - DNA, 30 bp, Artificial Sequence
  Synthetic oligonucleotide
gcatccctattccaatggccggcgatcgtc

SEQ ID NO: 252971 - DNA, 30 bp, Artificial Sequence
  Synthetic oligonucleotide
tgaaaaaactatgcacggcaataactcgtc

SEQ ID NO: 252972 - DNA, 30 bp, Artificial Sequence
  Synthetic oligonucleotide
tttatgaaaatcctgactgttcgactcgtc

SEQ ID NO: 252973 - DNA, 30 bp, Artificial Sequence
  Synthetic oligonucleotide
tactggtccttatactgtccatgactcgtc

SEQ ID NO: 252974 - DNA, 30 bp, Artificial Sequence
  Synthetic oligonucleotide
aatatttcgaccgtctggcataacctcgtc

SEQ ID NO: 252975 - DNA, 30 bp, Artificial Sequence
  Synthetic oligonucleotide
ccggatgttccgcaacgagcgtaagtcgtc

SEQ ID NO: 252976 - DNA, 30 bp, Artificial Sequence
  Synthetic oligonucleotide
agattccatcgaggttttcgtgacgtcgtc

SEQ ID NO: 252977 - DNA, 30 bp, Artificial Sequence
  Synthetic oligonucleotide
tcctcgactaccagctcagttgaattcgtc

SEQ ID NO: 252978 - DNA, 29 bp, Artificial Sequence
  Synthetic oligonucleotide
tgtactcatgcaaacacccggtattcgtc

SEQ ID NO: 252979 - DNA, 30 bp, Artificial Sequence
  Synthetic oligonucleotide
ctaagggccgaccaacatatattcttcgtc

SEQ ID NO: 252980 - DNA, 30 bp, Artificial Sequence
  Synthetic oligonucleotide
acaagacgtcatatttgagaggatttcgtc

SEQ ID NO: 252981 - DNA, 30 bp, Artificial Sequence
  Synthetic oligonucleotide
ttacgtgtataacgtttcgcttctttcgtc

SEQ ID NO: 252982 - DNA, 30 bp, Artificial Sequence
  Synthetic oligonucleotide
gacgactggcactaagcatgataaaaggtc

SEQ ID NO: 252983 - DNA, 30 bp, Artificial Sequence
  Synthetic oligonucleotide
aaactaaagggtaagcttaagacaaaggtc

SEQ ID NO: 252984 - DNA, 30 bp, Artificial Sequence
  Synthetic oligonucleotide
gcgggcctagggccaacctacccaaaggtc

SEQ ID NO: 252985 - DNA, 30 bp, Artificial Sequence
  Synthetic oligonucleotide
ggctcttcatgtcaagaaaggaggaaggtc

SEQ ID NO: 252986 - DNA, 30 bp, Artificial Sequence
  Synthetic oligonucleotide
cttgccgcgacattgggcagactgaaggtc

SEQ ID NO: 252987 - DNA, 30 bp, Artificial Sequence
  Synthetic oligonucleotide
ggcagaactattttacgtcggcataaggtc

SEQ ID NO: 252988 - DNA, 30 bp, Artificial Sequence
  Synthetic oligonucleotide
tcccattgcgaagttaaaaacggtaaggtc

SEQ ID NO: 252989 - DNA, 30 bp, Artificial Sequence
  Synthetic oligonucleotide
gtcagaaaacgaggtacggtccgtcaggtc

SEQ ID NO: 252990 - DNA, 30 bp, Artificial Sequence
  Synthetic oligonucleotide
ctctcgctgaactcaacgtgcggcgaggtc

SEQ ID NO: 252991 - DNA, 30 bp, Artificial Sequence
  Synthetic oligonucleotide
accactgcttgctttagagggagggaggtc

SEQ ID NO: 252992 - DNA, 30 bp, Artificial Sequence
  Synthetic oligonucleotide
acaatcggatcggtactgaagctggaggtc

SEQ ID NO: 252993 - DNA, 30 bp, Artificial Sequence
  Synthetic oligonucleotide
atgttcccatgttagcgtcgtgtggaggtc

SEQ ID NO: 252994 - DNA, 30 bp, Artificial Sequence
  Synthetic oligonucleotide
acgttatcattgaactgactaagtgaggtc

SEQ ID NO: 252995 - DNA, 30 bp, Artificial Sequence
  Synthetic oligonucleotide
catagcgaatgtccttggtataattaggtc

SEQ ID NO: 252996 - DNA, 30 bp, Artificial Sequence
  Synthetic oligonucleotide
tgctaaaaaagggtacggtccgattaggtc

SEQ ID NO: 252997 - DNA, 30 bp, Artificial Sequence
  Synthetic oligonucleotide
cggtcacacacctttctgtaatattaggtc

SEQ ID NO: 252998 - DNA, 30 bp, Artificial Sequence
  Synthetic oligonucleotide
agcaccggatcccatgcggtaatttaggtc

SEQ ID NO: 252999 - DNA, 30 bp, Artificial Sequence
  Synthetic oligonucleotide
cacaggatagaggaaccttttctttaggtc

SEQ ID NO: 253000 - DNA, 30 bp, Artificial Sequence
  Synthetic oligonucleotide
aggtttaggcgtctaacgagcgtttaggtc

SEQ ID NO: 253001 - DNA, 30 bp, Artificial Sequence
  Synthetic oligonucleotide
gggtttgcagctttgaaatagagaacggtc

SEQ ID NO: 253002 - DNA, 30 bp, Artificial Sequence
  Synthetic oligonucleotide
cattttctagggcgagatctaaccacggtc

SEQ ID NO: 253003 - DNA, 30 bp, Artificial Sequence
  Synthetic oligonucleotide
taaaaaaatggcgcatagtggggcacggtc

SEQ ID NO: 253004 - DNA, 30 bp, Artificial Sequence
  Synthetic oligonucleotide
ccgcgaatatgtcctgggtagtcgacggtc

SEQ ID NO: 253005 - DNA, 30 bp, Artificial Sequence
  Synthetic oligonucleotide
taagcgtaaggcgggccaaaagctacggtc

SEQ ID NO: 253006 - DNA, 30 bp, Artificial Sequence
  Synthetic oligonucleotide
tagcaccgctacaataagaccggtacggtc

SEQ ID NO: 253007 - DNA, 30 bp, Artificial Sequence
  Synthetic oligonucleotide
cgagtttcttgtaaacatatctcgccggtc

SEQ ID NO: 253008 - DNA, 30 bp, Artificial Sequence
  Synthetic oligonucleotide
attgaggataccaaaatcgacgtagcggtc

SEQ ID NO: 253009 - DNA, 30 bp, Artificial Sequence
  Synthetic oligonucleotide
aatagtaggcgcggacgggtgtgcgcggtc

SEQ ID NO: 253010 - DNA, 30 bp, Artificial Sequence
  Synthetic oligonucleotide
agccgattagccgcaactcgggtcgcggtc

SEQ ID NO: 253011 - DNA, 30 bp, Artificial Sequence
  Synthetic oligonucleotide
aagatccgtcaaacgtcagcataggcggtc

SEQ ID NO: 253012 - DNA, 30 bp, Artificial Sequence
  Synthetic oligonucleotide
cacgggtatataatcaataggcgggcggtc

SEQ ID NO: 253013 - DNA, 30 bp, Artificial Sequence
  Synthetic oligonucleotide
ctgtcaatagtaagcaatcaaactgcggtc

SEQ ID NO: 253014 - DNA, 30 bp, Artificial Sequence
  Synthetic oligonucleotide
gttagttctaggtgctatgttgcctcggtc

SEQ ID NO: 253015 - DNA, 30 bp, Artificial Sequence
  Synthetic oligonucleotide
ttgattaggcgatcaagtaaaatctcggtc

SEQ ID NO: 253016 - DNA, 30 bp, Artificial Sequence
  Synthetic oligonucleotide
ccgataaaccacgcatcctagcaaagggtc

SEQ ID NO: 253017 - DNA, 30 bp, Artificial Sequence
  Synthetic oligonucleotide
ctggctctcgaacatactgggcgaagggtc

SEQ ID NO: 253018 - DNA, 30 bp, Artificial Sequence
  Synthetic oligonucleotide
gcttacaggcggtagtggtataggagggtc

SEQ ID NO: 253019 - DNA, 30 bp, Artificial Sequence
  Synthetic oligonucleotide
tggacttcagaaggattcatcaatagggtc

SEQ ID NO: 253020 - DNA, 30 bp, Artificial Sequence
  Synthetic oligonucleotide
atgggcgcgccccagtgggttcctagggtc

SEQ ID NO: 253021 - DNA, 30 bp, Artificial Sequence
  Synthetic oligonucleotide
gtggctcaaccagcgcgcagaagtagggtc

SEQ ID NO: 253022 - DNA, 30 bp, Artificial Sequence
  Synthetic oligonucleotide
ggaaaaatggggtgaatacatatacgggtc

SEQ ID NO: 253023 - DNA, 30 bp, Artificial Sequence
  Synthetic oligonucleotide
acatttcgccgccccaggagatcccgggtc

SEQ ID NO: 253024 - DNA, 30 bp, Artificial Sequence
  Synthetic oligonucleotide
gatgggactcagatggcgcgaagccgggtc

SEQ ID NO: 253025 - DNA, 30 bp, Artificial Sequence
  Synthetic oligonucleotide
ttcaagggtctatctgatttctgaggggtc

SEQ ID NO: 253026 - DNA, 30 bp, Artificial Sequence
  Synthetic oligonucleotide
gtcgggacgccgtcagggctagtcggggtc

SEQ ID NO: 253027 - DNA, 30 bp, Artificial Sequence
  Synthetic oligonucleotide
ttgcctcacacaatcacaagctagggggtc

SEQ ID NO: 253028 - DNA, 30 bp, Artificial Sequence
  Synthetic oligonucleotide
cacttctggcgtaatggcatcaatggggtc

SEQ ID NO: 253029 - DNA, 30 bp, Artificial Sequence
  Synthetic oligonucleotide
gctgaaacggtcttcggcagagatggggtc

SEQ ID NO: 253030 - DNA, 30 bp, Artificial Sequence
  Synthetic oligonucleotide
acattaagccgatatcgtacgcgtggggtc

SEQ ID NO: 253031 - DNA, 30 bp, Artificial Sequence
  Synthetic oligonucleotide
taaacgaagagcgtcttataaaaatgggtc

SEQ ID NO: 253032 - DNA, 30 bp, Artificial Sequence
  Synthetic oligonucleotide
cggacactgactggtgcttatttgtgggtc

SEQ ID NO: 253033 - DNA, 30 bp, Artificial Sequence
  Synthetic oligonucleotide
cgctcttgtcaaagtgatagaatttgggtc

SEQ ID NO: 253034 - DNA, 30 bp, Artificial Sequence
  Synthetic oligonucleotide
agattttgcacccggggagtggaaatggtc

SEQ ID NO: 253035 - DNA, 30 bp, Artificial Sequence
  Synthetic oligonucleotide
gcgacggcggggacgggaacatgcatggtc

SEQ ID NO: 253036 - DNA, 30 bp, Artificial Sequence
  Synthetic oligonucleotide
gcgtgaaaacgctcagagcctactatggtc

SEQ ID NO: 253037 - DNA, 30 bp, Artificial Sequence
  Synthetic oligonucleotide
cgtgtataaggccttgccgggattatggtc

SEQ ID NO: 253038 - DNA, 30 bp, Artificial Sequence
  Synthetic oligonucleotide
tgaaaagcgacacgtctatgtcaactggtc

SEQ ID NO: 253039 - DNA, 30 bp, Artificial Sequence
  Synthetic oligonucleotide
taatgcgagagctagccccattcactggtc

SEQ ID NO: 253040 - DNA, 30 bp, Artificial Sequence
  Synthetic oligonucleotide
tacgcctcaaaagccgaggatgcagtggtc

SEQ ID NO: 253041 - DNA, 30 bp, Artificial Sequence
  Synthetic oligonucleotide
ccacagccgggcatacaggggaccgtggtc

SEQ ID NO: 253042 - DNA, 30 bp, Artificial Sequence
  Synthetic oligonucleotide
ggactgtggttagtgttacttttcgtggtc

SEQ ID NO: 253043 - DNA, 30 bp, Artificial Sequence
  Synthetic oligonucleotide
ccccgcgtcgtctgtgcttgagaggtggtc

SEQ ID NO: 253044 - DNA, 30 bp, Artificial Sequence
  Synthetic oligonucleotide
gttactgcttgggggcatgtgccattggtc

SEQ ID NO: 253045 - DNA, 30 bp, Artificial Sequence
  Synthetic oligonucleotide
cgagtgacacgcaaaattgccatattggtc

SEQ ID NO: 253046 - DNA, 30 bp, Artificial Sequence
  Synthetic oligonucleotide
cttactcgacgaaaaaggaggatgttggtc

SEQ ID NO: 253047 - DNA, 30 bp, Artificial Sequence
  Synthetic oligonucleotide
tcaaaaagatcttctcaggtagtgttggtc

SEQ ID NO: 253048 - DNA, 30 bp, Artificial Sequence
  Synthetic oligonucleotide
aaaggactcggaaaaccaccatatttggtc

SEQ ID NO: 253049 - DNA, 30 bp, Artificial Sequence
  Synthetic oligonucleotide
acactagaacgaggttaacggcctttggtc

SEQ ID NO: 253050 - DNA, 30 bp, Artificial Sequence
  Synthetic oligonucleotide
atagaagcccgtaggttatcgaataatgtc

SEQ ID NO: 253051 - DNA, 30 bp, Artificial Sequence
  Synthetic oligonucleotide
ggtcttagcacccagagggcgggacatgtc

SEQ ID NO: 253052 - DNA, 30 bp, Artificial Sequence
  Synthetic oligonucleotide
gtttgatcggcggcccggtgatttcatgtc

SEQ ID NO: 253053 - DNA, 30 bp, Artificial Sequence
  Synthetic oligonucleotide
gaggaccgcctagagcccggaaaagatgtc

SEQ ID NO: 253054 - DNA, 30 bp, Artificial Sequence
  Synthetic oligonucleotide
ctacactggaaaaacaatccgtaagatgtc

SEQ ID NO: 253055 - DNA, 30 bp, Artificial Sequence
  Synthetic oligonucleotide
ataaaatccggaaagaagcgcggagatgtc

SEQ ID NO: 253056 - DNA, 30 bp, Artificial Sequence
  Synthetic oligonucleotide
ctcggaacagagctctgtgatccggatgtc

SEQ ID NO: 253057 - DNA, 30 bp, Artificial Sequence
  Synthetic oligonucleotide
ctagatacacgtacgcgtgaggctgatgtc

SEQ ID NO: 253058 - DNA, 30 bp, Artificial Sequence
  Synthetic oligonucleotide
aatcatgatcgtaccgttttgggtgatgtc

SEQ ID NO: 253059 - DNA, 30 bp, Artificial Sequence
  Synthetic oligonucleotide
ggagatgcaagccatttatactgtgatgtc

SEQ ID NO: 253060 - DNA, 30 bp, Artificial Sequence
  Synthetic oligonucleotide
ctggcgtgaggcacggccttgtgtgatgtc

SEQ ID NO: 253061 - DNA, 30 bp, Artificial Sequence
  Synthetic oligonucleotide
aggacgtaaccgatggtcatggaatatgtc

SEQ ID NO: 253062 - DNA, 30 bp, Artificial Sequence
  Synthetic oligonucleotide
atcggaaagaggcgtcttgttagatatgtc

SEQ ID NO: 253063 - DNA, 30 bp, Artificial Sequence
  Synthetic oligonucleotide
atagccagtgggaagcagtgcggatatgtc

SEQ ID NO: 253064 - DNA, 30 bp, Artificial Sequence
  Synthetic oligonucleotide
cagatttcggtagaaaacgatagttatgtc

SEQ ID NO: 253065 - DNA, 30 bp, Artificial Sequence
  Synthetic oligonucleotide
gcgatactgaagcattgatagcgaactgtc

SEQ ID NO: 253066 - DNA, 30 bp, Artificial Sequence
  Synthetic oligonucleotide
ccctgacatgctcaaagcacatacactgtc

SEQ ID NO: 253067 - DNA, 30 bp, Artificial Sequence
  Synthetic oligonucleotide
acacttcaactctacctcgcagccactgtc

SEQ ID NO: 253068 - DNA, 30 bp, Artificial Sequence
  Synthetic oligonucleotide
agatcagtgtctttccacgcaatcactgtc

SEQ ID NO: 253069 - DNA, 30 bp, Artificial Sequence
  Synthetic oligonucleotide
ggagaaacgtttccagtcttatagactgtc

SEQ ID NO: 253070 - DNA, 30 bp, Artificial Sequence
  Synthetic oligonucleotide
catatgcaacacttcttgtggaatactgtc

SEQ ID NO: 253071 - DNA, 30 bp, Artificial Sequence
  Synthetic oligonucleotide
ttgctcttcccatgactgtggggtactgtc

SEQ ID NO: 253072 - DNA, 30 bp, Artificial Sequence
  Synthetic oligonucleotide
ctgctttcatggtaaacctatgctcctgtc

SEQ ID NO: 253073 - DNA, 30 bp, Artificial Sequence
  Synthetic oligonucleotide
taaaagcggtgtctccaaccatcagctgtc

SEQ ID NO: 253074 - DNA, 30 bp, Artificial Sequence
  Synthetic oligonucleotide
attaccgttcatttgacggagggcgctgtc

SEQ ID NO: 253075 - DNA, 30 bp, Artificial Sequence
  Synthetic oligonucleotide
cccgacttaaggcctatacttcaggctgtc

SEQ ID NO: 253076 - DNA, 30 bp, Artificial Sequence
  Synthetic oligonucleotide
actcgcaggattaggcggaaaagggctgtc

SEQ ID NO: 253077 - DNA, 30 bp, Artificial Sequence
  Synthetic oligonucleotide
ggtctgcgatctgtcgacgtcagggctgtc

SEQ ID NO: 253078 - DNA, 30 bp, Artificial Sequence
  Synthetic oligonucleotide
tgcagataagcttcagagataatggctgtc

SEQ ID NO: 253079 - DNA, 30 bp, Artificial Sequence
  Synthetic oligonucleotide
tagtgagctaccaggagacgggatgctgtc

SEQ ID NO: 253080 - DNA, 30 bp, Artificial Sequence
  Synthetic oligonucleotide
taccgtcacgctcggtgggacagatctgtc

SEQ ID NO: 253081 - DNA, 30 bp, Artificial Sequence
  Synthetic oligonucleotide
aaggaatgtaggatgaagtccgactctgtc

SEQ ID NO: 253082 - DNA, 30 bp, Artificial Sequence
  Synthetic oligonucleotide
agggggtggatttggttcgtttcctctgtc

SEQ ID NO: 253083 - DNA, 30 bp, Artificial Sequence
  Synthetic oligonucleotide
agctacgaagcgtgcggtcatgacagtgtc

SEQ ID NO: 253084 - DNA, 30 bp, Artificial Sequence
  Synthetic oligonucleotide
ttaagtaagcagctagtttggagcagtgtc

SEQ ID NO: 253085 - DNA, 30 bp, Artificial Sequence
  Synthetic oligonucleotide
gaacgccctcagatggtgatgtcgagtgtc

SEQ ID NO: 253086 - DNA, 30 bp, Artificial Sequence
  Synthetic oligonucleotide
cttgcattggggtggccggaaaggagtgtc

SEQ ID NO: 253087 - DNA, 30 bp, Artificial Sequence
  Synthetic oligonucleotide
gcgataaaccaaactatactgattagtgtc

SEQ ID NO: 253088 - DNA, 30 bp, Artificial Sequence
  Synthetic oligonucleotide
tagaataaagcgcgttagcttatgcgtgtc

SEQ ID NO: 253089 - DNA, 30 bp, Artificial Sequence
  Synthetic oligonucleotide
aggcagagatcccttgtcgaccatcgtgtc

SEQ ID NO: 253090 - DNA, 30 bp, Artificial Sequence
  Synthetic oligonucleotide
acacagaatttgttgttagagctaggtgtc

SEQ ID NO: 253091 - DNA, 30 bp, Artificial Sequence
  Synthetic oligonucleotide
tgcgacggaacggtgggtgatctaggtgtc

SEQ ID NO: 253092 - DNA, 30 bp, Artificial Sequence
  Synthetic oligonucleotide
cgttcatttgcggagattcggggatgtgtc

SEQ ID NO: 253093 - DNA, 30 bp, Artificial Sequence
  Synthetic oligonucleotide
tagtaagggttcacgttcagtttatgtgtc

SEQ ID NO: 253094 - DNA, 30 bp, Artificial Sequence
  Synthetic oligonucleotide
cggcttgtggttctccggtgtatgtgtgtc

SEQ ID NO: 253095 - DNA, 30 bp, Artificial Sequence
  Synthetic oligonucleotide
gcgttagtgataagtgtataggcttgtgtc

SEQ ID NO: 253096 - DNA, 30 bp, Artificial Sequence
  Synthetic oligonucleotide
aactgagatcccgatgagttgttcattgtc

SEQ ID NO: 253097 - DNA, 30 bp, Artificial Sequence
  Synthetic oligonucleotide
cattatgcaagaacctggaggacgattgtc

SEQ ID NO: 253098 - DNA, 30 bp, Artificial Sequence
  Synthetic oligonucleotide
gaagtgttagagcgacaacaaccgattgtc

SEQ ID NO: 253099 - DNA, 30 bp, Artificial Sequence
  Synthetic oligonucleotide
cataagactagccagtccgtgggtattgtc

SEQ ID NO: 253100 - DNA, 30 bp, Artificial Sequence
  Synthetic oligonucleotide
tcaggtagtcagtgatattatcttattgtc

SEQ ID NO: 253101 - DNA, 30 bp, Artificial Sequence
  Synthetic oligonucleotide
ggcattaaagaatggcccgaaaaccttgtc

SEQ ID NO: 253102 - DNA, 30 bp, Artificial Sequence
  Synthetic oligonucleotide
gtaacagcacaggcaatcttacaccttgtc

SEQ ID NO: 253103 - DNA, 30 bp, Artificial Sequence
  Synthetic oligonucleotide
tgtgaaaaccttagaagaatagaccttgtc

SEQ ID NO: 253104 - DNA, 30 bp, Artificial Sequence
  Synthetic oligonucleotide
gattaagagcgtagtgtatgaatccttgtc

SEQ ID NO: 253105 - DNA, 30 bp, Artificial Sequence
  Synthetic oligonucleotide
aacatctcgaaagctcttgtctagcttgtc

SEQ ID NO: 253106 - DNA, 30 bp, Artificial Sequence
  Synthetic oligonucleotide
gtggtaacagcaactctatgagcgcttgtc

SEQ ID NO: 253107 - DNA, 30 bp, Artificial Sequence
  Synthetic oligonucleotide
ccacgcttgtgttaagacaacgcgcttgtc

SEQ ID NO: 253108 - DNA, 30 bp, Artificial Sequence
  Synthetic oligonucleotide
agaatcaagcgtttagttaaggggcttgtc

SEQ ID NO: 253109 - DNA, 30 bp, Artificial Sequence
  Synthetic oligonucleotide
tgcgccggcgcggactatcccagagttgtc

SEQ ID NO: 253110 - DNA, 30 bp, Artificial Sequence
  Synthetic oligonucleotide
atgctccccgagtataaaattggtgttgtc

SEQ ID NO: 253111 - DNA, 30 bp, Artificial Sequence
  Synthetic oligonucleotide
aaactcaatagtgcaacttggtgatttgtc

SEQ ID NO: 253112 - DNA, 30 bp, Artificial Sequence
  Synthetic oligonucleotide
ctccttgttcagtgggtgcgatgctttgtc

SEQ ID NO: 253113 - DNA, 30 bp, Artificial Sequence
  Synthetic oligonucleotide
cgccagtactcactggctgctacgtttgtc

SEQ ID NO: 253114 - DNA, 30 bp, Artificial Sequence
  Synthetic oligonucleotide
actttggagggagcgaagtaaccttttgtc

SEQ ID NO: 253115 - DNA, 30 bp, Artificial Sequence
  Synthetic oligonucleotide
cctgaagtgatagtggcaagcctaaaattc

SEQ ID NO: 253116 - DNA, 30 bp, Artificial Sequence
  Synthetic oligonucleotide
ggctagggtctggcagaccgtcccaaattc

SEQ ID NO: 253117 - DNA, 30 bp, Artificial Sequence
  Synthetic oligonucleotide
cgcgaaaaaacgaatttttctagcaaattc

SEQ ID NO: 253118 - DNA, 30 bp, Artificial Sequence
  Synthetic oligonucleotide
gcccaagagggactaggacccatcaaattc

SEQ ID NO: 253119 - DNA, 30 bp, Artificial Sequence
  Synthetic oligonucleotide
attattgatacgtgccaaggggagaaattc

SEQ ID NO: 253120 - DNA, 30 bp, Artificial Sequence
  Synthetic oligonucleotide
gatcccttaggcatcaacattgagaaattc

SEQ ID NO: 253121 - DNA, 30 bp, Artificial Sequence
  Synthetic oligonucleotide
ttgcgcgaatccaaataacgtaataaattc

SEQ ID NO: 253122 - DNA, 30 bp, Artificial Sequence
  Synthetic oligonucleotide
aagacgtcgggctcagcacagtttaaattc

SEQ ID NO: 253123 - DNA, 30 bp, Artificial Sequence
  Synthetic oligonucleotide
cccacaacgcatattattcgtcaacaattc

SEQ ID NO: 253124 - DNA, 30 bp, Artificial Sequence
  Synthetic oligonucleotide
tcagagtattcttattgctagatacaattc

SEQ ID NO: 253125 - DNA, 30 bp, Artificial Sequence
  Synthetic oligonucleotide
tacgcccaatatagaatcagtgtacaattc

SEQ ID NO: 253126 - DNA, 30 bp, Artificial Sequence
  Synthetic oligonucleotide
tgctcgagcaccaccgcacaccaccaattc

SEQ ID NO: 253127 - DNA, 30 bp, Artificial Sequence
  Synthetic oligonucleotide
aaaagtaacggctaacacaaatgccaattc

SEQ ID NO: 253128 - DNA, 30 bp, Artificial Sequence
  Synthetic oligonucleotide
aaatgtatcgcgagctgcagtgagcaattc

SEQ ID NO: 253129 - DNA, 30 bp, Artificial Sequence
  Synthetic oligonucleotide
ccaaagggacggcggcggcgccatcaattc

SEQ ID NO: 253130 - DNA, 30 bp, Artificial Sequence
  Synthetic oligonucleotide
atctgttaaagctaacggcgcgatcaattc

SEQ ID NO: 253131 - DNA, 30 bp, Artificial Sequence
  Synthetic oligonucleotide
tgtaacttcaatgtttatgtacgtcaattc

SEQ ID NO: 253132 - DNA, 30 bp, Artificial Sequence
  Synthetic oligonucleotide
gcgcggaggctggtcgtccgcccagaattc

SEQ ID NO: 253133 - DNA, 30 bp, Artificial Sequence
  Synthetic oligonucleotide
tctttagtaatctcactctaaaaggaattc

SEQ ID NO: 253134 - DNA, 30 bp, Artificial Sequence
  Synthetic oligonucleotide
agacacagtggtaggttcacaagggaattc

SEQ ID NO: 253135 - DNA, 30 bp, Artificial Sequence
  Synthetic oligonucleotide
gcggcctggtgggggaaatctcctgaattc

SEQ ID NO: 253136 - DNA, 30 bp, Artificial Sequence
  Synthetic oligonucleotide
agatccgggcattgattaaggaaataattc

SEQ ID NO: 253137 - DNA, 30 bp, Artificial Sequence
  Synthetic oligonucleotide
acacatcagggtatgctggtgacataattc

SEQ ID NO: 253138 - DNA, 30 bp, Artificial Sequence
  Synthetic oligonucleotide
gccgcgcccatactaatacagtcataattc

SEQ ID NO: 253139 - DNA, 30 bp, Artificial Sequence
  Synthetic oligonucleotide
acctccggtgactccatgaaacgctaattc

SEQ ID NO: 253140 - DNA, 30 bp, Artificial Sequence
  Synthetic oligonucleotide
acgcggttacgatatatgcttccgtaattc

SEQ ID NO: 253141 - DNA, 30 bp, Artificial Sequence
  Synthetic oligonucleotide
cctgggtaaaaacgcccggattggtaattc

SEQ ID NO: 253142 - DNA, 30 bp, Artificial Sequence
  Synthetic oligonucleotide
agccaaaatagagctgaggtgttttaattc

SEQ ID NO: 253143 - DNA, 30 bp, Artificial Sequence
  Synthetic oligonucleotide
atgactgggcgagcgctggagcgaacattc

SEQ ID NO: 253144 - DNA, 30 bp, Artificial Sequence
  Synthetic oligonucleotide
taatccataccattctattcgataacattc

SEQ ID NO: 253145 - DNA, 30 bp, Artificial Sequence
  Synthetic oligonucleotide
cgtacgtcggaacgggggacagtaacattc

SEQ ID NO: 253146 - DNA, 30 bp, Artificial Sequence
  Synthetic oligonucleotide
cgtgtactcccgggcgttacagcgacattc

SEQ ID NO: 253147 - DNA, 30 bp, Artificial Sequence
  Synthetic oligonucleotide
tgtgatatcgtgggtgtttgggcgacattc

SEQ ID NO: 253148 - DNA, 30 bp, Artificial Sequence
  Synthetic oligonucleotide
taatagctaacactttagtggaaaccattc

SEQ ID NO: 253149 - DNA, 30 bp, Artificial Sequence
  Synthetic oligonucleotide
gtagaaatcgattgcgccgggagtccattc

SEQ ID NO: 253150 - DNA, 30 bp, Artificial Sequence
  Synthetic oligonucleotide
atttagagtttcagggaacaatttccattc

SEQ ID NO: 253151 - DNA, 30 bp, Artificial Sequence
  Synthetic oligonucleotide
gtacatgtcaagtgcgagcagcgtgcattc

SEQ ID NO: 253152 - DNA, 30 bp, Artificial Sequence
  Synthetic oligonucleotide
atcatcgaaaaatccatgcaaagatcattc

SEQ ID NO: 253153 - DNA, 30 bp, Artificial Sequence
  Synthetic oligonucleotide
ccaatgctcacaacaagtcaaaagtcattc

SEQ ID NO: 253154 - DNA, 30 bp, Artificial Sequence
  Synthetic oligonucleotide
cgggatttggtcggtgatcaccagtcattc

SEQ ID NO: 253155 - DNA, 30 bp, Artificial Sequence
  Synthetic oligonucleotide
tgcaacccattcagtatatccaggtcattc

SEQ ID NO: 253156 - DNA, 31 bp, Artificial Sequence
  Synthetic oligonucleotide
ggggttgtgactgtcacgcctccggtcattc

SEQ ID NO: 253157 - DNA, 30 bp, Artificial Sequence
  Synthetic oligonucleotide
agatggtatcggcatacagcgacaagattc

SEQ ID NO: 253158 - DNA, 30 bp, Artificial Sequence
  Synthetic oligonucleotide
aaagaccagggtgaataatgtacaagattc

SEQ ID NO: 253159 - DNA, 30 bp, Artificial Sequence
  Synthetic oligonucleotide
tccgggtaaatgtagggttgtccaagattc

SEQ ID NO: 253160 - DNA, 30 bp, Artificial Sequence
  Synthetic oligonucleotide
cgtaagggtcccagatcatggtgcagattc

SEQ ID NO: 253161 - DNA, 30 bp, Artificial Sequence
  Synthetic oligonucleotide
aaaggaattagtttggtcaccccgagattc

SEQ ID NO: 253162 - DNA, 30 bp, Artificial Sequence
  Synthetic oligonucleotide
gggctactgctacaattggaaagacgattc

SEQ ID NO: 253163 - DNA, 30 bp, Artificial Sequence
  Synthetic oligonucleotide
gattgatcggaatccagcgaggtacgattc

SEQ ID NO: 253164 - DNA, 30 bp, Artificial Sequence
  Synthetic oligonucleotide
ggggttttccaatttagcgtgaaccgattc

SEQ ID NO: 253165 - DNA, 30 bp, Artificial Sequence
  Synthetic oligonucleotide
caggctgttctcagggcacccgggcgattc

SEQ ID NO: 253166 - DNA, 30 bp, Artificial Sequence
  Synthetic oligonucleotide
gcagagcgttactagaaattttaaggattc

SEQ ID NO: 253167 - DNA, 30 bp, Artificial Sequence
  Synthetic oligonucleotide
tttgcagcacagggccattcgacaggattc

SEQ ID NO: 253168 - DNA, 30 bp, Artificial Sequence
  Synthetic oligonucleotide
tattggtattcgatagctcgatgaggattc

SEQ ID NO: 253169 - DNA, 30 bp, Artificial Sequence
  Synthetic oligonucleotide
atgcggtgaaccagcccctactacggattc

SEQ ID NO: 253170 - DNA, 30 bp, Artificial Sequence
  Synthetic oligonucleotide
cggggtcgaaggggtggcaggaccggattc

SEQ ID NO: 253171 - DNA, 30 bp, Artificial Sequence
  Synthetic oligonucleotide
tcggggacttactgagccagatgtggattc

SEQ ID NO: 253172 - DNA, 30 bp, Artificial Sequence
  Synthetic oligonucleotide
cactctggtttatagaggatttgatgattc

SEQ ID NO: 253173 - DNA, 30 bp, Artificial Sequence
  Synthetic oligonucleotide
tgattatgagttcccataatagtctgattc

SEQ ID NO: 253174 - DNA, 30 bp, Artificial Sequence
  Synthetic oligonucleotide
ctaccgcgtgcgttacctattgggtgattc

SEQ ID NO: 253175 - DNA, 30 bp, Artificial Sequence
  Synthetic oligonucleotide
gatactactgtagaagataatttgtgattc

SEQ ID NO: 253176 - DNA, 30 bp, Artificial Sequence
  Synthetic oligonucleotide
aacgagtataaggaggctgcttgcatattc

SEQ ID NO: 253177 - DNA, 30 bp, Artificial Sequence
  Synthetic oligonucleotide
agtggggcttattactcattggggatattc

SEQ ID NO: 253178 - DNA, 30 bp, Artificial Sequence
  Synthetic oligonucleotide
tgaaatgcggggggcttaccaagtatattc

SEQ ID NO: 253179 - DNA, 30 bp, Artificial Sequence
  Synthetic oligonucleotide
acattgtggcgtgacccggaatacctattc

SEQ ID NO: 253180 - DNA, 30 bp, Artificial Sequence
  Synthetic oligonucleotide
gagacgagtaattcggatgacgccctattc

SEQ ID NO: 253181 - DNA, 30 bp, Artificial Sequence
  Synthetic oligonucleotide
agctatcactagtgtgagcgtccgctattc

SEQ ID NO: 253182 - DNA, 30 bp, Artificial Sequence
  Synthetic oligonucleotide
acagagacggatttctgatatgggctattc

SEQ ID NO: 253183 - DNA, 30 bp, Artificial Sequence
  Synthetic oligonucleotide
cagtgaggggatcataaccacttagtattc

SEQ ID NO: 253184 - DNA, 30 bp, Artificial Sequence
  Synthetic oligonucleotide
gccagttgaacgaggtgttcacaggtattc

SEQ ID NO: 253185 - DNA, 30 bp, Artificial Sequence
  Synthetic oligonucleotide
tctgcgcggatatggttatcaggggtattc

SEQ ID NO: 253186 - DNA, 30 bp, Artificial Sequence
  Synthetic oligonucleotide
gtaccatactgaataccccacctggtattc

SEQ ID NO: 253187 - DNA, 30 bp, Artificial Sequence
  Synthetic oligonucleotide
gcgcagctgcgtccataggcgaatgtattc

SEQ ID NO: 253188 - DNA, 30 bp, Artificial Sequence
  Synthetic oligonucleotide
agttaaggaaggtgaaagaggagcttattc

SEQ ID NO: 253189 - DNA, 30 bp, Artificial Sequence
  Synthetic oligonucleotide
tgcaacctgggtctatcaaatgttttattc

SEQ ID NO: 253190 - DNA, 30 bp, Artificial Sequence
  Synthetic oligonucleotide
catggcaatatactaaggacgcgaaacttc

SEQ ID NO: 253191 - DNA, 30 bp, Artificial Sequence
  Synthetic oligonucleotide
tatcgaactaatgtcccgaaaatgaacttc

SEQ ID NO: 253192 - DNA, 30 bp, Artificial Sequence
  Synthetic oligonucleotide
gctggtgtacggcttcggtttggtaacttc

SEQ ID NO: 253193 - DNA, 30 bp, Artificial Sequence
  Synthetic oligonucleotide
aaaacgatcgtgcgtagcggcctccacttc

SEQ ID NO: 253194 - DNA, 30 bp, Artificial Sequence
  Synthetic oligonucleotide
ttaatggcgagctcggcgccgacgcacttc

SEQ ID NO: 253195 - DNA, 30 bp, Artificial Sequence
  Synthetic oligonucleotide
taacgtccatacgcattgtctaatcacttc

SEQ ID NO: 253196 - DNA, 30 bp, Artificial Sequence
  Synthetic oligonucleotide
gtatcacggttttttaactagcccgacttc

SEQ ID NO: 253197 - DNA, 30 bp, Artificial Sequence
  Synthetic oligonucleotide
tcaaggggtatcggaagcccaacggacttc

SEQ ID NO: 253198 - DNA, 30 bp, Artificial Sequence
  Synthetic oligonucleotide
gagcgttaatgcatatatacccgtgacttc

SEQ ID NO: 253199 - DNA, 30 bp, Artificial Sequence
  Synthetic oligonucleotide
atagagactgttctaaaaagcattgacttc

SEQ ID NO: 253200 - DNA, 30 bp, Artificial Sequence
  Synthetic oligonucleotide
aggtaaccacgatgtgtaatcgttgacttc

SEQ ID NO: 253201 - DNA, 30 bp, Artificial Sequence
  Synthetic oligonucleotide
tgtggacgttatggtttgcacctgaccttc

SEQ ID NO: 253202 - DNA, 30 bp, Artificial Sequence
  Synthetic oligonucleotide
ggaagagcaggcccagtgctataacccttc

SEQ ID NO: 253203 - DNA, 30 bp, Artificial Sequence
  Synthetic oligonucleotide
gtacattcaagggtagtcagaatccccttc

SEQ ID NO: 253204 - DNA, 30 bp, Artificial Sequence
  Synthetic oligonucleotide
tggcaggctagtatttaatcggggcccttc

SEQ ID NO: 253205 - DNA, 30 bp, Artificial Sequence
  Synthetic oligonucleotide
tcaattccacccgaacgttcccgcgccttc

SEQ ID NO: 253206 - DNA, 30 bp, Artificial Sequence
  Synthetic oligonucleotide
tagtttatagtggacgaaccatcggccttc

SEQ ID NO: 253207 - DNA, 31 bp, Artificial Sequence
  Synthetic oligonucleotide
caaccacaaacgcagttagacaaatgccttc

SEQ ID NO: 253208 - DNA, 30 bp, Artificial Sequence
  Synthetic oligonucleotide
gtcaacgacccagagagactttttgccttc

SEQ ID NO: 253209 - DNA, 30 bp, Artificial Sequence
  Synthetic oligonucleotide
aatgtacgagggcatagacgacaatccttc

SEQ ID NO: 253210 - DNA, 30 bp, Artificial Sequence
  Synthetic oligonucleotide
tatcatgggacatagggtgacgagtccttc

SEQ ID NO: 253211 - DNA, 30 bp, Artificial Sequence
  Synthetic oligonucleotide
tcgtacagcaggtcggcgttctcgtccttc

SEQ ID NO: 253212 - DNA, 30 bp, Artificial Sequence
  Synthetic oligonucleotide
cttgttccatcatgcagtacctaaagcttc

SEQ ID NO: 253213 - DNA, 30 bp, Artificial Sequence
  Synthetic oligonucleotide
actagtaaacatgcgagacacgacagcttc

SEQ ID NO: 253214 - DNA, 30 bp, Artificial Sequence
  Synthetic oligonucleotide
ctcccactcggaacgggatgatccagcttc

SEQ ID NO: 253215 - DNA, 30 bp, Artificial Sequence
  Synthetic oligonucleotide
gtcggcttagcactctgtccgagcagcttc

SEQ ID NO: 253216 - DNA, 30 bp, Artificial Sequence
  Synthetic oligonucleotide
aggattgacacataggtcagtatcagcttc

SEQ ID NO: 253217 - DNA, 30 bp, Artificial Sequence
  Synthetic oligonucleotide
tttggtctaagcgctggggcgttcagcttc

SEQ ID NO: 253218 - DNA, 30 bp, Artificial Sequence
  Synthetic oligonucleotide
agggaaaccagcgtcaccgagacacgcttc

SEQ ID NO: 253219 - DNA, 30 bp, Artificial Sequence
  Synthetic oligonucleotide
cctgttcaatgtgaagataataaccgcttc

SEQ ID NO: 253220 - DNA, 30 bp, Artificial Sequence
  Synthetic oligonucleotide
tcattgaggacacgaaaaatgtgccgcttc

SEQ ID NO: 253221 - DNA, 30 bp, Artificial Sequence
  Synthetic oligonucleotide
gatacgtgggcaaacagccgactccgcttc

SEQ ID NO: 253222 - DNA, 30 bp, Artificial Sequence
  Synthetic oligonucleotide
gaggcacacccacggtcccttgtgcgcttc

SEQ ID NO: 253223 - DNA, 30 bp, Artificial Sequence
  Synthetic oligonucleotide
ggctactatacaacggacatcccaggcttc

SEQ ID NO: 253224 - DNA, 30 bp, Artificial Sequence
  Synthetic oligonucleotide
agctactagagagcacggccttcaggcttc

SEQ ID NO: 253225 - DNA, 30 bp, Artificial Sequence
  Synthetic oligonucleotide
cagaccgggtggcaggcatgtcacggcttc

SEQ ID NO: 253226 - DNA, 30 bp, Artificial Sequence
  Synthetic oligonucleotide
ataatatgctattttggagatgacggcttc

SEQ ID NO: 253227 - DNA, 30 bp, Artificial Sequence
  Synthetic oligonucleotide
ttcttcaggaaaatggttaggtagggcttc

SEQ ID NO: 253228 - DNA, 30 bp, Artificial Sequence
  Synthetic oligonucleotide
atagatttgggaatcggcacagtgggcttc

SEQ ID NO: 253229 - DNA, 30 bp, Artificial Sequence
  Synthetic oligonucleotide
ccaccgttcactcttgttaggctatgcttc

SEQ ID NO: 253230 - DNA, 30 bp, Artificial Sequence
  Synthetic oligonucleotide
cgtttatgttggtgtggtcgtggctgcttc

SEQ ID NO: 253231 - DNA, 30 bp, Artificial Sequence
  Synthetic oligonucleotide
tattaagcaaggggctcacgtcagtgcttc

SEQ ID NO: 253232 - DNA, 30 bp, Artificial Sequence
  Synthetic oligonucleotide
aaaagggattgggggctatgtttgtgcttc

SEQ ID NO: 253233 - DNA, 30 bp, Artificial Sequence
  Synthetic oligonucleotide
tctccagtggtggccatgccgcaaatcttc

SEQ ID NO: 253234 - DNA, 30 bp, Artificial Sequence
  Synthetic oligonucleotide
aggtggattccagaagcgagttggatcttc

SEQ ID NO: 253235 - DNA, 30 bp, Artificial Sequence
  Synthetic oligonucleotide
tcaccagtactggtgtttattattatcttc

SEQ ID NO: 253236 - DNA, 30 bp, Artificial Sequence
  Synthetic oligonucleotide
tgtgtcactgaagtgttacgaccactcttc

SEQ ID NO: 253237 - DNA, 30 bp, Artificial Sequence
  Synthetic oligonucleotide
catagtcggaacttccgtcctggcctcttc

SEQ ID NO: 253238 - DNA, 30 bp, Artificial Sequence
  Synthetic oligonucleotide
tggttaggacctgcgcagttgtgcctcttc

SEQ ID NO: 253239 - DNA, 30 bp, Artificial Sequence
  Synthetic oligonucleotide
attaggaaaatggcaaacctgatcctcttc

SEQ ID NO: 253240 - DNA, 30 bp, Artificial Sequence
  Synthetic oligonucleotide
gatacgataatgataggggtgtcgctcttc

SEQ ID NO: 253241 - DNA, 30 bp, Artificial Sequence
  Synthetic oligonucleotide
aacgatcaggaaaacttgtaattgctcttc

SEQ ID NO: 253242 - DNA, 30 bp, Artificial Sequence
  Synthetic oligonucleotide
aaccacaggtagccataagcgagcgtcttc

SEQ ID NO: 253243 - DNA, 30 bp, Artificial Sequence
  Synthetic oligonucleotide
tacgacagcaatgtgctcggtttggtcttc

SEQ ID NO: 253244 - DNA, 30 bp, Artificial Sequence
  Synthetic oligonucleotide
gaaacttagcagtctatccagtgtgtcttc

SEQ ID NO: 253245 - DNA, 30 bp, Artificial Sequence
  Synthetic oligonucleotide
tcaggaatgactcgacggttaagattcttc

SEQ ID NO: 253246 - DNA, 30 bp, Artificial Sequence
  Synthetic oligonucleotide
ggaaccggctcaagggggggcatattcttc

SEQ ID NO: 253247 - DNA, 30 bp, Artificial Sequence
  Synthetic oligonucleotide
agatactccggttggagggcactattcttc

SEQ ID NO: 253248 - DNA, 30 bp, Artificial Sequence
  Synthetic oligonucleotide
gtttcgggtggccatggagagttattcttc

SEQ ID NO: 253249 - DNA, 30 bp, Artificial Sequence
  Synthetic oligonucleotide
aatgaactgactccgtgcccgtccttcttc

SEQ ID NO: 253250 - DNA, 30 bp, Artificial Sequence
  Synthetic oligonucleotide
tgatgacccatatcaacaccatagttcttc

SEQ ID NO: 253251 - DNA, 30 bp, Artificial Sequence
  Synthetic oligonucleotide
atgaacccatacaagagtagcggtttcttc

SEQ ID NO: 253252 - DNA, 30 bp, Artificial Sequence
  Synthetic oligonucleotide
tcaaaattataggaataagtcaaaaagttc

SEQ ID NO: 253253 - DNA, 30 bp, Artificial Sequence
  Synthetic oligonucleotide
agtaatgatcaacactccggcctcaagttc

SEQ ID NO: 253254 - DNA, 30 bp, Artificial Sequence
  Synthetic oligonucleotide
atgatccacaggagcgctgttgataagttc

SEQ ID NO: 253255 - DNA, 30 bp, Artificial Sequence
  Synthetic oligonucleotide
ccctaaaaagataaggggtcctgtaagttc

SEQ ID NO: 253256 - DNA, 30 bp, Artificial Sequence
  Synthetic oligonucleotide
ctagcgaccgtgatacaaggcggacagttc

SEQ ID NO: 253257 - DNA, 30 bp, Artificial Sequence
  Synthetic oligonucleotide
ttaggaagttaggtattccactagcagttc

SEQ ID NO: 253258 - DNA, 30 bp, Artificial Sequence
  Synthetic oligonucleotide
ggaaattggctgtactacgaaacgcagttc

SEQ ID NO: 253259 - DNA, 30 bp, Artificial Sequence
  Synthetic oligonucleotide
taggcagcctgcgtctaagaggggcagttc

SEQ ID NO: 253260 - DNA, 30 bp, Artificial Sequence
  Synthetic oligonucleotide
cgacttataaacacaggtacaattcagttc

SEQ ID NO: 253261 - DNA, 30 bp, Artificial Sequence
  Synthetic oligonucleotide
cggttggtctgcacgacgccctgagagttc

SEQ ID NO: 253262 - DNA, 30 bp, Artificial Sequence
  Synthetic oligonucleotide
agccagggtgtattctaaggctaggagttc

SEQ ID NO: 253263 - DNA, 30 bp, Artificial Sequence
  Synthetic oligonucleotide
gatatttttactaggtcgaaccgtgagttc

SEQ ID NO: 253264 - DNA, 30 bp, Artificial Sequence
  Synthetic oligonucleotide
tgcacctattgatagtctagccgtgagttc

SEQ ID NO: 253265 - DNA, 30 bp, Artificial Sequence
  Synthetic oligonucleotide
ataagtgggcgtgacatttaaccctagttc

SEQ ID NO: 253266 - DNA, 30 bp, Artificial Sequence
  Synthetic oligonucleotide
cagtcaagcaaggcagacgtcagctagttc

SEQ ID NO: 253267 - DNA, 30 bp, Artificial Sequence
  Synthetic oligonucleotide
ccagtacgtagtattgaccataagtagttc

SEQ ID NO: 253268 - DNA, 30 bp, Artificial Sequence
  Synthetic oligonucleotide
tgcttcctcctggataagttgctgtagttc

SEQ ID NO: 253269 - DNA, 30 bp, Artificial Sequence
  Synthetic oligonucleotide
aggatgacaataggtcttccgaattagttc

SEQ ID NO: 253270 - DNA, 30 bp, Artificial Sequence
  Synthetic oligonucleotide
cgacatgataatatcgaaggttattagttc

SEQ ID NO: 253271 - DNA, 30 bp, Artificial Sequence
  Synthetic oligonucleotide
ctgaaagttatgctaaaaggtgcttagttc

SEQ ID NO: 253272 - DNA, 30 bp, Artificial Sequence
  Synthetic oligonucleotide
gaagaggtaggtagtatgaaatgttagttc

SEQ ID NO: 253273 - DNA, 30 bp, Artificial Sequence
  Synthetic oligonucleotide
gtgatgggcttgaaagtataagggacgttc

SEQ ID NO: 253274 - DNA, 29 bp, Artificial Sequence
  Synthetic oligonucleotide
gtagatactaagcgactatgcttacgttc

SEQ ID NO: 253275 - DNA, 30 bp, Artificial Sequence
  Synthetic oligonucleotide
tgaccagaaacacacaggcttgttacgttc

SEQ ID NO: 253276 - DNA, 31 bp, Artificial Sequence
  Synthetic oligonucleotide
cagcgctttcgaagatagttcccaaccgttc

SEQ ID NO: 253277 - DNA, 30 bp, Artificial Sequence
  Synthetic oligonucleotide
gcatctgacggatatgttggattaccgttc

SEQ ID NO: 253278 - DNA, 30 bp, Artificial Sequence
  Synthetic oligonucleotide
ttgaacgatcacgttacaatacccccgttc

SEQ ID NO: 253279 - DNA, 30 bp, Artificial Sequence
  Synthetic oligonucleotide
tttgcgcacgtgcgtcgtactgccccgttc

SEQ ID NO: 253280 - DNA, 30 bp, Artificial Sequence
  Synthetic oligonucleotide
gaaagggtgattccgtcttcggggccgttc

SEQ ID NO: 253281 - DNA, 30 bp, Artificial Sequence
  Synthetic oligonucleotide
acactcgttggttttatttgtacagcgttc

SEQ ID NO: 253282 - DNA, 30 bp, Artificial Sequence
  Synthetic oligonucleotide
ggtaagatgcaaggtctaataacggcgttc

SEQ ID NO: 253283 - DNA, 30 bp, Artificial Sequence
  Synthetic oligonucleotide
catcgctcgtgtaaggtagacgtatcgttc

SEQ ID NO: 253284 - DNA, 30 bp, Artificial Sequence
  Synthetic oligonucleotide
ggtccgggatcagccggatacttatcgttc

SEQ ID NO: 253285 - DNA, 30 bp, Artificial Sequence
  Synthetic oligonucleotide
tttgacgtatgtagtggttcaagctcgttc

SEQ ID NO: 253286 - DNA, 30 bp, Artificial Sequence
  Synthetic oligonucleotide
cacgaatatcagggataacccgtttcgttc

SEQ ID NO: 253287 - DNA, 30 bp, Artificial Sequence
  Synthetic oligonucleotide
ctgcgatgcgatacagaggcagaaaggttc

SEQ ID NO: 253288 - DNA, 30 bp, Artificial Sequence
  Synthetic oligonucleotide
tcacattcgatatactgtgagtcaaggttc

SEQ ID NO: 253289 - DNA, 30 bp, Artificial Sequence
  Synthetic oligonucleotide
gctaaaaattgcgtttataaaggaaggttc

SEQ ID NO: 253290 - DNA, 30 bp, Artificial Sequence
  Synthetic oligonucleotide
gatccctcacccaggcagagtaacaggttc

SEQ ID NO: 253291 - DNA, 30 bp, Artificial Sequence
  Synthetic oligonucleotide
ctagagaactcttgtctcgcgggcaggttc

SEQ ID NO: 253292 - DNA, 30 bp, Artificial Sequence
  Synthetic oligonucleotide
taaggtgttgctacggaccgttgtaggttc

SEQ ID NO: 253293 - DNA, 29 bp, Artificial Sequence
  Synthetic oligonucleotide
tagatggcacacagatatatcttaggttc

SEQ ID NO: 253294 - DNA, 30 bp, Artificial Sequence
  Synthetic oligonucleotide
gtctttatccataagttccaaccgcggttc

SEQ ID NO: 253295 - DNA, 30 bp, Artificial Sequence
  Synthetic oligonucleotide
aaatgcaccaccacaaggcattaagggttc

SEQ ID NO: 253296 - DNA, 30 bp, Artificial Sequence
  Synthetic oligonucleotide
gccaagttccgaggccagaagagcgggttc

SEQ ID NO: 253297 - DNA, 30 bp, Artificial Sequence
  Synthetic oligonucleotide
gttgctctgtaaactataaggcatgggttc

SEQ ID NO: 253298 - DNA, 30 bp, Artificial Sequence
  Synthetic oligonucleotide
agattgcgacaaaactcccggaagtggttc

SEQ ID NO: 253299 - DNA, 30 bp, Artificial Sequence
  Synthetic oligonucleotide
cgaggaatgtctacgatgaataagtggttc

SEQ ID NO: 253300 - DNA, 30 bp, Artificial Sequence
  Synthetic oligonucleotide
gagtgggacgtgtaccaagtgcggtggttc

SEQ ID NO: 253301 - DNA, 30 bp, Artificial Sequence
  Synthetic oligonucleotide
ttactaacccatgctaacttaggttggttc

SEQ ID NO: 253302 - DNA, 30 bp, Artificial Sequence
  Synthetic oligonucleotide
tcaactggttagcattggacaacaatgttc

SEQ ID NO: 253303 - DNA, 30 bp, Artificial Sequence
  Synthetic oligonucleotide
ataatgggcgtaattcccagagcaatgttc

SEQ ID NO: 253304 - DNA, 30 bp, Artificial Sequence
  Synthetic oligonucleotide
atcctccaagccccactctgtgcaatgttc

SEQ ID NO: 253305 - DNA, 30 bp, Artificial Sequence
  Synthetic oligonucleotide
ggacaaattgtcgtctcccactagatgttc

SEQ ID NO: 253306 - DNA, 30 bp, Artificial Sequence
  Synthetic oligonucleotide
tacctagagcgaaacaaggacccactgttc

SEQ ID NO: 253307 - DNA, 30 bp, Artificial Sequence
  Synthetic oligonucleotide
attccagcaagtgtacgcgctcacctgttc

SEQ ID NO: 253308 - DNA, 30 bp, Artificial Sequence
  Synthetic oligonucleotide
ctatgtaatagggttttggaaatcctgttc

SEQ ID NO: 253309 - DNA, 30 bp, Artificial Sequence
  Synthetic oligonucleotide
agagcaaacaggtgtacacggttgctgttc

SEQ ID NO: 253310 - DNA, 30 bp, Artificial Sequence
  Synthetic oligonucleotide
gataggagtacgtgataagtagttctgttc

SEQ ID NO: 253311 - DNA, 30 bp, Artificial Sequence
  Synthetic oligonucleotide
actgttgtgtcgggagtaaaggacgtgttc

SEQ ID NO: 253312 - DNA, 30 bp, Artificial Sequence
  Synthetic oligonucleotide
gagaaaaaagacgaacgtgcctacgtgttc

SEQ ID NO: 253313 - DNA, 30 bp, Artificial Sequence
  Synthetic oligonucleotide
acaaacgaacttaactcaagtagggtgttc

SEQ ID NO: 253314 - DNA, 30 bp, Artificial Sequence
  Synthetic oligonucleotide
tgctcatatcgtgttaattgctgtgtgttc

SEQ ID NO: 253315 - DNA, 30 bp, Artificial Sequence
  Synthetic oligonucleotide
gtggacagcaaacgaggaaattccttgttc

SEQ ID NO: 253316 - DNA, 30 bp, Artificial Sequence
  Synthetic oligonucleotide
cgattggtcaatttcattttcgcaaatttc

SEQ ID NO: 253317 - DNA, 30 bp, Artificial Sequence
  Synthetic oligonucleotide
gcgctacacattacgggtccaataaatttc

SEQ ID NO: 253318 - DNA, 30 bp, Artificial Sequence
  Synthetic oligonucleotide
acgaaatggactgtggtcggaagtaatttc

SEQ ID NO: 253319 - DNA, 30 bp, Artificial Sequence
  Synthetic oligonucleotide
gaaccttgctacgcgactacataacatttc

SEQ ID NO: 253320 - DNA, 30 bp, Artificial Sequence
  Synthetic oligonucleotide
gtcaaacaatgaattatgcttaggcatttc

SEQ ID NO: 253321 - DNA, 30 bp, Artificial Sequence
  Synthetic oligonucleotide
ttgctccagcggacaggcggatgtcatttc

SEQ ID NO: 253322 - DNA, 30 bp, Artificial Sequence
  Synthetic oligonucleotide
ggcacgagtcaaatctaggtggcagatttc

SEQ ID NO: 253323 - DNA, 30 bp, Artificial Sequence
  Synthetic oligonucleotide
aatatgtcccggtaaactcgaggcgatttc

SEQ ID NO: 253324 - DNA, 30 bp, Artificial Sequence
  Synthetic oligonucleotide
aagtggtacgacgaagttcttactgatttc

SEQ ID NO: 253325 - DNA, 30 bp, Artificial Sequence
  Synthetic oligonucleotide
ttccgtaatacttcgttaacaaactatttc

SEQ ID NO: 253326 - DNA, 30 bp, Artificial Sequence
  Synthetic oligonucleotide
tatattccggaggacttacgagcgtatttc

SEQ ID NO: 253327 - DNA, 30 bp, Artificial Sequence
  Synthetic oligonucleotide
tatgtagttttggaattccggttgtatttc

SEQ ID NO: 253328 - DNA, 30 bp, Artificial Sequence
  Synthetic oligonucleotide
gttcagtgggacccggcacagtattatttc

SEQ ID NO: 253329 - DNA, 30 bp, Artificial Sequence
  Synthetic oligonucleotide
atcgctgcacgacgacaacttgtttatttc

SEQ ID NO: 253330 - DNA, 30 bp, Artificial Sequence
  Synthetic oligonucleotide
tcgcagtcaaggagatagcgaaaaactttc

SEQ ID NO: 253331 - DNA, 30 bp, Artificial Sequence
  Synthetic oligonucleotide
cattgtagtacccgacgaattgaaactttc

SEQ ID NO: 253332 - DNA, 30 bp, Artificial Sequence
  Synthetic oligonucleotide
gctgactcctgtttgtggccattaactttc

SEQ ID NO: 253333 - DNA, 30 bp, Artificial Sequence
  Synthetic oligonucleotide
caggtgttcgcaatcgcgctatcgactttc

SEQ ID NO: 253334 - DNA, 30 bp, Artificial Sequence
  Synthetic oligonucleotide
agttcaaagcacgggtagtatcggactttc

SEQ ID NO: 253335 - DNA, 30 bp, Artificial Sequence
  Synthetic oligonucleotide
cttatttgggaaaataagtcgtttactttc

SEQ ID NO: 253336 - DNA, 30 bp, Artificial Sequence
  Synthetic oligonucleotide
ctcatgtatttcaccgtctataagcctttc

SEQ ID NO: 253337 - DNA, 30 bp, Artificial Sequence
  Synthetic oligonucleotide
cgatccaacttacttctctgtcggcctttc

SEQ ID NO: 253338 - DNA, 30 bp, Artificial Sequence
  Synthetic oligonucleotide
cacggctgccgactagtatagagggctttc

SEQ ID NO: 253339 - DNA, 30 bp, Artificial Sequence
  Synthetic oligonucleotide
cgtgactaattgaacggtctggactctttc

SEQ ID NO: 253340 - DNA, 30 bp, Artificial Sequence
  Synthetic oligonucleotide
ataagccaatgtctcgaaattggctctttc

SEQ ID NO: 253341 - DNA, 30 bp, Artificial Sequence
  Synthetic oligonucleotide
tccaggtggtgatcatgtgtgcagtctttc

SEQ ID NO: 253342 - DNA, 30 bp, Artificial Sequence
  Synthetic oligonucleotide
cggtgtcagactctcaacttttagtctttc

SEQ ID NO: 253343 - DNA, 30 bp, Artificial Sequence
  Synthetic oligonucleotide
agactaagtagaaactgtaagcggtctttc

SEQ ID NO: 253344 - DNA, 30 bp, Artificial Sequence
  Synthetic oligonucleotide
cgaggaatattatcgtggagtagaagtttc

SEQ ID NO: 253345 - DNA, 30 bp, Artificial Sequence
  Synthetic oligonucleotide
ttggagttcacttataagaatagcagtttc

SEQ ID NO: 253346 - DNA, 30 bp, Artificial Sequence
  Synthetic oligonucleotide
cgtttgagttgaccagcatgacttagtttc

SEQ ID NO: 253347 - DNA, 30 bp, Artificial Sequence
  Synthetic oligonucleotide
ctatacagagcgagcattgtgtaacgtttc

SEQ ID NO: 253348 - DNA, 30 bp, Artificial Sequence
  Synthetic oligonucleotide
ggccaggcgcgtcaggtgagtgaccgtttc

SEQ ID NO: 253349 - DNA, 30 bp, Artificial Sequence
  Synthetic oligonucleotide
ttcggctcccgtcccaagtctcatcgtttc

SEQ ID NO: 253350 - DNA, 30 bp, Artificial Sequence
  Synthetic oligonucleotide
ggagataaaaaaatttgataattcggtttc

SEQ ID NO: 253351 - DNA, 30 bp, Artificial Sequence
  Synthetic oligonucleotide
ggtgcaagtttcgagatcacactgggtttc

SEQ ID NO: 253352 - DNA, 30 bp, Artificial Sequence
  Synthetic oligonucleotide
cgcaggggtcgtgaaatagccactggtttc

SEQ ID NO: 253353 - DNA, 30 bp, Artificial Sequence
  Synthetic oligonucleotide
cgttacggacaacagatgaaatttggtttc

SEQ ID NO: 253354 - DNA, 30 bp, Artificial Sequence
  Synthetic oligonucleotide
ccctacccagtgcgagcaggcgaatgtttc

SEQ ID NO: 253355 - DNA, 30 bp, Artificial Sequence
  Synthetic oligonucleotide
tataacagacataaaaaacgcacatgtttc

SEQ ID NO: 253356 - DNA, 30 bp, Artificial Sequence
  Synthetic oligonucleotide
cagtgattgtaaacatctgctaggtgtttc

SEQ ID NO: 253357 - DNA, 30 bp, Artificial Sequence
  Synthetic oligonucleotide
tgcggtggaaacattcagtggccttgtttc

SEQ ID NO: 253358 - DNA, 30 bp, Artificial Sequence
  Synthetic oligonucleotide
attccctcaatggcatggaaaggtattttc

SEQ ID NO: 253359 - DNA, 30 bp, Artificial Sequence
  Synthetic oligonucleotide
ctgatgaaacaccggcgtggacaacttttc

SEQ ID NO: 253360 - DNA, 30 bp, Artificial Sequence
  Synthetic oligonucleotide
cgtccgtcccacatctttgcaagacttttc

SEQ ID NO: 253361 - DNA, 30 bp, Artificial Sequence
  Synthetic oligonucleotide
gcttgacgagcgacaaatatgttgcttttc

SEQ ID NO: 253362 - DNA, 30 bp, Artificial Sequence
  Synthetic oligonucleotide
caatcctgtgttttgtgtgcgcaagttttc

SEQ ID NO: 253363 - DNA, 30 bp, Artificial Sequence
  Synthetic oligonucleotide
tacagtgttgttcagttggcaatcgttttc

SEQ ID NO: 253364 - DNA, 30 bp, Artificial Sequence
  Synthetic oligonucleotide
gctgaaacgctcgcgtaccgatgggttttc

SEQ ID NO: 253365 - DNA, 30 bp, Artificial Sequence
  Synthetic oligonucleotide
aggtgatcagaaatgactcacagtgttttc

SEQ ID NO: 253366 - DNA, 30 bp, Artificial Sequence
  Synthetic oligonucleotide
cgttcatcttcgaagacttacatatttttc

SEQ ID NO: 253367 - DNA, 30 bp, Artificial Sequence
  Synthetic oligonucleotide
aacgtattttggctaggtcgtgcgtttttc

SEQ ID NO: 253368 - DNA, 30 bp, Artificial Sequence
  Synthetic oligonucleotide
tataacagaatattgcggagggtaaaaaag

SEQ ID NO: 253369 - DNA, 30 bp, Artificial Sequence
  Synthetic oligonucleotide
cgtgttgtgtaagactacgaagccaaaaag

SEQ ID NO: 253370 - DNA, 30 bp, Artificial Sequence
  Synthetic oligonucleotide
atagacagaagtcacatatggggcaaaaag

SEQ ID NO: 253371 - DNA, 30 bp, Artificial Sequence
  Synthetic oligonucleotide
ataccttcgaagatacagcgcaagaaaaag

SEQ ID NO: 253372 - DNA, 31 bp, Artificial Sequence
  Synthetic oligonucleotide
tattgggcagacggtccgagcgcggaaaaag

SEQ ID NO: 253373 - DNA, 30 bp, Artificial Sequence
  Synthetic oligonucleotide
gccgtttggcaaatgggagcgacacaaaag

SEQ ID NO: 253374 - DNA, 30 bp, Artificial Sequence
  Synthetic oligonucleotide
gaatgcacagaacttggcatatcacaaaag

SEQ ID NO: 253375 - DNA, 30 bp, Artificial Sequence
  Synthetic oligonucleotide
gtgacccaccacacatggtggccccaaaag

SEQ ID NO: 253376 - DNA, 30 bp, Artificial Sequence
  Synthetic oligonucleotide
aataaggtcctttaacccggcggccaaaag

SEQ ID NO: 253377 - DNA, 30 bp, Artificial Sequence
  Synthetic oligonucleotide
ttactaaaaattatccatggttgccaaaag

SEQ ID NO: 253378 - DNA, 30 bp, Artificial Sequence
  Synthetic oligonucleotide
catgcttactccagtgattcactccaaaag

SEQ ID NO: 253379 - DNA, 30 bp, Artificial Sequence
  Synthetic oligonucleotide
gattgccggtaccatgtgcatgggcaaaag

SEQ ID NO: 253380 - DNA, 30 bp, Artificial Sequence
  Synthetic oligonucleotide
gagggtactgaccgatgcaccatgcaaaag

SEQ ID NO: 253381 - DNA, 30 bp, Artificial Sequence
  Synthetic oligonucleotide
ctttgaggaattggcccgcgacccgaaaag

SEQ ID NO: 253382 - DNA, 30 bp, Artificial Sequence
  Synthetic oligonucleotide
atagtcttgctagggttaccggaggaaaag

SEQ ID NO: 253383 - DNA, 30 bp, Artificial Sequence
  Synthetic oligonucleotide
ggtccggctggcgcaagcccactggaaaag

SEQ ID NO: 253384 - DNA, 30 bp, Artificial Sequence
  Synthetic oligonucleotide
atgtcccaaaacatcagaacggtggaaaag

SEQ ID NO: 253385 - DNA, 30 bp, Artificial Sequence
  Synthetic oligonucleotide
gtgagacccgggaaaaaacacactgaaaag

SEQ ID NO: 253386 - DNA, 30 bp, Artificial Sequence
  Synthetic oligonucleotide
atgtagactaagcagtggcgaagtgaaaag

SEQ ID NO: 253387 - DNA, 30 bp, Artificial Sequence
  Synthetic oligonucleotide
cccctatggtacggcctgtaaggtgaaaag

SEQ ID NO: 253388 - DNA, 30 bp, Artificial Sequence
  Synthetic oligonucleotide
aggatgcaaggacgcaagcgtaactaaaag

SEQ ID NO: 253389 - DNA, 30 bp, Artificial Sequence
  Synthetic oligonucleotide
tagctcaagtgccacagggggtactaaaag

SEQ ID NO: 253390 - DNA, 30 bp, Artificial Sequence
  Synthetic oligonucleotide
ttaggtaggtattttgctcaaaagtaaaag

SEQ ID NO: 253391 - DNA, 30 bp, Artificial Sequence
  Synthetic oligonucleotide
gcgatgtcaaacttccttccaaggtaaaag

SEQ ID NO: 253392 - DNA, 30 bp, Artificial Sequence
  Synthetic oligonucleotide
gcggagagggctgttcagcggaggtaaaag

SEQ ID NO: 253393 - DNA, 30 bp, Artificial Sequence
  Synthetic oligonucleotide
taagctaagtgcgctccagaggggtaaaag

SEQ ID NO: 253394 - DNA, 30 bp, Artificial Sequence
  Synthetic oligonucleotide
ttggaacggatgtaatgagaattgtaaaag

SEQ ID NO: 253395 - DNA, 30 bp, Artificial Sequence
  Synthetic oligonucleotide
ggcgggtataccacgcctatcaattaaaag

SEQ ID NO: 253396 - DNA, 30 bp, Artificial Sequence
  Synthetic oligonucleotide
ccacagaattttatcctgccccgttaaaag

SEQ ID NO: 253397 - DNA, 30 bp, Artificial Sequence
  Synthetic oligonucleotide
aggttctaaatgcgttctgtctgttaaaag

SEQ ID NO: 253398 - DNA, 30 bp, Artificial Sequence
  Synthetic oligonucleotide
agcaacaaaccacatacgggttgttaaaag

SEQ ID NO: 253399 - DNA, 30 bp, Artificial Sequence
  Synthetic oligonucleotide
gcaattatattgaatgccggtacgacaaag

SEQ ID NO: 253400 - DNA, 30 bp, Artificial Sequence
  Synthetic oligonucleotide
aatttagtacggtaggcaagctatacaaag

SEQ ID NO: 253401 - DNA, 30 bp, Artificial Sequence
  Synthetic oligonucleotide
gcactaggtggctcaggtgacccaccaaag

SEQ ID NO: 253402 - DNA, 30 bp, Artificial Sequence
  Synthetic oligonucleotide
cgtgagaccgcgctctcttgcccaccaaag

SEQ ID NO: 253403 - DNA, 30 bp, Artificial Sequence
  Synthetic oligonucleotide
aaccactagagttctactctgataccaaag

SEQ ID NO: 253404 - DNA, 30 bp, Artificial Sequence
  Synthetic oligonucleotide
atgtctgagtccattatttgtcgcccaaag

SEQ ID NO: 253405 - DNA, 30 bp, Artificial Sequence
  Synthetic oligonucleotide
aaaagaattataagcagttaaatcccaaag

SEQ ID NO: 253406 - DNA, 31 bp, Artificial Sequence
  Synthetic oligonucleotide
aaatagacctcacagttaataacagccaaag

SEQ ID NO: 253407 - DNA, 30 bp, Artificial Sequence
  Synthetic oligonucleotide
gcgtcctacggatcagcgggcgagccaaag

SEQ ID NO: 253408 - DNA, 30 bp, Artificial Sequence
  Synthetic oligonucleotide
tcaatcagggaatcgccgggtgagccaaag

SEQ ID NO: 253409 - DNA, 30 bp, Artificial Sequence
  Synthetic oligonucleotide
aaatatacgggaaatgtgcttagcgcaaag

SEQ ID NO: 253410 - DNA, 30 bp, Artificial Sequence
  Synthetic oligonucleotide
tatactcgccggcctaatacgtcggcaaag

SEQ ID NO: 253411 - DNA, 30 bp, Artificial Sequence
  Synthetic oligonucleotide
ctagtggcattgctaagacacatggcaaag

SEQ ID NO: 253412 - DNA, 31 bp, Artificial Sequence
  Synthetic oligonucleotide
aaatactccgtcggggtcgtgacctgcaaag

SEQ ID NO: 253413 - DNA, 30 bp, Artificial Sequence
  Synthetic oligonucleotide
agttggggccgttccaggtgtggatcaaag

SEQ ID NO: 253414 - DNA, 30 bp, Artificial Sequence
  Synthetic oligonucleotide
gattacattaataggcatgaaacctcaaag

SEQ ID NO: 253415 - DNA, 30 bp, Artificial Sequence
  Synthetic oligonucleotide
aaagcacctgtcacaccggtcgcctcaaag

SEQ ID NO: 253416 - DNA, 30 bp, Artificial Sequence
  Synthetic oligonucleotide
cgctagcatctcctcgaccggaagtcaaag

SEQ ID NO: 253417 - DNA, 30 bp, Artificial Sequence
  Synthetic oligonucleotide
gcacacacgacagaaatctactattcaaag

SEQ ID NO: 253418 - DNA, 30 bp, Artificial Sequence
  Synthetic oligonucleotide
acacaaatcatccgggtgaacctttcaaag

SEQ ID NO: 253419 - DNA, 30 bp, Artificial Sequence
  Synthetic oligonucleotide
tggggatgtattctcagaagccccagaaag

SEQ ID NO: 253420 - DNA, 30 bp, Artificial Sequence
  Synthetic oligonucleotide
tacagagaatcggggctccggcccagaaag

SEQ ID NO: 253421 - DNA, 30 bp, Artificial Sequence
  Synthetic oligonucleotide
cgtgtgcattaccacgggacgagcagaaag

SEQ ID NO: 253422 - DNA, 30 bp, Artificial Sequence
  Synthetic oligonucleotide
agggctcgtaattagggtttgccgagaaag

SEQ ID NO: 253423 - DNA, 30 bp, Artificial Sequence
  Synthetic oligonucleotide
cccacagagtcggttaacagtctgagaaag

SEQ ID NO: 253424 - DNA, 31 bp, Artificial Sequence
  Synthetic oligonucleotide
tgccgagaacaccctagtggacgttagaaag

SEQ ID NO: 253425 - DNA, 30 bp, Artificial Sequence
  Synthetic oligonucleotide
aacagtggagtgaggctatgctaacgaaag

SEQ ID NO: 253426 - DNA, 30 bp, Artificial Sequence
  Synthetic oligonucleotide
gctactgcgcatcaatgagatatacgaaag

SEQ ID NO: 253427 - DNA, 30 bp, Artificial Sequence
  Synthetic oligonucleotide
atacaacatctgatgcatgtaggccgaaag

SEQ ID NO: 253428 - DNA, 30 bp, Artificial Sequence
  Synthetic oligonucleotide
aactctcacgtaattagctatttccgaaag

SEQ ID NO: 253429 - DNA, 30 bp, Artificial Sequence
  Synthetic oligonucleotide
gcgggagacacgggacaaagggggcgaaag

SEQ ID NO: 253430 - DNA, 30 bp, Artificial Sequence
  Synthetic oligonucleotide
aatgaccacagtccgacgcgtttaggaaag

SEQ ID NO: 253431 - DNA, 30 bp, Artificial Sequence
  Synthetic oligonucleotide
gagccccgttgcatgctgtttaacggaaag

SEQ ID NO: 253432 - DNA, 30 bp, Artificial Sequence
  Synthetic oligonucleotide
acaggcatatacgaaccttgtgtcggaaag

SEQ ID NO: 253433 - DNA, 30 bp, Artificial Sequence
  Synthetic oligonucleotide
cctacaatcatggcactcccgcagggaaag

SEQ ID NO: 253434 - DNA, 30 bp, Artificial Sequence
  Synthetic oligonucleotide
gggtatcaacgtcgcagctggaatggaaag

SEQ ID NO: 253435 - DNA, 30 bp, Artificial Sequence
  Synthetic oligonucleotide
cgtttacagatgttaaccggacatggaaag

SEQ ID NO: 253436 - DNA, 30 bp, Artificial Sequence
  Synthetic oligonucleotide
cggcatgctccaatgggcgtccttggaaag

SEQ ID NO: 253437 - DNA, 30 bp, Artificial Sequence
  Synthetic oligonucleotide
acgtcccgtagtgcgcccagggttggaaag

SEQ ID NO: 253438 - DNA, 30 bp, Artificial Sequence
  Synthetic oligonucleotide
agtcacttcccaacaccactccgatgaaag

SEQ ID NO: 253439 - DNA, 30 bp, Artificial Sequence
  Synthetic oligonucleotide
agcggccacgcccacgttagcccctgaaag

SEQ ID NO: 253440 - DNA, 30 bp, Artificial Sequence
  Synthetic oligonucleotide
agagatcatgtgtcatcgaatgagtgaaag

SEQ ID NO: 253441 - DNA, 30 bp, Artificial Sequence
  Synthetic oligonucleotide
agattgttaaatcgcatgcggtagtgaaag

SEQ ID NO: 253442 - DNA, 30 bp, Artificial Sequence
  Synthetic oligonucleotide
gacgcgaattttataggattcgtgtgaaag

SEQ ID NO: 253443 - DNA, 31 bp, Artificial Sequence
  Synthetic oligonucleotide
ccaccctggaaacctcatggggttgtgaaag

SEQ ID NO: 253444 - DNA, 30 bp, Artificial Sequence
  Synthetic oligonucleotide
gcaccaattgggtgtagcccgcattgaaag

SEQ ID NO: 253445 - DNA, 30 bp, Artificial Sequence
  Synthetic oligonucleotide
ggcgtttcttgccactgttgaggttgaaag

SEQ ID NO: 253446 - DNA, 30 bp, Artificial Sequence
  Synthetic oligonucleotide
cgagtgagggatgagacagccttttgaaag

SEQ ID NO: 253447 - DNA, 30 bp, Artificial Sequence
  Synthetic oligonucleotide
tgcatcaccagttaacagtgcttaataaag

SEQ ID NO: 253448 - DNA, 30 bp, Artificial Sequence
  Synthetic oligonucleotide
ccagccccactgtgacggcacgtcataaag

SEQ ID NO: 253449 - DNA, 30 bp, Artificial Sequence
  Synthetic oligonucleotide
tgaatagatcgaaaaaatttgtagataaag

SEQ ID NO: 253450 - DNA, 30 bp, Artificial Sequence
  Synthetic oligonucleotide
gggtaactgagagggatcggctggataaag

SEQ ID NO: 253451 - DNA, 30 bp, Artificial Sequence
  Synthetic oligonucleotide
ctagagatcctaggcaatggcgctataaag

SEQ ID NO: 253452 - DNA, 30 bp, Artificial Sequence
  Synthetic oligonucleotide
tgactggcttggtggcctatcagtataaag

SEQ ID NO: 253453 - DNA, 30 bp, Artificial Sequence
  Synthetic oligonucleotide
ttaaactgactgtagtaacgacccctaaag

SEQ ID NO: 253454 - DNA, 30 bp, Artificial Sequence
  Synthetic oligonucleotide
ctgtagcggatagttgatggagtcctaaag

SEQ ID NO: 253455 - DNA, 30 bp, Artificial Sequence
  Synthetic oligonucleotide
gaatcggggtatcaacccacggcgctaaag

SEQ ID NO: 253456 - DNA, 30 bp, Artificial Sequence
  Synthetic oligonucleotide
ccggcattattaatctcattggggctaaag

SEQ ID NO: 253457 - DNA, 30 bp, Artificial Sequence
  Synthetic oligonucleotide
taatcaagttcatcgggaagtgtgctaaag

SEQ ID NO: 253458 - DNA, 30 bp, Artificial Sequence
  Synthetic oligonucleotide
acaaacgtttcctgtgggcgacatctaaag

SEQ ID NO: 253459 - DNA, 30 bp, Artificial Sequence
  Synthetic oligonucleotide
ataccagctcaaccttgcactctagtaaag

SEQ ID NO: 253460 - DNA, 30 bp, Artificial Sequence
  Synthetic oligonucleotide
gttcagaatggttcaagtaactgggtaaag

SEQ ID NO: 253461 - DNA, 30 bp, Artificial Sequence
  Synthetic oligonucleotide
actaccacgcgttcattcatttatgtaaag

SEQ ID NO: 253462 - DNA, 30 bp, Artificial Sequence
  Synthetic oligonucleotide
tacacatgatctgtccgctcaactgtaaag

SEQ ID NO: 253463 - DNA, 30 bp, Artificial Sequence
  Synthetic oligonucleotide
gcgctaccatataattggcactgattaaag

SEQ ID NO: 253464 - DNA, 30 bp, Artificial Sequence
  Synthetic oligonucleotide
cgaatgacaacctattcgggtgtcttaaag

SEQ ID NO: 253465 - DNA, 30 bp, Artificial Sequence
  Synthetic oligonucleotide
gcacgggatcgggggacacaagtgttaaag

SEQ ID NO: 253466 - DNA, 30 bp, Artificial Sequence
  Synthetic oligonucleotide
tacatcagagcctgaccggttcatttaaag

SEQ ID NO: 253467 - DNA, 30 bp, Artificial Sequence
  Synthetic oligonucleotide
atattggcctaatgcacagaaactttaaag

SEQ ID NO: 253468 - DNA, 30 bp, Artificial Sequence
  Synthetic oligonucleotide
cggattataaaaaaggttgtaggtttaaag

SEQ ID NO: 253469 - DNA, 30 bp, Artificial Sequence
  Synthetic oligonucleotide
cgtttctgggcatttagctataaaaacaag

SEQ ID NO: 253470 - DNA, 30 bp, Artificial Sequence
  Synthetic oligonucleotide
ccagataggcagacgcacgcaagaaacaag

SEQ ID NO: 253471 - DNA, 30 bp, Artificial Sequence
  Synthetic oligonucleotide
cataagacgcatattgaatagacgaacaag

SEQ ID NO: 253472 - DNA, 30 bp, Artificial Sequence
  Synthetic oligonucleotide
ggttactcccgaatcctgacttcgaacaag

SEQ ID NO: 253473 - DNA, 30 bp, Artificial Sequence
  Synthetic oligonucleotide
ctcctctagacccaattcgccaataacaag

SEQ ID NO: 253474 - DNA, 30 bp, Artificial Sequence
  Synthetic oligonucleotide
agcttcatacagcggcgtatgaataacaag

SEQ ID NO: 253475 - DNA, 30 bp, Artificial Sequence
  Synthetic oligonucleotide
ggctttccattgtcgatttcatgtaacaag

SEQ ID NO: 253476 - DNA, 30 bp, Artificial Sequence
  Synthetic oligonucleotide
gaacttaaggctcggggcgataaacacaag

SEQ ID NO: 253477 - DNA, 30 bp, Artificial Sequence
  Synthetic oligonucleotide
acgtcgcacaacttagatggggaacacaag

SEQ ID NO: 253478 - DNA, 30 bp, Artificial Sequence
  Synthetic oligonucleotide
ttagaatcgaatcgcggtttcgcccacaag

SEQ ID NO: 253479 - DNA, 30 bp, Artificial Sequence
  Synthetic oligonucleotide
taggtcccggcagaaattcctgctcacaag

SEQ ID NO: 253480 - DNA, 30 bp, Artificial Sequence
  Synthetic oligonucleotide
agcctgaaaaatggcgatttctttcacaag

SEQ ID NO: 253481 - DNA, 30 bp, Artificial Sequence
  Synthetic oligonucleotide
tctcaacaaggccctttaatcttcgacaag

SEQ ID NO: 253482 - DNA, 30 bp, Artificial Sequence
  Synthetic oligonucleotide
cgttgccgtgttaatggcttgcaggacaag

SEQ ID NO: 253483 - DNA, 30 bp, Artificial Sequence
  Synthetic oligonucleotide
ggtctctggcagaagagggcagaatacaag

SEQ ID NO: 253484 - DNA, 31 bp, Artificial Sequence
  Synthetic oligonucleotide
atacgggggttgtcccgatactagatacaag

SEQ ID NO: 253485 - DNA, 30 bp, Artificial Sequence
  Synthetic oligonucleotide
tacaaccgttcactagtaacgtgatacaag

SEQ ID NO: 253486 - DNA, 30 bp, Artificial Sequence
  Synthetic oligonucleotide
tcatccgttccttaatcttcaaactacaag

SEQ ID NO: 253487 - DNA, 30 bp, Artificial Sequence
  Synthetic oligonucleotide
tacgataattggttccgtggatcctacaag

SEQ ID NO: 253488 - DNA, 30 bp, Artificial Sequence
  Synthetic oligonucleotide
acgcacatacacggggctgattagtacaag

SEQ ID NO: 253489 - DNA, 30 bp, Artificial Sequence
  Synthetic oligonucleotide
caaagatgttaagatctttcgacgtacaag

SEQ ID NO: 253490 - DNA, 30 bp, Artificial Sequence
  Synthetic oligonucleotide
tccgagcgtggggaagttgcgctgtacaag

SEQ ID NO: 253491 - DNA, 31 bp, Artificial Sequence
  Synthetic oligonucleotide
gcgtaagtttctgggttgtaatgtgtacaag

SEQ ID NO: 253492 - DNA, 30 bp, Artificial Sequence
  Synthetic oligonucleotide
taagaagacggaagcgcacatcattacaag

SEQ ID NO: 253493 - DNA, 30 bp, Artificial Sequence
  Synthetic oligonucleotide
atccacgtctatcaagcgcccgattacaag

SEQ ID NO: 253494 - DNA, 30 bp, Artificial Sequence
  Synthetic oligonucleotide
gaaagatccactctattttcatcttacaag

SEQ ID NO: 253495 - DNA, 30 bp, Artificial Sequence
  Synthetic oligonucleotide
tttaaaaatagggatgtcttccaacccaag

SEQ ID NO: 253496 - DNA, 30 bp, Artificial Sequence
  Synthetic oligonucleotide
ttacatatgagtaatgtgcagccgcccaag

SEQ ID NO: 253497 - DNA, 30 bp, Artificial Sequence
  Synthetic oligonucleotide
aaaataacagtatgggtagtgaggcccaag

SEQ ID NO: 253498 - DNA, 30 bp, Artificial Sequence
  Synthetic oligonucleotide
ctcatcggcgacgataacattactcccaag

SEQ ID NO: 253499 - DNA, 30 bp, Artificial Sequence
  Synthetic oligonucleotide
ggtcctttgacttgggtgacatctcccaag

SEQ ID NO: 253500 - DNA, 30 bp, Artificial Sequence
  Synthetic oligonucleotide
ataggcgcaatttggtcctatccagccaag

SEQ ID NO: 253501 - DNA, 30 bp, Artificial Sequence
  Synthetic oligonucleotide
gccgctggcatgtggcaattaagagccaag

SEQ ID NO: 253502 - DNA, 30 bp, Artificial Sequence
  Synthetic oligonucleotide
atccgtagacccaaagtacaataggccaag

SEQ ID NO: 253503 - DNA, 30 bp, Artificial Sequence
  Synthetic oligonucleotide
tcgaacgtgagggagccttagtgggccaag

SEQ ID NO: 253504 - DNA, 30 bp, Artificial Sequence
  Synthetic oligonucleotide
tatataacgaatgcccggttatgtgccaag

SEQ ID NO: 253505 - DNA, 30 bp, Artificial Sequence
  Synthetic oligonucleotide
cagcgcgcaaggcaaacgtatattgccaag

SEQ ID NO: 253506 - DNA, 30 bp, Artificial Sequence
  Synthetic oligonucleotide
cctcactcgcagcctgcgagtgtatccaag

SEQ ID NO: 253507 - DNA, 30 bp, Artificial Sequence
  Synthetic oligonucleotide
ttaattgtagaatgattttgcaactccaag

SEQ ID NO: 253508 - DNA, 30 bp, Artificial Sequence
  Synthetic oligonucleotide
gagcatagggagtgtttgtttgtctccaag

SEQ ID NO: 253509 - DNA, 30 bp, Artificial Sequence
  Synthetic oligonucleotide
acccaattgctaagataattggtgtccaag

SEQ ID NO: 253510 - DNA, 30 bp, Artificial Sequence
  Synthetic oligonucleotide
tcaatctccggacacaggtcgagttccaag

SEQ ID NO: 253511 - DNA, 30 bp, Artificial Sequence
  Synthetic oligonucleotide
tgggaatagatatttaatacgccaagcaag

SEQ ID NO: 253512 - DNA, 31 bp, Artificial Sequence
  Synthetic oligonucleotide
ccgaacaagctcacaggggacgcgaagcaag

SEQ ID NO: 253513 - DNA, 30 bp, Artificial Sequence
  Synthetic oligonucleotide
aagataattacgccctctgggagcagcaag

SEQ ID NO: 253514 - DNA, 30 bp, Artificial Sequence
  Synthetic oligonucleotide
tcatttaaaaaaagagacattaagagcaag

SEQ ID NO: 253515 - DNA, 30 bp, Artificial Sequence
  Synthetic oligonucleotide
acaaatctatcgctatcaaaagtgagcaag

SEQ ID NO: 253516 - DNA, 30 bp, Artificial Sequence
  Synthetic oligonucleotide
gcgttatctagggcaaaagcacatagcaag

SEQ ID NO: 253517 - DNA, 30 bp, Artificial Sequence
  Synthetic oligonucleotide
cggctcgacgagattggtacttcccgcaag

SEQ ID NO: 253518 - DNA, 30 bp, Artificial Sequence
  Synthetic oligonucleotide
gattcgtcgggccggcttagcccgcgcaag

SEQ ID NO: 253519 - DNA, 30 bp, Artificial Sequence
  Synthetic oligonucleotide
gtttgtaggctatcgtgacataggcgcaag

SEQ ID NO: 253520 - DNA, 30 bp, Artificial Sequence
  Synthetic oligonucleotide
cttctccacgttagtgagggcagtcgcaag

SEQ ID NO: 253521 - DNA, 30 bp, Artificial Sequence
  Synthetic oligonucleotide
tctggaaaagagacgacggtgggtcgcaag

SEQ ID NO: 253522 - DNA, 30 bp, Artificial Sequence
  Synthetic oligonucleotide
tgaatacttaaaatgaagcctctaggcaag

SEQ ID NO: 253523 - DNA, 30 bp, Artificial Sequence
  Synthetic oligonucleotide
cggaagcggggcgtaagatcccgcggcaag

SEQ ID NO: 253524 - DNA, 30 bp, Artificial Sequence
  Synthetic oligonucleotide
aatgtaggacacatgatatggtgcggcaag

SEQ ID NO: 253525 - DNA, 30 bp, Artificial Sequence
  Synthetic oligonucleotide
aatgtaacgaaatgcggcactcagggcaag

SEQ ID NO: 253526 - DNA, 30 bp, Artificial Sequence
  Synthetic oligonucleotide
gggcagagaggttcgggacagtagggcaag

SEQ ID NO: 253527 - DNA, 30 bp, Artificial Sequence
  Synthetic oligonucleotide
cgcgtgatctatgtcatattcactggcaag

SEQ ID NO: 253528 - DNA, 30 bp, Artificial Sequence
  Synthetic oligonucleotide
tatgccacacacgaaagatttcctggcaag

SEQ ID NO: 253529 - DNA, 30 bp, Artificial Sequence
  Synthetic oligonucleotide
gcgaagcggtgtatttacgcaacatgcaag

SEQ ID NO: 253530 - DNA, 30 bp, Artificial Sequence
  Synthetic oligonucleotide
ggaaaatagatagcctgttgatgatgcaag

SEQ ID NO: 253531 - DNA, 30 bp, Artificial Sequence
  Synthetic oligonucleotide
acccaaagatttaattcttaaaggtgcaag

SEQ ID NO: 253532 - DNA, 30 bp, Artificial Sequence
  Synthetic oligonucleotide
cagtacgtgcagaaactgtgcatttgcaag

SEQ ID NO: 253533 - DNA, 30 bp, Artificial Sequence
  Synthetic oligonucleotide
tatacaacatcagggacacggtaaatcaag

SEQ ID NO: 253534 - DNA, 30 bp, Artificial Sequence
  Synthetic oligonucleotide
gccgcaagtaacatcagtcaatgaatcaag

SEQ ID NO: 253535 - DNA, 30 bp, Artificial Sequence
  Synthetic oligonucleotide
catacatggatgctaagttgccgcatcaag

SEQ ID NO: 253536 - DNA, 30 bp, Artificial Sequence
  Synthetic oligonucleotide
aagtcatccctcttgtgtatgcgcatcaag

SEQ ID NO: 253537 - DNA, 30 bp, Artificial Sequence
  Synthetic oligonucleotide
agagtgatcgtaaagtttgcgacgatcaag

SEQ ID NO: 253538 - DNA, 30 bp, Artificial Sequence
  Synthetic oligonucleotide
ggggtatcgatggcgatttaggggatcaag

SEQ ID NO: 253539 - DNA, 30 bp, Artificial Sequence
  Synthetic oligonucleotide
caaatggtatgttgtggaatatggatcaag

SEQ ID NO: 253540 - DNA, 30 bp, Artificial Sequence
  Synthetic oligonucleotide
cagtatatgtaagaaacgttgcatatcaag

SEQ ID NO: 253541 - DNA, 30 bp, Artificial Sequence
  Synthetic oligonucleotide
ctcatgacgtgccagctactacctatcaag

SEQ ID NO: 253542 - DNA, 30 bp, Artificial Sequence
  Synthetic oligonucleotide
aagagctccagcttcacttgtgctatcaag

SEQ ID NO: 253543 - DNA, 30 bp, Artificial Sequence
  Synthetic oligonucleotide
ccggactttaaggtgggacttcgtatcaag

SEQ ID NO: 253544 - DNA, 30 bp, Artificial Sequence
  Synthetic oligonucleotide
tgaattcacaatttcgcgtggtaactcaag

SEQ ID NO: 253545 - DNA, 30 bp, Artificial Sequence
  Synthetic oligonucleotide
gctaagcaggtgtatagggacgcactcaag

SEQ ID NO: 253546 - DNA, 30 bp, Artificial Sequence
  Synthetic oligonucleotide
aataatcaaagtgacgactggcggctcaag

SEQ ID NO: 253547 - DNA, 30 bp, Artificial Sequence
  Synthetic oligonucleotide
ctgatccagcccctaggcggcggagtcaag

SEQ ID NO: 253548 - DNA, 30 bp, Artificial Sequence
  Synthetic oligonucleotide
ctcaccccttaaagtggttacgtagtcaag

SEQ ID NO: 253549 - DNA, 30 bp, Artificial Sequence
  Synthetic oligonucleotide
taatagtgagccgctacggttgtagtcaag

SEQ ID NO: 253550 - DNA, 30 bp, Artificial Sequence
  Synthetic oligonucleotide
ccggtatgggttgatgcgggaaaggtcaag

SEQ ID NO: 253551 - DNA, 30 bp, Artificial Sequence
  Synthetic oligonucleotide
atgcacgcatacatcggaatttaggtcaag

SEQ ID NO: 253552 - DNA, 30 bp, Artificial Sequence
  Synthetic oligonucleotide
tatccggacgatgtcataggatgtgtcaag

SEQ ID NO: 253553 - DNA, 30 bp, Artificial Sequence
  Synthetic oligonucleotide
cacaacaaacttgagtctgggttgttcaag

SEQ ID NO: 253554 - DNA, 30 bp, Artificial Sequence
  Synthetic oligonucleotide
agcatcgcatgtcgttttgagtctttcaag

SEQ ID NO: 253555 - DNA, 30 bp, Artificial Sequence
  Synthetic oligonucleotide
gcctcgatactagctcgatgtcgtttcaag

SEQ ID NO: 253556 - DNA, 30 bp, Artificial Sequence
  Synthetic oligonucleotide
tactctaccaggtcccacacgccaaagaag

SEQ ID NO: 253557 - DNA, 30 bp, Artificial Sequence
  Synthetic oligonucleotide
aagttttacatagatggccgcgcaaagaag

SEQ ID NO: 253558 - DNA, 30 bp, Artificial Sequence
  Synthetic oligonucleotide
acccgatcggttacttcgaggtcaaagaag

SEQ ID NO: 253559 - DNA, 30 bp, Artificial Sequence
  Synthetic oligonucleotide
cgggctacatatccacgcgcactaaagaag

SEQ ID NO: 253560 - DNA, 30 bp, Artificial Sequence
  Synthetic oligonucleotide
tttacgctgattctactcgctaacaagaag

SEQ ID NO: 253561 - DNA, 30 bp, Artificial Sequence
  Synthetic oligonucleotide
tatatacaatcacgtgatgtcccgaagaag

SEQ ID NO: 253562 - DNA, 30 bp, Artificial Sequence
  Synthetic oligonucleotide
aaaatcaaaaacgcctagcctgaacagaag

SEQ ID NO: 253563 - DNA, 30 bp, Artificial Sequence
  Synthetic oligonucleotide
ctagcttgctgatctgttcgtgaacagaag

SEQ ID NO: 253564 - DNA, 30 bp, Artificial Sequence
  Synthetic oligonucleotide
ctgtgacttcacaatgtatagctacagaag

SEQ ID NO: 253565 - DNA, 30 bp, Artificial Sequence
  Synthetic oligonucleotide
ttgctctacagatcggctgtggaccagaag

SEQ ID NO: 253566 - DNA, 30 bp, Artificial Sequence
  Synthetic oligonucleotide
gaggagtccgctcaatgacaggcgcagaag

SEQ ID NO: 253567 - DNA, 30 bp, Artificial Sequence
  Synthetic oligonucleotide
ctgttgctgtttcgtgcgtcaaatcagaag

SEQ ID NO: 253568 - DNA, 30 bp, Artificial Sequence
  Synthetic oligonucleotide
cactgaagcgcacctcttcccggtcagaag

SEQ ID NO: 253569 - DNA, 30 bp, Artificial Sequence
  Synthetic oligonucleotide
ctagaagatggactcgaccgcctcgagaag

SEQ ID NO: 253570 - DNA, 30 bp, Artificial Sequence
  Synthetic oligonucleotide
agccaatatagtacacgaccccgtgagaag

SEQ ID NO: 253571 - DNA, 30 bp, Artificial Sequence
  Synthetic oligonucleotide
aaggttcggttcataattccatgatagaag

SEQ ID NO: 253572 - DNA, 30 bp, Artificial Sequence
  Synthetic oligonucleotide
cattttttgctccggaagacggtgtagaag

SEQ ID NO: 253573 - DNA, 30 bp, Artificial Sequence
  Synthetic oligonucleotide
taagcccaacagcgatagcaacgcacgaag

SEQ ID NO: 253574 - DNA, 30 bp, Artificial Sequence
  Synthetic oligonucleotide
agctgccatttctgtattatgtagacgaag

SEQ ID NO: 253575 - DNA, 30 bp, Artificial Sequence
  Synthetic oligonucleotide
attcacggatgtaattaacgttatacgaag

SEQ ID NO: 253576 - DNA, 30 bp, Artificial Sequence
  Synthetic oligonucleotide
gcatgttaggtggaccgtgaagcgccgaag

SEQ ID NO: 253577 - DNA, 30 bp, Artificial Sequence
  Synthetic oligonucleotide
ggtgggtccattggaacttaaaatccgaag

SEQ ID NO: 253578 - DNA, 30 bp, Artificial Sequence
  Synthetic oligonucleotide
tagaatcgcatactgagcccacatccgaag

SEQ ID NO: 253579 - DNA, 30 bp, Artificial Sequence
  Synthetic oligonucleotide
agcacgggtttttgagaggtgtctccgaag

SEQ ID NO: 253580 - DNA, 30 bp, Artificial Sequence
  Synthetic oligonucleotide
ttttaccatagatgtttcggagttccgaag

SEQ ID NO: 253581 - DNA, 30 bp, Artificial Sequence
  Synthetic oligonucleotide
tgaaaaaattcgctggctcctgaagcgaag

SEQ ID NO: 253582 - DNA, 30 bp, Artificial Sequence
  Synthetic oligonucleotide
agagtagcgggtttgagtagaacagcgaag

SEQ ID NO: 253583 - DNA, 30 bp, Artificial Sequence
  Synthetic oligonucleotide
gcagccctgacttctaggtgcacagcgaag

SEQ ID NO: 253584 - DNA, 30 bp, Artificial Sequence
  Synthetic oligonucleotide
atcatatttaaatcccagtaacacgcgaag

SEQ ID NO: 253585 - DNA, 30 bp, Artificial Sequence
  Synthetic oligonucleotide
tctcctggcgttaatagcgttcctgcgaag

SEQ ID NO: 253586 - DNA, 30 bp, Artificial Sequence
  Synthetic oligonucleotide
gcatttgctgaacatctcggtcaatcgaag

SEQ ID NO: 253587 - DNA, 30 bp, Artificial Sequence
  Synthetic oligonucleotide
gtagacaggatggccgggcccttatcgaag

SEQ ID NO: 253588 - DNA, 30 bp, Artificial Sequence
  Synthetic oligonucleotide
aatcgcccgggactttggtcattctcgaag

SEQ ID NO: 253589 - DNA, 30 bp, Artificial Sequence
  Synthetic oligonucleotide
tcattcattagccagtaggggccgtcgaag

SEQ ID NO: 253590 - DNA, 30 bp, Artificial Sequence
  Synthetic oligonucleotide
tctcaattttaaaaatctgatgggtcgaag

SEQ ID NO: 253591 - DNA, 30 bp, Artificial Sequence
  Synthetic oligonucleotide
atatggaaggcacacattcattgttcgaag

SEQ ID NO: 253592 - DNA, 30 bp, Artificial Sequence
  Synthetic oligonucleotide
tcatcagggtttcgtttagcagcaaggaag

SEQ ID NO: 253593 - DNA, 30 bp, Artificial Sequence
  Synthetic oligonucleotide
aaaaatgactatttagacgtcggaaggaag

SEQ ID NO: 253594 - DNA, 30 bp, Artificial Sequence
  Synthetic oligonucleotide
ggcgactagccctatcgtttaataaggaag

SEQ ID NO: 253595 - DNA, 30 bp, Artificial Sequence
  Synthetic oligonucleotide
tcgtagcttaaattttgaaattacaggaag

SEQ ID NO: 253596 - DNA, 30 bp, Artificial Sequence
  Synthetic oligonucleotide
cttaatttcagagtagtggttatcaggaag

SEQ ID NO: 253597 - DNA, 30 bp, Artificial Sequence
  Synthetic oligonucleotide
aagagtttagcaggaattctattgaggaag

SEQ ID NO: 253598 - DNA, 30 bp, Artificial Sequence
  Synthetic oligonucleotide
atggtgctcatagtgacgtatactaggaag

SEQ ID NO: 253599 - DNA, 30 bp, Artificial Sequence
  Synthetic oligonucleotide
gtatcggcaggtagctgaaaactacggaag

SEQ ID NO: 253600 - DNA, 30 bp, Artificial Sequence
  Synthetic oligonucleotide
taaattatgcccccgtcactgttacggaag

SEQ ID NO: 253601 - DNA, 30 bp, Artificial Sequence
  Synthetic oligonucleotide
agaatgttattttcaaccctagggcggaag

SEQ ID NO: 253602 - DNA, 30 bp, Artificial Sequence
  Synthetic oligonucleotide
taattgcgatttaagccagctcgagggaag

SEQ ID NO: 253603 - DNA, 30 bp, Artificial Sequence
  Synthetic oligonucleotide
atgtttttgacttttcttacttacgggaag

SEQ ID NO: 253604 - DNA, 30 bp, Artificial Sequence
  Synthetic oligonucleotide
tgccattcgtgatccaatacatgatggaag

SEQ ID NO: 253605 - DNA, 30 bp, Artificial Sequence
  Synthetic oligonucleotide
gctatacgtacccagtcccgctgatggaag

SEQ ID NO: 253606 - DNA, 30 bp, Artificial Sequence
  Synthetic oligonucleotide
cccatgtgtcaccccgaaccattatggaag

SEQ ID NO: 253607 - DNA, 30 bp, Artificial Sequence
  Synthetic oligonucleotide
tggtcttaggatggaaggtcattatggaag

SEQ ID NO: 253608 - DNA, 30 bp, Artificial Sequence
  Synthetic oligonucleotide
ccactcccataaaaagtccttccctggaag

SEQ ID NO: 253609 - DNA, 30 bp, Artificial Sequence
  Synthetic oligonucleotide
gcagacacgggatttaggccatcctggaag

SEQ ID NO: 253610 - DNA, 30 bp, Artificial Sequence
  Synthetic oligonucleotide
gatatccgtccaacgtgcaccttctggaag

SEQ ID NO: 253611 - DNA, 30 bp, Artificial Sequence
  Synthetic oligonucleotide
cattattctaagtggttgcctaagtggaag

SEQ ID NO: 253612 - DNA, 30 bp, Artificial Sequence
  Synthetic oligonucleotide
aaaaccgtatgagtcctccatcattggaag

SEQ ID NO: 253613 - DNA, 30 bp, Artificial Sequence
  Synthetic oligonucleotide
tgcttcagttgcccaggtgtcaaaatgaag

SEQ ID NO: 253614 - DNA, 30 bp, Artificial Sequence
  Synthetic oligonucleotide
aattcgaatttgggaagtgggatcatgaag

SEQ ID NO: 253615 - DNA, 30 bp, Artificial Sequence
  Synthetic oligonucleotide
ctatcaggaggggtagcatgtgggatgaag

SEQ ID NO: 253616 - DNA, 30 bp, Artificial Sequence
  Synthetic oligonucleotide
gcttcgaggctcgtccttgacggtatgaag

SEQ ID NO: 253617 - DNA, 30 bp, Artificial Sequence
  Synthetic oligonucleotide
aagattctggaaacgtatggtggtatgaag

SEQ ID NO: 253618 - DNA, 30 bp, Artificial Sequence
  Synthetic oligonucleotide
gcgcggtgcatatcccgcacacttatgaag

SEQ ID NO: 253619 - DNA, 30 bp, Artificial Sequence
  Synthetic oligonucleotide
cgtcgaagggctttgacgcatgttatgaag

SEQ ID NO: 253620 - DNA, 30 bp, Artificial Sequence
  Synthetic oligonucleotide
taggttattagctaggcgacctgcctgaag

SEQ ID NO: 253621 - DNA, 30 bp, Artificial Sequence
  Synthetic oligonucleotide
ttgagatatttcgatatagtcaggctgaag

SEQ ID NO: 253622 - DNA, 30 bp, Artificial Sequence
  Synthetic oligonucleotide
ttacgagcgatggcccgatgttatctgaag

SEQ ID NO: 253623 - DNA, 30 bp, Artificial Sequence
  Synthetic oligonucleotide
cacagtgtccgtatggtaaattcagtgaag

SEQ ID NO: 253624 - DNA, 30 bp, Artificial Sequence
  Synthetic oligonucleotide
atgggaaagaaaatgttaatcatcgtgaag

SEQ ID NO: 253625 - DNA, 30 bp, Artificial Sequence
  Synthetic oligonucleotide
tgggatagcatcgaatggtatggcttgaag

SEQ ID NO: 253626 - DNA, 30 bp, Artificial Sequence
  Synthetic oligonucleotide
ggactactgatgatcgccgttcatttgaag

SEQ ID NO: 253627 - DNA, 30 bp, Artificial Sequence
  Synthetic oligonucleotide
atactccaggtggctacagtagttttgaag

SEQ ID NO: 253628 - DNA, 30 bp, Artificial Sequence
  Synthetic oligonucleotide
actcaggctcaacggtcgcatgacaataag

SEQ ID NO: 253629 - DNA, 30 bp, Artificial Sequence
  Synthetic oligonucleotide
agaacagccagctcagtatatctcaataag

SEQ ID NO: 253630 - DNA, 30 bp, Artificial Sequence
  Synthetic oligonucleotide
cttaaatgggtaatacaatcacggaataag

SEQ ID NO: 253631 - DNA, 30 bp, Artificial Sequence
  Synthetic oligonucleotide
gatggggcttcaatcaaggtagggaataag

SEQ ID NO: 253632 - DNA, 30 bp, Artificial Sequence
  Synthetic oligonucleotide
cagtgactatttatatatacgaataataag

SEQ ID NO: 253633 - DNA, 30 bp, Artificial Sequence
  Synthetic oligonucleotide
ttctggcgacaacataatggctataataag

SEQ ID NO: 253634 - DNA, 30 bp, Artificial Sequence
  Synthetic oligonucleotide
cctgaattcaggcttattgaaagtaataag

SEQ ID NO: 253635 - DNA, 30 bp, Artificial Sequence
  Synthetic oligonucleotide
tcgcttctcaacagtatgtcatttaataag

SEQ ID NO: 253636 - DNA, 30 bp, Artificial Sequence
  Synthetic oligonucleotide
gagattacagcagaagaagagtcacataag

SEQ ID NO: 253637 - DNA, 30 bp, Artificial Sequence
  Synthetic oligonucleotide
acactgtgtaaatccggtgccggacataag

SEQ ID NO: 253638 - DNA, 30 bp, Artificial Sequence
  Synthetic oligonucleotide
cggtgtaagcgtcggcggtgacaccataag

SEQ ID NO: 253639 - DNA, 30 bp, Artificial Sequence
  Synthetic oligonucleotide
ttatcatgtatttgtttgatccaccataag

SEQ ID NO: 253640 - DNA, 30 bp, Artificial Sequence
  Synthetic oligonucleotide
tattgaaggttacgagagtcactccataag

SEQ ID NO: 253641 - DNA, 30 bp, Artificial Sequence
  Synthetic oligonucleotide
tacgaatgatttacggaacaatctcataag

SEQ ID NO: 253642 - DNA, 30 bp, Artificial Sequence
  Synthetic oligonucleotide
gcagtggggttaactacgattcgagataag

SEQ ID NO: 253643 - DNA, 30 bp, Artificial Sequence
  Synthetic oligonucleotide
ctcttataccaagtaacgagaatagataag

SEQ ID NO: 253644 - DNA, 30 bp, Artificial Sequence
  Synthetic oligonucleotide
cagcagctgtaagaggcagagatagataag

SEQ ID NO: 253645 - DNA, 30 bp, Artificial Sequence
  Synthetic oligonucleotide
cgctcggagtttccacatccgcgcgataag

SEQ ID NO: 253646 - DNA, 30 bp, Artificial Sequence
  Synthetic oligonucleotide
ggatttagttggcacataaacaaggataag

SEQ ID NO: 253647 - DNA, 30 bp, Artificial Sequence
  Synthetic oligonucleotide
ttgcgtagtatgtgctccaccatggataag

SEQ ID NO: 253648 - DNA, 30 bp, Artificial Sequence
  Synthetic oligonucleotide
ggttccaacgccaacctattctatgataag

SEQ ID NO: 253649 - DNA, 30 bp, Artificial Sequence
  Synthetic oligonucleotide
gaatagttggctcaagataaggctgataag

SEQ ID NO: 253650 - DNA, 30 bp, Artificial Sequence
  Synthetic oligonucleotide
agatttaaccgcaaaagctgcagtgataag

SEQ ID NO: 253651 - DNA, 30 bp, Artificial Sequence
  Synthetic oligonucleotide
gttctacgggttttgcggagacgtgataag

SEQ ID NO: 253652 - DNA, 30 bp, Artificial Sequence
  Synthetic oligonucleotide
tatctcagtccgtgggtgcaatgtgataag

SEQ ID NO: 253653 - DNA, 30 bp, Artificial Sequence
  Synthetic oligonucleotide
atgttcagatttctcgggtcaattgataag

SEQ ID NO: 253654 - DNA, 30 bp, Artificial Sequence
  Synthetic oligonucleotide
tcgtaccacaccgtcaacgacgtatataag

SEQ ID NO: 253655 - DNA, 30 bp, Artificial Sequence
  Synthetic oligonucleotide
aggcaaatacccaggccatgggtatataag

SEQ ID NO: 253656 - DNA, 30 bp, Artificial Sequence
  Synthetic oligonucleotide
taatcgtccgatactactcaatcctataag

SEQ ID NO: 253657 - DNA, 30 bp, Artificial Sequence
  Synthetic oligonucleotide
acttcaaatggtttgtcgataaagtataag

SEQ ID NO: 253658 - DNA, 30 bp, Artificial Sequence
  Synthetic oligonucleotide
caggaaaaggtctttgtgcggtggtataag

SEQ ID NO: 253659 - DNA, 30 bp, Artificial Sequence
  Synthetic oligonucleotide
agctctcagttactactgcacaattataag

SEQ ID NO: 253660 - DNA, 30 bp, Artificial Sequence
  Synthetic oligonucleotide
tcatgggaaagatcaattattatttataag

SEQ ID NO: 253661 - DNA, 30 bp, Artificial Sequence
  Synthetic oligonucleotide
ccaaacgataggcgcctagtggaaactaag

SEQ ID NO: 253662 - DNA, 30 bp, Artificial Sequence
  Synthetic oligonucleotide
tgcgtgccgcaaataactgtaacaactaag

SEQ ID NO: 253663 - DNA, 30 bp, Artificial Sequence
  Synthetic oligonucleotide
agtaatccgaaattagagtgggtaactaag

SEQ ID NO: 253664 - DNA, 30 bp, Artificial Sequence
  Synthetic oligonucleotide
gcgataggagccctattgcgtaacactaag

SEQ ID NO: 253665 - DNA, 30 bp, Artificial Sequence
  Synthetic oligonucleotide
gcttgtactaagctacggccacccactaag

SEQ ID NO: 253666 - DNA, 30 bp, Artificial Sequence
  Synthetic oligonucleotide
agaagtaatcagcgacttgagcagactaag

SEQ ID NO: 253667 - DNA, 30 bp, Artificial Sequence
  Synthetic oligonucleotide
accggctacacgtggtcttagtctactaag

SEQ ID NO: 253668 - DNA, 30 bp, Artificial Sequence
  Synthetic oligonucleotide
gaccctaagcgtggatgcctaattactaag

SEQ ID NO: 253669 - DNA, 30 bp, Artificial Sequence
  Synthetic oligonucleotide
ggccttttcgcgtcggtatgatctcctaag

SEQ ID NO: 253670 - DNA, 30 bp, Artificial Sequence
  Synthetic oligonucleotide
tatccaggaaaggttccattggttcctaag

SEQ ID NO: 253671 - DNA, 30 bp, Artificial Sequence
  Synthetic oligonucleotide
atctgcataaaccacgggcccaatgctaag

SEQ ID NO: 253672 - DNA, 30 bp, Artificial Sequence
  Synthetic oligonucleotide
tgtcaggcgttagctccgaacactgctaag

SEQ ID NO: 253673 - DNA, 30 bp, Artificial Sequence
  Synthetic oligonucleotide
aggctatttttgaagagcgtcacatctaag

SEQ ID NO: 253674 - DNA, 30 bp, Artificial Sequence
  Synthetic oligonucleotide
tgtacattccgtatagagtgtagatctaag

SEQ ID NO: 253675 - DNA, 30 bp, Artificial Sequence
  Synthetic oligonucleotide
aagtatatattcgcctggcccgtatctaag

SEQ ID NO: 253676 - DNA, 30 bp, Artificial Sequence
  Synthetic oligonucleotide
gccgtcatgattactgagggcgcctctaag

SEQ ID NO: 253677 - DNA, 30 bp, Artificial Sequence
  Synthetic oligonucleotide
gtatagctgaattcggagataatctctaag

SEQ ID NO: 253678 - DNA, 30 bp, Artificial Sequence
  Synthetic oligonucleotide
tggctagccagtatcatgattaagtctaag

SEQ ID NO: 253679 - DNA, 30 bp, Artificial Sequence
  Synthetic oligonucleotide
ttcacggttggtccgatccttttttctaag

SEQ ID NO: 253680 - DNA, 30 bp, Artificial Sequence
  Synthetic oligonucleotide
aacaagattgtgaagcaagcttctagtaag

SEQ ID NO: 253681 - DNA, 30 bp, Artificial Sequence
  Synthetic oligonucleotide
caaattacacgtagtaaagcgagtagtaag

SEQ ID NO: 253682 - DNA, 30 bp, Artificial Sequence
  Synthetic oligonucleotide
gttcatattctaataattggcacccgtaag

SEQ ID NO: 253683 - DNA, 30 bp, Artificial Sequence
  Synthetic oligonucleotide
aaagcggcagtactatttcttgtgcgtaag

SEQ ID NO: 253684 - DNA, 30 bp, Artificial Sequence
  Synthetic oligonucleotide
gagctagagaaacgccaatagccaggtaag

SEQ ID NO: 253685 - DNA, 30 bp, Artificial Sequence
  Synthetic oligonucleotide
atgaaggggtattgctgaaacttaggtaag

SEQ ID NO: 253686 - DNA, 30 bp, Artificial Sequence
  Synthetic oligonucleotide
ctagaatcgaattctagacacaggggtaag

SEQ ID NO: 253687 - DNA, 30 bp, Artificial Sequence
  Synthetic oligonucleotide
agcttgaaacagcaatttagtctgggtaag

SEQ ID NO: 253688 - DNA, 30 bp, Artificial Sequence
  Synthetic oligonucleotide
cccaccatgcgggatatatcgaatggtaag

SEQ ID NO: 253689 - DNA, 30 bp, Artificial Sequence
  Synthetic oligonucleotide
taacgtctagatattccgtaaactggtaag

SEQ ID NO: 253690 - DNA, 30 bp, Artificial Sequence
  Synthetic oligonucleotide
cactatcacccctgctaggcaggtggtaag

SEQ ID NO: 253691 - DNA, 30 bp, Artificial Sequence
  Synthetic oligonucleotide
ttaccctgctgacaagttacgtttggtaag

SEQ ID NO: 253692 - DNA, 30 bp, Artificial Sequence
  Synthetic oligonucleotide
gaggatttcataagtagtaagccctgtaag

SEQ ID NO: 253693 - DNA, 30 bp, Artificial Sequence
  Synthetic oligonucleotide
ggaggagattagggaatattagagtgtaag

SEQ ID NO: 253694 - DNA, 30 bp, Artificial Sequence
  Synthetic oligonucleotide
ttctggacctggcgatcactcgattgtaag

SEQ ID NO: 253695 - DNA, 30 bp, Artificial Sequence
  Synthetic oligonucleotide
ccagtgaactcttcttctcccggttgtaag

SEQ ID NO: 253696 - DNA, 30 bp, Artificial Sequence
  Synthetic oligonucleotide
ccggatgagaaatttaatgacctttgtaag

SEQ ID NO: 253697 - DNA, 30 bp, Artificial Sequence
  Synthetic oligonucleotide
ttggggggcaacggggaggtatcaattaag

SEQ ID NO: 253698 - DNA, 30 bp, Artificial Sequence
  Synthetic oligonucleotide
gtggatctcgatagtgggcgggcgattaag

SEQ ID NO: 253699 - DNA, 30 bp, Artificial Sequence
  Synthetic oligonucleotide
cgaccacgcttcgctatagcgatgattaag

SEQ ID NO: 253700 - DNA, 30 bp, Artificial Sequence
  Synthetic oligonucleotide
ccacggcacggggcaacataattgattaag

SEQ ID NO: 253701 - DNA, 30 bp, Artificial Sequence
  Synthetic oligonucleotide
aaacatgaattggcgcagggagatattaag

SEQ ID NO: 253702 - DNA, 30 bp, Artificial Sequence
  Synthetic oligonucleotide
cgtatacagcgaaggtagcacgatattaag

SEQ ID NO: 253703 - DNA, 30 bp, Artificial Sequence
  Synthetic oligonucleotide
gttatacattggcaatggagcctacttaag

SEQ ID NO: 253704 - DNA, 30 bp, Artificial Sequence
  Synthetic oligonucleotide
gggaaaatgtgttacagagatgcgcttaag

SEQ ID NO: 253705 - DNA, 30 bp, Artificial Sequence
  Synthetic oligonucleotide
cttgctgtcgaccgcgtagatcaagttaag

SEQ ID NO: 253706 - DNA, 30 bp, Artificial Sequence
  Synthetic oligonucleotide
ttcgctcatttgattgtcaagttagttaag

SEQ ID NO: 253707 - DNA, 30 bp, Artificial Sequence
  Synthetic oligonucleotide
ggactcaacaatttgacaaaaaacgttaag

SEQ ID NO: 253708 - DNA, 30 bp, Artificial Sequence
  Synthetic oligonucleotide
cggacgacggcattggctaataacgttaag

SEQ ID NO: 253709 - DNA, 30 bp, Artificial Sequence
  Synthetic oligonucleotide
gaaatgtcttacgacgatgaccccgttaag

SEQ ID NO: 253710 - DNA, 30 bp, Artificial Sequence
  Synthetic oligonucleotide
gccaaaaaaacggcgcactgtcgcgttaag

SEQ ID NO: 253711 - DNA, 30 bp, Artificial Sequence
  Synthetic oligonucleotide
tgtagggttaggctccccccagtcgttaag

SEQ ID NO: 253712 - DNA, 30 bp, Artificial Sequence
  Synthetic oligonucleotide
tagcgtttccaaacgctttggtaggttaag

SEQ ID NO: 253713 - DNA, 30 bp, Artificial Sequence
  Synthetic oligonucleotide
atactccatatgggaaagccgtgggttaag

SEQ ID NO: 253714 - DNA, 30 bp, Artificial Sequence
  Synthetic oligonucleotide
catacgaggagaagaccgtcgttggttaag

SEQ ID NO: 253715 - DNA, 30 bp, Artificial Sequence
  Synthetic oligonucleotide
cagatgtatctcagaagtttcaatgttaag

SEQ ID NO: 253716 - DNA, 30 bp, Artificial Sequence
  Synthetic oligonucleotide
gtactagagttaccaataggataatttaag

SEQ ID NO: 253717 - DNA, 30 bp, Artificial Sequence
  Synthetic oligonucleotide
aacgccgtcaggccagaagttggatttaag

SEQ ID NO: 253718 - DNA, 30 bp, Artificial Sequence
  Synthetic oligonucleotide
aaaggggtccaacgtggcaggagctttaag

SEQ ID NO: 253719 - DNA, 30 bp, Artificial Sequence
  Synthetic oligonucleotide
agtcgaaagcattgacgggcatagtttaag

SEQ ID NO: 253720 - DNA, 30 bp, Artificial Sequence
  Synthetic oligonucleotide
tatgcttggctggctatgtcgacgtttaag

SEQ ID NO: 253721 - DNA, 30 bp, Artificial Sequence
  Synthetic oligonucleotide
gtaattcggatggccacggcgaggtttaag

SEQ ID NO: 253722 - DNA, 30 bp, Artificial Sequence
  Synthetic oligonucleotide
caggtgccgcagaaatactcatattttaag

SEQ ID NO: 253723 - DNA, 30 bp, Artificial Sequence
  Synthetic oligonucleotide
cctatcgtaggcggaagcccggaaaaacag

SEQ ID NO: 253724 - DNA, 30 bp, Artificial Sequence
  Synthetic oligonucleotide
tgtgtgatgagacagtacgtaagcaaacag

SEQ ID NO: 253725 - DNA, 29 bp, Artificial Sequence
  Synthetic oligonucleotide
cgcagttctgggaaagatgaccgaaacag

SEQ ID NO: 253726 - DNA, 30 bp, Artificial Sequence
  Synthetic oligonucleotide
caacgatgagaatcaacgcacatgaaacag

SEQ ID NO: 253727 - DNA, 30 bp, Artificial Sequence
  Synthetic oligonucleotide
ttggaactggacacgtacaacttgaaacag

SEQ ID NO: 253728 - DNA, 30 bp, Artificial Sequence
  Synthetic oligonucleotide
gctctttttagctccgaaaacttacaacag

SEQ ID NO: 253729 - DNA, 30 bp, Artificial Sequence
  Synthetic oligonucleotide
gaccgtagtagacactgagcactccaacag

SEQ ID NO: 253730 - DNA, 30 bp, Artificial Sequence
  Synthetic oligonucleotide
acaactgttctcgccgtatggtatcaacag

SEQ ID NO: 253731 - DNA, 30 bp, Artificial Sequence
  Synthetic oligonucleotide
aaaagtttggatcatgaaagcagagaacag

SEQ ID NO: 253732 - DNA, 30 bp, Artificial Sequence
  Synthetic oligonucleotide
ccacggtttgtcagagccgttgacgaacag

SEQ ID NO: 253733 - DNA, 30 bp, Artificial Sequence
  Synthetic oligonucleotide
gtataggtcttcttggcggtttctgaacag

SEQ ID NO: 253734 - DNA, 30 bp, Artificial Sequence
  Synthetic oligonucleotide
ttattgggacaatgggcgatgtgtgaacag

SEQ ID NO: 253735 - DNA, 30 bp, Artificial Sequence
  Synthetic oligonucleotide
aagcctagactgatgtattagtaataacag

SEQ ID NO: 253736 - DNA, 30 bp, Artificial Sequence
  Synthetic oligonucleotide
tgggaatatcattgtggcaggtaataacag

SEQ ID NO: 253737 - DNA, 30 bp, Artificial Sequence
  Synthetic oligonucleotide
ggcccgcggcggagatgagagcactaacag

SEQ ID NO: 253738 - DNA, 30 bp, Artificial Sequence
  Synthetic oligonucleotide
acatgtaatgcattcagagcggactaacag

SEQ ID NO: 253739 - DNA, 30 bp, Artificial Sequence
  Synthetic oligonucleotide
tagaaccttggcgtaaggatgggctaacag

SEQ ID NO: 253740 - DNA, 30 bp, Artificial Sequence
  Synthetic oligonucleotide
aaggaccagatttcactcccgtgctaacag

SEQ ID NO: 253741 - DNA, 30 bp, Artificial Sequence
  Synthetic oligonucleotide
acgacctaaaatacctctttaaattaacag

SEQ ID NO: 253742 - DNA, 30 bp, Artificial Sequence
  Synthetic oligonucleotide
atgctaaatctatcatgagagggcacacag

SEQ ID NO: 253743 - DNA, 30 bp, Artificial Sequence
  Synthetic oligonucleotide
agactccgcattcagagggtaatcacacag

SEQ ID NO: 253744 - DNA, 30 bp, Artificial Sequence
  Synthetic oligonucleotide
acctccactataaaaaacagttagacacag

SEQ ID NO: 253745 - DNA, 30 bp, Artificial Sequence
  Synthetic oligonucleotide
atggtatcttgaacgacggactcaccacag

SEQ ID NO: 253746 - DNA, 30 bp, Artificial Sequence
  Synthetic oligonucleotide
aaaacggcactataaatgttgacgccacag

SEQ ID NO: 253747 - DNA, 30 bp, Artificial Sequence
  Synthetic oligonucleotide
gaggtaaatggctagcagtccacagcacag

SEQ ID NO: 253748 - DNA, 30 bp, Artificial Sequence
  Synthetic oligonucleotide
acggctagtccacgcggggcaggagcacag

SEQ ID NO: 253749 - DNA, 30 bp, Artificial Sequence
  Synthetic oligonucleotide
taatactgaaaagttttcgaagtagcacag

SEQ ID NO: 253750 - DNA, 30 bp, Artificial Sequence
  Synthetic oligonucleotide
gcacgcttgagtctcatgctaagggcacag

SEQ ID NO: 253751 - DNA, 30 bp, Artificial Sequence
  Synthetic oligonucleotide
aaatactgcacggtacctgttagtgcacag

SEQ ID NO: 253752 - DNA, 30 bp, Artificial Sequence
  Synthetic oligonucleotide
tgcgcgcgccttcactatagagactcacag

SEQ ID NO: 253753 - DNA, 30 bp, Artificial Sequence
  Synthetic oligonucleotide
gacttttggttgggtcctgggcagtcacag

SEQ ID NO: 253754 - DNA, 30 bp, Artificial Sequence
  Synthetic oligonucleotide
gttgtacccattatcgggaggacgtcacag

SEQ ID NO: 253755 - DNA, 30 bp, Artificial Sequence
  Synthetic oligonucleotide
tacgacaaagtcgccgaatagctttcacag

SEQ ID NO: 253756 - DNA, 30 bp, Artificial Sequence
  Synthetic oligonucleotide
tattccaccaatcaaactagaatgagacag

SEQ ID NO: 253757 - DNA, 30 bp, Artificial Sequence
  Synthetic oligonucleotide
aatagtgtcttcagctgtacaaaacgacag

SEQ ID NO: 253758 - DNA, 30 bp, Artificial Sequence
  Synthetic oligonucleotide
aggaagaaactttcaagtttacgccgacag

SEQ ID NO: 253759 - DNA, 30 bp, Artificial Sequence
  Synthetic oligonucleotide
taaacgacagatccagcattcttgcgacag

SEQ ID NO: 253760 - DNA, 30 bp, Artificial Sequence
  Synthetic oligonucleotide
cttatttccgctggaatcggtactcgacag

SEQ ID NO: 253761 - DNA, 31 bp, Artificial Sequence
  Synthetic oligonucleotide
agtagcgtttagtggcaagacgctaggacag

SEQ ID NO: 253762 - DNA, 30 bp, Artificial Sequence
  Synthetic oligonucleotide
tccgaattcctgaatgtgcttagcggacag

SEQ ID NO: 253763 - DNA, 30 bp, Artificial Sequence
  Synthetic oligonucleotide
acgtggagcgcactgccaaagggcggacag

SEQ ID NO: 253764 - DNA, 30 bp, Artificial Sequence
  Synthetic oligonucleotide
gagagatatgtgtattggaaactgggacag

SEQ ID NO: 253765 - DNA, 30 bp, Artificial Sequence
  Synthetic oligonucleotide
tacgtggtatattggcttccggatggacag

SEQ ID NO: 253766 - DNA, 30 bp, Artificial Sequence
  Synthetic oligonucleotide
tcagaagattgggtgtggtcgtatggacag

SEQ ID NO: 253767 - DNA, 30 bp, Artificial Sequence
  Synthetic oligonucleotide
gccatgaggcaaagttatcgttgatgacag

SEQ ID NO: 253768 - DNA, 30 bp, Artificial Sequence
  Synthetic oligonucleotide
ttaccttacccaggattttcacactgacag

SEQ ID NO: 253769 - DNA, 30 bp, Artificial Sequence
  Synthetic oligonucleotide
aggataatgtccatgtttgtatcgtgacag

SEQ ID NO: 253770 - DNA, 30 bp, Artificial Sequence
  Synthetic oligonucleotide
atggcgcttatagcatgcgtacggtgacag

SEQ ID NO: 253771 - DNA, 30 bp, Artificial Sequence
  Synthetic oligonucleotide
tgaatccttgccaaatcaatagggtgacag

SEQ ID NO: 253772 - DNA, 30 bp, Artificial Sequence
  Synthetic oligonucleotide
tattttggtgggagttagtaggtgtgacag

SEQ ID NO: 253773 - DNA, 30 bp, Artificial Sequence
  Synthetic oligonucleotide
cttaacgccgagcgaggccgcagttgacag

SEQ ID NO: 253774 - DNA, 30 bp, Artificial Sequence
  Synthetic oligonucleotide
tgtgttcgcactcttctgaccaaaatacag

SEQ ID NO: 253775 - DNA, 30 bp, Artificial Sequence
  Synthetic oligonucleotide
ttgaaagagcggaatattataccaatacag

SEQ ID NO: 253776 - DNA, 30 bp, Artificial Sequence
  Synthetic oligonucleotide
tacgcgacgcgaggacagaactgaatacag

SEQ ID NO: 253777 - DNA, 30 bp, Artificial Sequence
  Synthetic oligonucleotide
caatcttaaattcgtctgcaaaccatacag

SEQ ID NO: 253778 - DNA, 30 bp, Artificial Sequence
  Synthetic oligonucleotide
catggggatctatctgctcagtggatacag

SEQ ID NO: 253779 - DNA, 30 bp, Artificial Sequence
  Synthetic oligonucleotide
caggaagtttaaggcggataatttatacag

SEQ ID NO: 253780 - DNA, 31 bp, Artificial Sequence
  Synthetic oligonucleotide
gttaacgagtcatgggtagctacgactacag

SEQ ID NO: 253781 - DNA, 30 bp, Artificial Sequence
  Synthetic oligonucleotide
ccacggccaagccccccgggatagctacag

SEQ ID NO: 253782 - DNA, 30 bp, Artificial Sequence
  Synthetic oligonucleotide
tatggtagaggacctgcattgcggctacag

SEQ ID NO: 253783 - DNA, 30 bp, Artificial Sequence
  Synthetic oligonucleotide
gaaccgccaatactactccgcaatctacag

SEQ ID NO: 253784 - DNA, 30 bp, Artificial Sequence
  Synthetic oligonucleotide
accctcgccgctcctccaccacacgtacag

SEQ ID NO: 253785 - DNA, 30 bp, Artificial Sequence
  Synthetic oligonucleotide
ccactaacaataacacggcaggcggtacag

SEQ ID NO: 253786 - DNA, 30 bp, Artificial Sequence
  Synthetic oligonucleotide
tgagtagtgcctcgtgaaatgagggtacag

SEQ ID NO: 253787 - DNA, 30 bp, Artificial Sequence
  Synthetic oligonucleotide
caaggcgactaaatcggtaatatattacag

SEQ ID NO: 253788 - DNA, 30 bp, Artificial Sequence
  Synthetic oligonucleotide
ccagggccggaaagattcttcctattacag

SEQ ID NO: 253789 - DNA, 30 bp, Artificial Sequence
  Synthetic oligonucleotide
gcacccaagtccagtccacgacgcttacag

SEQ ID NO: 253790 - DNA, 30 bp, Artificial Sequence
  Synthetic oligonucleotide
aattccaatgttgattgcttgacgttacag

SEQ ID NO: 253791 - DNA, 30 bp, Artificial Sequence
  Synthetic oligonucleotide
acaattaaggcttgtttgcccgatttacag

SEQ ID NO: 253792 - DNA, 30 bp, Artificial Sequence
  Synthetic oligonucleotide
cctgaccagacccagggattcggtttacag

SEQ ID NO: 253793 - DNA, 30 bp, Artificial Sequence
  Synthetic oligonucleotide
tggactgctcgtaaactagttgttttacag

SEQ ID NO: 253794 - DNA, 30 bp, Artificial Sequence
  Synthetic oligonucleotide
tcaattagctcatgatggcaaaaaaaccag

SEQ ID NO: 253795 - DNA, 30 bp, Artificial Sequence
  Synthetic oligonucleotide
gaacggtagttcaggacgttataaaaccag

SEQ ID NO: 253796 - DNA, 30 bp, Artificial Sequence
  Synthetic oligonucleotide
ggcccctacaagacatcaatttgaaaccag

SEQ ID NO: 253797 - DNA, 30 bp, Artificial Sequence
  Synthetic oligonucleotide
ggaaaatctcgtggttgacctgcgaaccag

SEQ ID NO: 253798 - DNA, 30 bp, Artificial Sequence
  Synthetic oligonucleotide
ttgggtcgaacagttctctatgggaaccag

SEQ ID NO: 253799 - DNA, 30 bp, Artificial Sequence
  Synthetic oligonucleotide
aagacacgggatagttccctaatgaaccag

SEQ ID NO: 253800 - DNA, 30 bp, Artificial Sequence
  Synthetic oligonucleotide
ttttgcagattgctctatgcacgtaaccag

SEQ ID NO: 253801 - DNA, 30 bp, Artificial Sequence
  Synthetic oligonucleotide
ttaagccggctcaagtatccgggtaaccag

SEQ ID NO: 253802 - DNA, 30 bp, Artificial Sequence
  Synthetic oligonucleotide
ttctcgagagttccatcatcagttaaccag

SEQ ID NO: 253803 - DNA, 30 bp, Artificial Sequence
  Synthetic oligonucleotide
tagtcaagcgatccgacggcaaggcaccag

SEQ ID NO: 253804 - DNA, 30 bp, Artificial Sequence
  Synthetic oligonucleotide
acaggactatagatacttagtggtcaccag

SEQ ID NO: 253805 - DNA, 30 bp, Artificial Sequence
  Synthetic oligonucleotide
gtaaatacggagccctatacagcagaccag

SEQ ID NO: 253806 - DNA, 30 bp, Artificial Sequence
  Synthetic oligonucleotide
atttgctaggtaatggatgaagacgaccag

SEQ ID NO: 253807 - DNA, 30 bp, Artificial Sequence
  Synthetic oligonucleotide
cacggttctcccgaaactttctctgaccag

SEQ ID NO: 253808 - DNA, 30 bp, Artificial Sequence
  Synthetic oligonucleotide
tggttcgcatggtttgaaacgggtgaccag

SEQ ID NO: 253809 - DNA, 29 bp, Artificial Sequence
  Synthetic oligonucleotide
gtggggttacttcaggtccgcttgaccag

SEQ ID NO: 253810 - DNA, 30 bp, Artificial Sequence
  Synthetic oligonucleotide
gagctgcattgtgccgttggctcctaccag

SEQ ID NO: 253811 - DNA, 30 bp, Artificial Sequence
  Synthetic oligonucleotide
attcacagacttgaggcatctgagtaccag

SEQ ID NO: 253812 - DNA, 30 bp, Artificial Sequence
  Synthetic oligonucleotide
tttgagtgtaagttagggcctgcgtaccag

SEQ ID NO: 253813 - DNA, 30 bp, Artificial Sequence
  Synthetic oligonucleotide
tcacccgggtataattcaccacattaccag

SEQ ID NO: 253814 - DNA, 30 bp, Artificial Sequence
  Synthetic oligonucleotide
caacctctacggactatagtgtgttaccag

SEQ ID NO: 253815 - DNA, 30 bp, Artificial Sequence
  Synthetic oligonucleotide
ggtccgagcaatgggttaggccacacccag

SEQ ID NO: 253816 - DNA, 30 bp, Artificial Sequence
  Synthetic oligonucleotide
ggtcgaccaatggctgtcgcttagacccag

SEQ ID NO: 253817 - DNA, 30 bp, Artificial Sequence
  Synthetic oligonucleotide
gaaaagcaatgattgtctagcaggacccag

SEQ ID NO: 253818 - DNA, 30 bp, Artificial Sequence
  Synthetic oligonucleotide
ggccatcatccatctattgtccggccccag

SEQ ID NO: 253819 - DNA, 30 bp, Artificial Sequence
  Synthetic oligonucleotide
ttggtggataggcggctggttgtgccccag

SEQ ID NO: 253820 - DNA, 30 bp, Artificial Sequence
  Synthetic oligonucleotide
aatcaagggcctagccttcactcagcccag

SEQ ID NO: 253821 - DNA, 30 bp, Artificial Sequence
  Synthetic oligonucleotide
acgggtatcgtctatgttgtacgagcccag

SEQ ID NO: 253822 - DNA, 30 bp, Artificial Sequence
  Synthetic oligonucleotide
caactgctaactaccccggacggggcccag

SEQ ID NO: 253823 - DNA, 30 bp, Artificial Sequence
  Synthetic oligonucleotide
gggcgatgattgttcgtgagttttgcccag

SEQ ID NO: 253824 - DNA, 30 bp, Artificial Sequence
  Synthetic oligonucleotide
cattattctattgcgtaacccgggtcccag

SEQ ID NO: 253825 - DNA, 30 bp, Artificial Sequence
  Synthetic oligonucleotide
tccgacaggtgcgcgtggcttaattcccag

SEQ ID NO: 253826 - DNA, 30 bp, Artificial Sequence
  Synthetic oligonucleotide
gcacccacagtgccggtattcgattcccag

SEQ ID NO: 253827 - DNA, 30 bp, Artificial Sequence
  Synthetic oligonucleotide
accttgtctcagtaagttggctattcccag

SEQ ID NO: 253828 - DNA, 30 bp, Artificial Sequence
  Synthetic oligonucleotide
catggtgctatactttgcgtaagttcccag

SEQ ID NO: 253829 - DNA, 30 bp, Artificial Sequence
  Synthetic oligonucleotide
cgaccgtaatataataaactatatagccag

SEQ ID NO: 253830 - DNA, 30 bp, Artificial Sequence
  Synthetic oligonucleotide
agcttgagctgcacattgaatttacgccag

SEQ ID NO: 253831 - DNA, 30 bp, Artificial Sequence
  Synthetic oligonucleotide
ccaacgaggcccatcgggccacaccgccag

SEQ ID NO: 253832 - DNA, 30 bp, Artificial Sequence
  Synthetic oligonucleotide
tcacgctgagtactggaagttttgcgccag

SEQ ID NO: 253833 - DNA, 30 bp, Artificial Sequence
  Synthetic oligonucleotide
tttaattagtccgttcccaaatatcgccag

SEQ ID NO: 253834 - DNA, 30 bp, Artificial Sequence
  Synthetic oligonucleotide
aaaaaactcgattaagatcattaaggccag

SEQ ID NO: 253835 - DNA, 30 bp, Artificial Sequence
  Synthetic oligonucleotide
gctgcgttaagagcgagctacacgggccag

SEQ ID NO: 253836 - DNA, 30 bp, Artificial Sequence
  Synthetic oligonucleotide
cgtaatccgcgcttgctctacgtctgccag

SEQ ID NO: 253837 - DNA, 30 bp, Artificial Sequence
  Synthetic oligonucleotide
aacagtgacctgcccagggtcgagtgccag

SEQ ID NO: 253838 - DNA, 30 bp, Artificial Sequence
  Synthetic oligonucleotide
taagtcagggatggcttatctcgttgccag

SEQ ID NO: 253839 - DNA, 30 bp, Artificial Sequence
  Synthetic oligonucleotide
aggtgcgccaccgctgatgtttggatccag

SEQ ID NO: 253840 - DNA, 30 bp, Artificial Sequence
  Synthetic oligonucleotide
tacgtccgtgggggcgtgatgactatccag

SEQ ID NO: 253841 - DNA, 30 bp, Artificial Sequence
  Synthetic oligonucleotide
agtcgtatcttgactaacttgtttatccag

SEQ ID NO: 253842 - DNA, 30 bp, Artificial Sequence
  Synthetic oligonucleotide
gtgcctgcccgccagcaatatcacctccag

SEQ ID NO: 253843 - DNA, 30 bp, Artificial Sequence
  Synthetic oligonucleotide
gcgatgatgtagcctggttatttcctccag

SEQ ID NO: 253844 - DNA, 30 bp, Artificial Sequence
  Synthetic oligonucleotide
tggtatgagtgaggaataattcagctccag

SEQ ID NO: 253845 - DNA, 30 bp, Artificial Sequence
  Synthetic oligonucleotide
agataaagcccacattgacattctctccag

SEQ ID NO: 253846 - DNA, 30 bp, Artificial Sequence
  Synthetic oligonucleotide
ccttcactccaaacggtctctcgggtccag

SEQ ID NO: 253847 - DNA, 30 bp, Artificial Sequence
  Synthetic oligonucleotide
aaagccgccaatgtgagtttttgggtccag

SEQ ID NO: 253848 - DNA, 30 bp, Artificial Sequence
  Synthetic oligonucleotide
gggccagagcccttgcgcttgatggtccag

SEQ ID NO: 253849 - DNA, 30 bp, Artificial Sequence
  Synthetic oligonucleotide
agtgagtgtatcaaactgataaccttccag

SEQ ID NO: 253850 - DNA, 30 bp, Artificial Sequence
  Synthetic oligonucleotide
gatgaaggagggccgcccagtttgttccag

SEQ ID NO: 253851 - DNA, 30 bp, Artificial Sequence
  Synthetic oligonucleotide
acgggtcctgtgtttaagctccagaagcag

SEQ ID NO: 253852 - DNA, 30 bp, Artificial Sequence
  Synthetic oligonucleotide
gctgggtagttttggaatcagctgaagcag

SEQ ID NO: 253853 - DNA, 30 bp, Artificial Sequence
  Synthetic oligonucleotide
ctcagtcctgatgcaaaaggatataagcag

SEQ ID NO: 253854 - DNA, 30 bp, Artificial Sequence
  Synthetic oligonucleotide
gaataggtcaaaagcagtaagtgacagcag

SEQ ID NO: 253855 - DNA, 30 bp, Artificial Sequence
  Synthetic oligonucleotide
tattgaccgttttcgcttgcaaggcagcag

SEQ ID NO: 253856 - DNA, 30 bp, Artificial Sequence
  Synthetic oligonucleotide
caagaagccagtaacttgtccgtgcagcag

SEQ ID NO: 253857 - DNA, 30 bp, Artificial Sequence
  Synthetic oligonucleotide
gcggcgccatggtgtgagtttgtcgagcag

SEQ ID NO: 253858 - DNA, 30 bp, Artificial Sequence
  Synthetic oligonucleotide
acgccgggtaagaggtttagcttggagcag

SEQ ID NO: 253859 - DNA, 30 bp, Artificial Sequence
  Synthetic oligonucleotide
ttcggtatgttttactgagagggtgagcag

SEQ ID NO: 253860 - DNA, 30 bp, Artificial Sequence
  Synthetic oligonucleotide
gttatgcaaatatatatttgttttgagcag

SEQ ID NO: 253861 - DNA, 30 bp, Artificial Sequence
  Synthetic oligonucleotide
gagtcgggtggaaaaccagtattatagcag

SEQ ID NO: 253862 - DNA, 30 bp, Artificial Sequence
  Synthetic oligonucleotide
gtccctgtgctcgcaaccgagcaaacgcag

SEQ ID NO: 253863 - DNA, 31 bp, Artificial Sequence
  Synthetic oligonucleotide
cttcggagagtgcgcacaattggttacgcag

SEQ ID NO: 253864 - DNA, 30 bp, Artificial Sequence
  Synthetic oligonucleotide
tggctggatgtgtgccgtaggttcccgcag

SEQ ID NO: 253865 - DNA, 30 bp, Artificial Sequence
  Synthetic oligonucleotide
aaggttcacatgttcggacctctgccgcag

SEQ ID NO: 253866 - DNA, 30 bp, Artificial Sequence
  Synthetic oligonucleotide
atgattcggggagaacagcagcgtccgcag

SEQ ID NO: 253867 - DNA, 30 bp, Artificial Sequence
  Synthetic oligonucleotide
actttgcgaaaacaaacgttcgtggcgcag

SEQ ID NO: 253868 - DNA, 30 bp, Artificial Sequence
  Synthetic oligonucleotide
ccagagcttgccaccctacatttggcgcag

SEQ ID NO: 253869 - DNA, 30 bp, Artificial Sequence
  Synthetic oligonucleotide
aagctcaaagtatctggctgttatgcgcag

SEQ ID NO: 253870 - DNA, 30 bp, Artificial Sequence
  Synthetic oligonucleotide
agggtatctcggtgcgcctgtggtgcgcag

SEQ ID NO: 253871 - DNA, 30 bp, Artificial Sequence
  Synthetic oligonucleotide
tattgtcgcggcaagcttgttggtgcgcag

SEQ ID NO: 253872 - DNA, 30 bp, Artificial Sequence
  Synthetic oligonucleotide
ttataaatgtcaattgatatttaatcgcag

SEQ ID NO: 253873 - DNA, 30 bp, Artificial Sequence
  Synthetic oligonucleotide
tggtgttgagcgtccaaattcgtatcgcag

SEQ ID NO: 253874 - DNA, 30 bp, Artificial Sequence
  Synthetic oligonucleotide
attatgagggggtattcatttaagtcgcag

SEQ ID NO: 253875 - DNA, 30 bp, Artificial Sequence
  Synthetic oligonucleotide
attaccatccaagtgggaaattagtcgcag

SEQ ID NO: 253876 - DNA, 30 bp, Artificial Sequence
  Synthetic oligonucleotide
cgtcaagcggtcacaacctgagcttcgcag

SEQ ID NO: 253877 - DNA, 30 bp, Artificial Sequence
  Synthetic oligonucleotide
gctcggcagacgttataaaatagaaggcag

SEQ ID NO: 253878 - DNA, 30 bp, Artificial Sequence
  Synthetic oligonucleotide
ggttttataaatagtcgagggcgaaggcag

SEQ ID NO: 253879 - DNA, 30 bp, Artificial Sequence
  Synthetic oligonucleotide
tggcgtctctcccaatgtggcggaaggcag

SEQ ID NO: 253880 - DNA, 30 bp, Artificial Sequence
  Synthetic oligonucleotide
cgcgcggttcttggtacagcgcccaggcag

SEQ ID NO: 253881 - DNA, 30 bp, Artificial Sequence
  Synthetic oligonucleotide
aaccgctaagtaccttagtaaacgaggcag

SEQ ID NO: 253882 - DNA, 30 bp, Artificial Sequence
  Synthetic oligonucleotide
tacgccgcgtgtttgggcaacgcgaggcag

SEQ ID NO: 253883 - DNA, 30 bp, Artificial Sequence
  Synthetic oligonucleotide
cgaagagctggtaacccaagcatgaggcag

SEQ ID NO: 253884 - DNA, 30 bp, Artificial Sequence
  Synthetic oligonucleotide
gagttgtccgtagtgtagcggagtaggcag

SEQ ID NO: 253885 - DNA, 30 bp, Artificial Sequence
  Synthetic oligonucleotide
agagcggtaggacgtatcatgggtaggcag

SEQ ID NO: 253886 - DNA, 30 bp, Artificial Sequence
  Synthetic oligonucleotide
tagaggggggctaaaatgtgtcttaggcag

SEQ ID NO: 253887 - DNA, 30 bp, Artificial Sequence
  Synthetic oligonucleotide
cgtgtcaaagacacggcgctatcacggcag

SEQ ID NO: 253888 - DNA, 30 bp, Artificial Sequence
  Synthetic oligonucleotide
cttgatgtcggcttacggttctcacggcag

SEQ ID NO: 253889 - DNA, 30 bp, Artificial Sequence
  Synthetic oligonucleotide
ggggtatgggtacggagattgtcacggcag

SEQ ID NO: 253890 - DNA, 30 bp, Artificial Sequence
  Synthetic oligonucleotide
gacagcaatcgagaagaagccatccggcag

SEQ ID NO: 253891 - DNA, 30 bp, Artificial Sequence
  Synthetic oligonucleotide
aggcttaatatttgtggcgtcgcgcggcag

SEQ ID NO: 253892 - DNA, 30 bp, Artificial Sequence
  Synthetic oligonucleotide
tattacccggacaactaaacaggtcggcag

SEQ ID NO: 253893 - DNA, 30 bp, Artificial Sequence
  Synthetic oligonucleotide
gtgccaggaaagaaatatgtcggtcggcag

SEQ ID NO: 253894 - DNA, 30 bp, Artificial Sequence
  Synthetic oligonucleotide
gctgcaccgcgctagaaagtccgagggcag

SEQ ID NO: 253895 - DNA, 30 bp, Artificial Sequence
  Synthetic oligonucleotide
tgattttgtttggacgggattcccgggcag

SEQ ID NO: 253896 - DNA, 30 bp, Artificial Sequence
  Synthetic oligonucleotide
aaaaaacgggcaattagagttggcgggcag

SEQ ID NO: 253897 - DNA, 30 bp, Artificial Sequence
  Synthetic oligonucleotide
acctggcctaaagacttatcttaggggcag

SEQ ID NO: 253898 - DNA, 30 bp, Artificial Sequence
  Synthetic oligonucleotide
gggacggcgtatgcggtgtaaggtgggcag

SEQ ID NO: 253899 - DNA, 30 bp, Artificial Sequence
  Synthetic oligonucleotide
gtgagctggccagcataatttattgggcag

SEQ ID NO: 253900 - DNA, 30 bp, Artificial Sequence
  Synthetic oligonucleotide
caacaccgctcgtgcaatggtagatggcag

SEQ ID NO: 253901 - DNA, 30 bp, Artificial Sequence
  Synthetic oligonucleotide
tcagtggaaccgtgcgatgctgcctggcag

SEQ ID NO: 253902 - DNA, 30 bp, Artificial Sequence
  Synthetic oligonucleotide
tcgcacagggttagttttacgagctggcag

SEQ ID NO: 253903 - DNA, 30 bp, Artificial Sequence
  Synthetic oligonucleotide
agaactggtctagtatgatatatctggcag

SEQ ID NO: 253904 - DNA, 30 bp, Artificial Sequence
  Synthetic oligonucleotide
aaacacagacgggtcgcgtccgagtggcag

SEQ ID NO: 253905 - DNA, 30 bp, Artificial Sequence
  Synthetic oligonucleotide
gggtctcatacatgggtgaaggagtggcag

SEQ ID NO: 253906 - DNA, 30 bp, Artificial Sequence
  Synthetic oligonucleotide
gtaagttgtgccaacagttattagtggcag

SEQ ID NO: 253907 - DNA, 30 bp, Artificial Sequence
  Synthetic oligonucleotide
tgcagtcagtatgtactcgtgctgtggcag

SEQ ID NO: 253908 - DNA, 30 bp, Artificial Sequence
  Synthetic oligonucleotide
atcacggtcttttgtttaataccaatgcag

SEQ ID NO: 253909 - DNA, 30 bp, Artificial Sequence
  Synthetic oligonucleotide
gcacagcctgatgtcagatcttcaatgcag

SEQ ID NO: 253910 - DNA, 30 bp, Artificial Sequence
  Synthetic oligonucleotide
tcaagcatacttatgtcgacgccgatgcag

SEQ ID NO: 253911 - DNA, 30 bp, Artificial Sequence
  Synthetic oligonucleotide
ggttgtaacgaggttaatactgcgatgcag

SEQ ID NO: 253912 - DNA, 30 bp, Artificial Sequence
  Synthetic oligonucleotide
gttggtctgagttcagcaggcgctatgcag

SEQ ID NO: 253913 - DNA, 30 bp, Artificial Sequence
  Synthetic oligonucleotide
cgtcacgttcccccgcgtaggattatgcag

SEQ ID NO: 253914 - DNA, 30 bp, Artificial Sequence
  Synthetic oligonucleotide
actacacagtggcactaagggtcactgcag

SEQ ID NO: 253915 - DNA, 30 bp, Artificial Sequence
  Synthetic oligonucleotide
gtctccacccttcactaatcggtactgcag

SEQ ID NO: 253916 - DNA, 30 bp, Artificial Sequence
  Synthetic oligonucleotide
ggcactaggcgtcgtgaaatacgcctgcag

SEQ ID NO: 253917 - DNA, 30 bp, Artificial Sequence
  Synthetic oligonucleotide
tattggtcgtctcaaatcacacggctgcag

SEQ ID NO: 253918 - DNA, 30 bp, Artificial Sequence
  Synthetic oligonucleotide
ctagggagaccgggttaataatggctgcag

SEQ ID NO: 253919 - DNA, 30 bp, Artificial Sequence
  Synthetic oligonucleotide
cggcatgaacaatagagattaatgctgcag

SEQ ID NO: 253920 - DNA, 30 bp, Artificial Sequence
  Synthetic oligonucleotide
aatccgagtggccgagcctgtgatctgcag

SEQ ID NO: 253921 - DNA, 30 bp, Artificial Sequence
  Synthetic oligonucleotide
gcaggcgtttcggtttatggaagtctgcag

SEQ ID NO: 253922 - DNA, 30 bp, Artificial Sequence
  Synthetic oligonucleotide
gaagttgtgtttcaggcaatcgtagtgcag

SEQ ID NO: 253923 - DNA, 30 bp, Artificial Sequence
  Synthetic oligonucleotide
gataccccggacgggcgaagtaccgtgcag

SEQ ID NO: 253924 - DNA, 30 bp, Artificial Sequence
  Synthetic oligonucleotide
acttgtctcattagggaatgacccgtgcag

SEQ ID NO: 253925 - DNA, 30 bp, Artificial Sequence
  Synthetic oligonucleotide
catatttcatagagaccctcattcgtgcag

SEQ ID NO: 253926 - DNA, 30 bp, Artificial Sequence
  Synthetic oligonucleotide
gtttagtagttggtactcgaaccggtgcag

SEQ ID NO: 253927 - DNA, 30 bp, Artificial Sequence
  Synthetic oligonucleotide
gcagaaagtgtgatgagtctgacattgcag

SEQ ID NO: 253928 - DNA, 30 bp, Artificial Sequence
  Synthetic oligonucleotide
gaaacatcaattagctcacaagccttgcag

SEQ ID NO: 253929 - DNA, 30 bp, Artificial Sequence
  Synthetic oligonucleotide
gggatgctggctcagttggacttcttgcag

SEQ ID NO: 253930 - DNA, 30 bp, Artificial Sequence
  Synthetic oligonucleotide
tcggtaattgttctgagacaatctttgcag

SEQ ID NO: 253931 - DNA, 30 bp, Artificial Sequence
  Synthetic oligonucleotide
gtgtctacgaggcgttggctctctttgcag

SEQ ID NO: 253932 - DNA, 30 bp, Artificial Sequence
  Synthetic oligonucleotide
ttgcccgtatcaggattaagcgaaaatcag

SEQ ID NO: 253933 - DNA, 30 bp, Artificial Sequence
  Synthetic oligonucleotide
gcttcgacagacatgcagttagcaaatcag

SEQ ID NO: 253934 - DNA, 30 bp, Artificial Sequence
  Synthetic oligonucleotide
aaaccgaaagacgcaccaaggtccaatcag

SEQ ID NO: 253935 - DNA, 30 bp, Artificial Sequence
  Synthetic oligonucleotide
taacttgattgtgactggtcaaagaatcag

SEQ ID NO: 253936 - DNA, 30 bp, Artificial Sequence
  Synthetic oligonucleotide
taccttgggacaatcgtgtgcgagaatcag

SEQ ID NO: 253937 - DNA, 30 bp, Artificial Sequence
  Synthetic oligonucleotide
tgaggtgtttacgacagatttgctaatcag

SEQ ID NO: 253938 - DNA, 31 bp, Artificial Sequence
  Synthetic oligonucleotide
agccttaaaatgtgctgaagttgcacatcag

SEQ ID NO: 253939 - DNA, 30 bp, Artificial Sequence
  Synthetic oligonucleotide
tccaccctacaatggcacaagggacatcag

SEQ ID NO: 253940 - DNA, 30 bp, Artificial Sequence
  Synthetic oligonucleotide
tcaccgcctcgggcaatattcatacatcag

SEQ ID NO: 253941 - DNA, 30 bp, Artificial Sequence
  Synthetic oligonucleotide
cgatgaggcaagtggacgtaagtccatcag

SEQ ID NO: 253942 - DNA, 30 bp, Artificial Sequence
  Synthetic oligonucleotide
catcatgagagtccgtttaccagcgatcag

SEQ ID NO: 253943 - DNA, 29 bp, Artificial Sequence
  Synthetic oligonucleotide
ttaaatccatctaaaattcaatggatcag

SEQ ID NO: 253944 - DNA, 30 bp, Artificial Sequence
  Synthetic oligonucleotide
ctagtgagacacgatacgttcatggatcag

SEQ ID NO: 253945 - DNA, 30 bp, Artificial Sequence
  Synthetic oligonucleotide
caatacgttaggtccgctcagaatgatcag

SEQ ID NO: 253946 - DNA, 30 bp, Artificial Sequence
  Synthetic oligonucleotide
ggcacaggctttgtcaggggccattatcag

SEQ ID NO: 253947 - DNA, 30 bp, Artificial Sequence
  Synthetic oligonucleotide
tacttagtgccttcaagaggcacttatcag

SEQ ID NO: 253948 - DNA, 30 bp, Artificial Sequence
  Synthetic oligonucleotide
aattgacgtcaagctctagcccgtactcag

SEQ ID NO: 253949 - DNA, 30 bp, Artificial Sequence
  Synthetic oligonucleotide
ccaggttcagggcttggcgtccaacctcag

SEQ ID NO: 253950 - DNA, 30 bp, Artificial Sequence
  Synthetic oligonucleotide
atacgaatccagtacatttggcaacctcag

SEQ ID NO: 253951 - DNA, 30 bp, Artificial Sequence
  Synthetic oligonucleotide
gcgttttcctccggtcgaattcaacctcag

SEQ ID NO: 253952 - DNA, 30 bp, Artificial Sequence
  Synthetic oligonucleotide
gcttttaacgagcgtggccgcgaacctcag

SEQ ID NO: 253953 - DNA, 30 bp, Artificial Sequence
  Synthetic oligonucleotide
cttgcgagtattaaggttttaccacctcag

SEQ ID NO: 253954 - DNA, 30 bp, Artificial Sequence
  Synthetic oligonucleotide
cactaacccttatccccgtaaggccctcag

SEQ ID NO: 253955 - DNA, 30 bp, Artificial Sequence
  Synthetic oligonucleotide
aacgtgattgatcggccactcttccctcag

SEQ ID NO: 253956 - DNA, 30 bp, Artificial Sequence
  Synthetic oligonucleotide
cgtgaaatgtctggcgctttgcggcctcag

SEQ ID NO: 253957 - DNA, 30 bp, Artificial Sequence
  Synthetic oligonucleotide
tggttatacgaaggagaggcttggcctcag

SEQ ID NO: 253958 - DNA, 30 bp, Artificial Sequence
  Synthetic oligonucleotide
ccctatttgctgtcgctaatatcagctcag

SEQ ID NO: 253959 - DNA, 30 bp, Artificial Sequence
  Synthetic oligonucleotide
caccatagtagggctgacggttgggctcag

SEQ ID NO: 253960 - DNA, 30 bp, Artificial Sequence
  Synthetic oligonucleotide
ttacgatcgtccagaaaacccgatgctcag

SEQ ID NO: 253961 - DNA, 30 bp, Artificial Sequence
  Synthetic oligonucleotide
acaaagggttgatttttccgcaagtctcag

SEQ ID NO: 253962 - DNA, 30 bp, Artificial Sequence
  Synthetic oligonucleotide
ccacttggaaattcttgaaacatttctcag

SEQ ID NO: 253963 - DNA, 30 bp, Artificial Sequence
  Synthetic oligonucleotide
ccgttatgtcgccacctatagttttctcag

SEQ ID NO: 253964 - DNA, 30 bp, Artificial Sequence
  Synthetic oligonucleotide
gaagcataaatgacataagcgtcgagtcag

SEQ ID NO: 253965 - DNA, 30 bp, Artificial Sequence
  Synthetic oligonucleotide
gaagaaggatctaagaattagcggagtcag

SEQ ID NO: 253966 - DNA, 30 bp, Artificial Sequence
  Synthetic oligonucleotide
ctaagtttggaaccacaagcacgtagtcag

SEQ ID NO: 253967 - DNA, 30 bp, Artificial Sequence
  Synthetic oligonucleotide
tcgggcgttgtgaatactgccattagtcag

SEQ ID NO: 253968 - DNA, 30 bp, Artificial Sequence
  Synthetic oligonucleotide
atattgacatcttgcacccctacacgtcag

SEQ ID NO: 253969 - DNA, 30 bp, Artificial Sequence
  Synthetic oligonucleotide
tgtgaagtactcgcttacggctgacgtcag

SEQ ID NO: 253970 - DNA, 30 bp, Artificial Sequence
  Synthetic oligonucleotide
taggaaattgctctatagtatagccgtcag

SEQ ID NO: 253971 - DNA, 30 bp, Artificial Sequence
  Synthetic oligonucleotide
tacacgagcgtttggaaggatccgcgtcag

SEQ ID NO: 253972 - DNA, 30 bp, Artificial Sequence
  Synthetic oligonucleotide
cgaaaaagtgcgtggacccagggaggtcag

SEQ ID NO: 253973 - DNA, 30 bp, Artificial Sequence
  Synthetic oligonucleotide
agccttccattggcccttgagttaggtcag

SEQ ID NO: 253974 - DNA, 30 bp, Artificial Sequence
  Synthetic oligonucleotide
aaagatctgaaactcatgcttcggggtcag

SEQ ID NO: 253975 - DNA, 30 bp, Artificial Sequence
  Synthetic oligonucleotide
tacggttcaggcagtcgtcacatgggtcag

SEQ ID NO: 253976 - DNA, 30 bp, Artificial Sequence
  Synthetic oligonucleotide
ctcaggacaattcaaagaacgatgggtcag

SEQ ID NO: 253977 - DNA, 30 bp, Artificial Sequence
  Synthetic oligonucleotide
aaaagcaagtccgggtgtaccactggtcag

SEQ ID NO: 253978 - DNA, 30 bp, Artificial Sequence
  Synthetic oligonucleotide
ctggcgtagtaaggttcggggcttggtcag

SEQ ID NO: 253979 - DNA, 30 bp, Artificial Sequence
  Synthetic oligonucleotide
gtgacatgtagttattacgacgttggtcag

SEQ ID NO: 253980 - DNA, 30 bp, Artificial Sequence
  Synthetic oligonucleotide
ctacaatctaagaacggggtggactgtcag

SEQ ID NO: 253981 - DNA, 30 bp, Artificial Sequence
  Synthetic oligonucleotide
tcgacccccaattggttacacaggtgtcag

SEQ ID NO: 253982 - DNA, 30 bp, Artificial Sequence
  Synthetic oligonucleotide
cttctgaaagaagcccatagttggtgtcag

SEQ ID NO: 253983 - DNA, 30 bp, Artificial Sequence
  Synthetic oligonucleotide
ttgcaggtgaattagtttaccctgtgtcag

SEQ ID NO: 253984 - DNA, 30 bp, Artificial Sequence
  Synthetic oligonucleotide
ctcggacgttgcaaatagaaaacttgtcag

SEQ ID NO: 253985 - DNA, 30 bp, Artificial Sequence
  Synthetic oligonucleotide
tcattatccaagtagacggggtcttgtcag

SEQ ID NO: 253986 - DNA, 30 bp, Artificial Sequence
  Synthetic oligonucleotide
gctgctgaatagtatcaattcaacattcag

SEQ ID NO: 253987 - DNA, 30 bp, Artificial Sequence
  Synthetic oligonucleotide
caaagaaaccgtgattttagtacacttcag

SEQ ID NO: 253988 - DNA, 30 bp, Artificial Sequence
  Synthetic oligonucleotide
ggtgaagcaggagatgtattatgacttcag

SEQ ID NO: 253989 - DNA, 30 bp, Artificial Sequence
  Synthetic oligonucleotide
cggtgaagctcctggcatagaatccttcag

SEQ ID NO: 253990 - DNA, 30 bp, Artificial Sequence
  Synthetic oligonucleotide
cgaagataggtaagtgatagtttccttcag

SEQ ID NO: 253991 - DNA, 30 bp, Artificial Sequence
  Synthetic oligonucleotide
atgaggggtacggggtgaacactgcttcag

SEQ ID NO: 253992 - DNA, 30 bp, Artificial Sequence
  Synthetic oligonucleotide
gcggtgactttaccatggaaatcggttcag

SEQ ID NO: 253993 - DNA, 30 bp, Artificial Sequence
  Synthetic oligonucleotide
catagcttttgaagaggcgcaagggttcag

SEQ ID NO: 253994 - DNA, 30 bp, Artificial Sequence
  Synthetic oligonucleotide
tcattgacaggatctaaggcccctgttcag

SEQ ID NO: 253995 - DNA, 30 bp, Artificial Sequence
  Synthetic oligonucleotide
acagtaaggtgacatcgcctataatttcag

SEQ ID NO: 253996 - DNA, 30 bp, Artificial Sequence
  Synthetic oligonucleotide
cttccacaaaccaacggtggtgagaaagag

SEQ ID NO: 253997 - DNA, 30 bp, Artificial Sequence
  Synthetic oligonucleotide
ttcgttgtactaaatcgtcacgcgaaagag

SEQ ID NO: 253998 - DNA, 30 bp, Artificial Sequence
  Synthetic oligonucleotide
gtgcgcagtaatatgcggtttggacaagag

SEQ ID NO: 253999 - DNA, 30 bp, Artificial Sequence
  Synthetic oligonucleotide
tgggtctattcacgcttgtgaggccaagag

SEQ ID NO: 254000 - DNA, 30 bp, Artificial Sequence
  Synthetic oligonucleotide
agttccgctaggacgctcaggactcaagag

SEQ ID NO: 254001 - DNA, 29 bp, Artificial Sequence
  Synthetic oligonucleotide
cgcctctgcgtcacaaggtcgttcaagag

SEQ ID NO: 254002 - DNA, 30 bp, Artificial Sequence
  Synthetic oligonucleotide
agtgaatatcggcggctagggtaagaagag

SEQ ID NO: 254003 - DNA, 30 bp, Artificial Sequence
  Synthetic oligonucleotide
atcacttatgtttctgtgggagcagaagag

SEQ ID NO: 254004 - DNA, 30 bp, Artificial Sequence
  Synthetic oligonucleotide
tttatttggcgggaaacaacgtccgaagag

SEQ ID NO: 254005 - DNA, 30 bp, Artificial Sequence
  Synthetic oligonucleotide
caactttcacaacggtatgcccaggaagag

SEQ ID NO: 254006 - DNA, 30 bp, Artificial Sequence
  Synthetic oligonucleotide
tctaatattctcaggggcggctaggaagag

SEQ ID NO: 254007 - DNA, 30 bp, Artificial Sequence
  Synthetic oligonucleotide
aaacacgggattgttgaaataggggaagag

SEQ ID NO: 254008 - DNA, 30 bp, Artificial Sequence
  Synthetic oligonucleotide
caaagataacgagctcaatttaatgaagag

SEQ ID NO: 254009 - DNA, 30 bp, Artificial Sequence
  Synthetic oligonucleotide
cgtcaccgtgacagacctctgcctgaagag

SEQ ID NO: 254010 - DNA, 30 bp, Artificial Sequence
  Synthetic oligonucleotide
gtgtgaggacataccgatgtcattgaagag

SEQ ID NO: 254011 - DNA, 30 bp, Artificial Sequence
  Synthetic oligonucleotide
aataacagcgaccaacacggtgttgaagag

SEQ ID NO: 254012 - DNA, 30 bp, Artificial Sequence
  Synthetic oligonucleotide
aaattgccgctaaacggggatccataagag

SEQ ID NO: 254013 - DNA, 30 bp, Artificial Sequence
  Synthetic oligonucleotide
ttcacatggagtccctacaaacactaagag

SEQ ID NO: 254014 - DNA, 30 bp, Artificial Sequence
  Synthetic oligonucleotide
tggaccgggcatggaattcaaacttaagag

SEQ ID NO: 254015 - DNA, 30 bp, Artificial Sequence
  Synthetic oligonucleotide
gacggtggtttttaagatttcgtttaagag

SEQ ID NO: 254016 - DNA, 30 bp, Artificial Sequence
  Synthetic oligonucleotide
tagtaccgctgcaacacgcgcgaaacagag

SEQ ID NO: 254017 - DNA, 30 bp, Artificial Sequence
  Synthetic oligonucleotide
cgtgtaccctgatttagtatcgcaacagag

SEQ ID NO: 254018 - DNA, 30 bp, Artificial Sequence
  Synthetic oligonucleotide
tagtgatcacacgtattcgtgaacacagag

SEQ ID NO: 254019 - DNA, 30 bp, Artificial Sequence
  Synthetic oligonucleotide
agacatcgcaccacgagtgggactacagag

SEQ ID NO: 254020 - DNA, 30 bp, Artificial Sequence
  Synthetic oligonucleotide
ttatggatcttaatgggctcaagtacagag

SEQ ID NO: 254021 - DNA, 31 bp, Artificial Sequence
  Synthetic oligonucleotide
gtagggaagcgcgggggaatatggcgcagag

SEQ ID NO: 254022 - DNA, 30 bp, Artificial Sequence
  Synthetic oligonucleotide
taaagcgagcggcggttatcggtcgcagag

SEQ ID NO: 254023 - DNA, 30 bp, Artificial Sequence
  Synthetic oligonucleotide
gggtctttaagtaacgagtagttcgcagag

SEQ ID NO: 254024 - DNA, 30 bp, Artificial Sequence
  Synthetic oligonucleotide
ttggtcgaaaacgcacaatacaaggcagag

SEQ ID NO: 254025 - DNA, 30 bp, Artificial Sequence
  Synthetic oligonucleotide
tagttgtctgtcaacgttgacacggcagag

SEQ ID NO: 254026 - DNA, 30 bp, Artificial Sequence
  Synthetic oligonucleotide
gatcagaaaaattggcgtttcatggcagag

SEQ ID NO: 254027 - DNA, 30 bp, Artificial Sequence
  Synthetic oligonucleotide
caagtgtcgtggggtcgttacactgcagag

SEQ ID NO: 254028 - DNA, 30 bp, Artificial Sequence
  Synthetic oligonucleotide
ggtgcggctataccccttatcacatcagag

SEQ ID NO: 254029 - DNA, 30 bp, Artificial Sequence
  Synthetic oligonucleotide
taactctgcccggcctaaaccccatcagag

SEQ ID NO: 254030 - DNA, 30 bp, Artificial Sequence
  Synthetic oligonucleotide
tatgtagccctagacaaccgggcatcagag

SEQ ID NO: 254031 - DNA, 30 bp, Artificial Sequence
  Synthetic oligonucleotide
atatctgcatgggcttagtttagatcagag

SEQ ID NO: 254032 - DNA, 30 bp, Artificial Sequence
  Synthetic oligonucleotide
gtacttgtggtcattccatgtgcgtcagag

SEQ ID NO: 254033 - DNA, 30 bp, Artificial Sequence
  Synthetic oligonucleotide
gaggtccaatgacggtcatgtgggtcagag

SEQ ID NO: 254034 - DNA, 30 bp, Artificial Sequence
  Synthetic oligonucleotide
tctcgatcaatggagaagcgctgttcagag

SEQ ID NO: 254035 - DNA, 30 bp, Artificial Sequence
  Synthetic oligonucleotide
cgggaagtttgtgagagcgatttttcagag

SEQ ID NO: 254036 - DNA, 30 bp, Artificial Sequence
  Synthetic oligonucleotide
tttacgataaacgcgactggcttaagagag

SEQ ID NO: 254037 - DNA, 30 bp, Artificial Sequence
  Synthetic oligonucleotide
gataaaatgatgcctacggccaccagagag

SEQ ID NO: 254038 - DNA, 30 bp, Artificial Sequence
  Synthetic oligonucleotide
gcttgagtcttggttggactgctcagagag

SEQ ID NO: 254039 - DNA, 30 bp, Artificial Sequence
  Synthetic oligonucleotide
aatgttcttgagcgtggagagaggagagag

SEQ ID NO: 254040 - DNA, 30 bp, Artificial Sequence
  Synthetic oligonucleotide
gagccctcacggtgtatcgatgcacgagag

SEQ ID NO: 254041 - DNA, 30 bp, Artificial Sequence
  Synthetic oligonucleotide
ttattgcacgtttgaggctctaaccgagag

SEQ ID NO: 254042 - DNA, 30 bp, Artificial Sequence
  Synthetic oligonucleotide
aagcaaggttataaatctgctacccgagag

SEQ ID NO: 254043 - DNA, 30 bp, Artificial Sequence
  Synthetic oligonucleotide
agggagacggcccgccataagatccgagag

SEQ ID NO: 254044 - DNA, 30 bp, Artificial Sequence
  Synthetic oligonucleotide
acaacttgaagccttcccgacactcgagag

SEQ ID NO: 254045 - DNA, 30 bp, Artificial Sequence
  Synthetic oligonucleotide
gttaaatcgacattttatggaagtcgagag

SEQ ID NO: 254046 - DNA, 30 bp, Artificial Sequence
  Synthetic oligonucleotide
actactgccagcaagaaattccttcgagag

SEQ ID NO: 254047 - DNA, 30 bp, Artificial Sequence
  Synthetic oligonucleotide
aaacttagtagtcacaccgttaaaggagag

SEQ ID NO: 254048 - DNA, 30 bp, Artificial Sequence
  Synthetic oligonucleotide
catcacttcaaagtctgtttttcaggagag

SEQ ID NO: 254049 - DNA, 30 bp, Artificial Sequence
  Synthetic oligonucleotide
aaccgttccgaccctctagatgacggagag

SEQ ID NO: 254050 - DNA, 30 bp, Artificial Sequence
  Synthetic oligonucleotide
ttatacgacgatgacggggggggcggagag

SEQ ID NO: 254051 - DNA, 30 bp, Artificial Sequence
  Synthetic oligonucleotide
caactagcgactctttaggaccagggagag

SEQ ID NO: 254052 - DNA, 30 bp, Artificial Sequence
  Synthetic oligonucleotide
ttaaaggacgatccgatcggtgagggagag

SEQ ID NO: 254053 - DNA, 30 bp, Artificial Sequence
  Synthetic oligonucleotide
aatggcttttgatcggtaatgctatgagag

SEQ ID NO: 254054 - DNA, 30 bp, Artificial Sequence
  Synthetic oligonucleotide
cataagggaatacgatgaggctcctgagag

SEQ ID NO: 254055 - DNA, 30 bp, Artificial Sequence
  Synthetic oligonucleotide
atgcccaagcgcactcagcaggtctgagag

SEQ ID NO: 254056 - DNA, 30 bp, Artificial Sequence
  Synthetic oligonucleotide
cacggggacgatgtggtttatgtgtgagag

SEQ ID NO: 254057 - DNA, 30 bp, Artificial Sequence
  Synthetic oligonucleotide
aaaatattccgaaggtgcacctaaatagag

SEQ ID NO: 254058 - DNA, 30 bp, Artificial Sequence
  Synthetic oligonucleotide
ggtgcctctcacggttggtgctaaatagag

SEQ ID NO: 254059 - DNA, 30 bp, Artificial Sequence
  Synthetic oligonucleotide
aggttatgacattgggcttatgtcatagag

SEQ ID NO: 254060 - DNA, 30 bp, Artificial Sequence
  Synthetic oligonucleotide
cagaaaagggcttgcccttcacagatagag

SEQ ID NO: 254061 - DNA, 30 bp, Artificial Sequence
  Synthetic oligonucleotide
agagctgacgcgttaggtcaaaggatagag

SEQ ID NO: 254062 - DNA, 30 bp, Artificial Sequence
  Synthetic oligonucleotide
actagaccatgagattcaatatatatagag

SEQ ID NO: 254063 - DNA, 30 bp, Artificial Sequence
  Synthetic oligonucleotide
acagttattggttagcgtagtcctatagag

SEQ ID NO: 254064 - DNA, 30 bp, Artificial Sequence
  Synthetic oligonucleotide
atagtgacatgaaacgcaagcggtatagag

SEQ ID NO: 254065 - DNA, 30 bp, Artificial Sequence
  Synthetic oligonucleotide
gatcagtttgagacaaataatagactagag

SEQ ID NO: 254066 - DNA, 30 bp, Artificial Sequence
  Synthetic oligonucleotide
atccgccgagaaattcgctgcccgctagag

SEQ ID NO: 254067 - DNA, 30 bp, Artificial Sequence
  Synthetic oligonucleotide
taatataaggaggaccagtattctctagag

SEQ ID NO: 254068 - DNA, 30 bp, Artificial Sequence
  Synthetic oligonucleotide
tccggcgtataaactccggacgtagtagag

SEQ ID NO: 254069 - DNA, 30 bp, Artificial Sequence
  Synthetic oligonucleotide
aactcgctggacatgtatcaccaggtagag

SEQ ID NO: 254070 - DNA, 30 bp, Artificial Sequence
  Synthetic oligonucleotide
gttaacaaataaccagttgatagggtagag

SEQ ID NO: 254071 - DNA, 30 bp, Artificial Sequence
  Synthetic oligonucleotide
gccttttcacctggtttacgtactgtagag

SEQ ID NO: 254072 - DNA, 30 bp, Artificial Sequence
  Synthetic oligonucleotide
acttctcttttgaacaaaccccttgtagag

SEQ ID NO: 254073 - DNA, 30 bp, Artificial Sequence
  Synthetic oligonucleotide
gatggctgtaacattggttctaaattagag

SEQ ID NO: 254074 - DNA, 30 bp, Artificial Sequence
  Synthetic oligonucleotide
tcgtcagtcctacgcggttggccattagag

SEQ ID NO: 254075 - DNA, 30 bp, Artificial Sequence
  Synthetic oligonucleotide
cgaaggaacggacccggtttgggattagag

SEQ ID NO: 254076 - DNA, 30 bp, Artificial Sequence
  Synthetic oligonucleotide
cacctaatactggttctcgtgatattagag

SEQ ID NO: 254077 - DNA, 30 bp, Artificial Sequence
  Synthetic oligonucleotide
ttgtgccacatcacaagctgcaccttagag

SEQ ID NO: 254078 - DNA, 30 bp, Artificial Sequence
  Synthetic oligonucleotide
gagaagaactctatgcgcggttccttagag

SEQ ID NO: 254079 - DNA, 30 bp, Artificial Sequence
  Synthetic oligonucleotide
aacgggttccacattatgccgttcttagag

SEQ ID NO: 254080 - DNA, 30 bp, Artificial Sequence
  Synthetic oligonucleotide
aagacacgttgtaacctaagtcggttagag

SEQ ID NO: 254081 - DNA, 30 bp, Artificial Sequence
  Synthetic oligonucleotide
ttctggtcagtaataagcggaatgttagag

SEQ ID NO: 254082 - DNA, 30 bp, Artificial Sequence
  Synthetic oligonucleotide
ttaaccgtttccgtactcagaagtttagag

SEQ ID NO: 254083 - DNA, 30 bp, Artificial Sequence
  Synthetic oligonucleotide
ggcagatcctgtgccggggccggtttagag

SEQ ID NO: 254084 - DNA, 30 bp, Artificial Sequence
  Synthetic oligonucleotide
cggttggcagtcatccgctggcttttagag

SEQ ID NO: 254085 - DNA, 30 bp, Artificial Sequence
  Synthetic oligonucleotide
cataagtcagtattgaacctcaaaaacgag

SEQ ID NO: 254086 - DNA, 30 bp, Artificial Sequence
  Synthetic oligonucleotide
acaccgatcattgggtgcatgtaaaacgag

SEQ ID NO: 254087 - DNA, 30 bp, Artificial Sequence
  Synthetic oligonucleotide
ataggtatccttgggctctggctaaacgag

SEQ ID NO: 254088 - DNA, 30 bp, Artificial Sequence
  Synthetic oligonucleotide
caaatgcaccactcgggatgcctcaacgag

SEQ ID NO: 254089 - DNA, 30 bp, Artificial Sequence
  Synthetic oligonucleotide
attagcttatatgtgccagtcgtcaacgag

SEQ ID NO: 254090 - DNA, 30 bp, Artificial Sequence
  Synthetic oligonucleotide
tgcgctgatgttaatcgcgacaagaacgag

SEQ ID NO: 254091 - DNA, 30 bp, Artificial Sequence
  Synthetic oligonucleotide
aggcagggctatccagggcataagaacgag

SEQ ID NO: 254092 - DNA, 30 bp, Artificial Sequence
  Synthetic oligonucleotide
aaggtccctgactatgtggcaattaacgag

SEQ ID NO: 254093 - DNA, 30 bp, Artificial Sequence
  Synthetic oligonucleotide
ccatataagggctgactgagtatacacgag

SEQ ID NO: 254094 - DNA, 30 bp, Artificial Sequence
  Synthetic oligonucleotide
ggtatctaccggtggcgtgagacccacgag

SEQ ID NO: 254095 - DNA, 30 bp, Artificial Sequence
  Synthetic oligonucleotide
atcgtacgtgaaaacgagcggaggcacgag

SEQ ID NO: 254096 - DNA, 30 bp, Artificial Sequence
  Synthetic oligonucleotide
aaagacgacactggacgcggtttgcacgag

SEQ ID NO: 254097 - DNA, 30 bp, Artificial Sequence
  Synthetic oligonucleotide
gccatcacgctgagccatcgcaaagacgag

SEQ ID NO: 254098 - DNA, 30 bp, Artificial Sequence
  Synthetic oligonucleotide
cacagttgccatatcatgacggcggacgag

SEQ ID NO: 254099 - DNA, 30 bp, Artificial Sequence
  Synthetic oligonucleotide
gagtcgaggaatgcacatctcgtggacgag

SEQ ID NO: 254100 - DNA, 30 bp, Artificial Sequence
  Synthetic oligonucleotide
tttagcttgatgtaagtggcggatgacgag

SEQ ID NO: 254101 - DNA, 30 bp, Artificial Sequence
  Synthetic oligonucleotide
aaggttcgggataggtcctcattatacgag

SEQ ID NO: 254102 - DNA, 30 bp, Artificial Sequence
  Synthetic oligonucleotide
tgtacgatcctagttaggtaaaactacgag

SEQ ID NO: 254103 - DNA, 30 bp, Artificial Sequence
  Synthetic oligonucleotide
tagtaggagcgatgaggactaccctacgag

SEQ ID NO: 254104 - DNA, 30 bp, Artificial Sequence
  Synthetic oligonucleotide
ttgccgttgagggcgttatctcagtacgag

SEQ ID NO: 254105 - DNA, 30 bp, Artificial Sequence
  Synthetic oligonucleotide
gcaggataacgctatcacgctaggtacgag

SEQ ID NO: 254106 - DNA, 30 bp, Artificial Sequence
  Synthetic oligonucleotide
agtctgaaagactggacaatatgttacgag

SEQ ID NO: 254107 - DNA, 30 bp, Artificial Sequence
  Synthetic oligonucleotide
cgagagcgcacacgttcctatctttacgag

SEQ ID NO: 254108 - DNA, 30 bp, Artificial Sequence
  Synthetic oligonucleotide
ctgcgggtacaggatcgggtattaaccgag

SEQ ID NO: 254109 - DNA, 30 bp, Artificial Sequence
  Synthetic oligonucleotide
ttaagtgagcgtcatggataaatgaccgag

SEQ ID NO: 254110 - DNA, 30 bp, Artificial Sequence
  Synthetic oligonucleotide
gaacccctttaaatgtaccaagataccgag

SEQ ID NO: 254111 - DNA, 30 bp, Artificial Sequence
  Synthetic oligonucleotide
ggaacgagttcagcccggtggtaacccgag

SEQ ID NO: 254112 - DNA, 30 bp, Artificial Sequence
  Synthetic oligonucleotide
ccggctctgtgtgagaaggcactgcccgag

SEQ ID NO: 254113 - DNA, 30 bp, Artificial Sequence
  Synthetic oligonucleotide
aacctgggaactagggggtgagcagccgag

SEQ ID NO: 254114 - DNA, 30 bp, Artificial Sequence
  Synthetic oligonucleotide
tagagaattagggggctagaatgagccgag

SEQ ID NO: 254115 - DNA, 30 bp, Artificial Sequence
  Synthetic oligonucleotide
atttacgggaagcgtttcgtgatagccgag

SEQ ID NO: 254116 - DNA, 30 bp, Artificial Sequence
  Synthetic oligonucleotide
ggcggaaccagatatactgaagccgccgag

SEQ ID NO: 254117 - DNA, 30 bp, Artificial Sequence
  Synthetic oligonucleotide
caaccggatctcggcgccccacaggccgag

SEQ ID NO: 254118 - DNA, 30 bp, Artificial Sequence
  Synthetic oligonucleotide
cgacatactcagtcagcaccgcatgccgag

SEQ ID NO: 254119 - DNA, 30 bp, Artificial Sequence
  Synthetic oligonucleotide
ataatgactaccccattaagccaatccgag

SEQ ID NO: 254120 - DNA, 30 bp, Artificial Sequence
  Synthetic oligonucleotide
tgcgttataaaggagtctgattaatccgag

SEQ ID NO: 254121 - DNA, 30 bp, Artificial Sequence
  Synthetic oligonucleotide
tcgttctgctaagtgcactcagcctccgag

SEQ ID NO: 254122 - DNA, 30 bp, Artificial Sequence
  Synthetic oligonucleotide
gcttacgggattgttaaacttggctccgag

SEQ ID NO: 254123 - DNA, 30 bp, Artificial Sequence
  Synthetic oligonucleotide
aaaactacggtgatagcccccctctccgag

SEQ ID NO: 254124 - DNA, 30 bp, Artificial Sequence
  Synthetic oligonucleotide
cattttcaacgcctagacaagcaaagcgag

SEQ ID NO: 254125 - DNA, 30 bp, Artificial Sequence
  Synthetic oligonucleotide
tctccattataaaggcttgtgacaagcgag

SEQ ID NO: 254126 - DNA, 30 bp, Artificial Sequence
  Synthetic oligonucleotide
taagttacgcgataatggaggcagagcgag

SEQ ID NO: 254127 - DNA, 30 bp, Artificial Sequence
  Synthetic oligonucleotide
tgcacggggtgagaattcaattcgagcgag

SEQ ID NO: 254128 - DNA, 30 bp, Artificial Sequence
  Synthetic oligonucleotide
gactgcgcgcctgcgtacacgcctagcgag

SEQ ID NO: 254129 - DNA, 30 bp, Artificial Sequence
  Synthetic oligonucleotide
cggcgcgccagcaggttttctgtacgcgag

SEQ ID NO: 254130 - DNA, 31 bp, Artificial Sequence
  Synthetic oligonucleotide
acccaaatactcctataggggtggtcgcgag

SEQ ID NO: 254131 - DNA, 30 bp, Artificial Sequence
  Synthetic oligonucleotide
agcaggcatcaatgtcgcacttaaggcgag

SEQ ID NO: 254132 - DNA, 30 bp, Artificial Sequence
  Synthetic oligonucleotide
ggtagcagtgcctgcagtcgtggaggcgag

SEQ ID NO: 254133 - DNA, 30 bp, Artificial Sequence
  Synthetic oligonucleotide
ttcggcgcatgtcggtagcaagacggcgag

SEQ ID NO: 254134 - DNA, 30 bp, Artificial Sequence
  Synthetic oligonucleotide
aagcaatctatgtacgccagtagcggcgag

SEQ ID NO: 254135 - DNA, 30 bp, Artificial Sequence
  Synthetic oligonucleotide
taggctagttaatcggctcggcagggcgag

SEQ ID NO: 254136 - DNA, 30 bp, Artificial Sequence
  Synthetic oligonucleotide
attgtattccgcattgtgtgtcggggcgag

SEQ ID NO: 254137 - DNA, 30 bp, Artificial Sequence
  Synthetic oligonucleotide
tcaaccggtagcaagtggtggtgatgcgag

SEQ ID NO: 254138 - DNA, 30 bp, Artificial Sequence
  Synthetic oligonucleotide
acagtggcgagaatacggtaagtatgcgag

SEQ ID NO: 254139 - DNA, 30 bp, Artificial Sequence
  Synthetic oligonucleotide
cccatcacctacgtgcggagactctgcgag

SEQ ID NO: 254140 - DNA, 30 bp, Artificial Sequence
  Synthetic oligonucleotide
gggtccacgtgcaattctcacctctgcgag

SEQ ID NO: 254141 - DNA, 30 bp, Artificial Sequence
  Synthetic oligonucleotide
cgagtcctgcccgaaagggaaaggtgcgag

SEQ ID NO: 254142 - DNA, 30 bp, Artificial Sequence
  Synthetic oligonucleotide
attatcaaccccgctatgtgattttgcgag

SEQ ID NO: 254143 - DNA, 30 bp, Artificial Sequence
  Synthetic oligonucleotide
tagagctttgcaacatatgcgacaatcgag

SEQ ID NO: 254144 - DNA, 30 bp, Artificial Sequence
  Synthetic oligonucleotide
tatccggagcgcgaactgattataatcgag

SEQ ID NO: 254145 - DNA, 30 bp, Artificial Sequence
  Synthetic oligonucleotide
aacggatcacggcagttaaatgtaatcgag

SEQ ID NO: 254146 - DNA, 30 bp, Artificial Sequence
  Synthetic oligonucleotide
gaaattccagaataccatatatacatcgag

SEQ ID NO: 254147 - DNA, 30 bp, Artificial Sequence
  Synthetic oligonucleotide
cactctaggactcacttcatacgcatcgag

SEQ ID NO: 254148 - DNA, 30 bp, Artificial Sequence
  Synthetic oligonucleotide
tgttttcatggagaaggcaacatcatcgag

SEQ ID NO: 254149 - DNA, 30 bp, Artificial Sequence
  Synthetic oligonucleotide
tatgatacacataaaccatacggtatcgag

SEQ ID NO: 254150 - DNA, 30 bp, Artificial Sequence
  Synthetic oligonucleotide
atgtagtggacgcaatacgtaagactcgag

SEQ ID NO: 254151 - DNA, 30 bp, Artificial Sequence
  Synthetic oligonucleotide
ctttagacgagtaagcgtccgcggctcgag

SEQ ID NO: 254152 - DNA, 30 bp, Artificial Sequence
  Synthetic oligonucleotide
ttagtgggtgtcatttagcatgttctcgag

SEQ ID NO: 254153 - DNA, 30 bp, Artificial Sequence
  Synthetic oligonucleotide
cctttatagcaatgttaaaaactagtcgag

SEQ ID NO: 254154 - DNA, 30 bp, Artificial Sequence
  Synthetic oligonucleotide
tatcaatcttgaacgcgggtcgtattcgag

SEQ ID NO: 254155 - DNA, 30 bp, Artificial Sequence
  Synthetic oligonucleotide
ttaggggggcaaacgggccaagtcttcgag

SEQ ID NO: 254156 - DNA, 30 bp, Artificial Sequence
  Synthetic oligonucleotide
ttgcacgtagctctaaaatttgagttcgag

SEQ ID NO: 254157 - DNA, 30 bp, Artificial Sequence
  Synthetic oligonucleotide
tattgctcctacccaaaaagatagttcgag

SEQ ID NO: 254158 - DNA, 30 bp, Artificial Sequence
  Synthetic oligonucleotide
cttcgtatctcccaatctttgcgtttcgag

SEQ ID NO: 254159 - DNA, 30 bp, Artificial Sequence
  Synthetic oligonucleotide
gtggccccgcagcgacatattagaaaggag

SEQ ID NO: 254160 - DNA, 30 bp, Artificial Sequence
  Synthetic oligonucleotide
ttcgctagtaatgcattgagttacaaggag

SEQ ID NO: 254161 - DNA, 30 bp, Artificial Sequence
  Synthetic oligonucleotide
ccaaacgggtccgatcgggtccccaaggag

SEQ ID NO: 254162 - DNA, 30 bp, Artificial Sequence
  Synthetic oligonucleotide
tcaatcacagccgctctcatatgcaaggag

SEQ ID NO: 254163 - DNA, 30 bp, Artificial Sequence
  Synthetic oligonucleotide
gcatggaggccttatctaaccatcaaggag

SEQ ID NO: 254164 - DNA, 30 bp, Artificial Sequence
  Synthetic oligonucleotide
tacgcgacttgagccctgcccgagaaggag

SEQ ID NO: 254165 - DNA, 30 bp, Artificial Sequence
  Synthetic oligonucleotide
cccgtgacactgacggcgtaatcacaggag

SEQ ID NO: 254166 - DNA, 30 bp, Artificial Sequence
  Synthetic oligonucleotide
ttgatagtgacggtctattatcagcaggag

SEQ ID NO: 254167 - DNA, 30 bp, Artificial Sequence
  Synthetic oligonucleotide
cgggaggcgttgctcttccgtgtgcaggag

SEQ ID NO: 254168 - DNA, 30 bp, Artificial Sequence
  Synthetic oligonucleotide
agttttctgtgggaacgcgcaagtgaggag

SEQ ID NO: 254169 - DNA, 30 bp, Artificial Sequence
  Synthetic oligonucleotide
acattttctgctattcgggtagttgaggag

SEQ ID NO: 254170 - DNA, 30 bp, Artificial Sequence
  Synthetic oligonucleotide
actttcccatagccgggaatgtcataggag

SEQ ID NO: 254171 - DNA, 30 bp, Artificial Sequence
  Synthetic oligonucleotide
gagtgtcaaccgttttctaacacctaggag

SEQ ID NO: 254172 - DNA, 31 bp, Artificial Sequence
  Synthetic oligonucleotide
taaatacccccccgaccgaacaagctaggag

SEQ ID NO: 254173 - DNA, 30 bp, Artificial Sequence
  Synthetic oligonucleotide
ctgccacatttgtgggtttaaatctaggag

SEQ ID NO: 254174 - DNA, 30 bp, Artificial Sequence
  Synthetic oligonucleotide
tagggacgctaaataaggcacctttaggag

SEQ ID NO: 254175 - DNA, 30 bp, Artificial Sequence
  Synthetic oligonucleotide
gagtgaacaacaaatgggcccaaaacggag

SEQ ID NO: 254176 - DNA, 30 bp, Artificial Sequence
  Synthetic oligonucleotide
cattgaggcggtacacgtgccgtcacggag

SEQ ID NO: 254177 - DNA, 30 bp, Artificial Sequence
  Synthetic oligonucleotide
aaaatgtttatcgacatcctagcgacggag

SEQ ID NO: 254178 - DNA, 30 bp, Artificial Sequence
  Synthetic oligonucleotide
tagtcctcgagtacccgatatcaaccggag

SEQ ID NO: 254179 - DNA, 31 bp, Artificial Sequence
  Synthetic oligonucleotide
catattcgtataggacgggttgggaccggag

SEQ ID NO: 254180 - DNA, 30 bp, Artificial Sequence
  Synthetic oligonucleotide
aatggaaaagacatcggcgccgcagcggag

SEQ ID NO: 254181 - DNA, 30 bp, Artificial Sequence
  Synthetic oligonucleotide
ttagaagatccgtagacagcgcacgcggag

SEQ ID NO: 254182 - DNA, 30 bp, Artificial Sequence
  Synthetic oligonucleotide
atacttatcggtgcctagatgaaggcggag

SEQ ID NO: 254183 - DNA, 30 bp, Artificial Sequence
  Synthetic oligonucleotide
gtccgtattaacttagctagggtggcggag

SEQ ID NO: 254184 - DNA, 30 bp, Artificial Sequence
  Synthetic oligonucleotide
tgattttgacatcgagacgtattggcggag

SEQ ID NO: 254185 - DNA, 30 bp, Artificial Sequence
  Synthetic oligonucleotide
ggggtcatcagctgcacggagagtgcggag

SEQ ID NO: 254186 - DNA, 30 bp, Artificial Sequence
  Synthetic oligonucleotide
agcataatcgtttagacggagcgtgcggag

SEQ ID NO: 254187 - DNA, 30 bp, Artificial Sequence
  Synthetic oligonucleotide
cttggccgtctctttaattaatcgtcggag

SEQ ID NO: 254188 - DNA, 30 bp, Artificial Sequence
  Synthetic oligonucleotide
ttcacgccaatacaggagtggcggtcggag

SEQ ID NO: 254189 - DNA, 30 bp, Artificial Sequence
  Synthetic oligonucleotide
atgccgctagcacaacctaggatttcggag

SEQ ID NO: 254190 - DNA, 30 bp, Artificial Sequence
  Synthetic oligonucleotide
agggactcaagggtgtggttaaatagggag

SEQ ID NO: 254191 - DNA, 30 bp, Artificial Sequence
  Synthetic oligonucleotide
gagcctcaacagcagttttacactagggag

SEQ ID NO: 254192 - DNA, 30 bp, Artificial Sequence
  Synthetic oligonucleotide
atctgaaacggaaggcgtaagggtagggag

SEQ ID NO: 254193 - DNA, 30 bp, Artificial Sequence
  Synthetic oligonucleotide
gtcacagaattctgtctcaaaagacgggag

SEQ ID NO: 254194 - DNA, 30 bp, Artificial Sequence
  Synthetic oligonucleotide
tcgcaccgaatcggttttctctgacgggag

SEQ ID NO: 254195 - DNA, 30 bp, Artificial Sequence
  Synthetic oligonucleotide
tgtatgcttgtcagggcatctccgcgggag

SEQ ID NO: 254196 - DNA, 30 bp, Artificial Sequence
  Synthetic oligonucleotide
ccgtcatagacgtacagcacagctcgggag

SEQ ID NO: 254197 - DNA, 30 bp, Artificial Sequence
  Synthetic oligonucleotide
atcgtttaagtggctaagtcatttcgggag

SEQ ID NO: 254198 - DNA, 30 bp, Artificial Sequence
  Synthetic oligonucleotide
tagccccacgacgttattgagttaggggag

SEQ ID NO: 254199 - DNA, 30 bp, Artificial Sequence
  Synthetic oligonucleotide
ggtgggcatcacggtaaccccaatggggag

SEQ ID NO: 254200 - DNA, 30 bp, Artificial Sequence
  Synthetic oligonucleotide
gcgagtgcttaaattgatacagctggggag

SEQ ID NO: 254201 - DNA, 30 bp, Artificial Sequence
  Synthetic oligonucleotide
tgcacagaggcccatggcggtcgtggggag

SEQ ID NO: 254202 - DNA, 30 bp, Artificial Sequence
  Synthetic oligonucleotide
gatgaatgatcaatgaccggtagatgggag

SEQ ID NO: 254203 - DNA, 30 bp, Artificial Sequence
  Synthetic oligonucleotide
gccgcattccatccagcgtccggatgggag

SEQ ID NO: 254204 - DNA, 30 bp, Artificial Sequence
  Synthetic oligonucleotide
ttgacttccggacaatctcatgcctgggag

SEQ ID NO: 254205 - DNA, 30 bp, Artificial Sequence
  Synthetic oligonucleotide
gtagagactccgatgtacggtgcctgggag

SEQ ID NO: 254206 - DNA, 30 bp, Artificial Sequence
  Synthetic oligonucleotide
tctgaggattgtgctcgacacggctgggag

SEQ ID NO: 254207 - DNA, 30 bp, Artificial Sequence
  Synthetic oligonucleotide
ggaatggtgattacgcaagcggggtgggag

SEQ ID NO: 254208 - DNA, 30 bp, Artificial Sequence
  Synthetic oligonucleotide
tctaaaggaggtccgtctgtcttgtgggag

SEQ ID NO: 254209 - DNA, 30 bp, Artificial Sequence
  Synthetic oligonucleotide
ttcgtcaggaaaatagagtccggttgggag

SEQ ID NO: 254210 - DNA, 30 bp, Artificial Sequence
  Synthetic oligonucleotide
gtgtgttaggtaacacctacttgttgggag

SEQ ID NO: 254211 - DNA, 30 bp, Artificial Sequence
  Synthetic oligonucleotide
tggtctgggcagctgaattcccgaatggag

SEQ ID NO: 254212 - DNA, 30 bp, Artificial Sequence
  Synthetic oligonucleotide
caccccaccaacgtctacacttgaatggag

SEQ ID NO: 254213 - DNA, 30 bp, Artificial Sequence
  Synthetic oligonucleotide
agaactagtactccggaattcataatggag

SEQ ID NO: 254214 - DNA, 30 bp, Artificial Sequence
  Synthetic oligonucleotide
aggggtgggtacaagccacctactatggag

SEQ ID NO: 254215 - DNA, 30 bp, Artificial Sequence
  Synthetic oligonucleotide
actccctcaacagtgccctaccctctggag

SEQ ID NO: 254216 - DNA, 30 bp, Artificial Sequence
  Synthetic oligonucleotide
ttatgacacaactggtgcgaatctctggag

SEQ ID NO: 254217 - DNA, 30 bp, Artificial Sequence
  Synthetic oligonucleotide
gcatgacaattacttggagatagagtggag

SEQ ID NO: 254218 - DNA, 30 bp, Artificial Sequence
  Synthetic oligonucleotide
acttcagttccagaattatctacggtggag

SEQ ID NO: 254219 - DNA, 31 bp, Artificial Sequence
  Synthetic oligonucleotide
ttcttatcaagcgcagcctgtcccggtggag

SEQ ID NO: 254220 - DNA, 30 bp, Artificial Sequence
  Synthetic oligonucleotide
ctgcacttgtatgttgtttctcgggtggag

SEQ ID NO: 254221 - DNA, 30 bp, Artificial Sequence
  Synthetic oligonucleotide
aggatacttcggtatggctgtttggtggag

SEQ ID NO: 254222 - DNA, 30 bp, Artificial Sequence
  Synthetic oligonucleotide
atttcagcgtattcgatgcacatcttggag

SEQ ID NO: 254223 - DNA, 30 bp, Artificial Sequence
  Synthetic oligonucleotide
gggggtcaaagggagggcagacggttggag

SEQ ID NO: 254224 - DNA, 30 bp, Artificial Sequence
  Synthetic oligonucleotide
gcctttacagtctgtaatgggatgttggag

SEQ ID NO: 254225 - DNA, 30 bp, Artificial Sequence
  Synthetic oligonucleotide
acactggtttggctgtgctacactttggag

SEQ ID NO: 254226 - DNA, 30 bp, Artificial Sequence
  Synthetic oligonucleotide
taaggctagccgaaatttggacctttggag

SEQ ID NO: 254227 - DNA, 30 bp, Artificial Sequence
  Synthetic oligonucleotide
taaacagggctacagggaagtgttttggag

SEQ ID NO: 254228 - DNA, 30 bp, Artificial Sequence
  Synthetic oligonucleotide
tcaaaactataaatatcgtaagtcaatgag

SEQ ID NO: 254229 - DNA, 30 bp, Artificial Sequence
  Synthetic oligonucleotide
ttccataaacgagacgctgtagtgaatgag

SEQ ID NO: 254230 - DNA, 30 bp, Artificial Sequence
  Synthetic oligonucleotide
aagagctcactaatagttcattttcatgag

SEQ ID NO: 254231 - DNA, 30 bp, Artificial Sequence
  Synthetic oligonucleotide
tatcggttcgagtttcccagccaagatgag

SEQ ID NO: 254232 - DNA, 30 bp, Artificial Sequence
  Synthetic oligonucleotide
ttatcttcatcccgcggggacatcgatgag

SEQ ID NO: 254233 - DNA, 30 bp, Artificial Sequence
  Synthetic oligonucleotide
actcggcctcatattttactagatgatgag

SEQ ID NO: 254234 - DNA, 30 bp, Artificial Sequence
  Synthetic oligonucleotide
gtcccggaaacttgttctgtctatgatgag

SEQ ID NO: 254235 - DNA, 30 bp, Artificial Sequence
  Synthetic oligonucleotide
ggactagtgcccacgcgcagtgttgatgag

SEQ ID NO: 254236 - DNA, 30 bp, Artificial Sequence
  Synthetic oligonucleotide
ttctacaaggcatgtctctggaaatatgag

SEQ ID NO: 254237 - DNA, 30 bp, Artificial Sequence
  Synthetic oligonucleotide
acgggtaaacgattccggtggttatatgag

SEQ ID NO: 254238 - DNA, 30 bp, Artificial Sequence
  Synthetic oligonucleotide
ctggcggtccaaacgtagtaatcctatgag

SEQ ID NO: 254239 - DNA, 30 bp, Artificial Sequence
  Synthetic oligonucleotide
caatacttgtttggcattgattggtatgag

SEQ ID NO: 254240 - DNA, 30 bp, Artificial Sequence
  Synthetic oligonucleotide
attagaaacgatcacgtgggtcgttatgag

SEQ ID NO: 254241 - DNA, 30 bp, Artificial Sequence
  Synthetic oligonucleotide
actagggaaccgcaggcagttcaaactgag

SEQ ID NO: 254242 - DNA, 30 bp, Artificial Sequence
  Synthetic oligonucleotide
tgggatcggttccgtcgcgcatgaactgag

SEQ ID NO: 254243 - DNA, 30 bp, Artificial Sequence
  Synthetic oligonucleotide
acggggggaagattgccccagtgaactgag

SEQ ID NO: 254244 - DNA, 30 bp, Artificial Sequence
  Synthetic oligonucleotide
tagaaataagtgttccttcctagcactgag

SEQ ID NO: 254245 - DNA, 30 bp, Artificial Sequence
  Synthetic oligonucleotide
tttgagaagtcacgctccccatcgactgag

SEQ ID NO: 254246 - DNA, 30 bp, Artificial Sequence
  Synthetic oligonucleotide
actaccgtatcctagtgagtgaaacctgag

SEQ ID NO: 254247 - DNA, 30 bp, Artificial Sequence
  Synthetic oligonucleotide
gtattattacgtgccatacagtcagctgag

SEQ ID NO: 254248 - DNA, 30 bp, Artificial Sequence
  Synthetic oligonucleotide
aggctgctgtgatacggtacttcagctgag

SEQ ID NO: 254249 - DNA, 30 bp, Artificial Sequence
  Synthetic oligonucleotide
acatataagtattggcatcggatcgctgag

SEQ ID NO: 254250 - DNA, 30 bp, Artificial Sequence
  Synthetic oligonucleotide
tgcactaaaaggtcccagtatccggctgag

SEQ ID NO: 254251 - DNA, 30 bp, Artificial Sequence
  Synthetic oligonucleotide
gcgtgtttctttcgaaatccagtctctgag

SEQ ID NO: 254252 - DNA, 30 bp, Artificial Sequence
  Synthetic oligonucleotide
tcaatggtgtacatacactttgagtctgag

SEQ ID NO: 254253 - DNA, 30 bp, Artificial Sequence
  Synthetic oligonucleotide
taaacggttttcacctcgaacgtgtctgag

SEQ ID NO: 254254 - DNA, 30 bp, Artificial Sequence
  Synthetic oligonucleotide
acggaatcgcgccgcgcggtaacttctgag

SEQ ID NO: 254255 - DNA, 30 bp, Artificial Sequence
  Synthetic oligonucleotide
tatagaccggttgcatcatattgttctgag

SEQ ID NO: 254256 - DNA, 30 bp, Artificial Sequence
  Synthetic oligonucleotide
tccagttctaagtaaggcatataaagtgag

SEQ ID NO: 254257 - DNA, 30 bp, Artificial Sequence
  Synthetic oligonucleotide
agcatttgtctcccaggatggcacagtgag

SEQ ID NO: 254258 - DNA, 30 bp, Artificial Sequence
  Synthetic oligonucleotide
ggttaatccctactatcaaacgggagtgag

SEQ ID NO: 254259 - DNA, 30 bp, Artificial Sequence
  Synthetic oligonucleotide
ggtaccaggtataggcggggaactagtgag

SEQ ID NO: 254260 - DNA, 30 bp, Artificial Sequence
  Synthetic oligonucleotide
cccggaaattgtcatagcgagaaccgtgag

SEQ ID NO: 254261 - DNA, 30 bp, Artificial Sequence
  Synthetic oligonucleotide
gttgaattatcaggcttggtatgccgtgag

SEQ ID NO: 254262 - DNA, 30 bp, Artificial Sequence
  Synthetic oligonucleotide
atcagatctttgggaaaggtgttgcgtgag

SEQ ID NO: 254263 - DNA, 30 bp, Artificial Sequence
  Synthetic oligonucleotide
actgtgcgccatagcttcgggagtcgtgag

SEQ ID NO: 254264 - DNA, 30 bp, Artificial Sequence
  Synthetic oligonucleotide
cggcctgtaagtaggatatcaaaaggtgag

SEQ ID NO: 254265 - DNA, 30 bp, Artificial Sequence
  Synthetic oligonucleotide
acaagacgcggacaggctgtttcaggtgag

SEQ ID NO: 254266 - DNA, 30 bp, Artificial Sequence
  Synthetic oligonucleotide
ggtagagtcatagtagttgctgggggtgag

SEQ ID NO: 254267 - DNA, 30 bp, Artificial Sequence
  Synthetic oligonucleotide
accgactagctgagtccggacatgggtgag

SEQ ID NO: 254268 - DNA, 30 bp, Artificial Sequence
  Synthetic oligonucleotide
gttctcagtagctttaaggcatctggtgag

SEQ ID NO: 254269 - DNA, 30 bp, Artificial Sequence
  Synthetic oligonucleotide
tctttataattcgcagggaatattggtgag

SEQ ID NO: 254270 - DNA, 30 bp, Artificial Sequence
  Synthetic oligonucleotide
tcgtcaatacgatagacgttctggtgtgag

SEQ ID NO: 254271 - DNA, 30 bp, Artificial Sequence
  Synthetic oligonucleotide
tctagcactaagggggtatccatttgtgag

SEQ ID NO: 254272 - DNA, 30 bp, Artificial Sequence
  Synthetic oligonucleotide
cgattataccgaatgcatttaggaattgag

SEQ ID NO: 254273 - DNA, 30 bp, Artificial Sequence
  Synthetic oligonucleotide
ctgattaacctgggcgataacttaattgag

SEQ ID NO: 254274 - DNA, 30 bp, Artificial Sequence
  Synthetic oligonucleotide
tacagacaatgttcgcaccactacattgag

SEQ ID NO: 254275 - DNA, 30 bp, Artificial Sequence
  Synthetic oligonucleotide
gaagaattgtcccctcgacacaaacttgag

SEQ ID NO: 254276 - DNA, 30 bp, Artificial Sequence
  Synthetic oligonucleotide
tgtccgtctctcaaacgcccgggccttgag

SEQ ID NO: 254277 - DNA, 30 bp, Artificial Sequence
  Synthetic oligonucleotide
acataactggtctgcgcttgtggccttgag

SEQ ID NO: 254278 - DNA, 30 bp, Artificial Sequence
  Synthetic oligonucleotide
gagaatgtcggtgacctcaagtggcttgag

SEQ ID NO: 254279 - DNA, 30 bp, Artificial Sequence
  Synthetic oligonucleotide
tacctcacgacggacgcaaaaatcgttgag

SEQ ID NO: 254280 - DNA, 30 bp, Artificial Sequence
  Synthetic oligonucleotide
ggaaaatttgtacgtgcacaggctgttgag

SEQ ID NO: 254281 - DNA, 30 bp, Artificial Sequence
  Synthetic oligonucleotide
gatggatttgaatgagggatactatttgag

SEQ ID NO: 254282 - DNA, 30 bp, Artificial Sequence
  Synthetic oligonucleotide
gggataagactcatctacggtcgctttgag

SEQ ID NO: 254283 - DNA, 30 bp, Artificial Sequence
  Synthetic oligonucleotide
ttagcgtacaaggggcctcttgtaaaatag

SEQ ID NO: 254284 - DNA, 30 bp, Artificial Sequence
  Synthetic oligonucleotide
gtatctggtcaacctcccagaggcaaatag

SEQ ID NO: 254285 - DNA, 30 bp, Artificial Sequence
  Synthetic oligonucleotide
tgcgaggggttgtgtgcgtgcgcgaaatag

SEQ ID NO: 254286 - DNA, 30 bp, Artificial Sequence
  Synthetic oligonucleotide
gatctgtggccggcacttaatgggaaatag

SEQ ID NO: 254287 - DNA, 30 bp, Artificial Sequence
  Synthetic oligonucleotide
ctaggtaagtaggcgtggcagatgaaatag

SEQ ID NO: 254288 - DNA, 30 bp, Artificial Sequence
  Synthetic oligonucleotide
ctctgccctccgcaagattcgttgaaatag

SEQ ID NO: 254289 - DNA, 30 bp, Artificial Sequence
  Synthetic oligonucleotide
agctgatcgggaggctaagcttttaaatag

SEQ ID NO: 254290 - DNA, 30 bp, Artificial Sequence
  Synthetic oligonucleotide
gctggtgatgaatcggcttctccacaatag

SEQ ID NO: 254291 - DNA, 30 bp, Artificial Sequence
  Synthetic oligonucleotide
tgagtagcacactcggtgggtggccaatag

SEQ ID NO: 254292 - DNA, 30 bp, Artificial Sequence
  Synthetic oligonucleotide
cgggagttttcgtgcctccaacagcaatag

SEQ ID NO: 254293 - DNA, 30 bp, Artificial Sequence
  Synthetic oligonucleotide
agtaatagggcgggcggcccgccgcaatag

SEQ ID NO: 254294 - DNA, 30 bp, Artificial Sequence
  Synthetic oligonucleotide
gtaagtataacacgaagggcgccgcaatag

SEQ ID NO: 254295 - DNA, 30 bp, Artificial Sequence
  Synthetic oligonucleotide
ggcagtgttcgtaaagcgaagctgcaatag

SEQ ID NO: 254296 - DNA, 30 bp, Artificial Sequence
  Synthetic oligonucleotide
tgtaattaagaaccgtgagatcatcaatag

SEQ ID NO: 254297 - DNA, 30 bp, Artificial Sequence
  Synthetic oligonucleotide
atcaaggcgaagtatacttgtaaagaatag

SEQ ID NO: 254298 - DNA, 30 bp, Artificial Sequence
  Synthetic oligonucleotide
gtgggtctgtaaatctccagtcaagaatag

SEQ ID NO: 254299 - DNA, 30 bp, Artificial Sequence
  Synthetic oligonucleotide
cagcatggaagttagcgcactggagaatag

SEQ ID NO: 254300 - DNA, 30 bp, Artificial Sequence
  Synthetic oligonucleotide
tatacaggcttccggacggaacccgaatag

SEQ ID NO: 254301 - DNA, 30 bp, Artificial Sequence
  Synthetic oligonucleotide
tgggtctattttgtcttgatgtgggaatag

SEQ ID NO: 254302 - DNA, 30 bp, Artificial Sequence
  Synthetic oligonucleotide
tctaagtgagtaggttataagatggaatag

SEQ ID NO: 254303 - DNA, 30 bp, Artificial Sequence
  Synthetic oligonucleotide
gttgtggtcatgttacgtcactaataatag

SEQ ID NO: 254304 - DNA, 30 bp, Artificial Sequence
  Synthetic oligonucleotide
tgaacgcttaacggcttaccctgataatag

SEQ ID NO: 254305 - DNA, 30 bp, Artificial Sequence
  Synthetic oligonucleotide
atcagatgggtgaagaatgagtattaatag

SEQ ID NO: 254306 - DNA, 30 bp, Artificial Sequence
  Synthetic oligonucleotide
gggcgaggcttaggacagatgggttaatag

SEQ ID NO: 254307 - DNA, 30 bp, Artificial Sequence
  Synthetic oligonucleotide
acggtaatttcaaatattacctgttaatag

SEQ ID NO: 254308 - DNA, 30 bp, Artificial Sequence
  Synthetic oligonucleotide
gctgtggttggaagagtggcttaaacatag

SEQ ID NO: 254309 - DNA, 30 bp, Artificial Sequence
  Synthetic oligonucleotide
cgaatattttatgtttgatctgtaacatag

SEQ ID NO: 254310 - DNA, 30 bp, Artificial Sequence
  Synthetic oligonucleotide
agcgtttatctgttttcagagttcacatag

SEQ ID NO: 254311 - DNA, 30 bp, Artificial Sequence
  Synthetic oligonucleotide
ctcggaggcgtcatacattactagacatag

SEQ ID NO: 254312 - DNA, 29 bp, Artificial Sequence
  Synthetic oligonucleotide
tggaatccctgtaaacctaaacgacatag

SEQ ID NO: 254313 - DNA, 30 bp, Artificial Sequence
  Synthetic oligonucleotide
tttggccatggttttacactacggacatag

SEQ ID NO: 254314 - DNA, 30 bp, Artificial Sequence
  Synthetic oligonucleotide
aggccctgctggcctggtatccggacatag

SEQ ID NO: 254315 - DNA, 30 bp, Artificial Sequence
  Synthetic oligonucleotide
taggcgtgtttacttgtgtataatacatag

SEQ ID NO: 254316 - DNA, 30 bp, Artificial Sequence
  Synthetic oligonucleotide
ctcaagttttggaggtcctcagacccatag

SEQ ID NO: 254317 - DNA, 30 bp, Artificial Sequence
  Synthetic oligonucleotide
aaaggtcaggagaaccggtcccctccatag

SEQ ID NO: 254318 - DNA, 30 bp, Artificial Sequence
  Synthetic oligonucleotide
tactgcttgatggcccccatgaaagcatag

SEQ ID NO: 254319 - DNA, 30 bp, Artificial Sequence
  Synthetic oligonucleotide
ttgaactttggcgtctgtaatcgagcatag

SEQ ID NO: 254320 - DNA, 30 bp, Artificial Sequence
  Synthetic oligonucleotide
atggtgaatatctgtcgataagccgcatag

SEQ ID NO: 254321 - DNA, 30 bp, Artificial Sequence
  Synthetic oligonucleotide
gagtcgtgggttgcgtttatccgggcatag

SEQ ID NO: 254322 - DNA, 30 bp, Artificial Sequence
  Synthetic oligonucleotide
cgtttatcgtaaacatatatgtgggcatag

SEQ ID NO: 254323 - DNA, 30 bp, Artificial Sequence
  Synthetic oligonucleotide
cagagggccgactgaaggtagcttgcatag

SEQ ID NO: 254324 - DNA, 30 bp, Artificial Sequence
  Synthetic oligonucleotide
gctttctcacagttcagaaccggatcatag

SEQ ID NO: 254325 - DNA, 30 bp, Artificial Sequence
  Synthetic oligonucleotide
tgctgagagcgtagacacataacctcatag

SEQ ID NO: 254326 - DNA, 30 bp, Artificial Sequence
  Synthetic oligonucleotide
cccaccgtcatgtgcgtagcaagctcatag

SEQ ID NO: 254327 - DNA, 30 bp, Artificial Sequence
  Synthetic oligonucleotide
acagcataagagctttccagacagtcatag

SEQ ID NO: 254328 - DNA, 30 bp, Artificial Sequence
  Synthetic oligonucleotide
tgtgacgatatagcgtggaacatgtcatag

SEQ ID NO: 254329 - DNA, 30 bp, Artificial Sequence
  Synthetic oligonucleotide
gatgtagggccactaaagatgcgaagatag

SEQ ID NO: 254330 - DNA, 30 bp, Artificial Sequence
  Synthetic oligonucleotide
accataggtgttggctcaaagaacagatag

SEQ ID NO: 254331 - DNA, 30 bp, Artificial Sequence
  Synthetic oligonucleotide
gaccggatcaccttgaaattagtcagatag

SEQ ID NO: 254332 - DNA, 30 bp, Artificial Sequence
  Synthetic oligonucleotide
attgcgtggtcagaccacctcaatagatag

SEQ ID NO: 254333 - DNA, 30 bp, Artificial Sequence
  Synthetic oligonucleotide
tccacttgaccgatgtcatagtcacgatag

SEQ ID NO: 254334 - DNA, 30 bp, Artificial Sequence
  Synthetic oligonucleotide
accgggtagggcctctcctacagacgatag

SEQ ID NO: 254335 - DNA, 30 bp, Artificial Sequence
  Synthetic oligonucleotide
cgttaatgtactgagtaccatcaccgatag

SEQ ID NO: 254336 - DNA, 30 bp, Artificial Sequence
  Synthetic oligonucleotide
gggcttgcgccaaaggtaggacgccgatag

SEQ ID NO: 254337 - DNA, 30 bp, Artificial Sequence
  Synthetic oligonucleotide
agccaggacaacatatcgccattgcgatag

SEQ ID NO: 254338 - DNA, 30 bp, Artificial Sequence
  Synthetic oligonucleotide
acatccctggctatataaatccgaggatag

SEQ ID NO: 254339 - DNA, 30 bp, Artificial Sequence
  Synthetic oligonucleotide
ctaatagcccccgtacgagagtccggatag

SEQ ID NO: 254340 - DNA, 30 bp, Artificial Sequence
  Synthetic oligonucleotide
caactaagggggagccatatcggcggatag

SEQ ID NO: 254341 - DNA, 30 bp, Artificial Sequence
  Synthetic oligonucleotide
acattgggccaggtaccgcctattggatag

SEQ ID NO: 254342 - DNA, 30 bp, Artificial Sequence
  Synthetic oligonucleotide
ctcaaagaagtctccagacagacatgatag

SEQ ID NO: 254343 - DNA, 30 bp, Artificial Sequence
  Synthetic oligonucleotide
taaaagcctaccggggaagagttatgatag

SEQ ID NO: 254344 - DNA, 30 bp, Artificial Sequence
  Synthetic oligonucleotide
taaaagtttgtggtttctaagacctgatag

SEQ ID NO: 254345 - DNA, 30 bp, Artificial Sequence
  Synthetic oligonucleotide
agcacctacctgaaagtgggcggaatatag

SEQ ID NO: 254346 - DNA, 30 bp, Artificial Sequence
  Synthetic oligonucleotide
tcacggcttcctttgttatttataatatag

SEQ ID NO: 254347 - DNA, 30 bp, Artificial Sequence
  Synthetic oligonucleotide
catgggttttatataacattcctaatatag

SEQ ID NO: 254348 - DNA, 30 bp, Artificial Sequence
  Synthetic oligonucleotide
ttccaccaccgcttcagcgaaggcatatag

SEQ ID NO: 254349 - DNA, 30 bp, Artificial Sequence
  Synthetic oligonucleotide
tccatgaagggggctaatgcttagatatag

SEQ ID NO: 254350 - DNA, 30 bp, Artificial Sequence
  Synthetic oligonucleotide
ctgaaccagtatagaagtataccgatatag

SEQ ID NO: 254351 - DNA, 30 bp, Artificial Sequence
  Synthetic oligonucleotide
aatgtaactcttgctggtgagactatatag

SEQ ID NO: 254352 - DNA, 30 bp, Artificial Sequence
  Synthetic oligonucleotide
atgcagtgaaacccgtggcttcctatatag

SEQ ID NO: 254353 - DNA, 30 bp, Artificial Sequence
  Synthetic oligonucleotide
atctcgtggccgattgccccagaactatag

SEQ ID NO: 254354 - DNA, 30 bp, Artificial Sequence
  Synthetic oligonucleotide
tgtcattggtgcgttgacatatcactatag

SEQ ID NO: 254355 - DNA, 30 bp, Artificial Sequence
  Synthetic oligonucleotide
acacagcaccctacgcaacagaagctatag

SEQ ID NO: 254356 - DNA, 30 bp, Artificial Sequence
  Synthetic oligonucleotide
attcgtacgttagggggtgggacagtatag

SEQ ID NO: 254357 - DNA, 30 bp, Artificial Sequence
  Synthetic oligonucleotide
tggccacatgtccagggctatatagtatag

SEQ ID NO: 254358 - DNA, 30 bp, Artificial Sequence
  Synthetic oligonucleotide
agcagacaaaggaagactctttcggtatag

SEQ ID NO: 254359 - DNA, 30 bp, Artificial Sequence
  Synthetic oligonucleotide
cggagtgcacgggggtcacgcagggtatag

SEQ ID NO: 254360 - DNA, 30 bp, Artificial Sequence
  Synthetic oligonucleotide
cgagcagcactaagagaatatagggtatag

SEQ ID NO: 254361 - DNA, 30 bp, Artificial Sequence
  Synthetic oligonucleotide
atgtaagaccgtccggaatcccctgtatag

SEQ ID NO: 254362 - DNA, 30 bp, Artificial Sequence
  Synthetic oligonucleotide
cctatcgcaattgtttaaatggttgtatag

SEQ ID NO: 254363 - DNA, 30 bp, Artificial Sequence
  Synthetic oligonucleotide
agtgctattccggatctaatagccttatag

SEQ ID NO: 254364 - DNA, 30 bp, Artificial Sequence
  Synthetic oligonucleotide
gcgactgtgacaactagtcctgggttatag

SEQ ID NO: 254365 - DNA, 30 bp, Artificial Sequence
  Synthetic oligonucleotide
gcttgtattatgccacgtgataatttatag

SEQ ID NO: 254366 - DNA, 30 bp, Artificial Sequence
  Synthetic oligonucleotide
cgttcgagaatctgcatcaccaaaaactag

SEQ ID NO: 254367 - DNA, 30 bp, Artificial Sequence
  Synthetic oligonucleotide
caacacccgattgccgttacggaaaactag

SEQ ID NO: 254368 - DNA, 30 bp, Artificial Sequence
  Synthetic oligonucleotide
tatggggtcggcggtaagcgcacaaactag

SEQ ID NO: 254369 - DNA, 30 bp, Artificial Sequence
  Synthetic oligonucleotide
tgcattcatgcttgcagctaaggaaactag

SEQ ID NO: 254370 - DNA, 30 bp, Artificial Sequence
  Synthetic oligonucleotide
cctttgcctgagattgtgtgtttaaactag

SEQ ID NO: 254371 - DNA, 30 bp, Artificial Sequence
  Synthetic oligonucleotide
tttgagtgccctgcatatgagacgaactag

SEQ ID NO: 254372 - DNA, 30 bp, Artificial Sequence
  Synthetic oligonucleotide
gagacgtcgcctatcccaatgtataactag

SEQ ID NO: 254373 - DNA, 30 bp, Artificial Sequence
  Synthetic oligonucleotide
tctgtattaccagaaatttagattaactag

SEQ ID NO: 254374 - DNA, 30 bp, Artificial Sequence
  Synthetic oligonucleotide
ctaaaccaacatggtacaactattaactag

SEQ ID NO: 254375 - DNA, 30 bp, Artificial Sequence
  Synthetic oligonucleotide
tgggtgtagtccatgggcgttttgcactag

SEQ ID NO: 254376 - DNA, 30 bp, Artificial Sequence
  Synthetic oligonucleotide
ggcgcattgaagctaatgagtcttcactag

SEQ ID NO: 254377 - DNA, 30 bp, Artificial Sequence
  Synthetic oligonucleotide
cactttaaattaattatgcggaccgactag

SEQ ID NO: 254378 - DNA, 30 bp, Artificial Sequence
  Synthetic oligonucleotide
tccaggcaagccaacagatccttggactag

SEQ ID NO: 254379 - DNA, 30 bp, Artificial Sequence
  Synthetic oligonucleotide
tattccctagagactggataaacatactag

SEQ ID NO: 254380 - DNA, 30 bp, Artificial Sequence
  Synthetic oligonucleotide
tagttattccgtgcacaacatggatactag

SEQ ID NO: 254381 - DNA, 30 bp, Artificial Sequence
  Synthetic oligonucleotide
gatgaaagccttcacatgatcccaacctag

SEQ ID NO: 254382 - DNA, 30 bp, Artificial Sequence
  Synthetic oligonucleotide
gcaggagtcggccctaccacaccgacctag

SEQ ID NO: 254383 - DNA, 30 bp, Artificial Sequence
  Synthetic oligonucleotide
agtaaccttgctacatccattcggacctag

SEQ ID NO: 254384 - DNA, 30 bp, Artificial Sequence
  Synthetic oligonucleotide
acagggtgtaacaatgtgtccatgacctag

SEQ ID NO: 254385 - DNA, 30 bp, Artificial Sequence
  Synthetic oligonucleotide
cgccaccctaaacgggcgtagcgaccctag

SEQ ID NO: 254386 - DNA, 30 bp, Artificial Sequence
  Synthetic oligonucleotide
tatgggggtgataactgtagtgtaccctag

SEQ ID NO: 254387 - DNA, 30 bp, Artificial Sequence
  Synthetic oligonucleotide
agatagcgtgagggactttctttaccctag

SEQ ID NO: 254388 - DNA, 30 bp, Artificial Sequence
  Synthetic oligonucleotide
agcgtgaggcatatcctccggtggccctag

SEQ ID NO: 254389 - DNA, 30 bp, Artificial Sequence
  Synthetic oligonucleotide
ctaagccccataaagtagacggatccctag

SEQ ID NO: 254390 - DNA, 30 bp, Artificial Sequence
  Synthetic oligonucleotide
gcaataatcagccatctgcattaagcctag

SEQ ID NO: 254391 - DNA, 30 bp, Artificial Sequence
  Synthetic oligonucleotide
gcacgatgttgctggcgggtttaagcctag

SEQ ID NO: 254392 - DNA, 30 bp, Artificial Sequence
  Synthetic oligonucleotide
gtagcccatcgagggggggttctagcctag

SEQ ID NO: 254393 - DNA, 30 bp, Artificial Sequence
  Synthetic oligonucleotide
acatcgggattctcatctggagtagcctag

SEQ ID NO: 254394 - DNA, 30 bp, Artificial Sequence
  Synthetic oligonucleotide
atgacaaataattcgagttcggacgcctag

SEQ ID NO: 254395 - DNA, 30 bp, Artificial Sequence
  Synthetic oligonucleotide
aaaattcatgccatacccaatggcgcctag

SEQ ID NO: 254396 - DNA, 30 bp, Artificial Sequence
  Synthetic oligonucleotide
cgtggcacgggctacctctcctcggcctag

SEQ ID NO: 254397 - DNA, 30 bp, Artificial Sequence
  Synthetic oligonucleotide
agcataaaactcctaagtggttgtgcctag

SEQ ID NO: 254398 - DNA, 30 bp, Artificial Sequence
  Synthetic oligonucleotide
gggctacaaactatcatggtacaatcctag

SEQ ID NO: 254399 - DNA, 30 bp, Artificial Sequence
  Synthetic oligonucleotide
cggtatttgcacttagtctacccatcctag

SEQ ID NO: 254400 - DNA, 30 bp, Artificial Sequence
  Synthetic oligonucleotide
gtttccatagacgatgggacctagtcctag

SEQ ID NO: 254401 - DNA, 30 bp, Artificial Sequence
  Synthetic oligonucleotide
tttaagcccttaagtctggtcatgtcctag

SEQ ID NO: 254402 - DNA, 30 bp, Artificial Sequence
  Synthetic oligonucleotide
gctgtgtagcaccttggtgcaacttcctag

SEQ ID NO: 254403 - DNA, 30 bp, Artificial Sequence
  Synthetic oligonucleotide
ggagcgaattggctagcacgcgaaagctag

SEQ ID NO: 254404 - DNA, 30 bp, Artificial Sequence
  Synthetic oligonucleotide
gactaaaacatcgtgaatgccgccagctag

SEQ ID NO: 254405 - DNA, 30 bp, Artificial Sequence
  Synthetic oligonucleotide
catagctggtcgagtttcccaagtagctag

SEQ ID NO: 254406 - DNA, 30 bp, Artificial Sequence
  Synthetic oligonucleotide
tcacgtcgtctaggtaatccatgtagctag

SEQ ID NO: 254407 - DNA, 30 bp, Artificial Sequence
  Synthetic oligonucleotide
acctgaccgcagtcacggagttgacgctag

SEQ ID NO: 254408 - DNA, 30 bp, Artificial Sequence
  Synthetic oligonucleotide
taatgcaaatatccatgtgcaatacgctag

SEQ ID NO: 254409 - DNA, 30 bp, Artificial Sequence
  Synthetic oligonucleotide
tttaatgaccgggtcacctctttacgctag

SEQ ID NO: 254410 - DNA, 30 bp, Artificial Sequence
  Synthetic oligonucleotide
ccttccaaggtgagggcttctcagcgctag

SEQ ID NO: 254411 - DNA, 30 bp, Artificial Sequence
  Synthetic oligonucleotide
aggggtcggttttcagaggaagttcgctag

SEQ ID NO: 254412 - DNA, 30 bp, Artificial Sequence
  Synthetic oligonucleotide
aatcgcttcacgcacctttgttttcgctag

SEQ ID NO: 254413 - DNA, 30 bp, Artificial Sequence
  Synthetic oligonucleotide
aaggaccttaccgttctttcggggggctag

SEQ ID NO: 254414 - DNA, 30 bp, Artificial Sequence
  Synthetic oligonucleotide
gagagtgacggtgatcagtattgtggctag

SEQ ID NO: 254415 - DNA, 30 bp, Artificial Sequence
  Synthetic oligonucleotide
cgcacctcgatgctaatctttgcatgctag

SEQ ID NO: 254416 - DNA, 30 bp, Artificial Sequence
  Synthetic oligonucleotide
cctttctttagagagtgtcatatatgctag

SEQ ID NO: 254417 - DNA, 30 bp, Artificial Sequence
  Synthetic oligonucleotide
gtgatgatttggtaggttatactatgctag

SEQ ID NO: 254418 - DNA, 30 bp, Artificial Sequence
  Synthetic oligonucleotide
gttcgatgcgcgaatcaatactagtgctag

SEQ ID NO: 254419 - DNA, 30 bp, Artificial Sequence
  Synthetic oligonucleotide
gtattagatgagataactagtccgtgctag

SEQ ID NO: 254420 - DNA, 30 bp, Artificial Sequence
  Synthetic oligonucleotide
caaaacgccacattgattcgggcgtgctag

SEQ ID NO: 254421 - DNA, 30 bp, Artificial Sequence
  Synthetic oligonucleotide
ggcatcaacagaaaaatatgtttttgctag

SEQ ID NO: 254422 - DNA, 30 bp, Artificial Sequence
  Synthetic oligonucleotide
agcgtagtgcaagccacatggtagatctag

SEQ ID NO: 254423 - DNA, 30 bp, Artificial Sequence
  Synthetic oligonucleotide
ggacaagatatgacaggagctgggatctag

SEQ ID NO: 254424 - DNA, 30 bp, Artificial Sequence
  Synthetic oligonucleotide
atgatgcgtgttcgcctaacttatatctag

SEQ ID NO: 254425 - DNA, 30 bp, Artificial Sequence
  Synthetic oligonucleotide
cgatccggtttatcatacctcggactctag

SEQ ID NO: 254426 - DNA, 30 bp, Artificial Sequence
  Synthetic oligonucleotide
aactcgaacgaggggtattaggacctctag

SEQ ID NO: 254427 - DNA, 30 bp, Artificial Sequence
  Synthetic oligonucleotide
gaaacagtaccgctctgctgccatctctag

SEQ ID NO: 254428 - DNA, 30 bp, Artificial Sequence
  Synthetic oligonucleotide
ccctgtttgatactattcgagcgggtctag

SEQ ID NO: 254429 - DNA, 30 bp, Artificial Sequence
  Synthetic oligonucleotide
ggatggtggtcacgtgtaggggatgtctag

SEQ ID NO: 254430 - DNA, 30 bp, Artificial Sequence
  Synthetic oligonucleotide
ttcccataaggagggtgataccctgtctag

SEQ ID NO: 254431 - DNA, 30 bp, Artificial Sequence
  Synthetic oligonucleotide
ggagtaaccagtcatctccctcctgtctag

SEQ ID NO: 254432 - DNA, 30 bp, Artificial Sequence
  Synthetic oligonucleotide
tgtataccatgaaagggtgggtgattctag

SEQ ID NO: 254433 - DNA, 30 bp, Artificial Sequence
  Synthetic oligonucleotide
gtgtaacctacgcactccgggctcttctag

SEQ ID NO: 254434 - DNA, 30 bp, Artificial Sequence
  Synthetic oligonucleotide
gggacagtcccgaccatacagtcgttctag

SEQ ID NO: 254435 - DNA, 30 bp, Artificial Sequence
  Synthetic oligonucleotide
tcctgatagcatgattggagagtgttctag

SEQ ID NO: 254436 - DNA, 30 bp, Artificial Sequence
  Synthetic oligonucleotide
cagcctggccgttgatcagaacgtttctag

SEQ ID NO: 254437 - DNA, 30 bp, Artificial Sequence
  Synthetic oligonucleotide
caggctacaacttaaagcgccggcaagtag

SEQ ID NO: 254438 - DNA, 30 bp, Artificial Sequence
  Synthetic oligonucleotide
agggtgacaccacgccgctccaagaagtag

SEQ ID NO: 254439 - DNA, 30 bp, Artificial Sequence
  Synthetic oligonucleotide
actcccgtcaaaggcaccgtattgaagtag

SEQ ID NO: 254440 - DNA, 30 bp, Artificial Sequence
  Synthetic oligonucleotide
gggagaccagtttgcagtgcgtcacagtag

SEQ ID NO: 254441 - DNA, 30 bp, Artificial Sequence
  Synthetic oligonucleotide
tgtaccgagctgtataatatattacagtag

SEQ ID NO: 254442 - DNA, 30 bp, Artificial Sequence
  Synthetic oligonucleotide
agtcctgagcttaaaaaggcagtccagtag

SEQ ID NO: 254443 - DNA, 30 bp, Artificial Sequence
  Synthetic oligonucleotide
agggctctacgacgggtagaaaggcagtag

SEQ ID NO: 254444 - DNA, 30 bp, Artificial Sequence
  Synthetic oligonucleotide
ccatccggttcaacctgttatgtgcagtag

SEQ ID NO: 254445 - DNA, 30 bp, Artificial Sequence
  Synthetic oligonucleotide
gcgtcctgatgaggccgaatgcctcagtag

SEQ ID NO: 254446 - DNA, 30 bp, Artificial Sequence
  Synthetic oligonucleotide
agtcatcctaagtgtcttagcagtcagtag

SEQ ID NO: 254447 - DNA, 30 bp, Artificial Sequence
  Synthetic oligonucleotide
tgccgtgtaggggaatcaacgcttcagtag

SEQ ID NO: 254448 - DNA, 30 bp, Artificial Sequence
  Synthetic oligonucleotide
gattttgccaggaggcgagaccaagagtag

SEQ ID NO: 254449 - DNA, 30 bp, Artificial Sequence
  Synthetic oligonucleotide
atcagtcacgaagtctggaaaattgagtag

SEQ ID NO: 254450 - DNA, 30 bp, Artificial Sequence
  Synthetic oligonucleotide
tccagtttaaatcagcccagattatagtag

SEQ ID NO: 254451 - DNA, 30 bp, Artificial Sequence
  Synthetic oligonucleotide
gaacgaccatgaatccggttactgtagtag

SEQ ID NO: 254452 - DNA, 30 bp, Artificial Sequence
  Synthetic oligonucleotide
gctatcggcggctggccggtgataacgtag

SEQ ID NO: 254453 - DNA, 30 bp, Artificial Sequence
  Synthetic oligonucleotide
ggctggatgggtccaacagcactgacgtag

SEQ ID NO: 254454 - DNA, 30 bp, Artificial Sequence
  Synthetic oligonucleotide
tgtccctagcagcgttgggccgatacgtag

SEQ ID NO: 254455 - DNA, 30 bp, Artificial Sequence
  Synthetic oligonucleotide
ctaacccaccgaagggattcgtctacgtag

SEQ ID NO: 254456 - DNA, 30 bp, Artificial Sequence
  Synthetic oligonucleotide
ggttcggggccgcggaatgtttttacgtag

SEQ ID NO: 254457 - DNA, 30 bp, Artificial Sequence
  Synthetic oligonucleotide
gaatggttggttgagaaaggtcaaccgtag

SEQ ID NO: 254458 - DNA, 30 bp, Artificial Sequence
  Synthetic oligonucleotide
gataaaaccaacgggctaggctatccgtag

SEQ ID NO: 254459 - DNA, 30 bp, Artificial Sequence
  Synthetic oligonucleotide
ataagattcgcatgtagaccgggagcgtag

SEQ ID NO: 254460 - DNA, 30 bp, Artificial Sequence
  Synthetic oligonucleotide
ttggcgagtgacgatcggggccttgcgtag

SEQ ID NO: 254461 - DNA, 30 bp, Artificial Sequence
  Synthetic oligonucleotide
atcgcctccgtgtcaaccaactaatcgtag

SEQ ID NO: 254462 - DNA, 30 bp, Artificial Sequence
  Synthetic oligonucleotide
ttccccaccgaacgaatcaattaatcgtag

SEQ ID NO: 254463 - DNA, 30 bp, Artificial Sequence
  Synthetic oligonucleotide
taacccaacgttgtggatagactatcgtag

SEQ ID NO: 254464 - DNA, 30 bp, Artificial Sequence
  Synthetic oligonucleotide
tcttatgtcctagactgcttatattcgtag

SEQ ID NO: 254465 - DNA, 29 bp, Artificial Sequence
  Synthetic oligonucleotide
ggcgaataccccctggactaagaaggtag

SEQ ID NO: 254466 - DNA, 30 bp, Artificial Sequence
  Synthetic oligonucleotide
gcttacgggtcacgatcgtatatcaggtag

SEQ ID NO: 254467 - DNA, 30 bp, Artificial Sequence
  Synthetic oligonucleotide
cagacctattgtacacctgaaagacggtag

SEQ ID NO: 254468 - DNA, 30 bp, Artificial Sequence
  Synthetic oligonucleotide
tttgattgattacaggtctatcaccggtag

SEQ ID NO: 254469 - DNA, 30 bp, Artificial Sequence
  Synthetic oligonucleotide
ccttttaacctatactcatgacagcggtag

SEQ ID NO: 254470 - DNA, 30 bp, Artificial Sequence
  Synthetic oligonucleotide
caatcgcctgtgatatcagcaacgcggtag

SEQ ID NO: 254471 - DNA, 30 bp, Artificial Sequence
  Synthetic oligonucleotide
cgttagggtgaatgcctttgacctcggtag

SEQ ID NO: 254472 - DNA, 30 bp, Artificial Sequence
  Synthetic oligonucleotide
gcgccatggcaagcttgattctctcggtag

SEQ ID NO: 254473 - DNA, 30 bp, Artificial Sequence
  Synthetic oligonucleotide
ggagatttcccaatggtcttatgtcggtag

SEQ ID NO: 254474 - DNA, 30 bp, Artificial Sequence
  Synthetic oligonucleotide
cgatattgaaatcatgctacgtttcggtag

SEQ ID NO: 254475 - DNA, 30 bp, Artificial Sequence
  Synthetic oligonucleotide
gtaccgatacatgttgtacgagtagggtag

SEQ ID NO: 254476 - DNA, 30 bp, Artificial Sequence
  Synthetic oligonucleotide
ggcgcagccaggtgcaagggccgcgggtag

SEQ ID NO: 254477 - DNA, 30 bp, Artificial Sequence
  Synthetic oligonucleotide
tctagtgaacgctggtgggccatcgggtag

SEQ ID NO: 254478 - DNA, 30 bp, Artificial Sequence
  Synthetic oligonucleotide
taggttaggagaatattgatgagtgggtag

SEQ ID NO: 254479 - DNA, 30 bp, Artificial Sequence
  Synthetic oligonucleotide
aacaatacaagacgaggattccgtgggtag

SEQ ID NO: 254480 - DNA, 30 bp, Artificial Sequence
  Synthetic oligonucleotide
ctgaggggctcttcgtggcatggtgggtag

SEQ ID NO: 254481 - DNA, 30 bp, Artificial Sequence
  Synthetic oligonucleotide
ggcttgccgtttttatgtcgtattgggtag

SEQ ID NO: 254482 - DNA, 30 bp, Artificial Sequence
  Synthetic oligonucleotide
gaataggatggaccatggtgaaaatggtag

SEQ ID NO: 254483 - DNA, 30 bp, Artificial Sequence
  Synthetic oligonucleotide
gcaattgtggctatgctatttagatggtag

SEQ ID NO: 254484 - DNA, 30 bp, Artificial Sequence
  Synthetic oligonucleotide
agactcctaaaattgccagacgtatggtag

SEQ ID NO: 254485 - DNA, 30 bp, Artificial Sequence
  Synthetic oligonucleotide
ctacttgacaatcaatggaccttatggtag

SEQ ID NO: 254486 - DNA, 30 bp, Artificial Sequence
  Synthetic oligonucleotide
aattacctcggaatgccagatgagtggtag

SEQ ID NO: 254487 - DNA, 30 bp, Artificial Sequence
  Synthetic oligonucleotide
aacatgtgcgtcccttgtacagggtggtag

SEQ ID NO: 254488 - DNA, 30 bp, Artificial Sequence
  Synthetic oligonucleotide
ttgcataattcataaggattaatgtggtag

SEQ ID NO: 254489 - DNA, 30 bp, Artificial Sequence
  Synthetic oligonucleotide
agttcccagcgaggtgtacttgaaatgtag

SEQ ID NO: 254490 - DNA, 30 bp, Artificial Sequence
  Synthetic oligonucleotide
actataaaggggccggccaggataatgtag

SEQ ID NO: 254491 - DNA, 30 bp, Artificial Sequence
  Synthetic oligonucleotide
aactagtaagtgactagatggtgcatgtag

SEQ ID NO: 254492 - DNA, 30 bp, Artificial Sequence
  Synthetic oligonucleotide
cagtttagcttactctttcatcctatgtag

SEQ ID NO: 254493 - DNA, 30 bp, Artificial Sequence
  Synthetic oligonucleotide
tcaaccaggaatctttaatgagttatgtag

SEQ ID NO: 254494 - DNA, 30 bp, Artificial Sequence
  Synthetic oligonucleotide
accatggggggcgccgactttgtactgtag

SEQ ID NO: 254495 - DNA, 30 bp, Artificial Sequence
  Synthetic oligonucleotide
gcgcggtggcgttttgcacgttacctgtag

SEQ ID NO: 254496 - DNA, 30 bp, Artificial Sequence
  Synthetic oligonucleotide
atccggcagttgccacttcaagccctgtag

SEQ ID NO: 254497 - DNA, 30 bp, Artificial Sequence
  Synthetic oligonucleotide
gttcgctaagtagtaatcagacgcctgtag

SEQ ID NO: 254498 - DNA, 30 bp, Artificial Sequence
  Synthetic oligonucleotide
tatactcacgctcaaccggcaaatctgtag

SEQ ID NO: 254499 - DNA, 30 bp, Artificial Sequence
  Synthetic oligonucleotide
gctgcccagaaatatgccggtcttctgtag

SEQ ID NO: 254500 - DNA, 30 bp, Artificial Sequence
  Synthetic oligonucleotide
aggccgtgatctgcgctacaaggagtgtag

SEQ ID NO: 254501 - DNA, 30 bp, Artificial Sequence
  Synthetic oligonucleotide
ctaaagctcttccgttaggtgatcgtgtag

SEQ ID NO: 254502 - DNA, 30 bp, Artificial Sequence
  Synthetic oligonucleotide
ttgtgacaggttgcagctcatgcggtgtag

SEQ ID NO: 254503 - DNA, 30 bp, Artificial Sequence
  Synthetic oligonucleotide
gaactatcaatcaacagggtctcggtgtag

SEQ ID NO: 254504 - DNA, 30 bp, Artificial Sequence
  Synthetic oligonucleotide
cggatctcgaagtaatacggcagggtgtag

SEQ ID NO: 254505 - DNA, 30 bp, Artificial Sequence
  Synthetic oligonucleotide
ctaacgctctcacctgctagtagggtgtag

SEQ ID NO: 254506 - DNA, 30 bp, Artificial Sequence
  Synthetic oligonucleotide
cacggccgaccgctggcgtcggatgtgtag

SEQ ID NO: 254507 - DNA, 30 bp, Artificial Sequence
  Synthetic oligonucleotide
atcaaccccttcttataggagtatgtgtag

SEQ ID NO: 254508 - DNA, 30 bp, Artificial Sequence
  Synthetic oligonucleotide
gttcctcagtgaggtgcacaagttgtgtag

SEQ ID NO: 254509 - DNA, 30 bp, Artificial Sequence
  Synthetic oligonucleotide
ttaaattgcaacacagaggcgtgattgtag

SEQ ID NO: 254510 - DNA, 30 bp, Artificial Sequence
  Synthetic oligonucleotide
tcgggtggtcccaaaagatgtgtattgtag

SEQ ID NO: 254511 - DNA, 30 bp, Artificial Sequence
  Synthetic oligonucleotide
acgtgggtccccagattggatattttgtag

SEQ ID NO: 254512 - DNA, 30 bp, Artificial Sequence
  Synthetic oligonucleotide
accttcgacaagggtgaagtagaaaattag

SEQ ID NO: 254513 - DNA, 30 bp, Artificial Sequence
  Synthetic oligonucleotide
actcacatcagtatgctggaaccaaattag

SEQ ID NO: 254514 - DNA, 30 bp, Artificial Sequence
  Synthetic oligonucleotide
acatagccggtcgcgagggccggaaattag

SEQ ID NO: 254515 - DNA, 30 bp, Artificial Sequence
  Synthetic oligonucleotide
ggtagatagccgctgacggttctcaattag

SEQ ID NO: 254516 - DNA, 31 bp, Artificial Sequence
  Synthetic oligonucleotide
aagctttggggctgactacttagagaattag

SEQ ID NO: 254517 - DNA, 30 bp, Artificial Sequence
  Synthetic oligonucleotide
gcagctggaggggtctctgccatgaattag

SEQ ID NO: 254518 - DNA, 30 bp, Artificial Sequence
  Synthetic oligonucleotide
aatgaattgacattatgtaacaataattag

SEQ ID NO: 254519 - DNA, 30 bp, Artificial Sequence
  Synthetic oligonucleotide
atacagcttcgtcctgtagctgctaattag

SEQ ID NO: 254520 - DNA, 30 bp, Artificial Sequence
  Synthetic oligonucleotide
aggccattggtacgccaggaacaacattag

SEQ ID NO: 254521 - DNA, 30 bp, Artificial Sequence
  Synthetic oligonucleotide
tcagctgcaataagtccgcccctacattag

SEQ ID NO: 254522 - DNA, 30 bp, Artificial Sequence
  Synthetic oligonucleotide
ctcgcgagggtggagattaacccccattag

SEQ ID NO: 254523 - DNA, 30 bp, Artificial Sequence
  Synthetic oligonucleotide
acgctcttttgatgtcgggagtagcattag

SEQ ID NO: 254524 - DNA, 30 bp, Artificial Sequence
  Synthetic oligonucleotide
ggtgcggtactggactctgcaacgcattag

SEQ ID NO: 254525 - DNA, 30 bp, Artificial Sequence
  Synthetic oligonucleotide
aactcgcataggagtatccacctgcattag

SEQ ID NO: 254526 - DNA, 30 bp, Artificial Sequence
  Synthetic oligonucleotide
cgattgtacgcgccgacattacatcattag

SEQ ID NO: 254527 - DNA, 30 bp, Artificial Sequence
  Synthetic oligonucleotide
tttagggaataatggccgcaggctcattag

SEQ ID NO: 254528 - DNA, 30 bp, Artificial Sequence
  Synthetic oligonucleotide
tccaccacgcaattacaacggcgagattag

SEQ ID NO: 254529 - DNA, 30 bp, Artificial Sequence
  Synthetic oligonucleotide
actaatccgcccagccgcggaatcgattag

SEQ ID NO: 254530 - DNA, 30 bp, Artificial Sequence
  Synthetic oligonucleotide
tattagctgagccgtactgcttaggattag

SEQ ID NO: 254531 - DNA, 30 bp, Artificial Sequence
  Synthetic oligonucleotide
ggttggttcaaacacgggcccttggattag

SEQ ID NO: 254532 - DNA, 30 bp, Artificial Sequence
  Synthetic oligonucleotide
gtatgtggaggtcatgaataatatgattag

SEQ ID NO: 254533 - DNA, 30 bp, Artificial Sequence
  Synthetic oligonucleotide
cggggaccgaataggtacacttttgattag

SEQ ID NO: 254534 - DNA, 30 bp, Artificial Sequence
  Synthetic oligonucleotide
gatcgaaatgatataggaaagtaatattag

SEQ ID NO: 254535 - DNA, 30 bp, Artificial Sequence
  Synthetic oligonucleotide
ccccggcggaacggctgacatccgtattag

SEQ ID NO: 254536 - DNA, 30 bp, Artificial Sequence
  Synthetic oligonucleotide
ctgggtatgtagagtgttcctgcgtattag

SEQ ID NO: 254537 - DNA, 30 bp, Artificial Sequence
  Synthetic oligonucleotide
tggcctatcgttgcgatggcatattattag

SEQ ID NO: 254538 - DNA, 30 bp, Artificial Sequence
  Synthetic oligonucleotide
tccgcaatggcccgatctctcgtttattag

SEQ ID NO: 254539 - DNA, 30 bp, Artificial Sequence
  Synthetic oligonucleotide
ttagatgaggacacccaacgtttttattag

SEQ ID NO: 254540 - DNA, 30 bp, Artificial Sequence
  Synthetic oligonucleotide
tcttctggggggaaatctatagaaacttag

SEQ ID NO: 254541 - DNA, 30 bp, Artificial Sequence
  Synthetic oligonucleotide
gccgctatggcaggatacggatgcacttag

SEQ ID NO: 254542 - DNA, 30 bp, Artificial Sequence
  Synthetic oligonucleotide
agtaggcagggctgcaactgaagtacttag

SEQ ID NO: 254543 - DNA, 30 bp, Artificial Sequence
  Synthetic oligonucleotide
gttaggccccgataaccacaaacaccttag

SEQ ID NO: 254544 - DNA, 30 bp, Artificial Sequence
  Synthetic oligonucleotide
attggcttgaattacaggtaaacaccttag

SEQ ID NO: 254545 - DNA, 30 bp, Artificial Sequence
  Synthetic oligonucleotide
agcaggcgctatttcagagagcagccttag

SEQ ID NO: 254546 - DNA, 30 bp, Artificial Sequence
  Synthetic oligonucleotide
gcccgaagaaccacctatccggaagcttag

SEQ ID NO: 254547 - DNA, 30 bp, Artificial Sequence
  Synthetic oligonucleotide
attacgtacttgccgatagctacggcttag

SEQ ID NO: 254548 - DNA, 30 bp, Artificial Sequence
  Synthetic oligonucleotide
gcggtattccattcacgaggctcggcttag

SEQ ID NO: 254549 - DNA, 30 bp, Artificial Sequence
  Synthetic oligonucleotide
ttcccgacttgtaacacccgtggtgcttag

SEQ ID NO: 254550 - DNA, 30 bp, Artificial Sequence
  Synthetic oligonucleotide
tgggcttggtcgcataattggctatcttag

SEQ ID NO: 254551 - DNA, 30 bp, Artificial Sequence
  Synthetic oligonucleotide
cttccacggccgtacccaagaaggtcttag

SEQ ID NO: 254552 - DNA, 30 bp, Artificial Sequence
  Synthetic oligonucleotide
cgggtagactgactgcttccttcttcttag

SEQ ID NO: 254553 - DNA, 30 bp, Artificial Sequence
  Synthetic oligonucleotide
cagccttacacatgtaagctttgttcttag

SEQ ID NO: 254554 - DNA, 30 bp, Artificial Sequence
  Synthetic oligonucleotide
tacaaaggaaagaagtgaccggcaagttag

SEQ ID NO: 254555 - DNA, 30 bp, Artificial Sequence
  Synthetic oligonucleotide
aaatagtgaggtttctgtacacgaagttag

SEQ ID NO: 254556 - DNA, 30 bp, Artificial Sequence
  Synthetic oligonucleotide
aacatctctagattttaaccaaccagttag

SEQ ID NO: 254557 - DNA, 30 bp, Artificial Sequence
  Synthetic oligonucleotide
acgctcatgtgtcggccgcacggcagttag

SEQ ID NO: 254558 - DNA, 30 bp, Artificial Sequence
  Synthetic oligonucleotide
gaatcaagggatgagtgtacgttcagttag

SEQ ID NO: 254559 - DNA, 30 bp, Artificial Sequence
  Synthetic oligonucleotide
caactggggcgcaagttcccagcgagttag

SEQ ID NO: 254560 - DNA, 30 bp, Artificial Sequence
  Synthetic oligonucleotide
tttgccatgtgtgtctggagggatagttag

SEQ ID NO: 254561 - DNA, 30 bp, Artificial Sequence
  Synthetic oligonucleotide
gtgagccatttcgggcatcaggaacgttag

SEQ ID NO: 254562 - DNA, 30 bp, Artificial Sequence
  Synthetic oligonucleotide
gtacactgccggatggggcggcgccgttag

SEQ ID NO: 254563 - DNA, 30 bp, Artificial Sequence
  Synthetic oligonucleotide
agtaaaagccggttggaaacaggccgttag

SEQ ID NO: 254564 - DNA, 30 bp, Artificial Sequence
  Synthetic oligonucleotide
cactgcaccgtcaatcctttaaagcgttag

SEQ ID NO: 254565 - DNA, 30 bp, Artificial Sequence
  Synthetic oligonucleotide
agtctcgtagactaaccataggagcgttag

SEQ ID NO: 254566 - DNA, 30 bp, Artificial Sequence
  Synthetic oligonucleotide
tcagatggttgtgaaaaacaaaggcgttag

SEQ ID NO: 254567 - DNA, 30 bp, Artificial Sequence
  Synthetic oligonucleotide
aggatttccaggaaacgcctccaaggttag

SEQ ID NO: 254568 - DNA, 30 bp, Artificial Sequence
  Synthetic oligonucleotide
gcaaaaatacaccgagctgtgccaggttag

SEQ ID NO: 254569 - DNA, 30 bp, Artificial Sequence
  Synthetic oligonucleotide
ctacggtagaacgtcactcaacacggttag

SEQ ID NO: 254570 - DNA, 30 bp, Artificial Sequence
  Synthetic oligonucleotide
aatcatgggccatgtgatcccacgggttag

SEQ ID NO: 254571 - DNA, 30 bp, Artificial Sequence
  Synthetic oligonucleotide
atgaggacttggtaaaatatgaatggttag

SEQ ID NO: 254572 - DNA, 30 bp, Artificial Sequence
  Synthetic oligonucleotide
gcgcccaccgtttcgattcaagttggttag

SEQ ID NO: 254573 - DNA, 30 bp, Artificial Sequence
  Synthetic oligonucleotide
ctagatacaaagcatagatagacatgttag

SEQ ID NO: 254574 - DNA, 30 bp, Artificial Sequence
  Synthetic oligonucleotide
aatcccgcataacgttggtacccatgttag

SEQ ID NO: 254575 - DNA, 30 bp, Artificial Sequence
  Synthetic oligonucleotide
ttcctcgtaccgcggtgtgtcagatgttag

SEQ ID NO: 254576 - DNA, 30 bp, Artificial Sequence
  Synthetic oligonucleotide
gatctagcaacccttgcgttaggatgttag

SEQ ID NO: 254577 - DNA, 30 bp, Artificial Sequence
  Synthetic oligonucleotide
ttgcctatcctccaaataccgggatgttag

SEQ ID NO: 254578 - DNA, 30 bp, Artificial Sequence
  Synthetic oligonucleotide
gtgaagcctattcggatccctctatgttag

SEQ ID NO: 254579 - DNA, 30 bp, Artificial Sequence
  Synthetic oligonucleotide
gaatgcaccattcgccagtataggtgttag

SEQ ID NO: 254580 - DNA, 30 bp, Artificial Sequence
  Synthetic oligonucleotide
ctcgtgtagttactcgtatgtacttgttag

SEQ ID NO: 254581 - DNA, 30 bp, Artificial Sequence
  Synthetic oligonucleotide
taaccaagaggaccgtgtggatgttgttag

SEQ ID NO: 254582 - DNA, 30 bp, Artificial Sequence
  Synthetic oligonucleotide
tcgatgccagcgattgcacgcgaaatttag

SEQ ID NO: 254583 - DNA, 30 bp, Artificial Sequence
  Synthetic oligonucleotide
gcacgctttcgcgccatctccggaatttag

SEQ ID NO: 254584 - DNA, 30 bp, Artificial Sequence
  Synthetic oligonucleotide
tggaaattatcatacttgatcgtaatttag

SEQ ID NO: 254585 - DNA, 30 bp, Artificial Sequence
  Synthetic oligonucleotide
aacggaaagccccacgagtatgacatttag

SEQ ID NO: 254586 - DNA, 30 bp, Artificial Sequence
  Synthetic oligonucleotide
accgatcaaagatgggaagtgggcatttag

SEQ ID NO: 254587 - DNA, 30 bp, Artificial Sequence
  Synthetic oligonucleotide
agatggagcgtcgcttgaaagtcgatttag

SEQ ID NO: 254588 - DNA, 30 bp, Artificial Sequence
  Synthetic oligonucleotide
gcaggaacgggggggaggttacggatttag

SEQ ID NO: 254589 - DNA, 30 bp, Artificial Sequence
  Synthetic oligonucleotide
tcaatagataacgaccctctcatgatttag

SEQ ID NO: 254590 - DNA, 30 bp, Artificial Sequence
  Synthetic oligonucleotide
tagactaaccaggaaactcctatgatttag

SEQ ID NO: 254591 - DNA, 30 bp, Artificial Sequence
  Synthetic oligonucleotide
aatggatccgtgccttttcagttgatttag

SEQ ID NO: 254592 - DNA, 30 bp, Artificial Sequence
  Synthetic oligonucleotide
ttgtaacaggttagttcgggtcctatttag

SEQ ID NO: 254593 - DNA, 30 bp, Artificial Sequence
  Synthetic oligonucleotide
acaattacttaactcaaaacccgactttag

SEQ ID NO: 254594 - DNA, 30 bp, Artificial Sequence
  Synthetic oligonucleotide
gttcccggatacctatacgaaaagctttag

SEQ ID NO: 254595 - DNA, 30 bp, Artificial Sequence
  Synthetic oligonucleotide
cgtggtacatgtcgccggtgctcgctttag

SEQ ID NO: 254596 - DNA, 30 bp, Artificial Sequence
  Synthetic oligonucleotide
ggacaagttgaaattggggcgactctttag

SEQ ID NO: 254597 - DNA, 30 bp, Artificial Sequence
  Synthetic oligonucleotide
aagagccctccggcttatccatcagtttag

SEQ ID NO: 254598 - DNA, 30 bp, Artificial Sequence
  Synthetic oligonucleotide
cctgagttcataatagagtaaatagtttag

SEQ ID NO: 254599 - DNA, 30 bp, Artificial Sequence
  Synthetic oligonucleotide
gtcgccacacgatcgagccaattcgtttag

SEQ ID NO: 254600 - DNA, 31 bp, Artificial Sequence
  Synthetic oligonucleotide
ctcagagttcggtctagtgggaaaggtttag

SEQ ID NO: 254601 - DNA, 30 bp, Artificial Sequence
  Synthetic oligonucleotide
gcacgtgtagcttgtgaaagtccggtttag

SEQ ID NO: 254602 - DNA, 30 bp, Artificial Sequence
  Synthetic oligonucleotide
ccagtgggttgatactaagtggttgtttag

SEQ ID NO: 254603 - DNA, 30 bp, Artificial Sequence
  Synthetic oligonucleotide
ttacaggtgagggacatccgaagattttag

SEQ ID NO: 254604 - DNA, 30 bp, Artificial Sequence
  Synthetic oligonucleotide
catccccgatagtcaaggtagggcttttag

SEQ ID NO: 254605 - DNA, 30 bp, Artificial Sequence
  Synthetic oligonucleotide
taaaacacaacttcaagaaagaagttttag

SEQ ID NO: 254606 - DNA, 30 bp, Artificial Sequence
  Synthetic oligonucleotide
gggcaatcctgacgacacacgcggttttag

SEQ ID NO: 254607 - DNA, 30 bp, Artificial Sequence
  Synthetic oligonucleotide
aggtatgaactttgtggatacgttttttag

SEQ ID NO: 254608 - DNA, 30 bp, Artificial Sequence
  Synthetic oligonucleotide
aaaggcttagatctctgttcttaaaaaacg

SEQ ID NO: 254609 - DNA, 30 bp, Artificial Sequence
  Synthetic oligonucleotide
aataagggttcacaacccacgttcaaaacg

SEQ ID NO: 254610 - DNA, 30 bp, Artificial Sequence
  Synthetic oligonucleotide
attggctatttcaccgttcaaagtaaaacg

SEQ ID NO: 254611 - DNA, 30 bp, Artificial Sequence
  Synthetic oligonucleotide
gagagaccaaaagataggcagatacaaacg

SEQ ID NO: 254612 - DNA, 30 bp, Artificial Sequence
  Synthetic oligonucleotide
gtactaatttgcggacaatctgagcaaacg

SEQ ID NO: 254613 - DNA, 30 bp, Artificial Sequence
  Synthetic oligonucleotide
tacaccccgtttattggaccatagcaaacg

SEQ ID NO: 254614 - DNA, 30 bp, Artificial Sequence
  Synthetic oligonucleotide
gaccatccgaattcgtcatgacttcaaacg

SEQ ID NO: 254615 - DNA, 30 bp, Artificial Sequence
  Synthetic oligonucleotide
cgaaagagtgaagcttcgaaccttcaaacg

SEQ ID NO: 254616 - DNA, 30 bp, Artificial Sequence
  Synthetic oligonucleotide
actaaatgttgcatatgattctctgaaacg

SEQ ID NO: 254617 - DNA, 30 bp, Artificial Sequence
  Synthetic oligonucleotide
gctcccactgaccaaaatatccaataaacg

SEQ ID NO: 254618 - DNA, 30 bp, Artificial Sequence
  Synthetic oligonucleotide
aaacatcttgattgtgcgccaccataaacg

SEQ ID NO: 254619 - DNA, 30 bp, Artificial Sequence
  Synthetic oligonucleotide
agtactcaccctgaaatccgtccctaaacg

SEQ ID NO: 254620 - DNA, 30 bp, Artificial Sequence
  Synthetic oligonucleotide
atgcggccttggtctagggctggctaaacg

SEQ ID NO: 254621 - DNA, 30 bp, Artificial Sequence
  Synthetic oligonucleotide
tgggcttcggggcggaggccagggtaaacg

SEQ ID NO: 254622 - DNA, 30 bp, Artificial Sequence
  Synthetic oligonucleotide
cggtataatatcagtcgcttatggtaaacg

SEQ ID NO: 254623 - DNA, 30 bp, Artificial Sequence
  Synthetic oligonucleotide
aaaaatgcaatatcgtagtctctgtaaacg

SEQ ID NO: 254624 - DNA, 30 bp, Artificial Sequence
  Synthetic oligonucleotide
tgggatcgctgaatatgcactacgacaacg

SEQ ID NO: 254625 - DNA, 30 bp, Artificial Sequence
  Synthetic oligonucleotide
cagagtaggtaagcaggagattggacaacg

SEQ ID NO: 254626 - DNA, 30 bp, Artificial Sequence
  Synthetic oligonucleotide
cgtaacgcggggtagtcaccgtaaccaacg

SEQ ID NO: 254627 - DNA, 30 bp, Artificial Sequence
  Synthetic oligonucleotide
gacatggttatccgtcaatgacgcccaacg

SEQ ID NO: 254628 - DNA, 30 bp, Artificial Sequence
  Synthetic oligonucleotide
ggaagttgatccactagggagttcccaacg

SEQ ID NO: 254629 - DNA, 30 bp, Artificial Sequence
  Synthetic oligonucleotide
ttcgctgaaaggacacgtcgaacgccaacg

SEQ ID NO: 254630 - DNA, 30 bp, Artificial Sequence
  Synthetic oligonucleotide
agctcctcatcgaaccagcacccgccaacg

SEQ ID NO: 254631 - DNA, 30 bp, Artificial Sequence
  Synthetic oligonucleotide
cgtgatgttacaatacaccagtctccaacg

SEQ ID NO: 254632 - DNA, 30 bp, Artificial Sequence
  Synthetic oligonucleotide
gcgtcatttctggtgcccaggagtccaacg

SEQ ID NO: 254633 - DNA, 30 bp, Artificial Sequence
  Synthetic oligonucleotide
cgtgacgcaagggtgatattcgtcgcaacg

SEQ ID NO: 254634 - DNA, 30 bp, Artificial Sequence
  Synthetic oligonucleotide
aacatggtcctttcgtcagggaaggcaacg

SEQ ID NO: 254635 - DNA, 30 bp, Artificial Sequence
  Synthetic oligonucleotide
cttcagggtccaaatgcactttgggcaacg

SEQ ID NO: 254636 - DNA, 30 bp, Artificial Sequence
  Synthetic oligonucleotide
cctacagcagacagagtcgttctggcaacg

SEQ ID NO: 254637 - DNA, 30 bp, Artificial Sequence
  Synthetic oligonucleotide
tactaggtattcacattggcaggatcaacg

SEQ ID NO: 254638 - DNA, 30 bp, Artificial Sequence
  Synthetic oligonucleotide
gcggtcgatctatggattcggaactcaacg

SEQ ID NO: 254639 - DNA, 31 bp, Artificial Sequence
  Synthetic oligonucleotide
accaggccctagaaaacgcagagcctcaacg

SEQ ID NO: 254640 - DNA, 30 bp, Artificial Sequence
  Synthetic oligonucleotide
tccgcgaaagacgttacaagacagtcaacg

SEQ ID NO: 254641 - DNA, 30 bp, Artificial Sequence
  Synthetic oligonucleotide
aacgcactcactacccttcagacaagaacg

SEQ ID NO: 254642 - DNA, 30 bp, Artificial Sequence
  Synthetic oligonucleotide
cgcaagttcgccgacctagtcataagaacg

SEQ ID NO: 254643 - DNA, 30 bp, Artificial Sequence
  Synthetic oligonucleotide
tacttagaaccaatgtgcggtttaagaacg

SEQ ID NO: 254644 - DNA, 30 bp, Artificial Sequence
  Synthetic oligonucleotide
ctgtcgagttcgacatcaggaaacagaacg

SEQ ID NO: 254645 - DNA, 30 bp, Artificial Sequence
  Synthetic oligonucleotide
cgtcctatgataaggtaggaacacagaacg

SEQ ID NO: 254646 - DNA, 30 bp, Artificial Sequence
  Synthetic oligonucleotide
caactgttgttgttcatgttctatagaacg

SEQ ID NO: 254647 - DNA, 30 bp, Artificial Sequence
  Synthetic oligonucleotide
gtactatcgtggtatgcttcctctagaacg

SEQ ID NO: 254648 - DNA, 30 bp, Artificial Sequence
  Synthetic oligonucleotide
gatgtataagacaacggacttcgtagaacg

SEQ ID NO: 254649 - DNA, 30 bp, Artificial Sequence
  Synthetic oligonucleotide
ggcaaacgtgagaggggaccccgacgaacg

SEQ ID NO: 254650 - DNA, 30 bp, Artificial Sequence
  Synthetic oligonucleotide
gcggtattgactggtcattgtggacgaacg

SEQ ID NO: 254651 - DNA, 30 bp, Artificial Sequence
  Synthetic oligonucleotide
aaagtcactacgatccagtatacccgaacg

SEQ ID NO: 254652 - DNA, 30 bp, Artificial Sequence
  Synthetic oligonucleotide
atttcatgtttgaaacgcgctacgcgaacg

SEQ ID NO: 254653 - DNA, 30 bp, Artificial Sequence
  Synthetic oligonucleotide
ggccatcatataaaattgttatggcgaacg

SEQ ID NO: 254654 - DNA, 30 bp, Artificial Sequence
  Synthetic oligonucleotide
aagaagctataactgtggacgtcaggaacg

SEQ ID NO: 254655 - DNA, 30 bp, Artificial Sequence
  Synthetic oligonucleotide
taggggtgccacgctgcttacctcggaacg

SEQ ID NO: 254656 - DNA, 31 bp, Artificial Sequence
  Synthetic oligonucleotide
tgattcagtcgataagcgccgtttcggaacg

SEQ ID NO: 254657 - DNA, 30 bp, Artificial Sequence
  Synthetic oligonucleotide
tcaaatgattctcacatggcccgctgaacg

SEQ ID NO: 254658 - DNA, 30 bp, Artificial Sequence
  Synthetic oligonucleotide
tgtttcgacagatgagtaattaggtgaacg

SEQ ID NO: 254659 - DNA, 30 bp, Artificial Sequence
  Synthetic oligonucleotide
aggatttcaaaaggtatcgggttaataacg

SEQ ID NO: 254660 - DNA, 30 bp, Artificial Sequence
  Synthetic oligonucleotide
tagggtacaatgtcttgcattcacataacg

SEQ ID NO: 254661 - DNA, 30 bp, Artificial Sequence
  Synthetic oligonucleotide
acgctcggaatactgaaaggggccataacg

SEQ ID NO: 254662 - DNA, 30 bp, Artificial Sequence
  Synthetic oligonucleotide
ctcgtgagtacgaccgtgagcggcataacg

SEQ ID NO: 254663 - DNA, 30 bp, Artificial Sequence
  Synthetic oligonucleotide
gggtaccgttccgaaggtgagttgataacg

SEQ ID NO: 254664 - DNA, 30 bp, Artificial Sequence
  Synthetic oligonucleotide
ctcaggtcaagtggttggcaacctataacg

SEQ ID NO: 254665 - DNA, 30 bp, Artificial Sequence
  Synthetic oligonucleotide
ggggtgtctgttatacgataaatcctaacg

SEQ ID NO: 254666 - DNA, 30 bp, Artificial Sequence
  Synthetic oligonucleotide
tgcagctatgagaagtatcattggctaacg

SEQ ID NO: 254667 - DNA, 30 bp, Artificial Sequence
  Synthetic oligonucleotide
ggcatccagtggcacgagtctgtgctaacg

SEQ ID NO: 254668 - DNA, 30 bp, Artificial Sequence
  Synthetic oligonucleotide
ggtcggcatgatctcttggcaaatctaacg

SEQ ID NO: 254669 - DNA, 30 bp, Artificial Sequence
  Synthetic oligonucleotide
tagagtgggcttaaggtctctaatctaacg

SEQ ID NO: 254670 - DNA, 30 bp, Artificial Sequence
  Synthetic oligonucleotide
gtcctaaagggtaagtcgcttgatctaacg

SEQ ID NO: 254671 - DNA, 30 bp, Artificial Sequence
  Synthetic oligonucleotide
gtcccggtgtggtagtggtttggtctaacg

SEQ ID NO: 254672 - DNA, 30 bp, Artificial Sequence
  Synthetic oligonucleotide
caagttcattacaaacgaatgagagtaacg

SEQ ID NO: 254673 - DNA, 30 bp, Artificial Sequence
  Synthetic oligonucleotide
gagttgcggaagtcaattcataacgtaacg

SEQ ID NO: 254674 - DNA, 30 bp, Artificial Sequence
  Synthetic oligonucleotide
gcataagaacgtataaggcagagcgtaacg

SEQ ID NO: 254675 - DNA, 30 bp, Artificial Sequence
  Synthetic oligonucleotide
actggagccagcaagatagaagaggtaacg

SEQ ID NO: 254676 - DNA, 30 bp, Artificial Sequence
  Synthetic oligonucleotide
cataggagcggcgaagggacctgtgtaacg

SEQ ID NO: 254677 - DNA, 30 bp, Artificial Sequence
  Synthetic oligonucleotide
gtttcagcatgggccggtgagtgattaacg

SEQ ID NO: 254678 - DNA, 30 bp, Artificial Sequence
  Synthetic oligonucleotide
acgccgatgaaaaggacgagatggttaacg

SEQ ID NO: 254679 - DNA, 30 bp, Artificial Sequence
  Synthetic oligonucleotide
ggcaattgagagactggcttaatgttaacg

SEQ ID NO: 254680 - DNA, 30 bp, Artificial Sequence
  Synthetic oligonucleotide
tggaccaccatgggggtccggttgttaacg

SEQ ID NO: 254681 - DNA, 30 bp, Artificial Sequence
  Synthetic oligonucleotide
gaggcggtttacataaccgataaaaacacg

SEQ ID NO: 254682 - DNA, 30 bp, Artificial Sequence
  Synthetic oligonucleotide
cttacaacgtatgggcgctagctaaacacg

SEQ ID NO: 254683 - DNA, 30 bp, Artificial Sequence
  Synthetic oligonucleotide
taatatacacgccttcatcgtttaaacacg

SEQ ID NO: 254684 - DNA, 30 bp, Artificial Sequence
  Synthetic oligonucleotide
cagttccccgtaggctaagtgtagaacacg

SEQ ID NO: 254685 - DNA, 30 bp, Artificial Sequence
  Synthetic oligonucleotide
ggttgggcctcaggtacaatttataacacg

SEQ ID NO: 254686 - DNA, 30 bp, Artificial Sequence
  Synthetic oligonucleotide
ttcgtgataaacagcgtctggccacacacg

SEQ ID NO: 254687 - DNA, 30 bp, Artificial Sequence
  Synthetic oligonucleotide
atgtgtattccacttgttttacagcacacg

SEQ ID NO: 254688 - DNA, 30 bp, Artificial Sequence
  Synthetic oligonucleotide
ctagtgagtaatagaaggactgatcacacg

SEQ ID NO: 254689 - DNA, 30 bp, Artificial Sequence
  Synthetic oligonucleotide
aggtcaatagcggcttcgtttactcacacg

SEQ ID NO: 254690 - DNA, 30 bp, Artificial Sequence
  Synthetic oligonucleotide
cgtgtccagtgcaggaaggcagttcacacg

SEQ ID NO: 254691 - DNA, 30 bp, Artificial Sequence
  Synthetic oligonucleotide
tgctgtaggctaaccgtcatgcaagacacg

SEQ ID NO: 254692 - DNA, 30 bp, Artificial Sequence
  Synthetic oligonucleotide
cagcgtaccatacgtatggtcgaagacacg

SEQ ID NO: 254693 - DNA, 30 bp, Artificial Sequence
  Synthetic oligonucleotide
ccgttgccaacccgttgtgcgatagacacg

SEQ ID NO: 254694 - DNA, 29 bp, Artificial Sequence
  Synthetic oligonucleotide
aggggttcgatgatcgttaacacgacacg

SEQ ID NO: 254695 - DNA, 30 bp, Artificial Sequence
  Synthetic oligonucleotide
cctttcaagggtactcttaatcacgacacg

SEQ ID NO: 254696 - DNA, 29 bp, Artificial Sequence
  Synthetic oligonucleotide
ataattgcaccccataacgctccgacacg

SEQ ID NO: 254697 - DNA, 30 bp, Artificial Sequence
  Synthetic oligonucleotide
cgtgatattggaattgcttagctcgacacg

SEQ ID NO: 254698 - DNA, 30 bp, Artificial Sequence
  Synthetic oligonucleotide
ataaatgatgttgaaagtactactgacacg

SEQ ID NO: 254699 - DNA, 30 bp, Artificial Sequence
  Synthetic oligonucleotide
ttgggtgttatgcaatctggtagatacacg

SEQ ID NO: 254700 - DNA, 30 bp, Artificial Sequence
  Synthetic oligonucleotide
ttcccgcaggatgtatgggggatgtacacg

SEQ ID NO: 254701 - DNA, 30 bp, Artificial Sequence
  Synthetic oligonucleotide
ttcagtaagaagtaaaggtacagttacacg

SEQ ID NO: 254702 - DNA, 30 bp, Artificial Sequence
  Synthetic oligonucleotide
cgatacagtcatatataaatctgttacacg

SEQ ID NO: 254703 - DNA, 30 bp, Artificial Sequence
  Synthetic oligonucleotide
cagtatcgtgcgcacgctctatcaaccacg

SEQ ID NO: 254704 - DNA, 30 bp, Artificial Sequence
  Synthetic oligonucleotide
tagccgtattctatacgatttagaaccacg

SEQ ID NO: 254705 - DNA, 30 bp, Artificial Sequence
  Synthetic oligonucleotide
gtcgctgttcataatgatctgcgaaccacg

SEQ ID NO: 254706 - DNA, 30 bp, Artificial Sequence
  Synthetic oligonucleotide
cgggttagccaccactttactctgaccacg

SEQ ID NO: 254707 - DNA, 30 bp, Artificial Sequence
  Synthetic oligonucleotide
tatgtcacccaagctaggcgtaaacccacg

SEQ ID NO: 254708 - DNA, 30 bp, Artificial Sequence
  Synthetic oligonucleotide
atatgcatcgatggtgtccacccacccacg

SEQ ID NO: 254709 - DNA, 30 bp, Artificial Sequence
  Synthetic oligonucleotide
gctatataccaaatcgagatctcacccacg

SEQ ID NO: 254710 - DNA, 30 bp, Artificial Sequence
  Synthetic oligonucleotide
ttaccttgctgggctaagaacgatcccacg

SEQ ID NO: 254711 - DNA, 30 bp, Artificial Sequence
  Synthetic oligonucleotide
atgcactacgtggcctaaagtgctcccacg

SEQ ID NO: 254712 - DNA, 30 bp, Artificial Sequence
  Synthetic oligonucleotide
acaacgtaactgacactacgatgagccacg

SEQ ID NO: 254713 - DNA, 30 bp, Artificial Sequence
  Synthetic oligonucleotide
aagactcggcaggggccatataccgccacg

SEQ ID NO: 254714 - DNA, 30 bp, Artificial Sequence
  Synthetic oligonucleotide
ggtagaagatcgatcgtctgacaggccacg

SEQ ID NO: 254715 - DNA, 30 bp, Artificial Sequence
  Synthetic oligonucleotide
caaagtacttgtcgtaccagcgaggccacg

SEQ ID NO: 254716 - DNA, 30 bp, Artificial Sequence
  Synthetic oligonucleotide
ttctgtgtggggaagattccagatgccacg

SEQ ID NO: 254717 - DNA, 30 bp, Artificial Sequence
  Synthetic oligonucleotide
acagagggcttctgtgtgtggcaatccacg

SEQ ID NO: 254718 - DNA, 30 bp, Artificial Sequence
  Synthetic oligonucleotide
tcgagcttctcgaggggtctagaatccacg

SEQ ID NO: 254719 - DNA, 30 bp, Artificial Sequence
  Synthetic oligonucleotide
ctagaatttaagggacacacataatccacg

SEQ ID NO: 254720 - DNA, 30 bp, Artificial Sequence
  Synthetic oligonucleotide
aagtagatcagaggcgcggtataatccacg

SEQ ID NO: 254721 - DNA, 30 bp, Artificial Sequence
  Synthetic oligonucleotide
cggataccgatacgatttttttgatccacg

SEQ ID NO: 254722 - DNA, 30 bp, Artificial Sequence
  Synthetic oligonucleotide
agtgttcattagtaccatggatgctccacg

SEQ ID NO: 254723 - DNA, 30 bp, Artificial Sequence
  Synthetic oligonucleotide
ccacgttaaccagatggaatgccgtccacg

SEQ ID NO: 254724 - DNA, 30 bp, Artificial Sequence
  Synthetic oligonucleotide
gtaatggaaggggcttagcgtttgtccacg

SEQ ID NO: 254725 - DNA, 30 bp, Artificial Sequence
  Synthetic oligonucleotide
acctggtccgcaattgggcccccaagcacg

SEQ ID NO: 254726 - DNA, 30 bp, Artificial Sequence
  Synthetic oligonucleotide
agtgtctagtagaagaaaccaacccgcacg

SEQ ID NO: 254727 - DNA, 30 bp, Artificial Sequence
  Synthetic oligonucleotide
ctcatttctgtgaacggggaaatccgcacg

SEQ ID NO: 254728 - DNA, 30 bp, Artificial Sequence
  Synthetic oligonucleotide
caatttatcctacgatgacatcctcgcacg

SEQ ID NO: 254729 - DNA, 30 bp, Artificial Sequence
  Synthetic oligonucleotide
gtaaccgtacctactagattgtgtcgcacg

SEQ ID NO: 254730 - DNA, 30 bp, Artificial Sequence
  Synthetic oligonucleotide
ggaggtagacccgcggtaggataaggcacg

SEQ ID NO: 254731 - DNA, 30 bp, Artificial Sequence
  Synthetic oligonucleotide
gagaaaagtccgtctggaattataggcacg

SEQ ID NO: 254732 - DNA, 30 bp, Artificial Sequence
  Synthetic oligonucleotide
gcgcgccacctccgagacctctgcggcacg

SEQ ID NO: 254733 - DNA, 30 bp, Artificial Sequence
  Synthetic oligonucleotide
aatccgaaagggcccaaagaaaggggcacg

SEQ ID NO: 254734 - DNA, 30 bp, Artificial Sequence
  Synthetic oligonucleotide
gcacggatggatacgtagaaatgtggcacg

SEQ ID NO: 254735 - DNA, 30 bp, Artificial Sequence
  Synthetic oligonucleotide
acatccggtctaccgacgacataatgcacg

SEQ ID NO: 254736 - DNA, 30 bp, Artificial Sequence
  Synthetic oligonucleotide
gcggagcgcagatggagcaatatatgcacg

SEQ ID NO: 254737 - DNA, 30 bp, Artificial Sequence
  Synthetic oligonucleotide
atctagagggactgtaatcggcactgcacg

SEQ ID NO: 254738 - DNA, 30 bp, Artificial Sequence
  Synthetic oligonucleotide
cgtgcggtacagacataaagttactgcacg

SEQ ID NO: 254739 - DNA, 30 bp, Artificial Sequence
  Synthetic oligonucleotide
cgcgaggcacatcacacgacgaagtgcacg

SEQ ID NO: 254740 - DNA, 30 bp, Artificial Sequence
  Synthetic oligonucleotide
catgtcttatcggtctacagtcagtgcacg

SEQ ID NO: 254741 - DNA, 30 bp, Artificial Sequence
  Synthetic oligonucleotide
gtcaagttcatttcgaggacgaacatcacg

SEQ ID NO: 254742 - DNA, 30 bp, Artificial Sequence
  Synthetic oligonucleotide
gcaaagaaatctctcatcagaaagatcacg

SEQ ID NO: 254743 - DNA, 30 bp, Artificial Sequence
  Synthetic oligonucleotide
cagacacgtagcggtaagtgatggatcacg

SEQ ID NO: 254744 - DNA, 30 bp, Artificial Sequence
  Synthetic oligonucleotide
cacgtacggctattatcccgggtgatcacg

SEQ ID NO: 254745 - DNA, 30 bp, Artificial Sequence
  Synthetic oligonucleotide
gtactggtctacatatagggatatatcacg

SEQ ID NO: 254746 - DNA, 30 bp, Artificial Sequence
  Synthetic oligonucleotide
ctgaaagaaggggttcaccatgctatcacg

SEQ ID NO: 254747 - DNA, 30 bp, Artificial Sequence
  Synthetic oligonucleotide
gctgtagcagaagcttaggtcggtatcacg

SEQ ID NO: 254748 - DNA, 30 bp, Artificial Sequence
  Synthetic oligonucleotide
cttgtgaattagtccacctttggtatcacg

SEQ ID NO: 254749 - DNA, 30 bp, Artificial Sequence
  Synthetic oligonucleotide
tcgtaatctccggaaaaagactgactcacg

SEQ ID NO: 254750 - DNA, 30 bp, Artificial Sequence
  Synthetic oligonucleotide
tgacacgggtgataggaagatctcctcacg

SEQ ID NO: 254751 - DNA, 30 bp, Artificial Sequence
  Synthetic oligonucleotide
tcggagcccatggcgcgcgatccgctcacg

SEQ ID NO: 254752 - DNA, 30 bp, Artificial Sequence
  Synthetic oligonucleotide
ttatgctgttcgtaattatataggctcacg

SEQ ID NO: 254753 - DNA, 30 bp, Artificial Sequence
  Synthetic oligonucleotide
ccaggagtatattttatgaggatgctcacg

SEQ ID NO: 254754 - DNA, 30 bp, Artificial Sequence
  Synthetic oligonucleotide
atgctcaatcatgggtgtcaacttctcacg

SEQ ID NO: 254755 - DNA, 30 bp, Artificial Sequence
  Synthetic oligonucleotide
ggccaccacgacgcgactcacacagtcacg

SEQ ID NO: 254756 - DNA, 30 bp, Artificial Sequence
  Synthetic oligonucleotide
atttgcctggcctttgatacggtagtcacg

SEQ ID NO: 254757 - DNA, 30 bp, Artificial Sequence
  Synthetic oligonucleotide
gttattttccgaggccaggtggtagtcacg

SEQ ID NO: 254758 - DNA, 30 bp, Artificial Sequence
  Synthetic oligonucleotide
atcactatgattttaaagcaatacgtcacg

SEQ ID NO: 254759 - DNA, 30 bp, Artificial Sequence
  Synthetic oligonucleotide
atgatcaatacgcccctccttgtcgtcacg

SEQ ID NO: 254760 - DNA, 30 bp, Artificial Sequence
  Synthetic oligonucleotide
ttcgaggccggtcaggttaacgatgtcacg

SEQ ID NO: 254761 - DNA, 30 bp, Artificial Sequence
  Synthetic oligonucleotide
gttcaagtcagatcacgacgtcctgtcacg

SEQ ID NO: 254762 - DNA, 30 bp, Artificial Sequence
  Synthetic oligonucleotide
cacgagatgcattcaagtaatcggttcacg

SEQ ID NO: 254763 - DNA, 30 bp, Artificial Sequence
  Synthetic oligonucleotide
tcaaatccgtgaagatatagggggttcacg

SEQ ID NO: 254764 - DNA, 30 bp, Artificial Sequence
  Synthetic oligonucleotide
gcaacatatcatgattgagcgtggttcacg

SEQ ID NO: 254765 - DNA, 30 bp, Artificial Sequence
  Synthetic oligonucleotide
ataggagttttagttagttgttttttcacg

SEQ ID NO: 254766 - DNA, 30 bp, Artificial Sequence
  Synthetic oligonucleotide
tgggcgtccgaatttagccaccacaagacg

SEQ ID NO: 254767 - DNA, 30 bp, Artificial Sequence
  Synthetic oligonucleotide
tacacaagagacacagggaatctgaagacg

SEQ ID NO: 254768 - DNA, 30 bp, Artificial Sequence
  Synthetic oligonucleotide
ccagactatccttcgattgctggtaagacg

SEQ ID NO: 254769 - DNA, 30 bp, Artificial Sequence
  Synthetic oligonucleotide
ttggctagttgccatctcccggttaagacg

SEQ ID NO: 254770 - DNA, 30 bp, Artificial Sequence
  Synthetic oligonucleotide
aaagcgttcaagtgcttatagatccagacg

SEQ ID NO: 254771 - DNA, 30 bp, Artificial Sequence
  Synthetic oligonucleotide
aagggtttagcgcgataggggaagcagacg

SEQ ID NO: 254772 - DNA, 30 bp, Artificial Sequence
  Synthetic oligonucleotide
aacctactaatcgatccgctcaatcagacg

SEQ ID NO: 254773 - DNA, 30 bp, Artificial Sequence
  Synthetic oligonucleotide
atgatatgtacttttattagccatcagacg

SEQ ID NO: 254774 - DNA, 30 bp, Artificial Sequence
  Synthetic oligonucleotide
gctcctacacatctgcttatttgtcagacg

SEQ ID NO: 254775 - DNA, 30 bp, Artificial Sequence
  Synthetic oligonucleotide
cttcacgacatcgaaagttaacaagagacg

SEQ ID NO: 254776 - DNA, 30 bp, Artificial Sequence
  Synthetic oligonucleotide
ccatgacgaggttcggagtatgggtagacg

SEQ ID NO: 254777 - DNA, 31 bp, Artificial Sequence
  Synthetic oligonucleotide
cgcggcgtccgggcggaatacgttaacgacg

SEQ ID NO: 254778 - DNA, 30 bp, Artificial Sequence
  Synthetic oligonucleotide
acatttttgtgtagcatagctcccacgacg

SEQ ID NO: 254779 - DNA, 30 bp, Artificial Sequence
  Synthetic oligonucleotide
cgagagacactcagacgcaggatgacgacg

SEQ ID NO: 254780 - DNA, 30 bp, Artificial Sequence
  Synthetic oligonucleotide
cgagacagctgtagtccggtattaccgacg

SEQ ID NO: 254781 - DNA, 30 bp, Artificial Sequence
  Synthetic oligonucleotide
actcggggcgatccaacacaaaacccgacg

SEQ ID NO: 254782 - DNA, 30 bp, Artificial Sequence
  Synthetic oligonucleotide
atggaccccatatcttggtgctcgccgacg

SEQ ID NO: 254783 - DNA, 30 bp, Artificial Sequence
  Synthetic oligonucleotide
atattataatgagcggcttagcggccgacg

SEQ ID NO: 254784 - DNA, 30 bp, Artificial Sequence
  Synthetic oligonucleotide
ggagcgggggggcttaatttgatgccgacg

SEQ ID NO: 254785 - DNA, 30 bp, Artificial Sequence
  Synthetic oligonucleotide
atcacaatctaatgcttgtaaactccgacg

SEQ ID NO: 254786 - DNA, 30 bp, Artificial Sequence
  Synthetic oligonucleotide
cgtaataaaaaagcggtgcactgagcgacg

SEQ ID NO: 254787 - DNA, 30 bp, Artificial Sequence
  Synthetic oligonucleotide
cccggggactgccggcgcaagtgagcgacg

SEQ ID NO: 254788 - DNA, 30 bp, Artificial Sequence
  Synthetic oligonucleotide
tagacccgagaagagggtcatgtagcgacg

SEQ ID NO: 254789 - DNA, 30 bp, Artificial Sequence
  Synthetic oligonucleotide
cgataaaaagcgactgatatcactgcgacg

SEQ ID NO: 254790 - DNA, 30 bp, Artificial Sequence
  Synthetic oligonucleotide
ttagtatacctctgggcgcggtgctcgacg

SEQ ID NO: 254791 - DNA, 30 bp, Artificial Sequence
  Synthetic oligonucleotide
aggcgcaaacaaccagcgtccccttcgacg

SEQ ID NO: 254792 - DNA, 30 bp, Artificial Sequence
  Synthetic oligonucleotide
aaaatatggaacgagcgattagcaaggacg

SEQ ID NO: 254793 - DNA, 30 bp, Artificial Sequence
  Synthetic oligonucleotide
gcaggtcccgggaataacatcaacaggacg

SEQ ID NO: 254794 - DNA, 30 bp, Artificial Sequence
  Synthetic oligonucleotide
atgaagactgctgagttcgttaacaggacg

SEQ ID NO: 254795 - DNA, 30 bp, Artificial Sequence
  Synthetic oligonucleotide
gctcttgcgagaacagcaactctcaggacg

SEQ ID NO: 254796 - DNA, 30 bp, Artificial Sequence
  Synthetic oligonucleotide
aaactgggtatatcgattaaggtgaggacg

SEQ ID NO: 254797 - DNA, 30 bp, Artificial Sequence
  Synthetic oligonucleotide
gtgcgcatagtcctcacatctgctaggacg

SEQ ID NO: 254798 - DNA, 30 bp, Artificial Sequence
  Synthetic oligonucleotide
tagcgtacaataccggtgtgaacacggacg

SEQ ID NO: 254799 - DNA, 30 bp, Artificial Sequence
  Synthetic oligonucleotide
aatgtaggataaatcggcacagcccggacg

SEQ ID NO: 254800 - DNA, 30 bp, Artificial Sequence
  Synthetic oligonucleotide
tatgatacagtagacgataatagccggacg

SEQ ID NO: 254801 - DNA, 30 bp, Artificial Sequence
  Synthetic oligonucleotide
aatagatagagtaagatacggaggcggacg

SEQ ID NO: 254802 - DNA, 30 bp, Artificial Sequence
  Synthetic oligonucleotide
gccagggcggaagaactttttaggcggacg

SEQ ID NO: 254803 - DNA, 30 bp, Artificial Sequence
  Synthetic oligonucleotide
tagacggttgccttgtcgtgattgcggacg

SEQ ID NO: 254804 - DNA, 30 bp, Artificial Sequence
  Synthetic oligonucleotide
cagacatcccggaaaatctcaggtcggacg

SEQ ID NO: 254805 - DNA, 30 bp, Artificial Sequence
  Synthetic oligonucleotide
gttgcctaataatgagcagcatgtcggacg

SEQ ID NO: 254806 - DNA, 30 bp, Artificial Sequence
  Synthetic oligonucleotide
gggcttcgtcgtaaaagagtataagggacg

SEQ ID NO: 254807 - DNA, 30 bp, Artificial Sequence
  Synthetic oligonucleotide
tcggctggttgcggccaaagagccgggacg

SEQ ID NO: 254808 - DNA, 30 bp, Artificial Sequence
  Synthetic oligonucleotide
agcaaaaccgccggtctaccccatgggacg

SEQ ID NO: 254809 - DNA, 30 bp, Artificial Sequence
  Synthetic oligonucleotide
ctgcatcgtaccaaaagagccagtgggacg

SEQ ID NO: 254810 - DNA, 30 bp, Artificial Sequence
  Synthetic oligonucleotide
ctcacgcatattgcggaacgatgtgggacg

SEQ ID NO: 254811 - DNA, 30 bp, Artificial Sequence
  Synthetic oligonucleotide
ttacatgtacgcctgtgcgcattatggacg

SEQ ID NO: 254812 - DNA, 30 bp, Artificial Sequence
  Synthetic oligonucleotide
gcggaagcatccgtggcctccttatggacg

SEQ ID NO: 254813 - DNA, 30 bp, Artificial Sequence
  Synthetic oligonucleotide
ttgggtcgaaaagaagcatggttatggacg

SEQ ID NO: 254814 - DNA, 30 bp, Artificial Sequence
  Synthetic oligonucleotide
gatactaggggagggccatattactggacg

SEQ ID NO: 254815 - DNA, 30 bp, Artificial Sequence
  Synthetic oligonucleotide
ttaacatgtcacctaagtctcgtctggacg

SEQ ID NO: 254816 - DNA, 29 bp, Artificial Sequence
  Synthetic oligonucleotide
atagggcaggaaagtatgtccagtggacg

SEQ ID NO: 254817 - DNA, 30 bp, Artificial Sequence
  Synthetic oligonucleotide
gccaaagatggaggatgcacggtgtggacg

SEQ ID NO: 254818 - DNA, 30 bp, Artificial Sequence
  Synthetic oligonucleotide
tcggaaacgttatctactgcagattggacg

SEQ ID NO: 254819 - DNA, 30 bp, Artificial Sequence
  Synthetic oligonucleotide
gagtaccgaaattcagttacggcttggacg

SEQ ID NO: 254820 - DNA, 30 bp, Artificial Sequence
  Synthetic oligonucleotide
gcaagcgataatctagcgcaaggaatgacg

SEQ ID NO: 254821 - DNA, 30 bp, Artificial Sequence
  Synthetic oligonucleotide
tacgtaaagcctaccgtacctggcatgacg

SEQ ID NO: 254822 - DNA, 30 bp, Artificial Sequence
  Synthetic oligonucleotide
ataactagcagcagcattcattgcatgacg

SEQ ID NO: 254823 - DNA, 30 bp, Artificial Sequence
  Synthetic oligonucleotide
atacgtacaagaagtttggtttctatgacg

SEQ ID NO: 254824 - DNA, 30 bp, Artificial Sequence
  Synthetic oligonucleotide
cacggaagtatcttagcaacatttatgacg

SEQ ID NO: 254825 - DNA, 30 bp, Artificial Sequence
  Synthetic oligonucleotide
cataggttgacgcaatcaaagaaactgacg

SEQ ID NO: 254826 - DNA, 30 bp, Artificial Sequence
  Synthetic oligonucleotide
ctacatacaaggtatgagcgttaactgacg

SEQ ID NO: 254827 - DNA, 30 bp, Artificial Sequence
  Synthetic oligonucleotide
aattgtagggataagacgttagtcctgacg

SEQ ID NO: 254828 - DNA, 30 bp, Artificial Sequence
  Synthetic oligonucleotide
cttatatagacattagctattgtgctgacg

SEQ ID NO: 254829 - DNA, 30 bp, Artificial Sequence
  Synthetic oligonucleotide
tgagcatccgcgtggctatggcatctgacg

SEQ ID NO: 254830 - DNA, 30 bp, Artificial Sequence
  Synthetic oligonucleotide
ttgaatttgcacgggggtcacactctgacg

SEQ ID NO: 254831 - DNA, 30 bp, Artificial Sequence
  Synthetic oligonucleotide
agtgcgcatccccttgatccaggtctgacg

SEQ ID NO: 254832 - DNA, 30 bp, Artificial Sequence
  Synthetic oligonucleotide
accccacatgcgggtttatcgtacgtgacg

SEQ ID NO: 254833 - DNA, 30 bp, Artificial Sequence
  Synthetic oligonucleotide
ctgttgcttaaccaacgtattcccgtgacg

SEQ ID NO: 254834 - DNA, 30 bp, Artificial Sequence
  Synthetic oligonucleotide
gcagagtcagccgttcaaatgctcgtgacg

SEQ ID NO: 254835 - DNA, 30 bp, Artificial Sequence
  Synthetic oligonucleotide
ctcggtacggggacagtctttaatgtgacg

SEQ ID NO: 254836 - DNA, 30 bp, Artificial Sequence
  Synthetic oligonucleotide
tcgcaagcagtcgttaattatcctgtgacg

SEQ ID NO: 254837 - DNA, 30 bp, Artificial Sequence
  Synthetic oligonucleotide
ttgtgcggcagattggtcagacacttgacg

SEQ ID NO: 254838 - DNA, 30 bp, Artificial Sequence
  Synthetic oligonucleotide
tgccgcgactcgacctcaagaggcttgacg

SEQ ID NO: 254839 - DNA, 30 bp, Artificial Sequence
  Synthetic oligonucleotide
ttgcgaagcactggacaaggggtcttgacg

SEQ ID NO: 254840 - DNA, 30 bp, Artificial Sequence
  Synthetic oligonucleotide
tatgcctaggccggagcaggccagttgacg

SEQ ID NO: 254841 - DNA, 30 bp, Artificial Sequence
  Synthetic oligonucleotide
cggacaccagttcggggtatagtgttgacg

SEQ ID NO: 254842 - DNA, 30 bp, Artificial Sequence
  Synthetic oligonucleotide
tttgggtaatggtatgcccgcgttttgacg

SEQ ID NO: 254843 - DNA, 30 bp, Artificial Sequence
  Synthetic oligonucleotide
ttcagccacccttatagaaggaaaaatacg

SEQ ID NO: 254844 - DNA, 30 bp, Artificial Sequence
  Synthetic oligonucleotide
aatagagcctaagatgtacttccaaatacg

SEQ ID NO: 254845 - DNA, 30 bp, Artificial Sequence
  Synthetic oligonucleotide
ggtctaggcaatgggccgtacctaaatacg

SEQ ID NO: 254846 - DNA, 30 bp, Artificial Sequence
  Synthetic oligonucleotide
gacagtgactggagaaatatggtaaatacg

SEQ ID NO: 254847 - DNA, 30 bp, Artificial Sequence
  Synthetic oligonucleotide
cgcgtggtaatctaagaattgtacaatacg

SEQ ID NO: 254848 - DNA, 30 bp, Artificial Sequence
  Synthetic oligonucleotide
cccagtagcgcacgtaccctacgtaatacg

SEQ ID NO: 254849 - DNA, 30 bp, Artificial Sequence
  Synthetic oligonucleotide
tcacttcctgctgctagggtaggtaatacg

SEQ ID NO: 254850 - DNA, 30 bp, Artificial Sequence
  Synthetic oligonucleotide
taccacgccatggtgtatcacccacatacg

SEQ ID NO: 254851 - DNA, 30 bp, Artificial Sequence
  Synthetic oligonucleotide
cgaagtgcgtggatttttctcatccatacg

SEQ ID NO: 254852 - DNA, 30 bp, Artificial Sequence
  Synthetic oligonucleotide
tctagttacgtgtcccggagtatgcatacg

SEQ ID NO: 254853 - DNA, 30 bp, Artificial Sequence
  Synthetic oligonucleotide
tttaggtccgaacttagattttgagatacg

SEQ ID NO: 254854 - DNA, 30 bp, Artificial Sequence
  Synthetic oligonucleotide
taactcgggatcgttgtgttaaacgatacg

SEQ ID NO: 254855 - DNA, 30 bp, Artificial Sequence
  Synthetic oligonucleotide
atgcgggtgcacaggtacctgtaggatacg

SEQ ID NO: 254856 - DNA, 30 bp, Artificial Sequence
  Synthetic oligonucleotide
cggcattaattcgtaaaacagtttgatacg

SEQ ID NO: 254857 - DNA, 30 bp, Artificial Sequence
  Synthetic oligonucleotide
ttagctgtttcgagtaaccatccctatacg

SEQ ID NO: 254858 - DNA, 30 bp, Artificial Sequence
  Synthetic oligonucleotide
ggccttcgacctgttccgcaaggctatacg

SEQ ID NO: 254859 - DNA, 30 bp, Artificial Sequence
  Synthetic oligonucleotide
cgatgccgctttgtcgccaaaatctatacg

SEQ ID NO: 254860 - DNA, 30 bp, Artificial Sequence
  Synthetic oligonucleotide
tggcgggctccaccaaatgcgtggactacg

SEQ ID NO: 254861 - DNA, 30 bp, Artificial Sequence
  Synthetic oligonucleotide
gccggtcgggactctattaactatactacg

SEQ ID NO: 254862 - DNA, 30 bp, Artificial Sequence
  Synthetic oligonucleotide
aacgccatctagaacatggaccttactacg

SEQ ID NO: 254863 - DNA, 30 bp, Artificial Sequence
  Synthetic oligonucleotide
gcaactagaatagaaacgggcgaacctacg

SEQ ID NO: 254864 - DNA, 30 bp, Artificial Sequence
  Synthetic oligonucleotide
tgaagcatgtcaggaaggaatttccctacg

SEQ ID NO: 254865 - DNA, 30 bp, Artificial Sequence
  Synthetic oligonucleotide
ctatgagaagtgcggcacggattgcctacg

SEQ ID NO: 254866 - DNA, 30 bp, Artificial Sequence
  Synthetic oligonucleotide
ggtgtgaatcaacaagagcttattcctacg

SEQ ID NO: 254867 - DNA, 30 bp, Artificial Sequence
  Synthetic oligonucleotide
acttagctgccttagccggttttagctacg

SEQ ID NO: 254868 - DNA, 30 bp, Artificial Sequence
  Synthetic oligonucleotide
ggcctcccacgcacgaagtgctacgctacg

SEQ ID NO: 254869 - DNA, 30 bp, Artificial Sequence
  Synthetic oligonucleotide
aatgcagaatgctattgaagggaggctacg

SEQ ID NO: 254870 - DNA, 30 bp, Artificial Sequence
  Synthetic oligonucleotide
tctgaatatcatgggtcttccgaatctacg

SEQ ID NO: 254871 - DNA, 30 bp, Artificial Sequence
  Synthetic oligonucleotide
gttgcctactagctgcgctgacagtctacg

SEQ ID NO: 254872 - DNA, 30 bp, Artificial Sequence
  Synthetic oligonucleotide
aggcatgtttttactttcacgctgtctacg

SEQ ID NO: 254873 - DNA, 30 bp, Artificial Sequence
  Synthetic oligonucleotide
gtgttagtttgtgcgaaggcattgtctacg

SEQ ID NO: 254874 - DNA, 30 bp, Artificial Sequence
  Synthetic oligonucleotide
atcgaagcccgcaacgtagaatcaagtacg

SEQ ID NO: 254875 - DNA, 30 bp, Artificial Sequence
  Synthetic oligonucleotide
ccgaaggccggggagtatctcctaagtacg

SEQ ID NO: 254876 - DNA, 30 bp, Artificial Sequence
  Synthetic oligonucleotide
cagggatacgtcacgttgctgtatagtacg

SEQ ID NO: 254877 - DNA, 30 bp, Artificial Sequence
  Synthetic oligonucleotide
ttaactatgaatttagaacacactagtacg

SEQ ID NO: 254878 - DNA, 30 bp, Artificial Sequence
  Synthetic oligonucleotide
agtactacaaagatagtggccattagtacg

SEQ ID NO: 254879 - DNA, 30 bp, Artificial Sequence
  Synthetic oligonucleotide
cttcgcacactaaaatgactccttagtacg

SEQ ID NO: 254880 - DNA, 30 bp, Artificial Sequence
  Synthetic oligonucleotide
tgagtagccgacggccatctccttagtacg

SEQ ID NO: 254881 - DNA, 30 bp, Artificial Sequence
  Synthetic oligonucleotide
tactactagagccatccagatcttagtacg

SEQ ID NO: 254882 - DNA, 30 bp, Artificial Sequence
  Synthetic oligonucleotide
tgaatctctgtatgggaaaacttacgtacg

SEQ ID NO: 254883 - DNA, 30 bp, Artificial Sequence
  Synthetic oligonucleotide
tacataaccgggttagctgaaccccgtacg

SEQ ID NO: 254884 - DNA, 30 bp, Artificial Sequence
  Synthetic oligonucleotide
ttgatcttctagttgtagtcccgccgtacg

SEQ ID NO: 254885 - DNA, 30 bp, Artificial Sequence
  Synthetic oligonucleotide
aagctcatccgggcagcaccaaagcgtacg

SEQ ID NO: 254886 - DNA, 30 bp, Artificial Sequence
  Synthetic oligonucleotide
cgatcgaattataaaatggatcgtcgtacg

SEQ ID NO: 254887 - DNA, 30 bp, Artificial Sequence
  Synthetic oligonucleotide
cgggagtccctagtagtgtctggaggtacg

SEQ ID NO: 254888 - DNA, 30 bp, Artificial Sequence
  Synthetic oligonucleotide
aaattacactgaatttccgacaccggtacg

SEQ ID NO: 254889 - DNA, 30 bp, Artificial Sequence
  Synthetic oligonucleotide
gtgaaggggtattgaaagttcacgggtacg

SEQ ID NO: 254890 - DNA, 30 bp, Artificial Sequence
  Synthetic oligonucleotide
aaaagcggcctcgctctgtatcggggtacg

SEQ ID NO: 254891 - DNA, 30 bp, Artificial Sequence
  Synthetic oligonucleotide
tggaagacacgccagcgttggactggtacg

SEQ ID NO: 254892 - DNA, 30 bp, Artificial Sequence
  Synthetic oligonucleotide
cgcgataaatgttgcgaaccatttggtacg

SEQ ID NO: 254893 - DNA, 30 bp, Artificial Sequence
  Synthetic oligonucleotide
gagttcgggataatgggggtaagatgtacg

SEQ ID NO: 254894 - DNA, 30 bp, Artificial Sequence
  Synthetic oligonucleotide
atttgggcggttagcgggagacactgtacg

SEQ ID NO: 254895 - DNA, 30 bp, Artificial Sequence
  Synthetic oligonucleotide
ctacagattgcgtaaaaaatgatctgtacg

SEQ ID NO: 254896 - DNA, 30 bp, Artificial Sequence
  Synthetic oligonucleotide
catcagatctattacagactagggtgtacg

SEQ ID NO: 254897 - DNA, 30 bp, Artificial Sequence
  Synthetic oligonucleotide
acgccggcggtagtttagattaattgtacg

SEQ ID NO: 254898 - DNA, 30 bp, Artificial Sequence
  Synthetic oligonucleotide
ggtgcccacgtataagggatcataattacg

SEQ ID NO: 254899 - DNA, 30 bp, Artificial Sequence
  Synthetic oligonucleotide
gtttggagcgagcattccatgctcattacg

SEQ ID NO: 254900 - DNA, 30 bp, Artificial Sequence
  Synthetic oligonucleotide
ttgcatggacgggcatgttccgctattacg

SEQ ID NO: 254901 - DNA, 30 bp, Artificial Sequence
  Synthetic oligonucleotide
agctagatatgcgtatttggtcaacttacg

SEQ ID NO: 254902 - DNA, 30 bp, Artificial Sequence
  Synthetic oligonucleotide
agcgtagggcacgtcccccaggcgcttacg

SEQ ID NO: 254903 - DNA, 31 bp, Artificial Sequence
  Synthetic oligonucleotide
ggacggcaaactgagcggtattgatcttacg

SEQ ID NO: 254904 - DNA, 30 bp, Artificial Sequence
  Synthetic oligonucleotide
aggttgatcatacagggggtaagtcttacg

SEQ ID NO: 254905 - DNA, 30 bp, Artificial Sequence
  Synthetic oligonucleotide
aacaggtcacatcttgagtggtgagttacg

SEQ ID NO: 254906 - DNA, 28 bp, Artificial Sequence
  Synthetic oligonucleotide
aaaagatctcgacttcttagtcgttacg

SEQ ID NO: 254907 - DNA, 30 bp, Artificial Sequence
  Synthetic oligonucleotide
agtactacttcagttacgcgccaggttacg

SEQ ID NO: 254908 - DNA, 30 bp, Artificial Sequence
  Synthetic oligonucleotide
gttaatgtgttgtcctgttcttgggttacg

SEQ ID NO: 254909 - DNA, 30 bp, Artificial Sequence
  Synthetic oligonucleotide
gtcccaggcgaattaattacgaatgttacg

SEQ ID NO: 254910 - DNA, 30 bp, Artificial Sequence
  Synthetic oligonucleotide
ggacaattagggtgacggtgattatttacg

SEQ ID NO: 254911 - DNA, 30 bp, Artificial Sequence
  Synthetic oligonucleotide
ggccccaatgggatgttgtccttatttacg

SEQ ID NO: 254912 - DNA, 30 bp, Artificial Sequence
  Synthetic oligonucleotide
atattattaggacactacgaaacctttacg

SEQ ID NO: 254913 - DNA, 30 bp, Artificial Sequence
  Synthetic oligonucleotide
atacaagatcgccgaaggtgtgtctttacg

SEQ ID NO: 254914 - DNA, 30 bp, Artificial Sequence
  Synthetic oligonucleotide
tccacggacagggttcgtgccgattttacg

SEQ ID NO: 254915 - DNA, 30 bp, Artificial Sequence
  Synthetic oligonucleotide
gacatatgtgattactctatgggaaaaccg

SEQ ID NO: 254916 - DNA, 30 bp, Artificial Sequence
  Synthetic oligonucleotide
ggcattgaaggccctgccgcttgaaaaccg

SEQ ID NO: 254917 - DNA, 30 bp, Artificial Sequence
  Synthetic oligonucleotide
gcgccctaccaggcacaactcctaaaaccg

SEQ ID NO: 254918 - DNA, 30 bp, Artificial Sequence
  Synthetic oligonucleotide
cagccggcccgattggactcagtaaaaccg

SEQ ID NO: 254919 - DNA, 30 bp, Artificial Sequence
  Synthetic oligonucleotide
caaggtcggggcttgagcctgcctaaaccg

SEQ ID NO: 254920 - DNA, 30 bp, Artificial Sequence
  Synthetic oligonucleotide
gagcgatcctacgatcacagcacacaaccg

SEQ ID NO: 254921 - DNA, 30 bp, Artificial Sequence
  Synthetic oligonucleotide
cgattccgtcccccacgcaactatcaaccg

SEQ ID NO: 254922 - DNA, 30 bp, Artificial Sequence
  Synthetic oligonucleotide
gaatgtacgacttcaatggggcgtcaaccg

SEQ ID NO: 254923 - DNA, 30 bp, Artificial Sequence
  Synthetic oligonucleotide
tataaaggattgtgttgcagttttcaaccg

SEQ ID NO: 254924 - DNA, 30 bp, Artificial Sequence
  Synthetic oligonucleotide
gattaggtacgaacagcgttcgaagaaccg

SEQ ID NO: 254925 - DNA, 30 bp, Artificial Sequence
  Synthetic oligonucleotide
cccgcttggcgcatctctatcacagaaccg

SEQ ID NO: 254926 - DNA, 30 bp, Artificial Sequence
  Synthetic oligonucleotide
ggaccggtaagacaagccgttccagaaccg

SEQ ID NO: 254927 - DNA, 30 bp, Artificial Sequence
  Synthetic oligonucleotide
agggtccgaggggacatgctgtccgaaccg

SEQ ID NO: 254928 - DNA, 30 bp, Artificial Sequence
  Synthetic oligonucleotide
ataagtcggcttactggagacttcgaaccg

SEQ ID NO: 254929 - DNA, 30 bp, Artificial Sequence
  Synthetic oligonucleotide
acttttaagtaaagcggcgccccggaaccg

SEQ ID NO: 254930 - DNA, 30 bp, Artificial Sequence
  Synthetic oligonucleotide
gtcagcgctgcccgccttagcctggaaccg

SEQ ID NO: 254931 - DNA, 30 bp, Artificial Sequence
  Synthetic oligonucleotide
tatgtctcaggaaccttcatcagataaccg

SEQ ID NO: 254932 - DNA, 30 bp, Artificial Sequence
  Synthetic oligonucleotide
ttctatggcatcgagagagggctataaccg

SEQ ID NO: 254933 - DNA, 30 bp, Artificial Sequence
  Synthetic oligonucleotide
atataacggaccatgctaatgaagtaaccg

SEQ ID NO: 254934 - DNA, 30 bp, Artificial Sequence
  Synthetic oligonucleotide
gaggcagctgccgccaagggtgagtaaccg

SEQ ID NO: 254935 - DNA, 30 bp, Artificial Sequence
  Synthetic oligonucleotide
ttggtggcgcgcacagatcgctagtaaccg

SEQ ID NO: 254936 - DNA, 30 bp, Artificial Sequence
  Synthetic oligonucleotide
cgttaatacgacggctcttaagcttaaccg

SEQ ID NO: 254937 - DNA, 30 bp, Artificial Sequence
  Synthetic oligonucleotide
actggtttagcaaagggtccgcgttaaccg

SEQ ID NO: 254938 - DNA, 30 bp, Artificial Sequence
  Synthetic oligonucleotide
ttggtgttatcaaagaggaaatcaacaccg

SEQ ID NO: 254939 - DNA, 30 bp, Artificial Sequence
  Synthetic oligonucleotide
aaatatggcaagtgtgggtccataacaccg

SEQ ID NO: 254940 - DNA, 30 bp, Artificial Sequence
  Synthetic oligonucleotide
tctaatggtaggacatactgagccacaccg

SEQ ID NO: 254941 - DNA, 30 bp, Artificial Sequence
  Synthetic oligonucleotide
ggagttttctgcctagggttcctcacaccg

SEQ ID NO: 254942 - DNA, 30 bp, Artificial Sequence
  Synthetic oligonucleotide
tacggacataagtatgggagcattacaccg

SEQ ID NO: 254943 - DNA, 30 bp, Artificial Sequence
  Synthetic oligonucleotide
gttagggtgagtgagaataagtaaccaccg

SEQ ID NO: 254944 - DNA, 30 bp, Artificial Sequence
  Synthetic oligonucleotide
agttgtgacgagtccggcgtaatcccaccg

SEQ ID NO: 254945 - DNA, 30 bp, Artificial Sequence
  Synthetic oligonucleotide
ctgctttgcaaccattcaagcctcccaccg

SEQ ID NO: 254946 - DNA, 30 bp, Artificial Sequence
  Synthetic oligonucleotide
gtatcaaaacatgcgtcgtgattcccaccg

SEQ ID NO: 254947 - DNA, 30 bp, Artificial Sequence
  Synthetic oligonucleotide
tggccgaatcaagcttctattccgccaccg

SEQ ID NO: 254948 - DNA, 30 bp, Artificial Sequence
  Synthetic oligonucleotide
aataaataccggaagctccacaggccaccg

SEQ ID NO: 254949 - DNA, 30 bp, Artificial Sequence
  Synthetic oligonucleotide
cgaaagtgattacccggttgtaatccaccg

SEQ ID NO: 254950 - DNA, 30 bp, Artificial Sequence
  Synthetic oligonucleotide
tatttcgagtacaccgtgattaatccaccg

SEQ ID NO: 254951 - DNA, 30 bp, Artificial Sequence
  Synthetic oligonucleotide
tgtttgccatcaggtaaagtgactccaccg

SEQ ID NO: 254952 - DNA, 30 bp, Artificial Sequence
  Synthetic oligonucleotide
gattaggcttattttgggtaagaatcaccg

SEQ ID NO: 254953 - DNA, 30 bp, Artificial Sequence
  Synthetic oligonucleotide
cgtcgcatcactggtagctctgaatcaccg

SEQ ID NO: 254954 - DNA, 30 bp, Artificial Sequence
  Synthetic oligonucleotide
gtggatcgcggtggttaatagggttcaccg

SEQ ID NO: 254955 - DNA, 30 bp, Artificial Sequence
  Synthetic oligonucleotide
taagcgagctccggccccgacctttcaccg

SEQ ID NO: 254956 - DNA, 30 bp, Artificial Sequence
  Synthetic oligonucleotide
atgggagcacgctcggccctgttttcaccg

SEQ ID NO: 254957 - DNA, 30 bp, Artificial Sequence
  Synthetic oligonucleotide
gaactagacacgtgggttgtctcaagaccg

SEQ ID NO: 254958 - DNA, 31 bp, Artificial Sequence
  Synthetic oligonucleotide
actcgggcctatagggcgaacgtacagaccg

SEQ ID NO: 254959 - DNA, 30 bp, Artificial Sequence
  Synthetic oligonucleotide
cctgatcgacgtgttgtctcgaccagaccg

SEQ ID NO: 254960 - DNA, 30 bp, Artificial Sequence
  Synthetic oligonucleotide
cctgacaaggcttagtgtgtgccgagaccg

SEQ ID NO: 254961 - DNA, 30 bp, Artificial Sequence
  Synthetic oligonucleotide
gcacgcagagttagtcctttatcgagaccg

SEQ ID NO: 254962 - DNA, 30 bp, Artificial Sequence
  Synthetic oligonucleotide
gtcttccactcttgaaactaaggtagaccg

SEQ ID NO: 254963 - DNA, 30 bp, Artificial Sequence
  Synthetic oligonucleotide
cgagcacgtttttacagccggaaacgaccg

SEQ ID NO: 254964 - DNA, 30 bp, Artificial Sequence
  Synthetic oligonucleotide
gagataactcccgcccttatgtggcgaccg

SEQ ID NO: 254965 - DNA, 30 bp, Artificial Sequence
  Synthetic oligonucleotide
acgtttaaacatagggcctctcatcgaccg

SEQ ID NO: 254966 - DNA, 30 bp, Artificial Sequence
  Synthetic oligonucleotide
ttactgagcgaaaaacgatggtatcgaccg

SEQ ID NO: 254967 - DNA, 30 bp, Artificial Sequence
  Synthetic oligonucleotide
atacactttgactttgctcaggaaggaccg

SEQ ID NO: 254968 - DNA, 30 bp, Artificial Sequence
  Synthetic oligonucleotide
atcggtggtgctaaggtggatgcaggaccg

SEQ ID NO: 254969 - DNA, 30 bp, Artificial Sequence
  Synthetic oligonucleotide
tgtagcatcactgtatcttgcggcggaccg

SEQ ID NO: 254970 - DNA, 30 bp, Artificial Sequence
  Synthetic oligonucleotide
atggtacatgacaggtggtatttcggaccg

SEQ ID NO: 254971 - DNA, 30 bp, Artificial Sequence
  Synthetic oligonucleotide
ggctcttcatcggtcaaggaactatgaccg

SEQ ID NO: 254972 - DNA, 30 bp, Artificial Sequence
  Synthetic oligonucleotide
cgacaggagtatgttacagtcatctgaccg

SEQ ID NO: 254973 - DNA, 30 bp, Artificial Sequence
  Synthetic oligonucleotide
gaagcgactctatggagtgtaacttgaccg

SEQ ID NO: 254974 - DNA, 30 bp, Artificial Sequence
  Synthetic oligonucleotide
tatgagtttgaggacataacgagttgaccg

SEQ ID NO: 254975 - DNA, 30 bp, Artificial Sequence
  Synthetic oligonucleotide
aaccgtgggatttgccgcctttaaataccg

SEQ ID NO: 254976 - DNA, 30 bp, Artificial Sequence
  Synthetic oligonucleotide
ggggccgcctcatagaccacccatataccg

SEQ ID NO: 254977 - DNA, 30 bp, Artificial Sequence
  Synthetic oligonucleotide
tatacgcctatcaacaactctcgactaccg

SEQ ID NO: 254978 - DNA, 30 bp, Artificial Sequence
  Synthetic oligonucleotide
actgtgccgcgtaagtctagcggactaccg

SEQ ID NO: 254979 - DNA, 30 bp, Artificial Sequence
  Synthetic oligonucleotide
caccgctgaacctgtcgccaaaccctaccg

SEQ ID NO: 254980 - DNA, 30 bp, Artificial Sequence
  Synthetic oligonucleotide
gacaattgtgccaggataaagtccctaccg

SEQ ID NO: 254981 - DNA, 30 bp, Artificial Sequence
  Synthetic oligonucleotide
ataaactcagactcatggtttacgctaccg

SEQ ID NO: 254982 - DNA, 30 bp, Artificial Sequence
  Synthetic oligonucleotide
aattgagccgaacttggtgttcctctaccg

SEQ ID NO: 254983 - DNA, 30 bp, Artificial Sequence
  Synthetic oligonucleotide
cgccgaattcgccagactttgtgcgtaccg

SEQ ID NO: 254984 - DNA, 30 bp, Artificial Sequence
  Synthetic oligonucleotide
atcgaagtcagctcctacgactgggtaccg

SEQ ID NO: 254985 - DNA, 30 bp, Artificial Sequence
  Synthetic oligonucleotide
catagcgccttttatctcgaagcattaccg

SEQ ID NO: 254986 - DNA, 30 bp, Artificial Sequence
  Synthetic oligonucleotide
tcgattagtcagtacgcaagagacttaccg

SEQ ID NO: 254987 - DNA, 30 bp, Artificial Sequence
  Synthetic oligonucleotide
gtcggaacctgcagcggctatgacttaccg

SEQ ID NO: 254988 - DNA, 30 bp, Artificial Sequence
  Synthetic oligonucleotide
aacaaaatcgcaaggaatccggccttaccg

SEQ ID NO: 254989 - DNA, 30 bp, Artificial Sequence
  Synthetic oligonucleotide
ttggaacgccgtctgaaattatgcttaccg

SEQ ID NO: 254990 - DNA, 30 bp, Artificial Sequence
  Synthetic oligonucleotide
ccatgtctgctaatccgatcagtgttaccg

SEQ ID NO: 254991 - DNA, 30 bp, Artificial Sequence
  Synthetic oligonucleotide
ccgtagaagcccgacagtttcatcaacccg

SEQ ID NO: 254992 - DNA, 30 bp, Artificial Sequence
  Synthetic oligonucleotide
tcgccaaggtctgaattcacatgtaacccg

SEQ ID NO: 254993 - DNA, 30 bp, Artificial Sequence
  Synthetic oligonucleotide
tagtatttgggcgcgtccgtacaacacccg

SEQ ID NO: 254994 - DNA, 30 bp, Artificial Sequence
  Synthetic oligonucleotide
cagggctggcatattggacgcgaacacccg

SEQ ID NO: 254995 - DNA, 30 bp, Artificial Sequence
  Synthetic oligonucleotide
taagctaggagtcgcgcgaatggccacccg

SEQ ID NO: 254996 - DNA, 30 bp, Artificial Sequence
  Synthetic oligonucleotide
ggccgatttaacgcttaggtttatcacccg

SEQ ID NO: 254997 - DNA, 30 bp, Artificial Sequence
  Synthetic oligonucleotide
gtcctgttggggagctagcgtcttcacccg

SEQ ID NO: 254998 - DNA, 30 bp, Artificial Sequence
  Synthetic oligonucleotide
ggtcaggccagcagaaaactcacctacccg

SEQ ID NO: 254999 - DNA, 30 bp, Artificial Sequence
  Synthetic oligonucleotide
ccaaaacgggctttggtcgtcgcctacccg

SEQ ID NO: 255000 - DNA, 30 bp, Artificial Sequence
  Synthetic oligonucleotide
atgctttagagtcacttcgacacgtacccg

SEQ ID NO: 255001 - DNA, 30 bp, Artificial Sequence
  Synthetic oligonucleotide
cggcgttatccgagacacagggcgtacccg

SEQ ID NO: 255002 - DNA, 30 bp, Artificial Sequence
  Synthetic oligonucleotide
ggaagtaagagacttttacttagttacccg

SEQ ID NO: 255003 - DNA, 30 bp, Artificial Sequence
  Synthetic oligonucleotide
atatcgcttgctcattgatggcaaaccccg

SEQ ID NO: 255004 - DNA, 30 bp, Artificial Sequence
  Synthetic oligonucleotide
cctcaagtgggagcaggcgtaataaccccg

SEQ ID NO: 255005 - DNA, 30 bp, Artificial Sequence
  Synthetic oligonucleotide
tattggattaacgtgtatgcattaaccccg

SEQ ID NO: 255006 - DNA, 30 bp, Artificial Sequence
  Synthetic oligonucleotide
tgtgaccgacacacgtaaaggcataccccg

SEQ ID NO: 255007 - DNA, 30 bp, Artificial Sequence
  Synthetic oligonucleotide
gttacaggcgtaagtcttcttgctaccccg

SEQ ID NO: 255008 - DNA, 30 bp, Artificial Sequence
  Synthetic oligonucleotide
agtgtagatgacgtacggaaatgtaccccg

SEQ ID NO: 255009 - DNA, 30 bp, Artificial Sequence
  Synthetic oligonucleotide
agtcagagatcgcaggagccgatacccccg

SEQ ID NO: 255010 - DNA, 30 bp, Artificial Sequence
  Synthetic oligonucleotide
gtacgtcaaaactctcttgagtaagccccg

SEQ ID NO: 255011 - DNA, 30 bp, Artificial Sequence
  Synthetic oligonucleotide
gtacactagttaatgtcagaatgagccccg

SEQ ID NO: 255012 - DNA, 30 bp, Artificial Sequence
  Synthetic oligonucleotide
cgcctaggagcaggaaaggcctcctccccg

SEQ ID NO: 255013 - DNA, 30 bp, Artificial Sequence
  Synthetic oligonucleotide
cgcccataagtgtgatgaagcgtttccccg

SEQ ID NO: 255014 - DNA, 30 bp, Artificial Sequence
  Synthetic oligonucleotide
aacacgaacttggcgcatcctacaagcccg

SEQ ID NO: 255015 - DNA, 30 bp, Artificial Sequence
  Synthetic oligonucleotide
gaccgggggagaggactcacgatcagcccg

SEQ ID NO: 255016 - DNA, 30 bp, Artificial Sequence
  Synthetic oligonucleotide
aaccgtgctgccaacttgacggatagcccg

SEQ ID NO: 255017 - DNA, 30 bp, Artificial Sequence
  Synthetic oligonucleotide
gtgatggttttgtcaggtctatatagcccg

SEQ ID NO: 255018 - DNA, 30 bp, Artificial Sequence
  Synthetic oligonucleotide
caacctagggtttgagtcttgattagcccg

SEQ ID NO: 255019 - DNA, 30 bp, Artificial Sequence
  Synthetic oligonucleotide
gcggtatgacttcgtggcaataagcgcccg

SEQ ID NO: 255020 - DNA, 30 bp, Artificial Sequence
  Synthetic oligonucleotide
gtatgccgctacctagccggatgtcgcccg

SEQ ID NO: 255021 - DNA, 30 bp, Artificial Sequence
  Synthetic oligonucleotide
gtatccatctgaggctatgtgtgaggcccg

SEQ ID NO: 255022 - DNA, 30 bp, Artificial Sequence
  Synthetic oligonucleotide
tatcgttgacaatcaatcaagtgcggcccg

SEQ ID NO: 255023 - DNA, 30 bp, Artificial Sequence
  Synthetic oligonucleotide
ataattctgataaccccaagcatcggcccg

SEQ ID NO: 255024 - DNA, 30 bp, Artificial Sequence
  Synthetic oligonucleotide
acaactagttgcgccgtggtatatggcccg

SEQ ID NO: 255025 - DNA, 30 bp, Artificial Sequence
  Synthetic oligonucleotide
ccaaggatcccgttatgcagttgtggcccg

SEQ ID NO: 255026 - DNA, 30 bp, Artificial Sequence
  Synthetic oligonucleotide
gtcgataaaatagaacgccaaaactgcccg

SEQ ID NO: 255027 - DNA, 30 bp, Artificial Sequence
  Synthetic oligonucleotide
tgatgcagtcggatcgtgaggaccatcccg

SEQ ID NO: 255028 - DNA, 30 bp, Artificial Sequence
  Synthetic oligonucleotide
aggtaagggacttggtcagtaacactcccg

SEQ ID NO: 255029 - DNA, 30 bp, Artificial Sequence
  Synthetic oligonucleotide
tcggggcccgggggtttccgagcactcccg

SEQ ID NO: 255030 - DNA, 30 bp, Artificial Sequence
  Synthetic oligonucleotide
catttaaggtgtgggattgcacacctcccg

SEQ ID NO: 255031 - DNA, 30 bp, Artificial Sequence
  Synthetic oligonucleotide
ccgggcctcacaggcactaattggctcccg

SEQ ID NO: 255032 - DNA, 30 bp, Artificial Sequence
  Synthetic oligonucleotide
gacctacgcggcaaaaggatccatctcccg

SEQ ID NO: 255033 - DNA, 30 bp, Artificial Sequence
  Synthetic oligonucleotide
aaacgatcgtagtccactctcgaagtcccg

SEQ ID NO: 255034 - DNA, 30 bp, Artificial Sequence
  Synthetic oligonucleotide
aactttgcgcacgtaaacacattagtcccg

SEQ ID NO: 255035 - DNA, 30 bp, Artificial Sequence
  Synthetic oligonucleotide
aaagaattccctacggaggcaatcgtcccg

SEQ ID NO: 255036 - DNA, 30 bp, Artificial Sequence
  Synthetic oligonucleotide
gtttggtaggtcccaaaaccactcgtcccg

SEQ ID NO: 255037 - DNA, 30 bp, Artificial Sequence
  Synthetic oligonucleotide
agtttggtgtggtcggaatactaggtcccg

SEQ ID NO: 255038 - DNA, 30 bp, Artificial Sequence
  Synthetic oligonucleotide
ctttgcgttaactttgaggcccttgtcccg

SEQ ID NO: 255039 - DNA, 30 bp, Artificial Sequence
  Synthetic oligonucleotide
gcatgttacttaaatgaacgcgacttcccg

SEQ ID NO: 255040 - DNA, 31 bp, Artificial Sequence
  Synthetic oligonucleotide
ccctgtggcggagttatcggatcggttcccg

SEQ ID NO: 255041 - DNA, 30 bp, Artificial Sequence
  Synthetic oligonucleotide
ggtgttggagtgcacagtgaagtgttcccg

SEQ ID NO: 255042 - DNA, 30 bp, Artificial Sequence
  Synthetic oligonucleotide
tggccacgcgaaaagacgagcccaaagccg

SEQ ID NO: 255043 - DNA, 30 bp, Artificial Sequence
  Synthetic oligonucleotide
ataacctggtctctgtttagctacaagccg

SEQ ID NO: 255044 - DNA, 30 bp, Artificial Sequence
  Synthetic oligonucleotide
atagaggtaatattgacccctctgaagccg

SEQ ID NO: 255045 - DNA, 30 bp, Artificial Sequence
  Synthetic oligonucleotide
atcacagtgttcttccggccataacagccg

SEQ ID NO: 255046 - DNA, 30 bp, Artificial Sequence
  Synthetic oligonucleotide
caagcgcttaagtgaggaccctaacagccg

SEQ ID NO: 255047 - DNA, 30 bp, Artificial Sequence
  Synthetic oligonucleotide
aattgtgccacccaccatgtacagcagccg

SEQ ID NO: 255048 - DNA, 30 bp, Artificial Sequence
  Synthetic oligonucleotide
gctatcgcggtgcgttggtattctgagccg

SEQ ID NO: 255049 - DNA, 30 bp, Artificial Sequence
  Synthetic oligonucleotide
gcaaaagtgccccaggcaggcacatagccg

SEQ ID NO: 255050 - DNA, 30 bp, Artificial Sequence
  Synthetic oligonucleotide
tcgacaataatacaggggcctatctagccg

SEQ ID NO: 255051 - DNA, 30 bp, Artificial Sequence
  Synthetic oligonucleotide
tagtatttatgcgaacccgctcaaacgccg

SEQ ID NO: 255052 - DNA, 30 bp, Artificial Sequence
  Synthetic oligonucleotide
aacggcggccaggcaagtgacataacgccg

SEQ ID NO: 255053 - DNA, 30 bp, Artificial Sequence
  Synthetic oligonucleotide
tgtgtaaactcagtaaaactagggacgccg

SEQ ID NO: 255054 - DNA, 30 bp, Artificial Sequence
  Synthetic oligonucleotide
cagtaccgttgcaactacaggctgacgccg

SEQ ID NO: 255055 - DNA, 30 bp, Artificial Sequence
  Synthetic oligonucleotide
ggttacgggtgtaacagtaatggtacgccg

SEQ ID NO: 255056 - DNA, 30 bp, Artificial Sequence
  Synthetic oligonucleotide
gattggataagtcagggctcagcaccgccg

SEQ ID NO: 255057 - DNA, 30 bp, Artificial Sequence
  Synthetic oligonucleotide
cagccattttcttcatgcattggaccgccg

SEQ ID NO: 255058 - DNA, 30 bp, Artificial Sequence
  Synthetic oligonucleotide
caacaagaataagaccagtggtagccgccg

SEQ ID NO: 255059 - DNA, 30 bp, Artificial Sequence
  Synthetic oligonucleotide
actagtaccagagtatacttgtggccgccg

SEQ ID NO: 255060 - DNA, 30 bp, Artificial Sequence
  Synthetic oligonucleotide
caacagacggtgggatagaaattgccgccg

SEQ ID NO: 255061 - DNA, 30 bp, Artificial Sequence
  Synthetic oligonucleotide
ccagtcagaaagtgtcctttaaaagcgccg

SEQ ID NO: 255062 - DNA, 30 bp, Artificial Sequence
  Synthetic oligonucleotide
actagacggcctctatgaaatgaagcgccg

SEQ ID NO: 255063 - DNA, 30 bp, Artificial Sequence
  Synthetic oligonucleotide
ggcggatttccggctagtatgacagcgccg

SEQ ID NO: 255064 - DNA, 30 bp, Artificial Sequence
  Synthetic oligonucleotide
aagctaggatggacgactttttacgcgccg

SEQ ID NO: 255065 - DNA, 30 bp, Artificial Sequence
  Synthetic oligonucleotide
caaggcagtctagcattattcgaggcgccg

SEQ ID NO: 255066 - DNA, 30 bp, Artificial Sequence
  Synthetic oligonucleotide
cggggatgggcaacggtcacataggcgccg

SEQ ID NO: 255067 - DNA, 30 bp, Artificial Sequence
  Synthetic oligonucleotide
tgtgtcatcatttgtacactttgggcgccg

SEQ ID NO: 255068 - DNA, 30 bp, Artificial Sequence
  Synthetic oligonucleotide
agatctggttctggtatggtcagtgcgccg

SEQ ID NO: 255069 - DNA, 30 bp, Artificial Sequence
  Synthetic oligonucleotide
ccaataaaagtccaccgttttagatcgccg

SEQ ID NO: 255070 - DNA, 30 bp, Artificial Sequence
  Synthetic oligonucleotide
tcatctgttacgtgttgaagcgtctcgccg

SEQ ID NO: 255071 - DNA, 30 bp, Artificial Sequence
  Synthetic oligonucleotide
gccaggggaaactatcaactttgttcgccg

SEQ ID NO: 255072 - DNA, 30 bp, Artificial Sequence
  Synthetic oligonucleotide
atgagtaaccacgaactattagagaggccg

SEQ ID NO: 255073 - DNA, 30 bp, Artificial Sequence
  Synthetic oligonucleotide
aatatgctcagtagcacaatggggaggccg

SEQ ID NO: 255074 - DNA, 30 bp, Artificial Sequence
  Synthetic oligonucleotide
atagagataattgatgtcgatgtgaggccg

SEQ ID NO: 255075 - DNA, 30 bp, Artificial Sequence
  Synthetic oligonucleotide
taacgttaattataattaaaaactaggccg

SEQ ID NO: 255076 - DNA, 30 bp, Artificial Sequence
  Synthetic oligonucleotide
ttccttcggcctgtgtgagtgcgtaggccg

SEQ ID NO: 255077 - DNA, 30 bp, Artificial Sequence
  Synthetic oligonucleotide
ctaggccaacccttagtacagtcacggccg

SEQ ID NO: 255078 - DNA, 30 bp, Artificial Sequence
  Synthetic oligonucleotide
gtgggggacatcaacctgtaaatacggccg

SEQ ID NO: 255079 - DNA, 30 bp, Artificial Sequence
  Synthetic oligonucleotide
acattccagaccagagtggggacccggccg

SEQ ID NO: 255080 - DNA, 30 bp, Artificial Sequence
  Synthetic oligonucleotide
agtgggtgtaatgcttgtggggagcggccg

SEQ ID NO: 255081 - DNA, 30 bp, Artificial Sequence
  Synthetic oligonucleotide
ttattggtgatcggcccaagacatcggccg

SEQ ID NO: 255082 - DNA, 30 bp, Artificial Sequence
  Synthetic oligonucleotide
aacgttggacaacttccccaccatgggccg

SEQ ID NO: 255083 - DNA, 30 bp, Artificial Sequence
  Synthetic oligonucleotide
ggaaaattgactttagtacggaaatggccg

SEQ ID NO: 255084 - DNA, 30 bp, Artificial Sequence
  Synthetic oligonucleotide
tcttgctcctacggggtcggggaatggccg

SEQ ID NO: 255085 - DNA, 30 bp, Artificial Sequence
  Synthetic oligonucleotide
tcagtagtctgggcgctaggtacatggccg

SEQ ID NO: 255086 - DNA, 30 bp, Artificial Sequence
  Synthetic oligonucleotide
gctggatctgaccgtttggcctcatggccg

SEQ ID NO: 255087 - DNA, 30 bp, Artificial Sequence
  Synthetic oligonucleotide
atggttgacatgacgcaagggggatggccg

SEQ ID NO: 255088 - DNA, 30 bp, Artificial Sequence
  Synthetic oligonucleotide
aattggggtaatgccaaacgtgtatggccg

SEQ ID NO: 255089 - DNA, 30 bp, Artificial Sequence
  Synthetic oligonucleotide
gtagctgttcgttcaggactcgtctggccg

SEQ ID NO: 255090 - DNA, 30 bp, Artificial Sequence
  Synthetic oligonucleotide
ggtgagcctgacgcgttccagctgtggccg

SEQ ID NO: 255091 - DNA, 30 bp, Artificial Sequence
  Synthetic oligonucleotide
ttcggcgaaatctaaacattgcaaatgccg

SEQ ID NO: 255092 - DNA, 31 bp, Artificial Sequence
  Synthetic oligonucleotide
cactcacttgatgcggataggtgacatgccg

SEQ ID NO: 255093 - DNA, 30 bp, Artificial Sequence
  Synthetic oligonucleotide
tagacgtatgatgggtccagatacatgccg

SEQ ID NO: 255094 - DNA, 30 bp, Artificial Sequence
  Synthetic oligonucleotide
ggtgtcgtcgtccaaacttttaagatgccg

SEQ ID NO: 255095 - DNA, 30 bp, Artificial Sequence
  Synthetic oligonucleotide
cggatacaccggggggacctccgtatgccg

SEQ ID NO: 255096 - DNA, 30 bp, Artificial Sequence
  Synthetic oligonucleotide
catatcaattcatacgcaatttcactgccg

SEQ ID NO: 255097 - DNA, 30 bp, Artificial Sequence
  Synthetic oligonucleotide
gacacgcgggactctctggcaagcctgccg

SEQ ID NO: 255098 - DNA, 30 bp, Artificial Sequence
  Synthetic oligonucleotide
aagtacctgtttgcggtcgaggtggtgccg

SEQ ID NO: 255099 - DNA, 30 bp, Artificial Sequence
  Synthetic oligonucleotide
agtggacgaccctgagttgcgcgattgccg

SEQ ID NO: 255100 - DNA, 30 bp, Artificial Sequence
  Synthetic oligonucleotide
tatgttaagtaggtttgtggcctgttgccg

SEQ ID NO: 255101 - DNA, 30 bp, Artificial Sequence
  Synthetic oligonucleotide
ggctgggcaaccgcgtcgtgcaatttgccg

SEQ ID NO: 255102 - DNA, 30 bp, Artificial Sequence
  Synthetic oligonucleotide
tagacctcccctcgccgggataatttgccg

SEQ ID NO: 255103 - DNA, 30 bp, Artificial Sequence
  Synthetic oligonucleotide
gtgtgggggttgtgcggcaggctcaatccg

SEQ ID NO: 255104 - DNA, 30 bp, Artificial Sequence
  Synthetic oligonucleotide
tgatggccgcacggcccaccaaaacatccg

SEQ ID NO: 255105 - DNA, 30 bp, Artificial Sequence
  Synthetic oligonucleotide
tcgcggagcacgtttccgtgggaacatccg

SEQ ID NO: 255106 - DNA, 30 bp, Artificial Sequence
  Synthetic oligonucleotide
ctcgtatgggggaattgtcaaatacatccg

SEQ ID NO: 255107 - DNA, 30 bp, Artificial Sequence
  Synthetic oligonucleotide
ctcaatgtaaagggtttaaatatacatccg

SEQ ID NO: 255108 - DNA, 30 bp, Artificial Sequence
  Synthetic oligonucleotide
caagctagtaggtgtgggtttcaccatccg

SEQ ID NO: 255109 - DNA, 30 bp, Artificial Sequence
  Synthetic oligonucleotide
tccactgcgacaactgtacaaaaagatccg

SEQ ID NO: 255110 - DNA, 30 bp, Artificial Sequence
  Synthetic oligonucleotide
accagtatgtagagatagttcgaagatccg

SEQ ID NO: 255111 - DNA, 30 bp, Artificial Sequence
  Synthetic oligonucleotide
aaaggtaattacgcacattttcaggatccg

SEQ ID NO: 255112 - DNA, 30 bp, Artificial Sequence
  Synthetic oligonucleotide
caggtcaagtccttcattactacggatccg

SEQ ID NO: 255113 - DNA, 30 bp, Artificial Sequence
  Synthetic oligonucleotide
acttccgagtatcactaaatactggatccg

SEQ ID NO: 255114 - DNA, 30 bp, Artificial Sequence
  Synthetic oligonucleotide
gaccgaagtacggagtatcagaaatatccg

SEQ ID NO: 255115 - DNA, 30 bp, Artificial Sequence
  Synthetic oligonucleotide
acggaatattagagatcgcctcggtatccg

SEQ ID NO: 255116 - DNA, 30 bp, Artificial Sequence
  Synthetic oligonucleotide
agtctcccgaccgacaatcacttgtatccg

SEQ ID NO: 255117 - DNA, 30 bp, Artificial Sequence
  Synthetic oligonucleotide
tttcctagccacataaccccgtattatccg

SEQ ID NO: 255118 - DNA, 30 bp, Artificial Sequence
  Synthetic oligonucleotide
gcgcgagacagcttaagtagtgtaactccg

SEQ ID NO: 255119 - DNA, 30 bp, Artificial Sequence
  Synthetic oligonucleotide
cttcacgcaggacgaactcgaatcactccg

SEQ ID NO: 255120 - DNA, 30 bp, Artificial Sequence
  Synthetic oligonucleotide
ccgttgctgagttaagagttgaagactccg

SEQ ID NO: 255121 - DNA, 30 bp, Artificial Sequence
  Synthetic oligonucleotide
gcagagccagctctgtctgcgcagactccg

SEQ ID NO: 255122 - DNA, 30 bp, Artificial Sequence
  Synthetic oligonucleotide
tcgagggcagtccactagtgttagactccg

SEQ ID NO: 255123 - DNA, 30 bp, Artificial Sequence
  Synthetic oligonucleotide
aggagccacggaatgttctggcaccctccg

SEQ ID NO: 255124 - DNA, 30 bp, Artificial Sequence
  Synthetic oligonucleotide
tctagtgttgagccgttgcgaatccctccg

SEQ ID NO: 255125 - DNA, 30 bp, Artificial Sequence
  Synthetic oligonucleotide
ttaaatcgttcacttagatttcagcctccg

SEQ ID NO: 255126 - DNA, 30 bp, Artificial Sequence
  Synthetic oligonucleotide
gtagacagaaatgagcgttcctaagctccg

SEQ ID NO: 255127 - DNA, 30 bp, Artificial Sequence
  Synthetic oligonucleotide
ctttcaccaaaagattggcggatagctccg

SEQ ID NO: 255128 - DNA, 30 bp, Artificial Sequence
  Synthetic oligonucleotide
gtacggacggcttaaacgtgtttagctccg

SEQ ID NO: 255129 - DNA, 30 bp, Artificial Sequence
  Synthetic oligonucleotide
agcataacccggtaggctatccacgctccg

SEQ ID NO: 255130 - DNA, 30 bp, Artificial Sequence
  Synthetic oligonucleotide
taaggcttgtcgcattttcgtgccgctccg

SEQ ID NO: 255131 - DNA, 30 bp, Artificial Sequence
  Synthetic oligonucleotide
aaaacgcgatcgaccggtgcgccggctccg

SEQ ID NO: 255132 - DNA, 30 bp, Artificial Sequence
  Synthetic oligonucleotide
tcgaatgttgttgaattcttatcggctccg

SEQ ID NO: 255133 - DNA, 30 bp, Artificial Sequence
  Synthetic oligonucleotide
gcacgggaactcgtgcatctaaatgctccg

SEQ ID NO: 255134 - DNA, 30 bp, Artificial Sequence
  Synthetic oligonucleotide
gacccgtcgggatgagccgcgggtgctccg

SEQ ID NO: 255135 - DNA, 30 bp, Artificial Sequence
  Synthetic oligonucleotide
gcacaaacactgcaggtgcaggactctccg

SEQ ID NO: 255136 - DNA, 30 bp, Artificial Sequence
  Synthetic oligonucleotide
ggaacacacaccacgacgacgacgtctccg

SEQ ID NO: 255137 - DNA, 30 bp, Artificial Sequence
  Synthetic oligonucleotide
gtactggcaacgaatgaggttacgtctccg

SEQ ID NO: 255138 - DNA, 30 bp, Artificial Sequence
  Synthetic oligonucleotide
ttacgtgacgtggcggaactctcgtctccg

SEQ ID NO: 255139 - DNA, 30 bp, Artificial Sequence
  Synthetic oligonucleotide
tatgcaaggaaaaacgcatagataagtccg

SEQ ID NO: 255140 - DNA, 30 bp, Artificial Sequence
  Synthetic oligonucleotide
aacatatagatgtttagcacgctaagtccg

SEQ ID NO: 255141 - DNA, 30 bp, Artificial Sequence
  Synthetic oligonucleotide
aagtagaagaacgcactaccagtcagtccg

SEQ ID NO: 255142 - DNA, 30 bp, Artificial Sequence
  Synthetic oligonucleotide
gcagatctgttccgataaggcaggagtccg

SEQ ID NO: 255143 - DNA, 30 bp, Artificial Sequence
  Synthetic oligonucleotide
aacagtttccggatgctggttaagcgtccg

SEQ ID NO: 255144 - DNA, 30 bp, Artificial Sequence
  Synthetic oligonucleotide
tcagattataatatccgcatcactcgtccg

SEQ ID NO: 255145 - DNA, 30 bp, Artificial Sequence
  Synthetic oligonucleotide
cacctgcctgggtcacttgtcaaaggtccg

SEQ ID NO: 255146 - DNA, 30 bp, Artificial Sequence
  Synthetic oligonucleotide
tatggtgcgatcctcggatttgggggtccg

SEQ ID NO: 255147 - DNA, 30 bp, Artificial Sequence
  Synthetic oligonucleotide
cggagattcgcaaacaccgcccatggtccg

SEQ ID NO: 255148 - DNA, 30 bp, Artificial Sequence
  Synthetic oligonucleotide
aagccggttagggtaataaggtatggtccg

SEQ ID NO: 255149 - DNA, 30 bp, Artificial Sequence
  Synthetic oligonucleotide
gcagatcttgggttagatatgtaatgtccg

SEQ ID NO: 255150 - DNA, 30 bp, Artificial Sequence
  Synthetic oligonucleotide
ccgtgcctatttgtacggtgactatgtccg

SEQ ID NO: 255151 - DNA, 30 bp, Artificial Sequence
  Synthetic oligonucleotide
ggttatctctcgtatcgggttctctgtccg

SEQ ID NO: 255152 - DNA, 30 bp, Artificial Sequence
  Synthetic oligonucleotide
gaagatgacacctaccagtgatagtgtccg

SEQ ID NO: 255153 - DNA, 30 bp, Artificial Sequence
  Synthetic oligonucleotide
ggccagtggctacctagagttctttgtccg

SEQ ID NO: 255154 - DNA, 30 bp, Artificial Sequence
  Synthetic oligonucleotide
ttcgtcggaggcaaccattggttttgtccg

SEQ ID NO: 255155 - DNA, 30 bp, Artificial Sequence
  Synthetic oligonucleotide
gcctgctttcaatttggggggggaattccg

SEQ ID NO: 255156 - DNA, 30 bp, Artificial Sequence
  Synthetic oligonucleotide
acatcttgagctaggggggaggtcattccg

SEQ ID NO: 255157 - DNA, 30 bp, Artificial Sequence
  Synthetic oligonucleotide
gcaggtctgcagacatataggtatattccg

SEQ ID NO: 255158 - DNA, 30 bp, Artificial Sequence
  Synthetic oligonucleotide
ttaaactacaggttggatggttatattccg

SEQ ID NO: 255159 - DNA, 30 bp, Artificial Sequence
  Synthetic oligonucleotide
ataagtatgtccgatgttaaatgtattccg

SEQ ID NO: 255160 - DNA, 30 bp, Artificial Sequence
  Synthetic oligonucleotide
ataggagggtactacagaggtgaacttccg

SEQ ID NO: 255161 - DNA, 30 bp, Artificial Sequence
  Synthetic oligonucleotide
aatcgaccacaaatcttttacaaccttccg

SEQ ID NO: 255162 - DNA, 30 bp, Artificial Sequence
  Synthetic oligonucleotide
cttttactgctttaacttccgtaccttccg

SEQ ID NO: 255163 - DNA, 30 bp, Artificial Sequence
  Synthetic oligonucleotide
gtctggatcgagcgacagtaccccgttccg

SEQ ID NO: 255164 - DNA, 30 bp, Artificial Sequence
  Synthetic oligonucleotide
acgatcactgcatactaccattctgttccg

SEQ ID NO: 255165 - DNA, 30 bp, Artificial Sequence
  Synthetic oligonucleotide
ctactcaactgagcgtggtagccttttccg

SEQ ID NO: 255166 - DNA, 30 bp, Artificial Sequence
  Synthetic oligonucleotide
caaagtggattggtggatcttgtaaaagcg

SEQ ID NO: 255167 - DNA, 30 bp, Artificial Sequence
  Synthetic oligonucleotide
ggtgttaccgttataggaaccgggaaagcg

SEQ ID NO: 255168 - DNA, 30 bp, Artificial Sequence
  Synthetic oligonucleotide
atactggggtgggggctcttaactaaagcg

SEQ ID NO: 255169 - DNA, 30 bp, Artificial Sequence
  Synthetic oligonucleotide
tcctagcgcgttggaatccggcctaaagcg

SEQ ID NO: 255170 - DNA, 30 bp, Artificial Sequence
  Synthetic oligonucleotide
tgagcttggtccagccagagctctaaagcg

SEQ ID NO: 255171 - DNA, 30 bp, Artificial Sequence
  Synthetic oligonucleotide
ggactgccaccctgcccagaatcacaagcg

SEQ ID NO: 255172 - DNA, 30 bp, Artificial Sequence
  Synthetic oligonucleotide
cagccaagggttctgcccagattccaagcg

SEQ ID NO: 255173 - DNA, 30 bp, Artificial Sequence
  Synthetic oligonucleotide
gaggtccttgtagaccgccaaggtcaagcg

SEQ ID NO: 255174 - DNA, 28 bp, Artificial Sequence
  Synthetic oligonucleotide
gcaagcttaactcaagaaagaagaagcg

SEQ ID NO: 255175 - DNA, 30 bp, Artificial Sequence
  Synthetic oligonucleotide
attacaatacaaaggcagctcgtagaagcg

SEQ ID NO: 255176 - DNA, 30 bp, Artificial Sequence
  Synthetic oligonucleotide
cccttactatatccggggcatcaataagcg

SEQ ID NO: 255177 - DNA, 30 bp, Artificial Sequence
  Synthetic oligonucleotide
tactatgttacaatcaatcctgtataagcg

SEQ ID NO: 255178 - DNA, 30 bp, Artificial Sequence
  Synthetic oligonucleotide
acaggactagagtcttgaaatttctaagcg

SEQ ID NO: 255179 - DNA, 30 bp, Artificial Sequence
  Synthetic oligonucleotide
agcctatttatgaacaacataccgtaagcg

SEQ ID NO: 255180 - DNA, 29 bp, Artificial Sequence
  Synthetic oligonucleotide
ttgacattcggtgtgcgaagctgtaagcg

SEQ ID NO: 255181 - DNA, 30 bp, Artificial Sequence
  Synthetic oligonucleotide
tcggttgcgattcatgtttgtgtgtaagcg

SEQ ID NO: 255182 - DNA, 30 bp, Artificial Sequence
  Synthetic oligonucleotide
ggggatctatggtcggttacactttaagcg

SEQ ID NO: 255183 - DNA, 30 bp, Artificial Sequence
  Synthetic oligonucleotide
agaaaaaatcgctagactggcgcaacagcg

SEQ ID NO: 255184 - DNA, 30 bp, Artificial Sequence
  Synthetic oligonucleotide
agcgacccttctcgtaaagcaagcacagcg

SEQ ID NO: 255185 - DNA, 30 bp, Artificial Sequence
  Synthetic oligonucleotide
gatatcgtacccctctatggaccgacagcg

SEQ ID NO: 255186 - DNA, 30 bp, Artificial Sequence
  Synthetic oligonucleotide
aacgtcttaaattagcgtgtggcaccagcg

SEQ ID NO: 255187 - DNA, 30 bp, Artificial Sequence
  Synthetic oligonucleotide
ctcagtgacaatactgctctaagcccagcg

SEQ ID NO: 255188 - DNA, 30 bp, Artificial Sequence
  Synthetic oligonucleotide
ggcggagtcaaaaacgggccctggccagcg

SEQ ID NO: 255189 - DNA, 30 bp, Artificial Sequence
  Synthetic oligonucleotide
ggaatgtttcagggtggcggtatgccagcg

SEQ ID NO: 255190 - DNA, 30 bp, Artificial Sequence
  Synthetic oligonucleotide
gcgggtactatgccgatagctagtgcagcg

SEQ ID NO: 255191 - DNA, 30 bp, Artificial Sequence
  Synthetic oligonucleotide
agggtacatccccacaatgctattgcagcg

SEQ ID NO: 255192 - DNA, 30 bp, Artificial Sequence
  Synthetic oligonucleotide
ccgcccgtgttgccacgaatgcgatcagcg

SEQ ID NO: 255193 - DNA, 30 bp, Artificial Sequence
  Synthetic oligonucleotide
agatggataagcttcaccgtgtattcagcg

SEQ ID NO: 255194 - DNA, 30 bp, Artificial Sequence
  Synthetic oligonucleotide
cggaacctccatagttataatccttcagcg

SEQ ID NO: 255195 - DNA, 30 bp, Artificial Sequence
  Synthetic oligonucleotide
atgagtatcagctatgcgtctaccagagcg

SEQ ID NO: 255196 - DNA, 30 bp, Artificial Sequence
  Synthetic oligonucleotide
atgtccatattaaccgctcggggcagagcg

SEQ ID NO: 255197 - DNA, 30 bp, Artificial Sequence
  Synthetic oligonucleotide
cactaaggtaacttgctgcagttcagagcg

SEQ ID NO: 255198 - DNA, 30 bp, Artificial Sequence
  Synthetic oligonucleotide
ataggccggttaagaatatccactagagcg

SEQ ID NO: 255199 - DNA, 30 bp, Artificial Sequence
  Synthetic oligonucleotide
gttagaacgcactcgaagtaggtccgagcg

SEQ ID NO: 255200 - DNA, 30 bp, Artificial Sequence
  Synthetic oligonucleotide
ccaggcagctcctcccgaaaaccgcgagcg

SEQ ID NO: 255201 - DNA, 30 bp, Artificial Sequence
  Synthetic oligonucleotide
aaattaccttcacgagctcgaactcgagcg

SEQ ID NO: 255202 - DNA, 30 bp, Artificial Sequence
  Synthetic oligonucleotide
caagttatgagaccgagatcaagtcgagcg

SEQ ID NO: 255203 - DNA, 30 bp, Artificial Sequence
  Synthetic oligonucleotide
cgtactgttctacgatcgcgccgaggagcg

SEQ ID NO: 255204 - DNA, 30 bp, Artificial Sequence
  Synthetic oligonucleotide
attgatcgggcccttaggcatcgaggagcg

SEQ ID NO: 255205 - DNA, 30 bp, Artificial Sequence
  Synthetic oligonucleotide
acgccggtaacggcctacgtacacggagcg

SEQ ID NO: 255206 - DNA, 30 bp, Artificial Sequence
  Synthetic oligonucleotide
ctcaatatacaataatccgggaccggagcg

SEQ ID NO: 255207 - DNA, 30 bp, Artificial Sequence
  Synthetic oligonucleotide
gacgtaggtggcctaccgataatcggagcg

SEQ ID NO: 255208 - DNA, 30 bp, Artificial Sequence
  Synthetic oligonucleotide
taacatctggctttaaaagacaagggagcg

SEQ ID NO: 255209 - DNA, 30 bp, Artificial Sequence
  Synthetic oligonucleotide
gataggttcacggggtcttggatgggagcg

SEQ ID NO: 255210 - DNA, 30 bp, Artificial Sequence
  Synthetic oligonucleotide
agttagaggcaatgtctcaccctgggagcg

SEQ ID NO: 255211 - DNA, 30 bp, Artificial Sequence
  Synthetic oligonucleotide
aaaagacagccaagactataggtgggagcg

SEQ ID NO: 255212 - DNA, 30 bp, Artificial Sequence
  Synthetic oligonucleotide
aacttcaacttcgattccctaaatggagcg

SEQ ID NO: 255213 - DNA, 30 bp, Artificial Sequence
  Synthetic oligonucleotide
ggcggttttatcggtatgttttatggagcg

SEQ ID NO: 255214 - DNA, 30 bp, Artificial Sequence
  Synthetic oligonucleotide
tggtggcgcgcgtacaaagcgcctggagcg

SEQ ID NO: 255215 - DNA, 30 bp, Artificial Sequence
  Synthetic oligonucleotide
cgggctgagatgggtaatgtggctggagcg

SEQ ID NO: 255216 - DNA, 30 bp, Artificial Sequence
  Synthetic oligonucleotide
attgctcaaaacaggacttggggtggagcg

SEQ ID NO: 255217 - DNA, 30 bp, Artificial Sequence
  Synthetic oligonucleotide
taaggctgctggaggtagtataggtgagcg

SEQ ID NO: 255218 - DNA, 30 bp, Artificial Sequence
  Synthetic oligonucleotide
gtgataagttaatcgttcatcatttgagcg

SEQ ID NO: 255219 - DNA, 30 bp, Artificial Sequence
  Synthetic oligonucleotide
ggtcactatgcggatctaaaactttgagcg

SEQ ID NO: 255220 - DNA, 30 bp, Artificial Sequence
  Synthetic oligonucleotide
gtgtgggaggtcaagcattacctaatagcg

SEQ ID NO: 255221 - DNA, 30 bp, Artificial Sequence
  Synthetic oligonucleotide
cggatgtatgcaaccgcggagttaatagcg

SEQ ID NO: 255222 - DNA, 30 bp, Artificial Sequence
  Synthetic oligonucleotide
tatgatgattcggcgacgtcgatgatagcg

SEQ ID NO: 255223 - DNA, 30 bp, Artificial Sequence
  Synthetic oligonucleotide
atccttacaaaatcaatcattttgatagcg

SEQ ID NO: 255224 - DNA, 30 bp, Artificial Sequence
  Synthetic oligonucleotide
cctactatagtagaaacgtagggactagcg

SEQ ID NO: 255225 - DNA, 30 bp, Artificial Sequence
  Synthetic oligonucleotide
agttaatgctacgtagaaatccagctagcg

SEQ ID NO: 255226 - DNA, 30 bp, Artificial Sequence
  Synthetic oligonucleotide
gggaacacgtgtagtgttacattgctagcg

SEQ ID NO: 255227 - DNA, 30 bp, Artificial Sequence
  Synthetic oligonucleotide
cggccatcacgctgacccagtcatctagcg

SEQ ID NO: 255228 - DNA, 30 bp, Artificial Sequence
  Synthetic oligonucleotide
cagttatggcgtcacgaagcgtatctagcg

SEQ ID NO: 255229 - DNA, 30 bp, Artificial Sequence
  Synthetic oligonucleotide
caacttccatgccagttggtatcggtagcg

SEQ ID NO: 255230 - DNA, 30 bp, Artificial Sequence
  Synthetic oligonucleotide
tgggccctagtataaggtattagattagcg

SEQ ID NO: 255231 - DNA, 30 bp, Artificial Sequence
  Synthetic oligonucleotide
tgtaagtcaatttctatttgctgattagcg

SEQ ID NO: 255232 - DNA, 30 bp, Artificial Sequence
  Synthetic oligonucleotide
gatccgctcagttggctcgtacacttagcg

SEQ ID NO: 255233 - DNA, 30 bp, Artificial Sequence
  Synthetic oligonucleotide
gctccgtagcgtgatgaggattagttagcg

SEQ ID NO: 255234 - DNA, 30 bp, Artificial Sequence
  Synthetic oligonucleotide
gcatacgggtcgaacgattaaaggttagcg

SEQ ID NO: 255235 - DNA, 30 bp, Artificial Sequence
  Synthetic oligonucleotide
tacgaaggctcgcaaaacccgcaaaacgcg

SEQ ID NO: 255236 - DNA, 30 bp, Artificial Sequence
  Synthetic oligonucleotide
tattacgggttgacaattgatctcaacgcg

SEQ ID NO: 255237 - DNA, 30 bp, Artificial Sequence
  Synthetic oligonucleotide
taagagatctatgccgttcctgagaacgcg

SEQ ID NO: 255238 - DNA, 30 bp, Artificial Sequence
  Synthetic oligonucleotide
gcacgaacgcaaatcagggttccgaacgcg

SEQ ID NO: 255239 - DNA, 30 bp, Artificial Sequence
  Synthetic oligonucleotide
tttcggagttggtcacgttagcataacgcg

SEQ ID NO: 255240 - DNA, 30 bp, Artificial Sequence
  Synthetic oligonucleotide
ttggcgtcagaggggtatgaggataacgcg

SEQ ID NO: 255241 - DNA, 30 bp, Artificial Sequence
  Synthetic oligonucleotide
agaaaaagtggaggactgatgcttaacgcg

SEQ ID NO: 255242 - DNA, 30 bp, Artificial Sequence
  Synthetic oligonucleotide
tctcacatggctcgtaaggcaatacacgcg

SEQ ID NO: 255243 - DNA, 30 bp, Artificial Sequence
  Synthetic oligonucleotide
ccagaattagtcctgtaaggaatacacgcg

SEQ ID NO: 255244 - DNA, 30 bp, Artificial Sequence
  Synthetic oligonucleotide
tgacatattggttgctatctaatgcacgcg

SEQ ID NO: 255245 - DNA, 30 bp, Artificial Sequence
  Synthetic oligonucleotide
atgacaatctgaaatatgcttgctcacgcg

SEQ ID NO: 255246 - DNA, 30 bp, Artificial Sequence
  Synthetic oligonucleotide
catatctctggcaagggtgtcttagacgcg

SEQ ID NO: 255247 - DNA, 30 bp, Artificial Sequence
  Synthetic oligonucleotide
tagactcgtctatcgataaaggacgacgcg

SEQ ID NO: 255248 - DNA, 30 bp, Artificial Sequence
  Synthetic oligonucleotide
tacagtgcgggtaatccgacctacgacgcg

SEQ ID NO: 255249 - DNA, 30 bp, Artificial Sequence
  Synthetic oligonucleotide
ctcgtgatcacactgacctcgtgcgacgcg

SEQ ID NO: 255250 - DNA, 30 bp, Artificial Sequence
  Synthetic oligonucleotide
aaagcgccaatatttttacgtcaggacgcg

SEQ ID NO: 255251 - DNA, 30 bp, Artificial Sequence
  Synthetic oligonucleotide
taccaaggacccgtgctataagaggacgcg

SEQ ID NO: 255252 - DNA, 30 bp, Artificial Sequence
  Synthetic oligonucleotide
tgcgaacaataattgggatttgtggacgcg

SEQ ID NO: 255253 - DNA, 30 bp, Artificial Sequence
  Synthetic oligonucleotide
agggcataggcagcacttttgagatacgcg

SEQ ID NO: 255254 - DNA, 30 bp, Artificial Sequence
  Synthetic oligonucleotide
taaggggccctgttgatgcggacctacgcg

SEQ ID NO: 255255 - DNA, 30 bp, Artificial Sequence
  Synthetic oligonucleotide
cataggtctaaaaaacacatgtgctacgcg

SEQ ID NO: 255256 - DNA, 30 bp, Artificial Sequence
  Synthetic oligonucleotide
acatgtgactcttcaacgctaatctacgcg

SEQ ID NO: 255257 - DNA, 30 bp, Artificial Sequence
  Synthetic oligonucleotide
gtcagtagggtattgagcttagagtacgcg

SEQ ID NO: 255258 - DNA, 30 bp, Artificial Sequence
  Synthetic oligonucleotide
ttcgcactctgtgttgaatgttaaaccgcg

SEQ ID NO: 255259 - DNA, 30 bp, Artificial Sequence
  Synthetic oligonucleotide
tcataaaccccatcagcatgcattaccgcg

SEQ ID NO: 255260 - DNA, 30 bp, Artificial Sequence
  Synthetic oligonucleotide
atcttgtgtacgaacttggcttttaccgcg

SEQ ID NO: 255261 - DNA, 30 bp, Artificial Sequence
  Synthetic oligonucleotide
ctaaattccgattgagcgcactgacccgcg

SEQ ID NO: 255262 - DNA, 30 bp, Artificial Sequence
  Synthetic oligonucleotide
agctatgaacaccgttgggtgaatcccgcg

SEQ ID NO: 255263 - DNA, 30 bp, Artificial Sequence
  Synthetic oligonucleotide
agtcctccagggacttgttgaattcccgcg

SEQ ID NO: 255264 - DNA, 30 bp, Artificial Sequence
  Synthetic oligonucleotide
gtaaaccctaagccgcatagagtcgccgcg

SEQ ID NO: 255265 - DNA, 30 bp, Artificial Sequence
  Synthetic oligonucleotide
actggtgtgtgtgttttcgacaaggccgcg

SEQ ID NO: 255266 - DNA, 30 bp, Artificial Sequence
  Synthetic oligonucleotide
tcaggaaccggggaagtgcttcaatccgcg

SEQ ID NO: 255267 - DNA, 30 bp, Artificial Sequence
  Synthetic oligonucleotide
agaggcaatcaactaacggtcttatccgcg

SEQ ID NO: 255268 - DNA, 30 bp, Artificial Sequence
  Synthetic oligonucleotide
aactgacgcttcggtgacttcgactccgcg

SEQ ID NO: 255269 - DNA, 30 bp, Artificial Sequence
  Synthetic oligonucleotide
gcaaattcgaccataactcgcatgtccgcg

SEQ ID NO: 255270 - DNA, 30 bp, Artificial Sequence
  Synthetic oligonucleotide
atgcatgattgctcgggttgacattccgcg

SEQ ID NO: 255271 - DNA, 30 bp, Artificial Sequence
  Synthetic oligonucleotide
tgtacacgggcatattaagcccacagcgcg

SEQ ID NO: 255272 - DNA, 30 bp, Artificial Sequence
  Synthetic oligonucleotide
tagtcggcgcaggttcaaggtacgagcgcg

SEQ ID NO: 255273 - DNA, 30 bp, Artificial Sequence
  Synthetic oligonucleotide
tgcctgcttggtcccggggggcggagcgcg

SEQ ID NO: 255274 - DNA, 30 bp, Artificial Sequence
  Synthetic oligonucleotide
cggaatacaatcagctacgaccatagcgcg

SEQ ID NO: 255275 - DNA, 30 bp, Artificial Sequence
  Synthetic oligonucleotide
ggtttatccaccggccggccaaaacgcgcg

SEQ ID NO: 255276 - DNA, 30 bp, Artificial Sequence
  Synthetic oligonucleotide
tgactacctcttgagcgccaaagacgcgcg

SEQ ID NO: 255277 - DNA, 30 bp, Artificial Sequence
  Synthetic oligonucleotide
cgtttcccgctattgggacaggagcgcgcg

SEQ ID NO: 255278 - DNA, 30 bp, Artificial Sequence
  Synthetic oligonucleotide
gggcagcccgctcagggcaataatcgcgcg

SEQ ID NO: 255279 - DNA, 30 bp, Artificial Sequence
  Synthetic oligonucleotide
ttaaataccaagaagtccacagctcgcgcg

SEQ ID NO: 255280 - DNA, 30 bp, Artificial Sequence
  Synthetic oligonucleotide
actaagaaaccatcgcccagcataggcgcg

SEQ ID NO: 255281 - DNA, 30 bp, Artificial Sequence
  Synthetic oligonucleotide
ggagaccgagcttaccttctacgcggcgcg

SEQ ID NO: 255282 - DNA, 30 bp, Artificial Sequence
  Synthetic oligonucleotide
gcggtcggcttaagcctagccatgggcgcg

SEQ ID NO: 255283 - DNA, 30 bp, Artificial Sequence
  Synthetic oligonucleotide
aaaagggtaagggaccgagctatgggcgcg

SEQ ID NO: 255284 - DNA, 30 bp, Artificial Sequence
  Synthetic oligonucleotide
gcgtcccgtgcgcgcagatcacgatgcgcg

SEQ ID NO: 255285 - DNA, 30 bp, Artificial Sequence
  Synthetic oligonucleotide
tcgtaataagagacggtattaatgtgcgcg

SEQ ID NO: 255286 - DNA, 30 bp, Artificial Sequence
  Synthetic oligonucleotide
tgttgctactatgaaacagggaattgcgcg

SEQ ID NO: 255287 - DNA, 30 bp, Artificial Sequence
  Synthetic oligonucleotide
gattacgttaaggcttccgtagaaatcgcg

SEQ ID NO: 255288 - DNA, 30 bp, Artificial Sequence
  Synthetic oligonucleotide
cgaatcacgtgaagggaagggccaatcgcg

SEQ ID NO: 255289 - DNA, 30 bp, Artificial Sequence
  Synthetic oligonucleotide
ttggacgcagtaaaacatagccgaatcgcg

SEQ ID NO: 255290 - DNA, 30 bp, Artificial Sequence
  Synthetic oligonucleotide
ctggcctcctggggcccgtgaataatcgcg

SEQ ID NO: 255291 - DNA, 30 bp, Artificial Sequence
  Synthetic oligonucleotide
ggagtaggccgccagtactggttaatcgcg

SEQ ID NO: 255292 - DNA, 30 bp, Artificial Sequence
  Synthetic oligonucleotide
ggaagtcttgatgcaaactgacacatcgcg

SEQ ID NO: 255293 - DNA, 30 bp, Artificial Sequence
  Synthetic oligonucleotide
agcgccctgcctctttacataaagatcgcg

SEQ ID NO: 255294 - DNA, 30 bp, Artificial Sequence
  Synthetic oligonucleotide
atgctgataggagttgctaaccctatcgcg

SEQ ID NO: 255295 - DNA, 30 bp, Artificial Sequence
  Synthetic oligonucleotide
ccaaagaggagtgtaagagttatcctcgcg

SEQ ID NO: 255296 - DNA, 30 bp, Artificial Sequence
  Synthetic oligonucleotide
tttgctctatggaatatgtcagcgctcgcg

SEQ ID NO: 255297 - DNA, 30 bp, Artificial Sequence
  Synthetic oligonucleotide
caggttcgccgtaagatggtttggctcgcg

SEQ ID NO: 255298 - DNA, 30 bp, Artificial Sequence
  Synthetic oligonucleotide
gctgcctgatccggcgagcctgatctcgcg

SEQ ID NO: 255299 - DNA, 30 bp, Artificial Sequence
  Synthetic oligonucleotide
acctccgagaagcgcgcaccggtagtcgcg

SEQ ID NO: 255300 - DNA, 30 bp, Artificial Sequence
  Synthetic oligonucleotide
gatccgacctaaccttgcatgggcgtcgcg

SEQ ID NO: 255301 - DNA, 30 bp, Artificial Sequence
  Synthetic oligonucleotide
gccgtggtaccctcccgggaccaggtcgcg

SEQ ID NO: 255302 - DNA, 30 bp, Artificial Sequence
  Synthetic oligonucleotide
ttaacagcaaaatggaccagcagggtcgcg

SEQ ID NO: 255303 - DNA, 30 bp, Artificial Sequence
  Synthetic oligonucleotide
gtcacacaaaaaccgatgtcttgggtcgcg

SEQ ID NO: 255304 - DNA, 30 bp, Artificial Sequence
  Synthetic oligonucleotide
actagaatacaaatttccaatcaattcgcg

SEQ ID NO: 255305 - DNA, 30 bp, Artificial Sequence
  Synthetic oligonucleotide
gaggactagcaatgagctattagcttcgcg

SEQ ID NO: 255306 - DNA, 30 bp, Artificial Sequence
  Synthetic oligonucleotide
ccgggtcctgtgaacgacttggggttcgcg

SEQ ID NO: 255307 - DNA, 30 bp, Artificial Sequence
  Synthetic oligonucleotide
tctggtggcttgaggtaccagttgttcgcg

SEQ ID NO: 255308 - DNA, 30 bp, Artificial Sequence
  Synthetic oligonucleotide
tctggacacctttcacaagagccaaaggcg

SEQ ID NO: 255309 - DNA, 30 bp, Artificial Sequence
  Synthetic oligonucleotide
tatagccggtgtggcgtgtcaataaaggcg

SEQ ID NO: 255310 - DNA, 30 bp, Artificial Sequence
  Synthetic oligonucleotide
acggtttggactagtgctggtaacaaggcg

SEQ ID NO: 255311 - DNA, 30 bp, Artificial Sequence
  Synthetic oligonucleotide
gctgagctctctaacgcggaggccaaggcg

SEQ ID NO: 255312 - DNA, 30 bp, Artificial Sequence
  Synthetic oligonucleotide
agaacatcgtttgcatgaactattaaggcg

SEQ ID NO: 255313 - DNA, 30 bp, Artificial Sequence
  Synthetic oligonucleotide
agttatacacgagcaaataatgagcaggcg

SEQ ID NO: 255314 - DNA, 30 bp, Artificial Sequence
  Synthetic oligonucleotide
agtggcgtgctacatctagaaacggaggcg

SEQ ID NO: 255315 - DNA, 30 bp, Artificial Sequence
  Synthetic oligonucleotide
cgaatgggtttttcagttcatacataggcg

SEQ ID NO: 255316 - DNA, 30 bp, Artificial Sequence
  Synthetic oligonucleotide
tgtagctcttccctccaggactcataggcg

SEQ ID NO: 255317 - DNA, 30 bp, Artificial Sequence
  Synthetic oligonucleotide
ccgtgaaagtctactgttctccgataggcg

SEQ ID NO: 255318 - DNA, 30 bp, Artificial Sequence
  Synthetic oligonucleotide
aagcttccggtgatgaagtaagagtaggcg

SEQ ID NO: 255319 - DNA, 30 bp, Artificial Sequence
  Synthetic oligonucleotide
gatacatgtatagtggttcatttaacggcg

SEQ ID NO: 255320 - DNA, 30 bp, Artificial Sequence
  Synthetic oligonucleotide
aaggcctgcgcataagcatatgacacggcg

SEQ ID NO: 255321 - DNA, 30 bp, Artificial Sequence
  Synthetic oligonucleotide
gatatacgaaaactagcctgctctacggcg

SEQ ID NO: 255322 - DNA, 30 bp, Artificial Sequence
  Synthetic oligonucleotide
agtgaattgatactcggaggtagaccggcg

SEQ ID NO: 255323 - DNA, 30 bp, Artificial Sequence
  Synthetic oligonucleotide
aagcaagaatgactataagtcattccggcg

SEQ ID NO: 255324 - DNA, 30 bp, Artificial Sequence
  Synthetic oligonucleotide
tttagagggtctcaaactctatgagcggcg

SEQ ID NO: 255325 - DNA, 30 bp, Artificial Sequence
  Synthetic oligonucleotide
acgacagcgcagggtgcggcaacggcggcg

SEQ ID NO: 255326 - DNA, 30 bp, Artificial Sequence
  Synthetic oligonucleotide
gtctgaatgggacggcgagggggtgcggcg

SEQ ID NO: 255327 - DNA, 30 bp, Artificial Sequence
  Synthetic oligonucleotide
tggcttttgtcttgagctcgggggtcggcg

SEQ ID NO: 255328 - DNA, 30 bp, Artificial Sequence
  Synthetic oligonucleotide
tcccatttgggatagaggtctaaaagggcg

SEQ ID NO: 255329 - DNA, 30 bp, Artificial Sequence
  Synthetic oligonucleotide
ggaagatttacgcaacgtaagttaagggcg

SEQ ID NO: 255330 - DNA, 30 bp, Artificial Sequence
  Synthetic oligonucleotide
tgtttgtactcggcgtggtaaatcagggcg

SEQ ID NO: 255331 - DNA, 30 bp, Artificial Sequence
  Synthetic oligonucleotide
ccaggcatgccaccatttacattcagggcg

SEQ ID NO: 255332 - DNA, 30 bp, Artificial Sequence
  Synthetic oligonucleotide
ggatctttcagaagagttgtcatgagggcg

SEQ ID NO: 255333 - DNA, 30 bp, Artificial Sequence
  Synthetic oligonucleotide
cccgataaatgcccgaacgtacctagggcg

SEQ ID NO: 255334 - DNA, 30 bp, Artificial Sequence
  Synthetic oligonucleotide
caacctaccgtatgccggtcctctagggcg

SEQ ID NO: 255335 - DNA, 30 bp, Artificial Sequence
  Synthetic oligonucleotide
attgaatgttttgggacataagttagggcg

SEQ ID NO: 255336 - DNA, 30 bp, Artificial Sequence
  Synthetic oligonucleotide
tggctagtcgtctggcaacataaacgggcg

SEQ ID NO: 255337 - DNA, 30 bp, Artificial Sequence
  Synthetic oligonucleotide
gaaactaagctagcgcgtatttcacgggcg

SEQ ID NO: 255338 - DNA, 30 bp, Artificial Sequence
  Synthetic oligonucleotide
tacatcggacacacagcaagaggacgggcg

SEQ ID NO: 255339 - DNA, 30 bp, Artificial Sequence
  Synthetic oligonucleotide
gttcagtgttgtaccaatggcggccgggcg

SEQ ID NO: 255340 - DNA, 30 bp, Artificial Sequence
  Synthetic oligonucleotide
atcccggctgccgctataagtgagcgggcg

SEQ ID NO: 255341 - DNA, 30 bp, Artificial Sequence
  Synthetic oligonucleotide
atatatactagggcgacatacccgcgggcg

SEQ ID NO: 255342 - DNA, 30 bp, Artificial Sequence
  Synthetic oligonucleotide
tataccacgaaaaggcgctctctgcgggcg

SEQ ID NO: 255343 - DNA, 30 bp, Artificial Sequence
  Synthetic oligonucleotide
cttaaaagcttcgtgtggtacggaggggcg

SEQ ID NO: 255344 - DNA, 30 bp, Artificial Sequence
  Synthetic oligonucleotide
cgttactacgtgtgataaaactacggggcg

SEQ ID NO: 255345 - DNA, 30 bp, Artificial Sequence
  Synthetic oligonucleotide
agcatataagatacgagttgttccggggcg

SEQ ID NO: 255346 - DNA, 30 bp, Artificial Sequence
  Synthetic oligonucleotide
agggcgcgcgcgggtcgtagtgatggggcg

SEQ ID NO: 255347 - DNA, 30 bp, Artificial Sequence
  Synthetic oligonucleotide
gagcgatgctgtatagtagatgttggggcg

SEQ ID NO: 255348 - DNA, 30 bp, Artificial Sequence
  Synthetic oligonucleotide
tattcgtgtgagttgctttgcgtatgggcg

SEQ ID NO: 255349 - DNA, 30 bp, Artificial Sequence
  Synthetic oligonucleotide
ggactgtaagctggaattgcctactgggcg

SEQ ID NO: 255350 - DNA, 30 bp, Artificial Sequence
  Synthetic oligonucleotide
ctacaacgcatttggcttaccagctgggcg

SEQ ID NO: 255351 - DNA, 30 bp, Artificial Sequence
  Synthetic oligonucleotide
ggcttatgcaagtgcaaatgcaccatggcg

SEQ ID NO: 255352 - DNA, 30 bp, Artificial Sequence
  Synthetic oligonucleotide
ctccgcctagcgagcaggactgcactggcg

SEQ ID NO: 255353 - DNA, 30 bp, Artificial Sequence
  Synthetic oligonucleotide
cccatgtaagttcttcgtatccgactggcg

SEQ ID NO: 255354 - DNA, 30 bp, Artificial Sequence
  Synthetic oligonucleotide
cggaagttccgaactcgctcgttactggcg

SEQ ID NO: 255355 - DNA, 30 bp, Artificial Sequence
  Synthetic oligonucleotide
tgtccacggccaatttctctaatagtggcg

SEQ ID NO: 255356 - DNA, 35 bp, Artificial Sequence
  Synthetic oligonucleotide
gtatcgcggcgggggtcgggtgcgcgcgggtggcg

SEQ ID NO: 255357 - DNA, 30 bp, Artificial Sequence
  Synthetic oligonucleotide
gctcgtctacgtcttacccgttgggtggcg

SEQ ID NO: 255358 - DNA, 30 bp, Artificial Sequence
  Synthetic oligonucleotide
gagttaacatgttgtgcggtccatgtggcg

SEQ ID NO: 255359 - DNA, 26 bp, Artificial Sequence
  Synthetic oligonucleotide
gtcagatgcaaagtaacacattggcg

SEQ ID NO: 255360 - DNA, 30 bp, Artificial Sequence
  Synthetic oligonucleotide
cacagctggtttcgcccatcgagattggcg

SEQ ID NO: 255361 - DNA, 30 bp, Artificial Sequence
  Synthetic oligonucleotide
tacagggcacttgtttccgtgaaaaatgcg

SEQ ID NO: 255362 - DNA, 30 bp, Artificial Sequence
  Synthetic oligonucleotide
gtgatatccactcagagccctaaaaatgcg

SEQ ID NO: 255363 - DNA, 30 bp, Artificial Sequence
  Synthetic oligonucleotide
aatcgaacagcgtttgaacgggaaaatgcg

SEQ ID NO: 255364 - DNA, 30 bp, Artificial Sequence
  Synthetic oligonucleotide
ggtgtgagttaggccagtaagttaaatgcg

SEQ ID NO: 255365 - DNA, 30 bp, Artificial Sequence
  Synthetic oligonucleotide
ggaatgatattgagtaccgagcacaatgcg

SEQ ID NO: 255366 - DNA, 30 bp, Artificial Sequence
  Synthetic oligonucleotide
agatctgcttcgtttactaccggcaatgcg

SEQ ID NO: 255367 - DNA, 30 bp, Artificial Sequence
  Synthetic oligonucleotide
atacataagacgcgtagtcgcctcaatgcg

SEQ ID NO: 255368 - DNA, 30 bp, Artificial Sequence
  Synthetic oligonucleotide
tcaattctgttgtgtagaaaggtcaatgcg

SEQ ID NO: 255369 - DNA, 30 bp, Artificial Sequence
  Synthetic oligonucleotide
gtaggaggatgatctatcatatgtaatgcg

SEQ ID NO: 255370 - DNA, 30 bp, Artificial Sequence
  Synthetic oligonucleotide
gtcaccattggtgatacacctaaacatgcg

SEQ ID NO: 255371 - DNA, 30 bp, Artificial Sequence
  Synthetic oligonucleotide
tcaattgggacccttcacgaaaaccatgcg

SEQ ID NO: 255372 - DNA, 30 bp, Artificial Sequence
  Synthetic oligonucleotide
ggaaagctctcaccatacgattaccatgcg

SEQ ID NO: 255373 - DNA, 30 bp, Artificial Sequence
  Synthetic oligonucleotide
gaaaaggacagagactctcacacccatgcg

SEQ ID NO: 255374 - DNA, 30 bp, Artificial Sequence
  Synthetic oligonucleotide
ccaggctagggtgggaaccaaatgcatgcg

SEQ ID NO: 255375 - DNA, 30 bp, Artificial Sequence
  Synthetic oligonucleotide
tcatggcctgcatttcgaggctgagatgcg

SEQ ID NO: 255376 - DNA, 30 bp, Artificial Sequence
  Synthetic oligonucleotide
tgtcatcgggtgctccaggtagttgatgcg

SEQ ID NO: 255377 - DNA, 30 bp, Artificial Sequence
  Synthetic oligonucleotide
cgggcacagctgccataagatgttgatgcg

SEQ ID NO: 255378 - DNA, 30 bp, Artificial Sequence
  Synthetic oligonucleotide
ttccaaataagaggaatgccgctctatgcg

SEQ ID NO: 255379 - DNA, 30 bp, Artificial Sequence
  Synthetic oligonucleotide
gttagttggggattggcatgtcatactgcg

SEQ ID NO: 255380 - DNA, 30 bp, Artificial Sequence
  Synthetic oligonucleotide
gattagaacgaggatagttcggatactgcg

SEQ ID NO: 255381 - DNA, 30 bp, Artificial Sequence
  Synthetic oligonucleotide
ggcgtgtattgccggtttcagcctactgcg

SEQ ID NO: 255382 - DNA, 30 bp, Artificial Sequence
  Synthetic oligonucleotide
ttcgtgatgtatacgatcctaagagctgcg

SEQ ID NO: 255383 - DNA, 30 bp, Artificial Sequence
  Synthetic oligonucleotide
acgtcaggttacaccgggttgagcgctgcg

SEQ ID NO: 255384 - DNA, 30 bp, Artificial Sequence
  Synthetic oligonucleotide
agtttaagcagtgtatctatgccggctgcg

SEQ ID NO: 255385 - DNA, 30 bp, Artificial Sequence
  Synthetic oligonucleotide
gggcaacctatgtgcttcaattgtgctgcg

SEQ ID NO: 255386 - DNA, 30 bp, Artificial Sequence
  Synthetic oligonucleotide
attagatttccggcggacacagaatctgcg

SEQ ID NO: 255387 - DNA, 31 bp, Artificial Sequence
  Synthetic oligonucleotide
tcccaaaaggaatagcttatcgtcatctgcg

SEQ ID NO: 255388 - DNA, 30 bp, Artificial Sequence
  Synthetic oligonucleotide
gtaacaatgggtgtcggaacgaggtctgcg

SEQ ID NO: 255389 - DNA, 30 bp, Artificial Sequence
  Synthetic oligonucleotide
cacgctaacccttgctaggttcaaagtgcg

SEQ ID NO: 255390 - DNA, 30 bp, Artificial Sequence
  Synthetic oligonucleotide
ggatatcctttccaaggatattgaagtgcg

SEQ ID NO: 255391 - DNA, 30 bp, Artificial Sequence
  Synthetic oligonucleotide
aatgcagctctacaaacgaaccgcagtgcg

SEQ ID NO: 255392 - DNA, 30 bp, Artificial Sequence
  Synthetic oligonucleotide
gaaacagaggtgggcttcaatcgcagtgcg

SEQ ID NO: 255393 - DNA, 30 bp, Artificial Sequence
  Synthetic oligonucleotide
tggcctcttaacatgagcaggtcgagtgcg

SEQ ID NO: 255394 - DNA, 30 bp, Artificial Sequence
  Synthetic oligonucleotide
tagcaaaggaacttctttaaacttagtgcg

SEQ ID NO: 255395 - DNA, 30 bp, Artificial Sequence
  Synthetic oligonucleotide
cgtttttatccttccgagaaggtgcgtgcg

SEQ ID NO: 255396 - DNA, 30 bp, Artificial Sequence
  Synthetic oligonucleotide
gtgacaattgattccattgaactaggtgcg

SEQ ID NO: 255397 - DNA, 30 bp, Artificial Sequence
  Synthetic oligonucleotide
gtctatgagtgtaaatgtccaggcggtgcg

SEQ ID NO: 255398 - DNA, 30 bp, Artificial Sequence
  Synthetic oligonucleotide
attatagtctgcgctgtgacccatggtgcg

SEQ ID NO: 255399 - DNA, 30 bp, Artificial Sequence
  Synthetic oligonucleotide
ctatagctcttaacaagaccagctggtgcg

SEQ ID NO: 255400 - DNA, 30 bp, Artificial Sequence
  Synthetic oligonucleotide
caggtaaaaatagtgctttcaacatgtgcg

SEQ ID NO: 255401 - DNA, 30 bp, Artificial Sequence
  Synthetic oligonucleotide
ccggaccaacaattaccggaacgctgtgcg

SEQ ID NO: 255402 - DNA, 30 bp, Artificial Sequence
  Synthetic oligonucleotide
aaacaagaggttgtccaagttgcttgtgcg

SEQ ID NO: 255403 - DNA, 30 bp, Artificial Sequence
  Synthetic oligonucleotide
tgttcttaaggactggagccaataattgcg

SEQ ID NO: 255404 - DNA, 30 bp, Artificial Sequence
  Synthetic oligonucleotide
ttatgctcaccaggtataataagcattgcg

SEQ ID NO: 255405 - DNA, 30 bp, Artificial Sequence
  Synthetic oligonucleotide
gtatcccggcttcaaacaacggaacttgcg

SEQ ID NO: 255406 - DNA, 32 bp, Artificial Sequence
  Synthetic oligonucleotide
tttgttgtgtaggttcactcctctaccttgcg

SEQ ID NO: 255407 - DNA, 30 bp, Artificial Sequence
  Synthetic oligonucleotide
ggtgcggtcaatatagtgcatgctcttgcg

SEQ ID NO: 255408 - DNA, 30 bp, Artificial Sequence
  Synthetic oligonucleotide
cgcagatacccgactagactgagcgttgcg

SEQ ID NO: 255409 - DNA, 30 bp, Artificial Sequence
  Synthetic oligonucleotide
ccaaccttggtagtaagccgtgcggttgcg

SEQ ID NO: 255410 - DNA, 30 bp, Artificial Sequence
  Synthetic oligonucleotide
agaacatcacagctggcaactattgttgcg

SEQ ID NO: 255411 - DNA, 30 bp, Artificial Sequence
  Synthetic oligonucleotide
agccagacatatagagagagtcaatttgcg

SEQ ID NO: 255412 - DNA, 30 bp, Artificial Sequence
  Synthetic oligonucleotide
attaaaactgaacctttacgatcctttgcg

SEQ ID NO: 255413 - DNA, 30 bp, Artificial Sequence
  Synthetic oligonucleotide
tggtgggataagcgggtagctgattttgcg

SEQ ID NO: 255414 - DNA, 30 bp, Artificial Sequence
  Synthetic oligonucleotide
acctttcaagggatttgcaccacaaaatcg

SEQ ID NO: 255415 - DNA, 30 bp, Artificial Sequence
  Synthetic oligonucleotide
caagccagaaactgttttgtcagcaaatcg

SEQ ID NO: 255416 - DNA, 30 bp, Artificial Sequence
  Synthetic oligonucleotide
ctctagagccctatggtgcggttcaaatcg

SEQ ID NO: 255417 - DNA, 30 bp, Artificial Sequence
  Synthetic oligonucleotide
tgtggtcgttaccgtatcatcatgaaatcg

SEQ ID NO: 255418 - DNA, 30 bp, Artificial Sequence
  Synthetic oligonucleotide
tagagtaaacctggttaaaaattgaaatcg

SEQ ID NO: 255419 - DNA, 29 bp, Artificial Sequence
  Synthetic oligonucleotide
cttaatgaaccacggaccgggttaaatcg

SEQ ID NO: 255420 - DNA, 30 bp, Artificial Sequence
  Synthetic oligonucleotide
aagagccggtaaatgagtgtcacacaatcg

SEQ ID NO: 255421 - DNA, 30 bp, Artificial Sequence
  Synthetic oligonucleotide
aaaaggtaagcatatagcgtcgaccaatcg

SEQ ID NO: 255422 - DNA, 30 bp, Artificial Sequence
  Synthetic oligonucleotide
acacctgaaggttcggggttaagccaatcg

SEQ ID NO: 255423 - DNA, 30 bp, Artificial Sequence
  Synthetic oligonucleotide
gcacggagtaccgaaatattttagcaatcg

SEQ ID NO: 255424 - DNA, 30 bp, Artificial Sequence
  Synthetic oligonucleotide
tccaaagtggccaagtatactgctcaatcg

SEQ ID NO: 255425 - DNA, 30 bp, Artificial Sequence
  Synthetic oligonucleotide
agggtccatccagatcaagtccgtgaatcg

SEQ ID NO: 255426 - DNA, 30 bp, Artificial Sequence
  Synthetic oligonucleotide
tccgcagagcagccgtatttgattgaatcg

SEQ ID NO: 255427 - DNA, 30 bp, Artificial Sequence
  Synthetic oligonucleotide
cggtttagaatagtcccatttgaataatcg

SEQ ID NO: 255428 - DNA, 30 bp, Artificial Sequence
  Synthetic oligonucleotide
caaacgtaaacgtttgtttgtgcataatcg

SEQ ID NO: 255429 - DNA, 30 bp, Artificial Sequence
  Synthetic oligonucleotide
aatcatgcggaaactacgtctagataatcg

SEQ ID NO: 255430 - DNA, 30 bp, Artificial Sequence
  Synthetic oligonucleotide
ttatggaaatcctccgttacagcctaatcg

SEQ ID NO: 255431 - DNA, 30 bp, Artificial Sequence
  Synthetic oligonucleotide
attatcgctatagttaacgcaagttaatcg

SEQ ID NO: 255432 - DNA, 30 bp, Artificial Sequence
  Synthetic oligonucleotide
tggtctaattagctactgggagtttaatcg

SEQ ID NO: 255433 - DNA, 30 bp, Artificial Sequence
  Synthetic oligonucleotide
catgtcgaagatgagctggggacaacatcg

SEQ ID NO: 255434 - DNA, 30 bp, Artificial Sequence
  Synthetic oligonucleotide
tgccagttataggaatcgagatgcacatcg

SEQ ID NO: 255435 - DNA, 30 bp, Artificial Sequence
  Synthetic oligonucleotide
ccgctctggccgtatgtgcagcagacatcg

SEQ ID NO: 255436 - DNA, 30 bp, Artificial Sequence
  Synthetic oligonucleotide
aactgatctgtgatgcgggtaccgacatcg

SEQ ID NO: 255437 - DNA, 30 bp, Artificial Sequence
  Synthetic oligonucleotide
cccaggtggggagtagagaggtcgacatcg

SEQ ID NO: 255438 - DNA, 30 bp, Artificial Sequence
  Synthetic oligonucleotide
ggagggctgcactgggagagatccccatcg

SEQ ID NO: 255439 - DNA, 30 bp, Artificial Sequence
  Synthetic oligonucleotide
taaaagctattggacctaacacgtccatcg

SEQ ID NO: 255440 - DNA, 30 bp, Artificial Sequence
  Synthetic oligonucleotide
gttaattccattgcactgtggtgagcatcg

SEQ ID NO: 255441 - DNA, 30 bp, Artificial Sequence
  Synthetic oligonucleotide
tggatcacggtcggttctgggacggcatcg

SEQ ID NO: 255442 - DNA, 30 bp, Artificial Sequence
  Synthetic oligonucleotide
ggttagtccggcatccgtggtaatgcatcg

SEQ ID NO: 255443 - DNA, 30 bp, Artificial Sequence
  Synthetic oligonucleotide
acacggctggcgtgtctaggtcttgcatcg

SEQ ID NO: 255444 - DNA, 30 bp, Artificial Sequence
  Synthetic oligonucleotide
cgagagaaaaccttcccgacgccgtcatcg

SEQ ID NO: 255445 - DNA, 30 bp, Artificial Sequence
  Synthetic oligonucleotide
ctctggagcttgtggaatgttaaaagatcg

SEQ ID NO: 255446 - DNA, 30 bp, Artificial Sequence
  Synthetic oligonucleotide
acaagttagggtatttccaactcaagatcg

SEQ ID NO: 255447 - DNA, 30 bp, Artificial Sequence
  Synthetic oligonucleotide
cgcactgtcattgttcgtaggtcaagatcg

SEQ ID NO: 255448 - DNA, 30 bp, Artificial Sequence
  Synthetic oligonucleotide
gatccggcgtaaacaatccatttaagatcg

SEQ ID NO: 255449 - DNA, 30 bp, Artificial Sequence
  Synthetic oligonucleotide
atacccgagccgaccagccattacagatcg

SEQ ID NO: 255450 - DNA, 30 bp, Artificial Sequence
  Synthetic oligonucleotide
ccaccctggatgcgggtggagaccagatcg

SEQ ID NO: 255451 - DNA, 30 bp, Artificial Sequence
  Synthetic oligonucleotide
ggcattggcgcactcttcccccggagatcg

SEQ ID NO: 255452 - DNA, 30 bp, Artificial Sequence
  Synthetic oligonucleotide
ctctgtcaagcaccgtgggcggggagatcg

SEQ ID NO: 255453 - DNA, 30 bp, Artificial Sequence
  Synthetic oligonucleotide
ccgaagcacagatgaatcgcattgagatcg

SEQ ID NO: 255454 - DNA, 31 bp, Artificial Sequence
  Synthetic oligonucleotide
agccagttgccagttttggaacaatagatcg

SEQ ID NO: 255455 - DNA, 30 bp, Artificial Sequence
  Synthetic oligonucleotide
gtcgactccatcaccctccgatatagatcg

SEQ ID NO: 255456 - DNA, 30 bp, Artificial Sequence
  Synthetic oligonucleotide
ctgcatctttgatatccctcaatacgatcg

SEQ ID NO: 255457 - DNA, 30 bp, Artificial Sequence
  Synthetic oligonucleotide
ggtagacgagtcgtataagcaccccgatcg

SEQ ID NO: 255458 - DNA, 30 bp, Artificial Sequence
  Synthetic oligonucleotide
gaagtcttacttgatgttgctcatcgatcg

SEQ ID NO: 255459 - DNA, 30 bp, Artificial Sequence
  Synthetic oligonucleotide
ccgataatatcgcagtataagcctcgatcg

SEQ ID NO: 255460 - DNA, 30 bp, Artificial Sequence
  Synthetic oligonucleotide
gaagtcacacgcttccccccggacggatcg

SEQ ID NO: 255461 - DNA, 30 bp, Artificial Sequence
  Synthetic oligonucleotide
tatacatgcggcgaggcgataatcggatcg

SEQ ID NO: 255462 - DNA, 30 bp, Artificial Sequence
  Synthetic oligonucleotide
tggctgtaaatccacttgatcgggggatcg

SEQ ID NO: 255463 - DNA, 30 bp, Artificial Sequence
  Synthetic oligonucleotide
ccaggctggaggcggtctacctgtggatcg

SEQ ID NO: 255464 - DNA, 29 bp, Artificial Sequence
  Synthetic oligonucleotide
gcgcagggggtgtcgtaagacaatgatcg

SEQ ID NO: 255465 - DNA, 30 bp, Artificial Sequence
  Synthetic oligonucleotide
cttgcctggttgtgggcttgagcatgatcg

SEQ ID NO: 255466 - DNA, 30 bp, Artificial Sequence
  Synthetic oligonucleotide
gtgcacctgccacgggatcctgtatgatcg

SEQ ID NO: 255467 - DNA, 30 bp, Artificial Sequence
  Synthetic oligonucleotide
tagcagttatctgaggccattcactgatcg

SEQ ID NO: 255468 - DNA, 30 bp, Artificial Sequence
  Synthetic oligonucleotide
tgcacgtatgtggtctttccagactgatcg

SEQ ID NO: 255469 - DNA, 30 bp, Artificial Sequence
  Synthetic oligonucleotide
tagcccgggcaaattttcaggtgctgatcg

SEQ ID NO: 255470 - DNA, 31 bp, Artificial Sequence
  Synthetic oligonucleotide
tcattgatcaggcgggcggatcgggtgatcg

SEQ ID NO: 255471 - DNA, 30 bp, Artificial Sequence
  Synthetic oligonucleotide
gaattgcattactacagtaatgattgatcg

SEQ ID NO: 255472 - DNA, 30 bp, Artificial Sequence
  Synthetic oligonucleotide
tcggtgtggcgatcttcgcatgtttgatcg

SEQ ID NO: 255473 - DNA, 30 bp, Artificial Sequence
  Synthetic oligonucleotide
atctgatttcagaccgcttggctaatatcg

SEQ ID NO: 255474 - DNA, 30 bp, Artificial Sequence
  Synthetic oligonucleotide
gaacaaggtaccggtatcgcgaccatatcg

SEQ ID NO: 255475 - DNA, 30 bp, Artificial Sequence
  Synthetic oligonucleotide
taatcactggtccaccaatgcattatatcg

SEQ ID NO: 255476 - DNA, 30 bp, Artificial Sequence
  Synthetic oligonucleotide
ggcgcctactcatagattgttattatatcg

SEQ ID NO: 255477 - DNA, 30 bp, Artificial Sequence
  Synthetic oligonucleotide
acgtagaatatatatgccctagtgctatcg

SEQ ID NO: 255478 - DNA, 30 bp, Artificial Sequence
  Synthetic oligonucleotide
gacgggcctacgtcaacttcatgtctatcg

SEQ ID NO: 255479 - DNA, 30 bp, Artificial Sequence
  Synthetic oligonucleotide
ggttcatcatgtatagtagcgcttctatcg

SEQ ID NO: 255480 - DNA, 30 bp, Artificial Sequence
  Synthetic oligonucleotide
atcgccaaaatcgataatgggaaagtatcg

SEQ ID NO: 255481 - DNA, 30 bp, Artificial Sequence
  Synthetic oligonucleotide
cgattcttctgataagataactccgtatcg

SEQ ID NO: 255482 - DNA, 30 bp, Artificial Sequence
  Synthetic oligonucleotide
cgaactgcgagggctttcgtactcgtatcg

SEQ ID NO: 255483 - DNA, 30 bp, Artificial Sequence
  Synthetic oligonucleotide
tgtggtcctatggtgccggctacggtatcg

SEQ ID NO: 255484 - DNA, 30 bp, Artificial Sequence
  Synthetic oligonucleotide
tgggatttagaagttcgttggagattatcg

SEQ ID NO: 255485 - DNA, 30 bp, Artificial Sequence
  Synthetic oligonucleotide
attgcgaataaattagcgctggacttatcg

SEQ ID NO: 255486 - DNA, 30 bp, Artificial Sequence
  Synthetic oligonucleotide
ttatttgatcctaaggaaccacagttatcg

SEQ ID NO: 255487 - DNA, 30 bp, Artificial Sequence
  Synthetic oligonucleotide
tcgtcaaggtttttttggttaattttatcg

SEQ ID NO: 255488 - DNA, 30 bp, Artificial Sequence
  Synthetic oligonucleotide
agttggaaggacgttgtatatcaaaactcg

SEQ ID NO: 255489 - DNA, 30 bp, Artificial Sequence
  Synthetic oligonucleotide
cacccgtattagttagcatcagtcaactcg

SEQ ID NO: 255490 - DNA, 30 bp, Artificial Sequence
  Synthetic oligonucleotide
agattatatctcacgcccttgagtaactcg

SEQ ID NO: 255491 - DNA, 30 bp, Artificial Sequence
  Synthetic oligonucleotide
atacgcatacacaaggatatgggtaactcg

SEQ ID NO: 255492 - DNA, 30 bp, Artificial Sequence
  Synthetic oligonucleotide
gcgcatgaatatgggcggccgatacactcg

SEQ ID NO: 255493 - DNA, 30 bp, Artificial Sequence
  Synthetic oligonucleotide
gaaactcagttctaggctagaaaccactcg

SEQ ID NO: 255494 - DNA, 30 bp, Artificial Sequence
  Synthetic oligonucleotide
ctatttcccttatgtgctgtagggcactcg

SEQ ID NO: 255495 - DNA, 30 bp, Artificial Sequence
  Synthetic oligonucleotide
tgaacgctgagcactgcgttggtagactcg

SEQ ID NO: 255496 - DNA, 30 bp, Artificial Sequence
  Synthetic oligonucleotide
tataatgaatcgataaatacttcggactcg

SEQ ID NO: 255497 - DNA, 30 bp, Artificial Sequence
  Synthetic oligonucleotide
tctacacctgcaaacacggtgactgactcg

SEQ ID NO: 255498 - DNA, 30 bp, Artificial Sequence
  Synthetic oligonucleotide
tgaccttgagcttccagcaacaactactcg

SEQ ID NO: 255499 - DNA, 30 bp, Artificial Sequence
  Synthetic oligonucleotide
gttgggccgtccaagtatttctgaacctcg

SEQ ID NO: 255500 - DNA, 30 bp, Artificial Sequence
  Synthetic oligonucleotide
cttaccttccgagagcgtccgataacctcg

SEQ ID NO: 255501 - DNA, 30 bp, Artificial Sequence
  Synthetic oligonucleotide
tctggatatgggatattttgagtaacctcg

SEQ ID NO: 255502 - DNA, 30 bp, Artificial Sequence
  Synthetic oligonucleotide
acgagctattttcaggtcgacttaacctcg

SEQ ID NO: 255503 - DNA, 30 bp, Artificial Sequence
  Synthetic oligonucleotide
ggggggttcatactatgtgttcccccctcg

SEQ ID NO: 255504 - DNA, 30 bp, Artificial Sequence
  Synthetic oligonucleotide
ttactttagccatggccgacatggccctcg

SEQ ID NO: 255505 - DNA, 30 bp, Artificial Sequence
  Synthetic oligonucleotide
ctatctatatgtcgacaaaccggcgcctcg

SEQ ID NO: 255506 - DNA, 30 bp, Artificial Sequence
  Synthetic oligonucleotide
atgccatgcagtatgagctatcaatcctcg

SEQ ID NO: 255507 - DNA, 30 bp, Artificial Sequence
  Synthetic oligonucleotide
ctctatgatgtgctattagcacactcctcg

SEQ ID NO: 255508 - DNA, 30 bp, Artificial Sequence
  Synthetic oligonucleotide
ctaatgagggtcgtcacgggttattcctcg

SEQ ID NO: 255509 - DNA, 30 bp, Artificial Sequence
  Synthetic oligonucleotide
gcgggataggaaaccgtttgcgtttcctcg

SEQ ID NO: 255510 - DNA, 30 bp, Artificial Sequence
  Synthetic oligonucleotide
gcccgctgtagcttagacaaccagagctcg

SEQ ID NO: 255511 - DNA, 30 bp, Artificial Sequence
  Synthetic oligonucleotide
ctagtcttggtcaacatatgccagagctcg

SEQ ID NO: 255512 - DNA, 30 bp, Artificial Sequence
  Synthetic oligonucleotide
tggctaatctacgaacaggtgtcgagctcg

SEQ ID NO: 255513 - DNA, 30 bp, Artificial Sequence
  Synthetic oligonucleotide
ggggagaagggatgcaccttctgccgctcg

SEQ ID NO: 255514 - DNA, 30 bp, Artificial Sequence
  Synthetic oligonucleotide
ttggatgtgcagccacaacccatgcgctcg

SEQ ID NO: 255515 - DNA, 30 bp, Artificial Sequence
  Synthetic oligonucleotide
agtacactgatgtgtaatattgtgcgctcg

SEQ ID NO: 255516 - DNA, 30 bp, Artificial Sequence
  Synthetic oligonucleotide
tgcaagaacgctcccgtaacctctcgctcg

SEQ ID NO: 255517 - DNA, 30 bp, Artificial Sequence
  Synthetic oligonucleotide
gccaagactctccttgatgacagtcgctcg

SEQ ID NO: 255518 - DNA, 30 bp, Artificial Sequence
  Synthetic oligonucleotide
aactcacaagaattggcctagaaaggctcg

SEQ ID NO: 255519 - DNA, 30 bp, Artificial Sequence
  Synthetic oligonucleotide
aagtaaagtatgccatccgtccgcggctcg

SEQ ID NO: 255520 - DNA, 30 bp, Artificial Sequence
  Synthetic oligonucleotide
catcccccggtgttctaggtggctggctcg

SEQ ID NO: 255521 - DNA, 30 bp, Artificial Sequence
  Synthetic oligonucleotide
agggaatatacctgagtacgataatgctcg

SEQ ID NO: 255522 - DNA, 30 bp, Artificial Sequence
  Synthetic oligonucleotide
agcgcctccaaagagacggtttcttgctcg

SEQ ID NO: 255523 - DNA, 30 bp, Artificial Sequence
  Synthetic oligonucleotide
gctggatcgcgctacaacagcatttgctcg

SEQ ID NO: 255524 - DNA, 30 bp, Artificial Sequence
  Synthetic oligonucleotide
gaattacagactatgattagtttaatctcg

SEQ ID NO: 255525 - DNA, 30 bp, Artificial Sequence
  Synthetic oligonucleotide
gcccggcctgagtacgccctgttgatctcg

SEQ ID NO: 255526 - DNA, 30 bp, Artificial Sequence
  Synthetic oligonucleotide
tacacctatagttgccaaatatatatctcg

SEQ ID NO: 255527 - DNA, 30 bp, Artificial Sequence
  Synthetic oligonucleotide
atacacaccaatcaacggacacgtatctcg

SEQ ID NO: 255528 - DNA, 30 bp, Artificial Sequence
  Synthetic oligonucleotide
cgctgtcgggcccgaatatctcacctctcg

SEQ ID NO: 255529 - DNA, 30 bp, Artificial Sequence
  Synthetic oligonucleotide
ctagtcgcaggcctgtaaggcatgctctcg

SEQ ID NO: 255530 - DNA, 30 bp, Artificial Sequence
  Synthetic oligonucleotide
caaagatgaggtttttgcctacatctctcg

SEQ ID NO: 255531 - DNA, 30 bp, Artificial Sequence
  Synthetic oligonucleotide
cgtttttgtgagtaaaggtcccatctctcg

SEQ ID NO: 255532 - DNA, 30 bp, Artificial Sequence
  Synthetic oligonucleotide
gtggtgagtttaacctgaatgcaggtctcg

SEQ ID NO: 255533 - DNA, 30 bp, Artificial Sequence
  Synthetic oligonucleotide
ttttagagccagtattagcctccggtctcg

SEQ ID NO: 255534 - DNA, 30 bp, Artificial Sequence
  Synthetic oligonucleotide
aactgttgggcgtactacgatatggtctcg

SEQ ID NO: 255535 - DNA, 30 bp, Artificial Sequence
  Synthetic oligonucleotide
cgtagcggaagtttggcttgaattgtctcg

SEQ ID NO: 255536 - DNA, 30 bp, Artificial Sequence
  Synthetic oligonucleotide
aagaggaataacgcatcgcccagattctcg

SEQ ID NO: 255537 - DNA, 30 bp, Artificial Sequence
  Synthetic oligonucleotide
catgtaaaggtagcgaagcttgagttctcg

SEQ ID NO: 255538 - DNA, 30 bp, Artificial Sequence
  Synthetic oligonucleotide
gatgcgagtgtcagatgaacctctttctcg

SEQ ID NO: 255539 - DNA, 30 bp, Artificial Sequence
  Synthetic oligonucleotide
ttagtgaggagacagtgctgcaacaagtcg

SEQ ID NO: 255540 - DNA, 30 bp, Artificial Sequence
  Synthetic oligonucleotide
gttcctggtaatcaaggaaatcacaagtcg

SEQ ID NO: 255541 - DNA, 31 bp, Artificial Sequence
  Synthetic oligonucleotide
aaatgttacctcaataaagagtaccaagtcg

SEQ ID NO: 255542 - DNA, 31 bp, Artificial Sequence
  Synthetic oligonucleotide
aacagcagacgattggggggcctgcaagtcg

SEQ ID NO: 255543 - DNA, 30 bp, Artificial Sequence
  Synthetic oligonucleotide
gaatgcaggagggttggaggtaagaagtcg

SEQ ID NO: 255544 - DNA, 30 bp, Artificial Sequence
  Synthetic oligonucleotide
atggacaggatatcaatagtcgggaagtcg

SEQ ID NO: 255545 - DNA, 30 bp, Artificial Sequence
  Synthetic oligonucleotide
aaataaatcttgtaatataagcataagtcg

SEQ ID NO: 255546 - DNA, 30 bp, Artificial Sequence
  Synthetic oligonucleotide
agtcttcggtctacagtatggagtaagtcg

SEQ ID NO: 255547 - DNA, 30 bp, Artificial Sequence
  Synthetic oligonucleotide
tagtcttacttttaaagatggcgtaagtcg

SEQ ID NO: 255548 - DNA, 30 bp, Artificial Sequence
  Synthetic oligonucleotide
ctaacaaaggtaggaggtcataaacagtcg

SEQ ID NO: 255549 - DNA, 30 bp, Artificial Sequence
  Synthetic oligonucleotide
atcattacgcggcccaagaagtcacagtcg

SEQ ID NO: 255550 - DNA, 30 bp, Artificial Sequence
  Synthetic oligonucleotide
gttgaatccaacgatacggccgatcagtcg

SEQ ID NO: 255551 - DNA, 30 bp, Artificial Sequence
  Synthetic oligonucleotide
cggacagtgccacaggattcctctcagtcg

SEQ ID NO: 255552 - DNA, 30 bp, Artificial Sequence
  Synthetic oligonucleotide
gagtctaaagatagcccggatcccgagtcg

SEQ ID NO: 255553 - DNA, 30 bp, Artificial Sequence
  Synthetic oligonucleotide
tatgggttcacgtcgtaggacaatgagtcg

SEQ ID NO: 255554 - DNA, 30 bp, Artificial Sequence
  Synthetic oligonucleotide
accggttgagcaggattcagatctgagtcg

SEQ ID NO: 255555 - DNA, 30 bp, Artificial Sequence
  Synthetic oligonucleotide
agatttgacactaccaatctcgagtagtcg

SEQ ID NO: 255556 - DNA, 30 bp, Artificial Sequence
  Synthetic oligonucleotide
agtacacaagccaggccatgggcttagtcg

SEQ ID NO: 255557 - DNA, 31 bp, Artificial Sequence
  Synthetic oligonucleotide
ggacgacataatagggttttaaatttagtcg

SEQ ID NO: 255558 - DNA, 30 bp, Artificial Sequence
  Synthetic oligonucleotide
ccgttgatcagcactcgtaagatttagtcg

SEQ ID NO: 255559 - DNA, 30 bp, Artificial Sequence
  Synthetic oligonucleotide
gcaggcagttccactgcacacctttagtcg

SEQ ID NO: 255560 - DNA, 30 bp, Artificial Sequence
  Synthetic oligonucleotide
aggtagttactcgggtccgcgctttagtcg

SEQ ID NO: 255561 - DNA, 30 bp, Artificial Sequence
  Synthetic oligonucleotide
ggtgactcacattttaccagcgaaacgtcg

SEQ ID NO: 255562 - DNA, 30 bp, Artificial Sequence
  Synthetic oligonucleotide
gacaaaccgtgagccagacggtgaacgtcg

SEQ ID NO: 255563 - DNA, 30 bp, Artificial Sequence
  Synthetic oligonucleotide
agcatctgagccgctaaggcatgcacgtcg

SEQ ID NO: 255564 - DNA, 30 bp, Artificial Sequence
  Synthetic oligonucleotide
agcgcgagcgttagaggtagagcgacgtcg

SEQ ID NO: 255565 - DNA, 30 bp, Artificial Sequence
  Synthetic oligonucleotide
ctcgtgcaaagcgcggcgtactttacgtcg

SEQ ID NO: 255566 - DNA, 30 bp, Artificial Sequence
  Synthetic oligonucleotide
tgaacgaaagccggggtaattggaccgtcg

SEQ ID NO: 255567 - DNA, 30 bp, Artificial Sequence
  Synthetic oligonucleotide
tctacttgaacgacgtgtgaagtaccgtcg

SEQ ID NO: 255568 - DNA, 30 bp, Artificial Sequence
  Synthetic oligonucleotide
taatagtatgatataaaaagagtcccgtcg

SEQ ID NO: 255569 - DNA, 30 bp, Artificial Sequence
  Synthetic oligonucleotide
aaaaaatgcatcgtcaaactagagccgtcg

SEQ ID NO: 255570 - DNA, 30 bp, Artificial Sequence
  Synthetic oligonucleotide
agaggatcatacgcgacacgcggagcgtcg

SEQ ID NO: 255571 - DNA, 30 bp, Artificial Sequence
  Synthetic oligonucleotide
tcgttctttttgatacttggccttgcgtcg

SEQ ID NO: 255572 - DNA, 30 bp, Artificial Sequence
  Synthetic oligonucleotide
tattatgcgccgtaaattagtacatcgtcg

SEQ ID NO: 255573 - DNA, 30 bp, Artificial Sequence
  Synthetic oligonucleotide
tcagaatttttgacccgcttaccatcgtcg

SEQ ID NO: 255574 - DNA, 30 bp, Artificial Sequence
  Synthetic oligonucleotide
ttgcgtaagactttaacttatgtatcgtcg

SEQ ID NO: 255575 - DNA, 30 bp, Artificial Sequence
  Synthetic oligonucleotide
tcgtcaggtcatctactgggctcctcgtcg

SEQ ID NO: 255576 - DNA, 30 bp, Artificial Sequence
  Synthetic oligonucleotide
gtgcgctagccctctggtactacaaggtcg

SEQ ID NO: 255577 - DNA, 30 bp, Artificial Sequence
  Synthetic oligonucleotide
gtcggcttcccagcataagggtgaaggtcg

SEQ ID NO: 255578 - DNA, 30 bp, Artificial Sequence
  Synthetic oligonucleotide
ttttagaatccgcaggtggaaataaggtcg

SEQ ID NO: 255579 - DNA, 30 bp, Artificial Sequence
  Synthetic oligonucleotide
ccgctcttggtggcagattaacgcaggtcg

SEQ ID NO: 255580 - DNA, 30 bp, Artificial Sequence
  Synthetic oligonucleotide
agccccgcgcaccaaccacagaagaggtcg

SEQ ID NO: 255581 - DNA, 30 bp, Artificial Sequence
  Synthetic oligonucleotide
gttgcagcctgtacgattgggtagaggtcg

SEQ ID NO: 255582 - DNA, 30 bp, Artificial Sequence
  Synthetic oligonucleotide
attcgtagggtggccagcatctctaggtcg

SEQ ID NO: 255583 - DNA, 30 bp, Artificial Sequence
  Synthetic oligonucleotide
tagaaagcgcttaattaggtaagtaggtcg

SEQ ID NO: 255584 - DNA, 30 bp, Artificial Sequence
  Synthetic oligonucleotide
ttcacaacaattgttcaccctgaacggtcg

SEQ ID NO: 255585 - DNA, 30 bp, Artificial Sequence
  Synthetic oligonucleotide
gatgagcgtatcaggggacgtagccggtcg

SEQ ID NO: 255586 - DNA, 30 bp, Artificial Sequence
  Synthetic oligonucleotide
gttggggatcggaagtaaacgttccggtcg

SEQ ID NO: 255587 - DNA, 30 bp, Artificial Sequence
  Synthetic oligonucleotide
tttgagggtggcgagtaaaaccatcggtcg

SEQ ID NO: 255588 - DNA, 30 bp, Artificial Sequence
  Synthetic oligonucleotide
ccagtaactcagtacttttcctatcggtcg

SEQ ID NO: 255589 - DNA, 29 bp, Artificial Sequence
  Synthetic oligonucleotide
tgtcttttttgaagcggattgaagggtcg

SEQ ID NO: 255590 - DNA, 30 bp, Artificial Sequence
  Synthetic oligonucleotide
tcacttgctagccgtagactgatcgggtcg

SEQ ID NO: 255591 - DNA, 29 bp, Artificial Sequence
  Synthetic oligonucleotide
tcttaagtgtgaggcgagacgctgggtcg

SEQ ID NO: 255592 - DNA, 30 bp, Artificial Sequence
  Synthetic oligonucleotide
ctagaagtctgggttcaaaaatctgggtcg

SEQ ID NO: 255593 - DNA, 30 bp, Artificial Sequence
  Synthetic oligonucleotide
gcctcgagctctgacctcctagttgggtcg

SEQ ID NO: 255594 - DNA, 30 bp, Artificial Sequence
  Synthetic oligonucleotide
cccgcgcaagacccaacgcacacatggtcg

SEQ ID NO: 255595 - DNA, 30 bp, Artificial Sequence
  Synthetic oligonucleotide
ttgtttgacgagatcccaattacctggtcg

SEQ ID NO: 255596 - DNA, 30 bp, Artificial Sequence
  Synthetic oligonucleotide
agggagttgggttttgttatcgtaatgtcg

SEQ ID NO: 255597 - DNA, 30 bp, Artificial Sequence
  Synthetic oligonucleotide
ttgggcgatctactccgcaaaaccatgtcg

SEQ ID NO: 255598 - DNA, 30 bp, Artificial Sequence
  Synthetic oligonucleotide
gggggatgttcaaaaatcttcctgatgtcg

SEQ ID NO: 255599 - DNA, 30 bp, Artificial Sequence
  Synthetic oligonucleotide
cgcgaataatcccccgccccaattatgtcg

SEQ ID NO: 255600 - DNA, 30 bp, Artificial Sequence
  Synthetic oligonucleotide
ccggcattctacttacgaagcgatctgtcg

SEQ ID NO: 255601 - DNA, 30 bp, Artificial Sequence
  Synthetic oligonucleotide
caggggatatagccaacggctcttctgtcg

SEQ ID NO: 255602 - DNA, 30 bp, Artificial Sequence
  Synthetic oligonucleotide
gcggccgaactgtctagtcccacagtgtcg

SEQ ID NO: 255603 - DNA, 30 bp, Artificial Sequence
  Synthetic oligonucleotide
gcgtgcaagaacactcgagtgaacgtgtcg

SEQ ID NO: 255604 - DNA, 30 bp, Artificial Sequence
  Synthetic oligonucleotide
aggactatctctacatgtcgtaatgtgtcg

SEQ ID NO: 255605 - DNA, 30 bp, Artificial Sequence
  Synthetic oligonucleotide
ggtatcctcgtgctggcttgcaaattgtcg

SEQ ID NO: 255606 - DNA, 30 bp, Artificial Sequence
  Synthetic oligonucleotide
tttaaggggagtggggatacgaagttgtcg

SEQ ID NO: 255607 - DNA, 30 bp, Artificial Sequence
  Synthetic oligonucleotide
ggactgccgcgtggcactcgttagttgtcg

SEQ ID NO: 255608 - DNA, 30 bp, Artificial Sequence
  Synthetic oligonucleotide
gtgtactttcgataatagacaacgttgtcg

SEQ ID NO: 255609 - DNA, 30 bp, Artificial Sequence
  Synthetic oligonucleotide
cacggactatacatcatactccgtttgtcg

SEQ ID NO: 255610 - DNA, 30 bp, Artificial Sequence
  Synthetic oligonucleotide
gcggacctagagaatcatttgcgtttgtcg

SEQ ID NO: 255611 - DNA, 30 bp, Artificial Sequence
  Synthetic oligonucleotide
cagttcaagtagggcgggtggttgaattcg

SEQ ID NO: 255612 - DNA, 30 bp, Artificial Sequence
  Synthetic oligonucleotide
gccaaagtagtgagagtgcaacataattcg

SEQ ID NO: 255613 - DNA, 30 bp, Artificial Sequence
  Synthetic oligonucleotide
gagtcgagttcaaaggttctccataattcg

SEQ ID NO: 255614 - DNA, 30 bp, Artificial Sequence
  Synthetic oligonucleotide
ctccgatctagtatcaaatttggtaattcg

SEQ ID NO: 255615 - DNA, 30 bp, Artificial Sequence
  Synthetic oligonucleotide
aacgcgggcctcaaccttatggttaattcg

SEQ ID NO: 255616 - DNA, 30 bp, Artificial Sequence
  Synthetic oligonucleotide
gctcgatgacactggatctcgtagcattcg

SEQ ID NO: 255617 - DNA, 30 bp, Artificial Sequence
  Synthetic oligonucleotide
gattgtgttacccagaagtataacgattcg

SEQ ID NO: 255618 - DNA, 30 bp, Artificial Sequence
  Synthetic oligonucleotide
atgtcacataatagacttcgcgacgattcg

SEQ ID NO: 255619 - DNA, 30 bp, Artificial Sequence
  Synthetic oligonucleotide
acgtctgggatgtgttctcggcgggattcg

SEQ ID NO: 255620 - DNA, 30 bp, Artificial Sequence
  Synthetic oligonucleotide
gctgcgcctaggtaatagccactggattcg

SEQ ID NO: 255621 - DNA, 30 bp, Artificial Sequence
  Synthetic oligonucleotide
ttgtcattgcctcaagtcgggtatgattcg

SEQ ID NO: 255622 - DNA, 30 bp, Artificial Sequence
  Synthetic oligonucleotide
gctatgctcagtggcagtggtattgattcg

SEQ ID NO: 255623 - DNA, 30 bp, Artificial Sequence
  Synthetic oligonucleotide
gttagctgacattggatagcaaaatattcg

SEQ ID NO: 255624 - DNA, 30 bp, Artificial Sequence
  Synthetic oligonucleotide
gcgtagttaggtagtcctggttcgtattcg

SEQ ID NO: 255625 - DNA, 30 bp, Artificial Sequence
  Synthetic oligonucleotide
tcagtggacgtgactcccattgattattcg

SEQ ID NO: 255626 - DNA, 30 bp, Artificial Sequence
  Synthetic oligonucleotide
gcaacccctaaaatctgcgactaaacttcg

SEQ ID NO: 255627 - DNA, 30 bp, Artificial Sequence
  Synthetic oligonucleotide
tacctaggagtggatggtaaggcaacttcg

SEQ ID NO: 255628 - DNA, 30 bp, Artificial Sequence
  Synthetic oligonucleotide
gtagttacaagaaatcctatgctaacttcg

SEQ ID NO: 255629 - DNA, 30 bp, Artificial Sequence
  Synthetic oligonucleotide
atcaaaaatcaatatagtccatccacttcg

SEQ ID NO: 255630 - DNA, 30 bp, Artificial Sequence
  Synthetic oligonucleotide
gacgggtaacaccgcggaccagatacttcg

SEQ ID NO: 255631 - DNA, 30 bp, Artificial Sequence
  Synthetic oligonucleotide
tgggccaatgtgttatcctggcgtacttcg

SEQ ID NO: 255632 - DNA, 29 bp, Artificial Sequence
  Synthetic oligonucleotide
caaagctacatcacggaggaagagcttcg

SEQ ID NO: 255633 - DNA, 30 bp, Artificial Sequence
  Synthetic oligonucleotide
ttaccattcttatattagtccttcgcttcg

SEQ ID NO: 255634 - DNA, 30 bp, Artificial Sequence
  Synthetic oligonucleotide
atccaatggcatcttggtgtgaatgcttcg

SEQ ID NO: 255635 - DNA, 30 bp, Artificial Sequence
  Synthetic oligonucleotide
ggaccttgtgatggctggttgagtgcttcg

SEQ ID NO: 255636 - DNA, 30 bp, Artificial Sequence
  Synthetic oligonucleotide
aggcagaccttgacctccacccgatcttcg

SEQ ID NO: 255637 - DNA, 30 bp, Artificial Sequence
  Synthetic oligonucleotide
tagtctccgggatgacgacgaaactcttcg

SEQ ID NO: 255638 - DNA, 30 bp, Artificial Sequence
  Synthetic oligonucleotide
tggtacccccggataacggggcgaagttcg

SEQ ID NO: 255639 - DNA, 30 bp, Artificial Sequence
  Synthetic oligonucleotide
ctggtgttttggtggtgcctttacagttcg

SEQ ID NO: 255640 - DNA, 30 bp, Artificial Sequence
  Synthetic oligonucleotide
agaccccctcgttggaaaatagccagttcg

SEQ ID NO: 255641 - DNA, 30 bp, Artificial Sequence
  Synthetic oligonucleotide
agccagaaacccactcacgcggagagttcg

SEQ ID NO: 255642 - DNA, 30 bp, Artificial Sequence
  Synthetic oligonucleotide
taaatccttagtattaatgaagtgagttcg

SEQ ID NO: 255643 - DNA, 30 bp, Artificial Sequence
  Synthetic oligonucleotide
ctgtgcaactagttctgaggtggtagttcg

SEQ ID NO: 255644 - DNA, 30 bp, Artificial Sequence
  Synthetic oligonucleotide
tgcaaagtggcatcttataagtcacgttcg

SEQ ID NO: 255645 - DNA, 30 bp, Artificial Sequence
  Synthetic oligonucleotide
tgaacgacctctcaacgtcaccggcgttcg

SEQ ID NO: 255646 - DNA, 30 bp, Artificial Sequence
  Synthetic oligonucleotide
tagagcactggtggcgacgctcggcgttcg

SEQ ID NO: 255647 - DNA, 30 bp, Artificial Sequence
  Synthetic oligonucleotide
agttcgaaagtaccctgacgaggaggttcg

SEQ ID NO: 255648 - DNA, 30 bp, Artificial Sequence
  Synthetic oligonucleotide
aatacaaaagccattgaaggcttaggttcg

SEQ ID NO: 255649 - DNA, 30 bp, Artificial Sequence
  Synthetic oligonucleotide
cgatggctgggcggagaaacgcgcggttcg

SEQ ID NO: 255650 - DNA, 30 bp, Artificial Sequence
  Synthetic oligonucleotide
cggctggtgggaggtgcacttttcggttcg

SEQ ID NO: 255651 - DNA, 30 bp, Artificial Sequence
  Synthetic oligonucleotide
caaggtgcaaaagtccaccttggtggttcg

SEQ ID NO: 255652 - DNA, 30 bp, Artificial Sequence
  Synthetic oligonucleotide
tcactactagtctttagcatgattggttcg

SEQ ID NO: 255653 - DNA, 30 bp, Artificial Sequence
  Synthetic oligonucleotide
gagcgcattaccgtcaattaagaatgttcg

SEQ ID NO: 255654 - DNA, 30 bp, Artificial Sequence
  Synthetic oligonucleotide
gaacatggctccgcgggtacatcctgttcg

SEQ ID NO: 255655 - DNA, 30 bp, Artificial Sequence
  Synthetic oligonucleotide
ggatgtagacttaaaacttcggagtgttcg

SEQ ID NO: 255656 - DNA, 30 bp, Artificial Sequence
  Synthetic oligonucleotide
tgcacatagaagtcaagtggggtttgttcg

SEQ ID NO: 255657 - DNA, 30 bp, Artificial Sequence
  Synthetic oligonucleotide
ctatatattcaaacaactcgtccaatttcg

SEQ ID NO: 255658 - DNA, 30 bp, Artificial Sequence
  Synthetic oligonucleotide
aactaatctttataatcatattccatttcg

SEQ ID NO: 255659 - DNA, 30 bp, Artificial Sequence
  Synthetic oligonucleotide
tacatacggggtttaccggatctcatttcg

SEQ ID NO: 255660 - DNA, 30 bp, Artificial Sequence
  Synthetic oligonucleotide
tcgcaggaggattcacagggacagatttcg

SEQ ID NO: 255661 - DNA, 30 bp, Artificial Sequence
  Synthetic oligonucleotide
attaagggggttcgctatgaaattatttcg

SEQ ID NO: 255662 - DNA, 30 bp, Artificial Sequence
  Synthetic oligonucleotide
ccgactactgataacacttgcaaactttcg

SEQ ID NO: 255663 - DNA, 30 bp, Artificial Sequence
  Synthetic oligonucleotide
gctcacttgcaattcactataccactttcg

SEQ ID NO: 255664 - DNA, 30 bp, Artificial Sequence
  Synthetic oligonucleotide
gtgaccgtacatgaggttaccgagctttcg

SEQ ID NO: 255665 - DNA, 30 bp, Artificial Sequence
  Synthetic oligonucleotide
agatgggaatgactttacggcttggtttcg

SEQ ID NO: 255666 - DNA, 30 bp, Artificial Sequence
  Synthetic oligonucleotide
agttaaagctggagagctggtcgtgtttcg

SEQ ID NO: 255667 - DNA, 30 bp, Artificial Sequence
  Synthetic oligonucleotide
ttatgggcatctttcgtcgcctgtgtttcg

SEQ ID NO: 255668 - DNA, 30 bp, Artificial Sequence
  Synthetic oligonucleotide
gcggctagaagttagagccgtccattttcg

SEQ ID NO: 255669 - DNA, 30 bp, Artificial Sequence
  Synthetic oligonucleotide
tctatagtacagtacacctcaaacttttcg

SEQ ID NO: 255670 - DNA, 30 bp, Artificial Sequence
  Synthetic oligonucleotide
gtctcggcacggaccatccctaccttttcg

SEQ ID NO: 255671 - DNA, 30 bp, Artificial Sequence
  Synthetic oligonucleotide
agctaacgtacgatgtgaagcctcttttcg

SEQ ID NO: 255672 - DNA, 30 bp, Artificial Sequence
  Synthetic oligonucleotide
gagacagcggacgagatatctatgttttcg

SEQ ID NO: 255673 - DNA, 30 bp, Artificial Sequence
  Synthetic oligonucleotide
gttcgcccccgatgccagaaacatttttcg

SEQ ID NO: 255674 - DNA, 30 bp, Artificial Sequence
  Synthetic oligonucleotide
gcaccgagcaacaacatttcaggtttttcg

SEQ ID NO: 255675 - DNA, 30 bp, Artificial Sequence
  Synthetic oligonucleotide
ttattggggactggtgcttgttaaaaaagg

SEQ ID NO: 255676 - DNA, 30 bp, Artificial Sequence
  Synthetic oligonucleotide
agtttgaaaaggcagaccaacagaaaaagg

SEQ ID NO: 255677 - DNA, 30 bp, Artificial Sequence
  Synthetic oligonucleotide
ttgccgttttcgcccttggtcaacaaaagg

SEQ ID NO: 255678 - DNA, 30 bp, Artificial Sequence
  Synthetic oligonucleotide
aataaagtcaggtttaatagcggcaaaagg

SEQ ID NO: 255679 - DNA, 30 bp, Artificial Sequence
  Synthetic oligonucleotide
gcttatcgtaacgccttcaggcagaaaagg

SEQ ID NO: 255680 - DNA, 30 bp, Artificial Sequence
  Synthetic oligonucleotide
catttattcccttatcacattgcgaaaagg

SEQ ID NO: 255681 - DNA, 30 bp, Artificial Sequence
  Synthetic oligonucleotide
taagaagaggctttcctcccttgtaaaagg

SEQ ID NO: 255682 - DNA, 30 bp, Artificial Sequence
  Synthetic oligonucleotide
ttcgtaattaggggctagttacaacaaagg

SEQ ID NO: 255683 - DNA, 30 bp, Artificial Sequence
  Synthetic oligonucleotide
cggacagaaatatagacccgttcacaaagg

SEQ ID NO: 255684 - DNA, 30 bp, Artificial Sequence
  Synthetic oligonucleotide
gtgcgaatgtgaacttgggcatcccaaagg

SEQ ID NO: 255685 - DNA, 30 bp, Artificial Sequence
  Synthetic oligonucleotide
aggggatgaatggtcgggtatgagcaaagg

SEQ ID NO: 255686 - DNA, 30 bp, Artificial Sequence
  Synthetic oligonucleotide
attgggggttgcgtgcagttgccgcaaagg

SEQ ID NO: 255687 - DNA, 30 bp, Artificial Sequence
  Synthetic oligonucleotide
cctatgccatacatggtcaacatgcaaagg

SEQ ID NO: 255688 - DNA, 30 bp, Artificial Sequence
  Synthetic oligonucleotide
attgttttaaatgaatcaacaattcaaagg

SEQ ID NO: 255689 - DNA, 30 bp, Artificial Sequence
  Synthetic oligonucleotide
aaaaggagttcacttttcgaagttcaaagg

SEQ ID NO: 255690 - DNA, 30 bp, Artificial Sequence
  Synthetic oligonucleotide
taatataagatacgataatgcaaagaaagg

SEQ ID NO: 255691 - DNA, 30 bp, Artificial Sequence
  Synthetic oligonucleotide
aagaaacaaccttgtctatagaaagaaagg

SEQ ID NO: 255692 - DNA, 30 bp, Artificial Sequence
  Synthetic oligonucleotide
actatcttcagcgtaggacgttaagaaagg

SEQ ID NO: 255693 - DNA, 30 bp, Artificial Sequence
  Synthetic oligonucleotide
gggctgttgagtctgttttggacagaaagg

SEQ ID NO: 255694 - DNA, 30 bp, Artificial Sequence
  Synthetic oligonucleotide
tttttcgaaccaataaagagatcagaaagg

SEQ ID NO: 255695 - DNA, 30 bp, Artificial Sequence
  Synthetic oligonucleotide
gattgcccagacttcgccaatgacgaaagg

SEQ ID NO: 255696 - DNA, 30 bp, Artificial Sequence
  Synthetic oligonucleotide
tgcttgactcgaacacggctcagtgaaagg

SEQ ID NO: 255697 - DNA, 30 bp, Artificial Sequence
  Synthetic oligonucleotide
tgaggatatggtgtatgccagggtgaaagg

SEQ ID NO: 255698 - DNA, 30 bp, Artificial Sequence
  Synthetic oligonucleotide
gccgcagtcgaactattagtgattgaaagg

SEQ ID NO: 255699 - DNA, 30 bp, Artificial Sequence
  Synthetic oligonucleotide
gtcaggggactgcagtctcatattgaaagg

SEQ ID NO: 255700 - DNA, 30 bp, Artificial Sequence
  Synthetic oligonucleotide
cacacccatagtctcgtcctataataaagg

SEQ ID NO: 255701 - DNA, 30 bp, Artificial Sequence
  Synthetic oligonucleotide
gctctgtactgcgataagactcgttaaagg

SEQ ID NO: 255702 - DNA, 30 bp, Artificial Sequence
  Synthetic oligonucleotide
gggtataatttacacagaggtgaaacaagg

SEQ ID NO: 255703 - DNA, 30 bp, Artificial Sequence
  Synthetic oligonucleotide
gtaatgttaactagtccggcgctaacaagg

SEQ ID NO: 255704 - DNA, 30 bp, Artificial Sequence
  Synthetic oligonucleotide
aagaatcattccatcgcaaatcacacaagg

SEQ ID NO: 255705 - DNA, 30 bp, Artificial Sequence
  Synthetic oligonucleotide
aagtttatcgacgagcggggtcacacaagg

SEQ ID NO: 255706 - DNA, 30 bp, Artificial Sequence
  Synthetic oligonucleotide
tactcgactggctacggcctaaagacaagg

SEQ ID NO: 255707 - DNA, 30 bp, Artificial Sequence
  Synthetic oligonucleotide
caggtagaatatattaccagcaggacaagg

SEQ ID NO: 255708 - DNA, 30 bp, Artificial Sequence
  Synthetic oligonucleotide
attaacggggaccatcgctaatggacaagg

SEQ ID NO: 255709 - DNA, 30 bp, Artificial Sequence
  Synthetic oligonucleotide
ttaatcaaatctccatcaatatggacaagg

SEQ ID NO: 255710 - DNA, 30 bp, Artificial Sequence
  Synthetic oligonucleotide
agaacgaacgacaagcggcaggatacaagg

SEQ ID NO: 255711 - DNA, 30 bp, Artificial Sequence
  Synthetic oligonucleotide
gaggttcgcaccctatctggacgtacaagg

SEQ ID NO: 255712 - DNA, 30 bp, Artificial Sequence
  Synthetic oligonucleotide
tgacaggatctcagtaccaaggcaccaagg

SEQ ID NO: 255713 - DNA, 30 bp, Artificial Sequence
  Synthetic oligonucleotide
ggtgcgagtggacatactagcggtccaagg

SEQ ID NO: 255714 - DNA, 30 bp, Artificial Sequence
  Synthetic oligonucleotide
gtgacaggcccatcatcatgtgttccaagg

SEQ ID NO: 255715 - DNA, 30 bp, Artificial Sequence
  Synthetic oligonucleotide
ctttcacgttaggcaagaccgcaggcaagg

SEQ ID NO: 255716 - DNA, 30 bp, Artificial Sequence
  Synthetic oligonucleotide
ccggaatcagacttggatcagccggcaagg

SEQ ID NO: 255717 - DNA, 30 bp, Artificial Sequence
  Synthetic oligonucleotide
agctttccgactttatgaaaagcggcaagg

SEQ ID NO: 255718 - DNA, 30 bp, Artificial Sequence
  Synthetic oligonucleotide
cttgaggatcggctcgcgtttagggcaagg

SEQ ID NO: 255719 - DNA, 30 bp, Artificial Sequence
  Synthetic oligonucleotide
gcacgacctctggtctgtcctcgggcaagg

SEQ ID NO: 255720 - DNA, 30 bp, Artificial Sequence
  Synthetic oligonucleotide
gaggggataacggaaactggagatgcaagg

SEQ ID NO: 255721 - DNA, 30 bp, Artificial Sequence
  Synthetic oligonucleotide
aatgaatgtgatacgaaggagcctgcaagg

SEQ ID NO: 255722 - DNA, 30 bp, Artificial Sequence
  Synthetic oligonucleotide
gcggtggaagaactcactccatgtgcaagg

SEQ ID NO: 255723 - DNA, 30 bp, Artificial Sequence
  Synthetic oligonucleotide
ccaagcccttatacgttctcccttgcaagg

SEQ ID NO: 255724 - DNA, 30 bp, Artificial Sequence
  Synthetic oligonucleotide
aaataagtcaaacgtatattcggatcaagg

SEQ ID NO: 255725 - DNA, 30 bp, Artificial Sequence
  Synthetic oligonucleotide
gtcggggaggaaacgcacacttcctcaagg

SEQ ID NO: 255726 - DNA, 30 bp, Artificial Sequence
  Synthetic oligonucleotide
ataatccccttagccagatacccttcaagg

SEQ ID NO: 255727 - DNA, 30 bp, Artificial Sequence
  Synthetic oligonucleotide
gttgattggacaatgacatcgtaaagaagg

SEQ ID NO: 255728 - DNA, 30 bp, Artificial Sequence
  Synthetic oligonucleotide
tgttcatggtatgcgctggccacaagaagg

SEQ ID NO: 255729 - DNA, 30 bp, Artificial Sequence
  Synthetic oligonucleotide
ttgcggtacacttccaaacatgcaagaagg

SEQ ID NO: 255730 - DNA, 30 bp, Artificial Sequence
  Synthetic oligonucleotide
ttaaatgccccatgtcacagaactagaagg

SEQ ID NO: 255731 - DNA, 30 bp, Artificial Sequence
  Synthetic oligonucleotide
cgtcgcctattagtatgctaaagacgaagg

SEQ ID NO: 255732 - DNA, 30 bp, Artificial Sequence
  Synthetic oligonucleotide
ctaacgtttcgggggtgcctagctcgaagg

SEQ ID NO: 255733 - DNA, 30 bp, Artificial Sequence
  Synthetic oligonucleotide
gacgcgctatgtttggaagggggaggaagg

SEQ ID NO: 255734 - DNA, 30 bp, Artificial Sequence
  Synthetic oligonucleotide
gtggaactgatagtaatgtgacacggaagg

SEQ ID NO: 255735 - DNA, 30 bp, Artificial Sequence
  Synthetic oligonucleotide
tcgcccccgcagaagtcgtggacgggaagg

SEQ ID NO: 255736 - DNA, 30 bp, Artificial Sequence
  Synthetic oligonucleotide
tcgttgcaacctcttagtaaggtgggaagg

SEQ ID NO: 255737 - DNA, 30 bp, Artificial Sequence
  Synthetic oligonucleotide
acgtgtggatctggactagatttgggaagg

SEQ ID NO: 255738 - DNA, 30 bp, Artificial Sequence
  Synthetic oligonucleotide
tatccatcccgagcaagagtagttggaagg

SEQ ID NO: 255739 - DNA, 30 bp, Artificial Sequence
  Synthetic oligonucleotide
ctcttcacgtttactcagcaagagtgaagg

SEQ ID NO: 255740 - DNA, 30 bp, Artificial Sequence
  Synthetic oligonucleotide
cggcaactattaaaggggttgtagtgaagg

SEQ ID NO: 255741 - DNA, 30 bp, Artificial Sequence
  Synthetic oligonucleotide
cggtgctgaatataatattcttcgtgaagg

SEQ ID NO: 255742 - DNA, 29 bp, Artificial Sequence
  Synthetic oligonucleotide
taacgataggtcagatagggcggtgaagg

SEQ ID NO: 255743 - DNA, 30 bp, Artificial Sequence
  Synthetic oligonucleotide
ttagaatcgaacgtgagaatcaattgaagg

SEQ ID NO: 255744 - DNA, 30 bp, Artificial Sequence
  Synthetic oligonucleotide
acttggacatagtgggacacgaattgaagg

SEQ ID NO: 255745 - DNA, 30 bp, Artificial Sequence
  Synthetic oligonucleotide
ccatagtcgttatgaccgctgtattgaagg

SEQ ID NO: 255746 - DNA, 30 bp, Artificial Sequence
  Synthetic oligonucleotide
aaacctacactaacttaagaatcttgaagg

SEQ ID NO: 255747 - DNA, 30 bp, Artificial Sequence
  Synthetic oligonucleotide
agggtgatactttgtgtctatggttgaagg

SEQ ID NO: 255748 - DNA, 30 bp, Artificial Sequence
  Synthetic oligonucleotide
cactcccgtagtgagccaggtcaaataagg

SEQ ID NO: 255749 - DNA, 30 bp, Artificial Sequence
  Synthetic oligonucleotide
aaaggccctgggttcatatctttaataagg

SEQ ID NO: 255750 - DNA, 30 bp, Artificial Sequence
  Synthetic oligonucleotide
tgggccccttaacgcgtgagcatcataagg

SEQ ID NO: 255751 - DNA, 30 bp, Artificial Sequence
  Synthetic oligonucleotide
agcgacagactaggtacctgttagataagg

SEQ ID NO: 255752 - DNA, 30 bp, Artificial Sequence
  Synthetic oligonucleotide
gtggtctggccaataggtataccactaagg

SEQ ID NO: 255753 - DNA, 30 bp, Artificial Sequence
  Synthetic oligonucleotide
ccggacactccggatattggtcgactaagg

SEQ ID NO: 255754 - DNA, 30 bp, Artificial Sequence
  Synthetic oligonucleotide
atttgattgggccaggtcagccacctaagg

SEQ ID NO: 255755 - DNA, 30 bp, Artificial Sequence
  Synthetic oligonucleotide
ctctaacaggctgagagaagtgcgctaagg

SEQ ID NO: 255756 - DNA, 30 bp, Artificial Sequence
  Synthetic oligonucleotide
tgcctcgctcctaatggggtcatgctaagg

SEQ ID NO: 255757 - DNA, 30 bp, Artificial Sequence
  Synthetic oligonucleotide
aaagtacgttaattccagtccaatctaagg

SEQ ID NO: 255758 - DNA, 30 bp, Artificial Sequence
  Synthetic oligonucleotide
cggggatagcggtgatcatcaactctaagg

SEQ ID NO: 255759 - DNA, 30 bp, Artificial Sequence
  Synthetic oligonucleotide
agcattccatagtctcaaatgtgtgtaagg

SEQ ID NO: 255760 - DNA, 30 bp, Artificial Sequence
  Synthetic oligonucleotide
atctggggccttacaagcggtatgttaagg

SEQ ID NO: 255761 - DNA, 30 bp, Artificial Sequence
  Synthetic oligonucleotide
tatgggcagaggtggttcggtgctttaagg

SEQ ID NO: 255762 - DNA, 30 bp, Artificial Sequence
  Synthetic oligonucleotide
tggggcaacgttgacggtaggcgaaacagg

SEQ ID NO: 255763 - DNA, 30 bp, Artificial Sequence
  Synthetic oligonucleotide
taccgacgcgcagcccataggtggaacagg

SEQ ID NO: 255764 - DNA, 30 bp, Artificial Sequence
  Synthetic oligonucleotide
ggtcttgagggattaagggtcctgaacagg

SEQ ID NO: 255765 - DNA, 30 bp, Artificial Sequence
  Synthetic oligonucleotide
cacagcaagcaccacaccaggtataacagg

SEQ ID NO: 255766 - DNA, 30 bp, Artificial Sequence
  Synthetic oligonucleotide
ctgtgtacgtcctgagtatgtcctaacagg

SEQ ID NO: 255767 - DNA, 30 bp, Artificial Sequence
  Synthetic oligonucleotide
tgggggggaagagtagacacggttaacagg

SEQ ID NO: 255768 - DNA, 30 bp, Artificial Sequence
  Synthetic oligonucleotide
catgacagtacagagcctttggcacacagg

SEQ ID NO: 255769 - DNA, 30 bp, Artificial Sequence
  Synthetic oligonucleotide
cgtaagtcggggattctatgggcccacagg

SEQ ID NO: 255770 - DNA, 30 bp, Artificial Sequence
  Synthetic oligonucleotide
gctctagtcacaagaggtcatcaagacagg

SEQ ID NO: 255771 - DNA, 30 bp, Artificial Sequence
  Synthetic oligonucleotide
tggcacgtaccggttggtaaaacagacagg

SEQ ID NO: 255772 - DNA, 30 bp, Artificial Sequence
  Synthetic oligonucleotide
ttccatactctatgtctcatatgcgacagg

SEQ ID NO: 255773 - DNA, 30 bp, Artificial Sequence
  Synthetic oligonucleotide
gactacaatcagagcacgctgcatgacagg

SEQ ID NO: 255774 - DNA, 30 bp, Artificial Sequence
  Synthetic oligonucleotide
taaactctatccaagggatagtagtacagg

SEQ ID NO: 255775 - DNA, 30 bp, Artificial Sequence
  Synthetic oligonucleotide
aatcgtaggtaccggatacgttagtacagg

SEQ ID NO: 255776 - DNA, 30 bp, Artificial Sequence
  Synthetic oligonucleotide
catagttatccaccagaccgtgcttacagg

SEQ ID NO: 255777 - DNA, 30 bp, Artificial Sequence
  Synthetic oligonucleotide
ggcttgttggcaggtaaactcagttacagg

SEQ ID NO: 255778 - DNA, 30 bp, Artificial Sequence
  Synthetic oligonucleotide
catttaggggacaaagtctttcgaaccagg

SEQ ID NO: 255779 - DNA, 30 bp, Artificial Sequence
  Synthetic oligonucleotide
gtggcacgcaactgtgacatcttcaccagg

SEQ ID NO: 255780 - DNA, 30 bp, Artificial Sequence
  Synthetic oligonucleotide
atcggtgggaaattccaacagaggaccagg

SEQ ID NO: 255781 - DNA, 30 bp, Artificial Sequence
  Synthetic oligonucleotide
cgtactcatacggacgccgttattaccagg

SEQ ID NO: 255782 - DNA, 30 bp, Artificial Sequence
  Synthetic oligonucleotide
tattactccacgaacaaacgcttacccagg

SEQ ID NO: 255783 - DNA, 30 bp, Artificial Sequence
  Synthetic oligonucleotide
gaacataaagacttgaggccggggcccagg

SEQ ID NO: 255784 - DNA, 30 bp, Artificial Sequence
  Synthetic oligonucleotide
gaaggaggcgctttggcctccactcccagg

SEQ ID NO: 255785 - DNA, 31 bp, Artificial Sequence
  Synthetic oligonucleotide
tcgctccgttaagcgcaccggaaacgccagg

SEQ ID NO: 255786 - DNA, 30 bp, Artificial Sequence
  Synthetic oligonucleotide
aatgagcatacccgccttcaatccgccagg

SEQ ID NO: 255787 - DNA, 30 bp, Artificial Sequence
  Synthetic oligonucleotide
cttttagaagcaacatgggcgtccgccagg

SEQ ID NO: 255788 - DNA, 30 bp, Artificial Sequence
  Synthetic oligonucleotide
agtaatttgcttaactcgaactgggccagg

SEQ ID NO: 255789 - DNA, 30 bp, Artificial Sequence
  Synthetic oligonucleotide
ttcgtagagcgtggcaatactcggtccagg

SEQ ID NO: 255790 - DNA, 30 bp, Artificial Sequence
  Synthetic oligonucleotide
gggtagcagcctcatttctgtcagagcagg

SEQ ID NO: 255791 - DNA, 30 bp, Artificial Sequence
  Synthetic oligonucleotide
tcatggggaaactcggggtcttatagcagg

SEQ ID NO: 255792 - DNA, 30 bp, Artificial Sequence
  Synthetic oligonucleotide
aaatcggactcaaaaagactgcctagcagg

SEQ ID NO: 255793 - DNA, 30 bp, Artificial Sequence
  Synthetic oligonucleotide
aatgaaacattcgggcttcaatctagcagg

SEQ ID NO: 255794 - DNA, 30 bp, Artificial Sequence
  Synthetic oligonucleotide
cgaagagcctacgtataggcatttcgcagg

SEQ ID NO: 255795 - DNA, 30 bp, Artificial Sequence
  Synthetic oligonucleotide
ccccagaatgatgcttgcgaacgaggcagg

SEQ ID NO: 255796 - DNA, 30 bp, Artificial Sequence
  Synthetic oligonucleotide
cggtggggacctgagcctatcggcggcagg

SEQ ID NO: 255797 - DNA, 30 bp, Artificial Sequence
  Synthetic oligonucleotide
tgcgtcttgcgcgtggtctctttcggcagg

SEQ ID NO: 255798 - DNA, 30 bp, Artificial Sequence
  Synthetic oligonucleotide
gagggatatctaggctatccgacgggcagg

SEQ ID NO: 255799 - DNA, 30 bp, Artificial Sequence
  Synthetic oligonucleotide
tattgactcgttagtaattacgtctgcagg

SEQ ID NO: 255800 - DNA, 30 bp, Artificial Sequence
  Synthetic oligonucleotide
cgttgtcgggtcgggccggtggtgtgcagg

SEQ ID NO: 255801 - DNA, 31 bp, Artificial Sequence
  Synthetic oligonucleotide
aaggggccgttagctgtgggagggttgcagg

SEQ ID NO: 255802 - DNA, 30 bp, Artificial Sequence
  Synthetic oligonucleotide
actctgtagtctttgatctatgcaatcagg

SEQ ID NO: 255803 - DNA, 30 bp, Artificial Sequence
  Synthetic oligonucleotide
ctcagggatacaccagtccgcctaatcagg

SEQ ID NO: 255804 - DNA, 30 bp, Artificial Sequence
  Synthetic oligonucleotide
agaacgtcgggagtcgttacagccatcagg

SEQ ID NO: 255805 - DNA, 30 bp, Artificial Sequence
  Synthetic oligonucleotide
gatcatcgtttttggcctaaatgcatcagg

SEQ ID NO: 255806 - DNA, 30 bp, Artificial Sequence
  Synthetic oligonucleotide
tttaataggtatagcggaggtcagatcagg

SEQ ID NO: 255807 - DNA, 30 bp, Artificial Sequence
  Synthetic oligonucleotide
gcttgccgatggctcactctctcgatcagg

SEQ ID NO: 255808 - DNA, 30 bp, Artificial Sequence
  Synthetic oligonucleotide
ggtctgattatataggaccgttcgatcagg

SEQ ID NO: 255809 - DNA, 30 bp, Artificial Sequence
  Synthetic oligonucleotide
aacgagcgcctttcgtgtacttatatcagg

SEQ ID NO: 255810 - DNA, 30 bp, Artificial Sequence
  Synthetic oligonucleotide
acgactgggggaggaaacccaactatcagg

SEQ ID NO: 255811 - DNA, 30 bp, Artificial Sequence
  Synthetic oligonucleotide
tgctcgaccgcgtgttacatgtctatcagg

SEQ ID NO: 255812 - DNA, 30 bp, Artificial Sequence
  Synthetic oligonucleotide
ttaaataacaagtatcggatgagtatcagg

SEQ ID NO: 255813 - DNA, 30 bp, Artificial Sequence
  Synthetic oligonucleotide
cggctctgtctacgagtatgaattatcagg

SEQ ID NO: 255814 - DNA, 30 bp, Artificial Sequence
  Synthetic oligonucleotide
ggaagaattctattattgattgaactcagg

SEQ ID NO: 255815 - DNA, 30 bp, Artificial Sequence
  Synthetic oligonucleotide
ttggcagtagggatgaaatcacgactcagg

SEQ ID NO: 255816 - DNA, 30 bp, Artificial Sequence
  Synthetic oligonucleotide
attaaacaagcactgcgatcgggcctcagg

SEQ ID NO: 255817 - DNA, 30 bp, Artificial Sequence
  Synthetic oligonucleotide
acttttggttaaaccctatacacagtcagg

SEQ ID NO: 255818 - DNA, 30 bp, Artificial Sequence
  Synthetic oligonucleotide
gaaaccataactaatgactcacgagtcagg

SEQ ID NO: 255819 - DNA, 30 bp, Artificial Sequence
  Synthetic oligonucleotide
gataaggaagcctgtggcggcaacgtcagg

SEQ ID NO: 255820 - DNA, 30 bp, Artificial Sequence
  Synthetic oligonucleotide
aaccgccttttacctattttccacgtcagg

SEQ ID NO: 255821 - DNA, 30 bp, Artificial Sequence
  Synthetic oligonucleotide
atgtgcacaagttctttttggtaggtcagg

SEQ ID NO: 255822 - DNA, 30 bp, Artificial Sequence
  Synthetic oligonucleotide
tgttcgtacaaagagagacatatggtcagg

SEQ ID NO: 255823 - DNA, 30 bp, Artificial Sequence
  Synthetic oligonucleotide
tcctatagaacgcccagccgcattgtcagg

SEQ ID NO: 255824 - DNA, 30 bp, Artificial Sequence
  Synthetic oligonucleotide
ttcccacagggattgtgtcctaccttcagg

SEQ ID NO: 255825 - DNA, 30 bp, Artificial Sequence
  Synthetic oligonucleotide
ccacgcttaccgtatcaccggcccttcagg

SEQ ID NO: 255826 - DNA, 30 bp, Artificial Sequence
  Synthetic oligonucleotide
gaattaaaagtactaaagttccatttcagg

SEQ ID NO: 255827 - DNA, 30 bp, Artificial Sequence
  Synthetic oligonucleotide
aacagagttgctagaggtcgtaaaaagagg

SEQ ID NO: 255828 - DNA, 30 bp, Artificial Sequence
  Synthetic oligonucleotide
cagtgttacggcatgacattcatgaagagg

SEQ ID NO: 255829 - DNA, 30 bp, Artificial Sequence
  Synthetic oligonucleotide
cacatgctcggcacataacttaataagagg

SEQ ID NO: 255830 - DNA, 30 bp, Artificial Sequence
  Synthetic oligonucleotide
atgatatgaatgcgatcggggcctaagagg

SEQ ID NO: 255831 - DNA, 30 bp, Artificial Sequence
  Synthetic oligonucleotide
cagtcgagtcacccggcaatatttaagagg

SEQ ID NO: 255832 - DNA, 30 bp, Artificial Sequence
  Synthetic oligonucleotide
acgatatattctacaccgctgtcccagagg

SEQ ID NO: 255833 - DNA, 30 bp, Artificial Sequence
  Synthetic oligonucleotide
gcggaagtcttagaccgctagatgcagagg

SEQ ID NO: 255834 - DNA, 30 bp, Artificial Sequence
  Synthetic oligonucleotide
gcccagaacctaggttctccaagtcagagg

SEQ ID NO: 255835 - DNA, 30 bp, Artificial Sequence
  Synthetic oligonucleotide
acgaccgcctcaagtccccagcgtcagagg

SEQ ID NO: 255836 - DNA, 31 bp, Artificial Sequence
  Synthetic oligonucleotide
ggacggggtaccctgctgtcacctagagagg

SEQ ID NO: 255837 - DNA, 30 bp, Artificial Sequence
  Synthetic oligonucleotide
gatcgggtgatctcggttaccgcggagagg

SEQ ID NO: 255838 - DNA, 30 bp, Artificial Sequence
  Synthetic oligonucleotide
gcgatcggtaaccgacatgctagggagagg

SEQ ID NO: 255839 - DNA, 30 bp, Artificial Sequence
  Synthetic oligonucleotide
aggggcggttaagtaggcgatcgctagagg

SEQ ID NO: 255840 - DNA, 30 bp, Artificial Sequence
  Synthetic oligonucleotide
tgccctcggttagttgtcgtgatctagagg

SEQ ID NO: 255841 - DNA, 30 bp, Artificial Sequence
  Synthetic oligonucleotide
agggatccgtggattgattgggtctagagg

SEQ ID NO: 255842 - DNA, 30 bp, Artificial Sequence
  Synthetic oligonucleotide
tctgcacgaagcggtggagggtcttagagg

SEQ ID NO: 255843 - DNA, 30 bp, Artificial Sequence
  Synthetic oligonucleotide
aacggcactgattcagccgtgtgaacgagg

SEQ ID NO: 255844 - DNA, 30 bp, Artificial Sequence
  Synthetic oligonucleotide
acttcgatttttaggtgcaattacacgagg

SEQ ID NO: 255845 - DNA, 30 bp, Artificial Sequence
  Synthetic oligonucleotide
tttgattcgggatgagttaggtgtacgagg

SEQ ID NO: 255846 - DNA, 30 bp, Artificial Sequence
  Synthetic oligonucleotide
ttatccgggtgggtaagccgtgttacgagg

SEQ ID NO: 255847 - DNA, 30 bp, Artificial Sequence
  Synthetic oligonucleotide
aggtgttttgagtcccaagcgaaaccgagg

SEQ ID NO: 255848 - DNA, 30 bp, Artificial Sequence
  Synthetic oligonucleotide
caaatgcgtaaccgcacgacagacccgagg

SEQ ID NO: 255849 - DNA, 30 bp, Artificial Sequence
  Synthetic oligonucleotide
ggtcctatattttataagatcacgccgagg

SEQ ID NO: 255850 - DNA, 30 bp, Artificial Sequence
  Synthetic oligonucleotide
ttgggaaaagtggagggtcagtcgccgagg

SEQ ID NO: 255851 - DNA, 30 bp, Artificial Sequence
  Synthetic oligonucleotide
cgatttcggacaggattgccagggccgagg

SEQ ID NO: 255852 - DNA, 30 bp, Artificial Sequence
  Synthetic oligonucleotide
tgatgtgtgaagaggttaatcgctccgagg

SEQ ID NO: 255853 - DNA, 30 bp, Artificial Sequence
  Synthetic oligonucleotide
cgtacacgcgtcctgcaaactcttccgagg

SEQ ID NO: 255854 - DNA, 30 bp, Artificial Sequence
  Synthetic oligonucleotide
gtctatgtaccaggaaactatttagcgagg

SEQ ID NO: 255855 - DNA, 30 bp, Artificial Sequence
  Synthetic oligonucleotide
gcctaaagggggaaagcggtcttggcgagg

SEQ ID NO: 255856 - DNA, 30 bp, Artificial Sequence
  Synthetic oligonucleotide
tgaaatcgccttccatggatagatgcgagg

SEQ ID NO: 255857 - DNA, 30 bp, Artificial Sequence
  Synthetic oligonucleotide
atggttaaacgggtccaggtgcttgcgagg

SEQ ID NO: 255858 - DNA, 30 bp, Artificial Sequence
  Synthetic oligonucleotide
aaatcagtagttggggagcgtgactcgagg

SEQ ID NO: 255859 - DNA, 30 bp, Artificial Sequence
  Synthetic oligonucleotide
acgtcgacacctcattgacactactcgagg

SEQ ID NO: 255860 - DNA, 30 bp, Artificial Sequence
  Synthetic oligonucleotide
tcaatatagtaatagaagacttcctcgagg

SEQ ID NO: 255861 - DNA, 30 bp, Artificial Sequence
  Synthetic oligonucleotide
acatacagaatcagcgtagacaggtcgagg

SEQ ID NO: 255862 - DNA, 30 bp, Artificial Sequence
  Synthetic oligonucleotide
agcagtatacgaaccttaaaagggtcgagg

SEQ ID NO: 255863 - DNA, 30 bp, Artificial Sequence
  Synthetic oligonucleotide
taacatatggccggaatttcaccttcgagg

SEQ ID NO: 255864 - DNA, 30 bp, Artificial Sequence
  Synthetic oligonucleotide
tggggtctgttattctgttagagttcgagg

SEQ ID NO: 255865 - DNA, 30 bp, Artificial Sequence
  Synthetic oligonucleotide
aatggtgaggttctttttccggaaaggagg

SEQ ID NO: 255866 - DNA, 30 bp, Artificial Sequence
  Synthetic oligonucleotide
actggccggggtcttgagaaataaaggagg

SEQ ID NO: 255867 - DNA, 30 bp, Artificial Sequence
  Synthetic oligonucleotide
gttgtaatgtaccaagggctttgaaggagg

SEQ ID NO: 255868 - DNA, 30 bp, Artificial Sequence
  Synthetic oligonucleotide
cgatgttgcttaagctgtattgccaggagg

SEQ ID NO: 255869 - DNA, 30 bp, Artificial Sequence
  Synthetic oligonucleotide
acattcgggcgaggggcaccttagaggagg

SEQ ID NO: 255870 - DNA, 30 bp, Artificial Sequence
  Synthetic oligonucleotide
gctccgaggggaggtcctatggtgaggagg

SEQ ID NO: 255871 - DNA, 30 bp, Artificial Sequence
  Synthetic oligonucleotide
atgagtcgttgctctgcggtgaataggagg

SEQ ID NO: 255872 - DNA, 30 bp, Artificial Sequence
  Synthetic oligonucleotide
ttgtagctcaggtgaccgggtcataggagg

SEQ ID NO: 255873 - DNA, 30 bp, Artificial Sequence
  Synthetic oligonucleotide
ccgataccaccatgggctgcttttaggagg

SEQ ID NO: 255874 - DNA, 30 bp, Artificial Sequence
  Synthetic oligonucleotide
ctatgggtatttcgcgtagatctacggagg

SEQ ID NO: 255875 - DNA, 30 bp, Artificial Sequence
  Synthetic oligonucleotide
gtttgtatcctgttacgatcagggcggagg

SEQ ID NO: 255876 - DNA, 30 bp, Artificial Sequence
  Synthetic oligonucleotide
ttagatacagttaaggacggaggtcggagg

SEQ ID NO: 255877 - DNA, 30 bp, Artificial Sequence
  Synthetic oligonucleotide
aataaaagcccataacgggaccaagggagg

SEQ ID NO: 255878 - DNA, 30 bp, Artificial Sequence
  Synthetic oligonucleotide
cgtgcaatcctgtaaacgaccgaagggagg

SEQ ID NO: 255879 - DNA, 30 bp, Artificial Sequence
  Synthetic oligonucleotide
aagttgaacgtacaatatcttaccgggagg

SEQ ID NO: 255880 - DNA, 30 bp, Artificial Sequence
  Synthetic oligonucleotide
acatcccgtatccatatggtagtcgggagg

SEQ ID NO: 255881 - DNA, 30 bp, Artificial Sequence
  Synthetic oligonucleotide
gggactcttagcatagtatactcggggagg

SEQ ID NO: 255882 - DNA, 30 bp, Artificial Sequence
  Synthetic oligonucleotide
ccccacgtcaagactacgcggtgggggagg

SEQ ID NO: 255883 - DNA, 30 bp, Artificial Sequence
  Synthetic oligonucleotide
ggttgtagctcgcaggtaacttatgggagg

SEQ ID NO: 255884 - DNA, 30 bp, Artificial Sequence
  Synthetic oligonucleotide
taactggcgcagagagaccgtactgggagg

SEQ ID NO: 255885 - DNA, 30 bp, Artificial Sequence
  Synthetic oligonucleotide
ggtactactggaatctgttcttgtgggagg

SEQ ID NO: 255886 - DNA, 30 bp, Artificial Sequence
  Synthetic oligonucleotide
gctggcccactatgaatatgcatctggagg

SEQ ID NO: 255887 - DNA, 30 bp, Artificial Sequence
  Synthetic oligonucleotide
aaaccgcaatactcgatagagcggtggagg

SEQ ID NO: 255888 - DNA, 30 bp, Artificial Sequence
  Synthetic oligonucleotide
gcattgggtaatatctgtaccaattggagg

SEQ ID NO: 255889 - DNA, 30 bp, Artificial Sequence
  Synthetic oligonucleotide
tgggactcatagtattgtcgattaatgagg

SEQ ID NO: 255890 - DNA, 30 bp, Artificial Sequence
  Synthetic oligonucleotide
tctgggcagccactaatacattagatgagg

SEQ ID NO: 255891 - DNA, 30 bp, Artificial Sequence
  Synthetic oligonucleotide
tatcgcctgaataaatcaaggtgtatgagg

SEQ ID NO: 255892 - DNA, 30 bp, Artificial Sequence
  Synthetic oligonucleotide
gaggcacgtacagtgtgggtcgcactgagg

SEQ ID NO: 255893 - DNA, 30 bp, Artificial Sequence
  Synthetic oligonucleotide
tccaataggcaacaacaagttgacctgagg

SEQ ID NO: 255894 - DNA, 30 bp, Artificial Sequence
  Synthetic oligonucleotide
tgactcgtggaaacatcgcaaagcctgagg

SEQ ID NO: 255895 - DNA, 30 bp, Artificial Sequence
  Synthetic oligonucleotide
aaaaaggcactatggtttcgggggctgagg

SEQ ID NO: 255896 - DNA, 30 bp, Artificial Sequence
  Synthetic oligonucleotide
tcccaatcaacggatcaattggatctgagg

SEQ ID NO: 255897 - DNA, 30 bp, Artificial Sequence
  Synthetic oligonucleotide
tagttccacgaaatgtcaaattatctgagg

SEQ ID NO: 255898 - DNA, 30 bp, Artificial Sequence
  Synthetic oligonucleotide
agggcttggggtcaagtccgtttagtgagg

SEQ ID NO: 255899 - DNA, 30 bp, Artificial Sequence
  Synthetic oligonucleotide
agatcataactaactgggggctacttgagg

SEQ ID NO: 255900 - DNA, 30 bp, Artificial Sequence
  Synthetic oligonucleotide
taatagggatttctggcattgagcttgagg

SEQ ID NO: 255901 - DNA, 30 bp, Artificial Sequence
  Synthetic oligonucleotide
gcaatcttcggcttcaaccttataaatagg

SEQ ID NO: 255902 - DNA, 30 bp, Artificial Sequence
  Synthetic oligonucleotide
cggggaacctcgttcaccgagagcaatagg

SEQ ID NO: 255903 - DNA, 30 bp, Artificial Sequence
  Synthetic oligonucleotide
ggtggccctggtcaacggaccatcaatagg

SEQ ID NO: 255904 - DNA, 30 bp, Artificial Sequence
  Synthetic oligonucleotide
aggtggtgcgtgtattaatcttagaatagg

SEQ ID NO: 255905 - DNA, 30 bp, Artificial Sequence
  Synthetic oligonucleotide
cctaggcagggccttaattcgcggaatagg

SEQ ID NO: 255906 - DNA, 30 bp, Artificial Sequence
  Synthetic oligonucleotide
ccgctacatggaatcggcgtgcttaatagg

SEQ ID NO: 255907 - DNA, 30 bp, Artificial Sequence
  Synthetic oligonucleotide
cgactcatatcagtcccgggtccacatagg

SEQ ID NO: 255908 - DNA, 30 bp, Artificial Sequence
  Synthetic oligonucleotide
caagtccaggtctgttaggagagacatagg

SEQ ID NO: 255909 - DNA, 30 bp, Artificial Sequence
  Synthetic oligonucleotide
ctcacccgacgacctaaagcgtgacatagg

SEQ ID NO: 255910 - DNA, 30 bp, Artificial Sequence
  Synthetic oligonucleotide
ccatgccccgtacgtccattgcaccatagg

SEQ ID NO: 255911 - DNA, 30 bp, Artificial Sequence
  Synthetic oligonucleotide
agagagctcggaaggaatgcgagccatagg

SEQ ID NO: 255912 - DNA, 30 bp, Artificial Sequence
  Synthetic oligonucleotide
caaggcttcgcgagtcgagcgtggcatagg

SEQ ID NO: 255913 - DNA, 30 bp, Artificial Sequence
  Synthetic oligonucleotide
gcgtgaaaatgggtacatatcaaggatagg

SEQ ID NO: 255914 - DNA, 30 bp, Artificial Sequence
  Synthetic oligonucleotide
cctcagttaaaccggtagcgtcatgatagg

SEQ ID NO: 255915 - DNA, 30 bp, Artificial Sequence
  Synthetic oligonucleotide
taccaaatccaagctacgtgagatgatagg

SEQ ID NO: 255916 - DNA, 30 bp, Artificial Sequence
  Synthetic oligonucleotide
cctctaaacagttgtcggcggcttgatagg

SEQ ID NO: 255917 - DNA, 30 bp, Artificial Sequence
  Synthetic oligonucleotide
gcgtcggccaaggcgttaagaggatatagg

SEQ ID NO: 255918 - DNA, 30 bp, Artificial Sequence
  Synthetic oligonucleotide
gattcggagatgtgcacagtaggctatagg

SEQ ID NO: 255919 - DNA, 30 bp, Artificial Sequence
  Synthetic oligonucleotide
atttctggcattagccttgggatctatagg

SEQ ID NO: 255920 - DNA, 30 bp, Artificial Sequence
  Synthetic oligonucleotide
tcatccggatcatcagcagtgcattatagg

SEQ ID NO: 255921 - DNA, 30 bp, Artificial Sequence
  Synthetic oligonucleotide
aggctgcggacgttttgtcgttcttatagg

SEQ ID NO: 255922 - DNA, 31 bp, Artificial Sequence
  Synthetic oligonucleotide
acggcatgcttccaacgcagcgatttatagg

SEQ ID NO: 255923 - DNA, 30 bp, Artificial Sequence
  Synthetic oligonucleotide
acctaataatacctgcgaacatacactagg

SEQ ID NO: 255924 - DNA, 30 bp, Artificial Sequence
  Synthetic oligonucleotide
taaccccagctgacatcagatccgactagg

SEQ ID NO: 255925 - DNA, 30 bp, Artificial Sequence
  Synthetic oligonucleotide
gatgggacgagagcacaggaaaggactagg

SEQ ID NO: 255926 - DNA, 30 bp, Artificial Sequence
  Synthetic oligonucleotide
gcaaaagctaccggatcagtagtgactagg

SEQ ID NO: 255927 - DNA, 30 bp, Artificial Sequence
  Synthetic oligonucleotide
ctgacatatcacaggtaaattcttactagg

SEQ ID NO: 255928 - DNA, 30 bp, Artificial Sequence
  Synthetic oligonucleotide
ctcggggattcggtttggcacggccctagg

SEQ ID NO: 255929 - DNA, 30 bp, Artificial Sequence
  Synthetic oligonucleotide
ttcgcgaatcgagaagcggagccgcctagg

SEQ ID NO: 255930 - DNA, 30 bp, Artificial Sequence
  Synthetic oligonucleotide
ggagtccaataacgggacgggtcgcctagg

SEQ ID NO: 255931 - DNA, 30 bp, Artificial Sequence
  Synthetic oligonucleotide
gcttcgacagggcggtactcggggcctagg

SEQ ID NO: 255932 - DNA, 30 bp, Artificial Sequence
  Synthetic oligonucleotide
acgtaggtctagccgttcaggattcctagg

SEQ ID NO: 255933 - DNA, 30 bp, Artificial Sequence
  Synthetic oligonucleotide
tgatctccctaaaaaggcgactgagctagg

SEQ ID NO: 255934 - DNA, 30 bp, Artificial Sequence
  Synthetic oligonucleotide
tgtaaggcccgataatattaaatagctagg

SEQ ID NO: 255935 - DNA, 30 bp, Artificial Sequence
  Synthetic oligonucleotide
tgtccgacaggtttcgtacgtgccgctagg

SEQ ID NO: 255936 - DNA, 30 bp, Artificial Sequence
  Synthetic oligonucleotide
ggggagtggggtaaatgggtactcgctagg

SEQ ID NO: 255937 - DNA, 30 bp, Artificial Sequence
  Synthetic oligonucleotide
aagctggtgtagtaggctataaaatctagg

SEQ ID NO: 255938 - DNA, 30 bp, Artificial Sequence
  Synthetic oligonucleotide
aacgtgacgggtgctgaagttctatctagg

SEQ ID NO: 255939 - DNA, 30 bp, Artificial Sequence
  Synthetic oligonucleotide
cttgtaagcagtttacggaaatattctagg

SEQ ID NO: 255940 - DNA, 30 bp, Artificial Sequence
  Synthetic oligonucleotide
agctagcacaaggcatgaccggacagtagg

SEQ ID NO: 255941 - DNA, 30 bp, Artificial Sequence
  Synthetic oligonucleotide
gatgccaggctgagtcagagtatcagtagg

SEQ ID NO: 255942 - DNA, 30 bp, Artificial Sequence
  Synthetic oligonucleotide
agagccatcgcaataaactgagtcagtagg

SEQ ID NO: 255943 - DNA, 30 bp, Artificial Sequence
  Synthetic oligonucleotide
ttttgttcagcgccagagaccgtgagtagg

SEQ ID NO: 255944 - DNA, 30 bp, Artificial Sequence
  Synthetic oligonucleotide
tctccaccagacccgaacggtttgagtagg

SEQ ID NO: 255945 - DNA, 30 bp, Artificial Sequence
  Synthetic oligonucleotide
tgtcgaggcacacacgaacactttagtagg

SEQ ID NO: 255946 - DNA, 30 bp, Artificial Sequence
  Synthetic oligonucleotide
agagggtcctatgaagccgatcagcgtagg

SEQ ID NO: 255947 - DNA, 30 bp, Artificial Sequence
  Synthetic oligonucleotide
tgtcctgattgagaatatgattagcgtagg

SEQ ID NO: 255948 - DNA, 30 bp, Artificial Sequence
  Synthetic oligonucleotide
aatctagcacgacacaggcgctcgcgtagg

SEQ ID NO: 255949 - DNA, 30 bp, Artificial Sequence
  Synthetic oligonucleotide
ctttactgagctcactcaaggactcgtagg

SEQ ID NO: 255950 - DNA, 30 bp, Artificial Sequence
  Synthetic oligonucleotide
gtgcttaacgtcacatgaatctttcgtagg

SEQ ID NO: 255951 - DNA, 30 bp, Artificial Sequence
  Synthetic oligonucleotide
aatgagatcggtgaaagggaactcggtagg

SEQ ID NO: 255952 - DNA, 30 bp, Artificial Sequence
  Synthetic oligonucleotide
attgtgcacctttgggcacatcagggtagg

SEQ ID NO: 255953 - DNA, 30 bp, Artificial Sequence
  Synthetic oligonucleotide
taagttcgtgactgttacactcagggtagg

SEQ ID NO: 255954 - DNA, 30 bp, Artificial Sequence
  Synthetic oligonucleotide
tgggaacaagtgggcctgagtaggggtagg

SEQ ID NO: 255955 - DNA, 30 bp, Artificial Sequence
  Synthetic oligonucleotide
gttagacgcgctggagccgacaatggtagg

SEQ ID NO: 255956 - DNA, 30 bp, Artificial Sequence
  Synthetic oligonucleotide
atgagagagccatgagtcacagcatgtagg

SEQ ID NO: 255957 - DNA, 30 bp, Artificial Sequence
  Synthetic oligonucleotide
cgccacccacctcggttgggtagatgtagg

SEQ ID NO: 255958 - DNA, 30 bp, Artificial Sequence
  Synthetic oligonucleotide
taaatatgcgactgtctggttctctgtagg

SEQ ID NO: 255959 - DNA, 30 bp, Artificial Sequence
  Synthetic oligonucleotide
cgttactgtcggggtttcgctttttgtagg

SEQ ID NO: 255960 - DNA, 30 bp, Artificial Sequence
  Synthetic oligonucleotide
ttagttattaggagtggtagcgtcattagg

SEQ ID NO: 255961 - DNA, 30 bp, Artificial Sequence
  Synthetic oligonucleotide
gtttcgtatcgatgttcctcattgattagg

SEQ ID NO: 255962 - DNA, 30 bp, Artificial Sequence
  Synthetic oligonucleotide
tctctagctaccatcgcggtgggtattagg

SEQ ID NO: 255963 - DNA, 30 bp, Artificial Sequence
  Synthetic oligonucleotide
tgaggataatatcggccaaagcaacttagg

SEQ ID NO: 255964 - DNA, 31 bp, Artificial Sequence
  Synthetic oligonucleotide
agggtcgagtgggcacatacgtccacttagg

SEQ ID NO: 255965 - DNA, 30 bp, Artificial Sequence
  Synthetic oligonucleotide
taagtccatttcactatgttgagccttagg

SEQ ID NO: 255966 - DNA, 30 bp, Artificial Sequence
  Synthetic oligonucleotide
ggtatataggggatagaaatcttccttagg

SEQ ID NO: 255967 - DNA, 30 bp, Artificial Sequence
  Synthetic oligonucleotide
tagatctaataatagggcaatcgtcttagg

SEQ ID NO: 255968 - DNA, 30 bp, Artificial Sequence
  Synthetic oligonucleotide
tatatagaattgtcgagtccattagttagg

SEQ ID NO: 255969 - DNA, 30 bp, Artificial Sequence
  Synthetic oligonucleotide
gtactaatcagaagaataccttgcgttagg

SEQ ID NO: 255970 - DNA, 30 bp, Artificial Sequence
  Synthetic oligonucleotide
ctgctctaaagcagtaaaggcctcgttagg

SEQ ID NO: 255971 - DNA, 30 bp, Artificial Sequence
  Synthetic oligonucleotide
caccacgcaaaattgcttgtattcgttagg

SEQ ID NO: 255972 - DNA, 30 bp, Artificial Sequence
  Synthetic oligonucleotide
atttgcagtgtgctaatggtctatgttagg

SEQ ID NO: 255973 - DNA, 30 bp, Artificial Sequence
  Synthetic oligonucleotide
attccgagaaggagggatttacagtttagg

SEQ ID NO: 255974 - DNA, 30 bp, Artificial Sequence
  Synthetic oligonucleotide
ttagaagcacaaccggcaggtcagtttagg

SEQ ID NO: 255975 - DNA, 30 bp, Artificial Sequence
  Synthetic oligonucleotide
agtttccaagacgggatagagaggtttagg

SEQ ID NO: 255976 - DNA, 30 bp, Artificial Sequence
  Synthetic oligonucleotide
tatgttcagcttggtactttaagttttagg

SEQ ID NO: 255977 - DNA, 30 bp, Artificial Sequence
  Synthetic oligonucleotide
ccgcgttgacgccgaataattcgttttagg

SEQ ID NO: 255978 - DNA, 30 bp, Artificial Sequence
  Synthetic oligonucleotide
atgcttccggactagggagactaaaaacgg

SEQ ID NO: 255979 - DNA, 30 bp, Artificial Sequence
  Synthetic oligonucleotide
cggttctcttgaggttgaacagacaaacgg

SEQ ID NO: 255980 - DNA, 30 bp, Artificial Sequence
  Synthetic oligonucleotide
agtttccacaagagcacgcaccccaaacgg

SEQ ID NO: 255981 - DNA, 30 bp, Artificial Sequence
  Synthetic oligonucleotide
gtgacagctttatgtgtctttatgaaacgg

SEQ ID NO: 255982 - DNA, 30 bp, Artificial Sequence
  Synthetic oligonucleotide
taccagagcggctagatttatctgaaacgg

SEQ ID NO: 255983 - DNA, 30 bp, Artificial Sequence
  Synthetic oligonucleotide
gcaggcgcaagctatatgtataataaacgg

SEQ ID NO: 255984 - DNA, 30 bp, Artificial Sequence
  Synthetic oligonucleotide
cttgagcaggcatcggcgccctgacaacgg

SEQ ID NO: 255985 - DNA, 30 bp, Artificial Sequence
  Synthetic oligonucleotide
agactacggtcagtctccttcccccaacgg

SEQ ID NO: 255986 - DNA, 30 bp, Artificial Sequence
  Synthetic oligonucleotide
ggttatgaattaaaaccgaaattgcaacgg

SEQ ID NO: 255987 - DNA, 30 bp, Artificial Sequence
  Synthetic oligonucleotide
ataacatgctcccccatgaagattcaacgg

SEQ ID NO: 255988 - DNA, 30 bp, Artificial Sequence
  Synthetic oligonucleotide
agttgagtcagagtattatggccagaacgg

SEQ ID NO: 255989 - DNA, 30 bp, Artificial Sequence
  Synthetic oligonucleotide
cacagaagtgtaggcgaaagctcagaacgg

SEQ ID NO: 255990 - DNA, 30 bp, Artificial Sequence
  Synthetic oligonucleotide
gtcgacataggagagttcatgtcagaacgg

SEQ ID NO: 255991 - DNA, 30 bp, Artificial Sequence
  Synthetic oligonucleotide
ctcggaccccagaattggtactccgaacgg

SEQ ID NO: 255992 - DNA, 30 bp, Artificial Sequence
  Synthetic oligonucleotide
gcccagtgccctcatgaactacctgaacgg

SEQ ID NO: 255993 - DNA, 30 bp, Artificial Sequence
  Synthetic oligonucleotide
atctcaagttaaaaatcatgttctgaacgg

SEQ ID NO: 255994 - DNA, 30 bp, Artificial Sequence
  Synthetic oligonucleotide
gttcagttggcaagtgtggcaaaataacgg

SEQ ID NO: 255995 - DNA, 30 bp, Artificial Sequence
  Synthetic oligonucleotide
cttctcagggcattagataagggctaacgg

SEQ ID NO: 255996 - DNA, 30 bp, Artificial Sequence
  Synthetic oligonucleotide
tcgaaatcgagtattttccttggctaacgg

SEQ ID NO: 255997 - DNA, 30 bp, Artificial Sequence
  Synthetic oligonucleotide
caagtggtctcatacccgacggcgtaacgg

SEQ ID NO: 255998 - DNA, 30 bp, Artificial Sequence
  Synthetic oligonucleotide
tatctcaaatgaggaattatggcgtaacgg

SEQ ID NO: 255999 - DNA, 30 bp, Artificial Sequence
  Synthetic oligonucleotide
ggcaatgaaaacgctactgttgtttaacgg

SEQ ID NO: 256000 - DNA, 30 bp, Artificial Sequence
  Synthetic oligonucleotide
acgtacggatcgaagcccttagatacacgg

SEQ ID NO: 256001 - DNA, 30 bp, Artificial Sequence
  Synthetic oligonucleotide
agtttagttgggatgtaggatacaccacgg

SEQ ID NO: 256002 - DNA, 31 bp, Artificial Sequence
  Synthetic oligonucleotide
ccaatacgggtcatagtgtcagggaccacgg

SEQ ID NO: 256003 - DNA, 30 bp, Artificial Sequence
  Synthetic oligonucleotide
accggatccgagtcttatgctggaccacgg

SEQ ID NO: 256004 - DNA, 30 bp, Artificial Sequence
  Synthetic oligonucleotide
ggcattcatcgagcaaatataaacccacgg

SEQ ID NO: 256005 - DNA, 30 bp, Artificial Sequence
  Synthetic oligonucleotide
tacaacagtcatgtgacggaaaccccacgg

SEQ ID NO: 256006 - DNA, 27 bp, Artificial Sequence
  Synthetic oligonucleotide
atggcggccggtttccacattccacgg

SEQ ID NO: 256007 - DNA, 30 bp, Artificial Sequence
  Synthetic oligonucleotide
ggcggcgcaagccacatatttattccacgg

SEQ ID NO: 256008 - DNA, 30 bp, Artificial Sequence
  Synthetic oligonucleotide
actcgaataccgttcattagcgaagcacgg

SEQ ID NO: 256009 - DNA, 30 bp, Artificial Sequence
  Synthetic oligonucleotide
gcacctaggctgtcagaagttagcgcacgg

SEQ ID NO: 256010 - DNA, 30 bp, Artificial Sequence
  Synthetic oligonucleotide
ccatcggataagcctgaggccagggcacgg

SEQ ID NO: 256011 - DNA, 30 bp, Artificial Sequence
  Synthetic oligonucleotide
cgaaccctctcataaacatgtaaatcacgg

SEQ ID NO: 256012 - DNA, 30 bp, Artificial Sequence
  Synthetic oligonucleotide
gaccaaagctatagtaaggaagcatcacgg

SEQ ID NO: 256013 - DNA, 31 bp, Artificial Sequence
  Synthetic oligonucleotide
gtatcggtcaaaatgacggggcggatcacgg

SEQ ID NO: 256014 - DNA, 30 bp, Artificial Sequence
  Synthetic oligonucleotide
gtgtagcgttgggacatattacgctcacgg

SEQ ID NO: 256015 - DNA, 30 bp, Artificial Sequence
  Synthetic oligonucleotide
tatacgatggcttacgtgcatatctcacgg

SEQ ID NO: 256016 - DNA, 30 bp, Artificial Sequence
  Synthetic oligonucleotide
ctcttggaaatggaacatcacctgtcacgg

SEQ ID NO: 256017 - DNA, 30 bp, Artificial Sequence
  Synthetic oligonucleotide
ccagcttcggcatttaacaccgcttcacgg

SEQ ID NO: 256018 - DNA, 30 bp, Artificial Sequence
  Synthetic oligonucleotide
ctcagcataagatgacgtcaggaaagacgg

SEQ ID NO: 256019 - DNA, 30 bp, Artificial Sequence
  Synthetic oligonucleotide
aagatactagttaagaatacgctaagacgg

SEQ ID NO: 256020 - DNA, 30 bp, Artificial Sequence
  Synthetic oligonucleotide
agaagtgatatgtccaagctattgagacgg

SEQ ID NO: 256021 - DNA, 30 bp, Artificial Sequence
  Synthetic oligonucleotide
gaatagtgaggtactatgctcgatagacgg

SEQ ID NO: 256022 - DNA, 30 bp, Artificial Sequence
  Synthetic oligonucleotide
tctaagaccgagacttaaatcagtagacgg

SEQ ID NO: 256023 - DNA, 30 bp, Artificial Sequence
  Synthetic oligonucleotide
agtaagggttagggacatttcggacgacgg

SEQ ID NO: 256024 - DNA, 30 bp, Artificial Sequence
  Synthetic oligonucleotide
tccttgggaacataatggagggaccgacgg

SEQ ID NO: 256025 - DNA, 30 bp, Artificial Sequence
  Synthetic oligonucleotide
acaacacggcggggaagataggggcgacgg

SEQ ID NO: 256026 - DNA, 27 bp, Artificial Sequence
  Synthetic oligonucleotide
tatcggtgccacgggcgggtgcgacgg

SEQ ID NO: 256027 - DNA, 30 bp, Artificial Sequence
  Synthetic oligonucleotide
gcggtcatactcatcgcgagccctcgacgg

SEQ ID NO: 256028 - DNA, 30 bp, Artificial Sequence
  Synthetic oligonucleotide
gtctgcgcttcatttaaggtataaggacgg

SEQ ID NO: 256029 - DNA, 30 bp, Artificial Sequence
  Synthetic oligonucleotide
caaaggcatggtgtctgtaatctaggacgg

SEQ ID NO: 256030 - DNA, 30 bp, Artificial Sequence
  Synthetic oligonucleotide
cacacccatggacgtaatagtgagggacgg

SEQ ID NO: 256031 - DNA, 30 bp, Artificial Sequence
  Synthetic oligonucleotide
tgccaaggtttatctccgtgcaggggacgg

SEQ ID NO: 256032 - DNA, 30 bp, Artificial Sequence
  Synthetic oligonucleotide
agatagtacctgtgcccggagtttggacgg

SEQ ID NO: 256033 - DNA, 30 bp, Artificial Sequence
  Synthetic oligonucleotide
agccacgatttggcgatgacctgatgacgg

SEQ ID NO: 256034 - DNA, 30 bp, Artificial Sequence
  Synthetic oligonucleotide
ccgcgcactagtctccgacataagtgacgg

SEQ ID NO: 256035 - DNA, 30 bp, Artificial Sequence
  Synthetic oligonucleotide
gctagaaatcacggtttcctctgttgacgg

SEQ ID NO: 256036 - DNA, 30 bp, Artificial Sequence
  Synthetic oligonucleotide
cgggtggactaaagacaagtgttcatacgg

SEQ ID NO: 256037 - DNA, 30 bp, Artificial Sequence
  Synthetic oligonucleotide
cgctcagacgtgcgtttaccgtctatacgg

SEQ ID NO: 256038 - DNA, 30 bp, Artificial Sequence
  Synthetic oligonucleotide
atcattgtggtggaatattgggcactacgg

SEQ ID NO: 256039 - DNA, 30 bp, Artificial Sequence
  Synthetic oligonucleotide
gagtaagagtcctttgagtcacatctacgg

SEQ ID NO: 256040 - DNA, 30 bp, Artificial Sequence
  Synthetic oligonucleotide
agctggcatatcgcatgaatcgaagtacgg

SEQ ID NO: 256041 - DNA, 30 bp, Artificial Sequence
  Synthetic oligonucleotide
atgtacatctgtaaaatgcatcaggtacgg

SEQ ID NO: 256042 - DNA, 30 bp, Artificial Sequence
  Synthetic oligonucleotide
aatacatatccggagggcgccacggtacgg

SEQ ID NO: 256043 - DNA, 30 bp, Artificial Sequence
  Synthetic oligonucleotide
ggtagtgggaagattatattcgcggtacgg

SEQ ID NO: 256044 - DNA, 30 bp, Artificial Sequence
  Synthetic oligonucleotide
ccaaaccaaacaaaatgatttatggtacgg

SEQ ID NO: 256045 - DNA, 30 bp, Artificial Sequence
  Synthetic oligonucleotide
aacgcaatcgcgtttatagacgcattacgg

SEQ ID NO: 256046 - DNA, 30 bp, Artificial Sequence
  Synthetic oligonucleotide
aactggtcaagcgtatatgcgggattacgg

SEQ ID NO: 256047 - DNA, 30 bp, Artificial Sequence
  Synthetic oligonucleotide
ttcgtaaaggcagggctgaatcacttacgg

SEQ ID NO: 256048 - DNA, 30 bp, Artificial Sequence
  Synthetic oligonucleotide
ctaataagcattgcagcgtaaaagttacgg

SEQ ID NO: 256049 - DNA, 30 bp, Artificial Sequence
  Synthetic oligonucleotide
tcggcgttagatagcgcccgggatttacgg

SEQ ID NO: 256050 - DNA, 30 bp, Artificial Sequence
  Synthetic oligonucleotide
cactatcgtaaaactatgaactatttacgg

SEQ ID NO: 256051 - DNA, 30 bp, Artificial Sequence
  Synthetic oligonucleotide
tgtggcctggcaagtgaacgtagtttacgg

SEQ ID NO: 256052 - DNA, 30 bp, Artificial Sequence
  Synthetic oligonucleotide
ttcggattagattaactcgtcattttacgg

SEQ ID NO: 256053 - DNA, 30 bp, Artificial Sequence
  Synthetic oligonucleotide
tgtcggagaactggttttacgaacaaccgg

SEQ ID NO: 256054 - DNA, 30 bp, Artificial Sequence
  Synthetic oligonucleotide
gtaggtgcggagtgggtgaggaataaccgg

SEQ ID NO: 256055 - DNA, 30 bp, Artificial Sequence
  Synthetic oligonucleotide
gacgtcgtttgccagtagctccataaccgg

SEQ ID NO: 256056 - DNA, 30 bp, Artificial Sequence
  Synthetic oligonucleotide
tattggcgctacgtgcaccatcataaccgg

SEQ ID NO: 256057 - DNA, 30 bp, Artificial Sequence
  Synthetic oligonucleotide
ttgtagtgagactacggttgacgtaaccgg

SEQ ID NO: 256058 - DNA, 30 bp, Artificial Sequence
  Synthetic oligonucleotide
ttttgggcaaccgttagtaagtaccaccgg

SEQ ID NO: 256059 - DNA, 30 bp, Artificial Sequence
  Synthetic oligonucleotide
gtcgataggtgagtggatagcgtccaccgg

SEQ ID NO: 256060 - DNA, 30 bp, Artificial Sequence
  Synthetic oligonucleotide
ggtatactagagtccaccgatgttcaccgg

SEQ ID NO: 256061 - DNA, 30 bp, Artificial Sequence
  Synthetic oligonucleotide
tatggcccaagcggcgaggggacagaccgg

SEQ ID NO: 256062 - DNA, 30 bp, Artificial Sequence
  Synthetic oligonucleotide
taagtatcgtaaactggacagcacgaccgg

SEQ ID NO: 256063 - DNA, 30 bp, Artificial Sequence
  Synthetic oligonucleotide
gtcacatataggtcgcgttttctcgaccgg

SEQ ID NO: 256064 - DNA, 30 bp, Artificial Sequence
  Synthetic oligonucleotide
tgtggacctgattgtcattcgctttaccgg

SEQ ID NO: 256065 - DNA, 30 bp, Artificial Sequence
  Synthetic oligonucleotide
attccaaacatacccttgacaaaaacccgg

SEQ ID NO: 256066 - DNA, 30 bp, Artificial Sequence
  Synthetic oligonucleotide
cgctaattactttgattccgggcaacccgg

SEQ ID NO: 256067 - DNA, 30 bp, Artificial Sequence
  Synthetic oligonucleotide
actccaagtaaaattaggagccccacccgg

SEQ ID NO: 256068 - DNA, 30 bp, Artificial Sequence
  Synthetic oligonucleotide
atgaaccaatacaaggcgatacgcacccgg

SEQ ID NO: 256069 - DNA, 30 bp, Artificial Sequence
  Synthetic oligonucleotide
gcaatggatcggtgtgacctctaaccccgg

SEQ ID NO: 256070 - DNA, 30 bp, Artificial Sequence
  Synthetic oligonucleotide
cttggggagcaactcacttagaagccccgg

SEQ ID NO: 256071 - DNA, 30 bp, Artificial Sequence
  Synthetic oligonucleotide
ttagtctaagcttagacaacctagccccgg

SEQ ID NO: 256072 - DNA, 30 bp, Artificial Sequence
  Synthetic oligonucleotide
tcaatttctgtagggctcaaccttccccgg

SEQ ID NO: 256073 - DNA, 30 bp, Artificial Sequence
  Synthetic oligonucleotide
ggagcggtcgcatcgttagagacagcccgg

SEQ ID NO: 256074 - DNA, 30 bp, Artificial Sequence
  Synthetic oligonucleotide
ctattaggggatatgtagaatacagcccgg

SEQ ID NO: 256075 - DNA, 30 bp, Artificial Sequence
  Synthetic oligonucleotide
tgcctttcgccaaaggagtctcacgcccgg

SEQ ID NO: 256076 - DNA, 30 bp, Artificial Sequence
  Synthetic oligonucleotide
aggatctctctagagtgaaacctcgcccgg

SEQ ID NO: 256077 - DNA, 30 bp, Artificial Sequence
  Synthetic oligonucleotide
cactaccgtagatgcgttggtcgggcccgg

SEQ ID NO: 256078 - DNA, 30 bp, Artificial Sequence
  Synthetic oligonucleotide
ccggtagtacataccgatcatggggcccgg

SEQ ID NO: 256079 - DNA, 30 bp, Artificial Sequence
  Synthetic oligonucleotide
aactgtgacgggggtgattatggggcccgg

SEQ ID NO: 256080 - DNA, 30 bp, Artificial Sequence
  Synthetic oligonucleotide
tctacagtctgggggggtgcagtggcccgg

SEQ ID NO: 256081 - DNA, 30 bp, Artificial Sequence
  Synthetic oligonucleotide
cccgagacctgggttcgactcatcagccgg

SEQ ID NO: 256082 - DNA, 30 bp, Artificial Sequence
  Synthetic oligonucleotide
ggtgagcccagcaactgaagaggtagccgg

SEQ ID NO: 256083 - DNA, 31 bp, Artificial Sequence
  Synthetic oligonucleotide
cagaccggttcctacgtttcctattagccgg

SEQ ID NO: 256084 - DNA, 30 bp, Artificial Sequence
  Synthetic oligonucleotide
aatgtgtaaattgggcattctatacgccgg

SEQ ID NO: 256085 - DNA, 30 bp, Artificial Sequence
  Synthetic oligonucleotide
tttcatgcggcttagggcacggaccgccgg

SEQ ID NO: 256086 - DNA, 30 bp, Artificial Sequence
  Synthetic oligonucleotide
cgcttccctggaacacgaaatcgccgccgg

SEQ ID NO: 256087 - DNA, 30 bp, Artificial Sequence
  Synthetic oligonucleotide
ctggtaccgcataggctatcaggccgccgg

SEQ ID NO: 256088 - DNA, 30 bp, Artificial Sequence
  Synthetic oligonucleotide
gggaacagaatccacggccagggccgccgg

SEQ ID NO: 256089 - DNA, 30 bp, Artificial Sequence
  Synthetic oligonucleotide
gtagttgtgggaggctaaagtgctcgccgg

SEQ ID NO: 256090 - DNA, 30 bp, Artificial Sequence
  Synthetic oligonucleotide
ggtaatatattacggataaaactaggccgg

SEQ ID NO: 256091 - DNA, 30 bp, Artificial Sequence
  Synthetic oligonucleotide
tcggcgggatgcccttaatgggccggccgg

SEQ ID NO: 256092 - DNA, 30 bp, Artificial Sequence
  Synthetic oligonucleotide
gccggggatggaatgtaaacgttcggccgg

SEQ ID NO: 256093 - DNA, 30 bp, Artificial Sequence
  Synthetic oligonucleotide
catcgcggtactgtcgcgcttaagggccgg

SEQ ID NO: 256094 - DNA, 30 bp, Artificial Sequence
  Synthetic oligonucleotide
attcgtcggacggtttaacggtcgggccgg

SEQ ID NO: 256095 - DNA, 30 bp, Artificial Sequence
  Synthetic oligonucleotide
tacgaactatcaaggacttttactggccgg

SEQ ID NO: 256096 - DNA, 30 bp, Artificial Sequence
  Synthetic oligonucleotide
tgcaggaagtctctgacgaagggatgccgg

SEQ ID NO: 256097 - DNA, 30 bp, Artificial Sequence
  Synthetic oligonucleotide
tgcctgtcagagagcgcgtgtagctgccgg

SEQ ID NO: 256098 - DNA, 30 bp, Artificial Sequence
  Synthetic oligonucleotide
gatgattttttgccatataatagttgccgg

SEQ ID NO: 256099 - DNA, 30 bp, Artificial Sequence
  Synthetic oligonucleotide
tgacagaacgttctctcctaaaaaatccgg

SEQ ID NO: 256100 - DNA, 30 bp, Artificial Sequence
  Synthetic oligonucleotide
gtagtcggttaactccctagataaatccgg

SEQ ID NO: 256101 - DNA, 30 bp, Artificial Sequence
  Synthetic oligonucleotide
ggaaagcgtctatcaggccaagcaatccgg

SEQ ID NO: 256102 - DNA, 30 bp, Artificial Sequence
  Synthetic oligonucleotide
gcaccatagaagcggactaactgaatccgg

SEQ ID NO: 256103 - DNA, 30 bp, Artificial Sequence
  Synthetic oligonucleotide
ctcgctgggctagtgttcctctgaatccgg

SEQ ID NO: 256104 - DNA, 30 bp, Artificial Sequence
  Synthetic oligonucleotide
gtaacaggcttcctagggccttgaatccgg

SEQ ID NO: 256105 - DNA, 30 bp, Artificial Sequence
  Synthetic oligonucleotide
atagcgttgggtgccaattggctcatccgg

SEQ ID NO: 256106 - DNA, 30 bp, Artificial Sequence
  Synthetic oligonucleotide
agtatgctattactggtccctagtatccgg

SEQ ID NO: 256107 - DNA, 30 bp, Artificial Sequence
  Synthetic oligonucleotide
aggttagccccgtcgcgtagcgagctccgg

SEQ ID NO: 256108 - DNA, 30 bp, Artificial Sequence
  Synthetic oligonucleotide
cagggtgagagtgtatctaagtcgctccgg

SEQ ID NO: 256109 - DNA, 30 bp, Artificial Sequence
  Synthetic oligonucleotide
ctccattccagtaggttactatggctccgg

SEQ ID NO: 256110 - DNA, 30 bp, Artificial Sequence
  Synthetic oligonucleotide
aggaattaataggatcttagcgttctccgg

SEQ ID NO: 256111 - DNA, 30 bp, Artificial Sequence
  Synthetic oligonucleotide
ctacaggacttccagcatgcttgagtccgg

SEQ ID NO: 256112 - DNA, 30 bp, Artificial Sequence
  Synthetic oligonucleotide
aattccgaaccgtatatgggcaacgtccgg

SEQ ID NO: 256113 - DNA, 30 bp, Artificial Sequence
  Synthetic oligonucleotide
ggaaaagttcctcacaattgatacgtccgg

SEQ ID NO: 256114 - DNA, 30 bp, Artificial Sequence
  Synthetic oligonucleotide
gttcagtgaggccaacgtaaacaggtccgg

SEQ ID NO: 256115 - DNA, 30 bp, Artificial Sequence
  Synthetic oligonucleotide
atgaatctcttggatggggagggggtccgg

SEQ ID NO: 256116 - DNA, 30 bp, Artificial Sequence
  Synthetic oligonucleotide
gtgcaagtcttcacaagtgcaaatgtccgg

SEQ ID NO: 256117 - DNA, 30 bp, Artificial Sequence
  Synthetic oligonucleotide
gtccagtgaagttggtcactaagattccgg

SEQ ID NO: 256118 - DNA, 30 bp, Artificial Sequence
  Synthetic oligonucleotide
gttttgcaacattaccgtagcggcttccgg

SEQ ID NO: 256119 - DNA, 30 bp, Artificial Sequence
  Synthetic oligonucleotide
tggaggaggcaccaccctagtcaaaagcgg

SEQ ID NO: 256120 - DNA, 30 bp, Artificial Sequence
  Synthetic oligonucleotide
caaaacccgatctctcctctgtcaaagcgg

SEQ ID NO: 256121 - DNA, 30 bp, Artificial Sequence
  Synthetic oligonucleotide
cctagacctgacacggaaaccgacaagcgg

SEQ ID NO: 256122 - DNA, 30 bp, Artificial Sequence
  Synthetic oligonucleotide
acgaccattgggggtgcaacgctcaagcgg

SEQ ID NO: 256123 - DNA, 30 bp, Artificial Sequence
  Synthetic oligonucleotide
ttgtcgagtgtttggaatacagtcaagcgg

SEQ ID NO: 256124 - DNA, 30 bp, Artificial Sequence
  Synthetic oligonucleotide
tctcccgcatgcctatgcgattctaagcgg

SEQ ID NO: 256125 - DNA, 30 bp, Artificial Sequence
  Synthetic oligonucleotide
ataagggttttatcttacatgagtaagcgg

SEQ ID NO: 256126 - DNA, 30 bp, Artificial Sequence
  Synthetic oligonucleotide
cacagcacaccggaacgatggggtaagcgg

SEQ ID NO: 256127 - DNA, 30 bp, Artificial Sequence
  Synthetic oligonucleotide
caagagaaccggccatggcgcgcagagcgg

SEQ ID NO: 256128 - DNA, 31 bp, Artificial Sequence
  Synthetic oligonucleotide
tggcggcggacggcgcgaatgaggagagcgg

SEQ ID NO: 256129 - DNA, 30 bp, Artificial Sequence
  Synthetic oligonucleotide
ggggtagacacattagggtccggcgagcgg

SEQ ID NO: 256130 - DNA, 30 bp, Artificial Sequence
  Synthetic oligonucleotide
gctcaagaatagacccgcgtttgggagcgg

SEQ ID NO: 256131 - DNA, 30 bp, Artificial Sequence
  Synthetic oligonucleotide
gcatccccgcattccgtaatgccatagcgg

SEQ ID NO: 256132 - DNA, 30 bp, Artificial Sequence
  Synthetic oligonucleotide
tcaggaagttaagcgagggttggatagcgg

SEQ ID NO: 256133 - DNA, 30 bp, Artificial Sequence
  Synthetic oligonucleotide
gtgtcgtaaccttcctttgaaaaaacgcgg

SEQ ID NO: 256134 - DNA, 30 bp, Artificial Sequence
  Synthetic oligonucleotide
gaaagcgagggtatgatttccataacgcgg

SEQ ID NO: 256135 - DNA, 30 bp, Artificial Sequence
  Synthetic oligonucleotide
tgctggcacgtgaaaaattcacacacgcgg

SEQ ID NO: 256136 - DNA, 30 bp, Artificial Sequence
  Synthetic oligonucleotide
aaaggtaatagcaattaatttccaccgcgg

SEQ ID NO: 256137 - DNA, 30 bp, Artificial Sequence
  Synthetic oligonucleotide
gttctaaacgtgactcgccaccacccgcgg

SEQ ID NO: 256138 - DNA, 30 bp, Artificial Sequence
  Synthetic oligonucleotide
acttgcttgataccaccggtgagcgcgcgg

SEQ ID NO: 256139 - DNA, 30 bp, Artificial Sequence
  Synthetic oligonucleotide
cagggcacgtgacaagctttaaaggcgcgg

SEQ ID NO: 256140 - DNA, 30 bp, Artificial Sequence
  Synthetic oligonucleotide
gtcatatatggtaatccaaccccggcgcgg

SEQ ID NO: 256141 - DNA, 30 bp, Artificial Sequence
  Synthetic oligonucleotide
aaagcgcgatcattagttgcagatgcgcgg

SEQ ID NO: 256142 - DNA, 30 bp, Artificial Sequence
  Synthetic oligonucleotide
ccaggtcgcttagattaaactattgcgcgg

SEQ ID NO: 256143 - DNA, 30 bp, Artificial Sequence
  Synthetic oligonucleotide
taagctacagatagcatactcatatcgcgg

SEQ ID NO: 256144 - DNA, 30 bp, Artificial Sequence
  Synthetic oligonucleotide
tctgtgcccccacccaccggcatctcgcgg

SEQ ID NO: 256145 - DNA, 30 bp, Artificial Sequence
  Synthetic oligonucleotide
ttcatacgacgctcgagtgatggttcgcgg

SEQ ID NO: 256146 - DNA, 30 bp, Artificial Sequence
  Synthetic oligonucleotide
tgtgcataacctcctgaataagctaggcgg

SEQ ID NO: 256147 - DNA, 30 bp, Artificial Sequence
  Synthetic oligonucleotide
aggccatccaggaacatagcatctaggcgg

SEQ ID NO: 256148 - DNA, 30 bp, Artificial Sequence
  Synthetic oligonucleotide
cacttcgttttctgccatggcgttaggcgg

SEQ ID NO: 256149 - DNA, 30 bp, Artificial Sequence
  Synthetic oligonucleotide
ctcagcttctcaagagatagtgtcgggcgg

SEQ ID NO: 256150 - DNA, 30 bp, Artificial Sequence
  Synthetic oligonucleotide
tatagtctccagagcgcgaaacaggggcgg

SEQ ID NO: 256151 - DNA, 30 bp, Artificial Sequence
  Synthetic oligonucleotide
cccctagactaaacgatacatgaggggcgg

SEQ ID NO: 256152 - DNA, 30 bp, Artificial Sequence
  Synthetic oligonucleotide
tgaagtaattactgcaaggtgtaggggcgg

SEQ ID NO: 256153 - DNA, 30 bp, Artificial Sequence
  Synthetic oligonucleotide
ggggcgcgattctcctgtgcgttggggcgg

SEQ ID NO: 256154 - DNA, 30 bp, Artificial Sequence
  Synthetic oligonucleotide
ggcactttatctggatcggaatatgggcgg

SEQ ID NO: 256155 - DNA, 30 bp, Artificial Sequence
  Synthetic oligonucleotide
cacgattacgggtccctacaaattgggcgg

SEQ ID NO: 256156 - DNA, 30 bp, Artificial Sequence
  Synthetic oligonucleotide
cacgaggcgctactagtgatctaatggcgg

SEQ ID NO: 256157 - DNA, 30 bp, Artificial Sequence
  Synthetic oligonucleotide
cgtaggactgcttcggtaacgacatggcgg

SEQ ID NO: 256158 - DNA, 30 bp, Artificial Sequence
  Synthetic oligonucleotide
acgccagcatgcacgcataggggctggcgg

SEQ ID NO: 256159 - DNA, 30 bp, Artificial Sequence
  Synthetic oligonucleotide
aatcacagctttatggccaggtattggcgg

SEQ ID NO: 256160 - DNA, 30 bp, Artificial Sequence
  Synthetic oligonucleotide
tagtggcggtggatcagtcctatttggcgg

SEQ ID NO: 256161 - DNA, 30 bp, Artificial Sequence
  Synthetic oligonucleotide
gagctggcctaccccaagaggggaatgcgg

SEQ ID NO: 256162 - DNA, 30 bp, Artificial Sequence
  Synthetic oligonucleotide
ggaatagcgcgctatgcaggctccatgcgg

SEQ ID NO: 256163 - DNA, 30 bp, Artificial Sequence
  Synthetic oligonucleotide
tttcggacaaagcagattagcagcatgcgg

SEQ ID NO: 256164 - DNA, 30 bp, Artificial Sequence
  Synthetic oligonucleotide
agttcctattgcctctcgggcttcatgcgg

SEQ ID NO: 256165 - DNA, 30 bp, Artificial Sequence
  Synthetic oligonucleotide
aatttagatgagggcaaataatagatgcgg

SEQ ID NO: 256166 - DNA, 30 bp, Artificial Sequence
  Synthetic oligonucleotide
gatttcgccaggttgtatcgctagatgcgg

SEQ ID NO: 256167 - DNA, 30 bp, Artificial Sequence
  Synthetic oligonucleotide
ctctggcggtcgtcttacctggctatgcgg

SEQ ID NO: 256168 - DNA, 30 bp, Artificial Sequence
  Synthetic oligonucleotide
attgcgtctctacgaagagacctgctgcgg

SEQ ID NO: 256169 - DNA, 30 bp, Artificial Sequence
  Synthetic oligonucleotide
gaggtattaagctgcagtttaaaagtgcgg

SEQ ID NO: 256170 - DNA, 30 bp, Artificial Sequence
  Synthetic oligonucleotide
acttgttcggttcaacctgatcgggtgcgg

SEQ ID NO: 256171 - DNA, 30 bp, Artificial Sequence
  Synthetic oligonucleotide
ggtgtagctcaagccggagggtgggtgcgg

SEQ ID NO: 256172 - DNA, 30 bp, Artificial Sequence
  Synthetic oligonucleotide
acaagttggcatcatatgtttaaattgcgg

SEQ ID NO: 256173 - DNA, 30 bp, Artificial Sequence
  Synthetic oligonucleotide
aggtgcctttttgaacgattaaagttgcgg

SEQ ID NO: 256174 - DNA, 30 bp, Artificial Sequence
  Synthetic oligonucleotide
tctctgggaagtcgtacaagtccgttgcgg

SEQ ID NO: 256175 - DNA, 30 bp, Artificial Sequence
  Synthetic oligonucleotide
ccgtctaattaggcccgtcacaatttgcgg

SEQ ID NO: 256176 - DNA, 30 bp, Artificial Sequence
  Synthetic oligonucleotide
aacaaattagatctatttgtgggaaatcgg

SEQ ID NO: 256177 - DNA, 31 bp, Artificial Sequence
  Synthetic oligonucleotide
atccagccgtgtgatgcgtcatgacaatcgg

SEQ ID NO: 256178 - DNA, 30 bp, Artificial Sequence
  Synthetic oligonucleotide
aagtaaaactgtgcgatctgtcgcaatcgg

SEQ ID NO: 256179 - DNA, 30 bp, Artificial Sequence
  Synthetic oligonucleotide
acagtactgaatcatcttaagacgaatcgg

SEQ ID NO: 256180 - DNA, 30 bp, Artificial Sequence
  Synthetic oligonucleotide
agggcaagaagaatatggttcgggaatcgg

SEQ ID NO: 256181 - DNA, 30 bp, Artificial Sequence
  Synthetic oligonucleotide
ggaatgaggctggtataaaacggtaatcgg

SEQ ID NO: 256182 - DNA, 30 bp, Artificial Sequence
  Synthetic oligonucleotide
gaagggaaccgatgacacctgggtaatcgg

SEQ ID NO: 256183 - DNA, 30 bp, Artificial Sequence
  Synthetic oligonucleotide
caaagttgctggcgcctggcgcaccatcgg

SEQ ID NO: 256184 - DNA, 30 bp, Artificial Sequence
  Synthetic oligonucleotide
aagtcctcccgcagggtgaccgaccatcgg

SEQ ID NO: 256185 - DNA, 30 bp, Artificial Sequence
  Synthetic oligonucleotide
aaaggtacatcccggactctttaagatcgg

SEQ ID NO: 256186 - DNA, 30 bp, Artificial Sequence
  Synthetic oligonucleotide
taaagcccatgtgcgccagttaacgatcgg

SEQ ID NO: 256187 - DNA, 30 bp, Artificial Sequence
  Synthetic oligonucleotide
cgttacctttaacatttgtcgtaggatcgg

SEQ ID NO: 256188 - DNA, 30 bp, Artificial Sequence
  Synthetic oligonucleotide
agttgggcgccgtaacggcgaacggatcgg

SEQ ID NO: 256189 - DNA, 30 bp, Artificial Sequence
  Synthetic oligonucleotide
cgtgcgttctagaacgctagccatgatcgg

SEQ ID NO: 256190 - DNA, 30 bp, Artificial Sequence
  Synthetic oligonucleotide
atgtactttaaggtactgtcagaatatcgg

SEQ ID NO: 256191 - DNA, 30 bp, Artificial Sequence
  Synthetic oligonucleotide
agagataatccggcgatcggaggatatcgg

SEQ ID NO: 256192 - DNA, 30 bp, Artificial Sequence
  Synthetic oligonucleotide
cccgagccccactaaagcatcggctatcgg

SEQ ID NO: 256193 - DNA, 30 bp, Artificial Sequence
  Synthetic oligonucleotide
tggggatatcacgatagttattagtatcgg

SEQ ID NO: 256194 - DNA, 30 bp, Artificial Sequence
  Synthetic oligonucleotide
gagatgcatagcgggaaaccccggtatcgg

SEQ ID NO: 256195 - DNA, 30 bp, Artificial Sequence
  Synthetic oligonucleotide
tgatgtcacattcccctctaggattatcgg

SEQ ID NO: 256196 - DNA, 30 bp, Artificial Sequence
  Synthetic oligonucleotide
gtagggtcaagttgcatagccacttatcgg

SEQ ID NO: 256197 - DNA, 30 bp, Artificial Sequence
  Synthetic oligonucleotide
ggctcaaacggtgcaatgaagttttatcgg

SEQ ID NO: 256198 - DNA, 30 bp, Artificial Sequence
  Synthetic oligonucleotide
ccggtgcgaataaatggtcctttttatcgg

SEQ ID NO: 256199 - DNA, 30 bp, Artificial Sequence
  Synthetic oligonucleotide
gtcattccaagaccacgtctcctgactcgg

SEQ ID NO: 256200 - DNA, 30 bp, Artificial Sequence
  Synthetic oligonucleotide
tcgcgcccatgtgagggcagaggtactcgg

SEQ ID NO: 256201 - DNA, 30 bp, Artificial Sequence
  Synthetic oligonucleotide
cgaacaatcaagcccgggatttgtactcgg

SEQ ID NO: 256202 - DNA, 30 bp, Artificial Sequence
  Synthetic oligonucleotide
cccggaccaagcagacggtcggttactcgg

SEQ ID NO: 256203 - DNA, 30 bp, Artificial Sequence
  Synthetic oligonucleotide
ctcaaatcacacgtggcagtggaacctcgg

SEQ ID NO: 256204 - DNA, 30 bp, Artificial Sequence
  Synthetic oligonucleotide
catgattatataggagaactctaacctcgg

SEQ ID NO: 256205 - DNA, 30 bp, Artificial Sequence
  Synthetic oligonucleotide
cgaaattaccatttcatgagatcacctcgg

SEQ ID NO: 256206 - DNA, 30 bp, Artificial Sequence
  Synthetic oligonucleotide
ttgacaagagatttgggtcatgcccctcgg

SEQ ID NO: 256207 - DNA, 30 bp, Artificial Sequence
  Synthetic oligonucleotide
gggtaatgtcttaatagagggacgcctcgg

SEQ ID NO: 256208 - DNA, 30 bp, Artificial Sequence
  Synthetic oligonucleotide
ccatgcctgttcggtcagttacggcctcgg

SEQ ID NO: 256209 - DNA, 30 bp, Artificial Sequence
  Synthetic oligonucleotide
ctgcgcgtggttgccgtttagcacgctcgg

SEQ ID NO: 256210 - DNA, 30 bp, Artificial Sequence
  Synthetic oligonucleotide
acgcctgcttgatggaacagtcgggctcgg

SEQ ID NO: 256211 - DNA, 30 bp, Artificial Sequence
  Synthetic oligonucleotide
gctttgtggaatgaaggtccataatctcgg

SEQ ID NO: 256212 - DNA, 30 bp, Artificial Sequence
  Synthetic oligonucleotide
ttcgagggtttttaagcttctggatctcgg

SEQ ID NO: 256213 - DNA, 30 bp, Artificial Sequence
  Synthetic oligonucleotide
taccgaagggacattccgtttccctctcgg

SEQ ID NO: 256214 - DNA, 30 bp, Artificial Sequence
  Synthetic oligonucleotide
tcgcatccagttggtgtgaagcgctctcgg

SEQ ID NO: 256215 - DNA, 30 bp, Artificial Sequence
  Synthetic oligonucleotide
aaaagactagactatggttgatcgtctcgg

SEQ ID NO: 256216 - DNA, 30 bp, Artificial Sequence
  Synthetic oligonucleotide
gtcagccgggctacattttacttgtctcgg

SEQ ID NO: 256217 - DNA, 30 bp, Artificial Sequence
  Synthetic oligonucleotide
caggccattctaagctcatcgttgtctcgg

SEQ ID NO: 256218 - DNA, 30 bp, Artificial Sequence
  Synthetic oligonucleotide
aacagtagagacacggatgtacattctcgg

SEQ ID NO: 256219 - DNA, 30 bp, Artificial Sequence
  Synthetic oligonucleotide
gctgggcggtcacttactagccattctcgg

SEQ ID NO: 256220 - DNA, 30 bp, Artificial Sequence
  Synthetic oligonucleotide
ggatctgtttgtcatacaactcgaagtcgg

SEQ ID NO: 256221 - DNA, 30 bp, Artificial Sequence
  Synthetic oligonucleotide
cgtatttcatggaaaatttgagagagtcgg

SEQ ID NO: 256222 - DNA, 30 bp, Artificial Sequence
  Synthetic oligonucleotide
cgggcttgctactggaataggctgagtcgg

SEQ ID NO: 256223 - DNA, 30 bp, Artificial Sequence
  Synthetic oligonucleotide
tccaaggacactacttacctcaatagtcgg

SEQ ID NO: 256224 - DNA, 30 bp, Artificial Sequence
  Synthetic oligonucleotide
atagagtaatgcctaaacaacattagtcgg

SEQ ID NO: 256225 - DNA, 30 bp, Artificial Sequence
  Synthetic oligonucleotide
cttgctctgatcccctaataaccacgtcgg

SEQ ID NO: 256226 - DNA, 30 bp, Artificial Sequence
  Synthetic oligonucleotide
actcgaggaccgcttagaggtccacgtcgg

SEQ ID NO: 256227 - DNA, 30 bp, Artificial Sequence
  Synthetic oligonucleotide
tagtgtttcgtaaaaggaggcggacgtcgg

SEQ ID NO: 256228 - DNA, 30 bp, Artificial Sequence
  Synthetic oligonucleotide
atgtgctcgtaggtgcgctagtcccgtcgg

SEQ ID NO: 256229 - DNA, 30 bp, Artificial Sequence
  Synthetic oligonucleotide
tcatgctacagacgattcacttgccgtcgg

SEQ ID NO: 256230 - DNA, 30 bp, Artificial Sequence
  Synthetic oligonucleotide
tcgagttccaactcaggtatgaatcgtcgg

SEQ ID NO: 256231 - DNA, 30 bp, Artificial Sequence
  Synthetic oligonucleotide
gtagaggttttgcgataccaatatcgtcgg

SEQ ID NO: 256232 - DNA, 30 bp, Artificial Sequence
  Synthetic oligonucleotide
atagtgaagttgcacctgccgacaggtcgg

SEQ ID NO: 256233 - DNA, 30 bp, Artificial Sequence
  Synthetic oligonucleotide
aacagatcaacccaccttaacaacggtcgg

SEQ ID NO: 256234 - DNA, 30 bp, Artificial Sequence
  Synthetic oligonucleotide
acaatcccgcgtttataaagcaacggtcgg

SEQ ID NO: 256235 - DNA, 30 bp, Artificial Sequence
  Synthetic oligonucleotide
catgttaaatcaacataggtggtcggtcgg

SEQ ID NO: 256236 - DNA, 30 bp, Artificial Sequence
  Synthetic oligonucleotide
agcatataaacagattaatagtggggtcgg

SEQ ID NO: 256237 - DNA, 30 bp, Artificial Sequence
  Synthetic oligonucleotide
gcacacaaacaggaggtctcgacatgtcgg

SEQ ID NO: 256238 - DNA, 30 bp, Artificial Sequence
  Synthetic oligonucleotide
gcgactgcgtgggaggttaaagtctgtcgg

SEQ ID NO: 256239 - DNA, 30 bp, Artificial Sequence
  Synthetic oligonucleotide
caccgccttctaactgttctgggaattcgg

SEQ ID NO: 256240 - DNA, 30 bp, Artificial Sequence
  Synthetic oligonucleotide
gtccgaatataagataatcgatgaattcgg

SEQ ID NO: 256241 - DNA, 30 bp, Artificial Sequence
  Synthetic oligonucleotide
tcagacttatggcttggcggcgacattcgg

SEQ ID NO: 256242 - DNA, 30 bp, Artificial Sequence
  Synthetic oligonucleotide
cccccagccgccctcttctaagcacttcgg

SEQ ID NO: 256243 - DNA, 30 bp, Artificial Sequence
  Synthetic oligonucleotide
gcgcctacccatgttgaagaatcacttcgg

SEQ ID NO: 256244 - DNA, 30 bp, Artificial Sequence
  Synthetic oligonucleotide
gctgacctgggaagcgacttttaccttcgg

SEQ ID NO: 256245 - DNA, 30 bp, Artificial Sequence
  Synthetic oligonucleotide
tggcggcagatagaagtcaaagagcttcgg

SEQ ID NO: 256246 - DNA, 30 bp, Artificial Sequence
  Synthetic oligonucleotide
tgtcggcgcgttggaatattagcgcttcgg

SEQ ID NO: 256247 - DNA, 30 bp, Artificial Sequence
  Synthetic oligonucleotide
ttggctatagaagtgaggagcttgcttcgg

SEQ ID NO: 256248 - DNA, 30 bp, Artificial Sequence
  Synthetic oligonucleotide
ccgtagtgaaggactttataaaatcttcgg

SEQ ID NO: 256249 - DNA, 30 bp, Artificial Sequence
  Synthetic oligonucleotide
actggagctctagcccgtctcgaagttcgg

SEQ ID NO: 256250 - DNA, 30 bp, Artificial Sequence
  Synthetic oligonucleotide
ccgttcaccgcgcttaatgtgtcagttcgg

SEQ ID NO: 256251 - DNA, 30 bp, Artificial Sequence
  Synthetic oligonucleotide
ctcggaccgctggggaaacaagtcgttcgg

SEQ ID NO: 256252 - DNA, 30 bp, Artificial Sequence
  Synthetic oligonucleotide
tgaagctggccacgggagttttgggttcgg

SEQ ID NO: 256253 - DNA, 30 bp, Artificial Sequence
  Synthetic oligonucleotide
gtcggagaatctcctatgttctgtgttcgg

SEQ ID NO: 256254 - DNA, 30 bp, Artificial Sequence
  Synthetic oligonucleotide
ggccatttcgcatgagacattgcttttcgg

SEQ ID NO: 256255 - DNA, 30 bp, Artificial Sequence
  Synthetic oligonucleotide
tgacagtctcaaaagagtatgtgttttcgg

SEQ ID NO: 256256 - DNA, 30 bp, Artificial Sequence
  Synthetic oligonucleotide
tgctaaccatgattacaaacgttttttcgg

SEQ ID NO: 256257 - DNA, 30 bp, Artificial Sequence
  Synthetic oligonucleotide
attgagagcgtgcgcgctcattataaaggg

SEQ ID NO: 256258 - DNA, 30 bp, Artificial Sequence
  Synthetic oligonucleotide
tgcgcatgatttaactcaatgattaaaggg

SEQ ID NO: 256259 - DNA, 30 bp, Artificial Sequence
  Synthetic oligonucleotide
aaaggtggcctacggatggtgtaacaaggg

SEQ ID NO: 256260 - DNA, 30 bp, Artificial Sequence
  Synthetic oligonucleotide
gtgcagatattaggacacgcttcacaaggg

SEQ ID NO: 256261 - DNA, 30 bp, Artificial Sequence
  Synthetic oligonucleotide
tccgtatgatgttgttgagcgtaccaaggg

SEQ ID NO: 256262 - DNA, 30 bp, Artificial Sequence
  Synthetic oligonucleotide
cataaactagcgcctcaccgcgcccaaggg

SEQ ID NO: 256263 - DNA, 30 bp, Artificial Sequence
  Synthetic oligonucleotide
gggccaaatttgggctgtcgactccaaggg

SEQ ID NO: 256264 - DNA, 30 bp, Artificial Sequence
  Synthetic oligonucleotide
agaagttccgctacttggtgaccgcaaggg

SEQ ID NO: 256265 - DNA, 30 bp, Artificial Sequence
  Synthetic oligonucleotide
ggttatccgtcctgttaaccagggcaaggg

SEQ ID NO: 256266 - DNA, 30 bp, Artificial Sequence
  Synthetic oligonucleotide
aagctattgaaaagtggacccgatcaaggg

SEQ ID NO: 256267 - DNA, 30 bp, Artificial Sequence
  Synthetic oligonucleotide
aacattcctctatacgtttcgtgtcaaggg

SEQ ID NO: 256268 - DNA, 30 bp, Artificial Sequence
  Synthetic oligonucleotide
ttatatagatatcttcggtcctcagaaggg

SEQ ID NO: 256269 - DNA, 30 bp, Artificial Sequence
  Synthetic oligonucleotide
ggtctcgtgacgtgctaattggtggaaggg

SEQ ID NO: 256270 - DNA, 30 bp, Artificial Sequence
  Synthetic oligonucleotide
gctaggcctcctggttatacttgtgaaggg

SEQ ID NO: 256271 - DNA, 30 bp, Artificial Sequence
  Synthetic oligonucleotide
atcgtatgaacttgtacccgaccataaggg

SEQ ID NO: 256272 - DNA, 30 bp, Artificial Sequence
  Synthetic oligonucleotide
tgacttggagtttctatgttcaactaaggg

SEQ ID NO: 256273 - DNA, 30 bp, Artificial Sequence
  Synthetic oligonucleotide
agtcagattgtatcgacgcttgactaaggg

SEQ ID NO: 256274 - DNA, 30 bp, Artificial Sequence
  Synthetic oligonucleotide
tgttttacagggagtaacattgcctaaggg

SEQ ID NO: 256275 - DNA, 30 bp, Artificial Sequence
  Synthetic oligonucleotide
gggaagttgataggtcggttactctaaggg

SEQ ID NO: 256276 - DNA, 30 bp, Artificial Sequence
  Synthetic oligonucleotide
gtcacgtttcagtgaaggtttctctaaggg

SEQ ID NO: 256277 - DNA, 31 bp, Artificial Sequence
  Synthetic oligonucleotide
acctgtaaatagcgagagcaatgtctaaggg

SEQ ID NO: 256278 - DNA, 30 bp, Artificial Sequence
  Synthetic oligonucleotide
gcgacgtgtccaaaatggtcgtagtaaggg

SEQ ID NO: 256279 - DNA, 29 bp, Artificial Sequence
  Synthetic oligonucleotide
atacttgaagaacgtaaacatcgtaaggg

SEQ ID NO: 256280 - DNA, 30 bp, Artificial Sequence
  Synthetic oligonucleotide
cattagaggacacgggaaggatggtaaggg

SEQ ID NO: 256281 - DNA, 30 bp, Artificial Sequence
  Synthetic oligonucleotide
attgccatatgagaattgcttgtgtaaggg

SEQ ID NO: 256282 - DNA, 30 bp, Artificial Sequence
  Synthetic oligonucleotide
aaataatttctacaacccacataaacaggg

SEQ ID NO: 256283 - DNA, 30 bp, Artificial Sequence
  Synthetic oligonucleotide
ccccaacgggactacgcagtgtgaacaggg

SEQ ID NO: 256284 - DNA, 30 bp, Artificial Sequence
  Synthetic oligonucleotide
cgtgcgcaccctacagcggcaataacaggg

SEQ ID NO: 256285 - DNA, 30 bp, Artificial Sequence
  Synthetic oligonucleotide
gagtccgccaagcttgattcgatcacaggg

SEQ ID NO: 256286 - DNA, 30 bp, Artificial Sequence
  Synthetic oligonucleotide
ggtagcgtactggtcatcaacaatacaggg

SEQ ID NO: 256287 - DNA, 30 bp, Artificial Sequence
  Synthetic oligonucleotide
catcgtttaagtcgggggcacagtacaggg

SEQ ID NO: 256288 - DNA, 30 bp, Artificial Sequence
  Synthetic oligonucleotide
aggcgccgtagtacgtgagctagcccaggg

SEQ ID NO: 256289 - DNA, 30 bp, Artificial Sequence
  Synthetic oligonucleotide
gttccaaggtggcgtgtcattgcgccaggg

SEQ ID NO: 256290 - DNA, 30 bp, Artificial Sequence
  Synthetic oligonucleotide
gtcaaagcgcatacaccccaacggccaggg

SEQ ID NO: 256291 - DNA, 30 bp, Artificial Sequence
  Synthetic oligonucleotide
acaggcacctactggtgctcagttccaggg

SEQ ID NO: 256292 - DNA, 30 bp, Artificial Sequence
  Synthetic oligonucleotide
gcgtgcagacctggaggagtcagcgcaggg

SEQ ID NO: 256293 - DNA, 30 bp, Artificial Sequence
  Synthetic oligonucleotide
cgatgggggctctgtccggggtcgtcaggg

SEQ ID NO: 256294 - DNA, 30 bp, Artificial Sequence
  Synthetic oligonucleotide
gctaatctctgggcatttcggtaaagaggg

SEQ ID NO: 256295 - DNA, 30 bp, Artificial Sequence
  Synthetic oligonucleotide
accataggttaggacaagttctcaagaggg

SEQ ID NO: 256296 - DNA, 30 bp, Artificial Sequence
  Synthetic oligonucleotide
ttcgtagtgagaggcaaaaaccagagaggg

SEQ ID NO: 256297 - DNA, 30 bp, Artificial Sequence
  Synthetic oligonucleotide
atctcagaccgggcgcaatctcaccgaggg

SEQ ID NO: 256298 - DNA, 30 bp, Artificial Sequence
  Synthetic oligonucleotide
gtctggtttaagtcacggtcgtagcgaggg

SEQ ID NO: 256299 - DNA, 30 bp, Artificial Sequence
  Synthetic oligonucleotide
caattaaagctggggtcctttcctcgaggg

SEQ ID NO: 256300 - DNA, 31 bp, Artificial Sequence
  Synthetic oligonucleotide
aactagtatagtactaagcagcagaggaggg

SEQ ID NO: 256301 - DNA, 30 bp, Artificial Sequence
  Synthetic oligonucleotide
cagtgttggtatatgttagagagaggaggg

SEQ ID NO: 256302 - DNA, 30 bp, Artificial Sequence
  Synthetic oligonucleotide
atctttaactatgagttgacgcccggaggg

SEQ ID NO: 256303 - DNA, 30 bp, Artificial Sequence
  Synthetic oligonucleotide
atagtctcaaataacgctggccagggaggg

SEQ ID NO: 256304 - DNA, 30 bp, Artificial Sequence
  Synthetic oligonucleotide
cgcctggacactccagtcatcaggggaggg

SEQ ID NO: 256305 - DNA, 30 bp, Artificial Sequence
  Synthetic oligonucleotide
ttaaatgtaattctaaaatgagggggaggg

SEQ ID NO: 256306 - DNA, 30 bp, Artificial Sequence
  Synthetic oligonucleotide
tgacggtcctgaaggcaagactatggaggg

SEQ ID NO: 256307 - DNA, 30 bp, Artificial Sequence
  Synthetic oligonucleotide
atggccgtgggaaccggaatgaaatgaggg

SEQ ID NO: 256308 - DNA, 30 bp, Artificial Sequence
  Synthetic oligonucleotide
tgcagggcacggtccttatcggcatgaggg

SEQ ID NO: 256309 - DNA, 30 bp, Artificial Sequence
  Synthetic oligonucleotide
gaggatgttgggaggctgtctatatgaggg

SEQ ID NO: 256310 - DNA, 30 bp, Artificial Sequence
  Synthetic oligonucleotide
ggggagaaccgattcagtagtaggtgaggg

SEQ ID NO: 256311 - DNA, 30 bp, Artificial Sequence
  Synthetic oligonucleotide
ttctgttcgaatgcattgagacattgaggg

SEQ ID NO: 256312 - DNA, 30 bp, Artificial Sequence
  Synthetic oligonucleotide
catgcttgcgtctccgtaccctaaataggg

SEQ ID NO: 256313 - DNA, 30 bp, Artificial Sequence
  Synthetic oligonucleotide
ccaggtagggaaaaagcacgggcaataggg

SEQ ID NO: 256314 - DNA, 30 bp, Artificial Sequence
  Synthetic oligonucleotide
ctcgcttaccaaggacagtggctaataggg

SEQ ID NO: 256315 - DNA, 30 bp, Artificial Sequence
  Synthetic oligonucleotide
tccctgaaagccctagttgaagccataggg

SEQ ID NO: 256316 - DNA, 30 bp, Artificial Sequence
  Synthetic oligonucleotide
catttgcgagtgaatagtctatccataggg

SEQ ID NO: 256317 - DNA, 30 bp, Artificial Sequence
  Synthetic oligonucleotide
ccggattcttcaggtgacaaaccgataggg

SEQ ID NO: 256318 - DNA, 30 bp, Artificial Sequence
  Synthetic oligonucleotide
attgtacacgagtatcgagttaggataggg

SEQ ID NO: 256319 - DNA, 30 bp, Artificial Sequence
  Synthetic oligonucleotide
ataaggtactacaaaggagattggataggg

SEQ ID NO: 256320 - DNA, 30 bp, Artificial Sequence
  Synthetic oligonucleotide
atcaaggcttgttcgaactttattataggg

SEQ ID NO: 256321 - DNA, 30 bp, Artificial Sequence
  Synthetic oligonucleotide
actaatccactttaagacctaggactaggg

SEQ ID NO: 256322 - DNA, 30 bp, Artificial Sequence
  Synthetic oligonucleotide
gtggctgtggaattatgcgattccctaggg

SEQ ID NO: 256323 - DNA, 30 bp, Artificial Sequence
  Synthetic oligonucleotide
gtacactttgcagttatcattagcctaggg

SEQ ID NO: 256324 - DNA, 30 bp, Artificial Sequence
  Synthetic oligonucleotide
gtgtaggggagaatagctagattgctaggg

SEQ ID NO: 256325 - DNA, 30 bp, Artificial Sequence
  Synthetic oligonucleotide
gtcaagttctgtttttctttttgtctaggg

SEQ ID NO: 256326 - DNA, 30 bp, Artificial Sequence
  Synthetic oligonucleotide
aggggggattagtggtacgctaaagtaggg

SEQ ID NO: 256327 - DNA, 30 bp, Artificial Sequence
  Synthetic oligonucleotide
cacactggacgctgtggtccagaagtaggg

SEQ ID NO: 256328 - DNA, 30 bp, Artificial Sequence
  Synthetic oligonucleotide
cggtttatgtagacatttcatggggtaggg

SEQ ID NO: 256329 - DNA, 30 bp, Artificial Sequence
  Synthetic oligonucleotide
cacgaggtaggtagctagagatctgtaggg

SEQ ID NO: 256330 - DNA, 30 bp, Artificial Sequence
  Synthetic oligonucleotide
actaaagtgaacgattttctgtgtgtaggg

SEQ ID NO: 256331 - DNA, 30 bp, Artificial Sequence
  Synthetic oligonucleotide
gcacaggttcgcacggagtatcaattaggg

SEQ ID NO: 256332 - DNA, 30 bp, Artificial Sequence
  Synthetic oligonucleotide
tggacacgccgtgcaaagggcccattaggg

SEQ ID NO: 256333 - DNA, 30 bp, Artificial Sequence
  Synthetic oligonucleotide
gaaactaactatggtgaactagtattaggg

SEQ ID NO: 256334 - DNA, 30 bp, Artificial Sequence
  Synthetic oligonucleotide
gggagtatggactagatgcaaaccttaggg

SEQ ID NO: 256335 - DNA, 30 bp, Artificial Sequence
  Synthetic oligonucleotide
gaatgtgcttgcttcccactacagttaggg

SEQ ID NO: 256336 - DNA, 30 bp, Artificial Sequence
  Synthetic oligonucleotide
gcgacaattcatagggaatggaggttaggg

SEQ ID NO: 256337 - DNA, 30 bp, Artificial Sequence
  Synthetic oligonucleotide
tacctcatacaagtcagcacggggttaggg

SEQ ID NO: 256338 - DNA, 30 bp, Artificial Sequence
  Synthetic oligonucleotide
ctgaatgactttggagagtatctgttaggg

SEQ ID NO: 256339 - DNA, 30 bp, Artificial Sequence
  Synthetic oligonucleotide
tctaatgttagtaacccagtcgatttaggg

SEQ ID NO: 256340 - DNA, 30 bp, Artificial Sequence
  Synthetic oligonucleotide
ctggcaggatacgactaaacgcgtttaggg

SEQ ID NO: 256341 - DNA, 30 bp, Artificial Sequence
  Synthetic oligonucleotide
ctgcctggtgtttgtcaattctgtttaggg

SEQ ID NO: 256342 - DNA, 30 bp, Artificial Sequence
  Synthetic oligonucleotide
gctataccatgatagtgtatcaaaaacggg

SEQ ID NO: 256343 - DNA, 30 bp, Artificial Sequence
  Synthetic oligonucleotide
ataggtccatctggctgcagtcgaaacggg

SEQ ID NO: 256344 - DNA, 30 bp, Artificial Sequence
  Synthetic oligonucleotide
gtcgatgacacgccataactgggtaacggg

SEQ ID NO: 256345 - DNA, 30 bp, Artificial Sequence
  Synthetic oligonucleotide
ggttagaaaacgcatcaggtgattaacggg

SEQ ID NO: 256346 - DNA, 30 bp, Artificial Sequence
  Synthetic oligonucleotide
atagatcccccctaggttgtcgttaacggg

SEQ ID NO: 256347 - DNA, 30 bp, Artificial Sequence
  Synthetic oligonucleotide
cgagcggagatatccaggtcgtttaacggg

SEQ ID NO: 256348 - DNA, 30 bp, Artificial Sequence
  Synthetic oligonucleotide
cacatagacggcaggctcacagaacacggg

SEQ ID NO: 256349 - DNA, 30 bp, Artificial Sequence
  Synthetic oligonucleotide
gtggcgcaaagttagggttggatacacggg

SEQ ID NO: 256350 - DNA, 30 bp, Artificial Sequence
  Synthetic oligonucleotide
aaacatagcgacgtacctaaccaccacggg

SEQ ID NO: 256351 - DNA, 30 bp, Artificial Sequence
  Synthetic oligonucleotide
ctggtaacacagtgaacccacccccacggg

SEQ ID NO: 256352 - DNA, 30 bp, Artificial Sequence
  Synthetic oligonucleotide
ggacaatatgctagagaccaggtccacggg

SEQ ID NO: 256353 - DNA, 30 bp, Artificial Sequence
  Synthetic oligonucleotide
gcggcggtgtctggacacaatgagcacggg

SEQ ID NO: 256354 - DNA, 30 bp, Artificial Sequence
  Synthetic oligonucleotide
agggcttactgggagaatcaaaatcacggg

SEQ ID NO: 256355 - DNA, 30 bp, Artificial Sequence
  Synthetic oligonucleotide
tagagtgtactatggcaccatgtagacggg

SEQ ID NO: 256356 - DNA, 30 bp, Artificial Sequence
  Synthetic oligonucleotide
gcaacctgctagggtcagaccggcgacggg

SEQ ID NO: 256357 - DNA, 30 bp, Artificial Sequence
  Synthetic oligonucleotide
catggagggtcattggtgatgaaggacggg

SEQ ID NO: 256358 - DNA, 30 bp, Artificial Sequence
  Synthetic oligonucleotide
cagtgggacagaggtgtaagaagggacggg

SEQ ID NO: 256359 - DNA, 30 bp, Artificial Sequence
  Synthetic oligonucleotide
tacgcacagcgtgggccgtgtccatacggg

SEQ ID NO: 256360 - DNA, 30 bp, Artificial Sequence
  Synthetic oligonucleotide
agaatggttatgtatccgttcatatacggg

SEQ ID NO: 256361 - DNA, 30 bp, Artificial Sequence
  Synthetic oligonucleotide
aggccttcattaacggttcccgtatacggg

SEQ ID NO: 256362 - DNA, 30 bp, Artificial Sequence
  Synthetic oligonucleotide
aagtgtacaaggtaggtctagtagtacggg

SEQ ID NO: 256363 - DNA, 30 bp, Artificial Sequence
  Synthetic oligonucleotide
cgaccaactagtgggtgtttcacttacggg

SEQ ID NO: 256364 - DNA, 30 bp, Artificial Sequence
  Synthetic oligonucleotide
cggaggatcactaattccagatcttacggg

SEQ ID NO: 256365 - DNA, 30 bp, Artificial Sequence
  Synthetic oligonucleotide
ctccttgtgaatcccttggctagcaccggg

SEQ ID NO: 256366 - DNA, 30 bp, Artificial Sequence
  Synthetic oligonucleotide
cactaacaacacgtcataatcatgaccggg

SEQ ID NO: 256367 - DNA, 30 bp, Artificial Sequence
  Synthetic oligonucleotide
cgttaaactcatggtctcaggtataccggg

SEQ ID NO: 256368 - DNA, 30 bp, Artificial Sequence
  Synthetic oligonucleotide
ccatcaggtgtaagttgctgagcacccggg

SEQ ID NO: 256369 - DNA, 30 bp, Artificial Sequence
  Synthetic oligonucleotide
agcaccagatcattacaccccggacccggg

SEQ ID NO: 256370 - DNA, 30 bp, Artificial Sequence
  Synthetic oligonucleotide
tgactagtttttggctagggtgtccccggg

SEQ ID NO: 256371 - DNA, 30 bp, Artificial Sequence
  Synthetic oligonucleotide
atgaagaaaagattaaatcggcagcccggg

SEQ ID NO: 256372 - DNA, 30 bp, Artificial Sequence
  Synthetic oligonucleotide
atgaggaccgaaagtcagtgagggcccggg

SEQ ID NO: 256373 - DNA, 30 bp, Artificial Sequence
  Synthetic oligonucleotide
cacgcaaccatttagaaaactcctcccggg

SEQ ID NO: 256374 - DNA, 30 bp, Artificial Sequence
  Synthetic oligonucleotide
aggggattacttgcatgtacgatagccggg

SEQ ID NO: 256375 - DNA, 30 bp, Artificial Sequence
  Synthetic oligonucleotide
ggcacgacttatacatgtgttcccgccggg

SEQ ID NO: 256376 - DNA, 30 bp, Artificial Sequence
  Synthetic oligonucleotide
agcggggacgtgcacggcacagccgccggg

SEQ ID NO: 256377 - DNA, 30 bp, Artificial Sequence
  Synthetic oligonucleotide
tgcgagttgtgcaaagcaggtatcgccggg

SEQ ID NO: 256378 - DNA, 30 bp, Artificial Sequence
  Synthetic oligonucleotide
tcaacccccgctaaaccagttatcgccggg

SEQ ID NO: 256379 - DNA, 30 bp, Artificial Sequence
  Synthetic oligonucleotide
gccataatggcttgcaatgtgttcgccggg

SEQ ID NO: 256380 - DNA, 30 bp, Artificial Sequence
  Synthetic oligonucleotide
gtaacgtatgctacatgggggatggccggg

SEQ ID NO: 256381 - DNA, 30 bp, Artificial Sequence
  Synthetic oligonucleotide
ggcccaacaagggacgggtccagatccggg

SEQ ID NO: 256382 - DNA, 30 bp, Artificial Sequence
  Synthetic oligonucleotide
ccactattcgttgagcaatgattatccggg

SEQ ID NO: 256383 - DNA, 30 bp, Artificial Sequence
  Synthetic oligonucleotide
tcccactccatggaatatgtgcactccggg

SEQ ID NO: 256384 - DNA, 30 bp, Artificial Sequence
  Synthetic oligonucleotide
gttcagggagagttctcaaattagtccggg

SEQ ID NO: 256385 - DNA, 30 bp, Artificial Sequence
  Synthetic oligonucleotide
gtatgactcccccaaataaaactttccggg

SEQ ID NO: 256386 - DNA, 30 bp, Artificial Sequence
  Synthetic oligonucleotide
aatcaacaacaatgcagtccgagtagcggg

SEQ ID NO: 256387 - DNA, 30 bp, Artificial Sequence
  Synthetic oligonucleotide
gaaagtcgagccagagtagccgttagcggg

SEQ ID NO: 256388 - DNA, 30 bp, Artificial Sequence
  Synthetic oligonucleotide
tccagttatgtgtcacgaacttaacgcggg

SEQ ID NO: 256389 - DNA, 30 bp, Artificial Sequence
  Synthetic oligonucleotide
accatgtgcgagtgtacacctttacgcggg

SEQ ID NO: 256390 - DNA, 30 bp, Artificial Sequence
  Synthetic oligonucleotide
ggtttctacgtgtcatcctatcaccgcggg

SEQ ID NO: 256391 - DNA, 30 bp, Artificial Sequence
  Synthetic oligonucleotide
attggtttgcggtgtagaaggttgcgcggg

SEQ ID NO: 256392 - DNA, 30 bp, Artificial Sequence
  Synthetic oligonucleotide
ataagtggtatctaggaagaggtaggcggg

SEQ ID NO: 256393 - DNA, 30 bp, Artificial Sequence
  Synthetic oligonucleotide
gcccggtcaatctcaacagaggacggcggg

SEQ ID NO: 256394 - DNA, 30 bp, Artificial Sequence
  Synthetic oligonucleotide
gcaaacgtggcataggatgcccagggcggg

SEQ ID NO: 256395 - DNA, 30 bp, Artificial Sequence
  Synthetic oligonucleotide
gtctcaatcgcccttctgcttaggggcggg

SEQ ID NO: 256396 - DNA, 30 bp, Artificial Sequence
  Synthetic oligonucleotide
accaatgaaatgttgagataaatgggcggg

SEQ ID NO: 256397 - DNA, 30 bp, Artificial Sequence
  Synthetic oligonucleotide
gaagaccttcgaaggtatcgcccctgcggg

SEQ ID NO: 256398 - DNA, 30 bp, Artificial Sequence
  Synthetic oligonucleotide
ttgtacttcaagcagggcgtggcctgcggg

SEQ ID NO: 256399 - DNA, 30 bp, Artificial Sequence
  Synthetic oligonucleotide
aagtcggtgggttctaatgggttttgcggg

SEQ ID NO: 256400 - DNA, 30 bp, Artificial Sequence
  Synthetic oligonucleotide
tcagtttggttagtaaccactaaaatcggg

SEQ ID NO: 256401 - DNA, 30 bp, Artificial Sequence
  Synthetic oligonucleotide
gagacaactattttgtgttgacacatcggg

SEQ ID NO: 256402 - DNA, 30 bp, Artificial Sequence
  Synthetic oligonucleotide
ctcttattgaaaagtatagaccagatcggg

SEQ ID NO: 256403 - DNA, 30 bp, Artificial Sequence
  Synthetic oligonucleotide
ctaggtgtgaggccgggggaatttatcggg

SEQ ID NO: 256404 - DNA, 30 bp, Artificial Sequence
  Synthetic oligonucleotide
taatgtaaacttttagctgtcccactcggg

SEQ ID NO: 256405 - DNA, 30 bp, Artificial Sequence
  Synthetic oligonucleotide
gtacgtattaatgctgtagatgtgctcggg

SEQ ID NO: 256406 - DNA, 30 bp, Artificial Sequence
  Synthetic oligonucleotide
aaaggcccattatttcgacgtcctctcggg

SEQ ID NO: 256407 - DNA, 30 bp, Artificial Sequence
  Synthetic oligonucleotide
taattcgggactcagggggttctagtcggg

SEQ ID NO: 256408 - DNA, 30 bp, Artificial Sequence
  Synthetic oligonucleotide
gccttgcttgtgatcattgtgggcgtcggg

SEQ ID NO: 256409 - DNA, 30 bp, Artificial Sequence
  Synthetic oligonucleotide
cgcttccgacatcgttagcccaaggtcggg

SEQ ID NO: 256410 - DNA, 30 bp, Artificial Sequence
  Synthetic oligonucleotide
ttcatgtagtctgttgacagactggtcggg

SEQ ID NO: 256411 - DNA, 30 bp, Artificial Sequence
  Synthetic oligonucleotide
tgctatgctccgccaacgagcctggtcggg

SEQ ID NO: 256412 - DNA, 30 bp, Artificial Sequence
  Synthetic oligonucleotide
gtagggagatgtccacactgggctgtcggg

SEQ ID NO: 256413 - DNA, 30 bp, Artificial Sequence
  Synthetic oligonucleotide
gctatccatcccttgagagccatcttcggg

SEQ ID NO: 256414 - DNA, 30 bp, Artificial Sequence
  Synthetic oligonucleotide
aaagagtaggacatgctccggtagttcggg

SEQ ID NO: 256415 - DNA, 30 bp, Artificial Sequence
  Synthetic oligonucleotide
agcgcggctttaaataactttaatttcggg

SEQ ID NO: 256416 - DNA, 30 bp, Artificial Sequence
  Synthetic oligonucleotide
ataggggtgtgctctggcagcattttcggg

SEQ ID NO: 256417 - DNA, 30 bp, Artificial Sequence
  Synthetic oligonucleotide
tatataagtgggatttatctcataaagggg

SEQ ID NO: 256418 - DNA, 30 bp, Artificial Sequence
  Synthetic oligonucleotide
aaagagaacgagaatgaaaccagcaagggg

SEQ ID NO: 256419 - DNA, 30 bp, Artificial Sequence
  Synthetic oligonucleotide
cggcgggatcaccccgctatcatcaagggg

SEQ ID NO: 256420 - DNA, 31 bp, Artificial Sequence
  Synthetic oligonucleotide
cccagacggacagaggggttgatagaagggg

SEQ ID NO: 256421 - DNA, 30 bp, Artificial Sequence
  Synthetic oligonucleotide
aacgctacaccggtttgatttaagcagggg

SEQ ID NO: 256422 - DNA, 30 bp, Artificial Sequence
  Synthetic oligonucleotide
catgcccataagtgttcgctttgtcagggg

SEQ ID NO: 256423 - DNA, 30 bp, Artificial Sequence
  Synthetic oligonucleotide
gttcttcttaaatattgggatcaagagggg

SEQ ID NO: 256424 - DNA, 30 bp, Artificial Sequence
  Synthetic oligonucleotide
cttgccataacgggaagaacctgagagggg

SEQ ID NO: 256425 - DNA, 30 bp, Artificial Sequence
  Synthetic oligonucleotide
accacgcctaggacacagtccttagagggg

SEQ ID NO: 256426 - DNA, 30 bp, Artificial Sequence
  Synthetic oligonucleotide
aaacggcgcatcggagcttggaccgagggg

SEQ ID NO: 256427 - DNA, 30 bp, Artificial Sequence
  Synthetic oligonucleotide
attcggatctgtctagctgtggaggagggg

SEQ ID NO: 256428 - DNA, 30 bp, Artificial Sequence
  Synthetic oligonucleotide
tgggtgttaccactcaagttacgtgagggg

SEQ ID NO: 256429 - DNA, 30 bp, Artificial Sequence
  Synthetic oligonucleotide
gtatagatgcggatttaaagtacatagggg

SEQ ID NO: 256430 - DNA, 30 bp, Artificial Sequence
  Synthetic oligonucleotide
cgctctccgaagcatactcgctgatagggg

SEQ ID NO: 256431 - DNA, 30 bp, Artificial Sequence
  Synthetic oligonucleotide
ttcaggcttgcaaccgaggcatcctagggg

SEQ ID NO: 256432 - DNA, 30 bp, Artificial Sequence
  Synthetic oligonucleotide
ggtagatatgggaccaacacgttctagggg

SEQ ID NO: 256433 - DNA, 30 bp, Artificial Sequence
  Synthetic oligonucleotide
gcaagggctacccaccggaattcgtagggg

SEQ ID NO: 256434 - DNA, 30 bp, Artificial Sequence
  Synthetic oligonucleotide
ctgctagagtggtcatctgtgatttagggg

SEQ ID NO: 256435 - DNA, 30 bp, Artificial Sequence
  Synthetic oligonucleotide
ttagcgcacattgcctgttccaaaacgggg

SEQ ID NO: 256436 - DNA, 30 bp, Artificial Sequence
  Synthetic oligonucleotide
cagggcgcggtatatacccctaaaacgggg

SEQ ID NO: 256437 - DNA, 30 bp, Artificial Sequence
  Synthetic oligonucleotide
agctcagccggagtagactcattcacgggg

SEQ ID NO: 256438 - DNA, 30 bp, Artificial Sequence
  Synthetic oligonucleotide
agtgtggcagggatggttcccccgacgggg

SEQ ID NO: 256439 - DNA, 30 bp, Artificial Sequence
  Synthetic oligonucleotide
gagggcgcgaagtgcggggtgcctacgggg

SEQ ID NO: 256440 - DNA, 30 bp, Artificial Sequence
  Synthetic oligonucleotide
atgggtctttggatagtgcaacgtacgggg

SEQ ID NO: 256441 - DNA, 30 bp, Artificial Sequence
  Synthetic oligonucleotide
gacgcaataaatcctccctttaacccgggg

SEQ ID NO: 256442 - DNA, 30 bp, Artificial Sequence
  Synthetic oligonucleotide
cgatctgttctggagaccagtcccccgggg

SEQ ID NO: 256443 - DNA, 30 bp, Artificial Sequence
  Synthetic oligonucleotide
ttcctaaataagtgaaaacagatcccgggg

SEQ ID NO: 256444 - DNA, 30 bp, Artificial Sequence
  Synthetic oligonucleotide
gagaggggcgttataggtgggcggccgggg

SEQ ID NO: 256445 - DNA, 30 bp, Artificial Sequence
  Synthetic oligonucleotide
gtccgaaatcagccattcgggtatccgggg

SEQ ID NO: 256446 - DNA, 30 bp, Artificial Sequence
  Synthetic oligonucleotide
aatggttaacagcgagggcaggctccgggg

SEQ ID NO: 256447 - DNA, 30 bp, Artificial Sequence
  Synthetic oligonucleotide
ctttgatagccacgtactacaagagcgggg

SEQ ID NO: 256448 - DNA, 30 bp, Artificial Sequence
  Synthetic oligonucleotide
gtcagcgtaacgcacaaagcagtagcgggg

SEQ ID NO: 256449 - DNA, 30 bp, Artificial Sequence
  Synthetic oligonucleotide
tgattgtccttgggcagcgagttagcgggg

SEQ ID NO: 256450 - DNA, 30 bp, Artificial Sequence
  Synthetic oligonucleotide
tgccctgggaagtaccaatccgtcgcgggg

SEQ ID NO: 256451 - DNA, 30 bp, Artificial Sequence
  Synthetic oligonucleotide
gttatcgaatgaatcgaaatgacggcgggg

SEQ ID NO: 256452 - DNA, 30 bp, Artificial Sequence
  Synthetic oligonucleotide
acgggatcagcccatgatgtgtgggcgggg

SEQ ID NO: 256453 - DNA, 30 bp, Artificial Sequence
  Synthetic oligonucleotide
tcgttactcccacgtagcttagtggcgggg

SEQ ID NO: 256454 - DNA, 30 bp, Artificial Sequence
  Synthetic oligonucleotide
atcctcagcgtacttgtgagtagtgcgggg

SEQ ID NO: 256455 - DNA, 30 bp, Artificial Sequence
  Synthetic oligonucleotide
agaatgaacactgcgtgtatgtactcgggg

SEQ ID NO: 256456 - DNA, 30 bp, Artificial Sequence
  Synthetic oligonucleotide
acgcaactttctcgctgtgatttctcgggg

SEQ ID NO: 256457 - DNA, 30 bp, Artificial Sequence
  Synthetic oligonucleotide
caatgcaatagtagcacgattttctcgggg

SEQ ID NO: 256458 - DNA, 30 bp, Artificial Sequence
  Synthetic oligonucleotide
gctgctggtcaagatctggtggggtcgggg

SEQ ID NO: 256459 - DNA, 30 bp, Artificial Sequence
  Synthetic oligonucleotide
tggtaaaagttatcctcaatctggtcgggg

SEQ ID NO: 256460 - DNA, 30 bp, Artificial Sequence
  Synthetic oligonucleotide
gacgttcgggcatgggagcgtccttcgggg

SEQ ID NO: 256461 - DNA, 30 bp, Artificial Sequence
  Synthetic oligonucleotide
taaggactgacttgcggggtaatttcgggg

SEQ ID NO: 256462 - DNA, 30 bp, Artificial Sequence
  Synthetic oligonucleotide
gaaatcgtggctttggtacttatttcgggg

SEQ ID NO: 256463 - DNA, 30 bp, Artificial Sequence
  Synthetic oligonucleotide
tcgtgccataagtatggttcatgaaggggg

SEQ ID NO: 256464 - DNA, 30 bp, Artificial Sequence
  Synthetic oligonucleotide
atgttacgcgaacttctctcaaacaggggg

SEQ ID NO: 256465 - DNA, 30 bp, Artificial Sequence
  Synthetic oligonucleotide
catcttaggctatcgggtgccaacaggggg

SEQ ID NO: 256466 - DNA, 30 bp, Artificial Sequence
  Synthetic oligonucleotide
ggtgtggctttgacaagccggaacaggggg

SEQ ID NO: 256467 - DNA, 30 bp, Artificial Sequence
  Synthetic oligonucleotide
cgggcgacgacctggagtgtcccgaggggg

SEQ ID NO: 256468 - DNA, 30 bp, Artificial Sequence
  Synthetic oligonucleotide
ctgacatttaatcggatctgctctaggggg

SEQ ID NO: 256469 - DNA, 30 bp, Artificial Sequence
  Synthetic oligonucleotide
aatcttatagaccattaacatagtaggggg

SEQ ID NO: 256470 - DNA, 30 bp, Artificial Sequence
  Synthetic oligonucleotide
accagcctgcccgcttatcgagaacggggg

SEQ ID NO: 256471 - DNA, 30 bp, Artificial Sequence
  Synthetic oligonucleotide
cacttgccacgtcactcataggaacggggg

SEQ ID NO: 256472 - DNA, 30 bp, Artificial Sequence
  Synthetic oligonucleotide
cgtaggtccggtgttgtagaacagcggggg

SEQ ID NO: 256473 - DNA, 30 bp, Artificial Sequence
  Synthetic oligonucleotide
ttggcgaaaggtaactagcccgggcggggg

SEQ ID NO: 256474 - DNA, 30 bp, Artificial Sequence
  Synthetic oligonucleotide
gtcgacgggtacgtttctacgggtcggggg

SEQ ID NO: 256475 - DNA, 30 bp, Artificial Sequence
  Synthetic oligonucleotide
cccggtgaagattctcctcgtattcggggg

SEQ ID NO: 256476 - DNA, 30 bp, Artificial Sequence
  Synthetic oligonucleotide
cggccggcagatccgacgcttaaggggggg

SEQ ID NO: 256477 - DNA, 39 bp, Artificial Sequence
  Synthetic oligonucleotide
aagataatacattcatggtatggtaggggatcggggggg

SEQ ID NO: 256478 - DNA, 30 bp, Artificial Sequence
  Synthetic oligonucleotide
taagttttacagatctggtgtgctgggggg

SEQ ID NO: 256479 - DNA, 30 bp, Artificial Sequence
  Synthetic oligonucleotide
tattctacatccaaatattggattgggggg

SEQ ID NO: 256480 - DNA, 30 bp, Artificial Sequence
  Synthetic oligonucleotide
tcagttataactccccacaaaaaatggggg

SEQ ID NO: 256481 - DNA, 30 bp, Artificial Sequence
  Synthetic oligonucleotide
ccattatagcaatgcgaaagtagatggggg

SEQ ID NO: 256482 - DNA, 30 bp, Artificial Sequence
  Synthetic oligonucleotide
cgtacctgtataccacagtagatatggggg

SEQ ID NO: 256483 - DNA, 30 bp, Artificial Sequence
  Synthetic oligonucleotide
caggttgacgatctgcggattacctggggg

SEQ ID NO: 256484 - DNA, 30 bp, Artificial Sequence
  Synthetic oligonucleotide
cttaactagctaagggaccgtagctggggg

SEQ ID NO: 256485 - DNA, 30 bp, Artificial Sequence
  Synthetic oligonucleotide
actcgagcaaagaacctactaatctggggg

SEQ ID NO: 256486 - DNA, 30 bp, Artificial Sequence
  Synthetic oligonucleotide
cgtatctgctcgacccatcgctggtggggg

SEQ ID NO: 256487 - DNA, 30 bp, Artificial Sequence
  Synthetic oligonucleotide
ccgctcactacgactgcgtaattgtggggg

SEQ ID NO: 256488 - DNA, 30 bp, Artificial Sequence
  Synthetic oligonucleotide
agcctcaaatagaagttcgcccgttggggg

SEQ ID NO: 256489 - DNA, 30 bp, Artificial Sequence
  Synthetic oligonucleotide
aatactcacgcgaggtctaggcgaatgggg

SEQ ID NO: 256490 - DNA, 30 bp, Artificial Sequence
  Synthetic oligonucleotide
gccgagggggctggtgcagaattaatgggg

SEQ ID NO: 256491 - DNA, 30 bp, Artificial Sequence
  Synthetic oligonucleotide
cgaaagggggcggggcgacactacatgggg

SEQ ID NO: 256492 - DNA, 30 bp, Artificial Sequence
  Synthetic oligonucleotide
tagcctaggtccttctaaatatggatgggg

SEQ ID NO: 256493 - DNA, 30 bp, Artificial Sequence
  Synthetic oligonucleotide
gaacacactgactctactaataaactgggg

SEQ ID NO: 256494 - DNA, 30 bp, Artificial Sequence
  Synthetic oligonucleotide
ccatcgacggaccgtcttacgtaactgggg

SEQ ID NO: 256495 - DNA, 30 bp, Artificial Sequence
  Synthetic oligonucleotide
cattatccaagagttcggcccaccctgggg

SEQ ID NO: 256496 - DNA, 30 bp, Artificial Sequence
  Synthetic oligonucleotide
ggcgtacgcaggggtttggaagagctgggg

SEQ ID NO: 256497 - DNA, 30 bp, Artificial Sequence
  Synthetic oligonucleotide
ccacctaagatggcgcgtttcttgctgggg

SEQ ID NO: 256498 - DNA, 30 bp, Artificial Sequence
  Synthetic oligonucleotide
cgaccgtaggtttaaatcacccctctgggg

SEQ ID NO: 256499 - DNA, 30 bp, Artificial Sequence
  Synthetic oligonucleotide
aaagcctggtggggcaaacgaagtctgggg

SEQ ID NO: 256500 - DNA, 30 bp, Artificial Sequence
  Synthetic oligonucleotide
gagttagttagccgcttctgatgtctgggg

SEQ ID NO: 256501 - DNA, 30 bp, Artificial Sequence
  Synthetic oligonucleotide
tgtgtaaagtcgagccctcacgttctgggg

SEQ ID NO: 256502 - DNA, 30 bp, Artificial Sequence
  Synthetic oligonucleotide
gcgcgcgactacaatggcaccacagtgggg

SEQ ID NO: 256503 - DNA, 30 bp, Artificial Sequence
  Synthetic oligonucleotide
ggtggcgaatttaggataatcgccgtgggg

SEQ ID NO: 256504 - DNA, 30 bp, Artificial Sequence
  Synthetic oligonucleotide
cggtatgatatagtcaaaaagctggtgggg

SEQ ID NO: 256505 - DNA, 30 bp, Artificial Sequence
  Synthetic oligonucleotide
cagtatattccaaagcagattcgtgtgggg

SEQ ID NO: 256506 - DNA, 30 bp, Artificial Sequence
  Synthetic oligonucleotide
ctaaggtttaattcattgttccttgtgggg

SEQ ID NO: 256507 - DNA, 30 bp, Artificial Sequence
  Synthetic oligonucleotide
cctgacgggtaaggatgtgcgaacttgggg

SEQ ID NO: 256508 - DNA, 30 bp, Artificial Sequence
  Synthetic oligonucleotide
cccccggccaacctcaccactgagttgggg

SEQ ID NO: 256509 - DNA, 30 bp, Artificial Sequence
  Synthetic oligonucleotide
cttggcgacggctattgagcggtgttgggg

SEQ ID NO: 256510 - DNA, 30 bp, Artificial Sequence
  Synthetic oligonucleotide
actggctaagggcaagaagaacttttgggg

SEQ ID NO: 256511 - DNA, 30 bp, Artificial Sequence
  Synthetic oligonucleotide
agtaactaccattccagaagagaaaatggg

SEQ ID NO: 256512 - DNA, 30 bp, Artificial Sequence
  Synthetic oligonucleotide
aactaataaggagcgtgttgggcaaatggg

SEQ ID NO: 256513 - DNA, 30 bp, Artificial Sequence
  Synthetic oligonucleotide
cagctatcatgcaacttgcaatcaaatggg

SEQ ID NO: 256514 - DNA, 30 bp, Artificial Sequence
  Synthetic oligonucleotide
aatatcaaagattacacctgaaacaatggg

SEQ ID NO: 256515 - DNA, 30 bp, Artificial Sequence
  Synthetic oligonucleotide
gctcacgctagcgttacgacacacaatggg

SEQ ID NO: 256516 - DNA, 30 bp, Artificial Sequence
  Synthetic oligonucleotide
ctggttgtgtctattatatctgtcaatggg

SEQ ID NO: 256517 - DNA, 30 bp, Artificial Sequence
  Synthetic oligonucleotide
gatgctaacgagctgacactccagaatggg

SEQ ID NO: 256518 - DNA, 30 bp, Artificial Sequence
  Synthetic oligonucleotide
tgaatcattgggagcggacggtcgaatggg

SEQ ID NO: 256519 - DNA, 30 bp, Artificial Sequence
  Synthetic oligonucleotide
atatcgccggttctggggggtcgccatggg

SEQ ID NO: 256520 - DNA, 30 bp, Artificial Sequence
  Synthetic oligonucleotide
agtttccgccaataagggggagctcatggg

SEQ ID NO: 256521 - DNA, 30 bp, Artificial Sequence
  Synthetic oligonucleotide
gatgccgtcagcgaattaacccttcatggg

SEQ ID NO: 256522 - DNA, 30 bp, Artificial Sequence
  Synthetic oligonucleotide
cctttgtacgggcatagggtagccgatggg

SEQ ID NO: 256523 - DNA, 30 bp, Artificial Sequence
  Synthetic oligonucleotide
aatcctccctagcaggcggaaacggatggg

SEQ ID NO: 256524 - DNA, 30 bp, Artificial Sequence
  Synthetic oligonucleotide
ccgtaattagccgttttcgccactgatggg

SEQ ID NO: 256525 - DNA, 30 bp, Artificial Sequence
  Synthetic oligonucleotide
tcccctataaaatcccaatccagtgatggg

SEQ ID NO: 256526 - DNA, 30 bp, Artificial Sequence
  Synthetic oligonucleotide
ggcacggcagagacttatagcaggtatggg

SEQ ID NO: 256527 - DNA, 30 bp, Artificial Sequence
  Synthetic oligonucleotide
cctttaatctacagtggcccttggtatggg

SEQ ID NO: 256528 - DNA, 30 bp, Artificial Sequence
  Synthetic oligonucleotide
ggagttcgtgttgtatacccagcgactggg

SEQ ID NO: 256529 - DNA, 30 bp, Artificial Sequence
  Synthetic oligonucleotide
aatagattttggttaaccttagttactggg

SEQ ID NO: 256530 - DNA, 30 bp, Artificial Sequence
  Synthetic oligonucleotide
ctggattaaaattggaccccacaagctggg

SEQ ID NO: 256531 - DNA, 30 bp, Artificial Sequence
  Synthetic oligonucleotide
ggcagttttgcgatagtaagtttagctggg

SEQ ID NO: 256532 - DNA, 30 bp, Artificial Sequence
  Synthetic oligonucleotide
gcggcgatccgcgtgtcactatacgctggg

SEQ ID NO: 256533 - DNA, 30 bp, Artificial Sequence
  Synthetic oligonucleotide
tccatgagaagcgtcaagctactcgctggg

SEQ ID NO: 256534 - DNA, 30 bp, Artificial Sequence
  Synthetic oligonucleotide
ggcccgacctccctccgctaaccggctggg

SEQ ID NO: 256535 - DNA, 30 bp, Artificial Sequence
  Synthetic oligonucleotide
tcatgctggtacggtttgcgttcggctggg

SEQ ID NO: 256536 - DNA, 30 bp, Artificial Sequence
  Synthetic oligonucleotide
acatccgcaaacatttagtcgcgggctggg

SEQ ID NO: 256537 - DNA, 30 bp, Artificial Sequence
  Synthetic oligonucleotide
ggctgtctgcgtacacagtagtatgctggg

SEQ ID NO: 256538 - DNA, 30 bp, Artificial Sequence
  Synthetic oligonucleotide
agcaactccagacggggagctagtgctggg

SEQ ID NO: 256539 - DNA, 30 bp, Artificial Sequence
  Synthetic oligonucleotide
agcacacggcaaatgtaccttgaatctggg

SEQ ID NO: 256540 - DNA, 30 bp, Artificial Sequence
  Synthetic oligonucleotide
tggaaatggatccctaggcagggatctggg

SEQ ID NO: 256541 - DNA, 30 bp, Artificial Sequence
  Synthetic oligonucleotide
gtgtcgatacaggcaataaaaaactctggg

SEQ ID NO: 256542 - DNA, 30 bp, Artificial Sequence
  Synthetic oligonucleotide
tcgaccgcgaaatgtagttcccactctggg

SEQ ID NO: 256543 - DNA, 30 bp, Artificial Sequence
  Synthetic oligonucleotide
ggagtttcacacgaagccggcacgtctggg

SEQ ID NO: 256544 - DNA, 30 bp, Artificial Sequence
  Synthetic oligonucleotide
aatagagttcgcataaattccataagtggg

SEQ ID NO: 256545 - DNA, 30 bp, Artificial Sequence
  Synthetic oligonucleotide
ttgttaaggctacggggttagcagagtggg

SEQ ID NO: 256546 - DNA, 30 bp, Artificial Sequence
  Synthetic oligonucleotide
cagagtttcaatttcactcgcccgagtggg

SEQ ID NO: 256547 - DNA, 30 bp, Artificial Sequence
  Synthetic oligonucleotide
cacgactatgtgcgcgcgcccgtgagtggg

SEQ ID NO: 256548 - DNA, 30 bp, Artificial Sequence
  Synthetic oligonucleotide
cgaattgagtggttcgttctgttgagtggg

SEQ ID NO: 256549 - DNA, 30 bp, Artificial Sequence
  Synthetic oligonucleotide
cagatgtcgctgacgggcagtaatagtggg

SEQ ID NO: 256550 - DNA, 30 bp, Artificial Sequence
  Synthetic oligonucleotide
acaattgggatcgcggggtagtatagtggg

SEQ ID NO: 256551 - DNA, 30 bp, Artificial Sequence
  Synthetic oligonucleotide
tggtccacggatagccgaaggtcacgtggg

SEQ ID NO: 256552 - DNA, 30 bp, Artificial Sequence
  Synthetic oligonucleotide
gccctaaggcacataacattttgacgtggg

SEQ ID NO: 256553 - DNA, 30 bp, Artificial Sequence
  Synthetic oligonucleotide
ccgctgcataactcgtctggactaggtggg

SEQ ID NO: 256554 - DNA, 30 bp, Artificial Sequence
  Synthetic oligonucleotide
cataacagcgctgtttcactcctcggtggg

SEQ ID NO: 256555 - DNA, 30 bp, Artificial Sequence
  Synthetic oligonucleotide
aaggcactggcgattagaatttagggtggg

SEQ ID NO: 256556 - DNA, 30 bp, Artificial Sequence
  Synthetic oligonucleotide
cctctattgggtaccggggagtgtggtggg

SEQ ID NO: 256557 - DNA, 30 bp, Artificial Sequence
  Synthetic oligonucleotide
gcttctaactttagaatttactattgtggg

SEQ ID NO: 256558 - DNA, 30 bp, Artificial Sequence
  Synthetic oligonucleotide
tgaatgttcggtggtgaggcctattgtggg

SEQ ID NO: 256559 - DNA, 30 bp, Artificial Sequence
  Synthetic oligonucleotide
aaactgggcatctcattggtcagttgtggg

SEQ ID NO: 256560 - DNA, 30 bp, Artificial Sequence
  Synthetic oligonucleotide
tcatccagcgtaggtgcctacaaaattggg

SEQ ID NO: 256561 - DNA, 30 bp, Artificial Sequence
  Synthetic oligonucleotide
taagattgatggctagcatgaagaattggg

SEQ ID NO: 256562 - DNA, 30 bp, Artificial Sequence
  Synthetic oligonucleotide
tgtagcgcacgagggaccagaaccattggg

SEQ ID NO: 256563 - DNA, 30 bp, Artificial Sequence
  Synthetic oligonucleotide
cactaatatacagtgctgaggagcattggg

SEQ ID NO: 256564 - DNA, 30 bp, Artificial Sequence
  Synthetic oligonucleotide
cccacagaaccacttataagacagattggg

SEQ ID NO: 256565 - DNA, 30 bp, Artificial Sequence
  Synthetic oligonucleotide
tcctgggagagttgggtaagctgtattggg

SEQ ID NO: 256566 - DNA, 30 bp, Artificial Sequence
  Synthetic oligonucleotide
cgatactagttcccttttggccttattggg

SEQ ID NO: 256567 - DNA, 30 bp, Artificial Sequence
  Synthetic oligonucleotide
atgtgtgcgtctacacgaatttttattggg

SEQ ID NO: 256568 - DNA, 30 bp, Artificial Sequence
  Synthetic oligonucleotide
ttaggcaaacagtggagatcccaacttggg

SEQ ID NO: 256569 - DNA, 30 bp, Artificial Sequence
  Synthetic oligonucleotide
tttacatgatcactacatagtcgacttggg

SEQ ID NO: 256570 - DNA, 30 bp, Artificial Sequence
  Synthetic oligonucleotide
cttggtatgcttattcgcgccgtacttggg

SEQ ID NO: 256571 - DNA, 30 bp, Artificial Sequence
  Synthetic oligonucleotide
aaacgaaaggtttggcctcagtctcttggg

SEQ ID NO: 256572 - DNA, 30 bp, Artificial Sequence
  Synthetic oligonucleotide
tctatgggaaaataaggggttggagttggg

SEQ ID NO: 256573 - DNA, 30 bp, Artificial Sequence
  Synthetic oligonucleotide
tcaaagtagtcctacagaaggcttgttggg

SEQ ID NO: 256574 - DNA, 30 bp, Artificial Sequence
  Synthetic oligonucleotide
tggaacacagtcaaggaagtgggatttggg

SEQ ID NO: 256575 - DNA, 30 bp, Artificial Sequence
  Synthetic oligonucleotide
tggatgctacctactggtccggcctttggg

SEQ ID NO: 256576 - DNA, 30 bp, Artificial Sequence
  Synthetic oligonucleotide
gaggcgtggagcgtgtgacggggctttggg

SEQ ID NO: 256577 - DNA, 30 bp, Artificial Sequence
  Synthetic oligonucleotide
aatacagagaaaagtactaggatgtttggg

SEQ ID NO: 256578 - DNA, 30 bp, Artificial Sequence
  Synthetic oligonucleotide
tcaaagggttatactcacaggaattttggg

SEQ ID NO: 256579 - DNA, 30 bp, Artificial Sequence
  Synthetic oligonucleotide
acccggagttaatagcaccggggttttggg

SEQ ID NO: 256580 - DNA, 30 bp, Artificial Sequence
  Synthetic oligonucleotide
gcggagccaacatgaaatgttatttttggg

SEQ ID NO: 256581 - DNA, 30 bp, Artificial Sequence
  Synthetic oligonucleotide
gaccatatcctttccaagagctaaaaatgg

SEQ ID NO: 256582 - DNA, 30 bp, Artificial Sequence
  Synthetic oligonucleotide
gaacctaaatttgtcagtagctccaaatgg

SEQ ID NO: 256583 - DNA, 30 bp, Artificial Sequence
  Synthetic oligonucleotide
ggataggtttttgcctatatagcgaaatgg

SEQ ID NO: 256584 - DNA, 30 bp, Artificial Sequence
  Synthetic oligonucleotide
gttgatagtctttgacacaagaataaatgg

SEQ ID NO: 256585 - DNA, 30 bp, Artificial Sequence
  Synthetic oligonucleotide
aacctctagcgttactgattcgctaaatgg

SEQ ID NO: 256586 - DNA, 30 bp, Artificial Sequence
  Synthetic oligonucleotide
gtttctaaggggtggtagttcgctaaatgg

SEQ ID NO: 256587 - DNA, 30 bp, Artificial Sequence
  Synthetic oligonucleotide
tgtcgcactttcaagtaccggggtaaatgg

SEQ ID NO: 256588 - DNA, 30 bp, Artificial Sequence
  Synthetic oligonucleotide
aatcatagccatgctcaccggacccaatgg

SEQ ID NO: 256589 - DNA, 30 bp, Artificial Sequence
  Synthetic oligonucleotide
cggcgtacgatgtttggatattaagaatgg

SEQ ID NO: 256590 - DNA, 30 bp, Artificial Sequence
  Synthetic oligonucleotide
ttcactctcaagtagtaccacttagaatgg

SEQ ID NO: 256591 - DNA, 30 bp, Artificial Sequence
  Synthetic oligonucleotide
cgcgttggggtcaggggctagcgcgaatgg

SEQ ID NO: 256592 - DNA, 30 bp, Artificial Sequence
  Synthetic oligonucleotide
attctaggttattagtacagctaggaatgg

SEQ ID NO: 256593 - DNA, 30 bp, Artificial Sequence
  Synthetic oligonucleotide
gggactttatgacaggtatttggggaatgg

SEQ ID NO: 256594 - DNA, 30 bp, Artificial Sequence
  Synthetic oligonucleotide
ttctgtatgccaggcgagatagtggaatgg

SEQ ID NO: 256595 - DNA, 30 bp, Artificial Sequence
  Synthetic oligonucleotide
acgcccaacccgactctgcaattggaatgg

SEQ ID NO: 256596 - DNA, 30 bp, Artificial Sequence
  Synthetic oligonucleotide
tacgtcgcggatcagaactttgttgaatgg

SEQ ID NO: 256597 - DNA, 30 bp, Artificial Sequence
  Synthetic oligonucleotide
gacgagcggcgatttttaaacacataatgg

SEQ ID NO: 256598 - DNA, 30 bp, Artificial Sequence
  Synthetic oligonucleotide
gccgaattcgaccacctgaggatctaatgg

SEQ ID NO: 256599 - DNA, 30 bp, Artificial Sequence
  Synthetic oligonucleotide
ccacctcgtaactgctagaattagtaatgg

SEQ ID NO: 256600 - DNA, 30 bp, Artificial Sequence
  Synthetic oligonucleotide
acagagttccgactgataagtccgtaatgg

SEQ ID NO: 256601 - DNA, 30 bp, Artificial Sequence
  Synthetic oligonucleotide
agtagtaagcaagttccaccgcattaatgg

SEQ ID NO: 256602 - DNA, 30 bp, Artificial Sequence
  Synthetic oligonucleotide
tcgtacaagacagatcggggagattaatgg

SEQ ID NO: 256603 - DNA, 31 bp, Artificial Sequence
  Synthetic oligonucleotide
cggccctcccgtagagacgacaacttaatgg

SEQ ID NO: 256604 - DNA, 30 bp, Artificial Sequence
  Synthetic oligonucleotide
gggcacgccggggtaagggcgcgaacatgg

SEQ ID NO: 256605 - DNA, 30 bp, Artificial Sequence
  Synthetic oligonucleotide
gcatgtcgggtggactcggtcggaacatgg

SEQ ID NO: 256606 - DNA, 30 bp, Artificial Sequence
  Synthetic oligonucleotide
gctgacctttttaactcgcccttaacatgg

SEQ ID NO: 256607 - DNA, 30 bp, Artificial Sequence
  Synthetic oligonucleotide
ggattgcaactatctagcttcgggacatgg

SEQ ID NO: 256608 - DNA, 30 bp, Artificial Sequence
  Synthetic oligonucleotide
ataatggttaggggtttgatgagtacatgg

SEQ ID NO: 256609 - DNA, 30 bp, Artificial Sequence
  Synthetic oligonucleotide
gattggtagtatatatggcagagaccatgg

SEQ ID NO: 256610 - DNA, 30 bp, Artificial Sequence
  Synthetic oligonucleotide
gtcaagatgccccgggatatgtgaccatgg

SEQ ID NO: 256611 - DNA, 30 bp, Artificial Sequence
  Synthetic oligonucleotide
tcatgctataaggtctgcataaccccatgg

SEQ ID NO: 256612 - DNA, 30 bp, Artificial Sequence
  Synthetic oligonucleotide
acatttgcgccaaaaccctatgagccatgg

SEQ ID NO: 256613 - DNA, 30 bp, Artificial Sequence
  Synthetic oligonucleotide
agattgttcaacaatctgggtgcgccatgg

SEQ ID NO: 256614 - DNA, 30 bp, Artificial Sequence
  Synthetic oligonucleotide
actccggttatgagtgcgatacatccatgg

SEQ ID NO: 256615 - DNA, 30 bp, Artificial Sequence
  Synthetic oligonucleotide
atgtcgtggcgtaagtgcgccagtccatgg

SEQ ID NO: 256616 - DNA, 30 bp, Artificial Sequence
  Synthetic oligonucleotide
atacaggagtgtactggagtgggagcatgg

SEQ ID NO: 256617 - DNA, 30 bp, Artificial Sequence
  Synthetic oligonucleotide
gattcgtagcgcaattgcgtaatagcatgg

SEQ ID NO: 256618 - DNA, 30 bp, Artificial Sequence
  Synthetic oligonucleotide
agatttcactacggtcatgatttagcatgg

SEQ ID NO: 256619 - DNA, 30 bp, Artificial Sequence
  Synthetic oligonucleotide
tagtgaaatggtattttcgggaaggcatgg

SEQ ID NO: 256620 - DNA, 30 bp, Artificial Sequence
  Synthetic oligonucleotide
tcatacgcaacagttcaagttgatgcatgg

SEQ ID NO: 256621 - DNA, 30 bp, Artificial Sequence
  Synthetic oligonucleotide
tagcgggttcatggatgttgtcctgcatgg

SEQ ID NO: 256622 - DNA, 30 bp, Artificial Sequence
  Synthetic oligonucleotide
tggttaggtaggtgtgcattgcttgcatgg

SEQ ID NO: 256623 - DNA, 30 bp, Artificial Sequence
  Synthetic oligonucleotide
gcagactttttgccgaggataagatcatgg

SEQ ID NO: 256624 - DNA, 30 bp, Artificial Sequence
  Synthetic oligonucleotide
taaggcgggtctacgtctcgccactcatgg

SEQ ID NO: 256625 - DNA, 30 bp, Artificial Sequence
  Synthetic oligonucleotide
gggcgatggggctgtctgtagacgtcatgg

SEQ ID NO: 256626 - DNA, 30 bp, Artificial Sequence
  Synthetic oligonucleotide
catttacggttccactggcggtggtcatgg

SEQ ID NO: 256627 - DNA, 30 bp, Artificial Sequence
  Synthetic oligonucleotide
ctggggataaatcccgggtcactgtcatgg

SEQ ID NO: 256628 - DNA, 30 bp, Artificial Sequence
  Synthetic oligonucleotide
gtcccgagccacgcaattaaagattcatgg

SEQ ID NO: 256629 - DNA, 30 bp, Artificial Sequence
  Synthetic oligonucleotide
gcccgggacccacgcggagggagaagatgg

SEQ ID NO: 256630 - DNA, 30 bp, Artificial Sequence
  Synthetic oligonucleotide
actgggtccaattgccgattcaacagatgg

SEQ ID NO: 256631 - DNA, 30 bp, Artificial Sequence
  Synthetic oligonucleotide
atccccagattctgcagtcaggtcagatgg

SEQ ID NO: 256632 - DNA, 30 bp, Artificial Sequence
  Synthetic oligonucleotide
gccccggtgccagtattgtactatagatgg

SEQ ID NO: 256633 - DNA, 30 bp, Artificial Sequence
  Synthetic oligonucleotide
ttgcaaattatattagacaccagtagatgg

SEQ ID NO: 256634 - DNA, 30 bp, Artificial Sequence
  Synthetic oligonucleotide
gtggtttttgtcgagtgaagtgaacgatgg

SEQ ID NO: 256635 - DNA, 30 bp, Artificial Sequence
  Synthetic oligonucleotide
aggtcttcctgtacggaaggttcacgatgg

SEQ ID NO: 256636 - DNA, 30 bp, Artificial Sequence
  Synthetic oligonucleotide
ctctatagtggttagattcgatcccgatgg

SEQ ID NO: 256637 - DNA, 30 bp, Artificial Sequence
  Synthetic oligonucleotide
tactcttagctgctgaaggggcgccgatgg

SEQ ID NO: 256638 - DNA, 30 bp, Artificial Sequence
  Synthetic oligonucleotide
ggtaattcgatttcgtcgaagggtcgatgg

SEQ ID NO: 256639 - DNA, 30 bp, Artificial Sequence
  Synthetic oligonucleotide
gcagggcttgacgacgctcagcttcgatgg

SEQ ID NO: 256640 - DNA, 30 bp, Artificial Sequence
  Synthetic oligonucleotide
ctacgtcctgctcaaagctacacaggatgg

SEQ ID NO: 256641 - DNA, 30 bp, Artificial Sequence
  Synthetic oligonucleotide
tagaacataaggattgggatggtcggatgg

SEQ ID NO: 256642 - DNA, 30 bp, Artificial Sequence
  Synthetic oligonucleotide
tcggtgtaacatgtactaaccaatggatgg

SEQ ID NO: 256643 - DNA, 30 bp, Artificial Sequence
  Synthetic oligonucleotide
tattagtaacagtcggaaaagccgtgatgg

SEQ ID NO: 256644 - DNA, 30 bp, Artificial Sequence
  Synthetic oligonucleotide
gtcatgtggagagccccgatgggttgatgg

SEQ ID NO: 256645 - DNA, 30 bp, Artificial Sequence
  Synthetic oligonucleotide
gtaccttgctcttatgaactctgttgatgg

SEQ ID NO: 256646 - DNA, 30 bp, Artificial Sequence
  Synthetic oligonucleotide
agagtagaaaatattcgagatacaatatgg

SEQ ID NO: 256647 - DNA, 30 bp, Artificial Sequence
  Synthetic oligonucleotide
cagcaacactataggcatcgttgcatatgg

SEQ ID NO: 256648 - DNA, 30 bp, Artificial Sequence
  Synthetic oligonucleotide
cttgacaggggagggggcgaaacgatatgg

SEQ ID NO: 256649 - DNA, 30 bp, Artificial Sequence
  Synthetic oligonucleotide
gcgcggtagaaagttcgcacattgatatgg

SEQ ID NO: 256650 - DNA, 30 bp, Artificial Sequence
  Synthetic oligonucleotide
aggaaccctataatcccatcatgtatatgg

SEQ ID NO: 256651 - DNA, 30 bp, Artificial Sequence
  Synthetic oligonucleotide
atgaattgcgcataacctggcgcactatgg

SEQ ID NO: 256652 - DNA, 30 bp, Artificial Sequence
  Synthetic oligonucleotide
aaatgcatcacgctgatggacagcctatgg

SEQ ID NO: 256653 - DNA, 30 bp, Artificial Sequence
  Synthetic oligonucleotide
gttagttaaaccgtggtttgatcgctatgg

SEQ ID NO: 256654 - DNA, 30 bp, Artificial Sequence
  Synthetic oligonucleotide
gctctgaatcgcggtagaggcttgctatgg

SEQ ID NO: 256655 - DNA, 30 bp, Artificial Sequence
  Synthetic oligonucleotide
taatagagtctccgctaaagtattctatgg

SEQ ID NO: 256656 - DNA, 30 bp, Artificial Sequence
  Synthetic oligonucleotide
caacagtgtggcagttgctatgaagtatgg

SEQ ID NO: 256657 - DNA, 30 bp, Artificial Sequence
  Synthetic oligonucleotide
tttgtacccgatgaatacgatagagtatgg

SEQ ID NO: 256658 - DNA, 30 bp, Artificial Sequence
  Synthetic oligonucleotide
ggaatccctagaggagtcgggtacgtatgg

SEQ ID NO: 256659 - DNA, 30 bp, Artificial Sequence
  Synthetic oligonucleotide
tcgtccaacatgcgagaaggcacggtatgg

SEQ ID NO: 256660 - DNA, 30 bp, Artificial Sequence
  Synthetic oligonucleotide
tccaaagaatggagggcaaacagggtatgg

SEQ ID NO: 256661 - DNA, 30 bp, Artificial Sequence
  Synthetic oligonucleotide
cgtctgataacggtagttaaacttgtatgg

SEQ ID NO: 256662 - DNA, 30 bp, Artificial Sequence
  Synthetic oligonucleotide
gggcttagtctgaaaagtctaaaattatgg

SEQ ID NO: 256663 - DNA, 30 bp, Artificial Sequence
  Synthetic oligonucleotide
agacgcttttaggatttacgcaaattatgg

SEQ ID NO: 256664 - DNA, 30 bp, Artificial Sequence
  Synthetic oligonucleotide
ctatttacattaataccgttgtacttatgg

SEQ ID NO: 256665 - DNA, 30 bp, Artificial Sequence
  Synthetic oligonucleotide
ggggcctagcgttatgaggactagttatgg

SEQ ID NO: 256666 - DNA, 30 bp, Artificial Sequence
  Synthetic oligonucleotide
caaggacgacgtcttggactacttttatgg

SEQ ID NO: 256667 - DNA, 30 bp, Artificial Sequence
  Synthetic oligonucleotide
gggtggttactacgacggtcgtttttatgg

SEQ ID NO: 256668 - DNA, 30 bp, Artificial Sequence
  Synthetic oligonucleotide
tgtgtagctcaggtcgtagcatccaactgg

SEQ ID NO: 256669 - DNA, 30 bp, Artificial Sequence
  Synthetic oligonucleotide
tagtgggaacccttcctttgtggcaactgg

SEQ ID NO: 256670 - DNA, 30 bp, Artificial Sequence
  Synthetic oligonucleotide
ccaataggtcccgtcattggccggaactgg

SEQ ID NO: 256671 - DNA, 30 bp, Artificial Sequence
  Synthetic oligonucleotide
tggcgccacattactccgatttttaactgg

SEQ ID NO: 256672 - DNA, 30 bp, Artificial Sequence
  Synthetic oligonucleotide
ctcccgtaataacactagcagaagcactgg

SEQ ID NO: 256673 - DNA, 30 bp, Artificial Sequence
  Synthetic oligonucleotide
tctggggaatacgacgagcccgatcactgg

SEQ ID NO: 256674 - DNA, 30 bp, Artificial Sequence
  Synthetic oligonucleotide
tttcatcggcaaagattgaagtttcactgg

SEQ ID NO: 256675 - DNA, 30 bp, Artificial Sequence
  Synthetic oligonucleotide
gggaccactgggaaggattcgcgtgactgg

SEQ ID NO: 256676 - DNA, 30 bp, Artificial Sequence
  Synthetic oligonucleotide
gggtacagttcttcacgcctgcaatactgg

SEQ ID NO: 256677 - DNA, 30 bp, Artificial Sequence
  Synthetic oligonucleotide
ccgtttggataaaatcaggtttcatactgg

SEQ ID NO: 256678 - DNA, 30 bp, Artificial Sequence
  Synthetic oligonucleotide
ttaaagcgccgaacttgcaaagcgtactgg

SEQ ID NO: 256679 - DNA, 30 bp, Artificial Sequence
  Synthetic oligonucleotide
tatgggtagggttataagttcgggtactgg

SEQ ID NO: 256680 - DNA, 30 bp, Artificial Sequence
  Synthetic oligonucleotide
catcatggtccaacgaattattattactgg

SEQ ID NO: 256681 - DNA, 31 bp, Artificial Sequence
  Synthetic oligonucleotide
cgcggccacccctaaggcaccgaaaacctgg

SEQ ID NO: 256682 - DNA, 30 bp, Artificial Sequence
  Synthetic oligonucleotide
cctttggaggaaatccgccgcagaacctgg

SEQ ID NO: 256683 - DNA, 30 bp, Artificial Sequence
  Synthetic oligonucleotide
acagtacaatcttcgcagtacggaacctgg

SEQ ID NO: 256684 - DNA, 30 bp, Artificial Sequence
  Synthetic oligonucleotide
gcagtactattctctttatagggaacctgg

SEQ ID NO: 256685 - DNA, 30 bp, Artificial Sequence
  Synthetic oligonucleotide
gatatggagcaaacgatggtatagacctgg

SEQ ID NO: 256686 - DNA, 30 bp, Artificial Sequence
  Synthetic oligonucleotide
cgttggaggttttgttcgatgcgaccctgg

SEQ ID NO: 256687 - DNA, 30 bp, Artificial Sequence
  Synthetic oligonucleotide
agggctggtcggaacggctcatgcccctgg

SEQ ID NO: 256688 - DNA, 30 bp, Artificial Sequence
  Synthetic oligonucleotide
gtgaatctaaattgtgacttagtagcctgg

SEQ ID NO: 256689 - DNA, 30 bp, Artificial Sequence
  Synthetic oligonucleotide
tagcgttcaaacccgacgtaggtcgcctgg

SEQ ID NO: 256690 - DNA, 30 bp, Artificial Sequence
  Synthetic oligonucleotide
gctgtgccactcttagacattattgcctgg

SEQ ID NO: 256691 - DNA, 30 bp, Artificial Sequence
  Synthetic oligonucleotide
gatcatttgcgatattacctttttgcctgg

SEQ ID NO: 256692 - DNA, 30 bp, Artificial Sequence
  Synthetic oligonucleotide
cggcaacggcggccatgctgcaaatcctgg

SEQ ID NO: 256693 - DNA, 30 bp, Artificial Sequence
  Synthetic oligonucleotide
gaacatccggggcttggaataccatcctgg

SEQ ID NO: 256694 - DNA, 30 bp, Artificial Sequence
  Synthetic oligonucleotide
ggcaggggcccttcaaattcgtagtcctgg

SEQ ID NO: 256695 - DNA, 30 bp, Artificial Sequence
  Synthetic oligonucleotide
aagttggagatccccagtacgaaaagctgg

SEQ ID NO: 256696 - DNA, 30 bp, Artificial Sequence
  Synthetic oligonucleotide
ttatcaggatccggagccgtagtaagctgg

SEQ ID NO: 256697 - DNA, 30 bp, Artificial Sequence
  Synthetic oligonucleotide
caggcttgattgacaaaagtggccagctgg

SEQ ID NO: 256698 - DNA, 30 bp, Artificial Sequence
  Synthetic oligonucleotide
tgcatctaatgactgcctttggccagctgg

SEQ ID NO: 256699 - DNA, 30 bp, Artificial Sequence
  Synthetic oligonucleotide
cattcccaaaggagccatccaccgagctgg

SEQ ID NO: 256700 - DNA, 30 bp, Artificial Sequence
  Synthetic oligonucleotide
atgccgttgacacatgatcgagggagctgg

SEQ ID NO: 256701 - DNA, 30 bp, Artificial Sequence
  Synthetic oligonucleotide
gatgaaagaagtttatgagcaatgagctgg

SEQ ID NO: 256702 - DNA, 30 bp, Artificial Sequence
  Synthetic oligonucleotide
cccgttctggccacgcaatctgtgagctgg

SEQ ID NO: 256703 - DNA, 30 bp, Artificial Sequence
  Synthetic oligonucleotide
taaatttaagtgtggtcggcctttagctgg

SEQ ID NO: 256704 - DNA, 30 bp, Artificial Sequence
  Synthetic oligonucleotide
accctaataatgcaaccgctttcacgctgg

SEQ ID NO: 256705 - DNA, 29 bp, Artificial Sequence
  Synthetic oligonucleotide
ccccgcgatcgggaagtttatttcgctgg

SEQ ID NO: 256706 - DNA, 30 bp, Artificial Sequence
  Synthetic oligonucleotide
ggttaagataagtatgatatgagaggctgg

SEQ ID NO: 256707 - DNA, 30 bp, Artificial Sequence
  Synthetic oligonucleotide
tgataaaataccggtccgaagtgaggctgg

SEQ ID NO: 256708 - DNA, 30 bp, Artificial Sequence
  Synthetic oligonucleotide
cttgtggatacatttaatgccttaggctgg

SEQ ID NO: 256709 - DNA, 30 bp, Artificial Sequence
  Synthetic oligonucleotide
gatgtacgcgtaaaggctgcaaagggctgg

SEQ ID NO: 256710 - DNA, 30 bp, Artificial Sequence
  Synthetic oligonucleotide
ttggcgcagggtgcatcaatggggggctgg

SEQ ID NO: 256711 - DNA, 30 bp, Artificial Sequence
  Synthetic oligonucleotide
gtgggtattccacaagagtcatggggctgg

SEQ ID NO: 256712 - DNA, 30 bp, Artificial Sequence
  Synthetic oligonucleotide
ccaggtgaagtggactctttatggggctgg

SEQ ID NO: 256713 - DNA, 30 bp, Artificial Sequence
  Synthetic oligonucleotide
agcattaaaagttatgattgcatgggctgg

SEQ ID NO: 256714 - DNA, 30 bp, Artificial Sequence
  Synthetic oligonucleotide
tgcatgtattttcgtcaagtattgggctgg

SEQ ID NO: 256715 - DNA, 30 bp, Artificial Sequence
  Synthetic oligonucleotide
atccgacgattgatcgggaatgatggctgg

SEQ ID NO: 256716 - DNA, 30 bp, Artificial Sequence
  Synthetic oligonucleotide
gtggcctaaaatgcgcgaagtgttggctgg

SEQ ID NO: 256717 - DNA, 30 bp, Artificial Sequence
  Synthetic oligonucleotide
ttgctttcggaagtagtggtacaatgctgg

SEQ ID NO: 256718 - DNA, 30 bp, Artificial Sequence
  Synthetic oligonucleotide
cagtgtgcttgcgggcattcgggatgctgg

SEQ ID NO: 256719 - DNA, 30 bp, Artificial Sequence
  Synthetic oligonucleotide
gtttcagcgttctaaagcgtcaagtgctgg

SEQ ID NO: 256720 - DNA, 30 bp, Artificial Sequence
  Synthetic oligonucleotide
tcttctgtcttcgctaggcgagccatctgg

SEQ ID NO: 256721 - DNA, 30 bp, Artificial Sequence
  Synthetic oligonucleotide
atgcactcagcaacgaggaccaagatctgg

SEQ ID NO: 256722 - DNA, 30 bp, Artificial Sequence
  Synthetic oligonucleotide
cgtggaaatcaattaatagaatctatctgg

SEQ ID NO: 256723 - DNA, 30 bp, Artificial Sequence
  Synthetic oligonucleotide
gtcacgggtcttaccaagaagagtatctgg

SEQ ID NO: 256724 - DNA, 30 bp, Artificial Sequence
  Synthetic oligonucleotide
cctcctcccctctggaccgacaaactctgg

SEQ ID NO: 256725 - DNA, 30 bp, Artificial Sequence
  Synthetic oligonucleotide
gtatcgaattgggcgttagtggcactctgg

SEQ ID NO: 256726 - DNA, 30 bp, Artificial Sequence
  Synthetic oligonucleotide
tcatcaccgactgcttagcatcacctctgg

SEQ ID NO: 256727 - DNA, 30 bp, Artificial Sequence
  Synthetic oligonucleotide
tgtgtgggcccgttaagtcgtgacctctgg

SEQ ID NO: 256728 - DNA, 30 bp, Artificial Sequence
  Synthetic oligonucleotide
accgcgtcgttaaaggtgcagggcctctgg

SEQ ID NO: 256729 - DNA, 30 bp, Artificial Sequence
  Synthetic oligonucleotide
gtaacctgatacgggtactatgagctctgg

SEQ ID NO: 256730 - DNA, 30 bp, Artificial Sequence
  Synthetic oligonucleotide
cgttcaacctaggctcccaacaggctctgg

SEQ ID NO: 256731 - DNA, 30 bp, Artificial Sequence
  Synthetic oligonucleotide
taagccaacgagacagctatagctctctgg

SEQ ID NO: 256732 - DNA, 30 bp, Artificial Sequence
  Synthetic oligonucleotide
gaaacacctcagagtgtgttaccagtctgg

SEQ ID NO: 256733 - DNA, 30 bp, Artificial Sequence
  Synthetic oligonucleotide
ctttcatgccagtttttgaaagacgtctgg

SEQ ID NO: 256734 - DNA, 30 bp, Artificial Sequence
  Synthetic oligonucleotide
tgcagtaatgcataggtagcaacggtctgg

SEQ ID NO: 256735 - DNA, 30 bp, Artificial Sequence
  Synthetic oligonucleotide
atgagtgcgaatgcactggcttcggtctgg

SEQ ID NO: 256736 - DNA, 30 bp, Artificial Sequence
  Synthetic oligonucleotide
taaacggattaatgggcacttgatgtctgg

SEQ ID NO: 256737 - DNA, 30 bp, Artificial Sequence
  Synthetic oligonucleotide
ttgcggtggcgcaactttcagtacttctgg

SEQ ID NO: 256738 - DNA, 30 bp, Artificial Sequence
  Synthetic oligonucleotide
tctacgaagatccataagcaaaggttctgg

SEQ ID NO: 256739 - DNA, 30 bp, Artificial Sequence
  Synthetic oligonucleotide
gtgattgactaaaaggtaaaaaatttctgg

SEQ ID NO: 256740 - DNA, 30 bp, Artificial Sequence
  Synthetic oligonucleotide
atgtgagggtgtcctcgataacgtttctgg

SEQ ID NO: 256741 - DNA, 30 bp, Artificial Sequence
  Synthetic oligonucleotide
ccacgcgtcgtccacgggagttcgaagtgg

SEQ ID NO: 256742 - DNA, 30 bp, Artificial Sequence
  Synthetic oligonucleotide
accgacgaaagtgtcacgttaaggaagtgg

SEQ ID NO: 256743 - DNA, 30 bp, Artificial Sequence
  Synthetic oligonucleotide
cacgggggagtgttttcgtacgataagtgg

SEQ ID NO: 256744 - DNA, 30 bp, Artificial Sequence
  Synthetic oligonucleotide
gagtggacacaaacgtggcaggataagtgg

SEQ ID NO: 256745 - DNA, 30 bp, Artificial Sequence
  Synthetic oligonucleotide
acaaaagaccataagactttgtaacagtgg

SEQ ID NO: 256746 - DNA, 30 bp, Artificial Sequence
  Synthetic oligonucleotide
tactattggcgttccgtaaggccacagtgg

SEQ ID NO: 256747 - DNA, 30 bp, Artificial Sequence
  Synthetic oligonucleotide
ctctgtacgcggtgaagattatcacagtgg

SEQ ID NO: 256748 - DNA, 30 bp, Artificial Sequence
  Synthetic oligonucleotide
gtagctgaggcgcgggtggctagccagtgg

SEQ ID NO: 256749 - DNA, 30 bp, Artificial Sequence
  Synthetic oligonucleotide
gcaacccaggaaagagcatgcgcgcagtgg

SEQ ID NO: 256750 - DNA, 30 bp, Artificial Sequence
  Synthetic oligonucleotide
agttagagtggggactacagtccggagtgg

SEQ ID NO: 256751 - DNA, 30 bp, Artificial Sequence
  Synthetic oligonucleotide
agcgtattaattatatcagttctggagtgg

SEQ ID NO: 256752 - DNA, 30 bp, Artificial Sequence
  Synthetic oligonucleotide
ggtggtgatgagatgtctttcagatagtgg

SEQ ID NO: 256753 - DNA, 30 bp, Artificial Sequence
  Synthetic oligonucleotide
gtcagcgtactatggtagtttggatagtgg

SEQ ID NO: 256754 - DNA, 30 bp, Artificial Sequence
  Synthetic oligonucleotide
actcggaatgaccttttacttacctagtgg

SEQ ID NO: 256755 - DNA, 30 bp, Artificial Sequence
  Synthetic oligonucleotide
atgcgttaaaggcttggtacagattagtgg

SEQ ID NO: 256756 - DNA, 30 bp, Artificial Sequence
  Synthetic oligonucleotide
cgtctccgtggcttccccatcagttagtgg

SEQ ID NO: 256757 - DNA, 30 bp, Artificial Sequence
  Synthetic oligonucleotide
gatagaggagtcatagaaggtggttagtgg

SEQ ID NO: 256758 - DNA, 30 bp, Artificial Sequence
  Synthetic oligonucleotide
ttaggtaccttgcacagaccgtgaacgtgg

SEQ ID NO: 256759 - DNA, 30 bp, Artificial Sequence
  Synthetic oligonucleotide
tgaggcggtcgcggcgagaccaccacgtgg

SEQ ID NO: 256760 - DNA, 30 bp, Artificial Sequence
  Synthetic oligonucleotide
tctgcgccgatcaatgtcctttgcacgtgg

SEQ ID NO: 256761 - DNA, 30 bp, Artificial Sequence
  Synthetic oligonucleotide
ccgcccaattacaccgatctatcgacgtgg

SEQ ID NO: 256762 - DNA, 30 bp, Artificial Sequence
  Synthetic oligonucleotide
acttgtcagtcaacgccattccatacgtgg

SEQ ID NO: 256763 - DNA, 29 bp, Artificial Sequence
  Synthetic oligonucleotide
ctaaaggtaatatgggttatgctacgtgg

SEQ ID NO: 256764 - DNA, 30 bp, Artificial Sequence
  Synthetic oligonucleotide
gacggggagacgttaaagtttagtacgtgg

SEQ ID NO: 256765 - DNA, 30 bp, Artificial Sequence
  Synthetic oligonucleotide
aatgaaaagtggtacgcaaggggtacgtgg

SEQ ID NO: 256766 - DNA, 30 bp, Artificial Sequence
  Synthetic oligonucleotide
tcctacttagcggactcgtacttcccgtgg

SEQ ID NO: 256767 - DNA, 30 bp, Artificial Sequence
  Synthetic oligonucleotide
aagatcgaagccggcagtcaatgtccgtgg

SEQ ID NO: 256768 - DNA, 30 bp, Artificial Sequence
  Synthetic oligonucleotide
tgtttcgcttccgttagtacaacagcgtgg

SEQ ID NO: 256769 - DNA, 30 bp, Artificial Sequence
  Synthetic oligonucleotide
caacagggtagctgtcacggccaatcgtgg

SEQ ID NO: 256770 - DNA, 30 bp, Artificial Sequence
  Synthetic oligonucleotide
attaggagtgtggaccatgaacgatcgtgg

SEQ ID NO: 256771 - DNA, 30 bp, Artificial Sequence
  Synthetic oligonucleotide
cgcaatggagcgcctacgcttggatcgtgg

SEQ ID NO: 256772 - DNA, 30 bp, Artificial Sequence
  Synthetic oligonucleotide
aaacccccggttacatacccagcgtcgtgg

SEQ ID NO: 256773 - DNA, 30 bp, Artificial Sequence
  Synthetic oligonucleotide
cgcctggatttcggctcggcctggtcgtgg

SEQ ID NO: 256774 - DNA, 30 bp, Artificial Sequence
  Synthetic oligonucleotide
catcgaaagtaagtgtttccattttcgtgg

SEQ ID NO: 256775 - DNA, 30 bp, Artificial Sequence
  Synthetic oligonucleotide
caggccagagcacgcactgtgtcgaggtgg

SEQ ID NO: 256776 - DNA, 30 bp, Artificial Sequence
  Synthetic oligonucleotide
gagtgattgtcacgaaagggaattaggtgg

SEQ ID NO: 256777 - DNA, 30 bp, Artificial Sequence
  Synthetic oligonucleotide
gccgacgtattgtagttgcttcaacggtgg

SEQ ID NO: 256778 - DNA, 30 bp, Artificial Sequence
  Synthetic oligonucleotide
acgagagttgctagtgtctacggacggtgg

SEQ ID NO: 256779 - DNA, 30 bp, Artificial Sequence
  Synthetic oligonucleotide
tacggaattagtgacacactcctacggtgg

SEQ ID NO: 256780 - DNA, 30 bp, Artificial Sequence
  Synthetic oligonucleotide
cacaagtcgcgtggtcaccatttacggtgg

SEQ ID NO: 256781 - DNA, 30 bp, Artificial Sequence
  Synthetic oligonucleotide
ccaaatgggctcttcgcattaggtcggtgg

SEQ ID NO: 256782 - DNA, 30 bp, Artificial Sequence
  Synthetic oligonucleotide
ggtgttcgtattgacgatacttaagggtgg

SEQ ID NO: 256783 - DNA, 30 bp, Artificial Sequence
  Synthetic oligonucleotide
tcgcagcttcacgaatggagtccagggtgg

SEQ ID NO: 256784 - DNA, 30 bp, Artificial Sequence
  Synthetic oligonucleotide
tgccgccagacaaggaagctagtagggtgg

SEQ ID NO: 256785 - DNA, 30 bp, Artificial Sequence
  Synthetic oligonucleotide
tcggttgggcaaaatagacaagacgggtgg

SEQ ID NO: 256786 - DNA, 30 bp, Artificial Sequence
  Synthetic oligonucleotide
taacgcggactacggctaaaattcgggtgg

SEQ ID NO: 256787 - DNA, 30 bp, Artificial Sequence
  Synthetic oligonucleotide
cagtcctggtggaaaactctaagtgggtgg

SEQ ID NO: 256788 - DNA, 30 bp, Artificial Sequence
  Synthetic oligonucleotide
tttctcgcgtagagacacccaattgggtgg

SEQ ID NO: 256789 - DNA, 30 bp, Artificial Sequence
  Synthetic oligonucleotide
ggcagaaccggttaggaccttattgggtgg

SEQ ID NO: 256790 - DNA, 30 bp, Artificial Sequence
  Synthetic oligonucleotide
tttgacttagaaaaaatatcgggatggtgg

SEQ ID NO: 256791 - DNA, 30 bp, Artificial Sequence
  Synthetic oligonucleotide
acctctgtgtgtcaagcccaatactggtgg

SEQ ID NO: 256792 - DNA, 30 bp, Artificial Sequence
  Synthetic oligonucleotide
aataggaagccgaattcaacaccctggtgg

SEQ ID NO: 256793 - DNA, 30 bp, Artificial Sequence
  Synthetic oligonucleotide
accgtgataccagtcgtcaccccgtggtgg

SEQ ID NO: 256794 - DNA, 30 bp, Artificial Sequence
  Synthetic oligonucleotide
aagtagaggtggtgcttaaatgtgtggtgg

SEQ ID NO: 256795 - DNA, 30 bp, Artificial Sequence
  Synthetic oligonucleotide
tgttctccgacaaggggggtctgttggtgg

SEQ ID NO: 256796 - DNA, 30 bp, Artificial Sequence
  Synthetic oligonucleotide
aagttgtagcgactataaaatggaatgtgg

SEQ ID NO: 256797 - DNA, 30 bp, Artificial Sequence
  Synthetic oligonucleotide
agttgcgctcagtccttagtcaacatgtgg

SEQ ID NO: 256798 - DNA, 30 bp, Artificial Sequence
  Synthetic oligonucleotide
ctgacaagggctcgaaattggacactgtgg

SEQ ID NO: 256799 - DNA, 30 bp, Artificial Sequence
  Synthetic oligonucleotide
aagtcttgtggggcggaacccctactgtgg

SEQ ID NO: 256800 - DNA, 30 bp, Artificial Sequence
  Synthetic oligonucleotide
cgttatggtaaggccaaagctgacctgtgg

SEQ ID NO: 256801 - DNA, 30 bp, Artificial Sequence
  Synthetic oligonucleotide
ttactaatcaggaaaagcactcgcctgtgg

SEQ ID NO: 256802 - DNA, 30 bp, Artificial Sequence
  Synthetic oligonucleotide
gtaggtgcaacttaaagatcgtcgctgtgg

SEQ ID NO: 256803 - DNA, 30 bp, Artificial Sequence
  Synthetic oligonucleotide
cgcttcggtcagtggagttcaaggctgtgg

SEQ ID NO: 256804 - DNA, 30 bp, Artificial Sequence
  Synthetic oligonucleotide
cttttgctactagagtcaaaatggctgtgg

SEQ ID NO: 256805 - DNA, 30 bp, Artificial Sequence
  Synthetic oligonucleotide
acaatgaagctaccatctatcatgctgtgg

SEQ ID NO: 256806 - DNA, 30 bp, Artificial Sequence
  Synthetic oligonucleotide
cgggacagctggtatttgtcgcatctgtgg

SEQ ID NO: 256807 - DNA, 30 bp, Artificial Sequence
  Synthetic oligonucleotide
cgccatgtactggatatataaacagtgtgg

SEQ ID NO: 256808 - DNA, 30 bp, Artificial Sequence
  Synthetic oligonucleotide
caaagtcgttctgcaatcgcggacgtgtgg

SEQ ID NO: 256809 - DNA, 30 bp, Artificial Sequence
  Synthetic oligonucleotide
acgacacgcttagtgtcctgctacgtgtgg

SEQ ID NO: 256810 - DNA, 30 bp, Artificial Sequence
  Synthetic oligonucleotide
ctttgagaattacatagcctccccgtgtgg

SEQ ID NO: 256811 - DNA, 30 bp, Artificial Sequence
  Synthetic oligonucleotide
acattgatgaggaaacctcgactggtgtgg

SEQ ID NO: 256812 - DNA, 30 bp, Artificial Sequence
  Synthetic oligonucleotide
tccgttaagagaatggcactcctggtgtgg

SEQ ID NO: 256813 - DNA, 30 bp, Artificial Sequence
  Synthetic oligonucleotide
gtgattccgccttcattgcaattggtgtgg

SEQ ID NO: 256814 - DNA, 30 bp, Artificial Sequence
  Synthetic oligonucleotide
cagctcatggcctaatagaggcatgtgtgg

SEQ ID NO: 256815 - DNA, 30 bp, Artificial Sequence
  Synthetic oligonucleotide
tctcgcagacactgtagagaaagtgtgtgg

SEQ ID NO: 256816 - DNA, 30 bp, Artificial Sequence
  Synthetic oligonucleotide
tatggtggtttataatggaatagtgtgtgg

SEQ ID NO: 256817 - DNA, 30 bp, Artificial Sequence
  Synthetic oligonucleotide
gaaaggtcaggatttggctaatacttgtgg

SEQ ID NO: 256818 - DNA, 30 bp, Artificial Sequence
  Synthetic oligonucleotide
ggagacatggaaaatgctgattccttgtgg

SEQ ID NO: 256819 - DNA, 30 bp, Artificial Sequence
  Synthetic oligonucleotide
tagtaggtcgaccagtaccaagagttgtgg

SEQ ID NO: 256820 - DNA, 30 bp, Artificial Sequence
  Synthetic oligonucleotide
ctagagaactggcggtatacatatttgtgg

SEQ ID NO: 256821 - DNA, 30 bp, Artificial Sequence
  Synthetic oligonucleotide
taaaggaaaggagtgctgccttatttgtgg

SEQ ID NO: 256822 - DNA, 30 bp, Artificial Sequence
  Synthetic oligonucleotide
gtgggcgcgttaattaacgtagttttgtgg

SEQ ID NO: 256823 - DNA, 30 bp, Artificial Sequence
  Synthetic oligonucleotide
cgcctacagacatgtgggtgcgccaattgg

SEQ ID NO: 256824 - DNA, 30 bp, Artificial Sequence
  Synthetic oligonucleotide
tgttgtaacggctgtattccttccaattgg

SEQ ID NO: 256825 - DNA, 30 bp, Artificial Sequence
  Synthetic oligonucleotide
atatgcccgccgccatcgatagtacattgg

SEQ ID NO: 256826 - DNA, 30 bp, Artificial Sequence
  Synthetic oligonucleotide
aaggattggaatctgtattgcaagcattgg

SEQ ID NO: 256827 - DNA, 30 bp, Artificial Sequence
  Synthetic oligonucleotide
acagagcgcaagacgtgggacccgcattgg

SEQ ID NO: 256828 - DNA, 30 bp, Artificial Sequence
  Synthetic oligonucleotide
ccataggccgatatcttagtgaggcattgg

SEQ ID NO: 256829 - DNA, 30 bp, Artificial Sequence
  Synthetic oligonucleotide
attggagacctcctagccatggggcattgg

SEQ ID NO: 256830 - DNA, 30 bp, Artificial Sequence
  Synthetic oligonucleotide
gcatggagtcacaatcgagagcgagattgg

SEQ ID NO: 256831 - DNA, 30 bp, Artificial Sequence
  Synthetic oligonucleotide
ttttgcgcgggtgtcgctaactaggattgg

SEQ ID NO: 256832 - DNA, 29 bp, Artificial Sequence
  Synthetic oligonucleotide
tcagactcaagggacaggcgggggattgg

SEQ ID NO: 256833 - DNA, 30 bp, Artificial Sequence
  Synthetic oligonucleotide
gtccgaacataagtttagggcaaatattgg

SEQ ID NO: 256834 - DNA, 31 bp, Artificial Sequence
  Synthetic oligonucleotide
accggatttatgccacataccgtactattgg

SEQ ID NO: 256835 - DNA, 30 bp, Artificial Sequence
  Synthetic oligonucleotide
ctgactctaaataccgccaacgtgtattgg

SEQ ID NO: 256836 - DNA, 30 bp, Artificial Sequence
  Synthetic oligonucleotide
ggagaggtatgtcaactttggagtacttgg

SEQ ID NO: 256837 - DNA, 30 bp, Artificial Sequence
  Synthetic oligonucleotide
tccattgcactctgtctatagataccttgg

SEQ ID NO: 256838 - DNA, 30 bp, Artificial Sequence
  Synthetic oligonucleotide
acactatacatttcttcaggcttaccttgg

SEQ ID NO: 256839 - DNA, 30 bp, Artificial Sequence
  Synthetic oligonucleotide
ctgtgtgatcgttgggcgaaagggccttgg

SEQ ID NO: 256840 - DNA, 30 bp, Artificial Sequence
  Synthetic oligonucleotide
ttgtggatctgcaacggcggctatccttgg

SEQ ID NO: 256841 - DNA, 30 bp, Artificial Sequence
  Synthetic oligonucleotide
gcggtgaaataagcgtgcgagggagcttgg

SEQ ID NO: 256842 - DNA, 30 bp, Artificial Sequence
  Synthetic oligonucleotide
gggaccgcatggttcctgaaaagcgcttgg

SEQ ID NO: 256843 - DNA, 30 bp, Artificial Sequence
  Synthetic oligonucleotide
cctggtgttaatcatacgcctgaggcttgg

SEQ ID NO: 256844 - DNA, 30 bp, Artificial Sequence
  Synthetic oligonucleotide
gttgtagcagcgagattgttgacatcttgg

SEQ ID NO: 256845 - DNA, 30 bp, Artificial Sequence
  Synthetic oligonucleotide
agtattatgccgattgctcaagcatcttgg

SEQ ID NO: 256846 - DNA, 30 bp, Artificial Sequence
  Synthetic oligonucleotide
ttaaatggtactaaccactctggctcttgg

SEQ ID NO: 256847 - DNA, 30 bp, Artificial Sequence
  Synthetic oligonucleotide
aaatgtgcatactcattggttctgtcttgg

SEQ ID NO: 256848 - DNA, 30 bp, Artificial Sequence
  Synthetic oligonucleotide
gggttcgaaagaaagcgctaagtttcttgg

SEQ ID NO: 256849 - DNA, 30 bp, Artificial Sequence
  Synthetic oligonucleotide
aggagctgatccatttcagtctcgagttgg

SEQ ID NO: 256850 - DNA, 30 bp, Artificial Sequence
  Synthetic oligonucleotide
ttatcgggtttgtctcataaccggagttgg

SEQ ID NO: 256851 - DNA, 30 bp, Artificial Sequence
  Synthetic oligonucleotide
caatcttataagtcctggaccgtgagttgg

SEQ ID NO: 256852 - DNA, 30 bp, Artificial Sequence
  Synthetic oligonucleotide
ctataggacaagcacgcacgaacacgttgg

SEQ ID NO: 256853 - DNA, 30 bp, Artificial Sequence
  Synthetic oligonucleotide
agaacgacttttttatcggatccccgttgg

SEQ ID NO: 256854 - DNA, 30 bp, Artificial Sequence
  Synthetic oligonucleotide
tttaaatacggttacaggaatattcgttgg

SEQ ID NO: 256855 - DNA, 30 bp, Artificial Sequence
  Synthetic oligonucleotide
gaaattctcgtctaccgtacagaaggttgg

SEQ ID NO: 256856 - DNA, 30 bp, Artificial Sequence
  Synthetic oligonucleotide
gaagcacatatctgagggtggaagggttgg

SEQ ID NO: 256857 - DNA, 30 bp, Artificial Sequence
  Synthetic oligonucleotide
ccattgagcattgacgtgcaaacgggttgg

SEQ ID NO: 256858 - DNA, 30 bp, Artificial Sequence
  Synthetic oligonucleotide
ctattcgttagttggtttctggctggttgg

SEQ ID NO: 256859 - DNA, 30 bp, Artificial Sequence
  Synthetic oligonucleotide
tgattccaaataaccttcgttccctgttgg

SEQ ID NO: 256860 - DNA, 30 bp, Artificial Sequence
  Synthetic oligonucleotide
gggggtctggccctcacatcaagctgttgg

SEQ ID NO: 256861 - DNA, 30 bp, Artificial Sequence
  Synthetic oligonucleotide
ggacagtcagcggccaaatgattctgttgg

SEQ ID NO: 256862 - DNA, 30 bp, Artificial Sequence
  Synthetic oligonucleotide
cgaccaatccgggaaactagaccgtgttgg

SEQ ID NO: 256863 - DNA, 30 bp, Artificial Sequence
  Synthetic oligonucleotide
cgctcataagggtcattggcaaggtgttgg

SEQ ID NO: 256864 - DNA, 30 bp, Artificial Sequence
  Synthetic oligonucleotide
ttgactaattcagctttctgagggtgttgg

SEQ ID NO: 256865 - DNA, 30 bp, Artificial Sequence
  Synthetic oligonucleotide
gggaactttgtcacgggactaagttgttgg

SEQ ID NO: 256866 - DNA, 30 bp, Artificial Sequence
  Synthetic oligonucleotide
gcgagttaacggggcaacccacaaatttgg

SEQ ID NO: 256867 - DNA, 30 bp, Artificial Sequence
  Synthetic oligonucleotide
cgcaggagactaacacctgtagtcatttgg

SEQ ID NO: 256868 - DNA, 30 bp, Artificial Sequence
  Synthetic oligonucleotide
ttcatatttagggcagttgtcacgctttgg

SEQ ID NO: 256869 - DNA, 30 bp, Artificial Sequence
  Synthetic oligonucleotide
gtgtatgtatcatcaaaacacaaagtttgg

SEQ ID NO: 256870 - DNA, 30 bp, Artificial Sequence
  Synthetic oligonucleotide
tatttgctaccgagcatacgacaagtttgg

SEQ ID NO: 256871 - DNA, 30 bp, Artificial Sequence
  Synthetic oligonucleotide
tgcaccccggtgcctcaacattaagtttgg

SEQ ID NO: 256872 - DNA, 30 bp, Artificial Sequence
  Synthetic oligonucleotide
gttacgtctctagggagtcctatagtttgg

SEQ ID NO: 256873 - DNA, 30 bp, Artificial Sequence
  Synthetic oligonucleotide
tggcgcaggctgtcgacgtattccgtttgg

SEQ ID NO: 256874 - DNA, 30 bp, Artificial Sequence
  Synthetic oligonucleotide
tgcaatagggaacggcacgacagggtttgg

SEQ ID NO: 256875 - DNA, 30 bp, Artificial Sequence
  Synthetic oligonucleotide
aagaatgtgatttgatgcgggttggtttgg

SEQ ID NO: 256876 - DNA, 30 bp, Artificial Sequence
  Synthetic oligonucleotide
cggggtgccattcaagacgcgtacttttgg

SEQ ID NO: 256877 - DNA, 30 bp, Artificial Sequence
  Synthetic oligonucleotide
atatctggctaaggaagtatatccttttgg

SEQ ID NO: 256878 - DNA, 30 bp, Artificial Sequence
  Synthetic oligonucleotide
attgttcaaattcgccgaagagtcttttgg

SEQ ID NO: 256879 - DNA, 30 bp, Artificial Sequence
  Synthetic oligonucleotide
agaaggttaaggattcaagtcatgttttgg

SEQ ID NO: 256880 - DNA, 30 bp, Artificial Sequence
  Synthetic oligonucleotide
atgataggctcgttcagtcacaatttttgg

SEQ ID NO: 256881 - DNA, 30 bp, Artificial Sequence
  Synthetic oligonucleotide
agttaactcgtataagtgtctcgtttttgg

SEQ ID NO: 256882 - DNA, 30 bp, Artificial Sequence
  Synthetic oligonucleotide
gtatacttaagacgcgaacgaccaaaaatg

SEQ ID NO: 256883 - DNA, 30 bp, Artificial Sequence
  Synthetic oligonucleotide
cggttcaagtttatgcacggggcgaaaatg

SEQ ID NO: 256884 - DNA, 30 bp, Artificial Sequence
  Synthetic oligonucleotide
cgcatccagcgttaacatcctcctaaaatg

SEQ ID NO: 256885 - DNA, 30 bp, Artificial Sequence
  Synthetic oligonucleotide
gattgaagcaattgaatccgttctaaaatg

SEQ ID NO: 256886 - DNA, 30 bp, Artificial Sequence
  Synthetic oligonucleotide
tgctatgatgcgatgggagggtgtaaaatg

SEQ ID NO: 256887 - DNA, 30 bp, Artificial Sequence
  Synthetic oligonucleotide
ctttaggggtataagtcaaaggtccaaatg

SEQ ID NO: 256888 - DNA, 30 bp, Artificial Sequence
  Synthetic oligonucleotide
agcaccttaactctcaatacggttcaaatg

SEQ ID NO: 256889 - DNA, 30 bp, Artificial Sequence
  Synthetic oligonucleotide
gccaagtaggcacgcacccgggaagaaatg

SEQ ID NO: 256890 - DNA, 30 bp, Artificial Sequence
  Synthetic oligonucleotide
atgcgatcaggtctcctgactgcagaaatg

SEQ ID NO: 256891 - DNA, 30 bp, Artificial Sequence
  Synthetic oligonucleotide
ttcttcggctaagatgtagcgagggaaatg

SEQ ID NO: 256892 - DNA, 30 bp, Artificial Sequence
  Synthetic oligonucleotide
cagtgtgtttatcttgcaagattggaaatg

SEQ ID NO: 256893 - DNA, 30 bp, Artificial Sequence
  Synthetic oligonucleotide
agggattctcttcttatcgatactgaaatg

SEQ ID NO: 256894 - DNA, 30 bp, Artificial Sequence
  Synthetic oligonucleotide
cgtagatgcatcggatagacccttgaaatg

SEQ ID NO: 256895 - DNA, 30 bp, Artificial Sequence
  Synthetic oligonucleotide
aaagcgtaaactacgtattcgggataaatg

SEQ ID NO: 256896 - DNA, 30 bp, Artificial Sequence
  Synthetic oligonucleotide
gatacgtacagcatagcaacgttctaaatg

SEQ ID NO: 256897 - DNA, 30 bp, Artificial Sequence
  Synthetic oligonucleotide
tacctcacgcctgtactgacccggtaaatg

SEQ ID NO: 256898 - DNA, 30 bp, Artificial Sequence
  Synthetic oligonucleotide
tggcgtcgacgacatgaattacgttaaatg

SEQ ID NO: 256899 - DNA, 30 bp, Artificial Sequence
  Synthetic oligonucleotide
atgataaaggagcgcattgacgtttaaatg

SEQ ID NO: 256900 - DNA, 30 bp, Artificial Sequence
  Synthetic oligonucleotide
ggaaatgatacgagcaaccgagaaacaatg

SEQ ID NO: 256901 - DNA, 30 bp, Artificial Sequence
  Synthetic oligonucleotide
gttagttcgactggccttgtcagcacaatg

SEQ ID NO: 256902 - DNA, 30 bp, Artificial Sequence
  Synthetic oligonucleotide
tactcctttgaaccaactccagggacaatg

SEQ ID NO: 256903 - DNA, 30 bp, Artificial Sequence
  Synthetic oligonucleotide
ggatcttcccgaattgattggcacccaatg

SEQ ID NO: 256904 - DNA, 30 bp, Artificial Sequence
  Synthetic oligonucleotide
agcgtggagcatacgtgacttcatccaatg

SEQ ID NO: 256905 - DNA, 30 bp, Artificial Sequence
  Synthetic oligonucleotide
ataggttaaggtttagggggaggtccaatg

SEQ ID NO: 256906 - DNA, 30 bp, Artificial Sequence
  Synthetic oligonucleotide
gcaaacgggtacctagatcgctgtccaatg

SEQ ID NO: 256907 - DNA, 30 bp, Artificial Sequence
  Synthetic oligonucleotide
gagtgtaaccagagggcagcttgtccaatg

SEQ ID NO: 256908 - DNA, 30 bp, Artificial Sequence
  Synthetic oligonucleotide
tggttgagtcgatccgcaccaagagcaatg

SEQ ID NO: 256909 - DNA, 30 bp, Artificial Sequence
  Synthetic oligonucleotide
cgtcgagtcagtggtaccgtgggagcaatg

SEQ ID NO: 256910 - DNA, 30 bp, Artificial Sequence
  Synthetic oligonucleotide
gaactaggtctaccttcacacgacgcaatg

SEQ ID NO: 256911 - DNA, 30 bp, Artificial Sequence
  Synthetic oligonucleotide
ataattacagtcagtaggccgagtgcaatg

SEQ ID NO: 256912 - DNA, 30 bp, Artificial Sequence
  Synthetic oligonucleotide
aaatcgatataaaaatcagattcatcaatg

SEQ ID NO: 256913 - DNA, 30 bp, Artificial Sequence
  Synthetic oligonucleotide
gaggtttgtgatctcgccctagattcaatg

SEQ ID NO: 256914 - DNA, 30 bp, Artificial Sequence
  Synthetic oligonucleotide
tacgccgtggagagaacactcgattcaatg

SEQ ID NO: 256915 - DNA, 30 bp, Artificial Sequence
  Synthetic oligonucleotide
gtcatttgaacgttagggtcctattcaatg

SEQ ID NO: 256916 - DNA, 30 bp, Artificial Sequence
  Synthetic oligonucleotide
cgtagttgaatgcacagataccaaagaatg

SEQ ID NO: 256917 - DNA, 30 bp, Artificial Sequence
  Synthetic oligonucleotide
gaaggtaaattttacgccaaaagcagaatg

SEQ ID NO: 256918 - DNA, 30 bp, Artificial Sequence
  Synthetic oligonucleotide
ctgacattctgggataacaaacggagaatg

SEQ ID NO: 256919 - DNA, 30 bp, Artificial Sequence
  Synthetic oligonucleotide
tgtataatgtatccttagctcgtgagaatg

SEQ ID NO: 256920 - DNA, 30 bp, Artificial Sequence
  Synthetic oligonucleotide
ggttcgcacctcaggttctaaaaacgaatg

SEQ ID NO: 256921 - DNA, 30 bp, Artificial Sequence
  Synthetic oligonucleotide
gaacacgtaacggggggaagatcccgaatg

SEQ ID NO: 256922 - DNA, 30 bp, Artificial Sequence
  Synthetic oligonucleotide
caatggtgaaactcattggttcttcgaatg

SEQ ID NO: 256923 - DNA, 30 bp, Artificial Sequence
  Synthetic oligonucleotide
ggaactatcctttaataacgtccgggaatg

SEQ ID NO: 256924 - DNA, 30 bp, Artificial Sequence
  Synthetic oligonucleotide
tgaacttggggccttcaccaccggggaatg

SEQ ID NO: 256925 - DNA, 30 bp, Artificial Sequence
  Synthetic oligonucleotide
acgtgatgcgcgccatgactgagtggaatg

SEQ ID NO: 256926 - DNA, 30 bp, Artificial Sequence
  Synthetic oligonucleotide
cgcatgattccgcactgtgagcgtggaatg

SEQ ID NO: 256927 - DNA, 30 bp, Artificial Sequence
  Synthetic oligonucleotide
cgggactcggggcaggacaatgttggaatg

SEQ ID NO: 256928 - DNA, 30 bp, Artificial Sequence
  Synthetic oligonucleotide
agccccgggctatcttcgagatttggaatg

SEQ ID NO: 256929 - DNA, 30 bp, Artificial Sequence
  Synthetic oligonucleotide
gaaggagttcattagctatgcgtatgaatg

SEQ ID NO: 256930 - DNA, 30 bp, Artificial Sequence
  Synthetic oligonucleotide
gacccactgacgatggggcgccactgaatg

SEQ ID NO: 256931 - DNA, 30 bp, Artificial Sequence
  Synthetic oligonucleotide
aataatgaatacgctcaaaccgcgtgaatg

SEQ ID NO: 256932 - DNA, 30 bp, Artificial Sequence
  Synthetic oligonucleotide
tgtaagcctatgctatcacatgcgtgaatg

SEQ ID NO: 256933 - DNA, 30 bp, Artificial Sequence
  Synthetic oligonucleotide
agccggcagagagtatctctgtgttgaatg

SEQ ID NO: 256934 - DNA, 30 bp, Artificial Sequence
  Synthetic oligonucleotide
gtcgatataagctccccgttcataataatg

SEQ ID NO: 256935 - DNA, 30 bp, Artificial Sequence
  Synthetic oligonucleotide
gttgtagatagggtccagccacagataatg

SEQ ID NO: 256936 - DNA, 30 bp, Artificial Sequence
  Synthetic oligonucleotide
tttgaacggacagacgataaaaggataatg

SEQ ID NO: 256937 - DNA, 30 bp, Artificial Sequence
  Synthetic oligonucleotide
cttgtcccggcgtttccacacaggataatg

SEQ ID NO: 256938 - DNA, 30 bp, Artificial Sequence
  Synthetic oligonucleotide
tatgtggctgtgccgtacgtagggataatg

SEQ ID NO: 256939 - DNA, 30 bp, Artificial Sequence
  Synthetic oligonucleotide
aacaatgaatgggcctagttcgggataatg

SEQ ID NO: 256940 - DNA, 30 bp, Artificial Sequence
  Synthetic oligonucleotide
ttgcgtacaagatactcacgtgaactaatg

SEQ ID NO: 256941 - DNA, 30 bp, Artificial Sequence
  Synthetic oligonucleotide
tagtgatgaggttcaaacaatatactaatg

SEQ ID NO: 256942 - DNA, 30 bp, Artificial Sequence
  Synthetic oligonucleotide
gaccatggttgctctacgcgcgtactaatg

SEQ ID NO: 256943 - DNA, 30 bp, Artificial Sequence
  Synthetic oligonucleotide
gtcgcctatagggggccccgcggcctaatg

SEQ ID NO: 256944 - DNA, 30 bp, Artificial Sequence
  Synthetic oligonucleotide
acaggggacccaatatggatcattctaatg

SEQ ID NO: 256945 - DNA, 30 bp, Artificial Sequence
  Synthetic oligonucleotide
acgggctacacattcgcggcacttctaatg

SEQ ID NO: 256946 - DNA, 30 bp, Artificial Sequence
  Synthetic oligonucleotide
tgtgagcctcggggtatatgctaagtaatg

SEQ ID NO: 256947 - DNA, 30 bp, Artificial Sequence
  Synthetic oligonucleotide
tctctgataaagaaggaacgcgcagtaatg

SEQ ID NO: 256948 - DNA, 30 bp, Artificial Sequence
  Synthetic oligonucleotide
tctaaagatgtcagtttgcgatcagtaatg

SEQ ID NO: 256949 - DNA, 30 bp, Artificial Sequence
  Synthetic oligonucleotide
gcacggtaggcggtagtactatcagtaatg

SEQ ID NO: 256950 - DNA, 30 bp, Artificial Sequence
  Synthetic oligonucleotide
ccagcgatagatgcatctccaggcgtaatg

SEQ ID NO: 256951 - DNA, 30 bp, Artificial Sequence
  Synthetic oligonucleotide
acgtgtaatagcccgggaacattcgtaatg

SEQ ID NO: 256952 - DNA, 30 bp, Artificial Sequence
  Synthetic oligonucleotide
cgtgagctagggatacgttgttaggtaatg

SEQ ID NO: 256953 - DNA, 30 bp, Artificial Sequence
  Synthetic oligonucleotide
atcctctgtactgaccgggttgtggtaatg

SEQ ID NO: 256954 - DNA, 30 bp, Artificial Sequence
  Synthetic oligonucleotide
catagaatgtgggattgttcgactgtaatg

SEQ ID NO: 256955 - DNA, 30 bp, Artificial Sequence
  Synthetic oligonucleotide
cgcccacaggtgcacagtgcaaaattaatg

SEQ ID NO: 256956 - DNA, 30 bp, Artificial Sequence
  Synthetic oligonucleotide
gaagctctaagggagagagagaaattaatg

SEQ ID NO: 256957 - DNA, 30 bp, Artificial Sequence
  Synthetic oligonucleotide
tagctagggcactccgcattaatattaatg

SEQ ID NO: 256958 - DNA, 30 bp, Artificial Sequence
  Synthetic oligonucleotide
attaaccgaggtaagacgaagtgtttaatg

SEQ ID NO: 256959 - DNA, 30 bp, Artificial Sequence
  Synthetic oligonucleotide
cctacagcataaacaacgcggcaaaacatg

SEQ ID NO: 256960 - DNA, 30 bp, Artificial Sequence
  Synthetic oligonucleotide
ggtgcatatgtatttgcggtataaaacatg

SEQ ID NO: 256961 - DNA, 30 bp, Artificial Sequence
  Synthetic oligonucleotide
tagccgtgtcaactgttcattacaaacatg

SEQ ID NO: 256962 - DNA, 30 bp, Artificial Sequence
  Synthetic oligonucleotide
atacgccgccctcggcttgtggcaaacatg

SEQ ID NO: 256963 - DNA, 30 bp, Artificial Sequence
  Synthetic oligonucleotide
agggtgactggcgccatgaatgtaaacatg

SEQ ID NO: 256964 - DNA, 30 bp, Artificial Sequence
  Synthetic oligonucleotide
taatcccagacgatggttcgccccaacatg

SEQ ID NO: 256965 - DNA, 30 bp, Artificial Sequence
  Synthetic oligonucleotide
gtatgaacgggcgctccagctgtcaacatg

SEQ ID NO: 256966 - DNA, 30 bp, Artificial Sequence
  Synthetic oligonucleotide
atacgttcaatccggtaataatcgaacatg

SEQ ID NO: 256967 - DNA, 30 bp, Artificial Sequence
  Synthetic oligonucleotide
gcaattcctaggacatgcacatttaacatg

SEQ ID NO: 256968 - DNA, 30 bp, Artificial Sequence
  Synthetic oligonucleotide
ttcaagggactattgaaatggacacacatg

SEQ ID NO: 256969 - DNA, 30 bp, Artificial Sequence
  Synthetic oligonucleotide
aagagacggctggacctgctcagccacatg

SEQ ID NO: 256970 - DNA, 30 bp, Artificial Sequence
  Synthetic oligonucleotide
gtggaaggttagtatttgcgtctccacatg

SEQ ID NO: 256971 - DNA, 30 bp, Artificial Sequence
  Synthetic oligonucleotide
tccgcagcaccgatcaccgataagcacatg

SEQ ID NO: 256972 - DNA, 30 bp, Artificial Sequence
  Synthetic oligonucleotide
agttgcatcggttgataggacgagcacatg

SEQ ID NO: 256973 - DNA, 30 bp, Artificial Sequence
  Synthetic oligonucleotide
aatggtgaagaccttgaaaaaagtcacatg

SEQ ID NO: 256974 - DNA, 30 bp, Artificial Sequence
  Synthetic oligonucleotide
ctcgcacctccataggaatcggttcacatg

SEQ ID NO: 256975 - DNA, 30 bp, Artificial Sequence
  Synthetic oligonucleotide
agcgcgatatgtaatttagtcgcagacatg

SEQ ID NO: 256976 - DNA, 30 bp, Artificial Sequence
  Synthetic oligonucleotide
gtctataacgttcactaccgtcacgacatg

SEQ ID NO: 256977 - DNA, 30 bp, Artificial Sequence
  Synthetic oligonucleotide
gagcgaacgggctaatgggtatgcgacatg

SEQ ID NO: 256978 - DNA, 30 bp, Artificial Sequence
  Synthetic oligonucleotide
tttcgtcccgacgcgacaaaacctgacatg

SEQ ID NO: 256979 - DNA, 30 bp, Artificial Sequence
  Synthetic oligonucleotide
aaacatgtagtcttaagcaatcgtgacatg

SEQ ID NO: 256980 - DNA, 30 bp, Artificial Sequence
  Synthetic oligonucleotide
taggagtgagcgcagtacagcgcctacatg

SEQ ID NO: 256981 - DNA, 30 bp, Artificial Sequence
  Synthetic oligonucleotide
tggtgcaagaacggcatcataaagtacatg

SEQ ID NO: 256982 - DNA, 30 bp, Artificial Sequence
  Synthetic oligonucleotide
ctcgcttattggagaatgcacgagtacatg

SEQ ID NO: 256983 - DNA, 30 bp, Artificial Sequence
  Synthetic oligonucleotide
gcttatcttgatggcttctgatggtacatg

SEQ ID NO: 256984 - DNA, 30 bp, Artificial Sequence
  Synthetic oligonucleotide
catacgtcagcgggagatgtaccttacatg

SEQ ID NO: 256985 - DNA, 30 bp, Artificial Sequence
  Synthetic oligonucleotide
actgacctgggagagttgtaagtcaccatg

SEQ ID NO: 256986 - DNA, 30 bp, Artificial Sequence
  Synthetic oligonucleotide
ctgtgctatttttcgtacagattgaccatg

SEQ ID NO: 256987 - DNA, 30 bp, Artificial Sequence
  Synthetic oligonucleotide
gtgttaccacgatttatagtcctacccatg

SEQ ID NO: 256988 - DNA, 30 bp, Artificial Sequence
  Synthetic oligonucleotide
atagatctctggcaatttcctcaagccatg

SEQ ID NO: 256989 - DNA, 30 bp, Artificial Sequence
  Synthetic oligonucleotide
gggtgaacagcgaacaagtggtaagccatg

SEQ ID NO: 256990 - DNA, 30 bp, Artificial Sequence
  Synthetic oligonucleotide
tctgacggggccctctgggtgatcgccatg

SEQ ID NO: 256991 - DNA, 30 bp, Artificial Sequence
  Synthetic oligonucleotide
ccaacatcgtggagttgttttgcggccatg

SEQ ID NO: 256992 - DNA, 30 bp, Artificial Sequence
  Synthetic oligonucleotide
acacatccggcttttaacttattatccatg

SEQ ID NO: 256993 - DNA, 30 bp, Artificial Sequence
  Synthetic oligonucleotide
gaagttaccgagtgtcaataggtctccatg

SEQ ID NO: 256994 - DNA, 31 bp, Artificial Sequence
  Synthetic oligonucleotide
ctagtaaagccactctcacaagcaaagcatg

SEQ ID NO: 256995 - DNA, 30 bp, Artificial Sequence
  Synthetic oligonucleotide
cgagtttttggaggtttaattgcaagcatg

SEQ ID NO: 256996 - DNA, 30 bp, Artificial Sequence
  Synthetic oligonucleotide
ggtaagtctctgcctaaacttcgaagcatg

SEQ ID NO: 256997 - DNA, 30 bp, Artificial Sequence
  Synthetic oligonucleotide
attgtgagtgcggtgtcccttaccagcatg

SEQ ID NO: 256998 - DNA, 30 bp, Artificial Sequence
  Synthetic oligonucleotide
tgtaatggaaagcccgggacctccagcatg

SEQ ID NO: 256999 - DNA, 30 bp, Artificial Sequence
  Synthetic oligonucleotide
tagacctgtatagtgaacattatcagcatg

SEQ ID NO: 257000 - DNA, 30 bp, Artificial Sequence
  Synthetic oligonucleotide
taagtagctgctactcatacgtgtagcatg

SEQ ID NO: 257001 - DNA, 30 bp, Artificial Sequence
  Synthetic oligonucleotide
gagcaacaacggtctcatacgacacgcatg

SEQ ID NO: 257002 - DNA, 30 bp, Artificial Sequence
  Synthetic oligonucleotide
atgtgacggcgtatttagctcgcgcgcatg

SEQ ID NO: 257003 - DNA, 30 bp, Artificial Sequence
  Synthetic oligonucleotide
gacaggacgccgtcttcttaggaaggcatg

SEQ ID NO: 257004 - DNA, 30 bp, Artificial Sequence
  Synthetic oligonucleotide
cctttatcagaatatagtgactcaggcatg

SEQ ID NO: 257005 - DNA, 30 bp, Artificial Sequence
  Synthetic oligonucleotide
ttaatggtgactcgcaatagtcgaggcatg

SEQ ID NO: 257006 - DNA, 30 bp, Artificial Sequence
  Synthetic oligonucleotide
aaaaggcctccaatttccccgcacggcatg

SEQ ID NO: 257007 - DNA, 30 bp, Artificial Sequence
  Synthetic oligonucleotide
ggtgtacggcaaacaatgagtaccggcatg

SEQ ID NO: 257008 - DNA, 30 bp, Artificial Sequence
  Synthetic oligonucleotide
gtactgtacttaacgaccacctaatgcatg

SEQ ID NO: 257009 - DNA, 30 bp, Artificial Sequence
  Synthetic oligonucleotide
gtaccagggagatgtcaaacaacatgcatg

SEQ ID NO: 257010 - DNA, 30 bp, Artificial Sequence
  Synthetic oligonucleotide
ttcggtaatgggggtaacctaacctgcatg

SEQ ID NO: 257011 - DNA, 30 bp, Artificial Sequence
  Synthetic oligonucleotide
ggtctttatgtcaaccgtctgccgtgcatg

SEQ ID NO: 257012 - DNA, 30 bp, Artificial Sequence
  Synthetic oligonucleotide
aagggggttttactgtgttgcacttgcatg

SEQ ID NO: 257013 - DNA, 30 bp, Artificial Sequence
  Synthetic oligonucleotide
acggaattatcgagacgccatggttgcatg

SEQ ID NO: 257014 - DNA, 30 bp, Artificial Sequence
  Synthetic oligonucleotide
gctcaaagcatgctttagcatatttgcatg

SEQ ID NO: 257015 - DNA, 30 bp, Artificial Sequence
  Synthetic oligonucleotide
gcgcgatcagatctgcattacaaaatcatg

SEQ ID NO: 257016 - DNA, 30 bp, Artificial Sequence
  Synthetic oligonucleotide
gataaatggtcaggaggcggccccatcatg

SEQ ID NO: 257017 - DNA, 30 bp, Artificial Sequence
  Synthetic oligonucleotide
aggcaatatagtcacggacagatcatcatg

SEQ ID NO: 257018 - DNA, 30 bp, Artificial Sequence
  Synthetic oligonucleotide
tttaacattatctgccatacccagatcatg

SEQ ID NO: 257019 - DNA, 30 bp, Artificial Sequence
  Synthetic oligonucleotide
ctacgatggagtagaattcctgggatcatg

SEQ ID NO: 257020 - DNA, 30 bp, Artificial Sequence
  Synthetic oligonucleotide
agggcaaatgcaattgtcgaattgatcatg

SEQ ID NO: 257021 - DNA, 30 bp, Artificial Sequence
  Synthetic oligonucleotide
cattactggattcctgtagcaggtatcatg

SEQ ID NO: 257022 - DNA, 30 bp, Artificial Sequence
  Synthetic oligonucleotide
tcacattactttaataccaaaattatcatg

SEQ ID NO: 257023 - DNA, 30 bp, Artificial Sequence
  Synthetic oligonucleotide
agccggggtccaactccatacagcctcatg

SEQ ID NO: 257024 - DNA, 30 bp, Artificial Sequence
  Synthetic oligonucleotide
gtaccgttggctgtctcgaagggcctcatg

SEQ ID NO: 257025 - DNA, 30 bp, Artificial Sequence
  Synthetic oligonucleotide
ttgatttggtatcggttgggcatcctcatg

SEQ ID NO: 257026 - DNA, 30 bp, Artificial Sequence
  Synthetic oligonucleotide
ttcactgttaccgacttcgctgggctcatg

SEQ ID NO: 257027 - DNA, 30 bp, Artificial Sequence
  Synthetic oligonucleotide
caccaggtattgctaagcattcatctcatg

SEQ ID NO: 257028 - DNA, 30 bp, Artificial Sequence
  Synthetic oligonucleotide
ttcagggtccgatgcttagtgctagtcatg

SEQ ID NO: 257029 - DNA, 30 bp, Artificial Sequence
  Synthetic oligonucleotide
tgggcttaataaattgcatccaaggtcatg

SEQ ID NO: 257030 - DNA, 30 bp, Artificial Sequence
  Synthetic oligonucleotide
gggggggccgtttctgggaatgaggtcatg

SEQ ID NO: 257031 - DNA, 30 bp, Artificial Sequence
  Synthetic oligonucleotide
ctttacccgtcatgagcactgtcattcatg

SEQ ID NO: 257032 - DNA, 30 bp, Artificial Sequence
  Synthetic oligonucleotide
atcctctgagtcattatgctattattcatg

SEQ ID NO: 257033 - DNA, 30 bp, Artificial Sequence
  Synthetic oligonucleotide
gctgcggtttgtttcgactacctcttcatg

SEQ ID NO: 257034 - DNA, 30 bp, Artificial Sequence
  Synthetic oligonucleotide
atgtgaagcgttaatgatggctgtttcatg

SEQ ID NO: 257035 - DNA, 30 bp, Artificial Sequence
  Synthetic oligonucleotide
tcgcggtctacaaaggcttacattttcatg

SEQ ID NO: 257036 - DNA, 30 bp, Artificial Sequence
  Synthetic oligonucleotide
cctacaatgccgtacgcggacagaaagatg

SEQ ID NO: 257037 - DNA, 30 bp, Artificial Sequence
  Synthetic oligonucleotide
ctgtcgactagcgattaggctataaagatg

SEQ ID NO: 257038 - DNA, 30 bp, Artificial Sequence
  Synthetic oligonucleotide
ttttacccaagctcttcctaaaggaagatg

SEQ ID NO: 257039 - DNA, 40 bp, Artificial Sequence
  Synthetic oligonucleotide
tacaataataaattttaattcgcacaaatgtgataagatg

SEQ ID NO: 257040 - DNA, 30 bp, Artificial Sequence
  Synthetic oligonucleotide
atttcactcgacgaggtcctggctaagatg

SEQ ID NO: 257041 - DNA, 30 bp, Artificial Sequence
  Synthetic oligonucleotide
atcttcatggaggttggcgagcgtaagatg

SEQ ID NO: 257042 - DNA, 30 bp, Artificial Sequence
  Synthetic oligonucleotide
gattcatatatgtcttaaaaataacagatg

SEQ ID NO: 257043 - DNA, 30 bp, Artificial Sequence
  Synthetic oligonucleotide
gaagtcagcactaactggctaacacagatg

SEQ ID NO: 257044 - DNA, 30 bp, Artificial Sequence
  Synthetic oligonucleotide
agttcttcgtatgcagtggcatgccagatg

SEQ ID NO: 257045 - DNA, 30 bp, Artificial Sequence
  Synthetic oligonucleotide
aggtctgtacacggctgggaatggcagatg

SEQ ID NO: 257046 - DNA, 30 bp, Artificial Sequence
  Synthetic oligonucleotide
cgcaaagcggggacgggctggcccgagatg

SEQ ID NO: 257047 - DNA, 30 bp, Artificial Sequence
  Synthetic oligonucleotide
cgctcatcgcacccgagtacatccgagatg

SEQ ID NO: 257048 - DNA, 30 bp, Artificial Sequence
  Synthetic oligonucleotide
tccctcggtgggaaattatattcatagatg

SEQ ID NO: 257049 - DNA, 30 bp, Artificial Sequence
  Synthetic oligonucleotide
aagtcaaaaacccccaactataggtagatg

SEQ ID NO: 257050 - DNA, 30 bp, Artificial Sequence
  Synthetic oligonucleotide
cttcgttatccaattcgtaacccttagatg

SEQ ID NO: 257051 - DNA, 30 bp, Artificial Sequence
  Synthetic oligonucleotide
gtcgagaacagtcaattagcagtcacgatg

SEQ ID NO: 257052 - DNA, 30 bp, Artificial Sequence
  Synthetic oligonucleotide
tttctccatgagtcatagaactgcccgatg

SEQ ID NO: 257053 - DNA, 30 bp, Artificial Sequence
  Synthetic oligonucleotide
acagcggctaaggctatggtcatgccgatg

SEQ ID NO: 257054 - DNA, 30 bp, Artificial Sequence
  Synthetic oligonucleotide
tctacaggtcaaccggaggcgactccgatg

SEQ ID NO: 257055 - DNA, 30 bp, Artificial Sequence
  Synthetic oligonucleotide
tgagggagcgcggaaggacggattgcgatg

SEQ ID NO: 257056 - DNA, 30 bp, Artificial Sequence
  Synthetic oligonucleotide
ctggtgtggttcatggccctagttgcgatg

SEQ ID NO: 257057 - DNA, 30 bp, Artificial Sequence
  Synthetic oligonucleotide
ccgtggatgtctatgggttgattgtcgatg

SEQ ID NO: 257058 - DNA, 30 bp, Artificial Sequence
  Synthetic oligonucleotide
ttggaaactgggttgggttaatattcgatg

SEQ ID NO: 257059 - DNA, 30 bp, Artificial Sequence
  Synthetic oligonucleotide
ttatcggtagcattgactgtcacaaggatg

SEQ ID NO: 257060 - DNA, 30 bp, Artificial Sequence
  Synthetic oligonucleotide
taatctagtggcgattgccgttgaaggatg

SEQ ID NO: 257061 - DNA, 30 bp, Artificial Sequence
  Synthetic oligonucleotide
gtgtactttaatctgactgaagacaggatg

SEQ ID NO: 257062 - DNA, 30 bp, Artificial Sequence
  Synthetic oligonucleotide
gagtacaacttcgcggtcaacaccaggatg

SEQ ID NO: 257063 - DNA, 31 bp, Artificial Sequence
  Synthetic oligonucleotide
aatgggggttttgtgcgatggggagaggatg

SEQ ID NO: 257064 - DNA, 30 bp, Artificial Sequence
  Synthetic oligonucleotide
atttcgaacttgcaacccaagagtaggatg

SEQ ID NO: 257065 - DNA, 30 bp, Artificial Sequence
  Synthetic oligonucleotide
acaaggcacggtactttctggattaggatg

SEQ ID NO: 257066 - DNA, 30 bp, Artificial Sequence
  Synthetic oligonucleotide
ttagaagcaggggctatacgcacacggatg

SEQ ID NO: 257067 - DNA, 30 bp, Artificial Sequence
  Synthetic oligonucleotide
actgctgttcagagtacctgactccggatg

SEQ ID NO: 257068 - DNA, 30 bp, Artificial Sequence
  Synthetic oligonucleotide
cacataccttgatatatgtacgcgcggatg

SEQ ID NO: 257069 - DNA, 30 bp, Artificial Sequence
  Synthetic oligonucleotide
gcaaaaaataccatgcagaccaatcggatg

SEQ ID NO: 257070 - DNA, 30 bp, Artificial Sequence
  Synthetic oligonucleotide
attaggatggcgaaacgtaagtatcggatg

SEQ ID NO: 257071 - DNA, 30 bp, Artificial Sequence
  Synthetic oligonucleotide
aactcacactggaggcgaatagctcggatg

SEQ ID NO: 257072 - DNA, 30 bp, Artificial Sequence
  Synthetic oligonucleotide
acaatttctgtaccccctcacgctcggatg

SEQ ID NO: 257073 - DNA, 30 bp, Artificial Sequence
  Synthetic oligonucleotide
tgttatactgcagtctgacggcaagggatg

SEQ ID NO: 257074 - DNA, 30 bp, Artificial Sequence
  Synthetic oligonucleotide
ggtgaggaatttcgtcatttactagggatg

SEQ ID NO: 257075 - DNA, 30 bp, Artificial Sequence
  Synthetic oligonucleotide
aaccataggggctctttaacgcacgggatg

SEQ ID NO: 257076 - DNA, 30 bp, Artificial Sequence
  Synthetic oligonucleotide
tccagtctaagtttgctaccgaaggggatg

SEQ ID NO: 257077 - DNA, 30 bp, Artificial Sequence
  Synthetic oligonucleotide
gaggaacttcaattttgtctgtgggggatg

SEQ ID NO: 257078 - DNA, 30 bp, Artificial Sequence
  Synthetic oligonucleotide
tcatgtacaatgacctgggggattgggatg

SEQ ID NO: 257079 - DNA, 30 bp, Artificial Sequence
  Synthetic oligonucleotide
tctgccgcgcttgggtcggacgttgggatg

SEQ ID NO: 257080 - DNA, 30 bp, Artificial Sequence
  Synthetic oligonucleotide
tcatagagggaaaggtcttggttatggatg

SEQ ID NO: 257081 - DNA, 30 bp, Artificial Sequence
  Synthetic oligonucleotide
tacccgggacaaacctcaatttgctggatg

SEQ ID NO: 257082 - DNA, 30 bp, Artificial Sequence
  Synthetic oligonucleotide
aagtgacgggatccacggcacgaaatgatg

SEQ ID NO: 257083 - DNA, 30 bp, Artificial Sequence
  Synthetic oligonucleotide
gttaaggtcgtcacgccaccctccatgatg

SEQ ID NO: 257084 - DNA, 30 bp, Artificial Sequence
  Synthetic oligonucleotide
acgaaggccagcgatcaagtggagatgatg

SEQ ID NO: 257085 - DNA, 30 bp, Artificial Sequence
  Synthetic oligonucleotide
ctcgacagcctcattggatagactatgatg

SEQ ID NO: 257086 - DNA, 30 bp, Artificial Sequence
  Synthetic oligonucleotide
ttggagtccgtgctgaatcctcgtatgatg

SEQ ID NO: 257087 - DNA, 30 bp, Artificial Sequence
  Synthetic oligonucleotide
tactgtcgcgcttagatacaaggactgatg

SEQ ID NO: 257088 - DNA, 30 bp, Artificial Sequence
  Synthetic oligonucleotide
ggaccttaaaaaaaaacccgcggactgatg

SEQ ID NO: 257089 - DNA, 30 bp, Artificial Sequence
  Synthetic oligonucleotide
atatgcataataacgcatgttaccctgatg

SEQ ID NO: 257090 - DNA, 30 bp, Artificial Sequence
  Synthetic oligonucleotide
acggtcaggtcccttagtcctaagctgatg

SEQ ID NO: 257091 - DNA, 30 bp, Artificial Sequence
  Synthetic oligonucleotide
taggaggtcgagtagtcggtggtgctgatg

SEQ ID NO: 257092 - DNA, 30 bp, Artificial Sequence
  Synthetic oligonucleotide
gccttaaatacaattttgatgcctctgatg

SEQ ID NO: 257093 - DNA, 30 bp, Artificial Sequence
  Synthetic oligonucleotide
taaacggttggtcaataactttaagtgatg

SEQ ID NO: 257094 - DNA, 30 bp, Artificial Sequence
  Synthetic oligonucleotide
cctgattgaacagctccgcttttagtgatg

SEQ ID NO: 257095 - DNA, 30 bp, Artificial Sequence
  Synthetic oligonucleotide
tgcccgtagtctggtctatgtaccgtgatg

SEQ ID NO: 257096 - DNA, 30 bp, Artificial Sequence
  Synthetic oligonucleotide
cacccgagcctcaacatgctgtgcgtgatg

SEQ ID NO: 257097 - DNA, 30 bp, Artificial Sequence
  Synthetic oligonucleotide
ttctaaattaaagttcacgcttgcgtgatg

SEQ ID NO: 257098 - DNA, 30 bp, Artificial Sequence
  Synthetic oligonucleotide
gttggccaggtcaggaacatcatcgtgatg

SEQ ID NO: 257099 - DNA, 30 bp, Artificial Sequence
  Synthetic oligonucleotide
ggggagacctcatagtttttcagggtgatg

SEQ ID NO: 257100 - DNA, 30 bp, Artificial Sequence
  Synthetic oligonucleotide
aaaacccacctgaagtgccacttggtgatg

SEQ ID NO: 257101 - DNA, 30 bp, Artificial Sequence
  Synthetic oligonucleotide
tatacgtgccaattatcatccgctgtgatg

SEQ ID NO: 257102 - DNA, 30 bp, Artificial Sequence
  Synthetic oligonucleotide
ttgtagtgcctcttaagggcgggattgatg

SEQ ID NO: 257103 - DNA, 30 bp, Artificial Sequence
  Synthetic oligonucleotide
tcaggaactctgtcaaaggcctccttgatg

SEQ ID NO: 257104 - DNA, 30 bp, Artificial Sequence
  Synthetic oligonucleotide
attttgaaagctggtcaagtaggcttgatg

SEQ ID NO: 257105 - DNA, 30 bp, Artificial Sequence
  Synthetic oligonucleotide
tccagccgaggggtattgattggcttgatg

SEQ ID NO: 257106 - DNA, 30 bp, Artificial Sequence
  Synthetic oligonucleotide
ttgaagcgtgaagttcggaccaagttgatg

SEQ ID NO: 257107 - DNA, 30 bp, Artificial Sequence
  Synthetic oligonucleotide
caacgtcgagcatttaacgaaaggttgatg

SEQ ID NO: 257108 - DNA, 30 bp, Artificial Sequence
  Synthetic oligonucleotide
ttgcgagcgacaccctgagctggaaatatg

SEQ ID NO: 257109 - DNA, 30 bp, Artificial Sequence
  Synthetic oligonucleotide
taatcgtaggcggatcttgttgtaaatatg

SEQ ID NO: 257110 - DNA, 30 bp, Artificial Sequence
  Synthetic oligonucleotide
atgtagagtgcatatgcggcaggcaatatg

SEQ ID NO: 257111 - DNA, 30 bp, Artificial Sequence
  Synthetic oligonucleotide
gcgagaggttttacccggttatgtaatatg

SEQ ID NO: 257112 - DNA, 30 bp, Artificial Sequence
  Synthetic oligonucleotide
gttttacgatggcaaggggggtgtaatatg

SEQ ID NO: 257113 - DNA, 30 bp, Artificial Sequence
  Synthetic oligonucleotide
gcagttcatttaaacccagtgagacatatg

SEQ ID NO: 257114 - DNA, 30 bp, Artificial Sequence
  Synthetic oligonucleotide
ggggcgtgacgcatacgccaatgccatatg

SEQ ID NO: 257115 - DNA, 30 bp, Artificial Sequence
  Synthetic oligonucleotide
cccacgcttgaacaaaacgaggggcatatg

SEQ ID NO: 257116 - DNA, 30 bp, Artificial Sequence
  Synthetic oligonucleotide
tgacacgtacgacaagggtgaaatcatatg

SEQ ID NO: 257117 - DNA, 30 bp, Artificial Sequence
  Synthetic oligonucleotide
tgaagatcagagagagtccggagtcatatg

SEQ ID NO: 257118 - DNA, 30 bp, Artificial Sequence
  Synthetic oligonucleotide
cgctacagcgtcggatccgaccccgatatg

SEQ ID NO: 257119 - DNA, 30 bp, Artificial Sequence
  Synthetic oligonucleotide
ctcctagataaagcctaggtgtccgatatg

SEQ ID NO: 257120 - DNA, 30 bp, Artificial Sequence
  Synthetic oligonucleotide
aatgtcccggcaagtaatttatgcgatatg

SEQ ID NO: 257121 - DNA, 30 bp, Artificial Sequence
  Synthetic oligonucleotide
accgcgtctgggtaaccgaccgcggatatg

SEQ ID NO: 257122 - DNA, 30 bp, Artificial Sequence
  Synthetic oligonucleotide
gacccaaggtcgtggaaagaccgtgatatg

SEQ ID NO: 257123 - DNA, 30 bp, Artificial Sequence
  Synthetic oligonucleotide
aatcactttgaaacgaaaaactgtgatatg

SEQ ID NO: 257124 - DNA, 30 bp, Artificial Sequence
  Synthetic oligonucleotide
caaagtcggacagtcaatgggcgatatatg

SEQ ID NO: 257125 - DNA, 30 bp, Artificial Sequence
  Synthetic oligonucleotide
cgctctgtagggcgggtttaatgatatatg

SEQ ID NO: 257126 - DNA, 30 bp, Artificial Sequence
  Synthetic oligonucleotide
tggaaaggtccgagtcttaggctatatatg

SEQ ID NO: 257127 - DNA, 30 bp, Artificial Sequence
  Synthetic oligonucleotide
caggtatttgacccgcgaccagcctatatg

SEQ ID NO: 257128 - DNA, 30 bp, Artificial Sequence
  Synthetic oligonucleotide
tcttggccgcaagtgtctggggcctatatg

SEQ ID NO: 257129 - DNA, 30 bp, Artificial Sequence
  Synthetic oligonucleotide
gcaaaagagtgttggtgagacctctatatg

SEQ ID NO: 257130 - DNA, 30 bp, Artificial Sequence
  Synthetic oligonucleotide
gaccctttggtggaggggttacagtatatg

SEQ ID NO: 257131 - DNA, 30 bp, Artificial Sequence
  Synthetic oligonucleotide
ctacgcgaactacttgttcgttagtatatg

SEQ ID NO: 257132 - DNA, 30 bp, Artificial Sequence
  Synthetic oligonucleotide
tactttgagaccttcccaatcaattatatg

SEQ ID NO: 257133 - DNA, 30 bp, Artificial Sequence
  Synthetic oligonucleotide
ggtagtcattggatgggcatcaaaactatg

SEQ ID NO: 257134 - DNA, 30 bp, Artificial Sequence
  Synthetic oligonucleotide
gtttggatagtgcatagagaacaaactatg

SEQ ID NO: 257135 - DNA, 30 bp, Artificial Sequence
  Synthetic oligonucleotide
gcaaactgcgacactcaggacatcactatg

SEQ ID NO: 257136 - DNA, 30 bp, Artificial Sequence
  Synthetic oligonucleotide
aggccacaagaggcccgcgggccgactatg

SEQ ID NO: 257137 - DNA, 30 bp, Artificial Sequence
  Synthetic oligonucleotide
aacgtacttaagagcatttgtatgactatg

SEQ ID NO: 257138 - DNA, 30 bp, Artificial Sequence
  Synthetic oligonucleotide
agttaaagtggatgcggtgccaatactatg

SEQ ID NO: 257139 - DNA, 30 bp, Artificial Sequence
  Synthetic oligonucleotide
caggttgcatttaaccgataaagtactatg

SEQ ID NO: 257140 - DNA, 30 bp, Artificial Sequence
  Synthetic oligonucleotide
ccgcccgagacgactctacatgtccctatg

SEQ ID NO: 257141 - DNA, 30 bp, Artificial Sequence
  Synthetic oligonucleotide
gggtgttacgtagatatcgtgaagcctatg

SEQ ID NO: 257142 - DNA, 30 bp, Artificial Sequence
  Synthetic oligonucleotide
tatctatggtggttagtacttcatcctatg

SEQ ID NO: 257143 - DNA, 30 bp, Artificial Sequence
  Synthetic oligonucleotide
ggttacgtccccccactccgtatagctatg

SEQ ID NO: 257144 - DNA, 30 bp, Artificial Sequence
  Synthetic oligonucleotide
cgatctcagatgatcttgaaacgcgctatg

SEQ ID NO: 257145 - DNA, 30 bp, Artificial Sequence
  Synthetic oligonucleotide
aaatgcatagggctagtttttcaggctatg

SEQ ID NO: 257146 - DNA, 30 bp, Artificial Sequence
  Synthetic oligonucleotide
cagcgttcactaaccgaggcaccggctatg

SEQ ID NO: 257147 - DNA, 30 bp, Artificial Sequence
  Synthetic oligonucleotide
caaaagtatagacggaaattggcggctatg

SEQ ID NO: 257148 - DNA, 30 bp, Artificial Sequence
  Synthetic oligonucleotide
catgtaagcaggacattagatagggctatg

SEQ ID NO: 257149 - DNA, 30 bp, Artificial Sequence
  Synthetic oligonucleotide
taatgaggtcaccctttggaatgggctatg

SEQ ID NO: 257150 - DNA, 30 bp, Artificial Sequence
  Synthetic oligonucleotide
ccgatattacactgagctagtaaatctatg

SEQ ID NO: 257151 - DNA, 30 bp, Artificial Sequence
  Synthetic oligonucleotide
caattgagatctcgagggtacagctctatg

SEQ ID NO: 257152 - DNA, 30 bp, Artificial Sequence
  Synthetic oligonucleotide
taaggtccctttgttgacgaactctctatg

SEQ ID NO: 257153 - DNA, 30 bp, Artificial Sequence
  Synthetic oligonucleotide
ttaaccccgactcatgacgtcttctctatg

SEQ ID NO: 257154 - DNA, 30 bp, Artificial Sequence
  Synthetic oligonucleotide
ccaaggctctcgattttagtgtagtctatg

SEQ ID NO: 257155 - DNA, 30 bp, Artificial Sequence
  Synthetic oligonucleotide
accagatagaaatcctatcacgggtctatg

SEQ ID NO: 257156 - DNA, 30 bp, Artificial Sequence
  Synthetic oligonucleotide
gggcggcgtcactaagagcgttggtctatg

SEQ ID NO: 257157 - DNA, 30 bp, Artificial Sequence
  Synthetic oligonucleotide
cgaaaagtgcagtcattaagtacttctatg

SEQ ID NO: 257158 - DNA, 30 bp, Artificial Sequence
  Synthetic oligonucleotide
ctaatggcttgcgaatcatagctttctatg

SEQ ID NO: 257159 - DNA, 30 bp, Artificial Sequence
  Synthetic oligonucleotide
gatgcgaccagaaccacccaaaccagtatg

SEQ ID NO: 257160 - DNA, 30 bp, Artificial Sequence
  Synthetic oligonucleotide
tcatagtatggtcacgtcaaactcagtatg

SEQ ID NO: 257161 - DNA, 30 bp, Artificial Sequence
  Synthetic oligonucleotide
tcctgtcgggaaatgtcgtcatcgagtatg

SEQ ID NO: 257162 - DNA, 30 bp, Artificial Sequence
  Synthetic oligonucleotide
ctacctggtttccccttgtcatggagtatg

SEQ ID NO: 257163 - DNA, 30 bp, Artificial Sequence
  Synthetic oligonucleotide
tgaccggagcaaattccctgcgatagtatg

SEQ ID NO: 257164 - DNA, 30 bp, Artificial Sequence
  Synthetic oligonucleotide
ttccagacggcacgggtatgatatagtatg

SEQ ID NO: 257165 - DNA, 30 bp, Artificial Sequence
  Synthetic oligonucleotide
accctaaccgcgtgaaacgcgcctagtatg

SEQ ID NO: 257166 - DNA, 30 bp, Artificial Sequence
  Synthetic oligonucleotide
tatgcacgtgtgcgtccgccccttagtatg

SEQ ID NO: 257167 - DNA, 30 bp, Artificial Sequence
  Synthetic oligonucleotide
ttcagagacatgaattacgtgcaacgtatg

SEQ ID NO: 257168 - DNA, 30 bp, Artificial Sequence
  Synthetic oligonucleotide
acatagagcgaactagcccgcactcgtatg

SEQ ID NO: 257169 - DNA, 30 bp, Artificial Sequence
  Synthetic oligonucleotide
tcttttccttataacaaacattgtcgtatg

SEQ ID NO: 257170 - DNA, 30 bp, Artificial Sequence
  Synthetic oligonucleotide
acacaaacccgcgtgcgggagcgcggtatg

SEQ ID NO: 257171 - DNA, 30 bp, Artificial Sequence
  Synthetic oligonucleotide
ccttgagttgggcattaacacacgggtatg

SEQ ID NO: 257172 - DNA, 30 bp, Artificial Sequence
  Synthetic oligonucleotide
ccatcatcacgaggcgtaggaatgggtatg

SEQ ID NO: 257173 - DNA, 30 bp, Artificial Sequence
  Synthetic oligonucleotide
gcattactatcccttggactggatggtatg

SEQ ID NO: 257174 - DNA, 30 bp, Artificial Sequence
  Synthetic oligonucleotide
taggcacctcagttacctatgcttggtatg

SEQ ID NO: 257175 - DNA, 30 bp, Artificial Sequence
  Synthetic oligonucleotide
agagttagcgtggcgtgaggtgaatgtatg

SEQ ID NO: 257176 - DNA, 30 bp, Artificial Sequence
  Synthetic oligonucleotide
acgtctttttcgacggacggtacatgtatg

SEQ ID NO: 257177 - DNA, 30 bp, Artificial Sequence
  Synthetic oligonucleotide
aaatgttttcacatcaagcgccgatgtatg

SEQ ID NO: 257178 - DNA, 30 bp, Artificial Sequence
  Synthetic oligonucleotide
tcaacttcggctgctaggcgtctatgtatg

SEQ ID NO: 257179 - DNA, 30 bp, Artificial Sequence
  Synthetic oligonucleotide
gctttcttgctcctcacgtaggtatgtatg

SEQ ID NO: 257180 - DNA, 30 bp, Artificial Sequence
  Synthetic oligonucleotide
gcttcggggctatctagttgacggtgtatg

SEQ ID NO: 257181 - DNA, 30 bp, Artificial Sequence
  Synthetic oligonucleotide
agggatcaaataagagatacctggtgtatg

SEQ ID NO: 257182 - DNA, 30 bp, Artificial Sequence
  Synthetic oligonucleotide
ttgaacaatcttaaagtgatattttgtatg

SEQ ID NO: 257183 - DNA, 30 bp, Artificial Sequence
  Synthetic oligonucleotide
attcggactcacttcttaaggacaattatg

SEQ ID NO: 257184 - DNA, 30 bp, Artificial Sequence
  Synthetic oligonucleotide
ggatcctggatcatggcacatgacattatg

SEQ ID NO: 257185 - DNA, 30 bp, Artificial Sequence
  Synthetic oligonucleotide
tccaacgtacgactgtggctcagcattatg

SEQ ID NO: 257186 - DNA, 30 bp, Artificial Sequence
  Synthetic oligonucleotide
ttgacggcgtggtattatggcagtattatg

SEQ ID NO: 257187 - DNA, 30 bp, Artificial Sequence
  Synthetic oligonucleotide
tactgggaaggaaatctggaaggccttatg

SEQ ID NO: 257188 - DNA, 30 bp, Artificial Sequence
  Synthetic oligonucleotide
taaggcaagcctaacatgctggagcttatg

SEQ ID NO: 257189 - DNA, 30 bp, Artificial Sequence
  Synthetic oligonucleotide
actgtgccatacttccttccgtcgcttatg

SEQ ID NO: 257190 - DNA, 30 bp, Artificial Sequence
  Synthetic oligonucleotide
cataaacggaacgtattggcggaagttatg

SEQ ID NO: 257191 - DNA, 30 bp, Artificial Sequence
  Synthetic oligonucleotide
gtttaacagtgcaatactaaactagttatg

SEQ ID NO: 257192 - DNA, 30 bp, Artificial Sequence
  Synthetic oligonucleotide
agtagctcttggcagggtgaacccgttatg

SEQ ID NO: 257193 - DNA, 30 bp, Artificial Sequence
  Synthetic oligonucleotide
caagactgactagaatcgtgatgcgttatg

SEQ ID NO: 257194 - DNA, 30 bp, Artificial Sequence
  Synthetic oligonucleotide
tgcgataggccgcggactacgagtgttatg

SEQ ID NO: 257195 - DNA, 30 bp, Artificial Sequence
  Synthetic oligonucleotide
atgcttaggatgagtatgaaaggtgttatg

SEQ ID NO: 257196 - DNA, 30 bp, Artificial Sequence
  Synthetic oligonucleotide
cactatatgacattttaaatgtaatttatg

SEQ ID NO: 257197 - DNA, 30 bp, Artificial Sequence
  Synthetic oligonucleotide
cgccgtgacgtttatttagggcagtttatg

SEQ ID NO: 257198 - DNA, 30 bp, Artificial Sequence
  Synthetic oligonucleotide
atataaaacacccgagagtgcgtgtttatg

SEQ ID NO: 257199 - DNA, 30 bp, Artificial Sequence
  Synthetic oligonucleotide
cggtcatggtagccccggactgtgtttatg

SEQ ID NO: 257200 - DNA, 30 bp, Artificial Sequence
  Synthetic oligonucleotide
actcgtgaacgttgaaacattgcttttatg

SEQ ID NO: 257201 - DNA, 30 bp, Artificial Sequence
  Synthetic oligonucleotide
ttctattgccttacattaatgcaaaaactg

SEQ ID NO: 257202 - DNA, 30 bp, Artificial Sequence
  Synthetic oligonucleotide
atggttgatcccggaggcgaaacaaaactg

SEQ ID NO: 257203 - DNA, 30 bp, Artificial Sequence
  Synthetic oligonucleotide
ttatacctggtacgggctgaaacaaaactg

SEQ ID NO: 257204 - DNA, 30 bp, Artificial Sequence
  Synthetic oligonucleotide
ataccggtgtgtacgagtgaatcaaaactg

SEQ ID NO: 257205 - DNA, 30 bp, Artificial Sequence
  Synthetic oligonucleotide
aataacaatctgtttgttcgcataaaactg

SEQ ID NO: 257206 - DNA, 30 bp, Artificial Sequence
  Synthetic oligonucleotide
cgtttaggagaactatcgtatcagcaactg

SEQ ID NO: 257207 - DNA, 30 bp, Artificial Sequence
  Synthetic oligonucleotide
aggaaaagcactgatactggtcatcaactg

SEQ ID NO: 257208 - DNA, 30 bp, Artificial Sequence
  Synthetic oligonucleotide
tgcgtccgagcattactattgcaggaactg

SEQ ID NO: 257209 - DNA, 30 bp, Artificial Sequence
  Synthetic oligonucleotide
ataatagtcgttcattatatcacggaactg

SEQ ID NO: 257210 - DNA, 30 bp, Artificial Sequence
  Synthetic oligonucleotide
aatagttggtgaacccggataagtgaactg

SEQ ID NO: 257211 - DNA, 30 bp, Artificial Sequence
  Synthetic oligonucleotide
cctaaccgtgcccggagaccgattgaactg

SEQ ID NO: 257212 - DNA, 30 bp, Artificial Sequence
  Synthetic oligonucleotide
tcccgacacgatggtagactcttataactg

SEQ ID NO: 257213 - DNA, 30 bp, Artificial Sequence
  Synthetic oligonucleotide
gataactccttgtgttggtatagctaactg

SEQ ID NO: 257214 - DNA, 30 bp, Artificial Sequence
  Synthetic oligonucleotide
gcaactagtattaattcagcgagttaactg

SEQ ID NO: 257215 - DNA, 30 bp, Artificial Sequence
  Synthetic oligonucleotide
aagacagtacgggtctatctgtgttaactg

SEQ ID NO: 257216 - DNA, 30 bp, Artificial Sequence
  Synthetic oligonucleotide
ggaaaccctttacgggcttagatttaactg

SEQ ID NO: 257217 - DNA, 30 bp, Artificial Sequence
  Synthetic oligonucleotide
cgctcctgttcgaaacaggcatgcacactg

SEQ ID NO: 257218 - DNA, 30 bp, Artificial Sequence
  Synthetic oligonucleotide
tcattaccgattaacgcagatgtgacactg

SEQ ID NO: 257219 - DNA, 30 bp, Artificial Sequence
  Synthetic oligonucleotide
aagcacattagaacaggttaagatacactg

SEQ ID NO: 257220 - DNA, 30 bp, Artificial Sequence
  Synthetic oligonucleotide
gcccatttagtatggagacgggtaccactg

SEQ ID NO: 257221 - DNA, 30 bp, Artificial Sequence
  Synthetic oligonucleotide
aatgcttagtgttaaagaatgctcccactg

SEQ ID NO: 257222 - DNA, 30 bp, Artificial Sequence
  Synthetic oligonucleotide
gtgctagtgcggatgcggtatgtgccactg

SEQ ID NO: 257223 - DNA, 30 bp, Artificial Sequence
  Synthetic oligonucleotide
tgggtttggcagtgattcgagactccactg

SEQ ID NO: 257224 - DNA, 30 bp, Artificial Sequence
  Synthetic oligonucleotide
gttgtgctcaacgcattatagactccactg

SEQ ID NO: 257225 - DNA, 30 bp, Artificial Sequence
  Synthetic oligonucleotide
ctgtcccagtagcgcaaattgcaggcactg

SEQ ID NO: 257226 - DNA, 30 bp, Artificial Sequence
  Synthetic oligonucleotide
aagattatatatgtgcgcgaaagggcactg

SEQ ID NO: 257227 - DNA, 30 bp, Artificial Sequence
  Synthetic oligonucleotide
ctttaggtgtcgcgcgctacgttggcactg

SEQ ID NO: 257228 - DNA, 30 bp, Artificial Sequence
  Synthetic oligonucleotide
cttcgtttcctgtatgcctataaatcactg

SEQ ID NO: 257229 - DNA, 30 bp, Artificial Sequence
  Synthetic oligonucleotide
gcgaatcagtcattacagttagaatcactg

SEQ ID NO: 257230 - DNA, 30 bp, Artificial Sequence
  Synthetic oligonucleotide
gggcagatggcagcgaaaatacgatcactg

SEQ ID NO: 257231 - DNA, 30 bp, Artificial Sequence
  Synthetic oligonucleotide
ccagtgtctatcttatcataaggctcactg

SEQ ID NO: 257232 - DNA, 30 bp, Artificial Sequence
  Synthetic oligonucleotide
aatgaacaacaatatacgtgagagtcactg

SEQ ID NO: 257233 - DNA, 30 bp, Artificial Sequence
  Synthetic oligonucleotide
gtcctcacgtggaatcgaggaacaagactg

SEQ ID NO: 257234 - DNA, 30 bp, Artificial Sequence
  Synthetic oligonucleotide
gatttttgcgagaagatattttccagactg

SEQ ID NO: 257235 - DNA, 30 bp, Artificial Sequence
  Synthetic oligonucleotide
gggcttgttctcctgtttaccgagagactg

SEQ ID NO: 257236 - DNA, 30 bp, Artificial Sequence
  Synthetic oligonucleotide
gttaggcatggttctttaggatctagactg

SEQ ID NO: 257237 - DNA, 30 bp, Artificial Sequence
  Synthetic oligonucleotide
caagcgcgtcaaatgatcctgggtagactg

SEQ ID NO: 257238 - DNA, 30 bp, Artificial Sequence
  Synthetic oligonucleotide
tcgcgcccaatatgcgtcggatgacgactg

SEQ ID NO: 257239 - DNA, 31 bp, Artificial Sequence
  Synthetic oligonucleotide
gcgcgagcgctgctctcccagtaaccgactg

SEQ ID NO: 257240 - DNA, 30 bp, Artificial Sequence
  Synthetic oligonucleotide
tagacgcttcttagacgaaaagtccgactg

SEQ ID NO: 257241 - DNA, 30 bp, Artificial Sequence
  Synthetic oligonucleotide
ctcgtgttagtgggtacggttacgggactg

SEQ ID NO: 257242 - DNA, 30 bp, Artificial Sequence
  Synthetic oligonucleotide
ctctgaatcaaggctcttataggatgactg

SEQ ID NO: 257243 - DNA, 30 bp, Artificial Sequence
  Synthetic oligonucleotide
agctcagctcagcacgggctagactgactg

SEQ ID NO: 257244 - DNA, 30 bp, Artificial Sequence
  Synthetic oligonucleotide
taccacttaactatcttaaagtcctgactg

SEQ ID NO: 257245 - DNA, 30 bp, Artificial Sequence
  Synthetic oligonucleotide
ccttgcatcagttgtattccaggctgactg

SEQ ID NO: 257246 - DNA, 30 bp, Artificial Sequence
  Synthetic oligonucleotide
cctaataatatcagatagtcaccgtgactg

SEQ ID NO: 257247 - DNA, 30 bp, Artificial Sequence
  Synthetic oligonucleotide
aaccatggttgggacgggtacagaatactg

SEQ ID NO: 257248 - DNA, 30 bp, Artificial Sequence
  Synthetic oligonucleotide
tagccactaattagccaaacaggaatactg

SEQ ID NO: 257249 - DNA, 30 bp, Artificial Sequence
  Synthetic oligonucleotide
actggcggtgtctgtttcttcaatatactg

SEQ ID NO: 257250 - DNA, 30 bp, Artificial Sequence
  Synthetic oligonucleotide
gtgcggacgtattatccagctcccctactg

SEQ ID NO: 257251 - DNA, 30 bp, Artificial Sequence
  Synthetic oligonucleotide
gtaatgtgttataccagagtgagtctactg

SEQ ID NO: 257252 - DNA, 30 bp, Artificial Sequence
  Synthetic oligonucleotide
gataatatcgttggtgagttcgccgtactg

SEQ ID NO: 257253 - DNA, 30 bp, Artificial Sequence
  Synthetic oligonucleotide
gttacgcgctcacacgtaggactcgtactg

SEQ ID NO: 257254 - DNA, 30 bp, Artificial Sequence
  Synthetic oligonucleotide
tatgaaggggaattgtaaacgcaggtactg

SEQ ID NO: 257255 - DNA, 30 bp, Artificial Sequence
  Synthetic oligonucleotide
actccgctctacctgtgaaacggggtactg

SEQ ID NO: 257256 - DNA, 30 bp, Artificial Sequence
  Synthetic oligonucleotide
ccacatgatttcgctttggcagatgtactg

SEQ ID NO: 257257 - DNA, 30 bp, Artificial Sequence
  Synthetic oligonucleotide
aaccggatagtccagcgcaatatattactg

SEQ ID NO: 257258 - DNA, 30 bp, Artificial Sequence
  Synthetic oligonucleotide
gcggtgtctgctgaacggctctacttactg

SEQ ID NO: 257259 - DNA, 30 bp, Artificial Sequence
  Synthetic oligonucleotide
tgtttatggagcggtatcatggtcttactg

SEQ ID NO: 257260 - DNA, 30 bp, Artificial Sequence
  Synthetic oligonucleotide
aacgagtatagtgatgtgtaatggttactg

SEQ ID NO: 257261 - DNA, 30 bp, Artificial Sequence
  Synthetic oligonucleotide
gcctaccacgcgtgcctgcgttatttactg

SEQ ID NO: 257262 - DNA, 30 bp, Artificial Sequence
  Synthetic oligonucleotide
gatagccacatttagtcttggtttttactg

SEQ ID NO: 257263 - DNA, 30 bp, Artificial Sequence
  Synthetic oligonucleotide
gctgctgttaaggcgtacgagtgaaacctg

SEQ ID NO: 257264 - DNA, 30 bp, Artificial Sequence
  Synthetic oligonucleotide
cactcggtcgacaagtcaaagggcaacctg

SEQ ID NO: 257265 - DNA, 30 bp, Artificial Sequence
  Synthetic oligonucleotide
gtgggctaaccgggggcccttgtgaacctg

SEQ ID NO: 257266 - DNA, 30 bp, Artificial Sequence
  Synthetic oligonucleotide
accagtcgctataaggggtctcgacacctg

SEQ ID NO: 257267 - DNA, 30 bp, Artificial Sequence
  Synthetic oligonucleotide
ggagtcaaccagcaggaggatatccacctg

SEQ ID NO: 257268 - DNA, 30 bp, Artificial Sequence
  Synthetic oligonucleotide
ctgttgacgcttgagctacaagaagacctg

SEQ ID NO: 257269 - DNA, 30 bp, Artificial Sequence
  Synthetic oligonucleotide
agtacctaaatactggtgcggccagacctg

SEQ ID NO: 257270 - DNA, 30 bp, Artificial Sequence
  Synthetic oligonucleotide
tgaaccggacctactgaacccagagacctg

SEQ ID NO: 257271 - DNA, 30 bp, Artificial Sequence
  Synthetic oligonucleotide
tagtgtctcgcacgatacatatcggacctg

SEQ ID NO: 257272 - DNA, 30 bp, Artificial Sequence
  Synthetic oligonucleotide
acaatagacgaatggggtgactttgacctg

SEQ ID NO: 257273 - DNA, 30 bp, Artificial Sequence
  Synthetic oligonucleotide
atagaacacggaggccaacgatagtacctg

SEQ ID NO: 257274 - DNA, 30 bp, Artificial Sequence
  Synthetic oligonucleotide
aaatgtgcttcagaggttccggcttacctg

SEQ ID NO: 257275 - DNA, 30 bp, Artificial Sequence
  Synthetic oligonucleotide
ccgagcggttatccttatttgttttacctg

SEQ ID NO: 257276 - DNA, 30 bp, Artificial Sequence
  Synthetic oligonucleotide
acgagcttgctttatgcctcttcaaccctg

SEQ ID NO: 257277 - DNA, 30 bp, Artificial Sequence
  Synthetic oligonucleotide
ggaccaaattgcgttcagaccaataccctg

SEQ ID NO: 257278 - DNA, 30 bp, Artificial Sequence
  Synthetic oligonucleotide
catagggtgagctgttcgatccaacccctg

SEQ ID NO: 257279 - DNA, 30 bp, Artificial Sequence
  Synthetic oligonucleotide
agatagctaaacggttaattcgcacccctg

SEQ ID NO: 257280 - DNA, 30 bp, Artificial Sequence
  Synthetic oligonucleotide
acggtgtgcatcctaacacgcggggccctg

SEQ ID NO: 257281 - DNA, 30 bp, Artificial Sequence
  Synthetic oligonucleotide
cggaactgtttggaatccccatgtgccctg

SEQ ID NO: 257282 - DNA, 30 bp, Artificial Sequence
  Synthetic oligonucleotide
gtgtagaaccggtccgtctccggatccctg

SEQ ID NO: 257283 - DNA, 31 bp, Artificial Sequence
  Synthetic oligonucleotide
ctcggaagtgggacacactcgtttctccctg

SEQ ID NO: 257284 - DNA, 30 bp, Artificial Sequence
  Synthetic oligonucleotide
atagcataaacggtgcctagcccgtccctg

SEQ ID NO: 257285 - DNA, 30 bp, Artificial Sequence
  Synthetic oligonucleotide
tgtcggagacaacatagatatatgtccctg

SEQ ID NO: 257286 - DNA, 30 bp, Artificial Sequence
  Synthetic oligonucleotide
ttatccgtaaatggtggtggacattccctg

SEQ ID NO: 257287 - DNA, 30 bp, Artificial Sequence
  Synthetic oligonucleotide
taccgtacaagcttaagtacttgttccctg

SEQ ID NO: 257288 - DNA, 30 bp, Artificial Sequence
  Synthetic oligonucleotide
taatgccaatcatggctgttctgaagcctg

SEQ ID NO: 257289 - DNA, 30 bp, Artificial Sequence
  Synthetic oligonucleotide
agacaaacgcgggttagctatgtcagcctg

SEQ ID NO: 257290 - DNA, 30 bp, Artificial Sequence
  Synthetic oligonucleotide
ttgccgaaccctccgccgagcttcagcctg

SEQ ID NO: 257291 - DNA, 30 bp, Artificial Sequence
  Synthetic oligonucleotide
tactagtatagataattatgcgagagcctg

SEQ ID NO: 257292 - DNA, 30 bp, Artificial Sequence
  Synthetic oligonucleotide
gggtttgagtaaaaggaagtttcacgcctg

SEQ ID NO: 257293 - DNA, 30 bp, Artificial Sequence
  Synthetic oligonucleotide
gttacgaactataacacgtctgttcgcctg

SEQ ID NO: 257294 - DNA, 30 bp, Artificial Sequence
  Synthetic oligonucleotide
gatatatgccgcaattcacttacaggcctg

SEQ ID NO: 257295 - DNA, 30 bp, Artificial Sequence
  Synthetic oligonucleotide
agcaactgggtgattggcaatctaggcctg

SEQ ID NO: 257296 - DNA, 30 bp, Artificial Sequence
  Synthetic oligonucleotide
tcgttatcttgcgctggcgctggcggcctg

SEQ ID NO: 257297 - DNA, 30 bp, Artificial Sequence
  Synthetic oligonucleotide
cacttgagactaagaatgttcttgggcctg

SEQ ID NO: 257298 - DNA, 30 bp, Artificial Sequence
  Synthetic oligonucleotide
tcatagtgttcataaataggggcgtgcctg

SEQ ID NO: 257299 - DNA, 30 bp, Artificial Sequence
  Synthetic oligonucleotide
aaatccagtaacctctcactcgtttgcctg

SEQ ID NO: 257300 - DNA, 30 bp, Artificial Sequence
  Synthetic oligonucleotide
ggacaggaggttcgtaaggataatatcctg

SEQ ID NO: 257301 - DNA, 30 bp, Artificial Sequence
  Synthetic oligonucleotide
accaggcgccctcatctggagtttatcctg

SEQ ID NO: 257302 - DNA, 30 bp, Artificial Sequence
  Synthetic oligonucleotide
ctatggcggacagtgaattttaaactcctg

SEQ ID NO: 257303 - DNA, 30 bp, Artificial Sequence
  Synthetic oligonucleotide
gcaacttcgaattgcgtatgttagctcctg

SEQ ID NO: 257304 - DNA, 30 bp, Artificial Sequence
  Synthetic oligonucleotide
acccaagcggggtgctcaccagcgctcctg

SEQ ID NO: 257305 - DNA, 30 bp, Artificial Sequence
  Synthetic oligonucleotide
ggatttcaaaatcggggactgtggctcctg

SEQ ID NO: 257306 - DNA, 30 bp, Artificial Sequence
  Synthetic oligonucleotide
aaactcggcgggtggtgctcaactctcctg

SEQ ID NO: 257307 - DNA, 29 bp, Artificial Sequence
  Synthetic oligonucleotide
cagccaaggtagcaatgggcggtctcctg

SEQ ID NO: 257308 - DNA, 30 bp, Artificial Sequence
  Synthetic oligonucleotide
tcgggcagagggatcattttagttctcctg

SEQ ID NO: 257309 - DNA, 30 bp, Artificial Sequence
  Synthetic oligonucleotide
ggctgctagccgagacattgagacgtcctg

SEQ ID NO: 257310 - DNA, 30 bp, Artificial Sequence
  Synthetic oligonucleotide
tatggcataaacagtaaggtggcggtcctg

SEQ ID NO: 257311 - DNA, 30 bp, Artificial Sequence
  Synthetic oligonucleotide
ttcgcgtatcgccattcgagcatattcctg

SEQ ID NO: 257312 - DNA, 30 bp, Artificial Sequence
  Synthetic oligonucleotide
caggcctgtttgtgattatgatacttcctg

SEQ ID NO: 257313 - DNA, 30 bp, Artificial Sequence
  Synthetic oligonucleotide
gcaactacctgttggcgcgccatgttcctg

SEQ ID NO: 257314 - DNA, 30 bp, Artificial Sequence
  Synthetic oligonucleotide
aacgggcacgcaccgcacggtctgttcctg

SEQ ID NO: 257315 - DNA, 30 bp, Artificial Sequence
  Synthetic oligonucleotide
aacacaatcctgcggaaagcaagcaagctg

SEQ ID NO: 257316 - DNA, 30 bp, Artificial Sequence
  Synthetic oligonucleotide
tagcggtacaatagtcgcgagcataagctg

SEQ ID NO: 257317 - DNA, 30 bp, Artificial Sequence
  Synthetic oligonucleotide
taagttctgccagttaacaacgataagctg

SEQ ID NO: 257318 - DNA, 30 bp, Artificial Sequence
  Synthetic oligonucleotide
ttctactgccatggaataattcttaagctg

SEQ ID NO: 257319 - DNA, 30 bp, Artificial Sequence
  Synthetic oligonucleotide
ttgcagggcgtatacgcccaacaacagctg

SEQ ID NO: 257320 - DNA, 30 bp, Artificial Sequence
  Synthetic oligonucleotide
taggcacctcaggggtagagtcaacagctg

SEQ ID NO: 257321 - DNA, 30 bp, Artificial Sequence
  Synthetic oligonucleotide
tcccagttgcataccacgaacccagagctg

SEQ ID NO: 257322 - DNA, 30 bp, Artificial Sequence
  Synthetic oligonucleotide
aggtatgtggttttatcccttagagagctg

SEQ ID NO: 257323 - DNA, 30 bp, Artificial Sequence
  Synthetic oligonucleotide
cgttaaaagtgctagcttttagccgagctg

SEQ ID NO: 257324 - DNA, 30 bp, Artificial Sequence
  Synthetic oligonucleotide
ggctaggacctggaagacctaagggagctg

SEQ ID NO: 257325 - DNA, 30 bp, Artificial Sequence
  Synthetic oligonucleotide
ggcatagcctcacttgaatcagtggagctg

SEQ ID NO: 257326 - DNA, 30 bp, Artificial Sequence
  Synthetic oligonucleotide
ctcgcaaagaaccgtcggcttgaatagctg

SEQ ID NO: 257327 - DNA, 30 bp, Artificial Sequence
  Synthetic oligonucleotide
tgcgggtggtatccaggatgaagatagctg

SEQ ID NO: 257328 - DNA, 30 bp, Artificial Sequence
  Synthetic oligonucleotide
cggtagctaactcgttccctggtatagctg

SEQ ID NO: 257329 - DNA, 30 bp, Artificial Sequence
  Synthetic oligonucleotide
cttgattggacttagcttatcttaacgctg

SEQ ID NO: 257330 - DNA, 29 bp, Artificial Sequence
  Synthetic oligonucleotide
ttacccttcaactgagacggtggacgctg

SEQ ID NO: 257331 - DNA, 30 bp, Artificial Sequence
  Synthetic oligonucleotide
aaataagagcgaagtgaccgtactacgctg

SEQ ID NO: 257332 - DNA, 30 bp, Artificial Sequence
  Synthetic oligonucleotide
tgagtcccaggacttatcaacgctacgctg

SEQ ID NO: 257333 - DNA, 30 bp, Artificial Sequence
  Synthetic oligonucleotide
gagatgggccctcaccttaactctacgctg

SEQ ID NO: 257334 - DNA, 30 bp, Artificial Sequence
  Synthetic oligonucleotide
gacagtacgaaacactacggatgcccgctg

SEQ ID NO: 257335 - DNA, 30 bp, Artificial Sequence
  Synthetic oligonucleotide
ctacggagaggtctcaatgttgcagcgctg

SEQ ID NO: 257336 - DNA, 30 bp, Artificial Sequence
  Synthetic oligonucleotide
acaacggacgatttgccctcgggctcgctg

SEQ ID NO: 257337 - DNA, 30 bp, Artificial Sequence
  Synthetic oligonucleotide
ttagcggctcacactggacactgttcgctg

SEQ ID NO: 257338 - DNA, 30 bp, Artificial Sequence
  Synthetic oligonucleotide
atctaacccgatccagttacgccaaggctg

SEQ ID NO: 257339 - DNA, 30 bp, Artificial Sequence
  Synthetic oligonucleotide
tgttcctgcatattgcgagtaggaaggctg

SEQ ID NO: 257340 - DNA, 30 bp, Artificial Sequence
  Synthetic oligonucleotide
ttgaaaaggaatgggcgaagatccaggctg

SEQ ID NO: 257341 - DNA, 30 bp, Artificial Sequence
  Synthetic oligonucleotide
tgccagcatacaagggatgtaagcaggctg

SEQ ID NO: 257342 - DNA, 30 bp, Artificial Sequence
  Synthetic oligonucleotide
ggagggaatgcttctaaattataacggctg

SEQ ID NO: 257343 - DNA, 30 bp, Artificial Sequence
  Synthetic oligonucleotide
atcttgtaagcgtggtagaatgcccggctg

SEQ ID NO: 257344 - DNA, 30 bp, Artificial Sequence
  Synthetic oligonucleotide
atattatggaaacgaatctttggtcggctg

SEQ ID NO: 257345 - DNA, 30 bp, Artificial Sequence
  Synthetic oligonucleotide
ctcatggtaagttccctctgggcagggctg

SEQ ID NO: 257346 - DNA, 30 bp, Artificial Sequence
  Synthetic oligonucleotide
cgcccctaatacggtgaatgttgagggctg

SEQ ID NO: 257347 - DNA, 30 bp, Artificial Sequence
  Synthetic oligonucleotide
gctggccagatcaagtataagtacgggctg

SEQ ID NO: 257348 - DNA, 30 bp, Artificial Sequence
  Synthetic oligonucleotide
tgcactcggacagatttactgtgcgggctg

SEQ ID NO: 257349 - DNA, 30 bp, Artificial Sequence
  Synthetic oligonucleotide
aatacaaacctcgaatgcgcaaaggggctg

SEQ ID NO: 257350 - DNA, 30 bp, Artificial Sequence
  Synthetic oligonucleotide
ggtggcgtggaattatgcccacaggggctg

SEQ ID NO: 257351 - DNA, 30 bp, Artificial Sequence
  Synthetic oligonucleotide
ttaccaaagtctttgatcacccaggggctg

SEQ ID NO: 257352 - DNA, 30 bp, Artificial Sequence
  Synthetic oligonucleotide
tttcaccgccgagaatgggccgcggggctg

SEQ ID NO: 257353 - DNA, 30 bp, Artificial Sequence
  Synthetic oligonucleotide
acgggatttgtaggccttaggtttgggctg

SEQ ID NO: 257354 - DNA, 30 bp, Artificial Sequence
  Synthetic oligonucleotide
tggccaagagtcttgagcacagcctggctg

SEQ ID NO: 257355 - DNA, 30 bp, Artificial Sequence
  Synthetic oligonucleotide
agtcagagactattgccgcatatctggctg

SEQ ID NO: 257356 - DNA, 30 bp, Artificial Sequence
  Synthetic oligonucleotide
tagcggctaatcattgccttttcttggctg

SEQ ID NO: 257357 - DNA, 30 bp, Artificial Sequence
  Synthetic oligonucleotide
taagatggccgcttgtttcacaagatgctg

SEQ ID NO: 257358 - DNA, 30 bp, Artificial Sequence
  Synthetic oligonucleotide
gagtagcacatgtatgtcggcaagatgctg

SEQ ID NO: 257359 - DNA, 30 bp, Artificial Sequence
  Synthetic oligonucleotide
agtatagccgaagcaggggtcactatgctg

SEQ ID NO: 257360 - DNA, 30 bp, Artificial Sequence
  Synthetic oligonucleotide
taaataaaagcatggccatgtcccctgctg

SEQ ID NO: 257361 - DNA, 30 bp, Artificial Sequence
  Synthetic oligonucleotide
aacccctcagtcaaatgcgacattctgctg

SEQ ID NO: 257362 - DNA, 30 bp, Artificial Sequence
  Synthetic oligonucleotide
cctagtgcgtcattatgcagtagagtgctg

SEQ ID NO: 257363 - DNA, 30 bp, Artificial Sequence
  Synthetic oligonucleotide
gcgattgcgctaggcatggaactagtgctg

SEQ ID NO: 257364 - DNA, 30 bp, Artificial Sequence
  Synthetic oligonucleotide
agactttgagggtaactctggccggtgctg

SEQ ID NO: 257365 - DNA, 30 bp, Artificial Sequence
  Synthetic oligonucleotide
cccacggagattacaatagatctggtgctg

SEQ ID NO: 257366 - DNA, 30 bp, Artificial Sequence
  Synthetic oligonucleotide
actagtaaaatgtaccttagggctgtgctg

SEQ ID NO: 257367 - DNA, 30 bp, Artificial Sequence
  Synthetic oligonucleotide
atcaatatagagtggagacgcaaattgctg

SEQ ID NO: 257368 - DNA, 30 bp, Artificial Sequence
  Synthetic oligonucleotide
taagagatgatgagaacttaagaattgctg

SEQ ID NO: 257369 - DNA, 30 bp, Artificial Sequence
  Synthetic oligonucleotide
atattagattgatctaaaaggctattgctg

SEQ ID NO: 257370 - DNA, 30 bp, Artificial Sequence
  Synthetic oligonucleotide
aatagtaaccttcgagggttcgaaaatctg

SEQ ID NO: 257371 - DNA, 30 bp, Artificial Sequence
  Synthetic oligonucleotide
aaagagacgtcatcgcacgccacaaatctg

SEQ ID NO: 257372 - DNA, 30 bp, Artificial Sequence
  Synthetic oligonucleotide
tgctctattaactccccgctggcaaatctg

SEQ ID NO: 257373 - DNA, 30 bp, Artificial Sequence
  Synthetic oligonucleotide
aatcggctggcttaatccctggacaatctg

SEQ ID NO: 257374 - DNA, 30 bp, Artificial Sequence
  Synthetic oligonucleotide
aaagacccacgtttatgagggatcaatctg

SEQ ID NO: 257375 - DNA, 30 bp, Artificial Sequence
  Synthetic oligonucleotide
ttgaggcttgcggacaagctgcagaatctg

SEQ ID NO: 257376 - DNA, 30 bp, Artificial Sequence
  Synthetic oligonucleotide
aatttgaaagtactcatggctctgaatctg

SEQ ID NO: 257377 - DNA, 30 bp, Artificial Sequence
  Synthetic oligonucleotide
ggacgatgagagaatatagcgagacatctg

SEQ ID NO: 257378 - DNA, 30 bp, Artificial Sequence
  Synthetic oligonucleotide
gcgctaagtgataggagctgtgtacatctg

SEQ ID NO: 257379 - DNA, 30 bp, Artificial Sequence
  Synthetic oligonucleotide
aagtgtcgggttataagtactcaccatctg

SEQ ID NO: 257380 - DNA, 30 bp, Artificial Sequence
  Synthetic oligonucleotide
ttacgtccgggaggataaggtaagcatctg

SEQ ID NO: 257381 - DNA, 30 bp, Artificial Sequence
  Synthetic oligonucleotide
cattcgcagatttatccgaaacgagatctg

SEQ ID NO: 257382 - DNA, 30 bp, Artificial Sequence
  Synthetic oligonucleotide
aggccctcatgaactgccagactcgatctg

SEQ ID NO: 257383 - DNA, 30 bp, Artificial Sequence
  Synthetic oligonucleotide
tgccgagtgtaaaagcgagtcacatatctg

SEQ ID NO: 257384 - DNA, 30 bp, Artificial Sequence
  Synthetic oligonucleotide
tatgatcacgagtgcccagaaccttatctg

SEQ ID NO: 257385 - DNA, 30 bp, Artificial Sequence
  Synthetic oligonucleotide
tagcgttcactcataaggcgacgttatctg

SEQ ID NO: 257386 - DNA, 30 bp, Artificial Sequence
  Synthetic oligonucleotide
gaccggaaaggcaggggctgctaaactctg

SEQ ID NO: 257387 - DNA, 30 bp, Artificial Sequence
  Synthetic oligonucleotide
ttcgaaaggtggcctcccacgtaaactctg

SEQ ID NO: 257388 - DNA, 30 bp, Artificial Sequence
  Synthetic oligonucleotide
gctctagtcggctaagcgggcaccactctg

SEQ ID NO: 257389 - DNA, 30 bp, Artificial Sequence
  Synthetic oligonucleotide
cctctagtaattcgccagcctatgactctg

SEQ ID NO: 257390 - DNA, 30 bp, Artificial Sequence
  Synthetic oligonucleotide
ggacagatttgtcgcgctaaagctactctg

SEQ ID NO: 257391 - DNA, 30 bp, Artificial Sequence
  Synthetic oligonucleotide
aaccgggtgggaattctaccgtgtactctg

SEQ ID NO: 257392 - DNA, 30 bp, Artificial Sequence
  Synthetic oligonucleotide
ttcatagggtcgagcatgcaagttactctg

SEQ ID NO: 257393 - DNA, 30 bp, Artificial Sequence
  Synthetic oligonucleotide
ggtactgcagcgtctatatgagtacctctg

SEQ ID NO: 257394 - DNA, 30 bp, Artificial Sequence
  Synthetic oligonucleotide
tatggttggcataacgcagtatcccctctg

SEQ ID NO: 257395 - DNA, 30 bp, Artificial Sequence
  Synthetic oligonucleotide
ccacgagtcggcctcccgggttggcctctg

SEQ ID NO: 257396 - DNA, 30 bp, Artificial Sequence
  Synthetic oligonucleotide
ccgcgacgtcttgtttggactcgtcctctg

SEQ ID NO: 257397 - DNA, 30 bp, Artificial Sequence
  Synthetic oligonucleotide
actatcagattttcagactacatctctctg

SEQ ID NO: 257398 - DNA, 30 bp, Artificial Sequence
  Synthetic oligonucleotide
cattgaaatgttcaaggaaacatgtctctg

SEQ ID NO: 257399 - DNA, 30 bp, Artificial Sequence
  Synthetic oligonucleotide
agacgttggtatgtagttaagacttctctg

SEQ ID NO: 257400 - DNA, 30 bp, Artificial Sequence
  Synthetic oligonucleotide
cggggctagtaacaagcggtcttttctctg

SEQ ID NO: 257401 - DNA, 30 bp, Artificial Sequence
  Synthetic oligonucleotide
agcgccggcctatggtcttatgaaagtctg

SEQ ID NO: 257402 - DNA, 30 bp, Artificial Sequence
  Synthetic oligonucleotide
agtgggtatagcaacggctagccaagtctg

SEQ ID NO: 257403 - DNA, 30 bp, Artificial Sequence
  Synthetic oligonucleotide
cccaaatctatagaagcgcctggaagtctg

SEQ ID NO: 257404 - DNA, 30 bp, Artificial Sequence
  Synthetic oligonucleotide
ttagcgggtctgtggatccacttaagtctg

SEQ ID NO: 257405 - DNA, 30 bp, Artificial Sequence
  Synthetic oligonucleotide
gtataatcgacagtcgagctgcccagtctg

SEQ ID NO: 257406 - DNA, 30 bp, Artificial Sequence
  Synthetic oligonucleotide
tcatgactgaaacgaaagattttcagtctg

SEQ ID NO: 257407 - DNA, 30 bp, Artificial Sequence
  Synthetic oligonucleotide
gagctccttcggatagactggttgagtctg

SEQ ID NO: 257408 - DNA, 30 bp, Artificial Sequence
  Synthetic oligonucleotide
caacgctttgttcactgtttcattagtctg

SEQ ID NO: 257409 - DNA, 30 bp, Artificial Sequence
  Synthetic oligonucleotide
agcatatgaaccgccagacgcgttagtctg

SEQ ID NO: 257410 - DNA, 30 bp, Artificial Sequence
  Synthetic oligonucleotide
gaatcgcggcatgcactcagcgaacgtctg

SEQ ID NO: 257411 - DNA, 30 bp, Artificial Sequence
  Synthetic oligonucleotide
atggcccgatgaaacgcctgagtacgtctg

SEQ ID NO: 257412 - DNA, 30 bp, Artificial Sequence
  Synthetic oligonucleotide
cgcttatttacaccctagccagccggtctg

SEQ ID NO: 257413 - DNA, 30 bp, Artificial Sequence
  Synthetic oligonucleotide
tcctaaccacacgagaactggcgtggtctg

SEQ ID NO: 257414 - DNA, 30 bp, Artificial Sequence
  Synthetic oligonucleotide
ctgatgcgtggtaatatcccggactgtctg

SEQ ID NO: 257415 - DNA, 30 bp, Artificial Sequence
  Synthetic oligonucleotide
cggagtgaggcggagactgaccgctgtctg

SEQ ID NO: 257416 - DNA, 30 bp, Artificial Sequence
  Synthetic oligonucleotide
cggtactcgatggatgctcacaattgtctg

SEQ ID NO: 257417 - DNA, 30 bp, Artificial Sequence
  Synthetic oligonucleotide
gacctctgggcccggtacgaagattgtctg

SEQ ID NO: 257418 - DNA, 30 bp, Artificial Sequence
  Synthetic oligonucleotide
aagaggtcgctttcaatcaactgcattctg

SEQ ID NO: 257419 - DNA, 30 bp, Artificial Sequence
  Synthetic oligonucleotide
gtgtattacagagtctaaagctgcattctg

SEQ ID NO: 257420 - DNA, 30 bp, Artificial Sequence
  Synthetic oligonucleotide
gcaaaactgacggcatgtactatgattctg

SEQ ID NO: 257421 - DNA, 30 bp, Artificial Sequence
  Synthetic oligonucleotide
cttcggtgagtttaatggagcaaagttctg

SEQ ID NO: 257422 - DNA, 30 bp, Artificial Sequence
  Synthetic oligonucleotide
gttgcttggataaaccctacacaagttctg

SEQ ID NO: 257423 - DNA, 30 bp, Artificial Sequence
  Synthetic oligonucleotide
gtgacgggtcagcatacgaattaagttctg

SEQ ID NO: 257424 - DNA, 30 bp, Artificial Sequence
  Synthetic oligonucleotide
aaagtaggtgggtgctattaaacagttctg

SEQ ID NO: 257425 - DNA, 30 bp, Artificial Sequence
  Synthetic oligonucleotide
gccggcgttccacggatcacgcacgttctg

SEQ ID NO: 257426 - DNA, 30 bp, Artificial Sequence
  Synthetic oligonucleotide
atacgtgccgtcgtaagggcaaaggttctg

SEQ ID NO: 257427 - DNA, 30 bp, Artificial Sequence
  Synthetic oligonucleotide
accgatagggtaagcatttcttaggttctg

SEQ ID NO: 257428 - DNA, 30 bp, Artificial Sequence
  Synthetic oligonucleotide
ggttctagcggcttaggtatggtggttctg

SEQ ID NO: 257429 - DNA, 30 bp, Artificial Sequence
  Synthetic oligonucleotide
ctcaagctccgagctaacccggttgttctg

SEQ ID NO: 257430 - DNA, 30 bp, Artificial Sequence
  Synthetic oligonucleotide
tcaggaacggtcgcgggatagctatttctg

SEQ ID NO: 257431 - DNA, 30 bp, Artificial Sequence
  Synthetic oligonucleotide
cacatgcgcttcatcgttagcaattttctg

SEQ ID NO: 257432 - DNA, 30 bp, Artificial Sequence
  Synthetic oligonucleotide
ccggcatgatgtttcgaggaaccttttctg

SEQ ID NO: 257433 - DNA, 30 bp, Artificial Sequence
  Synthetic oligonucleotide
gcaacaattgataagattgtgcaaaaagtg

SEQ ID NO: 257434 - DNA, 30 bp, Artificial Sequence
  Synthetic oligonucleotide
ggagtcttattcgtgggttgctccaaagtg

SEQ ID NO: 257435 - DNA, 30 bp, Artificial Sequence
  Synthetic oligonucleotide
taaatcgacattcccctgccgtgcaaagtg

SEQ ID NO: 257436 - DNA, 30 bp, Artificial Sequence
  Synthetic oligonucleotide
ggacacgctcggtgtctgataaagaaagtg

SEQ ID NO: 257437 - DNA, 30 bp, Artificial Sequence
  Synthetic oligonucleotide
ttatcatgttccaagctcggagtgaaagtg

SEQ ID NO: 257438 - DNA, 30 bp, Artificial Sequence
  Synthetic oligonucleotide
ataatcggggatacaggtgttcctaaagtg

SEQ ID NO: 257439 - DNA, 29 bp, Artificial Sequence
  Synthetic oligonucleotide
aatcggtgcgtctatcggtatgtaaagtg

SEQ ID NO: 257440 - DNA, 30 bp, Artificial Sequence
  Synthetic oligonucleotide
gcacatgcctctcaaggatgacgacaagtg

SEQ ID NO: 257441 - DNA, 30 bp, Artificial Sequence
  Synthetic oligonucleotide
agagtcatgggaccgtgtcaataccaagtg

SEQ ID NO: 257442 - DNA, 30 bp, Artificial Sequence
  Synthetic oligonucleotide
gcggtatgaaatccgagtggcgcccaagtg

SEQ ID NO: 257443 - DNA, 30 bp, Artificial Sequence
  Synthetic oligonucleotide
cccggaactagcaagtatatatgccaagtg

SEQ ID NO: 257444 - DNA, 30 bp, Artificial Sequence
  Synthetic oligonucleotide
tcaatgaaggagggcgtcggccagcaagtg

SEQ ID NO: 257445 - DNA, 30 bp, Artificial Sequence
  Synthetic oligonucleotide
ttggcactggtgaggactcgttctcaagtg

SEQ ID NO: 257446 - DNA, 30 bp, Artificial Sequence
  Synthetic oligonucleotide
gcgcgacaccccaatcggggagacgaagtg

SEQ ID NO: 257447 - DNA, 30 bp, Artificial Sequence
  Synthetic oligonucleotide
ggtacccctaactaggaatcacaggaagtg

SEQ ID NO: 257448 - DNA, 30 bp, Artificial Sequence
  Synthetic oligonucleotide
attaatacccggtactactacttggaagtg

SEQ ID NO: 257449 - DNA, 30 bp, Artificial Sequence
  Synthetic oligonucleotide
tactatcgtgcggacttgggacaataagtg

SEQ ID NO: 257450 - DNA, 30 bp, Artificial Sequence
  Synthetic oligonucleotide
acgcgctacttttctggcgccatataagtg

SEQ ID NO: 257451 - DNA, 30 bp, Artificial Sequence
  Synthetic oligonucleotide
acaggaccagtcgatacttttagctaagtg

SEQ ID NO: 257452 - DNA, 30 bp, Artificial Sequence
  Synthetic oligonucleotide
agtggacatccttctataagtgtgtaagtg

SEQ ID NO: 257453 - DNA, 30 bp, Artificial Sequence
  Synthetic oligonucleotide
ggcgtgttattgcacatgcttttgtaagtg

SEQ ID NO: 257454 - DNA, 30 bp, Artificial Sequence
  Synthetic oligonucleotide
gaataaatcgtcaaggtaatagcttaagtg

SEQ ID NO: 257455 - DNA, 30 bp, Artificial Sequence
  Synthetic oligonucleotide
tctgacgctagattgaatcggttttaagtg

SEQ ID NO: 257456 - DNA, 30 bp, Artificial Sequence
  Synthetic oligonucleotide
taagcggtcgacacccgttggttttaagtg

SEQ ID NO: 257457 - DNA, 30 bp, Artificial Sequence
  Synthetic oligonucleotide
tgttggctacaagtactggatggaacagtg

SEQ ID NO: 257458 - DNA, 31 bp, Artificial Sequence
  Synthetic oligonucleotide
aacgatgatgcggttataatggcacacagtg

SEQ ID NO: 257459 - DNA, 30 bp, Artificial Sequence
  Synthetic oligonucleotide
attactcggtatataatggataagacagtg

SEQ ID NO: 257460 - DNA, 30 bp, Artificial Sequence
  Synthetic oligonucleotide
ttggttccgtacgacagtcagaggacagtg

SEQ ID NO: 257461 - DNA, 30 bp, Artificial Sequence
  Synthetic oligonucleotide
gctgagcatcgcatctcgtcgtgtacagtg

SEQ ID NO: 257462 - DNA, 30 bp, Artificial Sequence
  Synthetic oligonucleotide
ctctcagaagtagcaactttaggaccagtg

SEQ ID NO: 257463 - DNA, 30 bp, Artificial Sequence
  Synthetic oligonucleotide
gtagtgaaacgagcgttcgaaggagcagtg

SEQ ID NO: 257464 - DNA, 30 bp, Artificial Sequence
  Synthetic oligonucleotide
agaacgcttatattggttacaatagcagtg

SEQ ID NO: 257465 - DNA, 30 bp, Artificial Sequence
  Synthetic oligonucleotide
ggtcctgacaagggcgatttaatcgcagtg

SEQ ID NO: 257466 - DNA, 30 bp, Artificial Sequence
  Synthetic oligonucleotide
cacgctagcttcgtttctgttacggcagtg

SEQ ID NO: 257467 - DNA, 30 bp, Artificial Sequence
  Synthetic oligonucleotide
acgtctactgcagacaaccgtagtgcagtg

SEQ ID NO: 257468 - DNA, 30 bp, Artificial Sequence
  Synthetic oligonucleotide
tctggtctataccaaagctatcaatcagtg

SEQ ID NO: 257469 - DNA, 30 bp, Artificial Sequence
  Synthetic oligonucleotide
tattacaaactaccgtgcaagtaatcagtg

SEQ ID NO: 257470 - DNA, 30 bp, Artificial Sequence
  Synthetic oligonucleotide
cgttgaggcatagatggcctaacgtcagtg

SEQ ID NO: 257471 - DNA, 30 bp, Artificial Sequence
  Synthetic oligonucleotide
aacacccacgtgcgagggctcgggtcagtg

SEQ ID NO: 257472 - DNA, 30 bp, Artificial Sequence
  Synthetic oligonucleotide
tccgcatgtacccatatttctatgtcagtg

SEQ ID NO: 257473 - DNA, 30 bp, Artificial Sequence
  Synthetic oligonucleotide
ctgcattgcgcaattggggggtattcagtg

SEQ ID NO: 257474 - DNA, 30 bp, Artificial Sequence
  Synthetic oligonucleotide
agtatttcggagctaggaagcagttcagtg

SEQ ID NO: 257475 - DNA, 30 bp, Artificial Sequence
  Synthetic oligonucleotide
aagatttcgccaggacaatgtcaaagagtg

SEQ ID NO: 257476 - DNA, 30 bp, Artificial Sequence
  Synthetic oligonucleotide
cacatagcataattcggtatgtcaagagtg

SEQ ID NO: 257477 - DNA, 30 bp, Artificial Sequence
  Synthetic oligonucleotide
ccggcagctcctacgtcgcaaagcagagtg

SEQ ID NO: 257478 - DNA, 30 bp, Artificial Sequence
  Synthetic oligonucleotide
caaactcaggatcagtggattcggagagtg

SEQ ID NO: 257479 - DNA, 30 bp, Artificial Sequence
  Synthetic oligonucleotide
gtgaattgcatatgcaggacctgtagagtg

SEQ ID NO: 257480 - DNA, 30 bp, Artificial Sequence
  Synthetic oligonucleotide
ggattggcacctttgttttggattagagtg

SEQ ID NO: 257481 - DNA, 30 bp, Artificial Sequence
  Synthetic oligonucleotide
ttcaaactgagtagacaatcgcaacgagtg

SEQ ID NO: 257482 - DNA, 30 bp, Artificial Sequence
  Synthetic oligonucleotide
gaaacagccatttaaacgttcgcgcgagtg

SEQ ID NO: 257483 - DNA, 30 bp, Artificial Sequence
  Synthetic oligonucleotide
ggtattttcggcttagtaagatcaggagtg

SEQ ID NO: 257484 - DNA, 30 bp, Artificial Sequence
  Synthetic oligonucleotide
tccatatagaacatctgggcgcagggagtg

SEQ ID NO: 257485 - DNA, 30 bp, Artificial Sequence
  Synthetic oligonucleotide
agcaccctttgtacaaagctacgtggagtg

SEQ ID NO: 257486 - DNA, 30 bp, Artificial Sequence
  Synthetic oligonucleotide
ttagaatgagatccatcaagtcttggagtg

SEQ ID NO: 257487 - DNA, 30 bp, Artificial Sequence
  Synthetic oligonucleotide
tagagactgggttgcgcccgcccatgagtg

SEQ ID NO: 257488 - DNA, 30 bp, Artificial Sequence
  Synthetic oligonucleotide
accggtgcgcaccgtgcatgaatctgagtg

SEQ ID NO: 257489 - DNA, 30 bp, Artificial Sequence
  Synthetic oligonucleotide
acttctattcccttagtgtatctaatagtg

SEQ ID NO: 257490 - DNA, 30 bp, Artificial Sequence
  Synthetic oligonucleotide
ggggtataatacatgcggacgacgatagtg

SEQ ID NO: 257491 - DNA, 30 bp, Artificial Sequence
  Synthetic oligonucleotide
cagcctgtttgggcgaacgcctggatagtg

SEQ ID NO: 257492 - DNA, 30 bp, Artificial Sequence
  Synthetic oligonucleotide
caggttgaaacggaagtacgtcctatagtg

SEQ ID NO: 257493 - DNA, 30 bp, Artificial Sequence
  Synthetic oligonucleotide
tggtacaggtatcttcctgattttatagtg

SEQ ID NO: 257494 - DNA, 30 bp, Artificial Sequence
  Synthetic oligonucleotide
cggggcaaatccaggcactatgaactagtg

SEQ ID NO: 257495 - DNA, 30 bp, Artificial Sequence
  Synthetic oligonucleotide
cagttgtgaggggtacataagaccctagtg

SEQ ID NO: 257496 - DNA, 30 bp, Artificial Sequence
  Synthetic oligonucleotide
cagcaaatagacttcattgtgggcctagtg

SEQ ID NO: 257497 - DNA, 30 bp, Artificial Sequence
  Synthetic oligonucleotide
gtatccagatgagagaacaacgcgctagtg

SEQ ID NO: 257498 - DNA, 30 bp, Artificial Sequence
  Synthetic oligonucleotide
ctaaggtaattcatttggggtgctctagtg

SEQ ID NO: 257499 - DNA, 30 bp, Artificial Sequence
  Synthetic oligonucleotide
ctcctgcacggcccggcccagaaagtagtg

SEQ ID NO: 257500 - DNA, 30 bp, Artificial Sequence
  Synthetic oligonucleotide
gttaagggctgatggataagcgccgtagtg

SEQ ID NO: 257501 - DNA, 30 bp, Artificial Sequence
  Synthetic oligonucleotide
tgtgtctaggggatcagggcataggtagtg

SEQ ID NO: 257502 - DNA, 30 bp, Artificial Sequence
  Synthetic oligonucleotide
actatatttaggctgtgagtaacggtagtg

SEQ ID NO: 257503 - DNA, 30 bp, Artificial Sequence
  Synthetic oligonucleotide
agcagtggattcaagagtaactcggtagtg

SEQ ID NO: 257504 - DNA, 30 bp, Artificial Sequence
  Synthetic oligonucleotide
aagaacaccaagggttaaaccagcttagtg

SEQ ID NO: 257505 - DNA, 30 bp, Artificial Sequence
  Synthetic oligonucleotide
aacctctgcaacacagaacaagggttagtg

SEQ ID NO: 257506 - DNA, 30 bp, Artificial Sequence
  Synthetic oligonucleotide
cgatcaggagcttcgctcgatcatttagtg

SEQ ID NO: 257507 - DNA, 30 bp, Artificial Sequence
  Synthetic oligonucleotide
gtggttcaaagcgggctgcaaggtttagtg

SEQ ID NO: 257508 - DNA, 30 bp, Artificial Sequence
  Synthetic oligonucleotide
cgtaccgaggaccagggcagttaaaacgtg

SEQ ID NO: 257509 - DNA, 30 bp, Artificial Sequence
  Synthetic oligonucleotide
accgcaaaactatggggacgcttcaacgtg

SEQ ID NO: 257510 - DNA, 30 bp, Artificial Sequence
  Synthetic oligonucleotide
ggccaccaagtctatgacggatttaacgtg

SEQ ID NO: 257511 - DNA, 30 bp, Artificial Sequence
  Synthetic oligonucleotide
gtaacagtgaggactcacaacgcacacgtg

SEQ ID NO: 257512 - DNA, 30 bp, Artificial Sequence
  Synthetic oligonucleotide
agcgcggcaacgatcacaacgttacacgtg

SEQ ID NO: 257513 - DNA, 30 bp, Artificial Sequence
  Synthetic oligonucleotide
aaacggtttggatgcgaacgattgcacgtg

SEQ ID NO: 257514 - DNA, 30 bp, Artificial Sequence
  Synthetic oligonucleotide
ccaaaatgacagggaacaatttttcacgtg

SEQ ID NO: 257515 - DNA, 30 bp, Artificial Sequence
  Synthetic oligonucleotide
actgataaataggtacgcggcgtagacgtg

SEQ ID NO: 257516 - DNA, 30 bp, Artificial Sequence
  Synthetic oligonucleotide
cgggttagtaataggtgattatacgacgtg

SEQ ID NO: 257517 - DNA, 30 bp, Artificial Sequence
  Synthetic oligonucleotide
agggttacacgatgtacataggtatacgtg

SEQ ID NO: 257518 - DNA, 30 bp, Artificial Sequence
  Synthetic oligonucleotide
ccacacaggccctttcaccctaactacgtg

SEQ ID NO: 257519 - DNA, 30 bp, Artificial Sequence
  Synthetic oligonucleotide
ggttccccatgaatcattaggcagtacgtg

SEQ ID NO: 257520 - DNA, 30 bp, Artificial Sequence
  Synthetic oligonucleotide
ggtttcgttcgacagaatacggagtacgtg

SEQ ID NO: 257521 - DNA, 30 bp, Artificial Sequence
  Synthetic oligonucleotide
agaaagaacccggatgcaaagtcttacgtg

SEQ ID NO: 257522 - DNA, 30 bp, Artificial Sequence
  Synthetic oligonucleotide
aggtacataagatggctctgactttacgtg

SEQ ID NO: 257523 - DNA, 31 bp, Artificial Sequence
  Synthetic oligonucleotide
agaaattagagccggtcgaccaaaaaccgtg

SEQ ID NO: 257524 - DNA, 30 bp, Artificial Sequence
  Synthetic oligonucleotide
acagtagtgccttagctgatggaaaccgtg

SEQ ID NO: 257525 - DNA, 30 bp, Artificial Sequence
  Synthetic oligonucleotide
tcttttcgaaaaatcgaaagcccacccgtg

SEQ ID NO: 257526 - DNA, 30 bp, Artificial Sequence
  Synthetic oligonucleotide
ctcatgcgcggaggtagaagcctgcccgtg

SEQ ID NO: 257527 - DNA, 30 bp, Artificial Sequence
  Synthetic oligonucleotide
gacagacaatgcagctctttcctgcccgtg

SEQ ID NO: 257528 - DNA, 30 bp, Artificial Sequence
  Synthetic oligonucleotide
ccgggtggacttgtccacgctccagccgtg

SEQ ID NO: 257529 - DNA, 30 bp, Artificial Sequence
  Synthetic oligonucleotide
atggtgccacgcgagggcgtctacgccgtg

SEQ ID NO: 257530 - DNA, 30 bp, Artificial Sequence
  Synthetic oligonucleotide
gaaagtttgaattgtcaaataagggccgtg

SEQ ID NO: 257531 - DNA, 30 bp, Artificial Sequence
  Synthetic oligonucleotide
ccaggtctctaaactgaacggacctccgtg

SEQ ID NO: 257532 - DNA, 30 bp, Artificial Sequence
  Synthetic oligonucleotide
cgtagtcggattttcaccttacgctccgtg

SEQ ID NO: 257533 - DNA, 30 bp, Artificial Sequence
  Synthetic oligonucleotide
aaaccaaaggtcataccggttgtttccgtg

SEQ ID NO: 257534 - DNA, 30 bp, Artificial Sequence
  Synthetic oligonucleotide
gcccgttgattgctctgaaaaacaagcgtg

SEQ ID NO: 257535 - DNA, 30 bp, Artificial Sequence
  Synthetic oligonucleotide
atcccgcttatactcttcgcattgagcgtg

SEQ ID NO: 257536 - DNA, 30 bp, Artificial Sequence
  Synthetic oligonucleotide
aagaaaacacatgttaggtcaagtagcgtg

SEQ ID NO: 257537 - DNA, 30 bp, Artificial Sequence
  Synthetic oligonucleotide
tgtgtcgccgttccacacaccggtagcgtg

SEQ ID NO: 257538 - DNA, 30 bp, Artificial Sequence
  Synthetic oligonucleotide
gttgctgtaatagtccactcaagccgcgtg

SEQ ID NO: 257539 - DNA, 30 bp, Artificial Sequence
  Synthetic oligonucleotide
gcacgtagtcttagggatgacaagcgcgtg

SEQ ID NO: 257540 - DNA, 30 bp, Artificial Sequence
  Synthetic oligonucleotide
tttcggcaatacaaagcctttacgcgcgtg

SEQ ID NO: 257541 - DNA, 30 bp, Artificial Sequence
  Synthetic oligonucleotide
gtaagtgagcccacgtacaaatgtcgcgtg

SEQ ID NO: 257542 - DNA, 30 bp, Artificial Sequence
  Synthetic oligonucleotide
aatgcttgtgctagcctaccgccatgcgtg

SEQ ID NO: 257543 - DNA, 27 bp, Artificial Sequence
  Synthetic oligonucleotide
ggttgtcgagtaggcaggagatgcgtg

SEQ ID NO: 257544 - DNA, 30 bp, Artificial Sequence
  Synthetic oligonucleotide
ttgtacccgcatcgagggtaactatgcgtg

SEQ ID NO: 257545 - DNA, 30 bp, Artificial Sequence
  Synthetic oligonucleotide
ttacgttccgccaagccctggaattgcgtg

SEQ ID NO: 257546 - DNA, 30 bp, Artificial Sequence
  Synthetic oligonucleotide
catgatcaagtgagcattgtttattgcgtg

SEQ ID NO: 257547 - DNA, 30 bp, Artificial Sequence
  Synthetic oligonucleotide
acgttgagccaacctgagttgggaatcgtg

SEQ ID NO: 257548 - DNA, 30 bp, Artificial Sequence
  Synthetic oligonucleotide
tggtggccaccggcatttataaagatcgtg

SEQ ID NO: 257549 - DNA, 30 bp, Artificial Sequence
  Synthetic oligonucleotide
tagccacccttgatatggcacgggatcgtg

SEQ ID NO: 257550 - DNA, 30 bp, Artificial Sequence
  Synthetic oligonucleotide
tctcctggatgggaaatacccatactcgtg

SEQ ID NO: 257551 - DNA, 30 bp, Artificial Sequence
  Synthetic oligonucleotide
tcgatccgcggaggttggactctcctcgtg

SEQ ID NO: 257552 - DNA, 30 bp, Artificial Sequence
  Synthetic oligonucleotide
tatcaaaacaaacgggcgctgacgctcgtg

SEQ ID NO: 257553 - DNA, 30 bp, Artificial Sequence
  Synthetic oligonucleotide
cgtcactctagtggagcgtagaggctcgtg

SEQ ID NO: 257554 - DNA, 30 bp, Artificial Sequence
  Synthetic oligonucleotide
tcatcgcacaggcactctgagctgctcgtg

SEQ ID NO: 257555 - DNA, 30 bp, Artificial Sequence
  Synthetic oligonucleotide
agttcttcagtaagatgcaatccagtcgtg

SEQ ID NO: 257556 - DNA, 30 bp, Artificial Sequence
  Synthetic oligonucleotide
ggtattgtggccataggttcggacgtcgtg

SEQ ID NO: 257557 - DNA, 30 bp, Artificial Sequence
  Synthetic oligonucleotide
tcggattcggtcaccggaccgagcgtcgtg

SEQ ID NO: 257558 - DNA, 30 bp, Artificial Sequence
  Synthetic oligonucleotide
gaagtacatggaagaagctgcccggtcgtg

SEQ ID NO: 257559 - DNA, 30 bp, Artificial Sequence
  Synthetic oligonucleotide
gtccgagaggcacaaatcacgcgggtcgtg

SEQ ID NO: 257560 - DNA, 30 bp, Artificial Sequence
  Synthetic oligonucleotide
ggctatattggcgtccggtaggtggtcgtg

SEQ ID NO: 257561 - DNA, 30 bp, Artificial Sequence
  Synthetic oligonucleotide
tgcgtggacggtgttatgctaggtgtcgtg

SEQ ID NO: 257562 - DNA, 30 bp, Artificial Sequence
  Synthetic oligonucleotide
agtcgcgcggctttgtaatgagttgtcgtg

SEQ ID NO: 257563 - DNA, 30 bp, Artificial Sequence
  Synthetic oligonucleotide
aagaatgactatccacacggtggattcgtg

SEQ ID NO: 257564 - DNA, 30 bp, Artificial Sequence
  Synthetic oligonucleotide
tcaatgtgcggatttcacctaaacttcgtg

SEQ ID NO: 257565 - DNA, 30 bp, Artificial Sequence
  Synthetic oligonucleotide
atggaccgtaggtgattcccggccttcgtg

SEQ ID NO: 257566 - DNA, 30 bp, Artificial Sequence
  Synthetic oligonucleotide
tgtgtctgagtatgtgtgtcccagttcgtg

SEQ ID NO: 257567 - DNA, 30 bp, Artificial Sequence
  Synthetic oligonucleotide
gtactgtgaaacgtagggcctaaaaaggtg

SEQ ID NO: 257568 - DNA, 30 bp, Artificial Sequence
  Synthetic oligonucleotide
ttctcgacccaaccacttaggagaaaggtg

SEQ ID NO: 257569 - DNA, 29 bp, Artificial Sequence
  Synthetic oligonucleotide
ttatttcatgaatgatccacaacaaggtg

SEQ ID NO: 257570 - DNA, 30 bp, Artificial Sequence
  Synthetic oligonucleotide
acatcccaattctttgggtgtgccaaggtg

SEQ ID NO: 257571 - DNA, 30 bp, Artificial Sequence
  Synthetic oligonucleotide
aatgtactcgtcgaaaatttaggcaaggtg

SEQ ID NO: 257572 - DNA, 30 bp, Artificial Sequence
  Synthetic oligonucleotide
gaagaacattagtttgtgagtttcaaggtg

SEQ ID NO: 257573 - DNA, 30 bp, Artificial Sequence
  Synthetic oligonucleotide
gtgggagtcgggttaggtcgtccgaaggtg

SEQ ID NO: 257574 - DNA, 30 bp, Artificial Sequence
  Synthetic oligonucleotide
tacgaagagggtctctctgaggtgaaggtg

SEQ ID NO: 257575 - DNA, 30 bp, Artificial Sequence
  Synthetic oligonucleotide
gtagtgcgttacgaggatgcagataaggtg

SEQ ID NO: 257576 - DNA, 30 bp, Artificial Sequence
  Synthetic oligonucleotide
tggcttggacaaacataacctcaacaggtg

SEQ ID NO: 257577 - DNA, 30 bp, Artificial Sequence
  Synthetic oligonucleotide
atctcataaggttaaggtccgatacaggtg

SEQ ID NO: 257578 - DNA, 30 bp, Artificial Sequence
  Synthetic oligonucleotide
ttatagatagggctatcaagagtacaggtg

SEQ ID NO: 257579 - DNA, 30 bp, Artificial Sequence
  Synthetic oligonucleotide
cgtgcgtggtaacgtaactgcttacaggtg

SEQ ID NO: 257580 - DNA, 30 bp, Artificial Sequence
  Synthetic oligonucleotide
tctcagaaagttggacatgttggccaggtg

SEQ ID NO: 257581 - DNA, 30 bp, Artificial Sequence
  Synthetic oligonucleotide
cttggacatacctctgcgagcaggcaggtg

SEQ ID NO: 257582 - DNA, 30 bp, Artificial Sequence
  Synthetic oligonucleotide
acgaagaaaacagttaagaagtggcaggtg

SEQ ID NO: 257583 - DNA, 30 bp, Artificial Sequence
  Synthetic oligonucleotide
cggacttgactacaagtgtggattcaggtg

SEQ ID NO: 257584 - DNA, 30 bp, Artificial Sequence
  Synthetic oligonucleotide
caaatatccgacggtgaaatagcagaggtg

SEQ ID NO: 257585 - DNA, 30 bp, Artificial Sequence
  Synthetic oligonucleotide
tccaaagcttttatgcaggaggacgaggtg

SEQ ID NO: 257586 - DNA, 30 bp, Artificial Sequence
  Synthetic oligonucleotide
tcaattatgtatctgctcagaggggaggtg

SEQ ID NO: 257587 - DNA, 30 bp, Artificial Sequence
  Synthetic oligonucleotide
gctcatacgactaaagctttatttgaggtg

SEQ ID NO: 257588 - DNA, 30 bp, Artificial Sequence
  Synthetic oligonucleotide
ggaatttatgaaaatattacttttgaggtg

SEQ ID NO: 257589 - DNA, 30 bp, Artificial Sequence
  Synthetic oligonucleotide
gcgctcttcagatcagtagacacataggtg

SEQ ID NO: 257590 - DNA, 30 bp, Artificial Sequence
  Synthetic oligonucleotide
tgcgatattaacgcatttgtgacataggtg

SEQ ID NO: 257591 - DNA, 30 bp, Artificial Sequence
  Synthetic oligonucleotide
gctcgccgagctaaaagtagccgctaggtg

SEQ ID NO: 257592 - DNA, 30 bp, Artificial Sequence
  Synthetic oligonucleotide
ggatgtgggggtccctcagcgaagtaggtg

SEQ ID NO: 257593 - DNA, 30 bp, Artificial Sequence
  Synthetic oligonucleotide
caaacggtgctagtgcactcctattaggtg

SEQ ID NO: 257594 - DNA, 30 bp, Artificial Sequence
  Synthetic oligonucleotide
aagcgacgggcaaccatatcaggttaggtg

SEQ ID NO: 257595 - DNA, 30 bp, Artificial Sequence
  Synthetic oligonucleotide
aaggggtcgaatcggtatgtatgttaggtg

SEQ ID NO: 257596 - DNA, 30 bp, Artificial Sequence
  Synthetic oligonucleotide
ttaaggtctttattatgcctacggccggtg

SEQ ID NO: 257597 - DNA, 30 bp, Artificial Sequence
  Synthetic oligonucleotide
ctcgcgttaagccgggatgccactccggtg

SEQ ID NO: 257598 - DNA, 30 bp, Artificial Sequence
  Synthetic oligonucleotide
tctgcaagcgccattagtccgtacgcggtg

SEQ ID NO: 257599 - DNA, 30 bp, Artificial Sequence
  Synthetic oligonucleotide
tgtattaaaattagagttgaacgggcggtg

SEQ ID NO: 257600 - DNA, 30 bp, Artificial Sequence
  Synthetic oligonucleotide
tcatgtcagactatgcttatttctgcggtg

SEQ ID NO: 257601 - DNA, 29 bp, Artificial Sequence
  Synthetic oligonucleotide
tatacacaatcaatgcagaccgtgcggtg

SEQ ID NO: 257602 - DNA, 30 bp, Artificial Sequence
  Synthetic oligonucleotide
ttgcacggtgatggattcgtaaaatcggtg

SEQ ID NO: 257603 - DNA, 30 bp, Artificial Sequence
  Synthetic oligonucleotide
gatcaatgggagctggaaaccagatcggtg

SEQ ID NO: 257604 - DNA, 30 bp, Artificial Sequence
  Synthetic oligonucleotide
acatccgggcggtgacgggttctctcggtg

SEQ ID NO: 257605 - DNA, 30 bp, Artificial Sequence
  Synthetic oligonucleotide
cgttttctacctaggataacagagtcggtg

SEQ ID NO: 257606 - DNA, 30 bp, Artificial Sequence
  Synthetic oligonucleotide
gtgtagacgtgtccatgaagacggtcggtg

SEQ ID NO: 257607 - DNA, 30 bp, Artificial Sequence
  Synthetic oligonucleotide
tctggaccgcttttgagtagtcattcggtg

SEQ ID NO: 257608 - DNA, 30 bp, Artificial Sequence
  Synthetic oligonucleotide
aacataggttctgacagaagtggttcggtg

SEQ ID NO: 257609 - DNA, 30 bp, Artificial Sequence
  Synthetic oligonucleotide
tggaaacgttcatgggacgggtcaagggtg

SEQ ID NO: 257610 - DNA, 30 bp, Artificial Sequence
  Synthetic oligonucleotide
tggaggataattatagcctacagaagggtg

SEQ ID NO: 257611 - DNA, 30 bp, Artificial Sequence
  Synthetic oligonucleotide
ttactgagcaggggtcaagttgtaagggtg

SEQ ID NO: 257612 - DNA, 30 bp, Artificial Sequence
  Synthetic oligonucleotide
gtatcagaagcgatacacagcaacagggtg

SEQ ID NO: 257613 - DNA, 30 bp, Artificial Sequence
  Synthetic oligonucleotide
accaggtcaagctgctggagatgcagggtg

SEQ ID NO: 257614 - DNA, 30 bp, Artificial Sequence
  Synthetic oligonucleotide
acgaatctttcagcgacactcgagagggtg

SEQ ID NO: 257615 - DNA, 30 bp, Artificial Sequence
  Synthetic oligonucleotide
gtccccctcaatggtagggcgacgagggtg

SEQ ID NO: 257616 - DNA, 30 bp, Artificial Sequence
  Synthetic oligonucleotide
agacagaggcgtcccgggcggattagggtg

SEQ ID NO: 257617 - DNA, 30 bp, Artificial Sequence
  Synthetic oligonucleotide
ggggatagtctgttttatctcaggcgggtg

SEQ ID NO: 257618 - DNA, 30 bp, Artificial Sequence
  Synthetic oligonucleotide
gcgaggatacgctgtgcctcgcatcgggtg

SEQ ID NO: 257619 - DNA, 30 bp, Artificial Sequence
  Synthetic oligonucleotide
gggtctggatgaatcaagctccttcgggtg

SEQ ID NO: 257620 - DNA, 30 bp, Artificial Sequence
  Synthetic oligonucleotide
gcaaatccacaacgctcatctagaggggtg

SEQ ID NO: 257621 - DNA, 30 bp, Artificial Sequence
  Synthetic oligonucleotide
tccccgcggtcgcggcggagtaacggggtg

SEQ ID NO: 257622 - DNA, 30 bp, Artificial Sequence
  Synthetic oligonucleotide
ggagttctaggctagtaaatagccggggtg

SEQ ID NO: 257623 - DNA, 30 bp, Artificial Sequence
  Synthetic oligonucleotide
aacgactggatagtacactcgggcggggtg

SEQ ID NO: 257624 - DNA, 30 bp, Artificial Sequence
  Synthetic oligonucleotide
gaggaagttgcccgaccgattctcggggtg

SEQ ID NO: 257625 - DNA, 30 bp, Artificial Sequence
  Synthetic oligonucleotide
gcaggtattggcgggtgcactgctggggtg

SEQ ID NO: 257626 - DNA, 30 bp, Artificial Sequence
  Synthetic oligonucleotide
ttggagctacttgcatggtacacatgggtg

SEQ ID NO: 257627 - DNA, 30 bp, Artificial Sequence
  Synthetic oligonucleotide
gacacgctcagatcgagtaagtgatgggtg

SEQ ID NO: 257628 - DNA, 30 bp, Artificial Sequence
  Synthetic oligonucleotide
cgggacacgacatgtgtcctgttgtgggtg

SEQ ID NO: 257629 - DNA, 30 bp, Artificial Sequence
  Synthetic oligonucleotide
catgagaagaaagtagagatcaattgggtg

SEQ ID NO: 257630 - DNA, 30 bp, Artificial Sequence
  Synthetic oligonucleotide
ggtcgcatacgtccgaacaatcattgggtg

SEQ ID NO: 257631 - DNA, 30 bp, Artificial Sequence
  Synthetic oligonucleotide
gccggacccagcgacatgcactgaatggtg

SEQ ID NO: 257632 - DNA, 30 bp, Artificial Sequence
  Synthetic oligonucleotide
tgagaaaggccggtacaggcatacatggtg

SEQ ID NO: 257633 - DNA, 30 bp, Artificial Sequence
  Synthetic oligonucleotide
ggccatgggacagagagaatgaccatggtg

SEQ ID NO: 257634 - DNA, 30 bp, Artificial Sequence
  Synthetic oligonucleotide
tcatcaagacgacaaccagaggggatggtg

SEQ ID NO: 257635 - DNA, 30 bp, Artificial Sequence
  Synthetic oligonucleotide
tttgcaacagacgattcattgcttatggtg

SEQ ID NO: 257636 - DNA, 30 bp, Artificial Sequence
  Synthetic oligonucleotide
cccgaaggtgttcgacagggggcactggtg

SEQ ID NO: 257637 - DNA, 30 bp, Artificial Sequence
  Synthetic oligonucleotide
agtctagaatgtagtagggggttactggtg

SEQ ID NO: 257638 - DNA, 30 bp, Artificial Sequence
  Synthetic oligonucleotide
cctagtgttaacgtaccagtaatcctggtg

SEQ ID NO: 257639 - DNA, 30 bp, Artificial Sequence
  Synthetic oligonucleotide
ggtaacacccataccggttagtagctggtg

SEQ ID NO: 257640 - DNA, 30 bp, Artificial Sequence
  Synthetic oligonucleotide
tgatgatcaccgtgtacgtattcgctggtg

SEQ ID NO: 257641 - DNA, 30 bp, Artificial Sequence
  Synthetic oligonucleotide
ccaagatgaatccaagcatttaggctggtg

SEQ ID NO: 257642 - DNA, 30 bp, Artificial Sequence
  Synthetic oligonucleotide
ctttcgctggcataaagaagggtgctggtg

SEQ ID NO: 257643 - DNA, 30 bp, Artificial Sequence
  Synthetic oligonucleotide
tgaccacttgaacttctgttagatctggtg

SEQ ID NO: 257644 - DNA, 30 bp, Artificial Sequence
  Synthetic oligonucleotide
caggtgaatgtacccttcctgggtctggtg

SEQ ID NO: 257645 - DNA, 30 bp, Artificial Sequence
  Synthetic oligonucleotide
gccacagggtgatgtcatctaattctggtg

SEQ ID NO: 257646 - DNA, 30 bp, Artificial Sequence
  Synthetic oligonucleotide
gaaaggaatttttcaatactcatcgtggtg

SEQ ID NO: 257647 - DNA, 30 bp, Artificial Sequence
  Synthetic oligonucleotide
cctccggatccgtaaaggagctttgtggtg

SEQ ID NO: 257648 - DNA, 30 bp, Artificial Sequence
  Synthetic oligonucleotide
tcgtgcgtcatttcatctaaccgattggtg

SEQ ID NO: 257649 - DNA, 30 bp, Artificial Sequence
  Synthetic oligonucleotide
ttggtggtggctctgtcggagggattggtg

SEQ ID NO: 257650 - DNA, 30 bp, Artificial Sequence
  Synthetic oligonucleotide
cccgcaatgtcagcccgaccggacttggtg

SEQ ID NO: 257651 - DNA, 30 bp, Artificial Sequence
  Synthetic oligonucleotide
caatgtacatgggttcctcggaccttggtg

SEQ ID NO: 257652 - DNA, 30 bp, Artificial Sequence
  Synthetic oligonucleotide
ttatgagtatatgagaccacggccttggtg

SEQ ID NO: 257653 - DNA, 30 bp, Artificial Sequence
  Synthetic oligonucleotide
agcaccagtttgatattttgtttcttggtg

SEQ ID NO: 257654 - DNA, 30 bp, Artificial Sequence
  Synthetic oligonucleotide
gatctggagggccagggattacggttggtg

SEQ ID NO: 257655 - DNA, 30 bp, Artificial Sequence
  Synthetic oligonucleotide
tggttcatgtggactgtttagtttttggtg

SEQ ID NO: 257656 - DNA, 30 bp, Artificial Sequence
  Synthetic oligonucleotide
tttcggcgactgtagatgttgtgaaatgtg

SEQ ID NO: 257657 - DNA, 30 bp, Artificial Sequence
  Synthetic oligonucleotide
attacatggctgacgtatatactcaatgtg

SEQ ID NO: 257658 - DNA, 30 bp, Artificial Sequence
  Synthetic oligonucleotide
catatattatcgacaagatcatataatgtg

SEQ ID NO: 257659 - DNA, 30 bp, Artificial Sequence
  Synthetic oligonucleotide
ggacatttaggaactcgtgtccgtaatgtg

SEQ ID NO: 257660 - DNA, 30 bp, Artificial Sequence
  Synthetic oligonucleotide
cttgattgcaacattgtatgacatcatgtg

SEQ ID NO: 257661 - DNA, 30 bp, Artificial Sequence
  Synthetic oligonucleotide
agatagattgaagtttgcgtacaagatgtg

SEQ ID NO: 257662 - DNA, 30 bp, Artificial Sequence
  Synthetic oligonucleotide
gccattcgcgtctgtaatatgcgagatgtg

SEQ ID NO: 257663 - DNA, 30 bp, Artificial Sequence
  Synthetic oligonucleotide
taatgcacgtatctactcaggtgatatgtg

SEQ ID NO: 257664 - DNA, 30 bp, Artificial Sequence
  Synthetic oligonucleotide
caaatggaatttaatcgagccatatatgtg

SEQ ID NO: 257665 - DNA, 30 bp, Artificial Sequence
  Synthetic oligonucleotide
ggaccaacttacaccaacacttactatgtg

SEQ ID NO: 257666 - DNA, 30 bp, Artificial Sequence
  Synthetic oligonucleotide
atatattgtcgttgaatgagatgctatgtg

SEQ ID NO: 257667 - DNA, 30 bp, Artificial Sequence
  Synthetic oligonucleotide
gcagccatgctgaaggccctgttctatgtg

SEQ ID NO: 257668 - DNA, 30 bp, Artificial Sequence
  Synthetic oligonucleotide
ggtgaagggactcaaacacaaatgtatgtg

SEQ ID NO: 257669 - DNA, 30 bp, Artificial Sequence
  Synthetic oligonucleotide
cccgattacttagtgaggacccattatgtg

SEQ ID NO: 257670 - DNA, 30 bp, Artificial Sequence
  Synthetic oligonucleotide
atcattgaacgcctcgtccagcattatgtg

SEQ ID NO: 257671 - DNA, 30 bp, Artificial Sequence
  Synthetic oligonucleotide
accaacaagttgaggcctcggtcttatgtg

SEQ ID NO: 257672 - DNA, 30 bp, Artificial Sequence
  Synthetic oligonucleotide
tactcgtgtaagctagcggacagttatgtg

SEQ ID NO: 257673 - DNA, 30 bp, Artificial Sequence
  Synthetic oligonucleotide
cattcgtgctataccattattagttatgtg

SEQ ID NO: 257674 - DNA, 30 bp, Artificial Sequence
  Synthetic oligonucleotide
gaaccaagcttgttacatcggtccactgtg

SEQ ID NO: 257675 - DNA, 30 bp, Artificial Sequence
  Synthetic oligonucleotide
aaaccagatttgatgtatccttgcactgtg

SEQ ID NO: 257676 - DNA, 30 bp, Artificial Sequence
  Synthetic oligonucleotide
atgtgaagacaacagttaaatttgactgtg

SEQ ID NO: 257677 - DNA, 30 bp, Artificial Sequence
  Synthetic oligonucleotide
aaatctctcgcattggatttcccacctgtg

SEQ ID NO: 257678 - DNA, 30 bp, Artificial Sequence
  Synthetic oligonucleotide
agcagatccgacgccggaatcgtacctgtg

SEQ ID NO: 257679 - DNA, 30 bp, Artificial Sequence
  Synthetic oligonucleotide
cagataccaagagcagcctgttttcctgtg

SEQ ID NO: 257680 - DNA, 29 bp, Artificial Sequence
  Synthetic oligonucleotide
cctgggaactcagcattgttgaagctgtg

SEQ ID NO: 257681 - DNA, 30 bp, Artificial Sequence
  Synthetic oligonucleotide
ggagtcagcttacgccaggagacagctgtg

SEQ ID NO: 257682 - DNA, 30 bp, Artificial Sequence
  Synthetic oligonucleotide
ttcggaccctaaatgtaacagaacgctgtg

SEQ ID NO: 257683 - DNA, 30 bp, Artificial Sequence
  Synthetic oligonucleotide
tggaacgtataaatctacattaccgctgtg

SEQ ID NO: 257684 - DNA, 30 bp, Artificial Sequence
  Synthetic oligonucleotide
gactggcgggttggcgtcccacgggctgtg

SEQ ID NO: 257685 - DNA, 30 bp, Artificial Sequence
  Synthetic oligonucleotide
gtacggtttgacttttaccaggctgctgtg

SEQ ID NO: 257686 - DNA, 30 bp, Artificial Sequence
  Synthetic oligonucleotide
ggttcataggaatatttcacatctgctgtg

SEQ ID NO: 257687 - DNA, 30 bp, Artificial Sequence
  Synthetic oligonucleotide
aagaatagctgatgacgtcgtattgctgtg

SEQ ID NO: 257688 - DNA, 30 bp, Artificial Sequence
  Synthetic oligonucleotide
ggttggcaaggcacacatatggttgctgtg

SEQ ID NO: 257689 - DNA, 30 bp, Artificial Sequence
  Synthetic oligonucleotide
tcgtctcagataccatgttagttgtctgtg

SEQ ID NO: 257690 - DNA, 30 bp, Artificial Sequence
  Synthetic oligonucleotide
ttcaaatgttttatgtgatctttcagtgtg

SEQ ID NO: 257691 - DNA, 30 bp, Artificial Sequence
  Synthetic oligonucleotide
agcaattcctcagcaaaaataatgagtgtg

SEQ ID NO: 257692 - DNA, 30 bp, Artificial Sequence
  Synthetic oligonucleotide
gtgttgaactcgttggcccccggtagtgtg

SEQ ID NO: 257693 - DNA, 30 bp, Artificial Sequence
  Synthetic oligonucleotide
gaaacaaactacttactacagtgtagtgtg

SEQ ID NO: 257694 - DNA, 30 bp, Artificial Sequence
  Synthetic oligonucleotide
agctctcgtcacgtaggctccgaacgtgtg

SEQ ID NO: 257695 - DNA, 30 bp, Artificial Sequence
  Synthetic oligonucleotide
attaaaatggcagtgagtgtgttacgtgtg

SEQ ID NO: 257696 - DNA, 30 bp, Artificial Sequence
  Synthetic oligonucleotide
ccactgaagcgatcactgggagcccgtgtg

SEQ ID NO: 257697 - DNA, 30 bp, Artificial Sequence
  Synthetic oligonucleotide
tcggtgatattcgcggttgactcccgtgtg

SEQ ID NO: 257698 - DNA, 30 bp, Artificial Sequence
  Synthetic oligonucleotide
ctcaaagttgattaaccaaacgtccgtgtg

SEQ ID NO: 257699 - DNA, 30 bp, Artificial Sequence
  Synthetic oligonucleotide
gcaaagacatattcgatgtcggtgcgtgtg

SEQ ID NO: 257700 - DNA, 30 bp, Artificial Sequence
  Synthetic oligonucleotide
cagcttgatttcctcagtcagtatcgtgtg

SEQ ID NO: 257701 - DNA, 30 bp, Artificial Sequence
  Synthetic oligonucleotide
gtcttcaaagaaggacaactcttcggtgtg

SEQ ID NO: 257702 - DNA, 30 bp, Artificial Sequence
  Synthetic oligonucleotide
actagtagcatccacctgaagagtggtgtg

SEQ ID NO: 257703 - DNA, 30 bp, Artificial Sequence
  Synthetic oligonucleotide
tctgaagaagagagcttgtaaaaatgtgtg

SEQ ID NO: 257704 - DNA, 30 bp, Artificial Sequence
  Synthetic oligonucleotide
tactgggctcgcgacagcaattactgtgtg

SEQ ID NO: 257705 - DNA, 30 bp, Artificial Sequence
  Synthetic oligonucleotide
cgatgcagtttctaagtaaagacgtgtgtg

SEQ ID NO: 257706 - DNA, 30 bp, Artificial Sequence
  Synthetic oligonucleotide
cccttcaacgcacaataagagtcgtgtgtg

SEQ ID NO: 257707 - DNA, 30 bp, Artificial Sequence
  Synthetic oligonucleotide
tcatgaggcccttctttaacactttgtgtg

SEQ ID NO: 257708 - DNA, 30 bp, Artificial Sequence
  Synthetic oligonucleotide
aaatggaaagcatcatcgggcttttgtgtg

SEQ ID NO: 257709 - DNA, 30 bp, Artificial Sequence
  Synthetic oligonucleotide
cataattatgataagtcacgcgaaattgtg

SEQ ID NO: 257710 - DNA, 30 bp, Artificial Sequence
  Synthetic oligonucleotide
acggacggtcgaggctggaatacaattgtg

SEQ ID NO: 257711 - DNA, 30 bp, Artificial Sequence
  Synthetic oligonucleotide
gtcactgatcattgttaatccttcattgtg

SEQ ID NO: 257712 - DNA, 30 bp, Artificial Sequence
  Synthetic oligonucleotide
acagtaaattcttgacatccaccgattgtg

SEQ ID NO: 257713 - DNA, 30 bp, Artificial Sequence
  Synthetic oligonucleotide
tacggcgcgagtggcagatcttcgattgtg

SEQ ID NO: 257714 - DNA, 30 bp, Artificial Sequence
  Synthetic oligonucleotide
gtatgcggttggtactggcaatggattgtg

SEQ ID NO: 257715 - DNA, 30 bp, Artificial Sequence
  Synthetic oligonucleotide
gtcgtaggccggcatgtctgggttattgtg

SEQ ID NO: 257716 - DNA, 30 bp, Artificial Sequence
  Synthetic oligonucleotide
aatcaacaaagccctttgggatcacttgtg

SEQ ID NO: 257717 - DNA, 30 bp, Artificial Sequence
  Synthetic oligonucleotide
gtgcgatcttgtttatcacaagggcttgtg

SEQ ID NO: 257718 - DNA, 30 bp, Artificial Sequence
  Synthetic oligonucleotide
atgtggtgtaggatatatggccatcttgtg

SEQ ID NO: 257719 - DNA, 30 bp, Artificial Sequence
  Synthetic oligonucleotide
agagcggatggccaagattattgtcttgtg

SEQ ID NO: 257720 - DNA, 30 bp, Artificial Sequence
  Synthetic oligonucleotide
gcgacatgggtatgatttccatttcttgtg

SEQ ID NO: 257721 - DNA, 30 bp, Artificial Sequence
  Synthetic oligonucleotide
aacacgtaatagtctattgaacgagttgtg

SEQ ID NO: 257722 - DNA, 30 bp, Artificial Sequence
  Synthetic oligonucleotide
gttagtgaaaccgtcacccatctagttgtg

SEQ ID NO: 257723 - DNA, 30 bp, Artificial Sequence
  Synthetic oligonucleotide
aaaaaacctatccaagtagatctcgttgtg

SEQ ID NO: 257724 - DNA, 30 bp, Artificial Sequence
  Synthetic oligonucleotide
tagggctaagtaaaatattatagggttgtg

SEQ ID NO: 257725 - DNA, 30 bp, Artificial Sequence
  Synthetic oligonucleotide
accaggttaacacttgtatgttttgttgtg

SEQ ID NO: 257726 - DNA, 30 bp, Artificial Sequence
  Synthetic oligonucleotide
ccggtggtcgaagttcacaactaatttgtg

SEQ ID NO: 257727 - DNA, 30 bp, Artificial Sequence
  Synthetic oligonucleotide
gcggtagcgacatcttacattatatttgtg

SEQ ID NO: 257728 - DNA, 30 bp, Artificial Sequence
  Synthetic oligonucleotide
tatcgggtaacatcgtggatccgctttgtg

SEQ ID NO: 257729 - DNA, 30 bp, Artificial Sequence
  Synthetic oligonucleotide
tagcgagacgcaatcgatttaaagtttgtg

SEQ ID NO: 257730 - DNA, 30 bp, Artificial Sequence
  Synthetic oligonucleotide
ggtgctttgccaaggctattggagtttgtg

SEQ ID NO: 257731 - DNA, 30 bp, Artificial Sequence
  Synthetic oligonucleotide
ttcacataggcatatcatgtgttgtttgtg

SEQ ID NO: 257732 - DNA, 30 bp, Artificial Sequence
  Synthetic oligonucleotide
aagtgaatcggcatcacaacgcattttgtg

SEQ ID NO: 257733 - DNA, 30 bp, Artificial Sequence
  Synthetic oligonucleotide
caaagcatatgtaagtggcgtacttttgtg

SEQ ID NO: 257734 - DNA, 30 bp, Artificial Sequence
  Synthetic oligonucleotide
agcttctattagttcgagatgtcttttgtg

SEQ ID NO: 257735 - DNA, 30 bp, Artificial Sequence
  Synthetic oligonucleotide
cgtgctgattgaaaaatcctcaccaaattg

SEQ ID NO: 257736 - DNA, 30 bp, Artificial Sequence
  Synthetic oligonucleotide
actttagatgtgcttcgttcaaagaaattg

SEQ ID NO: 257737 - DNA, 30 bp, Artificial Sequence
  Synthetic oligonucleotide
gaaccttatggccaaagatggacgaaattg

SEQ ID NO: 257738 - DNA, 30 bp, Artificial Sequence
  Synthetic oligonucleotide
aagtaggagatggcgcctgccgggaaattg

SEQ ID NO: 257739 - DNA, 30 bp, Artificial Sequence
  Synthetic oligonucleotide
tcaaagatcccgcaagcgattgtgaaattg

SEQ ID NO: 257740 - DNA, 30 bp, Artificial Sequence
  Synthetic oligonucleotide
cagcagcgtcgcccgtccccctgtaaattg

SEQ ID NO: 257741 - DNA, 30 bp, Artificial Sequence
  Synthetic oligonucleotide
cggcatcgtctagatgctaagtcacaattg

SEQ ID NO: 257742 - DNA, 30 bp, Artificial Sequence
  Synthetic oligonucleotide
atgagcaggcacatacgacagcctcaattg

SEQ ID NO: 257743 - DNA, 30 bp, Artificial Sequence
  Synthetic oligonucleotide
tgctgagatcacgccgtagggcccgaattg

SEQ ID NO: 257744 - DNA, 30 bp, Artificial Sequence
  Synthetic oligonucleotide
aaagtataaactttgcgactagccgaattg

SEQ ID NO: 257745 - DNA, 30 bp, Artificial Sequence
  Synthetic oligonucleotide
aaacgctttcattttccaagtagcgaattg

SEQ ID NO: 257746 - DNA, 30 bp, Artificial Sequence
  Synthetic oligonucleotide
ggtggatgtatgttcaagtcacgcgaattg

SEQ ID NO: 257747 - DNA, 30 bp, Artificial Sequence
  Synthetic oligonucleotide
ctaatatccttggaactggatttcgaattg

SEQ ID NO: 257748 - DNA, 30 bp, Artificial Sequence
  Synthetic oligonucleotide
atagtgaaatggcggccatgatgtgaattg

SEQ ID NO: 257749 - DNA, 30 bp, Artificial Sequence
  Synthetic oligonucleotide
gcagcggaagtaattgcatgcgaataattg

SEQ ID NO: 257750 - DNA, 30 bp, Artificial Sequence
  Synthetic oligonucleotide
ctgcatgctcagacataaaaagtataattg

SEQ ID NO: 257751 - DNA, 30 bp, Artificial Sequence
  Synthetic oligonucleotide
cagcacgtcatgcatattgcggtataattg

SEQ ID NO: 257752 - DNA, 27 bp, Artificial Sequence
  Synthetic oligonucleotide
catatgaatgtattgtgaatctaattg

SEQ ID NO: 257753 - DNA, 30 bp, Artificial Sequence
  Synthetic oligonucleotide
ctggggacagaccatcgcgcagtctaattg

SEQ ID NO: 257754 - DNA, 30 bp, Artificial Sequence
  Synthetic oligonucleotide
aaaagacattgcatttttagctagtaattg

SEQ ID NO: 257755 - DNA, 30 bp, Artificial Sequence
  Synthetic oligonucleotide
cagaggactgttattagtgggttgtaattg

SEQ ID NO: 257756 - DNA, 30 bp, Artificial Sequence
  Synthetic oligonucleotide
tgtgcccaggccgttgaacccacaacattg

SEQ ID NO: 257757 - DNA, 30 bp, Artificial Sequence
  Synthetic oligonucleotide
acttgcggacggaatacctctcacacattg

SEQ ID NO: 257758 - DNA, 30 bp, Artificial Sequence
  Synthetic oligonucleotide
aggaaaggtgaagcatcgtcaaccacattg

SEQ ID NO: 257759 - DNA, 30 bp, Artificial Sequence
  Synthetic oligonucleotide
ttttgttgtacctaagtggatgctacattg

SEQ ID NO: 257760 - DNA, 30 bp, Artificial Sequence
  Synthetic oligonucleotide
cgtgaaatggggggtggtaccaccccattg

SEQ ID NO: 257761 - DNA, 30 bp, Artificial Sequence
  Synthetic oligonucleotide
gccggagctgcgacctattcgaccccattg

SEQ ID NO: 257762 - DNA, 30 bp, Artificial Sequence
  Synthetic oligonucleotide
tcctttagaaaatgtcgtcaagggccattg

SEQ ID NO: 257763 - DNA, 30 bp, Artificial Sequence
  Synthetic oligonucleotide
actgctgaggtaatgttcgcttggccattg

SEQ ID NO: 257764 - DNA, 30 bp, Artificial Sequence
  Synthetic oligonucleotide
gttttgagaagtgctgaacgttctccattg

SEQ ID NO: 257765 - DNA, 30 bp, Artificial Sequence
  Synthetic oligonucleotide
atactagatatcagtacgactggtccattg

SEQ ID NO: 257766 - DNA, 30 bp, Artificial Sequence
  Synthetic oligonucleotide
cagtagacgatttaagacgcctgtccattg

SEQ ID NO: 257767 - DNA, 30 bp, Artificial Sequence
  Synthetic oligonucleotide
aaacgtgacttggttgttagcatagcattg

SEQ ID NO: 257768 - DNA, 30 bp, Artificial Sequence
  Synthetic oligonucleotide
gaagaatatattctgggtatttaggcattg

SEQ ID NO: 257769 - DNA, 30 bp, Artificial Sequence
  Synthetic oligonucleotide
ccagccacgatgacttaatacagggcattg

SEQ ID NO: 257770 - DNA, 30 bp, Artificial Sequence
  Synthetic oligonucleotide
gagtggtaatgaggctatacccatgcattg

SEQ ID NO: 257771 - DNA, 30 bp, Artificial Sequence
  Synthetic oligonucleotide
aacaggagcttaacaaagtatctatcattg

SEQ ID NO: 257772 - DNA, 30 bp, Artificial Sequence
  Synthetic oligonucleotide
ctggggcctgcgtacgcaacgccctcattg

SEQ ID NO: 257773 - DNA, 30 bp, Artificial Sequence
  Synthetic oligonucleotide
tggtgtcgaagcagatcccccgggtcattg

SEQ ID NO: 257774 - DNA, 30 bp, Artificial Sequence
  Synthetic oligonucleotide
ggataaaaatccgtagtctcggggtcattg

SEQ ID NO: 257775 - DNA, 30 bp, Artificial Sequence
  Synthetic oligonucleotide
tgatccttagtataaagtcgatgttcattg

SEQ ID NO: 257776 - DNA, 30 bp, Artificial Sequence
  Synthetic oligonucleotide
tagtttatgtgggataaatagataagattg

SEQ ID NO: 257777 - DNA, 30 bp, Artificial Sequence
  Synthetic oligonucleotide
gcgtggccttcttacacgttaatgagattg

SEQ ID NO: 257778 - DNA, 30 bp, Artificial Sequence
  Synthetic oligonucleotide
agccgtagtcgcaaggatgccaatagattg

SEQ ID NO: 257779 - DNA, 30 bp, Artificial Sequence
  Synthetic oligonucleotide
ggtaaattcggggagatatcgcaacgattg

SEQ ID NO: 257780 - DNA, 30 bp, Artificial Sequence
  Synthetic oligonucleotide
ggatgcgttcggcatacttgacaccgattg

SEQ ID NO: 257781 - DNA, 30 bp, Artificial Sequence
  Synthetic oligonucleotide
gccggtagtatacccattgtggcccgattg

SEQ ID NO: 257782 - DNA, 30 bp, Artificial Sequence
  Synthetic oligonucleotide
gttaagattgggaccatagtatgccgattg

SEQ ID NO: 257783 - DNA, 30 bp, Artificial Sequence
  Synthetic oligonucleotide
gctctcgccaaagcgataaggtagcgattg

SEQ ID NO: 257784 - DNA, 30 bp, Artificial Sequence
  Synthetic oligonucleotide
tagatttgtaacgaaatgattcggcgattg

SEQ ID NO: 257785 - DNA, 30 bp, Artificial Sequence
  Synthetic oligonucleotide
aacggtgtattacatctttattggcgattg

SEQ ID NO: 257786 - DNA, 30 bp, Artificial Sequence
  Synthetic oligonucleotide
ccgggaatattaatagttgtcgctcgattg

SEQ ID NO: 257787 - DNA, 30 bp, Artificial Sequence
  Synthetic oligonucleotide
ccaaggccggctacgcgtccggttcgattg

SEQ ID NO: 257788 - DNA, 30 bp, Artificial Sequence
  Synthetic oligonucleotide
aaatggagaaccgagaggaaatttcgattg

SEQ ID NO: 257789 - DNA, 30 bp, Artificial Sequence
  Synthetic oligonucleotide
agcgcgtacttatatgtagcaagcggattg

SEQ ID NO: 257790 - DNA, 30 bp, Artificial Sequence
  Synthetic oligonucleotide
ataaaggccgtagaggccagatttggattg

SEQ ID NO: 257791 - DNA, 30 bp, Artificial Sequence
  Synthetic oligonucleotide
ttcgcacctgtaaccagttactttggattg

SEQ ID NO: 257792 - DNA, 30 bp, Artificial Sequence
  Synthetic oligonucleotide
acggacgcggtctttcgtcagaaatgattg

SEQ ID NO: 257793 - DNA, 30 bp, Artificial Sequence
  Synthetic oligonucleotide
agactagtgatgtaatcaaatcactgattg

SEQ ID NO: 257794 - DNA, 30 bp, Artificial Sequence
  Synthetic oligonucleotide
atatctacaaaatggcacctaagctgattg

SEQ ID NO: 257795 - DNA, 30 bp, Artificial Sequence
  Synthetic oligonucleotide
tgacaggctaagcagacaaaaccgtgattg

SEQ ID NO: 257796 - DNA, 30 bp, Artificial Sequence
  Synthetic oligonucleotide
aagccgattggaactttcaattcgtgattg

SEQ ID NO: 257797 - DNA, 30 bp, Artificial Sequence
  Synthetic oligonucleotide
tcacgcctatcgattatcgtgcggtgattg

SEQ ID NO: 257798 - DNA, 30 bp, Artificial Sequence
  Synthetic oligonucleotide
agcttttaatctattggacaggtgtgattg

SEQ ID NO: 257799 - DNA, 30 bp, Artificial Sequence
  Synthetic oligonucleotide
atgaaggcaatcagaccgtaaaattgattg

SEQ ID NO: 257800 - DNA, 30 bp, Artificial Sequence
  Synthetic oligonucleotide
tactttgggagacgggttggtgcaatattg

SEQ ID NO: 257801 - DNA, 30 bp, Artificial Sequence
  Synthetic oligonucleotide
gcttgccgccactgtaaactggtcatattg

SEQ ID NO: 257802 - DNA, 30 bp, Artificial Sequence
  Synthetic oligonucleotide
ttttaggggccgcggtacgccgcgatattg

SEQ ID NO: 257803 - DNA, 31 bp, Artificial Sequence
  Synthetic oligonucleotide
ttcgcctgaggctaaagattgtcttatattg

SEQ ID NO: 257804 - DNA, 30 bp, Artificial Sequence
  Synthetic oligonucleotide
caagactctcgtgccgtctatatactattg

SEQ ID NO: 257805 - DNA, 30 bp, Artificial Sequence
  Synthetic oligonucleotide
cacgttagttttttgccactcaccctattg

SEQ ID NO: 257806 - DNA, 30 bp, Artificial Sequence
  Synthetic oligonucleotide
gtcaatagtgtatagaggagcgtgctattg

SEQ ID NO: 257807 - DNA, 30 bp, Artificial Sequence
  Synthetic oligonucleotide
aagagaaaactcttacttgtcttgctattg

SEQ ID NO: 257808 - DNA, 30 bp, Artificial Sequence
  Synthetic oligonucleotide
tctcgaagagatcaggacaagtctctattg

SEQ ID NO: 257809 - DNA, 30 bp, Artificial Sequence
  Synthetic oligonucleotide
ctgcagattgggaatggttagcacgtattg

SEQ ID NO: 257810 - DNA, 30 bp, Artificial Sequence
  Synthetic oligonucleotide
tagaagtaaatgctattctgctatgtattg

SEQ ID NO: 257811 - DNA, 30 bp, Artificial Sequence
  Synthetic oligonucleotide
ccgacacaagacattcgtgttgctgtattg

SEQ ID NO: 257812 - DNA, 30 bp, Artificial Sequence
  Synthetic oligonucleotide
acaacccggagggtggcggtatctgtattg

SEQ ID NO: 257813 - DNA, 30 bp, Artificial Sequence
  Synthetic oligonucleotide
ccgagtttaatgaaacccctgagtgtattg

SEQ ID NO: 257814 - DNA, 30 bp, Artificial Sequence
  Synthetic oligonucleotide
gtgtatacggagaaacggcttagtgtattg

SEQ ID NO: 257815 - DNA, 30 bp, Artificial Sequence
  Synthetic oligonucleotide
tttacagtcaccgcaaggccccaattattg

SEQ ID NO: 257816 - DNA, 30 bp, Artificial Sequence
  Synthetic oligonucleotide
ctttggcgacgaacagtccaggaattattg

SEQ ID NO: 257817 - DNA, 30 bp, Artificial Sequence
  Synthetic oligonucleotide
gcgtaactatggggacaaggcagattattg

SEQ ID NO: 257818 - DNA, 30 bp, Artificial Sequence
  Synthetic oligonucleotide
ttcaccttggtaagaggaacagccttattg

SEQ ID NO: 257819 - DNA, 30 bp, Artificial Sequence
  Synthetic oligonucleotide
gtaactgacttaacacggaaaaagttattg

SEQ ID NO: 257820 - DNA, 30 bp, Artificial Sequence
  Synthetic oligonucleotide
actcataagcctcttcaccgtcgaaacttg

SEQ ID NO: 257821 - DNA, 30 bp, Artificial Sequence
  Synthetic oligonucleotide
atgtaaataacttgggacaaaggaaacttg

SEQ ID NO: 257822 - DNA, 30 bp, Artificial Sequence
  Synthetic oligonucleotide
ggattggttgacaccgcatttaacaacttg

SEQ ID NO: 257823 - DNA, 30 bp, Artificial Sequence
  Synthetic oligonucleotide
cgatgtagtacctgcactgtatagaacttg

SEQ ID NO: 257824 - DNA, 30 bp, Artificial Sequence
  Synthetic oligonucleotide
gtagtcttaagaaagttcggacaccacttg

SEQ ID NO: 257825 - DNA, 30 bp, Artificial Sequence
  Synthetic oligonucleotide
gagtacggcgtcccacaaacagaccacttg

SEQ ID NO: 257826 - DNA, 30 bp, Artificial Sequence
  Synthetic oligonucleotide
gggtagcggcggatcgggatcaggcacttg

SEQ ID NO: 257827 - DNA, 30 bp, Artificial Sequence
  Synthetic oligonucleotide
aatcgctcgagcctgtattcgctagacttg

SEQ ID NO: 257828 - DNA, 30 bp, Artificial Sequence
  Synthetic oligonucleotide
aaggatgtctatagacagctggtagacttg

SEQ ID NO: 257829 - DNA, 30 bp, Artificial Sequence
  Synthetic oligonucleotide
actacactattacagtgagagttcgacttg

SEQ ID NO: 257830 - DNA, 30 bp, Artificial Sequence
  Synthetic oligonucleotide
tccatcatcgttaaaccacatatatacttg

SEQ ID NO: 257831 - DNA, 30 bp, Artificial Sequence
  Synthetic oligonucleotide
tgttcatccgggagctcatacgagtacttg

SEQ ID NO: 257832 - DNA, 30 bp, Artificial Sequence
  Synthetic oligonucleotide
gacgacgtatccttgattcaagtgtacttg

SEQ ID NO: 257833 - DNA, 30 bp, Artificial Sequence
  Synthetic oligonucleotide
aagagtcagcctttctatcgaagaaccttg

SEQ ID NO: 257834 - DNA, 30 bp, Artificial Sequence
  Synthetic oligonucleotide
gcgccacgatagcggaccgcgtagaccttg

SEQ ID NO: 257835 - DNA, 30 bp, Artificial Sequence
  Synthetic oligonucleotide
gttgggaatcgcgctaagacattgaccttg

SEQ ID NO: 257836 - DNA, 30 bp, Artificial Sequence
  Synthetic oligonucleotide
ggtactaattatttggttattgttaccttg

SEQ ID NO: 257837 - DNA, 30 bp, Artificial Sequence
  Synthetic oligonucleotide
gcaactggacgcattagggaagaacccttg

SEQ ID NO: 257838 - DNA, 30 bp, Artificial Sequence
  Synthetic oligonucleotide
ttctgggatagaattatagagtaccccttg

SEQ ID NO: 257839 - DNA, 30 bp, Artificial Sequence
  Synthetic oligonucleotide
ccaggcgtggggtgtcttgcctgccccttg

SEQ ID NO: 257840 - DNA, 30 bp, Artificial Sequence
  Synthetic oligonucleotide
gaatatatgcaacaaaaatgtattcccttg

SEQ ID NO: 257841 - DNA, 30 bp, Artificial Sequence
  Synthetic oligonucleotide
cccgtgaccgagtacacatagcaagccttg

SEQ ID NO: 257842 - DNA, 30 bp, Artificial Sequence
  Synthetic oligonucleotide
tcgggagcagccgaagtcgaagtagccttg

SEQ ID NO: 257843 - DNA, 30 bp, Artificial Sequence
  Synthetic oligonucleotide
ctcccatcgtctgagtcttcggccgccttg

SEQ ID NO: 257844 - DNA, 30 bp, Artificial Sequence
  Synthetic oligonucleotide
tgtagaccattccgcccatatgttgccttg

SEQ ID NO: 257845 - DNA, 30 bp, Artificial Sequence
  Synthetic oligonucleotide
aacgtcgtggatgtaggtaccagctccttg

SEQ ID NO: 257846 - DNA, 30 bp, Artificial Sequence
  Synthetic oligonucleotide
actccgaagaacatttttatttcttccttg

SEQ ID NO: 257847 - DNA, 30 bp, Artificial Sequence
  Synthetic oligonucleotide
aagcgcctagacggttttgatcgttccttg

SEQ ID NO: 257848 - DNA, 30 bp, Artificial Sequence
  Synthetic oligonucleotide
acttgtgcaagtcccaaccccttaagcttg

SEQ ID NO: 257849 - DNA, 30 bp, Artificial Sequence
  Synthetic oligonucleotide
gaacaagatggtatccacagactcagcttg

SEQ ID NO: 257850 - DNA, 30 bp, Artificial Sequence
  Synthetic oligonucleotide
tgatggtaagatcccgatgcattgagcttg

SEQ ID NO: 257851 - DNA, 30 bp, Artificial Sequence
  Synthetic oligonucleotide
acacctgagaccactttcggacaacgcttg

SEQ ID NO: 257852 - DNA, 30 bp, Artificial Sequence
  Synthetic oligonucleotide
gcacggcttccctgaccacgcatacgcttg

SEQ ID NO: 257853 - DNA, 30 bp, Artificial Sequence
  Synthetic oligonucleotide
ggctggcggaaacacggtccgcatcgcttg

SEQ ID NO: 257854 - DNA, 30 bp, Artificial Sequence
  Synthetic oligonucleotide
ccactggctcatacaacttgacctcgcttg

SEQ ID NO: 257855 - DNA, 30 bp, Artificial Sequence
  Synthetic oligonucleotide
ggtagtcctccggatacctacgctcgcttg

SEQ ID NO: 257856 - DNA, 30 bp, Artificial Sequence
  Synthetic oligonucleotide
ggcaccgttcctctacgtgttttaggcttg

SEQ ID NO: 257857 - DNA, 30 bp, Artificial Sequence
  Synthetic oligonucleotide
tggacaagtattatttttgtgatcggcttg

SEQ ID NO: 257858 - DNA, 30 bp, Artificial Sequence
  Synthetic oligonucleotide
atagggtgaattgctactctacagggcttg

SEQ ID NO: 257859 - DNA, 30 bp, Artificial Sequence
  Synthetic oligonucleotide
gtgtaactaagggagaaggcgagtggcttg

SEQ ID NO: 257860 - DNA, 30 bp, Artificial Sequence
  Synthetic oligonucleotide
tttgagacggttcttactggcgaatgcttg

SEQ ID NO: 257861 - DNA, 30 bp, Artificial Sequence
  Synthetic oligonucleotide
gttatattggcttggtatcttcagtgcttg

SEQ ID NO: 257862 - DNA, 30 bp, Artificial Sequence
  Synthetic oligonucleotide
ctgggttgcgccgaccgaggactttgcttg

SEQ ID NO: 257863 - DNA, 30 bp, Artificial Sequence
  Synthetic oligonucleotide
cgccagacttgtggggggccaccaatcttg

SEQ ID NO: 257864 - DNA, 30 bp, Artificial Sequence
  Synthetic oligonucleotide
ttatatggattccgataaatgatgatcttg

SEQ ID NO: 257865 - DNA, 30 bp, Artificial Sequence
  Synthetic oligonucleotide
ctgaataggtagtattcaagattgatcttg

SEQ ID NO: 257866 - DNA, 30 bp, Artificial Sequence
  Synthetic oligonucleotide
tcgcagctaaattgggggactggtatcttg

SEQ ID NO: 257867 - DNA, 30 bp, Artificial Sequence
  Synthetic oligonucleotide
atcgcacacccggaacctgtaactctcttg

SEQ ID NO: 257868 - DNA, 30 bp, Artificial Sequence
  Synthetic oligonucleotide
tactttcaacacgccggaatgtaagtcttg

SEQ ID NO: 257869 - DNA, 30 bp, Artificial Sequence
  Synthetic oligonucleotide
tagaaacgagatcacctcatagtagtcttg

SEQ ID NO: 257870 - DNA, 30 bp, Artificial Sequence
  Synthetic oligonucleotide
ctttcaggtcacaaccttccgtccgtcttg

SEQ ID NO: 257871 - DNA, 30 bp, Artificial Sequence
  Synthetic oligonucleotide
cagtggagcagtccgggaagataggtcttg

SEQ ID NO: 257872 - DNA, 30 bp, Artificial Sequence
  Synthetic oligonucleotide
tttcgttcatgtaagggtgatgcggtcttg

SEQ ID NO: 257873 - DNA, 30 bp, Artificial Sequence
  Synthetic oligonucleotide
ctcaaaggcattataggccactgggtcttg

SEQ ID NO: 257874 - DNA, 30 bp, Artificial Sequence
  Synthetic oligonucleotide
ctcatgtgcatagatgcatttagtgtcttg

SEQ ID NO: 257875 - DNA, 30 bp, Artificial Sequence
  Synthetic oligonucleotide
gatatgtgtagccatttctggcgtgtcttg

SEQ ID NO: 257876 - DNA, 30 bp, Artificial Sequence
  Synthetic oligonucleotide
agcgcaaagacgcgcgaccaatgtgtcttg

SEQ ID NO: 257877 - DNA, 30 bp, Artificial Sequence
  Synthetic oligonucleotide
gtatacgttcctggacagtagcaattcttg

SEQ ID NO: 257878 - DNA, 30 bp, Artificial Sequence
  Synthetic oligonucleotide
acgccttatcaacagaagagatgattcttg

SEQ ID NO: 257879 - DNA, 30 bp, Artificial Sequence
  Synthetic oligonucleotide
gtgactgcttggttgtacaatgtgttcttg

SEQ ID NO: 257880 - DNA, 30 bp, Artificial Sequence
  Synthetic oligonucleotide
acctgagtctcatagttagtggaaaagttg

SEQ ID NO: 257881 - DNA, 30 bp, Artificial Sequence
  Synthetic oligonucleotide
aggagtgcttcccatgcggctgacaagttg

SEQ ID NO: 257882 - DNA, 30 bp, Artificial Sequence
  Synthetic oligonucleotide
tattaacgtgcgatgagtactttcaagttg

SEQ ID NO: 257883 - DNA, 30 bp, Artificial Sequence
  Synthetic oligonucleotide
gctggtcagcgttgcgacgtgattaagttg

SEQ ID NO: 257884 - DNA, 30 bp, Artificial Sequence
  Synthetic oligonucleotide
agattctggaatcattatgttattaagttg

SEQ ID NO: 257885 - DNA, 30 bp, Artificial Sequence
  Synthetic oligonucleotide
gatcaacgaagattttctggctcgcagttg

SEQ ID NO: 257886 - DNA, 30 bp, Artificial Sequence
  Synthetic oligonucleotide
tgttttgggttgagcggacaaaggcagttg

SEQ ID NO: 257887 - DNA, 30 bp, Artificial Sequence
  Synthetic oligonucleotide
acagattgggtcgcttttgaaaatcagttg

SEQ ID NO: 257888 - DNA, 30 bp, Artificial Sequence
  Synthetic oligonucleotide
gcttagacagcctgcgtcgcgtctcagttg

SEQ ID NO: 257889 - DNA, 30 bp, Artificial Sequence
  Synthetic oligonucleotide
aattatacctttacgggattacaagagttg

SEQ ID NO: 257890 - DNA, 30 bp, Artificial Sequence
  Synthetic oligonucleotide
tggcatcggtcgcaatgcggggtagagttg

SEQ ID NO: 257891 - DNA, 30 bp, Artificial Sequence
  Synthetic oligonucleotide
tttggcgcattataatggacaagcgagttg

SEQ ID NO: 257892 - DNA, 30 bp, Artificial Sequence
  Synthetic oligonucleotide
gggcaactggacctaatggggggcgagttg

SEQ ID NO: 257893 - DNA, 30 bp, Artificial Sequence
  Synthetic oligonucleotide
gaggaggtgaggccggaagcactggagttg

SEQ ID NO: 257894 - DNA, 30 bp, Artificial Sequence
  Synthetic oligonucleotide
aaagagtcgggagcggctaattctgagttg

SEQ ID NO: 257895 - DNA, 30 bp, Artificial Sequence
  Synthetic oligonucleotide
cataggtcctagagcaaatacaaatagttg

SEQ ID NO: 257896 - DNA, 30 bp, Artificial Sequence
  Synthetic oligonucleotide
atcattaccgcgtacatcaccctatagttg

SEQ ID NO: 257897 - DNA, 30 bp, Artificial Sequence
  Synthetic oligonucleotide
tccttcatgtacgattcgtctgactagttg

SEQ ID NO: 257898 - DNA, 30 bp, Artificial Sequence
  Synthetic oligonucleotide
aaacctgcgcggcaatgctagccctagttg

SEQ ID NO: 257899 - DNA, 30 bp, Artificial Sequence
  Synthetic oligonucleotide
taccgacatgaagccacgcgcaggtagttg

SEQ ID NO: 257900 - DNA, 30 bp, Artificial Sequence
  Synthetic oligonucleotide
cggtttcacgtcgtgctcggcatgtagttg

SEQ ID NO: 257901 - DNA, 30 bp, Artificial Sequence
  Synthetic oligonucleotide
caccatccgcgcttcgactcaaattagttg

SEQ ID NO: 257902 - DNA, 30 bp, Artificial Sequence
  Synthetic oligonucleotide
aatagttatgtcggtaagcaaacttagttg

SEQ ID NO: 257903 - DNA, 30 bp, Artificial Sequence
  Synthetic oligonucleotide
cgatggaaacaacgtgtcgtacgttagttg

SEQ ID NO: 257904 - DNA, 31 bp, Artificial Sequence
  Synthetic oligonucleotide
catcgcacatacttagcaattttgcacgttg

SEQ ID NO: 257905 - DNA, 30 bp, Artificial Sequence
  Synthetic oligonucleotide
ggttttattcgatcattaacacgaccgttg

SEQ ID NO: 257906 - DNA, 30 bp, Artificial Sequence
  Synthetic oligonucleotide
acaccgtccaaactcagcacaggaccgttg

SEQ ID NO: 257907 - DNA, 30 bp, Artificial Sequence
  Synthetic oligonucleotide
aatagttcgggttacaatgatcgcccgttg

SEQ ID NO: 257908 - DNA, 30 bp, Artificial Sequence
  Synthetic oligonucleotide
ggttaaagtcatgatgccctattcccgttg

SEQ ID NO: 257909 - DNA, 32 bp, Artificial Sequence
  Synthetic oligonucleotide
tggtaaggagggtcaccgacgtcgcgccgttg

SEQ ID NO: 257910 - DNA, 30 bp, Artificial Sequence
  Synthetic oligonucleotide
gtcagtatgacgtcataccgttggccgttg

SEQ ID NO: 257911 - DNA, 30 bp, Artificial Sequence
  Synthetic oligonucleotide
cctggtcgagatccttcgggtcctccgttg

SEQ ID NO: 257912 - DNA, 30 bp, Artificial Sequence
  Synthetic oligonucleotide
tggcgccgaagctggccagactaagcgttg

SEQ ID NO: 257913 - DNA, 30 bp, Artificial Sequence
  Synthetic oligonucleotide
ctcgttcgaatgcagagccggcttgcgttg

SEQ ID NO: 257914 - DNA, 30 bp, Artificial Sequence
  Synthetic oligonucleotide
ttctcacctgaatttgactcgttatcgttg

SEQ ID NO: 257915 - DNA, 30 bp, Artificial Sequence
  Synthetic oligonucleotide
cttcgtggatgatttgggagttactcgttg

SEQ ID NO: 257916 - DNA, 30 bp, Artificial Sequence
  Synthetic oligonucleotide
atgcggtaggggctgtttgccacgtcgttg

SEQ ID NO: 257917 - DNA, 30 bp, Artificial Sequence
  Synthetic oligonucleotide
tacgaggtgcataccacgggtacttcgttg

SEQ ID NO: 257918 - DNA, 30 bp, Artificial Sequence
  Synthetic oligonucleotide
ttggctgaatttgagcacctacgttcgttg

SEQ ID NO: 257919 - DNA, 30 bp, Artificial Sequence
  Synthetic oligonucleotide
gagaataacttaggtgaattagtttcgttg

SEQ ID NO: 257920 - DNA, 30 bp, Artificial Sequence
  Synthetic oligonucleotide
atgttcagccgaaagtaaggaaacaggttg

SEQ ID NO: 257921 - DNA, 30 bp, Artificial Sequence
  Synthetic oligonucleotide
ttagatacgaaatgcgccttttacaggttg

SEQ ID NO: 257922 - DNA, 30 bp, Artificial Sequence
  Synthetic oligonucleotide
tcacagcaacagggcgtagcctctaggttg

SEQ ID NO: 257923 - DNA, 30 bp, Artificial Sequence
  Synthetic oligonucleotide
ttgagaccatccgacgtaagtccccggttg

SEQ ID NO: 257924 - DNA, 30 bp, Artificial Sequence
  Synthetic oligonucleotide
gattaatgggccgagaacggttctcggttg

SEQ ID NO: 257925 - DNA, 30 bp, Artificial Sequence
  Synthetic oligonucleotide
ccgcggctcgtctggtcaagtcgagggttg

SEQ ID NO: 257926 - DNA, 30 bp, Artificial Sequence
  Synthetic oligonucleotide
acggtgggtttcgagtactggggagggttg

SEQ ID NO: 257927 - DNA, 30 bp, Artificial Sequence
  Synthetic oligonucleotide
gcacgaaagtggattagaccacgcgggttg

SEQ ID NO: 257928 - DNA, 30 bp, Artificial Sequence
  Synthetic oligonucleotide
aaatctgaaccaatcgcttaactcgggttg

SEQ ID NO: 257929 - DNA, 30 bp, Artificial Sequence
  Synthetic oligonucleotide
ttgcgagacgcacatgcggatgcggggttg

SEQ ID NO: 257930 - DNA, 30 bp, Artificial Sequence
  Synthetic oligonucleotide
agtaccgtataacaagtactgagggggttg

SEQ ID NO: 257931 - DNA, 30 bp, Artificial Sequence
  Synthetic oligonucleotide
ttatcgatgttagcgtccataaatgggttg

SEQ ID NO: 257932 - DNA, 30 bp, Artificial Sequence
  Synthetic oligonucleotide
gattgggctgcgaaacgtgtaaatgggttg

SEQ ID NO: 257933 - DNA, 30 bp, Artificial Sequence
  Synthetic oligonucleotide
aggtaaaatcctgttaccgtttatgggttg

SEQ ID NO: 257934 - DNA, 30 bp, Artificial Sequence
  Synthetic oligonucleotide
gcaagttcatagaatactagcagtgggttg

SEQ ID NO: 257935 - DNA, 30 bp, Artificial Sequence
  Synthetic oligonucleotide
gtggggaaaagggttgtatatttatggttg

SEQ ID NO: 257936 - DNA, 30 bp, Artificial Sequence
  Synthetic oligonucleotide
tgccaaaaaaacgcagcgtcgcagtggttg

SEQ ID NO: 257937 - DNA, 30 bp, Artificial Sequence
  Synthetic oligonucleotide
gggttgatagttgtggcaagtcattggttg

SEQ ID NO: 257938 - DNA, 30 bp, Artificial Sequence
  Synthetic oligonucleotide
tttcgatgttgatgaacgagagattggttg

SEQ ID NO: 257939 - DNA, 30 bp, Artificial Sequence
  Synthetic oligonucleotide
ggcgccaactcacccatcgacctttggttg

SEQ ID NO: 257940 - DNA, 30 bp, Artificial Sequence
  Synthetic oligonucleotide
cgcatagatggacctacaggtcaaatgttg

SEQ ID NO: 257941 - DNA, 30 bp, Artificial Sequence
  Synthetic oligonucleotide
agggccttgaccgtctgcaggctaatgttg

SEQ ID NO: 257942 - DNA, 30 bp, Artificial Sequence
  Synthetic oligonucleotide
cctgaggtatcgatgttatttggcatgttg

SEQ ID NO: 257943 - DNA, 30 bp, Artificial Sequence
  Synthetic oligonucleotide
acgctttgaagttgtatgaacacgctgttg

SEQ ID NO: 257944 - DNA, 30 bp, Artificial Sequence
  Synthetic oligonucleotide
tgctttcgaggtccagcgaagtcgctgttg

SEQ ID NO: 257945 - DNA, 30 bp, Artificial Sequence
  Synthetic oligonucleotide
aacggggccgcggagagcatccttctgttg

SEQ ID NO: 257946 - DNA, 30 bp, Artificial Sequence
  Synthetic oligonucleotide
acatgctcgggggcttactactcagtgttg

SEQ ID NO: 257947 - DNA, 30 bp, Artificial Sequence
  Synthetic oligonucleotide
tacggatgtttcacgacggacctcgtgttg

SEQ ID NO: 257948 - DNA, 30 bp, Artificial Sequence
  Synthetic oligonucleotide
aagaaaagagcttcttggtaaggggtgttg

SEQ ID NO: 257949 - DNA, 30 bp, Artificial Sequence
  Synthetic oligonucleotide
ggtgattagaaccaccgttatttggtgttg

SEQ ID NO: 257950 - DNA, 30 bp, Artificial Sequence
  Synthetic oligonucleotide
catagactcagaaaggggttccgtgtgttg

SEQ ID NO: 257951 - DNA, 30 bp, Artificial Sequence
  Synthetic oligonucleotide
gccccgcttcaacatgaaatcgttgtgttg

SEQ ID NO: 257952 - DNA, 31 bp, Artificial Sequence
  Synthetic oligonucleotide
cacacagttaaacgttcgacagcaattgttg

SEQ ID NO: 257953 - DNA, 30 bp, Artificial Sequence
  Synthetic oligonucleotide
atatagtggttgttcgggtcatcattgttg

SEQ ID NO: 257954 - DNA, 30 bp, Artificial Sequence
  Synthetic oligonucleotide
cctaatgacgagaacatgctagagttgttg

SEQ ID NO: 257955 - DNA, 30 bp, Artificial Sequence
  Synthetic oligonucleotide
cgtcgggtgcacctgtcattctcgttgttg

SEQ ID NO: 257956 - DNA, 30 bp, Artificial Sequence
  Synthetic oligonucleotide
tcagctacatccgggcggctatatttgttg

SEQ ID NO: 257957 - DNA, 30 bp, Artificial Sequence
  Synthetic oligonucleotide
gcgtgcaaaacgcacactgcttttttgttg

SEQ ID NO: 257958 - DNA, 30 bp, Artificial Sequence
  Synthetic oligonucleotide
tggggactttagtcacgcttaacaaatttg

SEQ ID NO: 257959 - DNA, 30 bp, Artificial Sequence
  Synthetic oligonucleotide
atccggaaaagtaaatggccatcaaatttg

SEQ ID NO: 257960 - DNA, 30 bp, Artificial Sequence
  Synthetic oligonucleotide
ttattcagggaggtttatgtaggaaatttg

SEQ ID NO: 257961 - DNA, 30 bp, Artificial Sequence
  Synthetic oligonucleotide
aatagcgtggagcggaactgcggaaatttg

SEQ ID NO: 257962 - DNA, 30 bp, Artificial Sequence
  Synthetic oligonucleotide
tcgggaacgattcgtgcacgaataaatttg

SEQ ID NO: 257963 - DNA, 30 bp, Artificial Sequence
  Synthetic oligonucleotide
aggggtagactgtttgctaacagcaatttg

SEQ ID NO: 257964 - DNA, 30 bp, Artificial Sequence
  Synthetic oligonucleotide
ggggactgtgtaggtattacaggcaatttg

SEQ ID NO: 257965 - DNA, 30 bp, Artificial Sequence
  Synthetic oligonucleotide
accctggctgcaatcccggacgggaatttg

SEQ ID NO: 257966 - DNA, 30 bp, Artificial Sequence
  Synthetic oligonucleotide
tgaggcaacgaactcctcatagggcatttg

SEQ ID NO: 257967 - DNA, 30 bp, Artificial Sequence
  Synthetic oligonucleotide
tgggcggtttctcaaactccttgtcatttg

SEQ ID NO: 257968 - DNA, 30 bp, Artificial Sequence
  Synthetic oligonucleotide
cgcatcgaccaataccatttggttcatttg

SEQ ID NO: 257969 - DNA, 30 bp, Artificial Sequence
  Synthetic oligonucleotide
gttataaacgaggtgggtaggctagatttg

SEQ ID NO: 257970 - DNA, 30 bp, Artificial Sequence
  Synthetic oligonucleotide
ttataatgcaggtatcgtactgtagatttg

SEQ ID NO: 257971 - DNA, 30 bp, Artificial Sequence
  Synthetic oligonucleotide
caattaaaattaaatcgtgagtaggatttg

SEQ ID NO: 257972 - DNA, 30 bp, Artificial Sequence
  Synthetic oligonucleotide
tatgaggtgtgcgcgggtatctctgatttg

SEQ ID NO: 257973 - DNA, 30 bp, Artificial Sequence
  Synthetic oligonucleotide
ttggcctctccgttgattgacagtgatttg

SEQ ID NO: 257974 - DNA, 30 bp, Artificial Sequence
  Synthetic oligonucleotide
gatcgccgtgggttctaggcaaattatttg

SEQ ID NO: 257975 - DNA, 30 bp, Artificial Sequence
  Synthetic oligonucleotide
tcgttagccgaagcaatcccgggttatttg

SEQ ID NO: 257976 - DNA, 30 bp, Artificial Sequence
  Synthetic oligonucleotide
ccacccggagttccgcaaatcgtttatttg

SEQ ID NO: 257977 - DNA, 30 bp, Artificial Sequence
  Synthetic oligonucleotide
tgttaatagagtcctcttttctcaactttg

SEQ ID NO: 257978 - DNA, 30 bp, Artificial Sequence
  Synthetic oligonucleotide
ctaagacaattgtgtccagggtcaactttg

SEQ ID NO: 257979 - DNA, 30 bp, Artificial Sequence
  Synthetic oligonucleotide
atggagaaagacttgtatcataccactttg

SEQ ID NO: 257980 - DNA, 30 bp, Artificial Sequence
  Synthetic oligonucleotide
ctcttatcacgacaccgttgctcgactttg

SEQ ID NO: 257981 - DNA, 30 bp, Artificial Sequence
  Synthetic oligonucleotide
cggagttgacgccacaacggacggactttg

SEQ ID NO: 257982 - DNA, 30 bp, Artificial Sequence
  Synthetic oligonucleotide
tgcttgagttggactgaattaagtactttg

SEQ ID NO: 257983 - DNA, 30 bp, Artificial Sequence
  Synthetic oligonucleotide
cgttgcgacattgtgcaatatgttactttg

SEQ ID NO: 257984 - DNA, 30 bp, Artificial Sequence
  Synthetic oligonucleotide
agatatcgctagcattgataccgacctttg

SEQ ID NO: 257985 - DNA, 30 bp, Artificial Sequence
  Synthetic oligonucleotide
agaatctgtgtttccaaacaaacccctttg

SEQ ID NO: 257986 - DNA, 30 bp, Artificial Sequence
  Synthetic oligonucleotide
acattagttattgtccttgttggccctttg

SEQ ID NO: 257987 - DNA, 30 bp, Artificial Sequence
  Synthetic oligonucleotide
ccccagtcttgccaggctaatacgcctttg

SEQ ID NO: 257988 - DNA, 30 bp, Artificial Sequence
  Synthetic oligonucleotide
tatcgacactcagtccaggaggtgcctttg

SEQ ID NO: 257989 - DNA, 30 bp, Artificial Sequence
  Synthetic oligonucleotide
gtgtcttacctatactgcacagatcctttg

SEQ ID NO: 257990 - DNA, 30 bp, Artificial Sequence
  Synthetic oligonucleotide
atgagtgggttaaagataactactcctttg

SEQ ID NO: 257991 - DNA, 30 bp, Artificial Sequence
  Synthetic oligonucleotide
aggtaataatcaggtgattcagttcctttg

SEQ ID NO: 257992 - DNA, 30 bp, Artificial Sequence
  Synthetic oligonucleotide
aacctatgggctaacattaagttagctttg

SEQ ID NO: 257993 - DNA, 30 bp, Artificial Sequence
  Synthetic oligonucleotide
aggtcgtttaatttgtcacagcgggctttg

SEQ ID NO: 257994 - DNA, 30 bp, Artificial Sequence
  Synthetic oligonucleotide
acgggtgttgattatccagtggattctttg

SEQ ID NO: 257995 - DNA, 30 bp, Artificial Sequence
  Synthetic oligonucleotide
aggaagacgcccgtattcaagaacagtttg

SEQ ID NO: 257996 - DNA, 30 bp, Artificial Sequence
  Synthetic oligonucleotide
tgttacgggcatgtatgtgccggcagtttg

SEQ ID NO: 257997 - DNA, 30 bp, Artificial Sequence
  Synthetic oligonucleotide
ctgtgcagaaggggggaaacactcagtttg

SEQ ID NO: 257998 - DNA, 30 bp, Artificial Sequence
  Synthetic oligonucleotide
aaccgcgttttggggaatgatatgagtttg

SEQ ID NO: 257999 - DNA, 30 bp, Artificial Sequence
  Synthetic oligonucleotide
taaaagctatctgaccagatggctagtttg

SEQ ID NO: 258000 - DNA, 30 bp, Artificial Sequence
  Synthetic oligonucleotide
ggtgtctgctactgcgtgacctgacgtttg

SEQ ID NO: 258001 - DNA, 30 bp, Artificial Sequence
  Synthetic oligonucleotide
tgtagcgatcgcttagtcattctccgtttg

SEQ ID NO: 258002 - DNA, 30 bp, Artificial Sequence
  Synthetic oligonucleotide
gtccttgaagtaaacggtgcgtcgcgtttg

SEQ ID NO: 258003 - DNA, 30 bp, Artificial Sequence
  Synthetic oligonucleotide
acagcgcaatcagggatatgcttgcgtttg

SEQ ID NO: 258004 - DNA, 30 bp, Artificial Sequence
  Synthetic oligonucleotide
agcagagcccattgttactagcgtcgtttg

SEQ ID NO: 258005 - DNA, 30 bp, Artificial Sequence
  Synthetic oligonucleotide
atagaatggatttgccaacagggtcgtttg

SEQ ID NO: 258006 - DNA, 30 bp, Artificial Sequence
  Synthetic oligonucleotide
acggcctagtttccaagaaatatcggtttg

SEQ ID NO: 258007 - DNA, 30 bp, Artificial Sequence
  Synthetic oligonucleotide
acagtccatatcgatgtgcatacgggtttg

SEQ ID NO: 258008 - DNA, 30 bp, Artificial Sequence
  Synthetic oligonucleotide
cccttggtgcgtttagtacctccgggtttg

SEQ ID NO: 258009 - DNA, 30 bp, Artificial Sequence
  Synthetic oligonucleotide
attacgaaacatgatatccgtgggggtttg

SEQ ID NO: 258010 - DNA, 30 bp, Artificial Sequence
  Synthetic oligonucleotide
acagtttcgtgccgtcttgtcgaatgtttg

SEQ ID NO: 258011 - DNA, 30 bp, Artificial Sequence
  Synthetic oligonucleotide
ttcgagtgttaagcgaactaaggatgtttg

SEQ ID NO: 258012 - DNA, 30 bp, Artificial Sequence
  Synthetic oligonucleotide
tggatcgctcaaaacacatcgttatgtttg

SEQ ID NO: 258013 - DNA, 30 bp, Artificial Sequence
  Synthetic oligonucleotide
ggaatgtagaatcagctgagacgctgtttg

SEQ ID NO: 258014 - DNA, 30 bp, Artificial Sequence
  Synthetic oligonucleotide
gttcgacgcaaataagaacgcaagtgtttg

SEQ ID NO: 258015 - DNA, 30 bp, Artificial Sequence
  Synthetic oligonucleotide
cttgccggagggtgagtccggaagtgtttg

SEQ ID NO: 258016 - DNA, 30 bp, Artificial Sequence
  Synthetic oligonucleotide
tcgccgaattttcagacagcggtgtgtttg

SEQ ID NO: 258017 - DNA, 30 bp, Artificial Sequence
  Synthetic oligonucleotide
attgggttaatctcagtttatagttgtttg

SEQ ID NO: 258018 - DNA, 30 bp, Artificial Sequence
  Synthetic oligonucleotide
tggggacgccgtcgaagttagaaaattttg

SEQ ID NO: 258019 - DNA, 30 bp, Artificial Sequence
  Synthetic oligonucleotide
tgagggcattcaaccgacggacacattttg

SEQ ID NO: 258020 - DNA, 30 bp, Artificial Sequence
  Synthetic oligonucleotide
aaagaccgtaccctgatgtacgggattttg

SEQ ID NO: 258021 - DNA, 30 bp, Artificial Sequence
  Synthetic oligonucleotide
ccgtcccggttcggtattttggatattttg

SEQ ID NO: 258022 - DNA, 30 bp, Artificial Sequence
  Synthetic oligonucleotide
ggctcaatcgataagttagtaggtattttg

SEQ ID NO: 258023 - DNA, 30 bp, Artificial Sequence
  Synthetic oligonucleotide
aactcactacctgagattgtcaaccttttg

SEQ ID NO: 258024 - DNA, 30 bp, Artificial Sequence
  Synthetic oligonucleotide
tcctaacgaataccaagcgactaccttttg

SEQ ID NO: 258025 - DNA, 30 bp, Artificial Sequence
  Synthetic oligonucleotide
tgccggtagtattggcttactcagcttttg

SEQ ID NO: 258026 - DNA, 30 bp, Artificial Sequence
  Synthetic oligonucleotide
tggcgtttggtatccgatctcgctgttttg

SEQ ID NO: 258027 - DNA, 30 bp, Artificial Sequence
  Synthetic oligonucleotide
aatgcggtgcatgggaagggggttgttttg

SEQ ID NO: 258028 - DNA, 30 bp, Artificial Sequence
  Synthetic oligonucleotide
gtcagcaatgcatggaactcccaatttttg

SEQ ID NO: 258029 - DNA, 30 bp, Artificial Sequence
  Synthetic oligonucleotide
tagagtgggagccctaatagagaatttttg

SEQ ID NO: 258030 - DNA, 30 bp, Artificial Sequence
  Synthetic oligonucleotide
gtcggtcagatcacactataagtgtttttg

SEQ ID NO: 258031 - DNA, 29 bp, Artificial Sequence
  Synthetic oligonucleotide
tgcaagttcgaaatagaacctgttttttg

SEQ ID NO: 258032 - DNA, 30 bp, Artificial Sequence
  Synthetic oligonucleotide
gtacgggcacacgccccctggaaaaaaaat

SEQ ID NO: 258033 - DNA, 30 bp, Artificial Sequence
  Synthetic oligonucleotide
aggcgaggggtaagagtcgcccaaaaaaat

SEQ ID NO: 258034 - DNA, 30 bp, Artificial Sequence
  Synthetic oligonucleotide
ggaggggacgattctagggtcagaaaaaat

SEQ ID NO: 258035 - DNA, 30 bp, Artificial Sequence
  Synthetic oligonucleotide
taggcttcagtacacgtgaaactgaaaaat

SEQ ID NO: 258036 - DNA, 30 bp, Artificial Sequence
  Synthetic oligonucleotide
taagagagaaggacggggattgtgaaaaat

SEQ ID NO: 258037 - DNA, 30 bp, Artificial Sequence
  Synthetic oligonucleotide
cggagggcggtggagccgtccggccaaaat

SEQ ID NO: 258038 - DNA, 30 bp, Artificial Sequence
  Synthetic oligonucleotide
gggaaagatccacgtgcgaatacagaaaat

SEQ ID NO: 258039 - DNA, 30 bp, Artificial Sequence
  Synthetic oligonucleotide
taggacagccgtcgaagcattacagaaaat

SEQ ID NO: 258040 - DNA, 30 bp, Artificial Sequence
  Synthetic oligonucleotide
taatgtgacaagcgggctcgtggagaaaat

SEQ ID NO: 258041 - DNA, 30 bp, Artificial Sequence
  Synthetic oligonucleotide
ttgtcagacggtcacgttcgagtcgaaaat

SEQ ID NO: 258042 - DNA, 30 bp, Artificial Sequence
  Synthetic oligonucleotide
taagcaataaaagtgcatagtaaggaaaat

SEQ ID NO: 258043 - DNA, 30 bp, Artificial Sequence
  Synthetic oligonucleotide
ttatgacacgaggcaaaagatcgggaaaat

SEQ ID NO: 258044 - DNA, 30 bp, Artificial Sequence
  Synthetic oligonucleotide
ttgtaacacagcgagcggtctgtggaaaat

SEQ ID NO: 258045 - DNA, 30 bp, Artificial Sequence
  Synthetic oligonucleotide
gataggtagtagctcatataccctgaaaat

SEQ ID NO: 258046 - DNA, 30 bp, Artificial Sequence
  Synthetic oligonucleotide
tgcaagcggcgagcacgtatttgtgaaaat

SEQ ID NO: 258047 - DNA, 30 bp, Artificial Sequence
  Synthetic oligonucleotide
ttcgtggaacgtgcattgatgtcataaaat

SEQ ID NO: 258048 - DNA, 30 bp, Artificial Sequence
  Synthetic oligonucleotide
gcctgacacatgcttaaagcgctataaaat

SEQ ID NO: 258049 - DNA, 30 bp, Artificial Sequence
  Synthetic oligonucleotide
cgattccataggacgccaaaacactaaaat

SEQ ID NO: 258050 - DNA, 30 bp, Artificial Sequence
  Synthetic oligonucleotide
cagcggtcaaagccaacgctacactaaaat

SEQ ID NO: 258051 - DNA, 30 bp, Artificial Sequence
  Synthetic oligonucleotide
gaaggcgatgatacagatccggtctaaaat

SEQ ID NO: 258052 - DNA, 30 bp, Artificial Sequence
  Synthetic oligonucleotide
ggcggggcagcctgggagccccagtaaaat

SEQ ID NO: 258053 - DNA, 30 bp, Artificial Sequence
  Synthetic oligonucleotide
cggtggagtctacacattgtgacgtaaaat

SEQ ID NO: 258054 - DNA, 30 bp, Artificial Sequence
  Synthetic oligonucleotide
ggcgtatagttatcgtacattcaaacaaat

SEQ ID NO: 258055 - DNA, 30 bp, Artificial Sequence
  Synthetic oligonucleotide
cgcttaatattgaacagggttacaacaaat

SEQ ID NO: 258056 - DNA, 30 bp, Artificial Sequence
  Synthetic oligonucleotide
ccaccagcatcaacgccttttataacaaat

SEQ ID NO: 258057 - DNA, 30 bp, Artificial Sequence
  Synthetic oligonucleotide
tactgtacggcgcgctctgggttaacaaat

SEQ ID NO: 258058 - DNA, 30 bp, Artificial Sequence
  Synthetic oligonucleotide
ggtgatggcacgtgccttcagggcacaaat

SEQ ID NO: 258059 - DNA, 30 bp, Artificial Sequence
  Synthetic oligonucleotide
ggaggacgtatcacacgttcttgcacaaat

SEQ ID NO: 258060 - DNA, 30 bp, Artificial Sequence
  Synthetic oligonucleotide
agataggcctcgatccaatgcaatacaaat

SEQ ID NO: 258061 - DNA, 30 bp, Artificial Sequence
  Synthetic oligonucleotide
cggccttcggtcacgaccaaacatacaaat

SEQ ID NO: 258062 - DNA, 30 bp, Artificial Sequence
  Synthetic oligonucleotide
ggcaaatttgactagtaaaagcgtacaaat

SEQ ID NO: 258063 - DNA, 30 bp, Artificial Sequence
  Synthetic oligonucleotide
cgagagacaattggggtaagggaaccaaat

SEQ ID NO: 258064 - DNA, 30 bp, Artificial Sequence
  Synthetic oligonucleotide
ctaacgacttgtatgggtacttttccaaat

SEQ ID NO: 258065 - DNA, 30 bp, Artificial Sequence
  Synthetic oligonucleotide
taggaaggccctcatgggggcggggcaaat

SEQ ID NO: 258066 - DNA, 30 bp, Artificial Sequence
  Synthetic oligonucleotide
tgccagtccagtgatctcagtagtgcaaat

SEQ ID NO: 258067 - DNA, 30 bp, Artificial Sequence
  Synthetic oligonucleotide
cttcgaactgaacggggggcaggtgcaaat

SEQ ID NO: 258068 - DNA, 30 bp, Artificial Sequence
  Synthetic oligonucleotide
cgagccaccaagggccccgagtaatcaaat

SEQ ID NO: 258069 - DNA, 30 bp, Artificial Sequence
  Synthetic oligonucleotide
aacagagcgcgacgtgctatgtcctcaaat

SEQ ID NO: 258070 - DNA, 30 bp, Artificial Sequence
  Synthetic oligonucleotide
ttctcaattcacatttcggggagctcaaat

SEQ ID NO: 258071 - DNA, 30 bp, Artificial Sequence
  Synthetic oligonucleotide
taaaccaggtgagcaccgtgcttctcaaat

SEQ ID NO: 258072 - DNA, 30 bp, Artificial Sequence
  Synthetic oligonucleotide
ttagtcagtgctcgtccgaggacttcaaat

SEQ ID NO: 258073 - DNA, 30 bp, Artificial Sequence
  Synthetic oligonucleotide
aagtgtggagctgagtgtctcggttcaaat

SEQ ID NO: 258074 - DNA, 30 bp, Artificial Sequence
  Synthetic oligonucleotide
tcgcgtttggaaccctacgagcgaagaaat

SEQ ID NO: 258075 - DNA, 30 bp, Artificial Sequence
  Synthetic oligonucleotide
aataaaatactctaggaacgatccagaaat

SEQ ID NO: 258076 - DNA, 30 bp, Artificial Sequence
  Synthetic oligonucleotide
agttgccggacccggaattaaaagagaaat

SEQ ID NO: 258077 - DNA, 30 bp, Artificial Sequence
  Synthetic oligonucleotide
agttttgcccataaagtttgagcgagaaat

SEQ ID NO: 258078 - DNA, 30 bp, Artificial Sequence
  Synthetic oligonucleotide
ccttgcgacgcagggtgggccaggagaaat

SEQ ID NO: 258079 - DNA, 30 bp, Artificial Sequence
  Synthetic oligonucleotide
taaatggaactcaggttagccaatagaaat

SEQ ID NO: 258080 - DNA, 30 bp, Artificial Sequence
  Synthetic oligonucleotide
tgcaggcctctgcgccgatgtattagaaat

SEQ ID NO: 258081 - DNA, 30 bp, Artificial Sequence
  Synthetic oligonucleotide
ggatcacgcggaaatggatcaacacgaaat

SEQ ID NO: 258082 - DNA, 30 bp, Artificial Sequence
  Synthetic oligonucleotide
tttggaaataaatcgtcgcgcctacgaaat

SEQ ID NO: 258083 - DNA, 30 bp, Artificial Sequence
  Synthetic oligonucleotide
atcacggcacatatcacgttcgtacgaaat

SEQ ID NO: 258084 - DNA, 30 bp, Artificial Sequence
  Synthetic oligonucleotide
acaaaaccgagggtacttaacgcccgaaat

SEQ ID NO: 258085 - DNA, 30 bp, Artificial Sequence
  Synthetic oligonucleotide
tatgcacgctcgcccgggcagtgccgaaat

SEQ ID NO: 258086 - DNA, 30 bp, Artificial Sequence
  Synthetic oligonucleotide
gcaacgtcccctgtgatctacatgcgaaat

SEQ ID NO: 258087 - DNA, 30 bp, Artificial Sequence
  Synthetic oligonucleotide
acgttgtgttctcagaaatcccatcgaaat

SEQ ID NO: 258088 - DNA, 30 bp, Artificial Sequence
  Synthetic oligonucleotide
tgcggttacaaaacgaaggtcgctcgaaat

SEQ ID NO: 258089 - DNA, 30 bp, Artificial Sequence
  Synthetic oligonucleotide
ttgcggttagagcaagattgatgtcgaaat

SEQ ID NO: 258090 - DNA, 30 bp, Artificial Sequence
  Synthetic oligonucleotide
tccggtcgtcgtcgctcttccattcgaaat

SEQ ID NO: 258091 - DNA, 30 bp, Artificial Sequence
  Synthetic oligonucleotide
tttgcgaacactgtcgcgcaggcaggaaat

SEQ ID NO: 258092 - DNA, 30 bp, Artificial Sequence
  Synthetic oligonucleotide
gctgactggttacttatacctggcggaaat

SEQ ID NO: 258093 - DNA, 30 bp, Artificial Sequence
  Synthetic oligonucleotide
taacttcatagggcacaagggttcggaaat

SEQ ID NO: 258094 - DNA, 28 bp, Artificial Sequence
  Synthetic oligonucleotide
gacggtacataatcaacagcggggaaat

SEQ ID NO: 258095 - DNA, 30 bp, Artificial Sequence
  Synthetic oligonucleotide
taccacgatcagacacaatctagtggaaat

SEQ ID NO: 258096 - DNA, 30 bp, Artificial Sequence
  Synthetic oligonucleotide
caccggtggactggatctactcgtggaaat

SEQ ID NO: 258097 - DNA, 30 bp, Artificial Sequence
  Synthetic oligonucleotide
aggtagagctctacctgtaagggtggaaat

SEQ ID NO: 258098 - DNA, 30 bp, Artificial Sequence
  Synthetic oligonucleotide
actcatcgtgatgttattcggtttggaaat

SEQ ID NO: 258099 - DNA, 30 bp, Artificial Sequence
  Synthetic oligonucleotide
atcggtatggcacttgcacttaaatgaaat

SEQ ID NO: 258100 - DNA, 30 bp, Artificial Sequence
  Synthetic oligonucleotide
gactcgtccaggccaaggaacatatgaaat

SEQ ID NO: 258101 - DNA, 30 bp, Artificial Sequence
  Synthetic oligonucleotide
taaaatcgacagaccgataacttctgaaat

SEQ ID NO: 258102 - DNA, 30 bp, Artificial Sequence
  Synthetic oligonucleotide
gatttaaactctatcattgaaaagtgaaat

SEQ ID NO: 258103 - DNA, 30 bp, Artificial Sequence
  Synthetic oligonucleotide
cctgtgaatgggcatgatagtgagtgaaat

SEQ ID NO: 258104 - DNA, 30 bp, Artificial Sequence
  Synthetic oligonucleotide
ttaccgattctactacgcaatacgtgaaat

SEQ ID NO: 258105 - DNA, 30 bp, Artificial Sequence
  Synthetic oligonucleotide
atcgcccggtcccagccatagtcttgaaat

SEQ ID NO: 258106 - DNA, 30 bp, Artificial Sequence
  Synthetic oligonucleotide
ctgctgtcggatcactacgcttcaataaat

SEQ ID NO: 258107 - DNA, 30 bp, Artificial Sequence
  Synthetic oligonucleotide
atgggcctcggagatatagtcagcataaat

SEQ ID NO: 258108 - DNA, 30 bp, Artificial Sequence
  Synthetic oligonucleotide
gccatgatattcatcctcttgaagataaat

SEQ ID NO: 258109 - DNA, 30 bp, Artificial Sequence
  Synthetic oligonucleotide
gctgtccttgagtattcttagtcgataaat

SEQ ID NO: 258110 - DNA, 30 bp, Artificial Sequence
  Synthetic oligonucleotide
tagggtcaatgtttccaccagccactaaat

SEQ ID NO: 258111 - DNA, 30 bp, Artificial Sequence
  Synthetic oligonucleotide
gagtattggtctcagttcgatggactaaat

SEQ ID NO: 258112 - DNA, 30 bp, Artificial Sequence
  Synthetic oligonucleotide
aagcgggtagcgagacaccgcgacctaaat

SEQ ID NO: 258113 - DNA, 30 bp, Artificial Sequence
  Synthetic oligonucleotide
cggtaggcatcagtacgtggtagcctaaat

SEQ ID NO: 258114 - DNA, 30 bp, Artificial Sequence
  Synthetic oligonucleotide
agagctggtagtcacttacgtcaagtaaat

SEQ ID NO: 258115 - DNA, 30 bp, Artificial Sequence
  Synthetic oligonucleotide
cgtggatgtcctggctatggaagagtaaat

SEQ ID NO: 258116 - DNA, 30 bp, Artificial Sequence
  Synthetic oligonucleotide
aataacctcagggcggctggcggcgtaaat

SEQ ID NO: 258117 - DNA, 30 bp, Artificial Sequence
  Synthetic oligonucleotide
gtatagcggtgcacgattgccgtcgtaaat

SEQ ID NO: 258118 - DNA, 30 bp, Artificial Sequence
  Synthetic oligonucleotide
ttgcgtaggcaacataattgagaggtaaat

SEQ ID NO: 258119 - DNA, 30 bp, Artificial Sequence
  Synthetic oligonucleotide
agaaaagttgccgggattgaatgggtaaat

SEQ ID NO: 258120 - DNA, 30 bp, Artificial Sequence
  Synthetic oligonucleotide
ctcggggccttgggcgaagtgaatgtaaat

SEQ ID NO: 258121 - DNA, 30 bp, Artificial Sequence
  Synthetic oligonucleotide
tatggttcgttgtataggatcagtgtaaat

SEQ ID NO: 258122 - DNA, 30 bp, Artificial Sequence
  Synthetic oligonucleotide
gcgttagttacaggacatatttgattaaat

SEQ ID NO: 258123 - DNA, 30 bp, Artificial Sequence
  Synthetic oligonucleotide
cagcgttctggcacagtttttaacttaaat

SEQ ID NO: 258124 - DNA, 30 bp, Artificial Sequence
  Synthetic oligonucleotide
gggtcccgtcagattggggtctgcttaaat

SEQ ID NO: 258125 - DNA, 30 bp, Artificial Sequence
  Synthetic oligonucleotide
taggtcaagctagacttacaaacgttaaat

SEQ ID NO: 258126 - DNA, 30 bp, Artificial Sequence
  Synthetic oligonucleotide
gtccaggagacgtcctctcccgatttaaat

SEQ ID NO: 258127 - DNA, 30 bp, Artificial Sequence
  Synthetic oligonucleotide
agccgccttgatatctttggaattttaaat

SEQ ID NO: 258128 - DNA, 30 bp, Artificial Sequence
  Synthetic oligonucleotide
tgtttgcttaaagagaaatccgttttaaat

SEQ ID NO: 258129 - DNA, 30 bp, Artificial Sequence
  Synthetic oligonucleotide
gggagcggatttattgttcagtaaaacaat

SEQ ID NO: 258130 - DNA, 30 bp, Artificial Sequence
  Synthetic oligonucleotide
gctgcactctcatcactacttcacaacaat

SEQ ID NO: 258131 - DNA, 30 bp, Artificial Sequence
  Synthetic oligonucleotide
agcagaccaatatcgtgatttaagaacaat

SEQ ID NO: 258132 - DNA, 30 bp, Artificial Sequence
  Synthetic oligonucleotide
atcgctcgccttatgcatagggcgaacaat

SEQ ID NO: 258133 - DNA, 30 bp, Artificial Sequence
  Synthetic oligonucleotide
gtgtaatcgtggctaggttccgggaacaat

SEQ ID NO: 258134 - DNA, 30 bp, Artificial Sequence
  Synthetic oligonucleotide
cacttataagtcgtgtgccttatgaacaat

SEQ ID NO: 258135 - DNA, 30 bp, Artificial Sequence
  Synthetic oligonucleotide
ataagggatgatattgagctatataacaat

SEQ ID NO: 258136 - DNA, 30 bp, Artificial Sequence
  Synthetic oligonucleotide
atgagtcacgttggcgagcagccacacaat

SEQ ID NO: 258137 - DNA, 30 bp, Artificial Sequence
  Synthetic oligonucleotide
attcggagcccgacggcagttgaccacaat

SEQ ID NO: 258138 - DNA, 30 bp, Artificial Sequence
  Synthetic oligonucleotide
cggaaatgccggtagggcgggtaccacaat

SEQ ID NO: 258139 - DNA, 30 bp, Artificial Sequence
  Synthetic oligonucleotide
ccggagggctaaaagtcatatgcccacaat

SEQ ID NO: 258140 - DNA, 30 bp, Artificial Sequence
  Synthetic oligonucleotide
tgattccggaatcagacaagtcagcacaat

SEQ ID NO: 258141 - DNA, 30 bp, Artificial Sequence
  Synthetic oligonucleotide
gtactccaggggagcaatcgtctgcacaat

SEQ ID NO: 258142 - DNA, 30 bp, Artificial Sequence
  Synthetic oligonucleotide
actcgattcggcaccaagaatctagacaat

SEQ ID NO: 258143 - DNA, 30 bp, Artificial Sequence
  Synthetic oligonucleotide
ggtaatttacctactacccaaagcgacaat

SEQ ID NO: 258144 - DNA, 30 bp, Artificial Sequence
  Synthetic oligonucleotide
tgcggtaaaactattcatcaacgcgacaat

SEQ ID NO: 258145 - DNA, 30 bp, Artificial Sequence
  Synthetic oligonucleotide
gcgtgcggaaggaaccggcctagggacaat

SEQ ID NO: 258146 - DNA, 30 bp, Artificial Sequence
  Synthetic oligonucleotide
acttggacctaccttgccctgcgggacaat

SEQ ID NO: 258147 - DNA, 30 bp, Artificial Sequence
  Synthetic oligonucleotide
agacttcacctaattaccttcatggacaat

SEQ ID NO: 258148 - DNA, 30 bp, Artificial Sequence
  Synthetic oligonucleotide
ggtatgaatatgtctgcgtacgtggacaat

SEQ ID NO: 258149 - DNA, 30 bp, Artificial Sequence
  Synthetic oligonucleotide
ggagcctcaggtaggagataccctgacaat

SEQ ID NO: 258150 - DNA, 30 bp, Artificial Sequence
  Synthetic oligonucleotide
gctattgagctagtgaccggcgctgacaat

SEQ ID NO: 258151 - DNA, 31 bp, Artificial Sequence
  Synthetic oligonucleotide
ttgtacgtcttcgagggccaagtgtgacaat

SEQ ID NO: 258152 - DNA, 30 bp, Artificial Sequence
  Synthetic oligonucleotide
gaagacagctccgctcgggagcttgacaat

SEQ ID NO: 258153 - DNA, 30 bp, Artificial Sequence
  Synthetic oligonucleotide
cctaaaattgtggtcgataaaacctacaat

SEQ ID NO: 258154 - DNA, 30 bp, Artificial Sequence
  Synthetic oligonucleotide
acagtccgaatctggacggaagcctacaat

SEQ ID NO: 258155 - DNA, 30 bp, Artificial Sequence
  Synthetic oligonucleotide
cccattacatcaaaccgtggcacttacaat

SEQ ID NO: 258156 - DNA, 30 bp, Artificial Sequence
  Synthetic oligonucleotide
ggatcacagagctcgctccatcgttacaat

SEQ ID NO: 258157 - DNA, 30 bp, Artificial Sequence
  Synthetic oligonucleotide
gaggaggtagcagcttgacacatttacaat

SEQ ID NO: 258158 - DNA, 30 bp, Artificial Sequence
  Synthetic oligonucleotide
cccagaagctccaacatctgtgaaaccaat

SEQ ID NO: 258159 - DNA, 30 bp, Artificial Sequence
  Synthetic oligonucleotide
acgaatgacaatccattctcacgaaccaat

SEQ ID NO: 258160 - DNA, 30 bp, Artificial Sequence
  Synthetic oligonucleotide
gaacgtagcccaggtggtgctctcaccaat

SEQ ID NO: 258161 - DNA, 30 bp, Artificial Sequence
  Synthetic oligonucleotide
attgagcatcgaagatggggagagaccaat

SEQ ID NO: 258162 - DNA, 30 bp, Artificial Sequence
  Synthetic oligonucleotide
acctgttcacaatattcagcgaggaccaat

SEQ ID NO: 258163 - DNA, 30 bp, Artificial Sequence
  Synthetic oligonucleotide
agattgtccaatgcgtatgctccacccaat

SEQ ID NO: 258164 - DNA, 30 bp, Artificial Sequence
  Synthetic oligonucleotide
tccggcctcctgccgacttggagacccaat

SEQ ID NO: 258165 - DNA, 30 bp, Artificial Sequence
  Synthetic oligonucleotide
catggaccagcggtagaatgtagccccaat

SEQ ID NO: 258166 - DNA, 30 bp, Artificial Sequence
  Synthetic oligonucleotide
tcaagacagctcctgtgaagaagagccaat

SEQ ID NO: 258167 - DNA, 30 bp, Artificial Sequence
  Synthetic oligonucleotide
attgagcatgaccgaagaccctgagccaat

SEQ ID NO: 258168 - DNA, 30 bp, Artificial Sequence
  Synthetic oligonucleotide
cgacatgaggcaggctcggcctgagccaat

SEQ ID NO: 258169 - DNA, 30 bp, Artificial Sequence
  Synthetic oligonucleotide
gacttaggctcacttaactggaacgccaat

SEQ ID NO: 258170 - DNA, 30 bp, Artificial Sequence
  Synthetic oligonucleotide
gtacatcatctgcaataaagagacgccaat

SEQ ID NO: 258171 - DNA, 30 bp, Artificial Sequence
  Synthetic oligonucleotide
gggattcgctggattgccgtcgacgccaat

SEQ ID NO: 258172 - DNA, 30 bp, Artificial Sequence
  Synthetic oligonucleotide
atcgagggcaacaatcgcgtgccggccaat

SEQ ID NO: 258173 - DNA, 30 bp, Artificial Sequence
  Synthetic oligonucleotide
ggcgattatgctagcttagaaaatgccaat

SEQ ID NO: 258174 - DNA, 30 bp, Artificial Sequence
  Synthetic oligonucleotide
aacgccagatatcggtccgtcgagtccaat

SEQ ID NO: 258175 - DNA, 30 bp, Artificial Sequence
  Synthetic oligonucleotide
cccctacggctacacctaggcgcgtccaat

SEQ ID NO: 258176 - DNA, 30 bp, Artificial Sequence
  Synthetic oligonucleotide
tggaggccgcgatggcattgagggtccaat

SEQ ID NO: 258177 - DNA, 30 bp, Artificial Sequence
  Synthetic oligonucleotide
ctctagacccttccaacccccacttccaat

SEQ ID NO: 258178 - DNA, 30 bp, Artificial Sequence
  Synthetic oligonucleotide
aaaacgttagacacaaggctcggaagcaat

SEQ ID NO: 258179 - DNA, 30 bp, Artificial Sequence
  Synthetic oligonucleotide
tcgatgtgctggcattcccgcttaagcaat

SEQ ID NO: 258180 - DNA, 30 bp, Artificial Sequence
  Synthetic oligonucleotide
gaaccggacgcccagttatgcgcgagcaat

SEQ ID NO: 258181 - DNA, 30 bp, Artificial Sequence
  Synthetic oligonucleotide
ctggactacgcggtgttgcctgggagcaat

SEQ ID NO: 258182 - DNA, 30 bp, Artificial Sequence
  Synthetic oligonucleotide
tctggacgtaaactgggtctgactagcaat

SEQ ID NO: 258183 - DNA, 30 bp, Artificial Sequence
  Synthetic oligonucleotide
cgacacatatcaatacggctgtctagcaat

SEQ ID NO: 258184 - DNA, 30 bp, Artificial Sequence
  Synthetic oligonucleotide
gggaggaggatcgggggaagaattagcaat

SEQ ID NO: 258185 - DNA, 30 bp, Artificial Sequence
  Synthetic oligonucleotide
cattagtgtccaaagttttccgaacgcaat

SEQ ID NO: 258186 - DNA, 30 bp, Artificial Sequence
  Synthetic oligonucleotide
gggtaatcatccggatataaagtgcgcaat

SEQ ID NO: 258187 - DNA, 30 bp, Artificial Sequence
  Synthetic oligonucleotide
atgctgttatgaatgaggtctactcgcaat

SEQ ID NO: 258188 - DNA, 30 bp, Artificial Sequence
  Synthetic oligonucleotide
acttaattaagtcgtgtatataaaggcaat

SEQ ID NO: 258189 - DNA, 30 bp, Artificial Sequence
  Synthetic oligonucleotide
agtcgactggctaaccagacggcaggcaat

SEQ ID NO: 258190 - DNA, 30 bp, Artificial Sequence
  Synthetic oligonucleotide
gtggaacgaaaactggagattgacggcaat

SEQ ID NO: 258191 - DNA, 30 bp, Artificial Sequence
  Synthetic oligonucleotide
tacttagatggtaggaaaaggtgcggcaat

SEQ ID NO: 258192 - DNA, 30 bp, Artificial Sequence
  Synthetic oligonucleotide
ttcaggacgtcggttgacagccggggcaat

SEQ ID NO: 258193 - DNA, 30 bp, Artificial Sequence
  Synthetic oligonucleotide
caattcaattgaaaattgtatcggggcaat

SEQ ID NO: 258194 - DNA, 30 bp, Artificial Sequence
  Synthetic oligonucleotide
aggaaccttacaatagtacttatgggcaat

SEQ ID NO: 258195 - DNA, 30 bp, Artificial Sequence
  Synthetic oligonucleotide
ccatagaaagtaaaacattggcctggcaat

SEQ ID NO: 258196 - DNA, 30 bp, Artificial Sequence
  Synthetic oligonucleotide
aggcgatttgtagttcgatccaactgcaat

SEQ ID NO: 258197 - DNA, 30 bp, Artificial Sequence
  Synthetic oligonucleotide
caggattcacctatacggcacgcgtgcaat

SEQ ID NO: 258198 - DNA, 30 bp, Artificial Sequence
  Synthetic oligonucleotide
agggaatgaatctgcattatgtggtgcaat

SEQ ID NO: 258199 - DNA, 30 bp, Artificial Sequence
  Synthetic oligonucleotide
ttattttgagcagagccttgattgtgcaat

SEQ ID NO: 258200 - DNA, 30 bp, Artificial Sequence
  Synthetic oligonucleotide
tccgtacaagagatcgtggtgctttgcaat

SEQ ID NO: 258201 - DNA, 30 bp, Artificial Sequence
  Synthetic oligonucleotide
gtaagagaagtgcaactcatgtccatcaat

SEQ ID NO: 258202 - DNA, 30 bp, Artificial Sequence
  Synthetic oligonucleotide
ggcggagcgggttgcgctaaatgcatcaat

SEQ ID NO: 258203 - DNA, 30 bp, Artificial Sequence
  Synthetic oligonucleotide
gcttcatcctgaggtttaaacagtatcaat

SEQ ID NO: 258204 - DNA, 30 bp, Artificial Sequence
  Synthetic oligonucleotide
ccacggatatataatcatcgctttatcaat

SEQ ID NO: 258205 - DNA, 29 bp, Artificial Sequence
  Synthetic oligonucleotide
ttaagggagatgacaatgataacctcaat

SEQ ID NO: 258206 - DNA, 30 bp, Artificial Sequence
  Synthetic oligonucleotide
ctaaggttaaatggtgcgaggtagctcaat

SEQ ID NO: 258207 - DNA, 30 bp, Artificial Sequence
  Synthetic oligonucleotide
cattcgatgattcacagcgcatggctcaat

SEQ ID NO: 258208 - DNA, 30 bp, Artificial Sequence
  Synthetic oligonucleotide
aaagaatacagccagatcacccatctcaat

SEQ ID NO: 258209 - DNA, 30 bp, Artificial Sequence
  Synthetic oligonucleotide
taggatctaaagacttagcattatctcaat

SEQ ID NO: 258210 - DNA, 30 bp, Artificial Sequence
  Synthetic oligonucleotide
gtgatagctcctgtctaatgtcctctcaat

SEQ ID NO: 258211 - DNA, 30 bp, Artificial Sequence
  Synthetic oligonucleotide
ttttagaataatgggcacaatacagtcaat

SEQ ID NO: 258212 - DNA, 30 bp, Artificial Sequence
  Synthetic oligonucleotide
tatgaccataaatacgaagacccagtcaat

SEQ ID NO: 258213 - DNA, 30 bp, Artificial Sequence
  Synthetic oligonucleotide
accgtcacccggagtgcttggatagtcaat

SEQ ID NO: 258214 - DNA, 30 bp, Artificial Sequence
  Synthetic oligonucleotide
ggggtcgcaagaaaccttgtttgcgtcaat

SEQ ID NO: 258215 - DNA, 30 bp, Artificial Sequence
  Synthetic oligonucleotide
tggtagtatcatactatatagctcgtcaat

SEQ ID NO: 258216 - DNA, 30 bp, Artificial Sequence
  Synthetic oligonucleotide
acagatgtatctccccacttccgggtcaat

SEQ ID NO: 258217 - DNA, 30 bp, Artificial Sequence
  Synthetic oligonucleotide
cctgcgtagtcgtgtagcgttggggtcaat

SEQ ID NO: 258218 - DNA, 30 bp, Artificial Sequence
  Synthetic oligonucleotide
ggcaactgtctaatgttccggctattcaat

SEQ ID NO: 258219 - DNA, 30 bp, Artificial Sequence
  Synthetic oligonucleotide
tccaaatctttggtgagacacgccttcaat

SEQ ID NO: 258220 - DNA, 30 bp, Artificial Sequence
  Synthetic oligonucleotide
aaccacccgagcaggcactggagcttcaat

SEQ ID NO: 258221 - DNA, 30 bp, Artificial Sequence
  Synthetic oligonucleotide
agacataaattgttagatggtggcttcaat

SEQ ID NO: 258222 - DNA, 30 bp, Artificial Sequence
  Synthetic oligonucleotide
ccctctaaggcgcctaaccgaaagttcaat

SEQ ID NO: 258223 - DNA, 30 bp, Artificial Sequence
  Synthetic oligonucleotide
tcgtgccccggggcattgagttcgttcaat

SEQ ID NO: 258224 - DNA, 30 bp, Artificial Sequence
  Synthetic oligonucleotide
cggtcgtgtacgagggtctgagtgttcaat

SEQ ID NO: 258225 - DNA, 30 bp, Artificial Sequence
  Synthetic oligonucleotide
ttcgcgcgcgggctcgatagcgtgttcaat

SEQ ID NO: 258226 - DNA, 30 bp, Artificial Sequence
  Synthetic oligonucleotide
tgagcggaaagccatcgctggaatttcaat

SEQ ID NO: 258227 - DNA, 30 bp, Artificial Sequence
  Synthetic oligonucleotide
tcgaccagaatatagcgcgcccgtttcaat

SEQ ID NO: 258228 - DNA, 30 bp, Artificial Sequence
  Synthetic oligonucleotide
acttgtgcggcccccgggttacgaaagaat

SEQ ID NO: 258229 - DNA, 30 bp, Artificial Sequence
  Synthetic oligonucleotide
gcaatgacccattaccttcatggaaagaat

SEQ ID NO: 258230 - DNA, 30 bp, Artificial Sequence
  Synthetic oligonucleotide
tgcggttgttgacgcaagggactaaagaat

SEQ ID NO: 258231 - DNA, 30 bp, Artificial Sequence
  Synthetic oligonucleotide
ccatgacagggttgaagctacttaaagaat

SEQ ID NO: 258232 - DNA, 30 bp, Artificial Sequence
  Synthetic oligonucleotide
ccgatctaacggttattgtcgggcaagaat

SEQ ID NO: 258233 - DNA, 30 bp, Artificial Sequence
  Synthetic oligonucleotide
ggattgccaaccactgtctaaatcaagaat

SEQ ID NO: 258234 - DNA, 30 bp, Artificial Sequence
  Synthetic oligonucleotide
atattcgatatcctgagaggtaagaagaat

SEQ ID NO: 258235 - DNA, 30 bp, Artificial Sequence
  Synthetic oligonucleotide
atgagccgaacacgtaagcaagagaagaat

SEQ ID NO: 258236 - DNA, 30 bp, Artificial Sequence
  Synthetic oligonucleotide
aagttcgactagggagaggtgttgaagaat

SEQ ID NO: 258237 - DNA, 30 bp, Artificial Sequence
  Synthetic oligonucleotide
ttttgcggtaggtatgcgttgagtaagaat

SEQ ID NO: 258238 - DNA, 30 bp, Artificial Sequence
  Synthetic oligonucleotide
actgagaaggtattccgcaatagtaagaat

SEQ ID NO: 258239 - DNA, 30 bp, Artificial Sequence
  Synthetic oligonucleotide
gagcactaaagtccagtaagtcttaagaat

SEQ ID NO: 258240 - DNA, 30 bp, Artificial Sequence
  Synthetic oligonucleotide
ggggaaaataggcattatattgtacagaat

SEQ ID NO: 258241 - DNA, 30 bp, Artificial Sequence
  Synthetic oligonucleotide
ggtcgtgtccacttggacgacccccagaat

SEQ ID NO: 258242 - DNA, 30 bp, Artificial Sequence
  Synthetic oligonucleotide
ccgtgacatattattatgaatcgccagaat

SEQ ID NO: 258243 - DNA, 30 bp, Artificial Sequence
  Synthetic oligonucleotide
atagacgcgggtcaagccaccttccagaat

SEQ ID NO: 258244 - DNA, 30 bp, Artificial Sequence
  Synthetic oligonucleotide
ctgatttcggaggcgtgcttaaagcagaat

SEQ ID NO: 258245 - DNA, 30 bp, Artificial Sequence
  Synthetic oligonucleotide
agagcgccaatctgtccggtcaagcagaat

SEQ ID NO: 258246 - DNA, 30 bp, Artificial Sequence
  Synthetic oligonucleotide
agtttacacacgtccgcagacccgcagaat

SEQ ID NO: 258247 - DNA, 30 bp, Artificial Sequence
  Synthetic oligonucleotide
cgtacatcggattgctctagaatgcagaat

SEQ ID NO: 258248 - DNA, 30 bp, Artificial Sequence
  Synthetic oligonucleotide
tggattaaaagcgtctccaacactcagaat

SEQ ID NO: 258249 - DNA, 30 bp, Artificial Sequence
  Synthetic oligonucleotide
ccactgggctgtatatcgaagcgtcagaat

SEQ ID NO: 258250 - DNA, 30 bp, Artificial Sequence
  Synthetic oligonucleotide
taccgactttctagagaggatccagagaat

SEQ ID NO: 258251 - DNA, 30 bp, Artificial Sequence
  Synthetic oligonucleotide
ccataatcaataggtgggtctgcagagaat

SEQ ID NO: 258252 - DNA, 30 bp, Artificial Sequence
  Synthetic oligonucleotide
gatgtcgtggaaacaatacaggtagagaat

SEQ ID NO: 258253 - DNA, 30 bp, Artificial Sequence
  Synthetic oligonucleotide
accttattccgatattcaggattagagaat

SEQ ID NO: 258254 - DNA, 30 bp, Artificial Sequence
  Synthetic oligonucleotide
tgatgcttgcatgaaacgtccagcgagaat

SEQ ID NO: 258255 - DNA, 30 bp, Artificial Sequence
  Synthetic oligonucleotide
caggattgccgcgtggcagatcaggagaat

SEQ ID NO: 258256 - DNA, 30 bp, Artificial Sequence
  Synthetic oligonucleotide
aaggtaggaaactgtggtcccgaggagaat

SEQ ID NO: 258257 - DNA, 30 bp, Artificial Sequence
  Synthetic oligonucleotide
agtaatacggatgctttcttgagggagaat

SEQ ID NO: 258258 - DNA, 30 bp, Artificial Sequence
  Synthetic oligonucleotide
gctgagtgactgcgatgacgaggggagaat

SEQ ID NO: 258259 - DNA, 30 bp, Artificial Sequence
  Synthetic oligonucleotide
aaccagacggaccaataatgccctgagaat

SEQ ID NO: 258260 - DNA, 30 bp, Artificial Sequence
  Synthetic oligonucleotide
gaggaggtcaatacacgtctagttgagaat

SEQ ID NO: 258261 - DNA, 30 bp, Artificial Sequence
  Synthetic oligonucleotide
gtgggaactccggggctggaagcatagaat

SEQ ID NO: 258262 - DNA, 30 bp, Artificial Sequence
  Synthetic oligonucleotide
agtggttttgcttagggtcgtagctagaat

SEQ ID NO: 258263 - DNA, 30 bp, Artificial Sequence
  Synthetic oligonucleotide
tctagcccgacaggggatgaactctagaat

SEQ ID NO: 258264 - DNA, 30 bp, Artificial Sequence
  Synthetic oligonucleotide
tttaccagaaagtcaggtatactttagaat

SEQ ID NO: 258265 - DNA, 30 bp, Artificial Sequence
  Synthetic oligonucleotide
gctggggaaacaacgtgcaccctgacgaat

SEQ ID NO: 258266 - DNA, 30 bp, Artificial Sequence
  Synthetic oligonucleotide
cgttgtctaagtgtgaagttaattacgaat

SEQ ID NO: 258267 - DNA, 30 bp, Artificial Sequence
  Synthetic oligonucleotide
tggctcacatgagcgcggcggtgaccgaat

SEQ ID NO: 258268 - DNA, 30 bp, Artificial Sequence
  Synthetic oligonucleotide
ttgacaatgtggctaggcagtatcccgaat

SEQ ID NO: 258269 - DNA, 30 bp, Artificial Sequence
  Synthetic oligonucleotide
actcacgagtgttggcgttgatcagcgaat

SEQ ID NO: 258270 - DNA, 30 bp, Artificial Sequence
  Synthetic oligonucleotide
cattcggggctcctcggtttacgagcgaat

SEQ ID NO: 258271 - DNA, 30 bp, Artificial Sequence
  Synthetic oligonucleotide
tacttgaaggggagcatctgaaccgcgaat

SEQ ID NO: 258272 - DNA, 30 bp, Artificial Sequence
  Synthetic oligonucleotide
cgcgatggtaattcagtggggggcgcgaat

SEQ ID NO: 258273 - DNA, 30 bp, Artificial Sequence
  Synthetic oligonucleotide
accaggatcattggaaaggcatcggcgaat

SEQ ID NO: 258274 - DNA, 30 bp, Artificial Sequence
  Synthetic oligonucleotide
aggtaattcacacttcctcgactatcgaat

SEQ ID NO: 258275 - DNA, 30 bp, Artificial Sequence
  Synthetic oligonucleotide
tgttaccggtgggcgcctcctaagtcgaat

SEQ ID NO: 258276 - DNA, 30 bp, Artificial Sequence
  Synthetic oligonucleotide
acagaggggtacgtctctcagaaaaggaat

SEQ ID NO: 258277 - DNA, 30 bp, Artificial Sequence
  Synthetic oligonucleotide
agaaatgccgcctcaaatttaacaaggaat

SEQ ID NO: 258278 - DNA, 30 bp, Artificial Sequence
  Synthetic oligonucleotide
gggatgcaaccggatggggggtgaaggaat

SEQ ID NO: 258279 - DNA, 30 bp, Artificial Sequence
  Synthetic oligonucleotide
ggtagcgatactgagaatttagtaaggaat

SEQ ID NO: 258280 - DNA, 30 bp, Artificial Sequence
  Synthetic oligonucleotide
ggggtcatattccatatgtagggcaggaat

SEQ ID NO: 258281 - DNA, 30 bp, Artificial Sequence
  Synthetic oligonucleotide
gcgacgtagacttgtactctccagaggaat

SEQ ID NO: 258282 - DNA, 30 bp, Artificial Sequence
  Synthetic oligonucleotide
agaaagtggtaagcacgtgcaaataggaat

SEQ ID NO: 258283 - DNA, 30 bp, Artificial Sequence
  Synthetic oligonucleotide
cggagggttatcgatgttaatcataggaat

SEQ ID NO: 258284 - DNA, 30 bp, Artificial Sequence
  Synthetic oligonucleotide
aaggactgacctaatacgcgatataggaat

SEQ ID NO: 258285 - DNA, 30 bp, Artificial Sequence
  Synthetic oligonucleotide
gtgttagtatccccacgcgagattaggaat

SEQ ID NO: 258286 - DNA, 30 bp, Artificial Sequence
  Synthetic oligonucleotide
ccggctagagcgtcactgcgtttgcggaat

SEQ ID NO: 258287 - DNA, 30 bp, Artificial Sequence
  Synthetic oligonucleotide
aatgtaactacaaggtagtatcaagggaat

SEQ ID NO: 258288 - DNA, 30 bp, Artificial Sequence
  Synthetic oligonucleotide
cgccacatcgattgtagaatctaagggaat

SEQ ID NO: 258289 - DNA, 30 bp, Artificial Sequence
  Synthetic oligonucleotide
catcaatagagaagcctagctgcagggaat

SEQ ID NO: 258290 - DNA, 30 bp, Artificial Sequence
  Synthetic oligonucleotide
aacgaaggccttcttggttccttcgggaat

SEQ ID NO: 258291 - DNA, 30 bp, Artificial Sequence
  Synthetic oligonucleotide
atggggtattgaatacgacttcaggggaat

SEQ ID NO: 258292 - DNA, 30 bp, Artificial Sequence
  Synthetic oligonucleotide
aaggctaccgatttggtcatcatggggaat

SEQ ID NO: 258293 - DNA, 30 bp, Artificial Sequence
  Synthetic oligonucleotide
tccttagacaagggatcccagactgggaat

SEQ ID NO: 258294 - DNA, 30 bp, Artificial Sequence
  Synthetic oligonucleotide
acgtgtgaaaattccgtgtacgaatggaat

SEQ ID NO: 258295 - DNA, 30 bp, Artificial Sequence
  Synthetic oligonucleotide
acgagcctcccgtgaaagctgtagtggaat

SEQ ID NO: 258296 - DNA, 30 bp, Artificial Sequence
  Synthetic oligonucleotide
accgcattcatgaattaaagtaggtggaat

SEQ ID NO: 258297 - DNA, 30 bp, Artificial Sequence
  Synthetic oligonucleotide
tatgttaaacagattgggaagctgtggaat

SEQ ID NO: 258298 - DNA, 30 bp, Artificial Sequence
  Synthetic oligonucleotide
aaaggtgtgctacccacgagcgaaatgaat

SEQ ID NO: 258299 - DNA, 30 bp, Artificial Sequence
  Synthetic oligonucleotide
gaatctacttccaactcccccagaatgaat

SEQ ID NO: 258300 - DNA, 30 bp, Artificial Sequence
  Synthetic oligonucleotide
atgcagggcaatgcattatcgggcatgaat

SEQ ID NO: 258301 - DNA, 30 bp, Artificial Sequence
  Synthetic oligonucleotide
gagctttgatacaggcgcgggtggatgaat

SEQ ID NO: 258302 - DNA, 30 bp, Artificial Sequence
  Synthetic oligonucleotide
cccgccggggcctggcgcgaattgatgaat

SEQ ID NO: 258303 - DNA, 30 bp, Artificial Sequence
  Synthetic oligonucleotide
tacctctcggaagagactctgaatatgaat

SEQ ID NO: 258304 - DNA, 30 bp, Artificial Sequence
  Synthetic oligonucleotide
ccacatttatgcaattagagacgtatgaat

SEQ ID NO: 258305 - DNA, 30 bp, Artificial Sequence
  Synthetic oligonucleotide
acgttcgcggacgggcacaagtgtatgaat

SEQ ID NO: 258306 - DNA, 30 bp, Artificial Sequence
  Synthetic oligonucleotide
tcctcaaggtccatgcgcaaagttatgaat

SEQ ID NO: 258307 - DNA, 30 bp, Artificial Sequence
  Synthetic oligonucleotide
aaaaagaatggtctagagtgtgtactgaat

SEQ ID NO: 258308 - DNA, 30 bp, Artificial Sequence
  Synthetic oligonucleotide
taccaacaggagtcatgcaaatccctgaat

SEQ ID NO: 258309 - DNA, 30 bp, Artificial Sequence
  Synthetic oligonucleotide
catggggtcaatattaataacggcctgaat

SEQ ID NO: 258310 - DNA, 30 bp, Artificial Sequence
  Synthetic oligonucleotide
atcccggtttgaaagcttctggggctgaat

SEQ ID NO: 258311 - DNA, 30 bp, Artificial Sequence
  Synthetic oligonucleotide
aggaagcaagaccagttttaatgtctgaat

SEQ ID NO: 258312 - DNA, 30 bp, Artificial Sequence
  Synthetic oligonucleotide
ctatcgccttttatccaactctgtctgaat

SEQ ID NO: 258313 - DNA, 30 bp, Artificial Sequence
  Synthetic oligonucleotide
agaaagtaaaagtagtgtcgtcccgtgaat

SEQ ID NO: 258314 - DNA, 31 bp, Artificial Sequence
  Synthetic oligonucleotide
cggtaaaagttaacaccgcagatcggtgaat

SEQ ID NO: 258315 - DNA, 30 bp, Artificial Sequence
  Synthetic oligonucleotide
gtgcgccgcacctactaacgtatggtgaat

SEQ ID NO: 258316 - DNA, 30 bp, Artificial Sequence
  Synthetic oligonucleotide
ccgatcgcccttggagacctgtctgtgaat

SEQ ID NO: 258317 - DNA, 30 bp, Artificial Sequence
  Synthetic oligonucleotide
gaaatgaaggcagacaaaagtaaattgaat

SEQ ID NO: 258318 - DNA, 30 bp, Artificial Sequence
  Synthetic oligonucleotide
gtggcacttcttaagcaggcagtattgaat

SEQ ID NO: 258319 - DNA, 30 bp, Artificial Sequence
  Synthetic oligonucleotide
agtcttagaacgcaaatgcctaacttgaat

SEQ ID NO: 258320 - DNA, 30 bp, Artificial Sequence
  Synthetic oligonucleotide
cgctgcaggtagacgttttgaggcttgaat

SEQ ID NO: 258321 - DNA, 30 bp, Artificial Sequence
  Synthetic oligonucleotide
taactcagggtccaaagggcgatcttgaat

SEQ ID NO: 258322 - DNA, 30 bp, Artificial Sequence
  Synthetic oligonucleotide
cctttcaagccgtcaagtccccagttgaat

SEQ ID NO: 258323 - DNA, 30 bp, Artificial Sequence
  Synthetic oligonucleotide
tctaattagtcggtcttaggttggttgaat

SEQ ID NO: 258324 - DNA, 30 bp, Artificial Sequence
  Synthetic oligonucleotide
tgcgctattccaatagaaattacaaataat

SEQ ID NO: 258325 - DNA, 30 bp, Artificial Sequence
  Synthetic oligonucleotide
gacagcataggggattacaggtcaaataat

SEQ ID NO: 258326 - DNA, 30 bp, Artificial Sequence
  Synthetic oligonucleotide
cccgggcgcgtaaaaatcagggacaataat

SEQ ID NO: 258327 - DNA, 30 bp, Artificial Sequence
  Synthetic oligonucleotide
ttacggtgattaaaccgcagtgagaataat

SEQ ID NO: 258328 - DNA, 30 bp, Artificial Sequence
  Synthetic oligonucleotide
agcgtcacagcatcaacgatgtcgaataat

SEQ ID NO: 258329 - DNA, 30 bp, Artificial Sequence
  Synthetic oligonucleotide
ccaacgagcttatgagggttcatgaataat

SEQ ID NO: 258330 - DNA, 30 bp, Artificial Sequence
  Synthetic oligonucleotide
gcgaatagtgtcctgaaattcagtaataat

SEQ ID NO: 258331 - DNA, 30 bp, Artificial Sequence
  Synthetic oligonucleotide
cggtcactgacttgtaggtccgttaataat

SEQ ID NO: 258332 - DNA, 30 bp, Artificial Sequence
  Synthetic oligonucleotide
acaggacctagcacaactattcaacataat

SEQ ID NO: 258333 - DNA, 30 bp, Artificial Sequence
  Synthetic oligonucleotide
ggggtctgctgtggtcaagatttacataat

SEQ ID NO: 258334 - DNA, 30 bp, Artificial Sequence
  Synthetic oligonucleotide
aaccgatctatggcagaacacggccataat

SEQ ID NO: 258335 - DNA, 30 bp, Artificial Sequence
  Synthetic oligonucleotide
atgacattcactggccggcgatgccataat

SEQ ID NO: 258336 - DNA, 30 bp, Artificial Sequence
  Synthetic oligonucleotide
gccatacatgaattccactctatccataat

SEQ ID NO: 258337 - DNA, 30 bp, Artificial Sequence
  Synthetic oligonucleotide
taggctccgtcccatccgcttcgtcataat

SEQ ID NO: 258338 - DNA, 30 bp, Artificial Sequence
  Synthetic oligonucleotide
ttgcgagggtagtgaaatacagttcataat

SEQ ID NO: 258339 - DNA, 30 bp, Artificial Sequence
  Synthetic oligonucleotide
ggggcaacatgagggcactaacaagataat

SEQ ID NO: 258340 - DNA, 30 bp, Artificial Sequence
  Synthetic oligonucleotide
cgcatagcggtaaagtcttaggaagataat

SEQ ID NO: 258341 - DNA, 30 bp, Artificial Sequence
  Synthetic oligonucleotide
atatcagtggaacctcgttacgtcgataat

SEQ ID NO: 258342 - DNA, 30 bp, Artificial Sequence
  Synthetic oligonucleotide
ctcggtagtagttgttttcttgcggataat

SEQ ID NO: 258343 - DNA, 30 bp, Artificial Sequence
  Synthetic oligonucleotide
agtataagagatttttttagcgtggataat

SEQ ID NO: 258344 - DNA, 30 bp, Artificial Sequence
  Synthetic oligonucleotide
aaaaatcgtggcatttgaagtgctgataat

SEQ ID NO: 258345 - DNA, 30 bp, Artificial Sequence
  Synthetic oligonucleotide
actgaaggtcccgagtagcgtagatataat

SEQ ID NO: 258346 - DNA, 30 bp, Artificial Sequence
  Synthetic oligonucleotide
tgttatgaacatcgatggaaccgatataat

SEQ ID NO: 258347 - DNA, 30 bp, Artificial Sequence
  Synthetic oligonucleotide
cgacttagcgctaagcactcatactataat

SEQ ID NO: 258348 - DNA, 30 bp, Artificial Sequence
  Synthetic oligonucleotide
gagagcaattcccaggtatcaaagtataat

SEQ ID NO: 258349 - DNA, 30 bp, Artificial Sequence
  Synthetic oligonucleotide
cggcaagacccaatcgaacatgggtataat

SEQ ID NO: 258350 - DNA, 30 bp, Artificial Sequence
  Synthetic oligonucleotide
gcagctgccgcctccttagtctggtataat

SEQ ID NO: 258351 - DNA, 30 bp, Artificial Sequence
  Synthetic oligonucleotide
gacgtcggtcggacctgtcacgtgtataat

SEQ ID NO: 258352 - DNA, 30 bp, Artificial Sequence
  Synthetic oligonucleotide
gcgacgattagtttcaggccctcaactaat

SEQ ID NO: 258353 - DNA, 30 bp, Artificial Sequence
  Synthetic oligonucleotide
aaaggtaatctccggttgtcagtaactaat

SEQ ID NO: 258354 - DNA, 30 bp, Artificial Sequence
  Synthetic oligonucleotide
gcaagggagtctgcgatggacttaactaat

SEQ ID NO: 258355 - DNA, 30 bp, Artificial Sequence
  Synthetic oligonucleotide
tatttaaagatgtcacgattttcgactaat

SEQ ID NO: 258356 - DNA, 30 bp, Artificial Sequence
  Synthetic oligonucleotide
ccaggggtttacacattctatattactaat

SEQ ID NO: 258357 - DNA, 30 bp, Artificial Sequence
  Synthetic oligonucleotide
tcaaagcttgtctggtccggtattactaat

SEQ ID NO: 258358 - DNA, 30 bp, Artificial Sequence
  Synthetic oligonucleotide
agctgtatacgagatgcgcctctccctaat

SEQ ID NO: 258359 - DNA, 30 bp, Artificial Sequence
  Synthetic oligonucleotide
ttagcaactagcgagacaccctcgcctaat

SEQ ID NO: 258360 - DNA, 30 bp, Artificial Sequence
  Synthetic oligonucleotide
ccgctaaaatacctttaccggatgcctaat

SEQ ID NO: 258361 - DNA, 30 bp, Artificial Sequence
  Synthetic oligonucleotide
tgaacagcggtttagcgcaaatttcctaat

SEQ ID NO: 258362 - DNA, 30 bp, Artificial Sequence
  Synthetic oligonucleotide
gtcgctgggcagggggtcatcgcagctaat

SEQ ID NO: 258363 - DNA, 30 bp, Artificial Sequence
  Synthetic oligonucleotide
cgtcggtactttatggctcgtttatctaat

SEQ ID NO: 258364 - DNA, 30 bp, Artificial Sequence
  Synthetic oligonucleotide
gtgcattcaaaactaaagctgtcgtctaat

SEQ ID NO: 258365 - DNA, 30 bp, Artificial Sequence
  Synthetic oligonucleotide
aattcgaaattcggaatatcgaggtctaat

SEQ ID NO: 258366 - DNA, 30 bp, Artificial Sequence
  Synthetic oligonucleotide
agtgcaaaaatctgcgcttgtaattctaat

SEQ ID NO: 258367 - DNA, 30 bp, Artificial Sequence
  Synthetic oligonucleotide
gactggtaggtacggtcaagcccttctaat

SEQ ID NO: 258368 - DNA, 30 bp, Artificial Sequence
  Synthetic oligonucleotide
atctaacgtccacggaagaaccgttctaat

SEQ ID NO: 258369 - DNA, 30 bp, Artificial Sequence
  Synthetic oligonucleotide
catgcaacaggcacgaaatacgtttctaat

SEQ ID NO: 258370 - DNA, 30 bp, Artificial Sequence
  Synthetic oligonucleotide
ttaaattctgagaggagacgcccgagtaat

SEQ ID NO: 258371 - DNA, 30 bp, Artificial Sequence
  Synthetic oligonucleotide
gagacacgacatgggaatgcgacacgtaat

SEQ ID NO: 258372 - DNA, 30 bp, Artificial Sequence
  Synthetic oligonucleotide
tagaagggctctaaaagtcagcaccgtaat

SEQ ID NO: 258373 - DNA, 30 bp, Artificial Sequence
  Synthetic oligonucleotide
acaccataggaagcgactcttattcgtaat

SEQ ID NO: 258374 - DNA, 30 bp, Artificial Sequence
  Synthetic oligonucleotide
atgaaggttacctacgatgaggaaggtaat

SEQ ID NO: 258375 - DNA, 30 bp, Artificial Sequence
  Synthetic oligonucleotide
tacctaattgagtgtaaatttaagggtaat

SEQ ID NO: 258376 - DNA, 30 bp, Artificial Sequence
  Synthetic oligonucleotide
gtcatactaaaggtagatcaaactggtaat

SEQ ID NO: 258377 - DNA, 30 bp, Artificial Sequence
  Synthetic oligonucleotide
cctggggcacgtgccattgggaaatgtaat

SEQ ID NO: 258378 - DNA, 30 bp, Artificial Sequence
  Synthetic oligonucleotide
gcacatatattatacagcctataatgtaat

SEQ ID NO: 258379 - DNA, 30 bp, Artificial Sequence
  Synthetic oligonucleotide
aaagttccggtcaagccagatacatgtaat

SEQ ID NO: 258380 - DNA, 30 bp, Artificial Sequence
  Synthetic oligonucleotide
tcgataacttctcaggcccgtagatgtaat

SEQ ID NO: 258381 - DNA, 30 bp, Artificial Sequence
  Synthetic oligonucleotide
gtacagtcatacatgcatctctgatgtaat

SEQ ID NO: 258382 - DNA, 30 bp, Artificial Sequence
  Synthetic oligonucleotide
cttgtggttcggctgaacgcgttatgtaat

SEQ ID NO: 258383 - DNA, 30 bp, Artificial Sequence
  Synthetic oligonucleotide
tcttcacttttatgccctttcagctgtaat

SEQ ID NO: 258384 - DNA, 30 bp, Artificial Sequence
  Synthetic oligonucleotide
ctcgacagttttaactcctcattctgtaat

SEQ ID NO: 258385 - DNA, 30 bp, Artificial Sequence
  Synthetic oligonucleotide
tgatgttattggttgtgagatatgtgtaat

SEQ ID NO: 258386 - DNA, 30 bp, Artificial Sequence
  Synthetic oligonucleotide
tctcgatcgagtttcttcaccatttgtaat

SEQ ID NO: 258387 - DNA, 30 bp, Artificial Sequence
  Synthetic oligonucleotide
tcaaatgggcacagcgacagtgaaattaat

SEQ ID NO: 258388 - DNA, 30 bp, Artificial Sequence
  Synthetic oligonucleotide
cagggaaaatgatagcgtgtcacgattaat

SEQ ID NO: 258389 - DNA, 30 bp, Artificial Sequence
  Synthetic oligonucleotide
gtccagagcccattactctcgctgattaat

SEQ ID NO: 258390 - DNA, 30 bp, Artificial Sequence
  Synthetic oligonucleotide
acggggttgtctctggtgtaacatattaat

SEQ ID NO: 258391 - DNA, 30 bp, Artificial Sequence
  Synthetic oligonucleotide
ctctaattattcacaatcctaaaacttaat

SEQ ID NO: 258392 - DNA, 30 bp, Artificial Sequence
  Synthetic oligonucleotide
tcctgctggaacagcgttgcacaccttaat

SEQ ID NO: 258393 - DNA, 30 bp, Artificial Sequence
  Synthetic oligonucleotide
attccaactggaacatgtatagaccttaat

SEQ ID NO: 258394 - DNA, 30 bp, Artificial Sequence
  Synthetic oligonucleotide
cctaattacgtataaggcacccttcttaat

SEQ ID NO: 258395 - DNA, 30 bp, Artificial Sequence
  Synthetic oligonucleotide
cagacgaggggccacagtgcataagttaat

SEQ ID NO: 258396 - DNA, 30 bp, Artificial Sequence
  Synthetic oligonucleotide
aaaagaacgcaccagggacgtggagttaat

SEQ ID NO: 258397 - DNA, 30 bp, Artificial Sequence
  Synthetic oligonucleotide
ttgtgtgtttgcttaatcttgtgagttaat

SEQ ID NO: 258398 - DNA, 30 bp, Artificial Sequence
  Synthetic oligonucleotide
cgagacggtagcttatgaagtggtgttaat

SEQ ID NO: 258399 - DNA, 30 bp, Artificial Sequence
  Synthetic oligonucleotide
cggatccaaaggtattaaccgccatttaat

SEQ ID NO: 258400 - DNA, 30 bp, Artificial Sequence
  Synthetic oligonucleotide
gagactcttaagaggtccctaagatttaat

SEQ ID NO: 258401 - DNA, 30 bp, Artificial Sequence
  Synthetic oligonucleotide
tcctgagaattagaacatacaatatttaat

SEQ ID NO: 258402 - DNA, 30 bp, Artificial Sequence
  Synthetic oligonucleotide
ccgggaaacgcaatcacagaacactttaat

SEQ ID NO: 258403 - DNA, 30 bp, Artificial Sequence
  Synthetic oligonucleotide
ggcctaaggtcgtccggtgtctactttaat

SEQ ID NO: 258404 - DNA, 29 bp, Artificial Sequence
  Synthetic oligonucleotide
cattcatcgaggatgggaattactttaat

SEQ ID NO: 258405 - DNA, 30 bp, Artificial Sequence
  Synthetic oligonucleotide
tcggacttcggtattaggtccatctttaat

SEQ ID NO: 258406 - DNA, 30 bp, Artificial Sequence
  Synthetic oligonucleotide
cgttactgggaggaggcccaaataaaacat

SEQ ID NO: 258407 - DNA, 30 bp, Artificial Sequence
  Synthetic oligonucleotide
tatttcaaaagaaggtaccaataccaacat

SEQ ID NO: 258408 - DNA, 30 bp, Artificial Sequence
  Synthetic oligonucleotide
aacgtaactgagtttaaacccatccaacat

SEQ ID NO: 258409 - DNA, 30 bp, Artificial Sequence
  Synthetic oligonucleotide
ttaaggtaaactcaccgtggggtccaacat

SEQ ID NO: 258410 - DNA, 30 bp, Artificial Sequence
  Synthetic oligonucleotide
gggttgctggcacgagcatatttccaacat

SEQ ID NO: 258411 - DNA, 30 bp, Artificial Sequence
  Synthetic oligonucleotide
ctaaatccaaacatgtctgcctagcaacat

SEQ ID NO: 258412 - DNA, 30 bp, Artificial Sequence
  Synthetic oligonucleotide
agtaggcagttgtcgatgaaatggcaacat

SEQ ID NO: 258413 - DNA, 30 bp, Artificial Sequence
  Synthetic oligonucleotide
cgagtatattttgctatatccgtgcaacat

SEQ ID NO: 258414 - DNA, 30 bp, Artificial Sequence
  Synthetic oligonucleotide
gggaccgcgtcgggggtaagacatcaacat

SEQ ID NO: 258415 - DNA, 30 bp, Artificial Sequence
  Synthetic oligonucleotide
atcgggatacatatttgaatcgaagaacat

SEQ ID NO: 258416 - DNA, 30 bp, Artificial Sequence
  Synthetic oligonucleotide
gtgcttattaaaagggaatttttcgaacat

SEQ ID NO: 258417 - DNA, 30 bp, Artificial Sequence
  Synthetic oligonucleotide
gtgaatacgtaaacccccctcttctaacat

SEQ ID NO: 258418 - DNA, 30 bp, Artificial Sequence
  Synthetic oligonucleotide
gcgttggcccgcctctcaagatcttaacat

SEQ ID NO: 258419 - DNA, 30 bp, Artificial Sequence
  Synthetic oligonucleotide
gttccgtaaggtgggcttacgagttaacat

SEQ ID NO: 258420 - DNA, 30 bp, Artificial Sequence
  Synthetic oligonucleotide
tatggaatcctaatacttggaataacacat

SEQ ID NO: 258421 - DNA, 30 bp, Artificial Sequence
  Synthetic oligonucleotide
tcatagagttttcattcggttctcacacat

SEQ ID NO: 258422 - DNA, 30 bp, Artificial Sequence
  Synthetic oligonucleotide
cttagttaaaggtcgattaggacgacacat

SEQ ID NO: 258423 - DNA, 30 bp, Artificial Sequence
  Synthetic oligonucleotide
cggacacgttttgctcctctatatacacat

SEQ ID NO: 258424 - DNA, 30 bp, Artificial Sequence
  Synthetic oligonucleotide
aagcatgtacacaccattttaccaccacat

SEQ ID NO: 258425 - DNA, 30 bp, Artificial Sequence
  Synthetic oligonucleotide
aaccgggtaggagtaatgtctagcccacat

SEQ ID NO: 258426 - DNA, 30 bp, Artificial Sequence
  Synthetic oligonucleotide
aacacttgtggacccgaaccaattccacat

SEQ ID NO: 258427 - DNA, 30 bp, Artificial Sequence
  Synthetic oligonucleotide
aaatgagaatccgcccactatgtagcacat

SEQ ID NO: 258428 - DNA, 30 bp, Artificial Sequence
  Synthetic oligonucleotide
actctgagcaagtctattacaaacgcacat

SEQ ID NO: 258429 - DNA, 30 bp, Artificial Sequence
  Synthetic oligonucleotide
acttcaaatatcgcatcaggctatgcacat

SEQ ID NO: 258430 - DNA, 29 bp, Artificial Sequence
  Synthetic oligonucleotide
ggcaacaggacctgtgactagactcacat

SEQ ID NO: 258431 - DNA, 30 bp, Artificial Sequence
  Synthetic oligonucleotide
gacgtatacaaacattcaaacggctcacat

SEQ ID NO: 258432 - DNA, 30 bp, Artificial Sequence
  Synthetic oligonucleotide
cagccgcaggccaatacccgcacgtcacat

SEQ ID NO: 258433 - DNA, 30 bp, Artificial Sequence
  Synthetic oligonucleotide
agggcggtccacggaaattctaggtcacat

SEQ ID NO: 258434 - DNA, 30 bp, Artificial Sequence
  Synthetic oligonucleotide
taattgatagagaggaaaatcgattcacat

SEQ ID NO: 258435 - DNA, 30 bp, Artificial Sequence
  Synthetic oligonucleotide
ctgagatagctttatgtttgcccttcacat

SEQ ID NO: 258436 - DNA, 30 bp, Artificial Sequence
  Synthetic oligonucleotide
cctggttataccacaatgaatttcagacat

SEQ ID NO: 258437 - DNA, 30 bp, Artificial Sequence
  Synthetic oligonucleotide
gatagcaaaggggctaaatgtctaggacat

SEQ ID NO: 258438 - DNA, 30 bp, Artificial Sequence
  Synthetic oligonucleotide
gagttcaggggtcacaattctttaggacat

SEQ ID NO: 258439 - DNA, 30 bp, Artificial Sequence
  Synthetic oligonucleotide
tccagatcgagcgccgcgtagaatggacat

SEQ ID NO: 258440 - DNA, 30 bp, Artificial Sequence
  Synthetic oligonucleotide
gctactatcgacgtctagagcggctgacat

SEQ ID NO: 258441 - DNA, 30 bp, Artificial Sequence
  Synthetic oligonucleotide
gtatggactccaggggtagaaaagtgacat

SEQ ID NO: 258442 - DNA, 30 bp, Artificial Sequence
  Synthetic oligonucleotide
tcatggttcaagacaccggccgagtgacat

SEQ ID NO: 258443 - DNA, 30 bp, Artificial Sequence
  Synthetic oligonucleotide
gctggcgatggctgcggtctttagtgacat

SEQ ID NO: 258444 - DNA, 30 bp, Artificial Sequence
  Synthetic oligonucleotide
cgttagtaggccaacagacgtttgtgacat

SEQ ID NO: 258445 - DNA, 30 bp, Artificial Sequence
  Synthetic oligonucleotide
gcacagggtaagtgtaatttatcttgacat

SEQ ID NO: 258446 - DNA, 30 bp, Artificial Sequence
  Synthetic oligonucleotide
actggccatcgatataaagcgggttgacat

SEQ ID NO: 258447 - DNA, 30 bp, Artificial Sequence
  Synthetic oligonucleotide
gtatctagctcaatcaaacaccaaatacat

SEQ ID NO: 258448 - DNA, 30 bp, Artificial Sequence
  Synthetic oligonucleotide
gatcatcactgcacgaccggtacaatacat

SEQ ID NO: 258449 - DNA, 30 bp, Artificial Sequence
  Synthetic oligonucleotide
agatcacgcaatagtaggaaaaatatacat

SEQ ID NO: 258450 - DNA, 30 bp, Artificial Sequence
  Synthetic oligonucleotide
agacctgccaaacttgcatcgaatatacat

SEQ ID NO: 258451 - DNA, 31 bp, Artificial Sequence
  Synthetic oligonucleotide
acgggttttaaaggaaggtaaagttatacat

SEQ ID NO: 258452 - DNA, 30 bp, Artificial Sequence
  Synthetic oligonucleotide
gaaggttaattcggaatcaccaatgtacat

SEQ ID NO: 258453 - DNA, 30 bp, Artificial Sequence
  Synthetic oligonucleotide
cattgtttactttggccacgatctgtacat

SEQ ID NO: 258454 - DNA, 30 bp, Artificial Sequence
  Synthetic oligonucleotide
agtgcgagtatggagtcttgagtcttacat

SEQ ID NO: 258455 - DNA, 30 bp, Artificial Sequence
  Synthetic oligonucleotide
tttcctccgttaaagtagatgccgttacat

SEQ ID NO: 258456 - DNA, 30 bp, Artificial Sequence
  Synthetic oligonucleotide
ggcagtacctttctatcgctcatgttacat

SEQ ID NO: 258457 - DNA, 30 bp, Artificial Sequence
  Synthetic oligonucleotide
ggctcacgcatctgtttgcagtgtttacat

SEQ ID NO: 258458 - DNA, 30 bp, Artificial Sequence
  Synthetic oligonucleotide
ctgaatctggtgtattaatagataaaccat

SEQ ID NO: 258459 - DNA, 30 bp, Artificial Sequence
  Synthetic oligonucleotide
atctgtccggacctgagaggactaaaccat

SEQ ID NO: 258460 - DNA, 30 bp, Artificial Sequence
  Synthetic oligonucleotide
ttagcgggctttacgagagaatgcaaccat

SEQ ID NO: 258461 - DNA, 30 bp, Artificial Sequence
  Synthetic oligonucleotide
atgttgacgaaccgtataaacactaaccat

SEQ ID NO: 258462 - DNA, 30 bp, Artificial Sequence
  Synthetic oligonucleotide
tgtgcgtcgacctggacgaaaattaaccat

SEQ ID NO: 258463 - DNA, 30 bp, Artificial Sequence
  Synthetic oligonucleotide
ggtaaagtgacaatcgtctaggcacaccat

SEQ ID NO: 258464 - DNA, 30 bp, Artificial Sequence
  Synthetic oligonucleotide
taattaagcatttaggactccttgcaccat

SEQ ID NO: 258465 - DNA, 30 bp, Artificial Sequence
  Synthetic oligonucleotide
cctgatcgttagtgctaacatactgaccat

SEQ ID NO: 258466 - DNA, 30 bp, Artificial Sequence
  Synthetic oligonucleotide
gcacccacattagcacattgatctgaccat

SEQ ID NO: 258467 - DNA, 30 bp, Artificial Sequence
  Synthetic oligonucleotide
aacaagcgatgattcaagtacctataccat

SEQ ID NO: 258468 - DNA, 30 bp, Artificial Sequence
  Synthetic oligonucleotide
gccggtcgggtagcaaatcctcagtaccat

SEQ ID NO: 258469 - DNA, 31 bp, Artificial Sequence
  Synthetic oligonucleotide
tgtgtggtgaacgcttgaatcttcgtaccat

SEQ ID NO: 258470 - DNA, 30 bp, Artificial Sequence
  Synthetic oligonucleotide
ttgaggcgtcaaagtatgttgatttaccat

SEQ ID NO: 258471 - DNA, 31 bp, Artificial Sequence
  Synthetic oligonucleotide
tatgtccgttgttctaatcgcataaacccat

SEQ ID NO: 258472 - DNA, 30 bp, Artificial Sequence
  Synthetic oligonucleotide
ctgaagcagaactacatgcttaggacccat

SEQ ID NO: 258473 - DNA, 30 bp, Artificial Sequence
  Synthetic oligonucleotide
tgagcgagcgtaggccggcttgccccccat

SEQ ID NO: 258474 - DNA, 30 bp, Artificial Sequence
  Synthetic oligonucleotide
cctctatcacaagagatctttcatccccat

SEQ ID NO: 258475 - DNA, 30 bp, Artificial Sequence
  Synthetic oligonucleotide
cttgacgcttataggtacgaacgagcccat

SEQ ID NO: 258476 - DNA, 30 bp, Artificial Sequence
  Synthetic oligonucleotide
tccgaatttatatggtgtcgtttagcccat

SEQ ID NO: 258477 - DNA, 30 bp, Artificial Sequence
  Synthetic oligonucleotide
tgacacccccaggcaacactcatcgcccat

SEQ ID NO: 258478 - DNA, 30 bp, Artificial Sequence
  Synthetic oligonucleotide
tgtagagccggctggctgtacttggcccat

SEQ ID NO: 258479 - DNA, 30 bp, Artificial Sequence
  Synthetic oligonucleotide
attctagggggctgggtcctccatgcccat

SEQ ID NO: 258480 - DNA, 30 bp, Artificial Sequence
  Synthetic oligonucleotide
gggtatggattggggaagagagatgcccat

SEQ ID NO: 258481 - DNA, 30 bp, Artificial Sequence
  Synthetic oligonucleotide
tgggcccagatgattaatttaaattcccat

SEQ ID NO: 258482 - DNA, 30 bp, Artificial Sequence
  Synthetic oligonucleotide
ttggtggtgtttataatccggttttcccat

SEQ ID NO: 258483 - DNA, 30 bp, Artificial Sequence
  Synthetic oligonucleotide
ggtttacactaatcaagcgcgaaaagccat

SEQ ID NO: 258484 - DNA, 30 bp, Artificial Sequence
  Synthetic oligonucleotide
atacaccggggtggtgagaacataagccat

SEQ ID NO: 258485 - DNA, 30 bp, Artificial Sequence
  Synthetic oligonucleotide
atattaagtttataactttgtagcagccat

SEQ ID NO: 258486 - DNA, 30 bp, Artificial Sequence
  Synthetic oligonucleotide
cgtcattcgggggtgggcttcaagagccat

SEQ ID NO: 258487 - DNA, 30 bp, Artificial Sequence
  Synthetic oligonucleotide
atagaggttcttgcgcgtgtttagagccat

SEQ ID NO: 258488 - DNA, 30 bp, Artificial Sequence
  Synthetic oligonucleotide
cagctgatattttaacgagcttggagccat

SEQ ID NO: 258489 - DNA, 30 bp, Artificial Sequence
  Synthetic oligonucleotide
gaatgtgtccagctacgaagactgagccat

SEQ ID NO: 258490 - DNA, 30 bp, Artificial Sequence
  Synthetic oligonucleotide
acaaatttgatagtggtagagtaacgccat

SEQ ID NO: 258491 - DNA, 30 bp, Artificial Sequence
  Synthetic oligonucleotide
atgggcattcaggatacgtgggtacgccat

SEQ ID NO: 258492 - DNA, 30 bp, Artificial Sequence
  Synthetic oligonucleotide
ggaacgatggcggttagcagattacgccat

SEQ ID NO: 258493 - DNA, 30 bp, Artificial Sequence
  Synthetic oligonucleotide
ggtcgatgtcttagacaggggtatcgccat

SEQ ID NO: 258494 - DNA, 30 bp, Artificial Sequence
  Synthetic oligonucleotide
gaatgagtagccctgctggtcggtcgccat

SEQ ID NO: 258495 - DNA, 30 bp, Artificial Sequence
  Synthetic oligonucleotide
tacaaataagatgtgtggcgctaaggccat

SEQ ID NO: 258496 - DNA, 30 bp, Artificial Sequence
  Synthetic oligonucleotide
tcaaggacggaggcttgtgatataggccat

SEQ ID NO: 258497 - DNA, 30 bp, Artificial Sequence
  Synthetic oligonucleotide
atcgttacggacattgcgatcccgggccat

SEQ ID NO: 258498 - DNA, 30 bp, Artificial Sequence
  Synthetic oligonucleotide
tcgctcgtttagttatggtgtattggccat

SEQ ID NO: 258499 - DNA, 30 bp, Artificial Sequence
  Synthetic oligonucleotide
gacgtctgtgccttgagtgtgacatgccat

SEQ ID NO: 258500 - DNA, 30 bp, Artificial Sequence
  Synthetic oligonucleotide
ttaagcaagatcataatctatctaatccat

SEQ ID NO: 258501 - DNA, 30 bp, Artificial Sequence
  Synthetic oligonucleotide
tagaaaggttggaatagcgtgcatatccat

SEQ ID NO: 258502 - DNA, 30 bp, Artificial Sequence
  Synthetic oligonucleotide
tattcaggctcatttaacaccgatatccat

SEQ ID NO: 258503 - DNA, 30 bp, Artificial Sequence
  Synthetic oligonucleotide
agagtcaagttcatgagaccctatatccat

SEQ ID NO: 258504 - DNA, 30 bp, Artificial Sequence
  Synthetic oligonucleotide
ggaatcctgatatctgcactgcttatccat

SEQ ID NO: 258505 - DNA, 30 bp, Artificial Sequence
  Synthetic oligonucleotide
caccctaaactgattagatcccccctccat

SEQ ID NO: 258506 - DNA, 30 bp, Artificial Sequence
  Synthetic oligonucleotide
tagtgaaacgttcccgcggaaaggctccat

SEQ ID NO: 258507 - DNA, 30 bp, Artificial Sequence
  Synthetic oligonucleotide
acttgcaagacggatagcttccggctccat

SEQ ID NO: 258508 - DNA, 30 bp, Artificial Sequence
  Synthetic oligonucleotide
gaagccgggccggcatgaattcctctccat

SEQ ID NO: 258509 - DNA, 30 bp, Artificial Sequence
  Synthetic oligonucleotide
aggagtggctccatgaagagccttctccat

SEQ ID NO: 258510 - DNA, 30 bp, Artificial Sequence
  Synthetic oligonucleotide
gtctttgtggacgaaccatagacagtccat

SEQ ID NO: 258511 - DNA, 30 bp, Artificial Sequence
  Synthetic oligonucleotide
ggaagacgagatcttattgacggcgtccat

SEQ ID NO: 258512 - DNA, 30 bp, Artificial Sequence
  Synthetic oligonucleotide
caaacggttactgggtaacatcgggtccat

SEQ ID NO: 258513 - DNA, 30 bp, Artificial Sequence
  Synthetic oligonucleotide
tgcggccttgccaagggggtaaatgtccat

SEQ ID NO: 258514 - DNA, 30 bp, Artificial Sequence
  Synthetic oligonucleotide
cgatcagacccctggcaagcggatgtccat

SEQ ID NO: 258515 - DNA, 30 bp, Artificial Sequence
  Synthetic oligonucleotide
cgacctcgatttatacgagcgtccttccat

SEQ ID NO: 258516 - DNA, 30 bp, Artificial Sequence
  Synthetic oligonucleotide
ctatccaaacgaactcaaacgaagttccat

SEQ ID NO: 258517 - DNA, 30 bp, Artificial Sequence
  Synthetic oligonucleotide
cgcgtgacccgcgaattccaccggttccat

SEQ ID NO: 258518 - DNA, 30 bp, Artificial Sequence
  Synthetic oligonucleotide
gtacaaataaagctgttaatcttgttccat

SEQ ID NO: 258519 - DNA, 30 bp, Artificial Sequence
  Synthetic oligonucleotide
agaccaggtaagaccacccggattttccat

SEQ ID NO: 258520 - DNA, 30 bp, Artificial Sequence
  Synthetic oligonucleotide
ttaatcacgggagacagggcattaaagcat

SEQ ID NO: 258521 - DNA, 30 bp, Artificial Sequence
  Synthetic oligonucleotide
agccattccaaatttctccgcttcaagcat

SEQ ID NO: 258522 - DNA, 30 bp, Artificial Sequence
  Synthetic oligonucleotide
tgtactaggtgcctggcggaagctaagcat

SEQ ID NO: 258523 - DNA, 30 bp, Artificial Sequence
  Synthetic oligonucleotide
caacctcgtaggattacgcccgtacagcat

SEQ ID NO: 258524 - DNA, 30 bp, Artificial Sequence
  Synthetic oligonucleotide
ggctcggtgatggatttgttcttacagcat

SEQ ID NO: 258525 - DNA, 30 bp, Artificial Sequence
  Synthetic oligonucleotide
cataaataaactttatcgccgaaccagcat

SEQ ID NO: 258526 - DNA, 30 bp, Artificial Sequence
  Synthetic oligonucleotide
cggccgttcgggcgtttgtcaatccagcat

SEQ ID NO: 258527 - DNA, 30 bp, Artificial Sequence
  Synthetic oligonucleotide
tagatttatcattcaacttacaagcagcat

SEQ ID NO: 258528 - DNA, 30 bp, Artificial Sequence
  Synthetic oligonucleotide
aactgctcccttttagatagccggcagcat

SEQ ID NO: 258529 - DNA, 30 bp, Artificial Sequence
  Synthetic oligonucleotide
tcaagaaatgtcgcctagccagatcagcat

SEQ ID NO: 258530 - DNA, 30 bp, Artificial Sequence
  Synthetic oligonucleotide
ccacggatcgtggcgatcttataagagcat

SEQ ID NO: 258531 - DNA, 30 bp, Artificial Sequence
  Synthetic oligonucleotide
ttctcagggcaaaaagggtttctagagcat

SEQ ID NO: 258532 - DNA, 30 bp, Artificial Sequence
  Synthetic oligonucleotide
gctcggcgtctgacccatcagtccgagcat

SEQ ID NO: 258533 - DNA, 30 bp, Artificial Sequence
  Synthetic oligonucleotide
tcgcaggtgaatagccctctaaatgagcat

SEQ ID NO: 258534 - DNA, 30 bp, Artificial Sequence
  Synthetic oligonucleotide
ggagtaggtgctcgtccgatatgtgagcat

SEQ ID NO: 258535 - DNA, 30 bp, Artificial Sequence
  Synthetic oligonucleotide
cgcataatcagtgtacccgcttagtagcat

SEQ ID NO: 258536 - DNA, 30 bp, Artificial Sequence
  Synthetic oligonucleotide
tttagaaggtaacgacccgtttggtagcat

SEQ ID NO: 258537 - DNA, 30 bp, Artificial Sequence
  Synthetic oligonucleotide
cactatagtagactattaagcttgtagcat

SEQ ID NO: 258538 - DNA, 30 bp, Artificial Sequence
  Synthetic oligonucleotide
tagctttgaaacttctaatagtcttagcat

SEQ ID NO: 258539 - DNA, 30 bp, Artificial Sequence
  Synthetic oligonucleotide
tatcgaaaagatttttggtagatttagcat

SEQ ID NO: 258540 - DNA, 30 bp, Artificial Sequence
  Synthetic oligonucleotide
gatggatgattaagagcgattcaaacgcat

SEQ ID NO: 258541 - DNA, 30 bp, Artificial Sequence
  Synthetic oligonucleotide
ccgtagagaagttaggctagtggcacgcat

SEQ ID NO: 258542 - DNA, 30 bp, Artificial Sequence
  Synthetic oligonucleotide
aaaggtttcacaacgggaaatacaccgcat

SEQ ID NO: 258543 - DNA, 30 bp, Artificial Sequence
  Synthetic oligonucleotide
aacataaccaggcgatatctaaagccgcat

SEQ ID NO: 258544 - DNA, 30 bp, Artificial Sequence
  Synthetic oligonucleotide
aaaagtaaggtgtctcggaatcagccgcat

SEQ ID NO: 258545 - DNA, 30 bp, Artificial Sequence
  Synthetic oligonucleotide
cacggacaacccacggggcgctggccgcat

SEQ ID NO: 258546 - DNA, 30 bp, Artificial Sequence
  Synthetic oligonucleotide
tggtgctgaaggaggtttagccctccgcat

SEQ ID NO: 258547 - DNA, 30 bp, Artificial Sequence
  Synthetic oligonucleotide
gttatcatgggaacatcaaccgcggcgcat

SEQ ID NO: 258548 - DNA, 30 bp, Artificial Sequence
  Synthetic oligonucleotide
acgactcaatgatgccgtatgagtgcgcat

SEQ ID NO: 258549 - DNA, 30 bp, Artificial Sequence
  Synthetic oligonucleotide
cataagttcgaggtgtagcagtgctcgcat

SEQ ID NO: 258550 - DNA, 30 bp, Artificial Sequence
  Synthetic oligonucleotide
atcgatgtaatgggatacattaagtcgcat

SEQ ID NO: 258551 - DNA, 30 bp, Artificial Sequence
  Synthetic oligonucleotide
acttgatattctgggcagccccgaaggcat

SEQ ID NO: 258552 - DNA, 30 bp, Artificial Sequence
  Synthetic oligonucleotide
ttgatggccgattgaggacccggaaggcat

SEQ ID NO: 258553 - DNA, 30 bp, Artificial Sequence
  Synthetic oligonucleotide
ctaatcatgtcgagtcagggccacaggcat

SEQ ID NO: 258554 - DNA, 30 bp, Artificial Sequence
  Synthetic oligonucleotide
tccgaacgtcggttcttgtatgccaggcat

SEQ ID NO: 258555 - DNA, 30 bp, Artificial Sequence
  Synthetic oligonucleotide
gactgatcggtgtacagaggattcaggcat

SEQ ID NO: 258556 - DNA, 30 bp, Artificial Sequence
  Synthetic oligonucleotide
tgtgagcagccgtaggccaatttcaggcat

SEQ ID NO: 258557 - DNA, 30 bp, Artificial Sequence
  Synthetic oligonucleotide
atactagtcgatacagaggctatgaggcat

SEQ ID NO: 258558 - DNA, 30 bp, Artificial Sequence
  Synthetic oligonucleotide
tgtcactgtacgctacatcgaggtaggcat

SEQ ID NO: 258559 - DNA, 30 bp, Artificial Sequence
  Synthetic oligonucleotide
gcgcgatcgctacgctaccagtgtaggcat

SEQ ID NO: 258560 - DNA, 30 bp, Artificial Sequence
  Synthetic oligonucleotide
ctgtagcggcgcgacatgaattgtaggcat

SEQ ID NO: 258561 - DNA, 30 bp, Artificial Sequence
  Synthetic oligonucleotide
gcagtctaaaggccctaagtctgccggcat

SEQ ID NO: 258562 - DNA, 30 bp, Artificial Sequence
  Synthetic oligonucleotide
cttctggtgctgcgacggcatttccggcat

SEQ ID NO: 258563 - DNA, 31 bp, Artificial Sequence
  Synthetic oligonucleotide
ttataacgccccgccctcagtcttgcggcat

SEQ ID NO: 258564 - DNA, 30 bp, Artificial Sequence
  Synthetic oligonucleotide
cctttgctatggaatgtaaactatcggcat

SEQ ID NO: 258565 - DNA, 30 bp, Artificial Sequence
  Synthetic oligonucleotide
tctaagggagtcgaggccacaggcgggcat

SEQ ID NO: 258566 - DNA, 30 bp, Artificial Sequence
  Synthetic oligonucleotide
acctggacgggcctatcagcaatcgggcat

SEQ ID NO: 258567 - DNA, 30 bp, Artificial Sequence
  Synthetic oligonucleotide
aggaccgaaggcgtaactcgcatcgggcat

SEQ ID NO: 258568 - DNA, 30 bp, Artificial Sequence
  Synthetic oligonucleotide
attgtaagtgacttgtcaaggtcggggcat

SEQ ID NO: 258569 - DNA, 30 bp, Artificial Sequence
  Synthetic oligonucleotide
cttacgagtcactgattgagttatgggcat

SEQ ID NO: 258570 - DNA, 30 bp, Artificial Sequence
  Synthetic oligonucleotide
aagactatcctccaggaatacacgtggcat

SEQ ID NO: 258571 - DNA, 30 bp, Artificial Sequence
  Synthetic oligonucleotide
aagcgttgaataacggcatacacgatgcat

SEQ ID NO: 258572 - DNA, 30 bp, Artificial Sequence
  Synthetic oligonucleotide
ggagcgcaaggtacgtagggttcgatgcat

SEQ ID NO: 258573 - DNA, 30 bp, Artificial Sequence
  Synthetic oligonucleotide
tcaaacaaaatagtgcaatgggtgatgcat

SEQ ID NO: 258574 - DNA, 30 bp, Artificial Sequence
  Synthetic oligonucleotide
ggccctgtggatcgacatagtttgatgcat

SEQ ID NO: 258575 - DNA, 30 bp, Artificial Sequence
  Synthetic oligonucleotide
ttccgcaatcataaaggaacgcaactgcat

SEQ ID NO: 258576 - DNA, 30 bp, Artificial Sequence
  Synthetic oligonucleotide
gcgtttagtccctgacggtgaacactgcat

SEQ ID NO: 258577 - DNA, 30 bp, Artificial Sequence
  Synthetic oligonucleotide
ggtggagtgccagggatattggtactgcat

SEQ ID NO: 258578 - DNA, 30 bp, Artificial Sequence
  Synthetic oligonucleotide
gtcggtaggcaggggtcttacttactgcat

SEQ ID NO: 258579 - DNA, 30 bp, Artificial Sequence
  Synthetic oligonucleotide
gaccaccggagtaatatccagtacctgcat

SEQ ID NO: 258580 - DNA, 30 bp, Artificial Sequence
  Synthetic oligonucleotide
atgtttcatagtaccaaaaacagcctgcat

SEQ ID NO: 258581 - DNA, 30 bp, Artificial Sequence
  Synthetic oligonucleotide
tcaaggagcgcgagaggcgatcgcctgcat

SEQ ID NO: 258582 - DNA, 30 bp, Artificial Sequence
  Synthetic oligonucleotide
gcaatggtgctagagtacaatttcctgcat

SEQ ID NO: 258583 - DNA, 30 bp, Artificial Sequence
  Synthetic oligonucleotide
cgggatcctcggtacgtgaggtatctgcat

SEQ ID NO: 258584 - DNA, 30 bp, Artificial Sequence
  Synthetic oligonucleotide
gaggtttctgatgtaaaggaaattctgcat

SEQ ID NO: 258585 - DNA, 25 bp, Artificial Sequence
  Synthetic oligonucleotide
ctggatctgcatctcccccgtgcat

SEQ ID NO: 258586 - DNA, 30 bp, Artificial Sequence
  Synthetic oligonucleotide
cctattgcacgggaatcctgctcggtgcat

SEQ ID NO: 258587 - DNA, 30 bp, Artificial Sequence
  Synthetic oligonucleotide
gtgggcgaaagcgtttttacgtcattgcat

SEQ ID NO: 258588 - DNA, 30 bp, Artificial Sequence
  Synthetic oligonucleotide
caacgcagtgtcaaggatttactattgcat

SEQ ID NO: 258589 - DNA, 30 bp, Artificial Sequence
  Synthetic oligonucleotide
gaactcgacctcggctaggccggcttgcat

SEQ ID NO: 258590 - DNA, 30 bp, Artificial Sequence
  Synthetic oligonucleotide
ccccccgcaatgaaccagttcactttgcat

SEQ ID NO: 258591 - DNA, 30 bp, Artificial Sequence
  Synthetic oligonucleotide
ataggtatcggtacgaacctttgaaatcat

SEQ ID NO: 258592 - DNA, 30 bp, Artificial Sequence
  Synthetic oligonucleotide
cagcgggcgaacaatgttatgcccaatcat

SEQ ID NO: 258593 - DNA, 30 bp, Artificial Sequence
  Synthetic oligonucleotide
cttcagcgcaacggcgataaggcgaatcat

SEQ ID NO: 258594 - DNA, 30 bp, Artificial Sequence
  Synthetic oligonucleotide
gagggatccatgcctgtcaagttgaatcat

SEQ ID NO: 258595 - DNA, 30 bp, Artificial Sequence
  Synthetic oligonucleotide
gacgcgtgggactcccattcagggcatcat

SEQ ID NO: 258596 - DNA, 30 bp, Artificial Sequence
  Synthetic oligonucleotide
agagctaacccaatttccaaccaagatcat

SEQ ID NO: 258597 - DNA, 30 bp, Artificial Sequence
  Synthetic oligonucleotide
ctgtgaataagaacggatcagtccgatcat

SEQ ID NO: 258598 - DNA, 30 bp, Artificial Sequence
  Synthetic oligonucleotide
gcgaaagggagatgtgccctaggcgatcat

SEQ ID NO: 258599 - DNA, 30 bp, Artificial Sequence
  Synthetic oligonucleotide
tccagcgggattctctgcaagtaggatcat

SEQ ID NO: 258600 - DNA, 30 bp, Artificial Sequence
  Synthetic oligonucleotide
gagctatggttctgggcctgacctgatcat

SEQ ID NO: 258601 - DNA, 30 bp, Artificial Sequence
  Synthetic oligonucleotide
gcaggaaggtcaagattgcttgtctatcat

SEQ ID NO: 258602 - DNA, 30 bp, Artificial Sequence
  Synthetic oligonucleotide
acagaacggttgtaggtaacgtagtatcat

SEQ ID NO: 258603 - DNA, 30 bp, Artificial Sequence
  Synthetic oligonucleotide
aaccaagatggtctcagcggcatgtatcat

SEQ ID NO: 258604 - DNA, 30 bp, Artificial Sequence
  Synthetic oligonucleotide
gaccagtttgatgccagaactctaactcat

SEQ ID NO: 258605 - DNA, 30 bp, Artificial Sequence
  Synthetic oligonucleotide
acgtaggccctatgacggggaaacactcat

SEQ ID NO: 258606 - DNA, 30 bp, Artificial Sequence
  Synthetic oligonucleotide
atcgggatacatctacatctatagactcat

SEQ ID NO: 258607 - DNA, 30 bp, Artificial Sequence
  Synthetic oligonucleotide
ctaactgtgcagactactccggggactcat

SEQ ID NO: 258608 - DNA, 30 bp, Artificial Sequence
  Synthetic oligonucleotide
ggctcaatgtacatcgacttactgactcat

SEQ ID NO: 258609 - DNA, 30 bp, Artificial Sequence
  Synthetic oligonucleotide
taaaaggatcatcagtcccacaatactcat

SEQ ID NO: 258610 - DNA, 30 bp, Artificial Sequence
  Synthetic oligonucleotide
caattttatatctgcctcttagaacctcat

SEQ ID NO: 258611 - DNA, 30 bp, Artificial Sequence
  Synthetic oligonucleotide
tgtcatcatcctggccagcacacacctcat

SEQ ID NO: 258612 - DNA, 30 bp, Artificial Sequence
  Synthetic oligonucleotide
tgtaattcataacaagacgaaccccctcat

SEQ ID NO: 258613 - DNA, 30 bp, Artificial Sequence
  Synthetic oligonucleotide
gaggaaaacgtagcacatgccaggcctcat

SEQ ID NO: 258614 - DNA, 30 bp, Artificial Sequence
  Synthetic oligonucleotide
ccccacagatctaccagggtcctgcctcat

SEQ ID NO: 258615 - DNA, 30 bp, Artificial Sequence
  Synthetic oligonucleotide
ctagttcgtgacccagtacgaacagctcat

SEQ ID NO: 258616 - DNA, 30 bp, Artificial Sequence
  Synthetic oligonucleotide
gggtagtggtactgccttatcctcgctcat

SEQ ID NO: 258617 - DNA, 30 bp, Artificial Sequence
  Synthetic oligonucleotide
gtcagcgccacgaaggacttaacatctcat

SEQ ID NO: 258618 - DNA, 30 bp, Artificial Sequence
  Synthetic oligonucleotide
aaagcacaccgtacgaaacaaagctctcat

SEQ ID NO: 258619 - DNA, 30 bp, Artificial Sequence
  Synthetic oligonucleotide
tcgttctaggacagacctagcagctctcat

SEQ ID NO: 258620 - DNA, 30 bp, Artificial Sequence
  Synthetic oligonucleotide
gtggatagggcccggaatacgtagtctcat

SEQ ID NO: 258621 - DNA, 30 bp, Artificial Sequence
  Synthetic oligonucleotide
cagcttacatgaatggcgtgctcttctcat

SEQ ID NO: 258622 - DNA, 30 bp, Artificial Sequence
  Synthetic oligonucleotide
ctcgcgagaaagagtggcgaccgttctcat

SEQ ID NO: 258623 - DNA, 30 bp, Artificial Sequence
  Synthetic oligonucleotide
attcgtgagcgtggggtatcgttttctcat

SEQ ID NO: 258624 - DNA, 30 bp, Artificial Sequence
  Synthetic oligonucleotide
gtgcggactaagttgttgaatcaaagtcat

SEQ ID NO: 258625 - DNA, 30 bp, Artificial Sequence
  Synthetic oligonucleotide
gtttaagagtacggatccgaataaagtcat

SEQ ID NO: 258626 - DNA, 30 bp, Artificial Sequence
  Synthetic oligonucleotide
tcagggatttaattcaacaaagacagtcat

SEQ ID NO: 258627 - DNA, 30 bp, Artificial Sequence
  Synthetic oligonucleotide
acttcaccaagtgccctttccatcagtcat

SEQ ID NO: 258628 - DNA, 29 bp, Artificial Sequence
  Synthetic oligonucleotide
agattacgggagtatggtctgtcagtcat

SEQ ID NO: 258629 - DNA, 30 bp, Artificial Sequence
  Synthetic oligonucleotide
agtggggaatatataaaactggagagtcat

SEQ ID NO: 258630 - DNA, 30 bp, Artificial Sequence
  Synthetic oligonucleotide
aaattagtgtgtgggactatggctagtcat

SEQ ID NO: 258631 - DNA, 30 bp, Artificial Sequence
  Synthetic oligonucleotide
tagggtagcataagggcgacgcgtagtcat

SEQ ID NO: 258632 - DNA, 30 bp, Artificial Sequence
  Synthetic oligonucleotide
ccgttctggtaaatggaaccccttagtcat

SEQ ID NO: 258633 - DNA, 30 bp, Artificial Sequence
  Synthetic oligonucleotide
gcatcgtactgaaccctctactaacgtcat

SEQ ID NO: 258634 - DNA, 30 bp, Artificial Sequence
  Synthetic oligonucleotide
atctcagtaaacggtatagcctcacgtcat

SEQ ID NO: 258635 - DNA, 30 bp, Artificial Sequence
  Synthetic oligonucleotide
aatgggctggtaagcccaaattgccgtcat

SEQ ID NO: 258636 - DNA, 30 bp, Artificial Sequence
  Synthetic oligonucleotide
cgcaataggatagccgagccaactcgtcat

SEQ ID NO: 258637 - DNA, 30 bp, Artificial Sequence
  Synthetic oligonucleotide
tccgcatgcgggcctacacaacctcgtcat

SEQ ID NO: 258638 - DNA, 30 bp, Artificial Sequence
  Synthetic oligonucleotide
gctacggttcgggctgaattgaaaggtcat

SEQ ID NO: 258639 - DNA, 30 bp, Artificial Sequence
  Synthetic oligonucleotide
aaaaaaccaggggcagtctagtaaggtcat

SEQ ID NO: 258640 - DNA, 30 bp, Artificial Sequence
  Synthetic oligonucleotide
gtaggcgtgtaatgagattgaacaggtcat

SEQ ID NO: 258641 - DNA, 30 bp, Artificial Sequence
  Synthetic oligonucleotide
cgaatcgctttacagtccattccaggtcat

SEQ ID NO: 258642 - DNA, 30 bp, Artificial Sequence
  Synthetic oligonucleotide
tctgtcgccgtctctaaatcccgaggtcat

SEQ ID NO: 258643 - DNA, 30 bp, Artificial Sequence
  Synthetic oligonucleotide
aagaccttcgccacgagaggacgcggtcat

SEQ ID NO: 258644 - DNA, 30 bp, Artificial Sequence
  Synthetic oligonucleotide
agtcgatataatagcccgttaacgggtcat

SEQ ID NO: 258645 - DNA, 30 bp, Artificial Sequence
  Synthetic oligonucleotide
gaggctatgaggtgaaaccccatgggtcat

SEQ ID NO: 258646 - DNA, 30 bp, Artificial Sequence
  Synthetic oligonucleotide
atgaccaggatatctttggaccgtggtcat

SEQ ID NO: 258647 - DNA, 30 bp, Artificial Sequence
  Synthetic oligonucleotide
gagggataggaaaagatcttctaatgtcat

SEQ ID NO: 258648 - DNA, 30 bp, Artificial Sequence
  Synthetic oligonucleotide
gtatattctttaaaatccaacggatgtcat

SEQ ID NO: 258649 - DNA, 30 bp, Artificial Sequence
  Synthetic oligonucleotide
tgcaccacaacccgtgaaagcttctgtcat

SEQ ID NO: 258650 - DNA, 30 bp, Artificial Sequence
  Synthetic oligonucleotide
cgggtactactgcccaaagcaacgtgtcat

SEQ ID NO: 258651 - DNA, 30 bp, Artificial Sequence
  Synthetic oligonucleotide
gtgtgcgaattcacgtgatgtttgtgtcat

SEQ ID NO: 258652 - DNA, 30 bp, Artificial Sequence
  Synthetic oligonucleotide
cacacgacgctgcccaacgtactttgtcat

SEQ ID NO: 258653 - DNA, 30 bp, Artificial Sequence
  Synthetic oligonucleotide
caaggtgcaggtcttgcaggattaattcat

SEQ ID NO: 258654 - DNA, 29 bp, Artificial Sequence
  Synthetic oligonucleotide
aattggtataccggggcgaaaccattcat

SEQ ID NO: 258655 - DNA, 30 bp, Artificial Sequence
  Synthetic oligonucleotide
aacaggggattaaaaagccaagtgcttcat

SEQ ID NO: 258656 - DNA, 30 bp, Artificial Sequence
  Synthetic oligonucleotide
ggtgcacgctcgagttcaattggtcttcat

SEQ ID NO: 258657 - DNA, 30 bp, Artificial Sequence
  Synthetic oligonucleotide
atcgatacgattgtacagttcgcagttcat

SEQ ID NO: 258658 - DNA, 30 bp, Artificial Sequence
  Synthetic oligonucleotide
ggagaaaagacgaaatgcttatggtttcat

SEQ ID NO: 258659 - DNA, 30 bp, Artificial Sequence
  Synthetic oligonucleotide
acgccaagtgtttccgccatcaattttcat

SEQ ID NO: 258660 - DNA, 30 bp, Artificial Sequence
  Synthetic oligonucleotide
atgttaaatgcggtctacaaccaaaaagat

SEQ ID NO: 258661 - DNA, 30 bp, Artificial Sequence
  Synthetic oligonucleotide
tttcgtccgctctaaagggccgaaaaagat

SEQ ID NO: 258662 - DNA, 30 bp, Artificial Sequence
  Synthetic oligonucleotide
tgaatcgaccgcccatggagggaaaaagat

SEQ ID NO: 258663 - DNA, 30 bp, Artificial Sequence
  Synthetic oligonucleotide
cacgccccctagttcgatagtgcaaaagat

SEQ ID NO: 258664 - DNA, 31 bp, Artificial Sequence
  Synthetic oligonucleotide
tccatatttgcccccccagaatcgaaaagat

SEQ ID NO: 258665 - DNA, 30 bp, Artificial Sequence
  Synthetic oligonucleotide
cagcgaaagggtgttggtccattaaaagat

SEQ ID NO: 258666 - DNA, 30 bp, Artificial Sequence
  Synthetic oligonucleotide
tcatgagccagtgattgggtgtacaaagat

SEQ ID NO: 258667 - DNA, 30 bp, Artificial Sequence
  Synthetic oligonucleotide
aatacctagacacccagcgcccccaaagat

SEQ ID NO: 258668 - DNA, 30 bp, Artificial Sequence
  Synthetic oligonucleotide
ttggagtaactattgggctcacagaaagat

SEQ ID NO: 258669 - DNA, 30 bp, Artificial Sequence
  Synthetic oligonucleotide
tgctcggagagaccgtccagtctgaaagat

SEQ ID NO: 258670 - DNA, 30 bp, Artificial Sequence
  Synthetic oligonucleotide
atatctacccatatcataccggatcaagat

SEQ ID NO: 258671 - DNA, 30 bp, Artificial Sequence
  Synthetic oligonucleotide
ggcgtggccgaggacatgaagaccgaagat

SEQ ID NO: 258672 - DNA, 30 bp, Artificial Sequence
  Synthetic oligonucleotide
catcgggcttcctcattgaaacgcgaagat

SEQ ID NO: 258673 - DNA, 30 bp, Artificial Sequence
  Synthetic oligonucleotide
atgtttcatagattgtcattctaggaagat

SEQ ID NO: 258674 - DNA, 30 bp, Artificial Sequence
  Synthetic oligonucleotide
agaccggagcccgcattaaaatcggaagat

SEQ ID NO: 258675 - DNA, 30 bp, Artificial Sequence
  Synthetic oligonucleotide
ttgttgttatataaacagtcacatgaagat

SEQ ID NO: 258676 - DNA, 30 bp, Artificial Sequence
  Synthetic oligonucleotide
ggcacccgcctggccaaagtcattgaagat

SEQ ID NO: 258677 - DNA, 30 bp, Artificial Sequence
  Synthetic oligonucleotide
agtgcccaggcaccttacttctaataagat

SEQ ID NO: 258678 - DNA, 30 bp, Artificial Sequence
  Synthetic oligonucleotide
tcttttaaatcaaactcacccaagtaagat

SEQ ID NO: 258679 - DNA, 30 bp, Artificial Sequence
  Synthetic oligonucleotide
tcataatatgacaaaagcgattagtaagat

SEQ ID NO: 258680 - DNA, 30 bp, Artificial Sequence
  Synthetic oligonucleotide
attgcactctctaaatgttaacggtaagat

SEQ ID NO: 258681 - DNA, 30 bp, Artificial Sequence
  Synthetic oligonucleotide
ctaggcgggaccggaggataagggtaagat

SEQ ID NO: 258682 - DNA, 30 bp, Artificial Sequence
  Synthetic oligonucleotide
tccaaatataatcctataccagtaacagat

SEQ ID NO: 258683 - DNA, 30 bp, Artificial Sequence
  Synthetic oligonucleotide
atggctgtagcctgctctgtgcctacagat

SEQ ID NO: 258684 - DNA, 30 bp, Artificial Sequence
  Synthetic oligonucleotide
tccaggtataggtcgggctcccggccagat

SEQ ID NO: 258685 - DNA, 30 bp, Artificial Sequence
  Synthetic oligonucleotide
gaaccagtcggaagctaagcctcagcagat

SEQ ID NO: 258686 - DNA, 30 bp, Artificial Sequence
  Synthetic oligonucleotide
catactggagtggagttaaacgcggcagat

SEQ ID NO: 258687 - DNA, 30 bp, Artificial Sequence
  Synthetic oligonucleotide
acgacatcgtagcaattgtcgtcggcagat

SEQ ID NO: 258688 - DNA, 30 bp, Artificial Sequence
  Synthetic oligonucleotide
gcgggtctggccgagattcaggctgcagat

SEQ ID NO: 258689 - DNA, 30 bp, Artificial Sequence
  Synthetic oligonucleotide
gcggtgagctttcaacaagtacgtgcagat

SEQ ID NO: 258690 - DNA, 30 bp, Artificial Sequence
  Synthetic oligonucleotide
aatgtttccctcagcggcaagtgtgcagat

SEQ ID NO: 258691 - DNA, 30 bp, Artificial Sequence
  Synthetic oligonucleotide
tatgataaagatgaatggacagagtcagat

SEQ ID NO: 258692 - DNA, 30 bp, Artificial Sequence
  Synthetic oligonucleotide
cacatctcgcgtatgagtcttaggtcagat

SEQ ID NO: 258693 - DNA, 30 bp, Artificial Sequence
  Synthetic oligonucleotide
ggggagcacgggattttgtgggaaagagat

SEQ ID NO: 258694 - DNA, 30 bp, Artificial Sequence
  Synthetic oligonucleotide
ggacgattatgccagaaccttgaaagagat

SEQ ID NO: 258695 - DNA, 30 bp, Artificial Sequence
  Synthetic oligonucleotide
cttatcagcgataaaacattcataagagat

SEQ ID NO: 258696 - DNA, 29 bp, Artificial Sequence
  Synthetic oligonucleotide
ttcgtgcggaacgcagtgctagcagagat

SEQ ID NO: 258697 - DNA, 30 bp, Artificial Sequence
  Synthetic oligonucleotide
gatcgacaagggcttgttgaggcgagagat

SEQ ID NO: 258698 - DNA, 30 bp, Artificial Sequence
  Synthetic oligonucleotide
aagggagttcggctcgctagtcggagagat

SEQ ID NO: 258699 - DNA, 30 bp, Artificial Sequence
  Synthetic oligonucleotide
agtctgactagaccttggacaagtagagat

SEQ ID NO: 258700 - DNA, 30 bp, Artificial Sequence
  Synthetic oligonucleotide
taaacaaccactcttttgtagagtagagat

SEQ ID NO: 258701 - DNA, 30 bp, Artificial Sequence
  Synthetic oligonucleotide
gatgcacgtaacgccggtattcaacgagat

SEQ ID NO: 258702 - DNA, 30 bp, Artificial Sequence
  Synthetic oligonucleotide
gggcaatctttggtacccaagggacgagat

SEQ ID NO: 258703 - DNA, 30 bp, Artificial Sequence
  Synthetic oligonucleotide
accctgcagtaggacgtagatctacgagat

SEQ ID NO: 258704 - DNA, 29 bp, Artificial Sequence
  Synthetic oligonucleotide
acgtcccgtggtaaaagtgggtacgagat

SEQ ID NO: 258705 - DNA, 30 bp, Artificial Sequence
  Synthetic oligonucleotide
ggggcgggcctaaatgtccaaattcgagat

SEQ ID NO: 258706 - DNA, 30 bp, Artificial Sequence
  Synthetic oligonucleotide
aagacgactgtatttggactttttcgagat

SEQ ID NO: 258707 - DNA, 30 bp, Artificial Sequence
  Synthetic oligonucleotide
gcggcacttgccagcatgccggaaggagat

SEQ ID NO: 258708 - DNA, 30 bp, Artificial Sequence
  Synthetic oligonucleotide
gaaagctacacatagggtaaaggaggagat

SEQ ID NO: 258709 - DNA, 30 bp, Artificial Sequence
  Synthetic oligonucleotide
acacgggttccgggcacgcatcacggagat

SEQ ID NO: 258710 - DNA, 30 bp, Artificial Sequence
  Synthetic oligonucleotide
acccttggttatccagaaaaagacggagat

SEQ ID NO: 258711 - DNA, 30 bp, Artificial Sequence
  Synthetic oligonucleotide
gtgataaattccagcccatcgggatgagat

SEQ ID NO: 258712 - DNA, 30 bp, Artificial Sequence
  Synthetic oligonucleotide
gtaattagctgctaggtagctctatgagat

SEQ ID NO: 258713 - DNA, 30 bp, Artificial Sequence
  Synthetic oligonucleotide
cttgcaatgccttcaattggcttatgagat

SEQ ID NO: 258714 - DNA, 30 bp, Artificial Sequence
  Synthetic oligonucleotide
cagcaggtcctaaataacattttctgagat

SEQ ID NO: 258715 - DNA, 30 bp, Artificial Sequence
  Synthetic oligonucleotide
gacatcgcctcataagtaactgagtgagat

SEQ ID NO: 258716 - DNA, 30 bp, Artificial Sequence
  Synthetic oligonucleotide
gaggacacgactcgaattcactggtgagat

SEQ ID NO: 258717 - DNA, 30 bp, Artificial Sequence
  Synthetic oligonucleotide
gatggttcgtcagattatgtgtattgagat

SEQ ID NO: 258718 - DNA, 30 bp, Artificial Sequence
  Synthetic oligonucleotide
caccccaagactgactgtatttgttgagat

SEQ ID NO: 258719 - DNA, 30 bp, Artificial Sequence
  Synthetic oligonucleotide
ccttacacgtagggagtagattgaatagat

SEQ ID NO: 258720 - DNA, 30 bp, Artificial Sequence
  Synthetic oligonucleotide
ggtgttaataggtttcatttaagcatagat

SEQ ID NO: 258721 - DNA, 30 bp, Artificial Sequence
  Synthetic oligonucleotide
gcctgggttcgagacaccaatttcatagat

SEQ ID NO: 258722 - DNA, 30 bp, Artificial Sequence
  Synthetic oligonucleotide
tgtccgacgataattgaggatcggatagat

SEQ ID NO: 258723 - DNA, 30 bp, Artificial Sequence
  Synthetic oligonucleotide
tccgcgggcgagttagcaaacagtatagat

SEQ ID NO: 258724 - DNA, 30 bp, Artificial Sequence
  Synthetic oligonucleotide
catagtacggacatgtagccatcactagat

SEQ ID NO: 258725 - DNA, 30 bp, Artificial Sequence
  Synthetic oligonucleotide
caggctaggcgcgcatacgcccccctagat

SEQ ID NO: 258726 - DNA, 30 bp, Artificial Sequence
  Synthetic oligonucleotide
tctatagatgtcactgggtgcaagctagat

SEQ ID NO: 258727 - DNA, 30 bp, Artificial Sequence
  Synthetic oligonucleotide
tagatagtgatcgatttgaaattgctagat

SEQ ID NO: 258728 - DNA, 30 bp, Artificial Sequence
  Synthetic oligonucleotide
gactaatcgggtttcaatccacaagtagat

SEQ ID NO: 258729 - DNA, 30 bp, Artificial Sequence
  Synthetic oligonucleotide
ctaaacatcacaagtggttatctcgtagat

SEQ ID NO: 258730 - DNA, 30 bp, Artificial Sequence
  Synthetic oligonucleotide
accagtcaatcgccgttactgcgggtagat

SEQ ID NO: 258731 - DNA, 30 bp, Artificial Sequence
  Synthetic oligonucleotide
gaatgctcagacttacagtagggggtagat

SEQ ID NO: 258732 - DNA, 30 bp, Artificial Sequence
  Synthetic oligonucleotide
gccacccgagcatcccagtaggctgtagat

SEQ ID NO: 258733 - DNA, 30 bp, Artificial Sequence
  Synthetic oligonucleotide
ggagaggcccgtagtaatgatggtgtagat

SEQ ID NO: 258734 - DNA, 30 bp, Artificial Sequence
  Synthetic oligonucleotide
cgaatgcactagtgctttctgaccttagat

SEQ ID NO: 258735 - DNA, 30 bp, Artificial Sequence
  Synthetic oligonucleotide
ttacaccgcgcggctcggttggtcttagat

SEQ ID NO: 258736 - DNA, 30 bp, Artificial Sequence
  Synthetic oligonucleotide
tttgcgaaatgaggacattcgccgttagat

SEQ ID NO: 258737 - DNA, 30 bp, Artificial Sequence
  Synthetic oligonucleotide
tttgcgtgtacaatagtggccattttagat

SEQ ID NO: 258738 - DNA, 30 bp, Artificial Sequence
  Synthetic oligonucleotide
gcgacactaactccatatatttgaaacgat

SEQ ID NO: 258739 - DNA, 30 bp, Artificial Sequence
  Synthetic oligonucleotide
ttatgtttgcatttagtcctgaggaacgat

SEQ ID NO: 258740 - DNA, 30 bp, Artificial Sequence
  Synthetic oligonucleotide
gctagtccttgaagagtagatggtaacgat

SEQ ID NO: 258741 - DNA, 30 bp, Artificial Sequence
  Synthetic oligonucleotide
cgtgcgtgctaggtctagaggtaacacgat

SEQ ID NO: 258742 - DNA, 30 bp, Artificial Sequence
  Synthetic oligonucleotide
ataccataacgtcctagttaaagacacgat

SEQ ID NO: 258743 - DNA, 30 bp, Artificial Sequence
  Synthetic oligonucleotide
ggagggttaggggcgctgaactaagacgat

SEQ ID NO: 258744 - DNA, 30 bp, Artificial Sequence
  Synthetic oligonucleotide
aacgattgattcggccacgcaatagacgat

SEQ ID NO: 258745 - DNA, 30 bp, Artificial Sequence
  Synthetic oligonucleotide
agcttcattgccataatcccaaaatacgat

SEQ ID NO: 258746 - DNA, 30 bp, Artificial Sequence
  Synthetic oligonucleotide
caattgtagtagccgcttggtacatacgat

SEQ ID NO: 258747 - DNA, 30 bp, Artificial Sequence
  Synthetic oligonucleotide
cgggtttgagttacccatcgcaattacgat

SEQ ID NO: 258748 - DNA, 30 bp, Artificial Sequence
  Synthetic oligonucleotide
ggtacgtcagaggtaacagtgcattacgat

SEQ ID NO: 258749 - DNA, 30 bp, Artificial Sequence
  Synthetic oligonucleotide
tatatggatagataagaaacggattacgat

SEQ ID NO: 258750 - DNA, 30 bp, Artificial Sequence
  Synthetic oligonucleotide
tacactccaaaggaggtccagataaccgat

SEQ ID NO: 258751 - DNA, 30 bp, Artificial Sequence
  Synthetic oligonucleotide
tgtataagatagcgcaatcgtaacaccgat

SEQ ID NO: 258752 - DNA, 30 bp, Artificial Sequence
  Synthetic oligonucleotide
gaggcagtaacagctacctgagacaccgat

SEQ ID NO: 258753 - DNA, 30 bp, Artificial Sequence
  Synthetic oligonucleotide
gggtgggttataaaccggtccgaacccgat

SEQ ID NO: 258754 - DNA, 30 bp, Artificial Sequence
  Synthetic oligonucleotide
tcgccgatcacgacgctaggtgcacccgat

SEQ ID NO: 258755 - DNA, 30 bp, Artificial Sequence
  Synthetic oligonucleotide
gaatggtaattaagcgtgatgcgagccgat

SEQ ID NO: 258756 - DNA, 30 bp, Artificial Sequence
  Synthetic oligonucleotide
gccttgcgtaattatggtgctggagccgat

SEQ ID NO: 258757 - DNA, 30 bp, Artificial Sequence
  Synthetic oligonucleotide
ggcctcgtcacttgtctcaatagcgccgat

SEQ ID NO: 258758 - DNA, 30 bp, Artificial Sequence
  Synthetic oligonucleotide
tcttgcgagcggataccgcaggatgccgat

SEQ ID NO: 258759 - DNA, 30 bp, Artificial Sequence
  Synthetic oligonucleotide
cctcgcgaaaggagtgatcggaactccgat

SEQ ID NO: 258760 - DNA, 30 bp, Artificial Sequence
  Synthetic oligonucleotide
gggcaacatcgtcgattttgctactccgat

SEQ ID NO: 258761 - DNA, 30 bp, Artificial Sequence
  Synthetic oligonucleotide
accggaggaatagagtccgctcgttccgat

SEQ ID NO: 258762 - DNA, 30 bp, Artificial Sequence
  Synthetic oligonucleotide
gctggcccgatccgtggaatcggttccgat

SEQ ID NO: 258763 - DNA, 30 bp, Artificial Sequence
  Synthetic oligonucleotide
actgcagtttggcaggactatcaaagcgat

SEQ ID NO: 258764 - DNA, 30 bp, Artificial Sequence
  Synthetic oligonucleotide
cgagtacgtccttggcaccgcttaagcgat

SEQ ID NO: 258765 - DNA, 30 bp, Artificial Sequence
  Synthetic oligonucleotide
gaagttacaaggagtaatgtcgcgagcgat

SEQ ID NO: 258766 - DNA, 30 bp, Artificial Sequence
  Synthetic oligonucleotide
ctgtgtcattaaaacacggttctgagcgat

SEQ ID NO: 258767 - DNA, 30 bp, Artificial Sequence
  Synthetic oligonucleotide
tcgtggaggtcatagctttctttgagcgat

SEQ ID NO: 258768 - DNA, 30 bp, Artificial Sequence
  Synthetic oligonucleotide
cgttttacggagatggagacaaaacgcgat

SEQ ID NO: 258769 - DNA, 30 bp, Artificial Sequence
  Synthetic oligonucleotide
ggtcactgtgattcggaaggtcgccgcgat

SEQ ID NO: 258770 - DNA, 30 bp, Artificial Sequence
  Synthetic oligonucleotide
tttggaagtaacgttttggatttccgcgat

SEQ ID NO: 258771 - DNA, 30 bp, Artificial Sequence
  Synthetic oligonucleotide
gacatcatagatttgcacgtctagcgcgat

SEQ ID NO: 258772 - DNA, 30 bp, Artificial Sequence
  Synthetic oligonucleotide
cgaatggtctgggcgcccaataggcgcgat

SEQ ID NO: 258773 - DNA, 30 bp, Artificial Sequence
  Synthetic oligonucleotide
agagcaggaaattgcttttcctgtcgcgat

SEQ ID NO: 258774 - DNA, 30 bp, Artificial Sequence
  Synthetic oligonucleotide
agtcatctgtcacggttactcggaggcgat

SEQ ID NO: 258775 - DNA, 30 bp, Artificial Sequence
  Synthetic oligonucleotide
gcactgtttctagcgcttcataacggcgat

SEQ ID NO: 258776 - DNA, 30 bp, Artificial Sequence
  Synthetic oligonucleotide
tctaggtctagtattggtggatagggcgat

SEQ ID NO: 258777 - DNA, 30 bp, Artificial Sequence
  Synthetic oligonucleotide
tgaatcgagctaacaccttgcactggcgat

SEQ ID NO: 258778 - DNA, 30 bp, Artificial Sequence
  Synthetic oligonucleotide
ccgcactaagaaaacggctgcgtttgcgat

SEQ ID NO: 258779 - DNA, 30 bp, Artificial Sequence
  Synthetic oligonucleotide
tgttacatggagtttatctctacaatcgat

SEQ ID NO: 258780 - DNA, 30 bp, Artificial Sequence
  Synthetic oligonucleotide
agcacttccgcatatacatggcatatcgat

SEQ ID NO: 258781 - DNA, 30 bp, Artificial Sequence
  Synthetic oligonucleotide
cgtctgtctttggaatttcatggcctcgat

SEQ ID NO: 258782 - DNA, 30 bp, Artificial Sequence
  Synthetic oligonucleotide
aaacctggtgcctccggataaaagctcgat

SEQ ID NO: 258783 - DNA, 30 bp, Artificial Sequence
  Synthetic oligonucleotide
gtatagccaggcactatgtagcgtctcgat

SEQ ID NO: 258784 - DNA, 30 bp, Artificial Sequence
  Synthetic oligonucleotide
gtcgtagacgggacgggagggtgtctcgat

SEQ ID NO: 258785 - DNA, 30 bp, Artificial Sequence
  Synthetic oligonucleotide
tatcgaaaaaaactagcgattgttctcgat

SEQ ID NO: 258786 - DNA, 30 bp, Artificial Sequence
  Synthetic oligonucleotide
gtaaagcggtgccttaggacaaacgtcgat

SEQ ID NO: 258787 - DNA, 30 bp, Artificial Sequence
  Synthetic oligonucleotide
ccccgtatttcacggcaatggagcgtcgat

SEQ ID NO: 258788 - DNA, 30 bp, Artificial Sequence
  Synthetic oligonucleotide
acggcaccggacggtgaccggcatgtcgat

SEQ ID NO: 258789 - DNA, 30 bp, Artificial Sequence
  Synthetic oligonucleotide
atggattcctggagccctttacgtgtcgat

SEQ ID NO: 258790 - DNA, 30 bp, Artificial Sequence
  Synthetic oligonucleotide
cattaggttcactttcgacagtcattcgat

SEQ ID NO: 258791 - DNA, 30 bp, Artificial Sequence
  Synthetic oligonucleotide
gtagaggaacttcgtctgcgaagattcgat

SEQ ID NO: 258792 - DNA, 30 bp, Artificial Sequence
  Synthetic oligonucleotide
gcgggattctaccgccacggtttattcgat

SEQ ID NO: 258793 - DNA, 30 bp, Artificial Sequence
  Synthetic oligonucleotide
cagaatgaatgggcaagacaagcgttcgat

SEQ ID NO: 258794 - DNA, 30 bp, Artificial Sequence
  Synthetic oligonucleotide
atctaggatataaaaaccctctgtttcgat

SEQ ID NO: 258795 - DNA, 30 bp, Artificial Sequence
  Synthetic oligonucleotide
aaaatttacggtcaataagaataaaaggat

SEQ ID NO: 258796 - DNA, 30 bp, Artificial Sequence
  Synthetic oligonucleotide
ggaaaattagagtccacggtgcgaaaggat

SEQ ID NO: 258797 - DNA, 30 bp, Artificial Sequence
  Synthetic oligonucleotide
gacgtaagcaggcataaacctttaaaggat

SEQ ID NO: 258798 - DNA, 30 bp, Artificial Sequence
  Synthetic oligonucleotide
ataccttagtctacctatcgtggcaaggat

SEQ ID NO: 258799 - DNA, 30 bp, Artificial Sequence
  Synthetic oligonucleotide
ggttttggatattctaaagtagcgaaggat

SEQ ID NO: 258800 - DNA, 30 bp, Artificial Sequence
  Synthetic oligonucleotide
gcaagaccctggcagtgatttatgaaggat

SEQ ID NO: 258801 - DNA, 30 bp, Artificial Sequence
  Synthetic oligonucleotide
accaccacgcaagtttatgcggtgaaggat

SEQ ID NO: 258802 - DNA, 30 bp, Artificial Sequence
  Synthetic oligonucleotide
ggcggggcgaatgtgctcagacaacaggat

SEQ ID NO: 258803 - DNA, 30 bp, Artificial Sequence
  Synthetic oligonucleotide
caagacgtaattcagctatgtacacaggat

SEQ ID NO: 258804 - DNA, 30 bp, Artificial Sequence
  Synthetic oligonucleotide
agtgcaggaagaactgtaataagccaggat

SEQ ID NO: 258805 - DNA, 30 bp, Artificial Sequence
  Synthetic oligonucleotide
cctgtagtcgaacgggtaaaattccaggat

SEQ ID NO: 258806 - DNA, 30 bp, Artificial Sequence
  Synthetic oligonucleotide
tgtcggcgtctggctgtggcccagcaggat

SEQ ID NO: 258807 - DNA, 30 bp, Artificial Sequence
  Synthetic oligonucleotide
acaactctaagatagacctactcgcaggat

SEQ ID NO: 258808 - DNA, 30 bp, Artificial Sequence
  Synthetic oligonucleotide
catcagcctccaacacaacttcttcaggat

SEQ ID NO: 258809 - DNA, 30 bp, Artificial Sequence
  Synthetic oligonucleotide
gacggtcctataagctttgtaaaagaggat

SEQ ID NO: 258810 - DNA, 30 bp, Artificial Sequence
  Synthetic oligonucleotide
gagcgacgaggtccagaggagtacgaggat

SEQ ID NO: 258811 - DNA, 30 bp, Artificial Sequence
  Synthetic oligonucleotide
cattgttgcacaccagtcggcaccgaggat

SEQ ID NO: 258812 - DNA, 30 bp, Artificial Sequence
  Synthetic oligonucleotide
cccgggtcatcaataataaccttcgaggat

SEQ ID NO: 258813 - DNA, 30 bp, Artificial Sequence
  Synthetic oligonucleotide
agctggataataatactatacccggaggat

SEQ ID NO: 258814 - DNA, 30 bp, Artificial Sequence
  Synthetic oligonucleotide
ttgagggtagaactcatgcatggggaggat

SEQ ID NO: 258815 - DNA, 30 bp, Artificial Sequence
  Synthetic oligonucleotide
atatttgtgcatgccaattcttgggaggat

SEQ ID NO: 258816 - DNA, 30 bp, Artificial Sequence
  Synthetic oligonucleotide
gaaacaaaccgggcttgaatggaataggat

SEQ ID NO: 258817 - DNA, 30 bp, Artificial Sequence
  Synthetic oligonucleotide
atgatctaataacagactgccgtataggat

SEQ ID NO: 258818 - DNA, 30 bp, Artificial Sequence
  Synthetic oligonucleotide
ttacgtaccaactttgtcgtgcactaggat

SEQ ID NO: 258819 - DNA, 30 bp, Artificial Sequence
  Synthetic oligonucleotide
accggctctcgtccctattgggcctaggat

SEQ ID NO: 258820 - DNA, 30 bp, Artificial Sequence
  Synthetic oligonucleotide
taaccaccgctccgatacaggagctaggat

SEQ ID NO: 258821 - DNA, 30 bp, Artificial Sequence
  Synthetic oligonucleotide
gaacgaattcatcattacaaaaggtaggat

SEQ ID NO: 258822 - DNA, 30 bp, Artificial Sequence
  Synthetic oligonucleotide
gcaaattcggtgaggctgaagttttaggat

SEQ ID NO: 258823 - DNA, 30 bp, Artificial Sequence
  Synthetic oligonucleotide
ctcgacggcggaacactggtcaaaacggat

SEQ ID NO: 258824 - DNA, 30 bp, Artificial Sequence
  Synthetic oligonucleotide
agtccgttatgactagttcagaaaacggat

SEQ ID NO: 258825 - DNA, 30 bp, Artificial Sequence
  Synthetic oligonucleotide
gctgatagcacgagaagacgtacaacggat

SEQ ID NO: 258826 - DNA, 30 bp, Artificial Sequence
  Synthetic oligonucleotide
gcatagcgtattaggatccctgtaacggat

SEQ ID NO: 258827 - DNA, 30 bp, Artificial Sequence
  Synthetic oligonucleotide
taattacttgcggcctggaacagcacggat

SEQ ID NO: 258828 - DNA, 30 bp, Artificial Sequence
  Synthetic oligonucleotide
ttcagcctgtcgacacgacatggcacggat

SEQ ID NO: 258829 - DNA, 31 bp, Artificial Sequence
  Synthetic oligonucleotide
cttcaaatgtaagcgcccccaggcgacggat

SEQ ID NO: 258830 - DNA, 30 bp, Artificial Sequence
  Synthetic oligonucleotide
ggtctacattgaaagctgtgtgtaccggat

SEQ ID NO: 258831 - DNA, 30 bp, Artificial Sequence
  Synthetic oligonucleotide
gttaaagatcatactaaggtagccccggat

SEQ ID NO: 258832 - DNA, 30 bp, Artificial Sequence
  Synthetic oligonucleotide
ggaccgagccgttgacgtttagggccggat

SEQ ID NO: 258833 - DNA, 30 bp, Artificial Sequence
  Synthetic oligonucleotide
gtgctaaggaaactagtccgataagcggat

SEQ ID NO: 258834 - DNA, 30 bp, Artificial Sequence
  Synthetic oligonucleotide
cctcggtacaaccggccgcaaacagcggat

SEQ ID NO: 258835 - DNA, 30 bp, Artificial Sequence
  Synthetic oligonucleotide
aggagctccgtacagtacccctcagcggat

SEQ ID NO: 258836 - DNA, 30 bp, Artificial Sequence
  Synthetic oligonucleotide
tactaagaaaggcatatcgggcccgcggat

SEQ ID NO: 258837 - DNA, 30 bp, Artificial Sequence
  Synthetic oligonucleotide
cagcgtttatgtgagggaatagcggcggat

SEQ ID NO: 258838 - DNA, 30 bp, Artificial Sequence
  Synthetic oligonucleotide
tctgtggttcacggggccactattgcggat

SEQ ID NO: 258839 - DNA, 30 bp, Artificial Sequence
  Synthetic oligonucleotide
gttataccacagacaatgttacaatcggat

SEQ ID NO: 258840 - DNA, 30 bp, Artificial Sequence
  Synthetic oligonucleotide
gtccgagctgcaggtccgtaaacatcggat

SEQ ID NO: 258841 - DNA, 30 bp, Artificial Sequence
  Synthetic oligonucleotide
cggttccccacgtgggggccggactcggat

SEQ ID NO: 258842 - DNA, 30 bp, Artificial Sequence
  Synthetic oligonucleotide
attaacgtgtaggttccgtacgcctcggat

SEQ ID NO: 258843 - DNA, 30 bp, Artificial Sequence
  Synthetic oligonucleotide
tccaattattcgcagctggtatggtcggat

SEQ ID NO: 258844 - DNA, 30 bp, Artificial Sequence
  Synthetic oligonucleotide
tggtgggaagcgatcagcttttcttcggat

SEQ ID NO: 258845 - DNA, 30 bp, Artificial Sequence
  Synthetic oligonucleotide
ctacgattactcttcgttaaaatttcggat

SEQ ID NO: 258846 - DNA, 30 bp, Artificial Sequence
  Synthetic oligonucleotide
gggacggcccgggaatgtccgcacagggat

SEQ ID NO: 258847 - DNA, 30 bp, Artificial Sequence
  Synthetic oligonucleotide
gaactaaaagctgaccgcttggcgagggat

SEQ ID NO: 258848 - DNA, 30 bp, Artificial Sequence
  Synthetic oligonucleotide
tatcgagactacgggtgcttgaggagggat

SEQ ID NO: 258849 - DNA, 30 bp, Artificial Sequence
  Synthetic oligonucleotide
cttggcacaggagcagttcccactagggat

SEQ ID NO: 258850 - DNA, 30 bp, Artificial Sequence
  Synthetic oligonucleotide
ggaagtgtaggtcgatcccgcgttagggat

SEQ ID NO: 258851 - DNA, 30 bp, Artificial Sequence
  Synthetic oligonucleotide
ttaaattcattacaaatccggaaacgggat

SEQ ID NO: 258852 - DNA, 30 bp, Artificial Sequence
  Synthetic oligonucleotide
ggctccctcgaacgcaagaggaagcgggat

SEQ ID NO: 258853 - DNA, 30 bp, Artificial Sequence
  Synthetic oligonucleotide
gatccatgaaagctgtcgccctcgcgggat

SEQ ID NO: 258854 - DNA, 30 bp, Artificial Sequence
  Synthetic oligonucleotide
ccccatcagtaagggaaaccagggcgggat

SEQ ID NO: 258855 - DNA, 30 bp, Artificial Sequence
  Synthetic oligonucleotide
ttagtggtcgatcgcttttgttggcgggat

SEQ ID NO: 258856 - DNA, 30 bp, Artificial Sequence
  Synthetic oligonucleotide
tagacataactttcaggtgatgtgcgggat

SEQ ID NO: 258857 - DNA, 30 bp, Artificial Sequence
  Synthetic oligonucleotide
atctaactgaagagctgcaaagaaggggat

SEQ ID NO: 258858 - DNA, 30 bp, Artificial Sequence
  Synthetic oligonucleotide
gacaagtcgagagcggattctataggggat

SEQ ID NO: 258859 - DNA, 30 bp, Artificial Sequence
  Synthetic oligonucleotide
tccctaagcttctctcccggattaggggat

SEQ ID NO: 258860 - DNA, 30 bp, Artificial Sequence
  Synthetic oligonucleotide
gtatagccaggcatccactcgaccggggat

SEQ ID NO: 258861 - DNA, 30 bp, Artificial Sequence
  Synthetic oligonucleotide
actaatgctttggatccttcgaccggggat

SEQ ID NO: 258862 - DNA, 30 bp, Artificial Sequence
  Synthetic oligonucleotide
gacactgtctggctcttgtaacccggggat

SEQ ID NO: 258863 - DNA, 30 bp, Artificial Sequence
  Synthetic oligonucleotide
ggtgcgtttagacccggtgacgtgggggat

SEQ ID NO: 258864 - DNA, 30 bp, Artificial Sequence
  Synthetic oligonucleotide
tggcctccagaccttctcaccaatggggat

SEQ ID NO: 258865 - DNA, 30 bp, Artificial Sequence
  Synthetic oligonucleotide
tgggctccggggaacaccaagcctggggat

SEQ ID NO: 258866 - DNA, 30 bp, Artificial Sequence
  Synthetic oligonucleotide
cgtatagctcgggtttaatggcgtggggat

SEQ ID NO: 258867 - DNA, 30 bp, Artificial Sequence
  Synthetic oligonucleotide
gctccctacgtactctctaggcaatgggat

SEQ ID NO: 258868 - DNA, 30 bp, Artificial Sequence
  Synthetic oligonucleotide
taaccataggtgatgctttaggaatgggat

SEQ ID NO: 258869 - DNA, 30 bp, Artificial Sequence
  Synthetic oligonucleotide
cagaatcgagcggtcggatcaaactgggat

SEQ ID NO: 258870 - DNA, 30 bp, Artificial Sequence
  Synthetic oligonucleotide
cccgcgcatgagaaggagtcgttctgggat

SEQ ID NO: 258871 - DNA, 30 bp, Artificial Sequence
  Synthetic oligonucleotide
ggcgtttatcgagggaaagtactgtgggat

SEQ ID NO: 258872 - DNA, 30 bp, Artificial Sequence
  Synthetic oligonucleotide
agggcaaattgatgatggggctattgggat

SEQ ID NO: 258873 - DNA, 30 bp, Artificial Sequence
  Synthetic oligonucleotide
gtgtatttattaccctcaatgtcttgggat

SEQ ID NO: 258874 - DNA, 30 bp, Artificial Sequence
  Synthetic oligonucleotide
tatacaagagtgagtttaaccgtttgggat

SEQ ID NO: 258875 - DNA, 30 bp, Artificial Sequence
  Synthetic oligonucleotide
aaaagtgacgcggatacgggagaaatggat

SEQ ID NO: 258876 - DNA, 30 bp, Artificial Sequence
  Synthetic oligonucleotide
gaaggctattaccgacgcggttaaatggat

SEQ ID NO: 258877 - DNA, 30 bp, Artificial Sequence
  Synthetic oligonucleotide
caaacatgcgagtcaaccttagcaatggat

SEQ ID NO: 258878 - DNA, 30 bp, Artificial Sequence
  Synthetic oligonucleotide
cgcaatgatagtggagtcttgggcatggat

SEQ ID NO: 258879 - DNA, 30 bp, Artificial Sequence
  Synthetic oligonucleotide
atgtaatagacgtggctcaaattcatggat

SEQ ID NO: 258880 - DNA, 30 bp, Artificial Sequence
  Synthetic oligonucleotide
cttacgctcgggtcgtcgaaaactatggat

SEQ ID NO: 258881 - DNA, 30 bp, Artificial Sequence
  Synthetic oligonucleotide
agggcataataaagccacgcaggtatggat

SEQ ID NO: 258882 - DNA, 30 bp, Artificial Sequence
  Synthetic oligonucleotide
tacacgtgatgtcaggatcaaagactggat

SEQ ID NO: 258883 - DNA, 30 bp, Artificial Sequence
  Synthetic oligonucleotide
atacgggcgccttaatctcacgccctggat

SEQ ID NO: 258884 - DNA, 30 bp, Artificial Sequence
  Synthetic oligonucleotide
ttcctgcctgcgggatgttacggcctggat

SEQ ID NO: 258885 - DNA, 30 bp, Artificial Sequence
  Synthetic oligonucleotide
ctcagataactttcggcgtgctgagtggat

SEQ ID NO: 258886 - DNA, 30 bp, Artificial Sequence
  Synthetic oligonucleotide
aagtaccagctgaatagcagcaaggtggat

SEQ ID NO: 258887 - DNA, 30 bp, Artificial Sequence
  Synthetic oligonucleotide
cataccaggtcggctttactcatggtggat

SEQ ID NO: 258888 - DNA, 30 bp, Artificial Sequence
  Synthetic oligonucleotide
aaacaccaggcagtgctatatcacttggat

SEQ ID NO: 258889 - DNA, 30 bp, Artificial Sequence
  Synthetic oligonucleotide
aagggataatactctttgcttacgttggat

SEQ ID NO: 258890 - DNA, 30 bp, Artificial Sequence
  Synthetic oligonucleotide
aggaggtcggcagatacggccccgttggat

SEQ ID NO: 258891 - DNA, 30 bp, Artificial Sequence
  Synthetic oligonucleotide
atggggcgccgcgccgaatctggtttggat

SEQ ID NO: 258892 - DNA, 30 bp, Artificial Sequence
  Synthetic oligonucleotide
gtgtttagcactatagcgatatataatgat

SEQ ID NO: 258893 - DNA, 30 bp, Artificial Sequence
  Synthetic oligonucleotide
caacgccctaggccaaattaaggtaatgat

SEQ ID NO: 258894 - DNA, 30 bp, Artificial Sequence
  Synthetic oligonucleotide
gggggctaatccctgcggtataaacatgat

SEQ ID NO: 258895 - DNA, 30 bp, Artificial Sequence
  Synthetic oligonucleotide
gtactgaaaggaattctgaaatcgcatgat

SEQ ID NO: 258896 - DNA, 30 bp, Artificial Sequence
  Synthetic oligonucleotide
gctaaaaagattccgttgtacgcggatgat

SEQ ID NO: 258897 - DNA, 30 bp, Artificial Sequence
  Synthetic oligonucleotide
tcgggacactcccacaggtgagttgatgat

SEQ ID NO: 258898 - DNA, 30 bp, Artificial Sequence
  Synthetic oligonucleotide
catggggccgtggcgtgctcagtctatgat

SEQ ID NO: 258899 - DNA, 30 bp, Artificial Sequence
  Synthetic oligonucleotide
gcccggttggatataatgatcaagtatgat

SEQ ID NO: 258900 - DNA, 30 bp, Artificial Sequence
  Synthetic oligonucleotide
ttgcgctgtctgcaagtactgacgtatgat

SEQ ID NO: 258901 - DNA, 30 bp, Artificial Sequence
  Synthetic oligonucleotide
taagcaactgcagtcaacgcgtggtatgat

SEQ ID NO: 258902 - DNA, 30 bp, Artificial Sequence
  Synthetic oligonucleotide
atacgactcgatgtggtctaatgttatgat

SEQ ID NO: 258903 - DNA, 31 bp, Artificial Sequence
  Synthetic oligonucleotide
attcggataccataccctatgtatttatgat

SEQ ID NO: 258904 - DNA, 30 bp, Artificial Sequence
  Synthetic oligonucleotide
tgaagtgccctattaaagaataacactgat

SEQ ID NO: 258905 - DNA, 30 bp, Artificial Sequence
  Synthetic oligonucleotide
catagccacttgcaatcggtataacctgat

SEQ ID NO: 258906 - DNA, 30 bp, Artificial Sequence
  Synthetic oligonucleotide
gcaatttagactagatacgcgacacctgat

SEQ ID NO: 258907 - DNA, 30 bp, Artificial Sequence
  Synthetic oligonucleotide
tctagtgtcaagaatggcggcgaccctgat

SEQ ID NO: 258908 - DNA, 30 bp, Artificial Sequence
  Synthetic oligonucleotide
gaacattccgaagtaattcattcgcctgat

SEQ ID NO: 258909 - DNA, 30 bp, Artificial Sequence
  Synthetic oligonucleotide
agcattcggccactaggtacttcagctgat

SEQ ID NO: 258910 - DNA, 30 bp, Artificial Sequence
  Synthetic oligonucleotide
ggacacaaaaccatcggagccggagctgat

SEQ ID NO: 258911 - DNA, 30 bp, Artificial Sequence
  Synthetic oligonucleotide
gccaacgttgggtgcgtgcagtccgctgat

SEQ ID NO: 258912 - DNA, 30 bp, Artificial Sequence
  Synthetic oligonucleotide
tgaattctacatgcgctaagcattgctgat

SEQ ID NO: 258913 - DNA, 30 bp, Artificial Sequence
  Synthetic oligonucleotide
gcgaatcagagaaccagaagaagatctgat

SEQ ID NO: 258914 - DNA, 30 bp, Artificial Sequence
  Synthetic oligonucleotide
cggaggtttctgcagcgtgtgctatctgat

SEQ ID NO: 258915 - DNA, 30 bp, Artificial Sequence
  Synthetic oligonucleotide
tatttccactgaatagtggtattctctgat

SEQ ID NO: 258916 - DNA, 30 bp, Artificial Sequence
  Synthetic oligonucleotide
atggacctcgaccgtttattcctttctgat

SEQ ID NO: 258917 - DNA, 30 bp, Artificial Sequence
  Synthetic oligonucleotide
ccgtgtagaacttaactagccaacagtgat

SEQ ID NO: 258918 - DNA, 30 bp, Artificial Sequence
  Synthetic oligonucleotide
cctactatctattaccaggaaaggagtgat

SEQ ID NO: 258919 - DNA, 30 bp, Artificial Sequence
  Synthetic oligonucleotide
tcatgacccgctaatgttggcgttagtgat

SEQ ID NO: 258920 - DNA, 30 bp, Artificial Sequence
  Synthetic oligonucleotide
actgagcaactctttatgaggatccgtgat

SEQ ID NO: 258921 - DNA, 30 bp, Artificial Sequence
  Synthetic oligonucleotide
ctggcaggatttgagcttcggcggcgtgat

SEQ ID NO: 258922 - DNA, 30 bp, Artificial Sequence
  Synthetic oligonucleotide
agaaccaaacaagtatggctgtggcgtgat

SEQ ID NO: 258923 - DNA, 30 bp, Artificial Sequence
  Synthetic oligonucleotide
taagaatggtgaactagtgttctgcgtgat

SEQ ID NO: 258924 - DNA, 30 bp, Artificial Sequence
  Synthetic oligonucleotide
aaagcttgtaaagcagccaagcgaggtgat

SEQ ID NO: 258925 - DNA, 30 bp, Artificial Sequence
  Synthetic oligonucleotide
tccagatggcatagactcgaaggaggtgat

SEQ ID NO: 258926 - DNA, 30 bp, Artificial Sequence
  Synthetic oligonucleotide
actacaagcccgataggcatcggaggtgat

SEQ ID NO: 258927 - DNA, 30 bp, Artificial Sequence
  Synthetic oligonucleotide
gcactaccgggcgggctcttggagggtgat

SEQ ID NO: 258928 - DNA, 30 bp, Artificial Sequence
  Synthetic oligonucleotide
ctacaagcagccaaccttggccatggtgat

SEQ ID NO: 258929 - DNA, 30 bp, Artificial Sequence
  Synthetic oligonucleotide
caacgatcgatacccgggcccgatggtgat

SEQ ID NO: 258930 - DNA, 30 bp, Artificial Sequence
  Synthetic oligonucleotide
agagttaaactgagtatcgttttttgtgat

SEQ ID NO: 258931 - DNA, 30 bp, Artificial Sequence
  Synthetic oligonucleotide
gagagatcgccacacttggctcgaattgat

SEQ ID NO: 258932 - DNA, 30 bp, Artificial Sequence
  Synthetic oligonucleotide
ggttcgtcttacgatccggtatttattgat

SEQ ID NO: 258933 - DNA, 30 bp, Artificial Sequence
  Synthetic oligonucleotide
actgacgagcagcggatattaggacttgat

SEQ ID NO: 258934 - DNA, 30 bp, Artificial Sequence
  Synthetic oligonucleotide
tgcgtgattgtccgttattagggacttgat

SEQ ID NO: 258935 - DNA, 30 bp, Artificial Sequence
  Synthetic oligonucleotide
ccttctagtcgaaaatgtctttctcttgat

SEQ ID NO: 258936 - DNA, 30 bp, Artificial Sequence
  Synthetic oligonucleotide
acatgcggatactttgccggttgtgttgat

SEQ ID NO: 258937 - DNA, 30 bp, Artificial Sequence
  Synthetic oligonucleotide
gggcacactcgtttttatcacgcctttgat

SEQ ID NO: 258938 - DNA, 30 bp, Artificial Sequence
  Synthetic oligonucleotide
ggttgtctttacaatttaccaaggtttgat

SEQ ID NO: 258939 - DNA, 30 bp, Artificial Sequence
  Synthetic oligonucleotide
gcccaagcgaacaccgcgcatgtttttgat

SEQ ID NO: 258940 - DNA, 30 bp, Artificial Sequence
  Synthetic oligonucleotide
gggcagaattttaggaaagtggaaaaatat

SEQ ID NO: 258941 - DNA, 30 bp, Artificial Sequence
  Synthetic oligonucleotide
tgtgccacatcccagcaacgcaccaaatat

SEQ ID NO: 258942 - DNA, 30 bp, Artificial Sequence
  Synthetic oligonucleotide
agcctgtggcccagccatttcaggaaatat

SEQ ID NO: 258943 - DNA, 30 bp, Artificial Sequence
  Synthetic oligonucleotide
atgccctcgccgaacgtaaagcttaaatat

SEQ ID NO: 258944 - DNA, 30 bp, Artificial Sequence
  Synthetic oligonucleotide
acgctttagatcaggtgcacaacccaatat

SEQ ID NO: 258945 - DNA, 30 bp, Artificial Sequence
  Synthetic oligonucleotide
taggacaatcagatacacccggcgcaatat

SEQ ID NO: 258946 - DNA, 30 bp, Artificial Sequence
  Synthetic oligonucleotide
gctataacatgccaaaatctatctcaatat

SEQ ID NO: 258947 - DNA, 30 bp, Artificial Sequence
  Synthetic oligonucleotide
attggtcaggcgtactatgagatcgaatat

SEQ ID NO: 258948 - DNA, 30 bp, Artificial Sequence
  Synthetic oligonucleotide
gcacactactaaagcgacacaactgaatat

SEQ ID NO: 258949 - DNA, 30 bp, Artificial Sequence
  Synthetic oligonucleotide
agaaaaggtgacagggcgaaaaaataatat

SEQ ID NO: 258950 - DNA, 30 bp, Artificial Sequence
  Synthetic oligonucleotide
atcgctgaaacattagatagaccataatat

SEQ ID NO: 258951 - DNA, 30 bp, Artificial Sequence
  Synthetic oligonucleotide
gaaaatgtgacgtgctcaaatccataatat

SEQ ID NO: 258952 - DNA, 31 bp, Artificial Sequence
  Synthetic oligonucleotide
gggggtacggtaaactaacgctatataatat

SEQ ID NO: 258953 - DNA, 30 bp, Artificial Sequence
  Synthetic oligonucleotide
tattggcaccagaaagcagttcactaatat

SEQ ID NO: 258954 - DNA, 30 bp, Artificial Sequence
  Synthetic oligonucleotide
aagtgtggttcgttacaaatgacgtaatat

SEQ ID NO: 258955 - DNA, 30 bp, Artificial Sequence
  Synthetic oligonucleotide
catactttgtttgactcgatgagttaatat

SEQ ID NO: 258956 - DNA, 30 bp, Artificial Sequence
  Synthetic oligonucleotide
ggccgtaaccatgccggtgggtcaacatat

SEQ ID NO: 258957 - DNA, 30 bp, Artificial Sequence
  Synthetic oligonucleotide
agaggagttacagtaagtggctgaacatat

SEQ ID NO: 258958 - DNA, 30 bp, Artificial Sequence
  Synthetic oligonucleotide
tccttaatacgcggagcatttagcacatat

SEQ ID NO: 258959 - DNA, 30 bp, Artificial Sequence
  Synthetic oligonucleotide
gattgcaacactctcaccagcggcacatat

SEQ ID NO: 258960 - DNA, 30 bp, Artificial Sequence
  Synthetic oligonucleotide
tagaaacatatctcataatgggagacatat

SEQ ID NO: 258961 - DNA, 30 bp, Artificial Sequence
  Synthetic oligonucleotide
caacgatttcgaacctacggtggtacatat

SEQ ID NO: 258962 - DNA, 30 bp, Artificial Sequence
  Synthetic oligonucleotide
agtgtgcttgcgcgtcagtactgcccatat

SEQ ID NO: 258963 - DNA, 31 bp, Artificial Sequence
  Synthetic oligonucleotide
ttagccgtacgagcggcaaaagaagccatat

SEQ ID NO: 258964 - DNA, 30 bp, Artificial Sequence
  Synthetic oligonucleotide
gtcaggacacgctttaaggttactccatat

SEQ ID NO: 258965 - DNA, 30 bp, Artificial Sequence
  Synthetic oligonucleotide
ccagtataatgaaagactgaggctccatat

SEQ ID NO: 258966 - DNA, 30 bp, Artificial Sequence
  Synthetic oligonucleotide
agtttcccaaatagatacatcgaagcatat

SEQ ID NO: 258967 - DNA, 31 bp, Artificial Sequence
  Synthetic oligonucleotide
aagagaggcgtggaagtccgcacacgcatat

SEQ ID NO: 258968 - DNA, 30 bp, Artificial Sequence
  Synthetic oligonucleotide
gatgggccgtggctcgaaaacgtcgcatat

SEQ ID NO: 258969 - DNA, 30 bp, Artificial Sequence
  Synthetic oligonucleotide
atgtggagtccataggggcggtcggcatat

SEQ ID NO: 258970 - DNA, 30 bp, Artificial Sequence
  Synthetic oligonucleotide
tggacggccagagtcataaaacgggcatat

SEQ ID NO: 258971 - DNA, 29 bp, Artificial Sequence
  Synthetic oligonucleotide
cttggtagaccagaataggtagctcatat

SEQ ID NO: 258972 - DNA, 30 bp, Artificial Sequence
  Synthetic oligonucleotide
tgtcatccgataatacgggaggagtcatat

SEQ ID NO: 258973 - DNA, 30 bp, Artificial Sequence
  Synthetic oligonucleotide
catggctggtaactatatttccggtcatat

SEQ ID NO: 258974 - DNA, 30 bp, Artificial Sequence
  Synthetic oligonucleotide
aacacgtgtcagttaaaactcgtaagatat

SEQ ID NO: 258975 - DNA, 30 bp, Artificial Sequence
  Synthetic oligonucleotide
gcgctccgggcgacggaggaggccagatat

SEQ ID NO: 258976 - DNA, 30 bp, Artificial Sequence
  Synthetic oligonucleotide
tgaaacgcgggtgcaacgatcggtagatat

SEQ ID NO: 258977 - DNA, 30 bp, Artificial Sequence
  Synthetic oligonucleotide
ctatgggctcacagacagttcggacgatat

SEQ ID NO: 258978 - DNA, 30 bp, Artificial Sequence
  Synthetic oligonucleotide
gcctcggggtttgaacaatacgtccgatat

SEQ ID NO: 258979 - DNA, 30 bp, Artificial Sequence
  Synthetic oligonucleotide
tggagggttgtacgcaggctggtgcgatat

SEQ ID NO: 258980 - DNA, 30 bp, Artificial Sequence
  Synthetic oligonucleotide
cggcgcgtagtcagtaccatggttcgatat

SEQ ID NO: 258981 - DNA, 30 bp, Artificial Sequence
  Synthetic oligonucleotide
aggtctattgcacgccgagagcgaggatat

SEQ ID NO: 258982 - DNA, 30 bp, Artificial Sequence
  Synthetic oligonucleotide
tagtaagtaatagataagctgaacggatat

SEQ ID NO: 258983 - DNA, 30 bp, Artificial Sequence
  Synthetic oligonucleotide
agccgtggttacgagtatgcccacggatat

SEQ ID NO: 258984 - DNA, 30 bp, Artificial Sequence
  Synthetic oligonucleotide
tcgatagtcgcaagcccatctagcggatat

SEQ ID NO: 258985 - DNA, 30 bp, Artificial Sequence
  Synthetic oligonucleotide
ggaatatgctccttagtttgacagggatat

SEQ ID NO: 258986 - DNA, 30 bp, Artificial Sequence
  Synthetic oligonucleotide
accaaggtacacacctcgggagagggatat

SEQ ID NO: 258987 - DNA, 30 bp, Artificial Sequence
  Synthetic oligonucleotide
acgaccaggatccatccggtaaggggatat

SEQ ID NO: 258988 - DNA, 30 bp, Artificial Sequence
  Synthetic oligonucleotide
agaaaattcatcgagatggtaatgggatat

SEQ ID NO: 258989 - DNA, 30 bp, Artificial Sequence
  Synthetic oligonucleotide
tctataaattgcatacggggacatggatat

SEQ ID NO: 258990 - DNA, 30 bp, Artificial Sequence
  Synthetic oligonucleotide
tgaatcgtccgcgtgtacggtacgtgatat

SEQ ID NO: 258991 - DNA, 30 bp, Artificial Sequence
  Synthetic oligonucleotide
agcatatgccgcgatagtttccggtgatat

SEQ ID NO: 258992 - DNA, 30 bp, Artificial Sequence
  Synthetic oligonucleotide
cctcaacgcgtcttcgattagacaatatat

SEQ ID NO: 258993 - DNA, 30 bp, Artificial Sequence
  Synthetic oligonucleotide
gcctgctcgcgctcccggatgccaatatat

SEQ ID NO: 258994 - DNA, 30 bp, Artificial Sequence
  Synthetic oligonucleotide
ggtcgccaccattcaggacggcgaatatat

SEQ ID NO: 258995 - DNA, 30 bp, Artificial Sequence
  Synthetic oligonucleotide
cttgtgggctactgtgatatgggaatatat

SEQ ID NO: 258996 - DNA, 30 bp, Artificial Sequence
  Synthetic oligonucleotide
gggggagtcggttgacacaggtgcatatat

SEQ ID NO: 258997 - DNA, 30 bp, Artificial Sequence
  Synthetic oligonucleotide
atcgaatttatcacggggacgggtatatat

SEQ ID NO: 258998 - DNA, 30 bp, Artificial Sequence
  Synthetic oligonucleotide
atacgtataggccttattagtagactatat

SEQ ID NO: 258999 - DNA, 30 bp, Artificial Sequence
  Synthetic oligonucleotide
cagttatggcctggaggagtgatactatat

SEQ ID NO: 259000 - DNA, 30 bp, Artificial Sequence
  Synthetic oligonucleotide
gccttcaaacccgggggctctggcctatat

SEQ ID NO: 259001 - DNA, 30 bp, Artificial Sequence
  Synthetic oligonucleotide
gctcgtatgatgataagttcaaggctatat

SEQ ID NO: 259002 - DNA, 30 bp, Artificial Sequence
  Synthetic oligonucleotide
ctatcgcgccagtgtgtgagtctgctatat

SEQ ID NO: 259003 - DNA, 30 bp, Artificial Sequence
  Synthetic oligonucleotide
cggtttaccgcccaagaagtggtgctatat

SEQ ID NO: 259004 - DNA, 30 bp, Artificial Sequence
  Synthetic oligonucleotide
cgtcacgtcgtcagacatcccggagtatat

SEQ ID NO: 259005 - DNA, 30 bp, Artificial Sequence
  Synthetic oligonucleotide
accttagatatagagtataaatgagtatat

SEQ ID NO: 259006 - DNA, 30 bp, Artificial Sequence
  Synthetic oligonucleotide
tcagcacgaacgtagggaagttacgtatat

SEQ ID NO: 259007 - DNA, 30 bp, Artificial Sequence
  Synthetic oligonucleotide
cgacgatctaaacgctggaactaggtatat

SEQ ID NO: 259008 - DNA, 30 bp, Artificial Sequence
  Synthetic oligonucleotide
tctgaccaaaccatccaaaatacggtatat

SEQ ID NO: 259009 - DNA, 30 bp, Artificial Sequence
  Synthetic oligonucleotide
atggtgagttaaaaactcctatgggtatat

SEQ ID NO: 259010 - DNA, 30 bp, Artificial Sequence
  Synthetic oligonucleotide
tcgcagtaagaatgcctagtcgtggtatat

SEQ ID NO: 259011 - DNA, 30 bp, Artificial Sequence
  Synthetic oligonucleotide
agcggggccgctaataattatgatgtatat

SEQ ID NO: 259012 - DNA, 30 bp, Artificial Sequence
  Synthetic oligonucleotide
ttatgcactgatggaggttgggctgtatat

SEQ ID NO: 259013 - DNA, 30 bp, Artificial Sequence
  Synthetic oligonucleotide
ggtgcacgctacatgagtataattgtatat

SEQ ID NO: 259014 - DNA, 30 bp, Artificial Sequence
  Synthetic oligonucleotide
caaatcgttagagcatcgctatttgtatat

SEQ ID NO: 259015 - DNA, 30 bp, Artificial Sequence
  Synthetic oligonucleotide
ttaagtctatcccggcatgtgcgattatat

SEQ ID NO: 259016 - DNA, 30 bp, Artificial Sequence
  Synthetic oligonucleotide
gttcgatagattagagttccaaacttatat

SEQ ID NO: 259017 - DNA, 30 bp, Artificial Sequence
  Synthetic oligonucleotide
gggcggatacgccgctcgctgatcttatat

SEQ ID NO: 259018 - DNA, 30 bp, Artificial Sequence
  Synthetic oligonucleotide
agaaaaatatgcgaaacagtcctgttatat

SEQ ID NO: 259019 - DNA, 30 bp, Artificial Sequence
  Synthetic oligonucleotide
cagtttacattggtctccaaccttttatat

SEQ ID NO: 259020 - DNA, 30 bp, Artificial Sequence
  Synthetic oligonucleotide
tctcaacgttaggggttaaacgcaaactat

SEQ ID NO: 259021 - DNA, 30 bp, Artificial Sequence
  Synthetic oligonucleotide
tgtcagctaaggactagactgaagaactat

SEQ ID NO: 259022 - DNA, 30 bp, Artificial Sequence
  Synthetic oligonucleotide
gctccggctctctggcgggtaagtaactat

SEQ ID NO: 259023 - DNA, 30 bp, Artificial Sequence
  Synthetic oligonucleotide
aagtgggctggacaagtgaagtttcactat

SEQ ID NO: 259024 - DNA, 30 bp, Artificial Sequence
  Synthetic oligonucleotide
caccacgggacggatcggtattaggactat

SEQ ID NO: 259025 - DNA, 30 bp, Artificial Sequence
  Synthetic oligonucleotide
tgctattaaataggacaggggtctgactat

SEQ ID NO: 259026 - DNA, 30 bp, Artificial Sequence
  Synthetic oligonucleotide
tgcaagatctttacagagagcatctactat

SEQ ID NO: 259027 - DNA, 30 bp, Artificial Sequence
  Synthetic oligonucleotide
gtacgaggaacttattgcgtaaattactat

SEQ ID NO: 259028 - DNA, 30 bp, Artificial Sequence
  Synthetic oligonucleotide
catgcagctagtcacattatgtgttactat

SEQ ID NO: 259029 - DNA, 30 bp, Artificial Sequence
  Synthetic oligonucleotide
gcatgcgaattaccgtccgacatttactat

SEQ ID NO: 259030 - DNA, 30 bp, Artificial Sequence
  Synthetic oligonucleotide
cttcttgacttggtactatgcctaacctat

SEQ ID NO: 259031 - DNA, 30 bp, Artificial Sequence
  Synthetic oligonucleotide
aggtgcacacacgctttgcgcgagacctat

SEQ ID NO: 259032 - DNA, 30 bp, Artificial Sequence
  Synthetic oligonucleotide
cgtcagcggcggaaggcccacattacctat

SEQ ID NO: 259033 - DNA, 30 bp, Artificial Sequence
  Synthetic oligonucleotide
tgcgagatcatctggtaaagcattacctat

SEQ ID NO: 259034 - DNA, 30 bp, Artificial Sequence
  Synthetic oligonucleotide
atcgctcggcaggctcgagccggaccctat

SEQ ID NO: 259035 - DNA, 30 bp, Artificial Sequence
  Synthetic oligonucleotide
ggtcagaagtgagcggtgtagggaccctat

SEQ ID NO: 259036 - DNA, 30 bp, Artificial Sequence
  Synthetic oligonucleotide
gctcgcggtttttaaacgaccgagccctat

SEQ ID NO: 259037 - DNA, 30 bp, Artificial Sequence
  Synthetic oligonucleotide
ggcctgggctgccaaagctacacagcctat

SEQ ID NO: 259038 - DNA, 30 bp, Artificial Sequence
  Synthetic oligonucleotide
gtgactaggcacttcagcagtgcagcctat

SEQ ID NO: 259039 - DNA, 30 bp, Artificial Sequence
  Synthetic oligonucleotide
ggtaacgatcaggtgggacgatgagcctat

SEQ ID NO: 259040 - DNA, 30 bp, Artificial Sequence
  Synthetic oligonucleotide
tgcaggaacatgtgcacaactctggcctat

SEQ ID NO: 259041 - DNA, 30 bp, Artificial Sequence
  Synthetic oligonucleotide
ccaagcaagaaatagatcttgcctgcctat

SEQ ID NO: 259042 - DNA, 30 bp, Artificial Sequence
  Synthetic oligonucleotide
ggcactccctccggcaccggtaagtcctat

SEQ ID NO: 259043 - DNA, 30 bp, Artificial Sequence
  Synthetic oligonucleotide
gatgacggggggaccaccgagtagagctat

SEQ ID NO: 259044 - DNA, 30 bp, Artificial Sequence
  Synthetic oligonucleotide
gttaaatacagactgaacgcgccgagctat

SEQ ID NO: 259045 - DNA, 30 bp, Artificial Sequence
  Synthetic oligonucleotide
atgctccacagcgctggattggatagctat

SEQ ID NO: 259046 - DNA, 30 bp, Artificial Sequence
  Synthetic oligonucleotide
ctaggggcgactagtgggaataaacgctat

SEQ ID NO: 259047 - DNA, 30 bp, Artificial Sequence
  Synthetic oligonucleotide
ggcgcgaccttcggaccgctaccacgctat

SEQ ID NO: 259048 - DNA, 30 bp, Artificial Sequence
  Synthetic oligonucleotide
ggcatgcaaatgaaacaagtcgtacgctat

SEQ ID NO: 259049 - DNA, 30 bp, Artificial Sequence
  Synthetic oligonucleotide
agtggacggaggttctatgtgtgaggctat

SEQ ID NO: 259050 - DNA, 30 bp, Artificial Sequence
  Synthetic oligonucleotide
acagttaggcttgatcagttcttaggctat

SEQ ID NO: 259051 - DNA, 30 bp, Artificial Sequence
  Synthetic oligonucleotide
attaagacaatggtctccatgaccggctat

SEQ ID NO: 259052 - DNA, 30 bp, Artificial Sequence
  Synthetic oligonucleotide
ccgggctcccaaagagccgatgtcggctat

SEQ ID NO: 259053 - DNA, 30 bp, Artificial Sequence
  Synthetic oligonucleotide
cgtagtcagtcgtagttaccaccgggctat

SEQ ID NO: 259054 - DNA, 30 bp, Artificial Sequence
  Synthetic oligonucleotide
gcatgagaatttcgccgacgttggggctat

SEQ ID NO: 259055 - DNA, 30 bp, Artificial Sequence
  Synthetic oligonucleotide
gaggtctcttaacggcgtcacctgggctat

SEQ ID NO: 259056 - DNA, 30 bp, Artificial Sequence
  Synthetic oligonucleotide
ggcggattacgccatcacctggtgggctat

SEQ ID NO: 259057 - DNA, 30 bp, Artificial Sequence
  Synthetic oligonucleotide
tagcttggttccgccaagagtaatggctat

SEQ ID NO: 259058 - DNA, 30 bp, Artificial Sequence
  Synthetic oligonucleotide
gcaacatctaatggaatataccatggctat

SEQ ID NO: 259059 - DNA, 30 bp, Artificial Sequence
  Synthetic oligonucleotide
gatcttgagtcgctctgtacgtgatgctat

SEQ ID NO: 259060 - DNA, 30 bp, Artificial Sequence
  Synthetic oligonucleotide
cttctccaaggtcggacgttctggtgctat

SEQ ID NO: 259061 - DNA, 30 bp, Artificial Sequence
  Synthetic oligonucleotide
cagagggcatagattgaactaatgtgctat

SEQ ID NO: 259062 - DNA, 30 bp, Artificial Sequence
  Synthetic oligonucleotide
caggagtcggtacgcggactatcttgctat

SEQ ID NO: 259063 - DNA, 30 bp, Artificial Sequence
  Synthetic oligonucleotide
ctaaccgcgaattttttaaaatgttgctat

SEQ ID NO: 259064 - DNA, 30 bp, Artificial Sequence
  Synthetic oligonucleotide
attgttctgagggtacagagttaaatctat

SEQ ID NO: 259065 - DNA, 30 bp, Artificial Sequence
  Synthetic oligonucleotide
caggagctaaaactgctttcgcgcatctat

SEQ ID NO: 259066 - DNA, 30 bp, Artificial Sequence
  Synthetic oligonucleotide
ggatgatagcagaagcggagtctcatctat

SEQ ID NO: 259067 - DNA, 30 bp, Artificial Sequence
  Synthetic oligonucleotide
aagttacgcaatcccaagtccttcatctat

SEQ ID NO: 259068 - DNA, 30 bp, Artificial Sequence
  Synthetic oligonucleotide
tgagaacatcgtcagaaaatgacgatctat

SEQ ID NO: 259069 - DNA, 30 bp, Artificial Sequence
  Synthetic oligonucleotide
tagtaggggaaccttctaattactatctat

SEQ ID NO: 259070 - DNA, 30 bp, Artificial Sequence
  Synthetic oligonucleotide
tcacaccgccacggtatattgcaactctat

SEQ ID NO: 259071 - DNA, 30 bp, Artificial Sequence
  Synthetic oligonucleotide
catgcaaacgctatatagtaaacactctat

SEQ ID NO: 259072 - DNA, 30 bp, Artificial Sequence
  Synthetic oligonucleotide
attaatcgccactagcgccagggactctat

SEQ ID NO: 259073 - DNA, 30 bp, Artificial Sequence
  Synthetic oligonucleotide
cctacaacatttctgaaaatgctactctat

SEQ ID NO: 259074 - DNA, 30 bp, Artificial Sequence
  Synthetic oligonucleotide
acgaatggaattcgcgcttggctcctctat

SEQ ID NO: 259075 - DNA, 30 bp, Artificial Sequence
  Synthetic oligonucleotide
gtaacgcgtccgagtatcctcccgctctat

SEQ ID NO: 259076 - DNA, 30 bp, Artificial Sequence
  Synthetic oligonucleotide
tgtgactttaataatggtgaggcagtctat

SEQ ID NO: 259077 - DNA, 30 bp, Artificial Sequence
  Synthetic oligonucleotide
gctcatcacttctctcgccaactagtctat

SEQ ID NO: 259078 - DNA, 30 bp, Artificial Sequence
  Synthetic oligonucleotide
aaatgcagttcggtagccttggaggtctat

SEQ ID NO: 259079 - DNA, 30 bp, Artificial Sequence
  Synthetic oligonucleotide
gatggtagggccttcgattttaatgtctat

SEQ ID NO: 259080 - DNA, 30 bp, Artificial Sequence
  Synthetic oligonucleotide
agaacgaggctcgcgcgatcctttgtctat

SEQ ID NO: 259081 - DNA, 30 bp, Artificial Sequence
  Synthetic oligonucleotide
cattctgtctcctttgtattcaccttctat

SEQ ID NO: 259082 - DNA, 30 bp, Artificial Sequence
  Synthetic oligonucleotide
ttccgttcgcgattaaattcattcttctat

SEQ ID NO: 259083 - DNA, 30 bp, Artificial Sequence
  Synthetic oligonucleotide
gaagaagacgtgcattctaggcagttctat

SEQ ID NO: 259084 - DNA, 30 bp, Artificial Sequence
  Synthetic oligonucleotide
gcggcccgcaaggtaacgccgtagttctat

SEQ ID NO: 259085 - DNA, 30 bp, Artificial Sequence
  Synthetic oligonucleotide
cagcacggataatagcaacgtgatttctat

SEQ ID NO: 259086 - DNA, 30 bp, Artificial Sequence
  Synthetic oligonucleotide
gatctgagtccgtcacgagattaaaagtat

SEQ ID NO: 259087 - DNA, 30 bp, Artificial Sequence
  Synthetic oligonucleotide
ctgcactctgcgtgcatagcaagaaagtat

SEQ ID NO: 259088 - DNA, 30 bp, Artificial Sequence
  Synthetic oligonucleotide
aaacaaaagtatcgggtagcggacaagtat

SEQ ID NO: 259089 - DNA, 30 bp, Artificial Sequence
  Synthetic oligonucleotide
tgagattatcctgaaagttgatagaagtat

SEQ ID NO: 259090 - DNA, 30 bp, Artificial Sequence
  Synthetic oligonucleotide
acagaaggtttgtaatacagcacgaagtat

SEQ ID NO: 259091 - DNA, 30 bp, Artificial Sequence
  Synthetic oligonucleotide
gtggcacggcgctagctggtcgcgaagtat

SEQ ID NO: 259092 - DNA, 30 bp, Artificial Sequence
  Synthetic oligonucleotide
caaagaaatgcaatgtctccctctaagtat

SEQ ID NO: 259093 - DNA, 30 bp, Artificial Sequence
  Synthetic oligonucleotide
tatatatgcctggtcacctcagttaagtat

SEQ ID NO: 259094 - DNA, 30 bp, Artificial Sequence
  Synthetic oligonucleotide
cctagcttacttggaggcatttcacagtat

SEQ ID NO: 259095 - DNA, 30 bp, Artificial Sequence
  Synthetic oligonucleotide
gaagtgggtagtccaagtagaacccagtat

SEQ ID NO: 259096 - DNA, 30 bp, Artificial Sequence
  Synthetic oligonucleotide
gtagattgtagacaactacgtggccagtat

SEQ ID NO: 259097 - DNA, 30 bp, Artificial Sequence
  Synthetic oligonucleotide
caagtcgaaaatgtgttcgctccgcagtat

SEQ ID NO: 259098 - DNA, 30 bp, Artificial Sequence
  Synthetic oligonucleotide
agactctctcagattcccaccgatcagtat

SEQ ID NO: 259099 - DNA, 30 bp, Artificial Sequence
  Synthetic oligonucleotide
gagctgtaagtgtgcaagagtagagagtat

SEQ ID NO: 259100 - DNA, 30 bp, Artificial Sequence
  Synthetic oligonucleotide
gggcggacggcagtctggaaaggagagtat

SEQ ID NO: 259101 - DNA, 30 bp, Artificial Sequence
  Synthetic oligonucleotide
atatctggaactcacctccaaagggagtat

SEQ ID NO: 259102 - DNA, 30 bp, Artificial Sequence
  Synthetic oligonucleotide
acactgctgccgcttggtagtctggagtat

SEQ ID NO: 259103 - DNA, 30 bp, Artificial Sequence
  Synthetic oligonucleotide
cgaatagcgacaggaacaccgggtgagtat

SEQ ID NO: 259104 - DNA, 30 bp, Artificial Sequence
  Synthetic oligonucleotide
ctttaggcttcgaatcggggttgctagtat

SEQ ID NO: 259105 - DNA, 30 bp, Artificial Sequence
  Synthetic oligonucleotide
actcaagcacagacaggttccgtctagtat

SEQ ID NO: 259106 - DNA, 30 bp, Artificial Sequence
  Synthetic oligonucleotide
taaattaaaacgggagcgcgctggtagtat

SEQ ID NO: 259107 - DNA, 30 bp, Artificial Sequence
  Synthetic oligonucleotide
ggcgtgagcatctcccatttattgtagtat

SEQ ID NO: 259108 - DNA, 30 bp, Artificial Sequence
  Synthetic oligonucleotide
acaccggtgaggcgggcaattgaaacgtat

SEQ ID NO: 259109 - DNA, 30 bp, Artificial Sequence
  Synthetic oligonucleotide
ccaggccgtcggtgacggatgtcaacgtat

SEQ ID NO: 259110 - DNA, 30 bp, Artificial Sequence
  Synthetic oligonucleotide
tggccaaactctccagccttgggaacgtat

SEQ ID NO: 259111 - DNA, 30 bp, Artificial Sequence
  Synthetic oligonucleotide
gaccattggagacgagtcttagacacgtat

SEQ ID NO: 259112 - DNA, 30 bp, Artificial Sequence
  Synthetic oligonucleotide
tggtcacatatatcgactgacttcacgtat

SEQ ID NO: 259113 - DNA, 30 bp, Artificial Sequence
  Synthetic oligonucleotide
ggcctgagaaataactatggtttcacgtat

SEQ ID NO: 259114 - DNA, 30 bp, Artificial Sequence
  Synthetic oligonucleotide
ccggaaaccaccaattttaacctgacgtat

SEQ ID NO: 259115 - DNA, 30 bp, Artificial Sequence
  Synthetic oligonucleotide
ggcttgggatgcatcacgggcttgacgtat

SEQ ID NO: 259116 - DNA, 30 bp, Artificial Sequence
  Synthetic oligonucleotide
atgtctataggaatgggtcgtattacgtat

SEQ ID NO: 259117 - DNA, 30 bp, Artificial Sequence
  Synthetic oligonucleotide
gcgatggctatatattcttagcggccgtat

SEQ ID NO: 259118 - DNA, 30 bp, Artificial Sequence
  Synthetic oligonucleotide
cttccaccgcgatcctcccatcttccgtat

SEQ ID NO: 259119 - DNA, 30 bp, Artificial Sequence
  Synthetic oligonucleotide
gggacaatggatttacgatgtcttccgtat

SEQ ID NO: 259120 - DNA, 30 bp, Artificial Sequence
  Synthetic oligonucleotide
aggaacgcagtaaagagcatcgccgcgtat

SEQ ID NO: 259121 - DNA, 30 bp, Artificial Sequence
  Synthetic oligonucleotide
atctggtgtgggtttgcagattttgcgtat

SEQ ID NO: 259122 - DNA, 30 bp, Artificial Sequence
  Synthetic oligonucleotide
tggatgttaattggtcacttaaaatcgtat

SEQ ID NO: 259123 - DNA, 30 bp, Artificial Sequence
  Synthetic oligonucleotide
gtccaaaacgttattgcaacctaatcgtat

SEQ ID NO: 259124 - DNA, 30 bp, Artificial Sequence
  Synthetic oligonucleotide
gacactacagaacccgcatcagggtcgtat

SEQ ID NO: 259125 - DNA, 30 bp, Artificial Sequence
  Synthetic oligonucleotide
gcacccgcgtcacgctgacccgtttcgtat

SEQ ID NO: 259126 - DNA, 30 bp, Artificial Sequence
  Synthetic oligonucleotide
tggccagcgccttagtgggagggaaggtat

SEQ ID NO: 259127 - DNA, 30 bp, Artificial Sequence
  Synthetic oligonucleotide
ggatcaagtatggatgaaaccttcaggtat

SEQ ID NO: 259128 - DNA, 30 bp, Artificial Sequence
  Synthetic oligonucleotide
cttccaagatgtgaggcagaaaagaggtat

SEQ ID NO: 259129 - DNA, 30 bp, Artificial Sequence
  Synthetic oligonucleotide
cacagtatggtaagatgccgtaagaggtat

SEQ ID NO: 259130 - DNA, 30 bp, Artificial Sequence
  Synthetic oligonucleotide
attaatggttaagtgagacgcctgaggtat

SEQ ID NO: 259131 - DNA, 30 bp, Artificial Sequence
  Synthetic oligonucleotide
agatcacggcgcactcactagagtaggtat

SEQ ID NO: 259132 - DNA, 30 bp, Artificial Sequence
  Synthetic oligonucleotide
gcattatttagggtttatatcccgcggtat

SEQ ID NO: 259133 - DNA, 30 bp, Artificial Sequence
  Synthetic oligonucleotide
tgcaatcatcccaagttacgggtgcggtat

SEQ ID NO: 259134 - DNA, 30 bp, Artificial Sequence
  Synthetic oligonucleotide
ggacagtagatacccatagccaatcggtat

SEQ ID NO: 259135 - DNA, 30 bp, Artificial Sequence
  Synthetic oligonucleotide
aatgaagttttgggcccatcaagtcggtat

SEQ ID NO: 259136 - DNA, 30 bp, Artificial Sequence
  Synthetic oligonucleotide
ataaggaagtatgtaccgggctcagggtat

SEQ ID NO: 259137 - DNA, 30 bp, Artificial Sequence
  Synthetic oligonucleotide
cccgaattacaaagctgcggaaacgggtat

SEQ ID NO: 259138 - DNA, 30 bp, Artificial Sequence
  Synthetic oligonucleotide
ccatacggaccgtggaggcccgtcgggtat

SEQ ID NO: 259139 - DNA, 30 bp, Artificial Sequence
  Synthetic oligonucleotide
acttggctaatgaaaggaatgcctgggtat

SEQ ID NO: 259140 - DNA, 30 bp, Artificial Sequence
  Synthetic oligonucleotide
ataacactcgaatatacaggccttgggtat

SEQ ID NO: 259141 - DNA, 30 bp, Artificial Sequence
  Synthetic oligonucleotide
ttcctagaaactacctgtacgtaatggtat

SEQ ID NO: 259142 - DNA, 30 bp, Artificial Sequence
  Synthetic oligonucleotide
acggtgcttcaggatttttatagatggtat

SEQ ID NO: 259143 - DNA, 30 bp, Artificial Sequence
  Synthetic oligonucleotide
aaacttgccacaccgttgtctccctggtat

SEQ ID NO: 259144 - DNA, 30 bp, Artificial Sequence
  Synthetic oligonucleotide
caacaaaggaccctcgattaaacttggtat

SEQ ID NO: 259145 - DNA, 30 bp, Artificial Sequence
  Synthetic oligonucleotide
tgttactaggcaagaggtattagttggtat

SEQ ID NO: 259146 - DNA, 30 bp, Artificial Sequence
  Synthetic oligonucleotide
ttgcggagttaaattgtttgctgaatgtat

SEQ ID NO: 259147 - DNA, 30 bp, Artificial Sequence
  Synthetic oligonucleotide
ggcgggttaacgagctaggattagatgtat

SEQ ID NO: 259148 - DNA, 30 bp, Artificial Sequence
  Synthetic oligonucleotide
actggtcaaaggaaggtggccgtgatgtat

SEQ ID NO: 259149 - DNA, 30 bp, Artificial Sequence
  Synthetic oligonucleotide
aggagctagctgtggaagcacttgatgtat

SEQ ID NO: 259150 - DNA, 30 bp, Artificial Sequence
  Synthetic oligonucleotide
gaacgacccactaattcgaatggtatgtat

SEQ ID NO: 259151 - DNA, 30 bp, Artificial Sequence
  Synthetic oligonucleotide
taataagattccaccttctctgttatgtat

SEQ ID NO: 259152 - DNA, 30 bp, Artificial Sequence
  Synthetic oligonucleotide
gttagcagcattctcacctagtgactgtat

SEQ ID NO: 259153 - DNA, 30 bp, Artificial Sequence
  Synthetic oligonucleotide
ggacacctctaccccttgaatgccctgtat

SEQ ID NO: 259154 - DNA, 30 bp, Artificial Sequence
  Synthetic oligonucleotide
ctatagatacggtttcaagagccgctgtat

SEQ ID NO: 259155 - DNA, 30 bp, Artificial Sequence
  Synthetic oligonucleotide
gaggtaacgttctcactcggtccgctgtat

SEQ ID NO: 259156 - DNA, 30 bp, Artificial Sequence
  Synthetic oligonucleotide
tgcatgaagtaaaatagatatatgctgtat

SEQ ID NO: 259157 - DNA, 30 bp, Artificial Sequence
  Synthetic oligonucleotide
atgttaaaacgattaccgaaggtcgtgtat

SEQ ID NO: 259158 - DNA, 30 bp, Artificial Sequence
  Synthetic oligonucleotide
gagaatccggcccagtttccctaggtgtat

SEQ ID NO: 259159 - DNA, 30 bp, Artificial Sequence
  Synthetic oligonucleotide
ccggtaaacaaattccggaccccggtgtat

SEQ ID NO: 259160 - DNA, 30 bp, Artificial Sequence
  Synthetic oligonucleotide
gccgagggtccagtcactgttatggtgtat

SEQ ID NO: 259161 - DNA, 30 bp, Artificial Sequence
  Synthetic oligonucleotide
tcagtcacaggtctatggtgaactgtgtat

SEQ ID NO: 259162 - DNA, 28 bp, Artificial Sequence
  Synthetic oligonucleotide
agcaacgactaagtgataggctgtgtat

SEQ ID NO: 259163 - DNA, 30 bp, Artificial Sequence
  Synthetic oligonucleotide
acttatctgttgtgttttcctcttgtgtat

SEQ ID NO: 259164 - DNA, 30 bp, Artificial Sequence
  Synthetic oligonucleotide
tgcatttattggatcggcttgtttttgtat

SEQ ID NO: 259165 - DNA, 30 bp, Artificial Sequence
  Synthetic oligonucleotide
aaatgtgattgtcctggaaacaaaaattat

SEQ ID NO: 259166 - DNA, 30 bp, Artificial Sequence
  Synthetic oligonucleotide
gagcagctggtggtcctgaaagaaaattat

SEQ ID NO: 259167 - DNA, 30 bp, Artificial Sequence
  Synthetic oligonucleotide
ccaggcaagattcatgccactttaaattat

SEQ ID NO: 259168 - DNA, 30 bp, Artificial Sequence
  Synthetic oligonucleotide
tgactcaaacagaatgagtcaaagaattat

SEQ ID NO: 259169 - DNA, 30 bp, Artificial Sequence
  Synthetic oligonucleotide
cgagcgccgaagaaatgcggacaacattat

SEQ ID NO: 259170 - DNA, 30 bp, Artificial Sequence
  Synthetic oligonucleotide
tagggtgcgtgccagatatgggaacattat

SEQ ID NO: 259171 - DNA, 30 bp, Artificial Sequence
  Synthetic oligonucleotide
cccgtgaacgtcagtctggtacgacattat

SEQ ID NO: 259172 - DNA, 30 bp, Artificial Sequence
  Synthetic oligonucleotide
aaaacagggcaccgacctcggttgcattat

SEQ ID NO: 259173 - DNA, 30 bp, Artificial Sequence
  Synthetic oligonucleotide
ccattcgattcagatacaagtggtcattat

SEQ ID NO: 259174 - DNA, 30 bp, Artificial Sequence
  Synthetic oligonucleotide
cgacccataaagggtcgaatcgttcattat

SEQ ID NO: 259175 - DNA, 30 bp, Artificial Sequence
  Synthetic oligonucleotide
caactaaggtctgagttaatcaacgattat

SEQ ID NO: 259176 - DNA, 30 bp, Artificial Sequence
  Synthetic oligonucleotide
gaagatgagccgtagaggcagtacgattat

SEQ ID NO: 259177 - DNA, 30 bp, Artificial Sequence
  Synthetic oligonucleotide
cattggcggaatgttgtcaaccccgattat

SEQ ID NO: 259178 - DNA, 30 bp, Artificial Sequence
  Synthetic oligonucleotide
ctaacgtcaagcacgcgaaggtccgattat

SEQ ID NO: 259179 - DNA, 30 bp, Artificial Sequence
  Synthetic oligonucleotide
tggtctgcagaaagaacttcggtggattat

SEQ ID NO: 259180 - DNA, 30 bp, Artificial Sequence
  Synthetic oligonucleotide
aacttctaacgcgacgaacgatctgattat

SEQ ID NO: 259181 - DNA, 30 bp, Artificial Sequence
  Synthetic oligonucleotide
acgtaggggtgctggtagggtaaatattat

SEQ ID NO: 259182 - DNA, 30 bp, Artificial Sequence
  Synthetic oligonucleotide
ccagagaggctgtggcaaggtgcatattat

SEQ ID NO: 259183 - DNA, 30 bp, Artificial Sequence
  Synthetic oligonucleotide
cagggtcaggtacttacgggaacctattat

SEQ ID NO: 259184 - DNA, 30 bp, Artificial Sequence
  Synthetic oligonucleotide
tgggtcagaaacaaagctggattgtattat

SEQ ID NO: 259185 - DNA, 30 bp, Artificial Sequence
  Synthetic oligonucleotide
cgaatagtcgcggacccctgcgattattat

SEQ ID NO: 259186 - DNA, 30 bp, Artificial Sequence
  Synthetic oligonucleotide
tggacgtattcaaggaggagccgaacttat

SEQ ID NO: 259187 - DNA, 31 bp, Artificial Sequence
  Synthetic oligonucleotide
tttaactgggtcatgcttgactctaacttat

SEQ ID NO: 259188 - DNA, 30 bp, Artificial Sequence
  Synthetic oligonucleotide
acagtctggggattgcaagttcgcacttat

SEQ ID NO: 259189 - DNA, 30 bp, Artificial Sequence
  Synthetic oligonucleotide
ttattcctaggtcgttctaagggcacttat

SEQ ID NO: 259190 - DNA, 30 bp, Artificial Sequence
  Synthetic oligonucleotide
cgccaggggggcacttctcccggtacttat

SEQ ID NO: 259191 - DNA, 31 bp, Artificial Sequence
  Synthetic oligonucleotide
agaaagcggtgcaaacgaacacacaccttat

SEQ ID NO: 259192 - DNA, 30 bp, Artificial Sequence
  Synthetic oligonucleotide
cgagatccggctatcctgtcacctccttat

SEQ ID NO: 259193 - DNA, 30 bp, Artificial Sequence
  Synthetic oligonucleotide
ctaggggcgcgggcgtccagacaagcttat

SEQ ID NO: 259194 - DNA, 30 bp, Artificial Sequence
  Synthetic oligonucleotide
caagggatttgcatttgtggacaagcttat

SEQ ID NO: 259195 - DNA, 30 bp, Artificial Sequence
  Synthetic oligonucleotide
gttgacaagactactaagagagaagcttat

SEQ ID NO: 259196 - DNA, 30 bp, Artificial Sequence
  Synthetic oligonucleotide
ctagggtctaaaatgagtcgttcatcttat

SEQ ID NO: 259197 - DNA, 30 bp, Artificial Sequence
  Synthetic oligonucleotide
ctcaaaaacgcatttcaatcccgatcttat

SEQ ID NO: 259198 - DNA, 30 bp, Artificial Sequence
  Synthetic oligonucleotide
gacatgggctgcaaccgttggatctcttat

SEQ ID NO: 259199 - DNA, 30 bp, Artificial Sequence
  Synthetic oligonucleotide
gtccgtatcttcatattgacactctcttat

SEQ ID NO: 259200 - DNA, 30 bp, Artificial Sequence
  Synthetic oligonucleotide
gaagggccgaacattcgcgccatgtcttat

SEQ ID NO: 259201 - DNA, 30 bp, Artificial Sequence
  Synthetic oligonucleotide
acggcttcatcggaatttggataaagttat

SEQ ID NO: 259202 - DNA, 30 bp, Artificial Sequence
  Synthetic oligonucleotide
ataagtgttggccttgtcagttccagttat

SEQ ID NO: 259203 - DNA, 30 bp, Artificial Sequence
  Synthetic oligonucleotide
atggatcagcggtcatgtcaccggagttat

SEQ ID NO: 259204 - DNA, 30 bp, Artificial Sequence
  Synthetic oligonucleotide
tgataggtttcccatcgtgagtctagttat

SEQ ID NO: 259205 - DNA, 30 bp, Artificial Sequence
  Synthetic oligonucleotide
attaacccattatgcgctaggtaacgttat

SEQ ID NO: 259206 - DNA, 30 bp, Artificial Sequence
  Synthetic oligonucleotide
attgtactcctctgtaaatccagccgttat

SEQ ID NO: 259207 - DNA, 30 bp, Artificial Sequence
  Synthetic oligonucleotide
tgcttttatgacgagatccataatcgttat

SEQ ID NO: 259208 - DNA, 30 bp, Artificial Sequence
  Synthetic oligonucleotide
acatatcgatggtctatatgtaatcgttat

SEQ ID NO: 259209 - DNA, 30 bp, Artificial Sequence
  Synthetic oligonucleotide
tagcaagaatgtctgatacgcgttcgttat

SEQ ID NO: 259210 - DNA, 30 bp, Artificial Sequence
  Synthetic oligonucleotide
ggcacttcgccccccctttcgctcggttat

SEQ ID NO: 259211 - DNA, 30 bp, Artificial Sequence
  Synthetic oligonucleotide
tgctgccttatcacgggagacgctggttat

SEQ ID NO: 259212 - DNA, 30 bp, Artificial Sequence
  Synthetic oligonucleotide
atgatcacggggccactcatacttggttat

SEQ ID NO: 259213 - DNA, 30 bp, Artificial Sequence
  Synthetic oligonucleotide
accgaagcagcccatcctctacaatgttat

SEQ ID NO: 259214 - DNA, 30 bp, Artificial Sequence
  Synthetic oligonucleotide
atggggaattatgcctggattagatgttat

SEQ ID NO: 259215 - DNA, 30 bp, Artificial Sequence
  Synthetic oligonucleotide
caccgaagctgaaaccagaaaccctgttat

SEQ ID NO: 259216 - DNA, 30 bp, Artificial Sequence
  Synthetic oligonucleotide
cgatggttgtccgtggaatgatcctgttat

SEQ ID NO: 259217 - DNA, 30 bp, Artificial Sequence
  Synthetic oligonucleotide
cggctcgtgtaaagtttgtttgggtgttat

SEQ ID NO: 259218 - DNA, 30 bp, Artificial Sequence
  Synthetic oligonucleotide
acggcaaggaagggggggtcatcttgttat

SEQ ID NO: 259219 - DNA, 30 bp, Artificial Sequence
  Synthetic oligonucleotide
atggcagaggcccataagcaaagaatttat

SEQ ID NO: 259220 - DNA, 30 bp, Artificial Sequence
  Synthetic oligonucleotide
tgtggtgaggcgcggagagaaaagatttat

SEQ ID NO: 259221 - DNA, 29 bp, Artificial Sequence
  Synthetic oligonucleotide
cgtgcgatgtgcaaactgatcgtatttat

SEQ ID NO: 259222 - DNA, 30 bp, Artificial Sequence
  Synthetic oligonucleotide
gttgtgctcacaagaggtgagggtatttat

SEQ ID NO: 259223 - DNA, 30 bp, Artificial Sequence
  Synthetic oligonucleotide
tccattgagctcggactttatggagtttat

SEQ ID NO: 259224 - DNA, 30 bp, Artificial Sequence
  Synthetic oligonucleotide
ctagataagcgagcgtatgattgagtttat

SEQ ID NO: 259225 - DNA, 30 bp, Artificial Sequence
  Synthetic oligonucleotide
actttgctagttgacaagggggccgtttat

SEQ ID NO: 259226 - DNA, 30 bp, Artificial Sequence
  Synthetic oligonucleotide
cacaagcatctttatcgtttgcgcgtttat

SEQ ID NO: 259227 - DNA, 30 bp, Artificial Sequence
  Synthetic oligonucleotide
ggtatcgggtgccactgggtacgggtttat

SEQ ID NO: 259228 - DNA, 30 bp, Artificial Sequence
  Synthetic oligonucleotide
gatcaggcaggaaaacgtgtgggtgtttat

SEQ ID NO: 259229 - DNA, 30 bp, Artificial Sequence
  Synthetic oligonucleotide
ccggcgtctgagaagtcaagctaattttat

SEQ ID NO: 259230 - DNA, 30 bp, Artificial Sequence
  Synthetic oligonucleotide
taacggactaaagcaccgcgggacttttat

SEQ ID NO: 259231 - DNA, 30 bp, Artificial Sequence
  Synthetic oligonucleotide
agcaatgggtgggcaaaggagcggttttat

SEQ ID NO: 259232 - DNA, 30 bp, Artificial Sequence
  Synthetic oligonucleotide
ggtcaagaactatccgggtagcctttttat

SEQ ID NO: 259233 - DNA, 30 bp, Artificial Sequence
  Synthetic oligonucleotide
atggagcataagcggaaaagagaaaaaact

SEQ ID NO: 259234 - DNA, 30 bp, Artificial Sequence
  Synthetic oligonucleotide
tactaggccgggaaacctaggctaaaaact

SEQ ID NO: 259235 - DNA, 30 bp, Artificial Sequence
  Synthetic oligonucleotide
atcagttcagattcatcggtaaacaaaact

SEQ ID NO: 259236 - DNA, 30 bp, Artificial Sequence
  Synthetic oligonucleotide
tggtctaccttcgaactccaaactaaaact

SEQ ID NO: 259237 - DNA, 30 bp, Artificial Sequence
  Synthetic oligonucleotide
tcgttgttagattctataattactaaaact

SEQ ID NO: 259238 - DNA, 30 bp, Artificial Sequence
  Synthetic oligonucleotide
gtacgcctctatttcttcccccaacaaact

SEQ ID NO: 259239 - DNA, 30 bp, Artificial Sequence
  Synthetic oligonucleotide
gcatatgaaaacattcgttggatacaaact

SEQ ID NO: 259240 - DNA, 30 bp, Artificial Sequence
  Synthetic oligonucleotide
gacacaggatacagggccgacccccaaact

SEQ ID NO: 259241 - DNA, 30 bp, Artificial Sequence
  Synthetic oligonucleotide
tatggaggaatcaagcagagtccccaaact

SEQ ID NO: 259242 - DNA, 30 bp, Artificial Sequence
  Synthetic oligonucleotide
gacccgtgcacttctgcctaatagcaaact

SEQ ID NO: 259243 - DNA, 30 bp, Artificial Sequence
  Synthetic oligonucleotide
aaaaggccagggttgaacgtgagtcaaact

SEQ ID NO: 259244 - DNA, 30 bp, Artificial Sequence
  Synthetic oligonucleotide
gttcgatatgactggttataggtcgaaact

SEQ ID NO: 259245 - DNA, 30 bp, Artificial Sequence
  Synthetic oligonucleotide
atgacaaccgttagaggcccgcgggaaact

SEQ ID NO: 259246 - DNA, 30 bp, Artificial Sequence
  Synthetic oligonucleotide
accaggcaaggttcgattcaaggggaaact

SEQ ID NO: 259247 - DNA, 30 bp, Artificial Sequence
  Synthetic oligonucleotide
gaatggacgctactcccaaaaagtgaaact

SEQ ID NO: 259248 - DNA, 30 bp, Artificial Sequence
  Synthetic oligonucleotide
ctgtagctaattcgggacctaagataaact

SEQ ID NO: 259249 - DNA, 30 bp, Artificial Sequence
  Synthetic oligonucleotide
cactccaccccgaggcgtcccagctaaact

SEQ ID NO: 259250 - DNA, 30 bp, Artificial Sequence
  Synthetic oligonucleotide
acatgtttaacgggtagtggcagctaaact

SEQ ID NO: 259251 - DNA, 30 bp, Artificial Sequence
  Synthetic oligonucleotide
acataccgagtggatcgaggcgtctaaact

SEQ ID NO: 259252 - DNA, 30 bp, Artificial Sequence
  Synthetic oligonucleotide
cagatctttgtgtgatacaagtgttaaact

SEQ ID NO: 259253 - DNA, 30 bp, Artificial Sequence
  Synthetic oligonucleotide
agcgccttaagccaggtaaaaagaacaact

SEQ ID NO: 259254 - DNA, 30 bp, Artificial Sequence
  Synthetic oligonucleotide
gaaccatctcagcattatccaagaacaact

SEQ ID NO: 259255 - DNA, 30 bp, Artificial Sequence
  Synthetic oligonucleotide
gagagtggtcaggagagactcgacacaact

SEQ ID NO: 259256 - DNA, 30 bp, Artificial Sequence
  Synthetic oligonucleotide
tatggtacggctgtgggatacatcacaact

SEQ ID NO: 259257 - DNA, 30 bp, Artificial Sequence
  Synthetic oligonucleotide
caaagccctttgaagacctcgtcgacaact

SEQ ID NO: 259258 - DNA, 30 bp, Artificial Sequence
  Synthetic oligonucleotide
cccattcagcgggtgaacggacatacaact

SEQ ID NO: 259259 - DNA, 30 bp, Artificial Sequence
  Synthetic oligonucleotide
taggttctacgctgaagactaattacaact

SEQ ID NO: 259260 - DNA, 30 bp, Artificial Sequence
  Synthetic oligonucleotide
tctgagtgacggtagtctgaatttacaact

SEQ ID NO: 259261 - DNA, 30 bp, Artificial Sequence
  Synthetic oligonucleotide
tataacgcggggctcatcggcagaccaact

SEQ ID NO: 259262 - DNA, 30 bp, Artificial Sequence
  Synthetic oligonucleotide
tcagcgggggagattgcccagaggccaact

SEQ ID NO: 259263 - DNA, 30 bp, Artificial Sequence
  Synthetic oligonucleotide
caatctatataggtttgcgtagtgccaact

SEQ ID NO: 259264 - DNA, 30 bp, Artificial Sequence
  Synthetic oligonucleotide
atgtacttgtcgagcgcacccaatccaact

SEQ ID NO: 259265 - DNA, 30 bp, Artificial Sequence
  Synthetic oligonucleotide
cggtgtatcttgagcgctcttcgtccaact

SEQ ID NO: 259266 - DNA, 30 bp, Artificial Sequence
  Synthetic oligonucleotide
ttgggtataggtgtatcaagtcgcgcaact

SEQ ID NO: 259267 - DNA, 30 bp, Artificial Sequence
  Synthetic oligonucleotide
catctgctcggaaaaagaatactggcaact

SEQ ID NO: 259268 - DNA, 30 bp, Artificial Sequence
  Synthetic oligonucleotide
tgatctctacgtcaaaacgatctggcaact

SEQ ID NO: 259269 - DNA, 30 bp, Artificial Sequence
  Synthetic oligonucleotide
tcaacttaatgacaaaattggtcatcaact

SEQ ID NO: 259270 - DNA, 30 bp, Artificial Sequence
  Synthetic oligonucleotide
aaatggctgcgtgttccgttctactcaact

SEQ ID NO: 259271 - DNA, 30 bp, Artificial Sequence
  Synthetic oligonucleotide
atctaacctagcgtatggggtgcctcaact

SEQ ID NO: 259272 - DNA, 30 bp, Artificial Sequence
  Synthetic oligonucleotide
acttacggtgcattagtagtagggtcaact

SEQ ID NO: 259273 - DNA, 30 bp, Artificial Sequence
  Synthetic oligonucleotide
tacgcgagccgtggtgatatcttgtcaact

SEQ ID NO: 259274 - DNA, 30 bp, Artificial Sequence
  Synthetic oligonucleotide
gggcgtggtgtcgagcgccagccaagaact

SEQ ID NO: 259275 - DNA, 30 bp, Artificial Sequence
  Synthetic oligonucleotide
ataatccgcgcgagggccattccaagaact

SEQ ID NO: 259276 - DNA, 30 bp, Artificial Sequence
  Synthetic oligonucleotide
cgctagtaatcaggggcatttggaagaact

SEQ ID NO: 259277 - DNA, 30 bp, Artificial Sequence
  Synthetic oligonucleotide
ttagcacgttggggcattttcgacagaact

SEQ ID NO: 259278 - DNA, 30 bp, Artificial Sequence
  Synthetic oligonucleotide
acacgatacttataggcagaaaggagaact

SEQ ID NO: 259279 - DNA, 30 bp, Artificial Sequence
  Synthetic oligonucleotide
atctgcaccttcttggggggcttgagaact

SEQ ID NO: 259280 - DNA, 30 bp, Artificial Sequence
  Synthetic oligonucleotide
tatggattataccgagacggaggtagaact

SEQ ID NO: 259281 - DNA, 30 bp, Artificial Sequence
  Synthetic oligonucleotide
gttgttaacaggaaggttcgatttagaact

SEQ ID NO: 259282 - DNA, 30 bp, Artificial Sequence
  Synthetic oligonucleotide
taatgtgattcacccgaccattctcgaact

SEQ ID NO: 259283 - DNA, 30 bp, Artificial Sequence
  Synthetic oligonucleotide
agggggcttgctttccatcgcaaaggaact

SEQ ID NO: 259284 - DNA, 30 bp, Artificial Sequence
  Synthetic oligonucleotide
atctgcttccctcctagctacgaaggaact

SEQ ID NO: 259285 - DNA, 30 bp, Artificial Sequence
  Synthetic oligonucleotide
gataagtcatgtggacttgtgcagggaact

SEQ ID NO: 259286 - DNA, 30 bp, Artificial Sequence
  Synthetic oligonucleotide
cactagcgagtaacgagctacacgggaact

SEQ ID NO: 259287 - DNA, 30 bp, Artificial Sequence
  Synthetic oligonucleotide
ttcgtaacattgtgttgatgcgcgggaact

SEQ ID NO: 259288 - DNA, 30 bp, Artificial Sequence
  Synthetic oligonucleotide
gtcacacggagttgagtcaccaaatgaact

SEQ ID NO: 259289 - DNA, 30 bp, Artificial Sequence
  Synthetic oligonucleotide
tgcacctcgagtatagcgccatgatgaact

SEQ ID NO: 259290 - DNA, 30 bp, Artificial Sequence
  Synthetic oligonucleotide
gtttggctagggcctagagcggactgaact

SEQ ID NO: 259291 - DNA, 30 bp, Artificial Sequence
  Synthetic oligonucleotide
cggtcttatggcgcgaatgggcgaataact

SEQ ID NO: 259292 - DNA, 30 bp, Artificial Sequence
  Synthetic oligonucleotide
gtcgcggacgctaaaatgaggggcataact

SEQ ID NO: 259293 - DNA, 30 bp, Artificial Sequence
  Synthetic oligonucleotide
gtgcaatagcccgccgttaacttgataact

SEQ ID NO: 259294 - DNA, 30 bp, Artificial Sequence
  Synthetic oligonucleotide
cgtaaatagggtaacacagtttcactaact

SEQ ID NO: 259295 - DNA, 30 bp, Artificial Sequence
  Synthetic oligonucleotide
ccgcggcactgagtatagcccagactaact

SEQ ID NO: 259296 - DNA, 30 bp, Artificial Sequence
  Synthetic oligonucleotide
gtggttgaacaacaacaagctatactaact

SEQ ID NO: 259297 - DNA, 30 bp, Artificial Sequence
  Synthetic oligonucleotide
cagcacgaccttaggtataaactactaact

SEQ ID NO: 259298 - DNA, 30 bp, Artificial Sequence
  Synthetic oligonucleotide
gtccctgatgtccctgatcgaaatctaact

SEQ ID NO: 259299 - DNA, 30 bp, Artificial Sequence
  Synthetic oligonucleotide
aggctaaggatattggtccagcatctaact

SEQ ID NO: 259300 - DNA, 30 bp, Artificial Sequence
  Synthetic oligonucleotide
taaggaagagatcactctacatgtctaact

SEQ ID NO: 259301 - DNA, 30 bp, Artificial Sequence
  Synthetic oligonucleotide
ccaccagcatactggtggggaggagtaact

SEQ ID NO: 259302 - DNA, 31 bp, Artificial Sequence
  Synthetic oligonucleotide
tgttattgcgaatgataccgaattcgtaact

SEQ ID NO: 259303 - DNA, 30 bp, Artificial Sequence
  Synthetic oligonucleotide
gcaaggttagaaggacgtgagtaggtaact

SEQ ID NO: 259304 - DNA, 30 bp, Artificial Sequence
  Synthetic oligonucleotide
ttaggtaccgtgttgggcgggggggtaact

SEQ ID NO: 259305 - DNA, 30 bp, Artificial Sequence
  Synthetic oligonucleotide
acgcatcgactccatcattaatatgtaact

SEQ ID NO: 259306 - DNA, 30 bp, Artificial Sequence
  Synthetic oligonucleotide
atcgcatttgccaagtcgtgctgattaact

SEQ ID NO: 259307 - DNA, 30 bp, Artificial Sequence
  Synthetic oligonucleotide
ggggcgggtcaccccgtccgtatgttaact

SEQ ID NO: 259308 - DNA, 30 bp, Artificial Sequence
  Synthetic oligonucleotide
gcctgtagtagagaaacgttataaaacact

SEQ ID NO: 259309 - DNA, 30 bp, Artificial Sequence
  Synthetic oligonucleotide
gtaagcggtgcaacgtaagtgcgaaacact

SEQ ID NO: 259310 - DNA, 30 bp, Artificial Sequence
  Synthetic oligonucleotide
agctgttcgaatagtgcaacaaacaacact

SEQ ID NO: 259311 - DNA, 30 bp, Artificial Sequence
  Synthetic oligonucleotide
ctttgagacatgcgatagcgcgtgaacact

SEQ ID NO: 259312 - DNA, 30 bp, Artificial Sequence
  Synthetic oligonucleotide
aaggtcatatgaactcaataaggtaacact

SEQ ID NO: 259313 - DNA, 30 bp, Artificial Sequence
  Synthetic oligonucleotide
gatcaatggggctctcggttggttaacact

SEQ ID NO: 259314 - DNA, 30 bp, Artificial Sequence
  Synthetic oligonucleotide
gtttcccagacaaaacacaagccacacact

SEQ ID NO: 259315 - DNA, 30 bp, Artificial Sequence
  Synthetic oligonucleotide
aaactcgaaagtaactgacacgcccacact

SEQ ID NO: 259316 - DNA, 30 bp, Artificial Sequence
  Synthetic oligonucleotide
ctgcactagtttgattaagacgcccacact

SEQ ID NO: 259317 - DNA, 30 bp, Artificial Sequence
  Synthetic oligonucleotide
ctacccagcacgcagagtgttacgcacact

SEQ ID NO: 259318 - DNA, 30 bp, Artificial Sequence
  Synthetic oligonucleotide
tctgctagtatgtgcgagactaggcacact

SEQ ID NO: 259319 - DNA, 30 bp, Artificial Sequence
  Synthetic oligonucleotide
agttggtggaatttaagtcagtctcacact

SEQ ID NO: 259320 - DNA, 30 bp, Artificial Sequence
  Synthetic oligonucleotide
gggaacaacgcgacacgattctgtcacact

SEQ ID NO: 259321 - DNA, 30 bp, Artificial Sequence
  Synthetic oligonucleotide
agatcacgcatggtgcgtagtttagacact

SEQ ID NO: 259322 - DNA, 30 bp, Artificial Sequence
  Synthetic oligonucleotide
aacgtgaaacagaggcaatgggtcgacact

SEQ ID NO: 259323 - DNA, 30 bp, Artificial Sequence
  Synthetic oligonucleotide
atcttgtactccaaaaacgtcactgacact

SEQ ID NO: 259324 - DNA, 30 bp, Artificial Sequence
  Synthetic oligonucleotide
ctataagacgaccgtctatcattatacact

SEQ ID NO: 259325 - DNA, 30 bp, Artificial Sequence
  Synthetic oligonucleotide
cgtactcatatctaacaacaattgtacact

SEQ ID NO: 259326 - DNA, 30 bp, Artificial Sequence
  Synthetic oligonucleotide
cgtagaaacctggcgcctaagcattacact

SEQ ID NO: 259327 - DNA, 30 bp, Artificial Sequence
  Synthetic oligonucleotide
cagaagtggcattgtacgtgtggttacact

SEQ ID NO: 259328 - DNA, 30 bp, Artificial Sequence
  Synthetic oligonucleotide
taagtgacgattgctttacctgtttacact

SEQ ID NO: 259329 - DNA, 30 bp, Artificial Sequence
  Synthetic oligonucleotide
ggcggtcaatatgttgctgttcccaccact

SEQ ID NO: 259330 - DNA, 30 bp, Artificial Sequence
  Synthetic oligonucleotide
aagtaaaaaccgagtcgcggttgcaccact

SEQ ID NO: 259331 - DNA, 30 bp, Artificial Sequence
  Synthetic oligonucleotide
gcggagacatggtcaggtaggcagaccact

SEQ ID NO: 259332 - DNA, 31 bp, Artificial Sequence
  Synthetic oligonucleotide
aagtttcgggacataggcgggcggtaccact

SEQ ID NO: 259333 - DNA, 30 bp, Artificial Sequence
  Synthetic oligonucleotide
caaattcctgtgcgctcaaacaaacccact

SEQ ID NO: 259334 - DNA, 30 bp, Artificial Sequence
  Synthetic oligonucleotide
ggggggatcaatgttgtgagcagacccact

SEQ ID NO: 259335 - DNA, 30 bp, Artificial Sequence
  Synthetic oligonucleotide
atacactcagcatattaaacagagcccact

SEQ ID NO: 259336 - DNA, 30 bp, Artificial Sequence
  Synthetic oligonucleotide
ctccactcgtcaatccgtcccatgcccact

SEQ ID NO: 259337 - DNA, 30 bp, Artificial Sequence
  Synthetic oligonucleotide
aatcgcacagctggtgtaggcactcccact

SEQ ID NO: 259338 - DNA, 30 bp, Artificial Sequence
  Synthetic oligonucleotide
gtcggatcattctttttgtcgactcccact

SEQ ID NO: 259339 - DNA, 30 bp, Artificial Sequence
  Synthetic oligonucleotide
cggactcgtacggctcaagccgaagccact

SEQ ID NO: 259340 - DNA, 30 bp, Artificial Sequence
  Synthetic oligonucleotide
aaacgtatgtcaggatgaaagtcagccact

SEQ ID NO: 259341 - DNA, 30 bp, Artificial Sequence
  Synthetic oligonucleotide
gtgggtggattactggtgaagtcggccact

SEQ ID NO: 259342 - DNA, 30 bp, Artificial Sequence
  Synthetic oligonucleotide
tctaccctgcaaaatggcataacctccact

SEQ ID NO: 259343 - DNA, 30 bp, Artificial Sequence
  Synthetic oligonucleotide
aatggacaggtacgtaaaacactctccact

SEQ ID NO: 259344 - DNA, 30 bp, Artificial Sequence
  Synthetic oligonucleotide
aacgataaaaagcattgtagggggtccact

SEQ ID NO: 259345 - DNA, 30 bp, Artificial Sequence
  Synthetic oligonucleotide
atcacctcagacgtcgagacacattccact

SEQ ID NO: 259346 - DNA, 30 bp, Artificial Sequence
  Synthetic oligonucleotide
ggcaagctcctagtgtcacagtgttccact

SEQ ID NO: 259347 - DNA, 30 bp, Artificial Sequence
  Synthetic oligonucleotide
gggagaacgggatgaattgcttgttccact

SEQ ID NO: 259348 - DNA, 30 bp, Artificial Sequence
  Synthetic oligonucleotide
cggcctgataggcgcgaaagtatttccact

SEQ ID NO: 259349 - DNA, 30 bp, Artificial Sequence
  Synthetic oligonucleotide
gggagatgcgtgggcgggacgaggagcact

SEQ ID NO: 259350 - DNA, 30 bp, Artificial Sequence
  Synthetic oligonucleotide
actcatcgcgagtagtatacgctgagcact

SEQ ID NO: 259351 - DNA, 30 bp, Artificial Sequence
  Synthetic oligonucleotide
tggggctagaacgacgcctatccccgcact

SEQ ID NO: 259352 - DNA, 30 bp, Artificial Sequence
  Synthetic oligonucleotide
gccgttagataggaccataaccctcgcact

SEQ ID NO: 259353 - DNA, 30 bp, Artificial Sequence
  Synthetic oligonucleotide
tatcagggtcagacttaggtctgtcgcact

SEQ ID NO: 259354 - DNA, 30 bp, Artificial Sequence
  Synthetic oligonucleotide
gcacgccccacagctcaagggcgaggcact

SEQ ID NO: 259355 - DNA, 30 bp, Artificial Sequence
  Synthetic oligonucleotide
tggcgtatagactcaccgacttacggcact

SEQ ID NO: 259356 - DNA, 30 bp, Artificial Sequence
  Synthetic oligonucleotide
cccagatctgggagccgggaatccggcact

SEQ ID NO: 259357 - DNA, 30 bp, Artificial Sequence
  Synthetic oligonucleotide
gcgccagacgcgaatccggaattcggcact

SEQ ID NO: 259358 - DNA, 30 bp, Artificial Sequence
  Synthetic oligonucleotide
atttcttcagtattgagcaggaggggcact

SEQ ID NO: 259359 - DNA, 30 bp, Artificial Sequence
  Synthetic oligonucleotide
ttcgaatcgtcagcgcgggcgtctggcact

SEQ ID NO: 259360 - DNA, 30 bp, Artificial Sequence
  Synthetic oligonucleotide
tctcgttgatttgcactcaccgactgcact

SEQ ID NO: 259361 - DNA, 30 bp, Artificial Sequence
  Synthetic oligonucleotide
ctacacagcatgattgggatgtgctgcact

SEQ ID NO: 259362 - DNA, 30 bp, Artificial Sequence
  Synthetic oligonucleotide
tgattaactagtgctcacagaaattgcact

SEQ ID NO: 259363 - DNA, 30 bp, Artificial Sequence
  Synthetic oligonucleotide
atgatcccagggtaatacccatcttgcact

SEQ ID NO: 259364 - DNA, 30 bp, Artificial Sequence
  Synthetic oligonucleotide
cgtttttctccagtcttgtgaagttgcact

SEQ ID NO: 259365 - DNA, 30 bp, Artificial Sequence
  Synthetic oligonucleotide
aaaagtcactaggaagactaaagcatcact

SEQ ID NO: 259366 - DNA, 30 bp, Artificial Sequence
  Synthetic oligonucleotide
ggtatgtgatgtaatgatgtaaagatcact

SEQ ID NO: 259367 - DNA, 30 bp, Artificial Sequence
  Synthetic oligonucleotide
ggcagtaatcacaattcatagtagatcact

SEQ ID NO: 259368 - DNA, 30 bp, Artificial Sequence
  Synthetic oligonucleotide
gagacttctaagcatcgattctgtatcact

SEQ ID NO: 259369 - DNA, 30 bp, Artificial Sequence
  Synthetic oligonucleotide
ctcattaccagtcggtgcctatttatcact

SEQ ID NO: 259370 - DNA, 30 bp, Artificial Sequence
  Synthetic oligonucleotide
ttctgctatgtggctaagagtacgctcact

SEQ ID NO: 259371 - DNA, 30 bp, Artificial Sequence
  Synthetic oligonucleotide
taagactaacgtaaagtcagggggctcact

SEQ ID NO: 259372 - DNA, 30 bp, Artificial Sequence
  Synthetic oligonucleotide
aataatgttcatctgtactggctcgtcact

SEQ ID NO: 259373 - DNA, 30 bp, Artificial Sequence
  Synthetic oligonucleotide
cagcccaccattcgaattagtcgggtcact

SEQ ID NO: 259374 - DNA, 30 bp, Artificial Sequence
  Synthetic oligonucleotide
gcatacgtaagtcgccgtacgactgtcact

SEQ ID NO: 259375 - DNA, 30 bp, Artificial Sequence
  Synthetic oligonucleotide
caactgtctcggagtatcccccgattcact

SEQ ID NO: 259376 - DNA, 30 bp, Artificial Sequence
  Synthetic oligonucleotide
tcccgtgtgttggatagagcagatttcact

SEQ ID NO: 259377 - DNA, 30 bp, Artificial Sequence
  Synthetic oligonucleotide
ggttccgcctcgtacacgtgtacaaagact

SEQ ID NO: 259378 - DNA, 30 bp, Artificial Sequence
  Synthetic oligonucleotide
gccttcccggcgtccttccaagtaaagact

SEQ ID NO: 259379 - DNA, 30 bp, Artificial Sequence
  Synthetic oligonucleotide
gtcgtgcggggcaagacttagcctaagact

SEQ ID NO: 259380 - DNA, 30 bp, Artificial Sequence
  Synthetic oligonucleotide
ggcctcgggctatctgatacacgacagact

SEQ ID NO: 259381 - DNA, 30 bp, Artificial Sequence
  Synthetic oligonucleotide
tagcatttcgggggtagggttcgacagact

SEQ ID NO: 259382 - DNA, 30 bp, Artificial Sequence
  Synthetic oligonucleotide
tggaataccttatgataggtgatccagact

SEQ ID NO: 259383 - DNA, 30 bp, Artificial Sequence
  Synthetic oligonucleotide
gcgatttccggccgaggttgatagcagact

SEQ ID NO: 259384 - DNA, 30 bp, Artificial Sequence
  Synthetic oligonucleotide
gttggtgggctccaatggttaccgcagact

SEQ ID NO: 259385 - DNA, 30 bp, Artificial Sequence
  Synthetic oligonucleotide
caaccttggtcaaccaaggacgggcagact

SEQ ID NO: 259386 - DNA, 30 bp, Artificial Sequence
  Synthetic oligonucleotide
tgttgaagttcatctttcgagaatcagact

SEQ ID NO: 259387 - DNA, 30 bp, Artificial Sequence
  Synthetic oligonucleotide
atagtacttctcaccgacgcatttcagact

SEQ ID NO: 259388 - DNA, 30 bp, Artificial Sequence
  Synthetic oligonucleotide
caaactacgaatatccaaaatttagagact

SEQ ID NO: 259389 - DNA, 30 bp, Artificial Sequence
  Synthetic oligonucleotide
gacggccctgaggctagctatatcgagact

SEQ ID NO: 259390 - DNA, 30 bp, Artificial Sequence
  Synthetic oligonucleotide
ctccggcgggcagacaggatatatgagact

SEQ ID NO: 259391 - DNA, 30 bp, Artificial Sequence
  Synthetic oligonucleotide
ggaagggccgtatggtgcgagttatagact

SEQ ID NO: 259392 - DNA, 30 bp, Artificial Sequence
  Synthetic oligonucleotide
gtaactgcatgaggagtagctacctagact

SEQ ID NO: 259393 - DNA, 30 bp, Artificial Sequence
  Synthetic oligonucleotide
gcagaaaggatcacgctcagttcctagact

SEQ ID NO: 259394 - DNA, 30 bp, Artificial Sequence
  Synthetic oligonucleotide
gtaagttgtttacattatcagtattagact

SEQ ID NO: 259395 - DNA, 30 bp, Artificial Sequence
  Synthetic oligonucleotide
ataattattaagtaagtggtagcaacgact

SEQ ID NO: 259396 - DNA, 30 bp, Artificial Sequence
  Synthetic oligonucleotide
attcattggagtgaaactgagttaacgact

SEQ ID NO: 259397 - DNA, 30 bp, Artificial Sequence
  Synthetic oligonucleotide
taaccggcagtagtctcaaccagcacgact

SEQ ID NO: 259398 - DNA, 30 bp, Artificial Sequence
  Synthetic oligonucleotide
ggaccagaaaaagccttctcaatcacgact

SEQ ID NO: 259399 - DNA, 30 bp, Artificial Sequence
  Synthetic oligonucleotide
gtccatgcggtgatttccgatacgacgact

SEQ ID NO: 259400 - DNA, 30 bp, Artificial Sequence
  Synthetic oligonucleotide
cgccgtccgtaagccctagttccgacgact

SEQ ID NO: 259401 - DNA, 30 bp, Artificial Sequence
  Synthetic oligonucleotide
agtacgtgggttcggtttaaggggacgact

SEQ ID NO: 259402 - DNA, 30 bp, Artificial Sequence
  Synthetic oligonucleotide
gcaaaaaagggacattaaccatcaccgact

SEQ ID NO: 259403 - DNA, 30 bp, Artificial Sequence
  Synthetic oligonucleotide
gtctactggggttcaaaattatgcccgact

SEQ ID NO: 259404 - DNA, 30 bp, Artificial Sequence
  Synthetic oligonucleotide
tgcaggaccaatacacggtttatgccgact

SEQ ID NO: 259405 - DNA, 30 bp, Artificial Sequence
  Synthetic oligonucleotide
attttggtgtggctaccaacaactccgact

SEQ ID NO: 259406 - DNA, 30 bp, Artificial Sequence
  Synthetic oligonucleotide
tcaataagttcaccttctacttaagcgact

SEQ ID NO: 259407 - DNA, 30 bp, Artificial Sequence
  Synthetic oligonucleotide
cccacgaacattagtcctgaattagcgact

SEQ ID NO: 259408 - DNA, 30 bp, Artificial Sequence
  Synthetic oligonucleotide
gagcaactgttgtagcgcgcggaggcgact

SEQ ID NO: 259409 - DNA, 30 bp, Artificial Sequence
  Synthetic oligonucleotide
gggagcaacattgggactccacgggcgact

SEQ ID NO: 259410 - DNA, 30 bp, Artificial Sequence
  Synthetic oligonucleotide
gcttctaagattgggctaggtgctgcgact

SEQ ID NO: 259411 - DNA, 30 bp, Artificial Sequence
  Synthetic oligonucleotide
gcggatgcttagaggaaatggacgtcgact

SEQ ID NO: 259412 - DNA, 30 bp, Artificial Sequence
  Synthetic oligonucleotide
tcggcccaatgagtcaaccgcgcttcgact

SEQ ID NO: 259413 - DNA, 30 bp, Artificial Sequence
  Synthetic oligonucleotide
ggtcgcccggactatgataagggttcgact

SEQ ID NO: 259414 - DNA, 30 bp, Artificial Sequence
  Synthetic oligonucleotide
cagaaagagtctgtcatgtcgggcaggact

SEQ ID NO: 259415 - DNA, 30 bp, Artificial Sequence
  Synthetic oligonucleotide
ggccttgtggaccaatgagtttgcaggact

SEQ ID NO: 259416 - DNA, 30 bp, Artificial Sequence
  Synthetic oligonucleotide
agccactaatcatagttggtggtcaggact

SEQ ID NO: 259417 - DNA, 30 bp, Artificial Sequence
  Synthetic oligonucleotide
tgactggccagcgagcaccaagagaggact

SEQ ID NO: 259418 - DNA, 30 bp, Artificial Sequence
  Synthetic oligonucleotide
aagtacgattgtgtcaaccactgtaggact

SEQ ID NO: 259419 - DNA, 30 bp, Artificial Sequence
  Synthetic oligonucleotide
aggtactcggctcactcctcccttaggact

SEQ ID NO: 259420 - DNA, 30 bp, Artificial Sequence
  Synthetic oligonucleotide
cgggtgaaataagccactcatgttaggact

SEQ ID NO: 259421 - DNA, 31 bp, Artificial Sequence
  Synthetic oligonucleotide
cggcttagctaaccggtccttaaaacggact

SEQ ID NO: 259422 - DNA, 30 bp, Artificial Sequence
  Synthetic oligonucleotide
atgtgaaagggtctggtttagtaacggact

SEQ ID NO: 259423 - DNA, 30 bp, Artificial Sequence
  Synthetic oligonucleotide
caacttgccggcgactcacagcaccggact

SEQ ID NO: 259424 - DNA, 30 bp, Artificial Sequence
  Synthetic oligonucleotide
cctggtagctgctatacccccgggcggact

SEQ ID NO: 259425 - DNA, 30 bp, Artificial Sequence
  Synthetic oligonucleotide
atagatcgccccaaaaatgtatgcgggact

SEQ ID NO: 259426 - DNA, 30 bp, Artificial Sequence
  Synthetic oligonucleotide
caggtcgattcatactatggacaggggact

SEQ ID NO: 259427 - DNA, 30 bp, Artificial Sequence
  Synthetic oligonucleotide
ggatcaagatctaccatgctatcggggact

SEQ ID NO: 259428 - DNA, 30 bp, Artificial Sequence
  Synthetic oligonucleotide
tcttgaagcagaatacatttgtctgggact

SEQ ID NO: 259429 - DNA, 30 bp, Artificial Sequence
  Synthetic oligonucleotide
acaggacacttgatatataaacttgggact

SEQ ID NO: 259430 - DNA, 30 bp, Artificial Sequence
  Synthetic oligonucleotide
actcggttctgtagttatggtccatggact

SEQ ID NO: 259431 - DNA, 30 bp, Artificial Sequence
  Synthetic oligonucleotide
cagtcccgaataggtacattgggatggact

SEQ ID NO: 259432 - DNA, 30 bp, Artificial Sequence
  Synthetic oligonucleotide
actcattggacgtgtagcgagtgatggact

SEQ ID NO: 259433 - DNA, 30 bp, Artificial Sequence
  Synthetic oligonucleotide
ccgtacggcgcttagttgggggactggact

SEQ ID NO: 259434 - DNA, 30 bp, Artificial Sequence
  Synthetic oligonucleotide
tggggtcgacgcggtacttgtgcgtggact

SEQ ID NO: 259435 - DNA, 30 bp, Artificial Sequence
  Synthetic oligonucleotide
caagagcaggcagctcacgaaacttggact

SEQ ID NO: 259436 - DNA, 30 bp, Artificial Sequence
  Synthetic oligonucleotide
gcgtcatacgcatcgagtggtacaatgact

SEQ ID NO: 259437 - DNA, 30 bp, Artificial Sequence
  Synthetic oligonucleotide
cggcttgagggcatagtgtgcggaatgact

SEQ ID NO: 259438 - DNA, 30 bp, Artificial Sequence
  Synthetic oligonucleotide
aatccgggaggaagttcacgtgacatgact

SEQ ID NO: 259439 - DNA, 30 bp, Artificial Sequence
  Synthetic oligonucleotide
ttcaattcgcgacggactagcaccatgact

SEQ ID NO: 259440 - DNA, 30 bp, Artificial Sequence
  Synthetic oligonucleotide
acaagtggaaagtggagcttatccatgact

SEQ ID NO: 259441 - DNA, 30 bp, Artificial Sequence
  Synthetic oligonucleotide
aatggggtatacaatgtaaaaccgatgact

SEQ ID NO: 259442 - DNA, 30 bp, Artificial Sequence
  Synthetic oligonucleotide
gtttctacaggagtgcgaatctatatgact

SEQ ID NO: 259443 - DNA, 30 bp, Artificial Sequence
  Synthetic oligonucleotide
cgttggcatgtgaagtgcaatgttatgact

SEQ ID NO: 259444 - DNA, 30 bp, Artificial Sequence
  Synthetic oligonucleotide
ttaagtttgcatggaatatgtgttatgact

SEQ ID NO: 259445 - DNA, 30 bp, Artificial Sequence
  Synthetic oligonucleotide
gtctcctaacctgtatccccttcactgact

SEQ ID NO: 259446 - DNA, 30 bp, Artificial Sequence
  Synthetic oligonucleotide
ctctacccatccagtcaatctgcagtgact

SEQ ID NO: 259447 - DNA, 30 bp, Artificial Sequence
  Synthetic oligonucleotide
ccaagggcggcttggctcgtagccgtgact

SEQ ID NO: 259448 - DNA, 30 bp, Artificial Sequence
  Synthetic oligonucleotide
gcagattgccggatcaatcagcaattgact

SEQ ID NO: 259449 - DNA, 30 bp, Artificial Sequence
  Synthetic oligonucleotide
tgtggggacgtaagttaaggtatattgact

SEQ ID NO: 259450 - DNA, 30 bp, Artificial Sequence
  Synthetic oligonucleotide
tgaaatagatgtgtaagctcctccttgact

SEQ ID NO: 259451 - DNA, 30 bp, Artificial Sequence
  Synthetic oligonucleotide
cagatctgagcgcccatttgtttgttgact

SEQ ID NO: 259452 - DNA, 30 bp, Artificial Sequence
  Synthetic oligonucleotide
gcataacattttacgccctgagcaaatact

SEQ ID NO: 259453 - DNA, 30 bp, Artificial Sequence
  Synthetic oligonucleotide
tgtggggtaagcctgaaaggcatcaatact

SEQ ID NO: 259454 - DNA, 30 bp, Artificial Sequence
  Synthetic oligonucleotide
tttcgcgagggctggtaagtgccgaatact

SEQ ID NO: 259455 - DNA, 30 bp, Artificial Sequence
  Synthetic oligonucleotide
tactgaagggatcccgtgaacacacatact

SEQ ID NO: 259456 - DNA, 30 bp, Artificial Sequence
  Synthetic oligonucleotide
tacgactagttgcttaactactggcatact

SEQ ID NO: 259457 - DNA, 30 bp, Artificial Sequence
  Synthetic oligonucleotide
atggttatccggaggagaattcttcatact

SEQ ID NO: 259458 - DNA, 30 bp, Artificial Sequence
  Synthetic oligonucleotide
cagatcccggtcgtgtagtactcagatact

SEQ ID NO: 259459 - DNA, 30 bp, Artificial Sequence
  Synthetic oligonucleotide
tagggtacagccctgagcacacacgatact

SEQ ID NO: 259460 - DNA, 30 bp, Artificial Sequence
  Synthetic oligonucleotide
ggaagatcgcgcttcgaaacgtacgatact

SEQ ID NO: 259461 - DNA, 30 bp, Artificial Sequence
  Synthetic oligonucleotide
gtcggttatatgcgtgcggacagcgatact

SEQ ID NO: 259462 - DNA, 30 bp, Artificial Sequence
  Synthetic oligonucleotide
cctttcgctacggcgggcagtaaggatact

SEQ ID NO: 259463 - DNA, 30 bp, Artificial Sequence
  Synthetic oligonucleotide
agccgtcgacccaatgacttatgggatact

SEQ ID NO: 259464 - DNA, 30 bp, Artificial Sequence
  Synthetic oligonucleotide
attcgggaattctggctacacaactatact

SEQ ID NO: 259465 - DNA, 30 bp, Artificial Sequence
  Synthetic oligonucleotide
agtgatctcgcattagctatgaattatact

SEQ ID NO: 259466 - DNA, 30 bp, Artificial Sequence
  Synthetic oligonucleotide
actgcatcagttcaaccggtatccactact

SEQ ID NO: 259467 - DNA, 30 bp, Artificial Sequence
  Synthetic oligonucleotide
gctgtggagataggcgagtctatgactact

SEQ ID NO: 259468 - DNA, 30 bp, Artificial Sequence
  Synthetic oligonucleotide
gatagggagtaactgaaccgaattactact

SEQ ID NO: 259469 - DNA, 30 bp, Artificial Sequence
  Synthetic oligonucleotide
cgtatgaaacaaaggggaaagagccctact

SEQ ID NO: 259470 - DNA, 30 bp, Artificial Sequence
  Synthetic oligonucleotide
tgcctaggtctcaattcttcacgagctact

SEQ ID NO: 259471 - DNA, 30 bp, Artificial Sequence
  Synthetic oligonucleotide
tatgagtcgagaattgatggccgagctact

SEQ ID NO: 259472 - DNA, 30 bp, Artificial Sequence
  Synthetic oligonucleotide
cacggctgcaagtcgtccctacaggctact

SEQ ID NO: 259473 - DNA, 30 bp, Artificial Sequence
  Synthetic oligonucleotide
atgtagcatcattaatgtatccaggctact

SEQ ID NO: 259474 - DNA, 30 bp, Artificial Sequence
  Synthetic oligonucleotide
ggtaggtccgttgtgccgcgagatgctact

SEQ ID NO: 259475 - DNA, 30 bp, Artificial Sequence
  Synthetic oligonucleotide
cccatctcacagatacgacgcattgctact

SEQ ID NO: 259476 - DNA, 30 bp, Artificial Sequence
  Synthetic oligonucleotide
gacgacggtatctacgtttacacctctact

SEQ ID NO: 259477 - DNA, 30 bp, Artificial Sequence
  Synthetic oligonucleotide
agatagctgcggatactccaagtgtctact

SEQ ID NO: 259478 - DNA, 30 bp, Artificial Sequence
  Synthetic oligonucleotide
atggcctacataggaccatccatttctact

SEQ ID NO: 259479 - DNA, 30 bp, Artificial Sequence
  Synthetic oligonucleotide
cctcacttaatgctcgtcaaccccagtact

SEQ ID NO: 259480 - DNA, 30 bp, Artificial Sequence
  Synthetic oligonucleotide
atgctctgcgtgaaccgtgaaccgagtact

SEQ ID NO: 259481 - DNA, 30 bp, Artificial Sequence
  Synthetic oligonucleotide
caacgcggatcggatttttcggcgagtact

SEQ ID NO: 259482 - DNA, 30 bp, Artificial Sequence
  Synthetic oligonucleotide
cactacattgttcgagtagtacaacgtact

SEQ ID NO: 259483 - DNA, 30 bp, Artificial Sequence
  Synthetic oligonucleotide
gaaaattggtatgaatccagtctgcgtact

SEQ ID NO: 259484 - DNA, 30 bp, Artificial Sequence
  Synthetic oligonucleotide
aatttaggaacttacaccagtaatcgtact

SEQ ID NO: 259485 - DNA, 30 bp, Artificial Sequence
  Synthetic oligonucleotide
cgagatttcaattaagtggccagtcgtact

SEQ ID NO: 259486 - DNA, 30 bp, Artificial Sequence
  Synthetic oligonucleotide
gtcagatgagggtgcgcccgcagaggtact

SEQ ID NO: 259487 - DNA, 30 bp, Artificial Sequence
  Synthetic oligonucleotide
cggtccgtatgtgcagatgaacatggtact

SEQ ID NO: 259488 - DNA, 30 bp, Artificial Sequence
  Synthetic oligonucleotide
ttaatggacgacgggacgaagattggtact

SEQ ID NO: 259489 - DNA, 30 bp, Artificial Sequence
  Synthetic oligonucleotide
ttcgctgtcttgacgtgtcgaagctgtact

SEQ ID NO: 259490 - DNA, 30 bp, Artificial Sequence
  Synthetic oligonucleotide
atctaccttcacgagctgttcgggtgtact

SEQ ID NO: 259491 - DNA, 30 bp, Artificial Sequence
  Synthetic oligonucleotide
acctagagacaccgcgtaattaattgtact

SEQ ID NO: 259492 - DNA, 30 bp, Artificial Sequence
  Synthetic oligonucleotide
aagaaattgcgaggtgacctaagttgtact

SEQ ID NO: 259493 - DNA, 30 bp, Artificial Sequence
  Synthetic oligonucleotide
gccgtagttgtaagtgacgtactttgtact

SEQ ID NO: 259494 - DNA, 30 bp, Artificial Sequence
  Synthetic oligonucleotide
gttgcatggatcgtacggagggaaattact

SEQ ID NO: 259495 - DNA, 30 bp, Artificial Sequence
  Synthetic oligonucleotide
ggccaaatatacagcgttattgcaattact

SEQ ID NO: 259496 - DNA, 30 bp, Artificial Sequence
  Synthetic oligonucleotide
gtgagagacgcacgctcaatgctcattact

SEQ ID NO: 259497 - DNA, 30 bp, Artificial Sequence
  Synthetic oligonucleotide
cgagattgcaattccacccggacgattact

SEQ ID NO: 259498 - DNA, 30 bp, Artificial Sequence
  Synthetic oligonucleotide
gacgatacctgctgggggcgtgttattact

SEQ ID NO: 259499 - DNA, 30 bp, Artificial Sequence
  Synthetic oligonucleotide
actagaggcccccagacatcatttattact

SEQ ID NO: 259500 - DNA, 31 bp, Artificial Sequence
  Synthetic oligonucleotide
tggaagccgtctactgacgggcaaacttact

SEQ ID NO: 259501 - DNA, 30 bp, Artificial Sequence
  Synthetic oligonucleotide
ttgtcgataagcttgtggagctcccttact

SEQ ID NO: 259502 - DNA, 30 bp, Artificial Sequence
  Synthetic oligonucleotide
ggttgcgtcctgctcggatgttaagttact

SEQ ID NO: 259503 - DNA, 30 bp, Artificial Sequence
  Synthetic oligonucleotide
gccgcatgtgttagctaaaggagagttact

SEQ ID NO: 259504 - DNA, 30 bp, Artificial Sequence
  Synthetic oligonucleotide
ccagatggctaggttcgagcactagttact

SEQ ID NO: 259505 - DNA, 30 bp, Artificial Sequence
  Synthetic oligonucleotide
gagagtatggacattccggatcccgttact

SEQ ID NO: 259506 - DNA, 30 bp, Artificial Sequence
  Synthetic oligonucleotide
ctatcgatttgacctcgcccaggcgttact

SEQ ID NO: 259507 - DNA, 30 bp, Artificial Sequence
  Synthetic oligonucleotide
atggtcagctcagatagagtaccggttact

SEQ ID NO: 259508 - DNA, 30 bp, Artificial Sequence
  Synthetic oligonucleotide
tgactaactcattatcatagtatggttact

SEQ ID NO: 259509 - DNA, 30 bp, Artificial Sequence
  Synthetic oligonucleotide
cgcgcgcactgaaggggcaaatatgttact

SEQ ID NO: 259510 - DNA, 30 bp, Artificial Sequence
  Synthetic oligonucleotide
gtcttggtgccccgttaaagcaactttact

SEQ ID NO: 259511 - DNA, 30 bp, Artificial Sequence
  Synthetic oligonucleotide
gcttggacgtcagaactgtctccgtttact

SEQ ID NO: 259512 - DNA, 30 bp, Artificial Sequence
  Synthetic oligonucleotide
gaatcatcagacgactatgacccttttact

SEQ ID NO: 259513 - DNA, 30 bp, Artificial Sequence
  Synthetic oligonucleotide
ggttcatactagatgaaccaatgcaaacct

SEQ ID NO: 259514 - DNA, 30 bp, Artificial Sequence
  Synthetic oligonucleotide
ccggtgtgttgagactcagtcgagaaacct

SEQ ID NO: 259515 - DNA, 30 bp, Artificial Sequence
  Synthetic oligonucleotide
gatcgtcgagtttccaaatacaggaaacct

SEQ ID NO: 259516 - DNA, 30 bp, Artificial Sequence
  Synthetic oligonucleotide
taaaccgacctcctcccgcaccataaacct

SEQ ID NO: 259517 - DNA, 30 bp, Artificial Sequence
  Synthetic oligonucleotide
ggccgccgtcggggggcgcaacgtaaacct

SEQ ID NO: 259518 - DNA, 30 bp, Artificial Sequence
  Synthetic oligonucleotide
aacacccacggatacgtattcgaacaacct

SEQ ID NO: 259519 - DNA, 30 bp, Artificial Sequence
  Synthetic oligonucleotide
ctcaacagaattcagcaaagcagtcaacct

SEQ ID NO: 259520 - DNA, 30 bp, Artificial Sequence
  Synthetic oligonucleotide
ttcggtgatgtcagtgctctctggtaacct

SEQ ID NO: 259521 - DNA, 30 bp, Artificial Sequence
  Synthetic oligonucleotide
ctcgccgtggtctcttaatggaattaacct

SEQ ID NO: 259522 - DNA, 30 bp, Artificial Sequence
  Synthetic oligonucleotide
ataccaatcaacgcgccgcgtacttaacct

SEQ ID NO: 259523 - DNA, 30 bp, Artificial Sequence
  Synthetic oligonucleotide
ttaataacaaggaagacgacgctttaacct

SEQ ID NO: 259524 - DNA, 30 bp, Artificial Sequence
  Synthetic oligonucleotide
gaatacggccgatcggaagcgccaacacct

SEQ ID NO: 259525 - DNA, 30 bp, Artificial Sequence
  Synthetic oligonucleotide
agcgcccaatatatttcgctgttaacacct

SEQ ID NO: 259526 - DNA, 30 bp, Artificial Sequence
  Synthetic oligonucleotide
gtcactgttagacatggtcaccacacacct

SEQ ID NO: 259527 - DNA, 30 bp, Artificial Sequence
  Synthetic oligonucleotide
ttaccactctgctggtctcacagtacacct

SEQ ID NO: 259528 - DNA, 30 bp, Artificial Sequence
  Synthetic oligonucleotide
atgaaagatgaagtaactaagtgtacacct

SEQ ID NO: 259529 - DNA, 30 bp, Artificial Sequence
  Synthetic oligonucleotide
gggtctcctcttagaatggcgtaaccacct

SEQ ID NO: 259530 - DNA, 30 bp, Artificial Sequence
  Synthetic oligonucleotide
atgcgatagaattaactaaccggaccacct

SEQ ID NO: 259531 - DNA, 30 bp, Artificial Sequence
  Synthetic oligonucleotide
actagcgatatctggaccgacaggccacct

SEQ ID NO: 259532 - DNA, 30 bp, Artificial Sequence
  Synthetic oligonucleotide
acgtggtgtatacagggacggcatccacct

SEQ ID NO: 259533 - DNA, 30 bp, Artificial Sequence
  Synthetic oligonucleotide
acaaggcgtaagacgctaggagatccacct

SEQ ID NO: 259534 - DNA, 30 bp, Artificial Sequence
  Synthetic oligonucleotide
gcttccagcgccaggtggcaagctccacct

SEQ ID NO: 259535 - DNA, 30 bp, Artificial Sequence
  Synthetic oligonucleotide
gccaatcccaaggcgaaactttaggcacct

SEQ ID NO: 259536 - DNA, 30 bp, Artificial Sequence
  Synthetic oligonucleotide
tccgtagctttgactcgggagcgggcacct

SEQ ID NO: 259537 - DNA, 30 bp, Artificial Sequence
  Synthetic oligonucleotide
acctgtcattgcctatgttcaccatcacct

SEQ ID NO: 259538 - DNA, 30 bp, Artificial Sequence
  Synthetic oligonucleotide
gtactagcggtcgggagcaattactcacct

SEQ ID NO: 259539 - DNA, 30 bp, Artificial Sequence
  Synthetic oligonucleotide
ccgccgatacattgctgccctggctcacct

SEQ ID NO: 259540 - DNA, 30 bp, Artificial Sequence
  Synthetic oligonucleotide
catactgccgtttgtaccacctcgtcacct

SEQ ID NO: 259541 - DNA, 30 bp, Artificial Sequence
  Synthetic oligonucleotide
atgaagggtacaccgggccaacattcacct

SEQ ID NO: 259542 - DNA, 30 bp, Artificial Sequence
  Synthetic oligonucleotide
agaaggttctattggtcgcgtccttcacct

SEQ ID NO: 259543 - DNA, 30 bp, Artificial Sequence
  Synthetic oligonucleotide
tgagacacgcgccgtgttattcaaagacct

SEQ ID NO: 259544 - DNA, 30 bp, Artificial Sequence
  Synthetic oligonucleotide
cagtattcttggtagagaaccgtcagacct

SEQ ID NO: 259545 - DNA, 30 bp, Artificial Sequence
  Synthetic oligonucleotide
ctcgttcgagggcgtttcgaatagagacct

SEQ ID NO: 259546 - DNA, 30 bp, Artificial Sequence
  Synthetic oligonucleotide
ggctttggtatactagtaatcacgagacct

SEQ ID NO: 259547 - DNA, 30 bp, Artificial Sequence
  Synthetic oligonucleotide
ataacaatccgtgcacgcgggtgtagacct

SEQ ID NO: 259548 - DNA, 30 bp, Artificial Sequence
  Synthetic oligonucleotide
aattcaacaacgtagtcgtgccttagacct

SEQ ID NO: 259549 - DNA, 30 bp, Artificial Sequence
  Synthetic oligonucleotide
gtgggcgcagtttaactgcctccacgacct

SEQ ID NO: 259550 - DNA, 30 bp, Artificial Sequence
  Synthetic oligonucleotide
ggcgggtttaacgggggcccaagacgacct

SEQ ID NO: 259551 - DNA, 30 bp, Artificial Sequence
  Synthetic oligonucleotide
tacatgccggaatccgatgacgatcgacct

SEQ ID NO: 259552 - DNA, 30 bp, Artificial Sequence
  Synthetic oligonucleotide
gtacgcaaccgtgtattgttgattcgacct

SEQ ID NO: 259553 - DNA, 30 bp, Artificial Sequence
  Synthetic oligonucleotide
ttgtcggccgaggagacccagaccggacct

SEQ ID NO: 259554 - DNA, 30 bp, Artificial Sequence
  Synthetic oligonucleotide
ttctcctgccggcagaccgaataatgacct

SEQ ID NO: 259555 - DNA, 30 bp, Artificial Sequence
  Synthetic oligonucleotide
ttcacccggtgactcgcactaagctgacct

SEQ ID NO: 259556 - DNA, 30 bp, Artificial Sequence
  Synthetic oligonucleotide
cttcacttaatggtaaagggcaggtgacct

SEQ ID NO: 259557 - DNA, 30 bp, Artificial Sequence
  Synthetic oligonucleotide
gggggcaaggggagcgattccaaaatacct

SEQ ID NO: 259558 - DNA, 30 bp, Artificial Sequence
  Synthetic oligonucleotide
tttttgcacccgaaaaggccttaaatacct

SEQ ID NO: 259559 - DNA, 30 bp, Artificial Sequence
  Synthetic oligonucleotide
cgacggaagcttccttcggatatcatacct

SEQ ID NO: 259560 - DNA, 30 bp, Artificial Sequence
  Synthetic oligonucleotide
acataacattctcattggcctctcatacct

SEQ ID NO: 259561 - DNA, 30 bp, Artificial Sequence
  Synthetic oligonucleotide
cacaccgtgttgcaaaattgagatctacct

SEQ ID NO: 259562 - DNA, 30 bp, Artificial Sequence
  Synthetic oligonucleotide
ttgcgcactacctgatcataacctctacct

SEQ ID NO: 259563 - DNA, 30 bp, Artificial Sequence
  Synthetic oligonucleotide
gcaggacagaaaagggaagtctttctacct

SEQ ID NO: 259564 - DNA, 30 bp, Artificial Sequence
  Synthetic oligonucleotide
tctcagcgacgcctcgcagtcgacgtacct

SEQ ID NO: 259565 - DNA, 30 bp, Artificial Sequence
  Synthetic oligonucleotide
gtgattgcccagtgtcgtgtcgacgtacct

SEQ ID NO: 259566 - DNA, 30 bp, Artificial Sequence
  Synthetic oligonucleotide
cggtctccggtggtaagcataggtgtacct

SEQ ID NO: 259567 - DNA, 30 bp, Artificial Sequence
  Synthetic oligonucleotide
tggcaaaagccgggttagtaagcgttacct

SEQ ID NO: 259568 - DNA, 30 bp, Artificial Sequence
  Synthetic oligonucleotide
tagttggagaggtcgttcggagtgttacct

SEQ ID NO: 259569 - DNA, 30 bp, Artificial Sequence
  Synthetic oligonucleotide
cttaagtcaccgtaggccagaagcaaccct

SEQ ID NO: 259570 - DNA, 29 bp, Artificial Sequence
  Synthetic oligonucleotide
tgatacaatggggtagctagttgaaccct

SEQ ID NO: 259571 - DNA, 30 bp, Artificial Sequence
  Synthetic oligonucleotide
gataagcgattagcgaatttttcacaccct

SEQ ID NO: 259572 - DNA, 30 bp, Artificial Sequence
  Synthetic oligonucleotide
ggcagggggatgtcctacaatcgagaccct

SEQ ID NO: 259573 - DNA, 30 bp, Artificial Sequence
  Synthetic oligonucleotide
gggacatgagacagtagctggtctgaccct

SEQ ID NO: 259574 - DNA, 30 bp, Artificial Sequence
  Synthetic oligonucleotide
gggtatggcacggtacgccgtcaataccct

SEQ ID NO: 259575 - DNA, 30 bp, Artificial Sequence
  Synthetic oligonucleotide
gagacataagtaaggattgccgaataccct

SEQ ID NO: 259576 - DNA, 30 bp, Artificial Sequence
  Synthetic oligonucleotide
gacatgctattttagtgaccataataccct

SEQ ID NO: 259577 - DNA, 30 bp, Artificial Sequence
  Synthetic oligonucleotide
cttggtgaaataaaaatggagcgataccct

SEQ ID NO: 259578 - DNA, 30 bp, Artificial Sequence
  Synthetic oligonucleotide
gtggcttcaaattcgatccagggataccct

SEQ ID NO: 259579 - DNA, 30 bp, Artificial Sequence
  Synthetic oligonucleotide
aatattagcttaacatgcctaatctaccct

SEQ ID NO: 259580 - DNA, 30 bp, Artificial Sequence
  Synthetic oligonucleotide
gggaacacgcgtgttccggaaggttaccct

SEQ ID NO: 259581 - DNA, 30 bp, Artificial Sequence
  Synthetic oligonucleotide
gagaaggtgtccggtagataggacacccct

SEQ ID NO: 259582 - DNA, 30 bp, Artificial Sequence
  Synthetic oligonucleotide
tcgtcatcgagtggtttgcacgaaccccct

SEQ ID NO: 259583 - DNA, 30 bp, Artificial Sequence
  Synthetic oligonucleotide
tgacggaaaaattccagtcccccgccccct

SEQ ID NO: 259584 - DNA, 30 bp, Artificial Sequence
  Synthetic oligonucleotide
acaacaactgaggggtaacgagcgccccct

SEQ ID NO: 259585 - DNA, 30 bp, Artificial Sequence
  Synthetic oligonucleotide
cagacaataaagtcgcaaacggcagcccct

SEQ ID NO: 259586 - DNA, 30 bp, Artificial Sequence
  Synthetic oligonucleotide
accgggagccgtacggcgaagtgtgcccct

SEQ ID NO: 259587 - DNA, 30 bp, Artificial Sequence
  Synthetic oligonucleotide
gggttagtgcgaagccttgaacgctcccct

SEQ ID NO: 259588 - DNA, 30 bp, Artificial Sequence
  Synthetic oligonucleotide
cataacacttgcaaggtggtagttagccct

SEQ ID NO: 259589 - DNA, 30 bp, Artificial Sequence
  Synthetic oligonucleotide
ggcgcatagagggtatacatgggacgccct

SEQ ID NO: 259590 - DNA, 30 bp, Artificial Sequence
  Synthetic oligonucleotide
gtgtgtttggtgtacgtcatttgccgccct

SEQ ID NO: 259591 - DNA, 30 bp, Artificial Sequence
  Synthetic oligonucleotide
acccccgaccctgacatcaaaaagcgccct

SEQ ID NO: 259592 - DNA, 30 bp, Artificial Sequence
  Synthetic oligonucleotide
gatctcaagaccgatatgactcccggccct

SEQ ID NO: 259593 - DNA, 30 bp, Artificial Sequence
  Synthetic oligonucleotide
caaagttcgtaacgaggtggacgtggccct

SEQ ID NO: 259594 - DNA, 30 bp, Artificial Sequence
  Synthetic oligonucleotide
agggctcattcaatgagaaaaggctgccct

SEQ ID NO: 259595 - DNA, 30 bp, Artificial Sequence
  Synthetic oligonucleotide
gaactacattacacgattaatttctgccct

SEQ ID NO: 259596 - DNA, 30 bp, Artificial Sequence
  Synthetic oligonucleotide
cccctctctctttctattcctttgtgccct

SEQ ID NO: 259597 - DNA, 30 bp, Artificial Sequence
  Synthetic oligonucleotide
tataggcatcgtcaaggagggctttgccct

SEQ ID NO: 259598 - DNA, 30 bp, Artificial Sequence
  Synthetic oligonucleotide
gtgaatattgaaaggcacagagaaatccct

SEQ ID NO: 259599 - DNA, 30 bp, Artificial Sequence
  Synthetic oligonucleotide
agagcgattattgagaggttgtcaatccct

SEQ ID NO: 259600 - DNA, 30 bp, Artificial Sequence
  Synthetic oligonucleotide
tccgcggtacttgtgtttggggtaatccct

SEQ ID NO: 259601 - DNA, 30 bp, Artificial Sequence
  Synthetic oligonucleotide
tagtggtgattatcacacaaatccatccct

SEQ ID NO: 259602 - DNA, 30 bp, Artificial Sequence
  Synthetic oligonucleotide
cgttaacacttggtcgattatagcctccct

SEQ ID NO: 259603 - DNA, 30 bp, Artificial Sequence
  Synthetic oligonucleotide
gatcaatgggcacgtatccgtaaagtccct

SEQ ID NO: 259604 - DNA, 30 bp, Artificial Sequence
  Synthetic oligonucleotide
acgtcaatgttacgagctatggcagtccct

SEQ ID NO: 259605 - DNA, 30 bp, Artificial Sequence
  Synthetic oligonucleotide
taatccgtgcggaagccgaaattagtccct

SEQ ID NO: 259606 - DNA, 30 bp, Artificial Sequence
  Synthetic oligonucleotide
cgagtaaccgtacgatacctggcggtccct

SEQ ID NO: 259607 - DNA, 30 bp, Artificial Sequence
  Synthetic oligonucleotide
tcgagtcgaaactcggcctatcgggtccct

SEQ ID NO: 259608 - DNA, 30 bp, Artificial Sequence
  Synthetic oligonucleotide
ggtaggcagtacatatccgcgtgggtccct

SEQ ID NO: 259609 - DNA, 29 bp, Artificial Sequence
  Synthetic oligonucleotide
ctatcgcctcagttcgttgttccttccct

SEQ ID NO: 259610 - DNA, 30 bp, Artificial Sequence
  Synthetic oligonucleotide
acggggtactacgagtcaatcggcttccct

SEQ ID NO: 259611 - DNA, 30 bp, Artificial Sequence
  Synthetic oligonucleotide
tgggggttctcggccggcagtgcgttccct

SEQ ID NO: 259612 - DNA, 30 bp, Artificial Sequence
  Synthetic oligonucleotide
ccatccatcggtccccaagaggtgttccct

SEQ ID NO: 259613 - DNA, 30 bp, Artificial Sequence
  Synthetic oligonucleotide
aacgctgtggtgcacgttataggtttccct

SEQ ID NO: 259614 - DNA, 30 bp, Artificial Sequence
  Synthetic oligonucleotide
ggggctaaatagtgtggcagtaccaagcct

SEQ ID NO: 259615 - DNA, 30 bp, Artificial Sequence
  Synthetic oligonucleotide
agcgcaacagtcgattctcattagaagcct

SEQ ID NO: 259616 - DNA, 30 bp, Artificial Sequence
  Synthetic oligonucleotide
tcacgaagcgattcattgagcgcgaagcct

SEQ ID NO: 259617 - DNA, 30 bp, Artificial Sequence
  Synthetic oligonucleotide
ttattaaacttggctaagtgcgtgaagcct

SEQ ID NO: 259618 - DNA, 30 bp, Artificial Sequence
  Synthetic oligonucleotide
cgaagctactactaagtataaactaagcct

SEQ ID NO: 259619 - DNA, 30 bp, Artificial Sequence
  Synthetic oligonucleotide
ctgcccggtaaagctgaaatctctaagcct

SEQ ID NO: 259620 - DNA, 30 bp, Artificial Sequence
  Synthetic oligonucleotide
aatttgagggcaccattgagttctaagcct

SEQ ID NO: 259621 - DNA, 30 bp, Artificial Sequence
  Synthetic oligonucleotide
cgaccatgaatatttacaaggggacagcct

SEQ ID NO: 259622 - DNA, 30 bp, Artificial Sequence
  Synthetic oligonucleotide
aagagagttccggagcgaatctgacagcct

SEQ ID NO: 259623 - DNA, 30 bp, Artificial Sequence
  Synthetic oligonucleotide
aaagggctcaaatttgtgcaggagcagcct

SEQ ID NO: 259624 - DNA, 30 bp, Artificial Sequence
  Synthetic oligonucleotide
tgtacaagggctcttcctagcgggcagcct

SEQ ID NO: 259625 - DNA, 30 bp, Artificial Sequence
  Synthetic oligonucleotide
caggtgttttccgcatcaccgctagagcct

SEQ ID NO: 259626 - DNA, 30 bp, Artificial Sequence
  Synthetic oligonucleotide
agacacatttattaatctcaacctgagcct

SEQ ID NO: 259627 - DNA, 30 bp, Artificial Sequence
  Synthetic oligonucleotide
tcgacgtggcttgtggacgtgcgtgagcct

SEQ ID NO: 259628 - DNA, 30 bp, Artificial Sequence
  Synthetic oligonucleotide
ggacagaatattccgggtcggggtgagcct

SEQ ID NO: 259629 - DNA, 30 bp, Artificial Sequence
  Synthetic oligonucleotide
ctccgattccgtaatgagacttaatagcct

SEQ ID NO: 259630 - DNA, 30 bp, Artificial Sequence
  Synthetic oligonucleotide
taggccttctggctacagacctgatagcct

SEQ ID NO: 259631 - DNA, 29 bp, Artificial Sequence
  Synthetic oligonucleotide
gtccaccccgtaagggccaggactagcct

SEQ ID NO: 259632 - DNA, 30 bp, Artificial Sequence
  Synthetic oligonucleotide
acactgagatgtgcataactcttaacgcct

SEQ ID NO: 259633 - DNA, 30 bp, Artificial Sequence
  Synthetic oligonucleotide
ccaaaaggtacgtgaaggacagacacgcct

SEQ ID NO: 259634 - DNA, 30 bp, Artificial Sequence
  Synthetic oligonucleotide
ctattactagcaagagttagagccacgcct

SEQ ID NO: 259635 - DNA, 30 bp, Artificial Sequence
  Synthetic oligonucleotide
ggacacaaccggaaaagatgcgtcacgcct

SEQ ID NO: 259636 - DNA, 30 bp, Artificial Sequence
  Synthetic oligonucleotide
attgctacaccgtgacaccagacgacgcct

SEQ ID NO: 259637 - DNA, 30 bp, Artificial Sequence
  Synthetic oligonucleotide
ccaggaatgcgatagtttcggtaaccgcct

SEQ ID NO: 259638 - DNA, 30 bp, Artificial Sequence
  Synthetic oligonucleotide
aagcgacgaacaaaaaagggctttccgcct

SEQ ID NO: 259639 - DNA, 30 bp, Artificial Sequence
  Synthetic oligonucleotide
ggctgtgtcacaccagcatcttaggcgcct

SEQ ID NO: 259640 - DNA, 30 bp, Artificial Sequence
  Synthetic oligonucleotide
tgcacgctaacgggcaacataaaatcgcct

SEQ ID NO: 259641 - DNA, 30 bp, Artificial Sequence
  Synthetic oligonucleotide
cgagagaactcccatcggtctaaatcgcct

SEQ ID NO: 259642 - DNA, 30 bp, Artificial Sequence
  Synthetic oligonucleotide
tgaattgcctgtccaggttgaggatcgcct

SEQ ID NO: 259643 - DNA, 30 bp, Artificial Sequence
  Synthetic oligonucleotide
atgaatagcaaactcccacacctttcgcct

SEQ ID NO: 259644 - DNA, 30 bp, Artificial Sequence
  Synthetic oligonucleotide
aaagcgttaaaaggaacaaccgttaggcct

SEQ ID NO: 259645 - DNA, 30 bp, Artificial Sequence
  Synthetic oligonucleotide
acgcgaggcgtggggtaggttccagggcct

SEQ ID NO: 259646 - DNA, 30 bp, Artificial Sequence
  Synthetic oligonucleotide
ttgatgcggggtacgaattaagtcgggcct

SEQ ID NO: 259647 - DNA, 30 bp, Artificial Sequence
  Synthetic oligonucleotide
ttgcaggctccagccctttcacgggggcct

SEQ ID NO: 259648 - DNA, 30 bp, Artificial Sequence
  Synthetic oligonucleotide
tgattggaggttggcgcatccactgggcct

SEQ ID NO: 259649 - DNA, 30 bp, Artificial Sequence
  Synthetic oligonucleotide
gtaagatccgggttgttgaacattgggcct

SEQ ID NO: 259650 - DNA, 30 bp, Artificial Sequence
  Synthetic oligonucleotide
aggcgcaataacgaaggtgtccttgggcct

SEQ ID NO: 259651 - DNA, 30 bp, Artificial Sequence
  Synthetic oligonucleotide
aattgctcgctcaactacggcgcatggcct

SEQ ID NO: 259652 - DNA, 30 bp, Artificial Sequence
  Synthetic oligonucleotide
agaggtcggcttcaagtgagggagtggcct

SEQ ID NO: 259653 - DNA, 30 bp, Artificial Sequence
  Synthetic oligonucleotide
cgattcaaagccggggttatttcttggcct

SEQ ID NO: 259654 - DNA, 30 bp, Artificial Sequence
  Synthetic oligonucleotide
acttggacaacttagtgacacacaatgcct

SEQ ID NO: 259655 - DNA, 30 bp, Artificial Sequence
  Synthetic oligonucleotide
tcgggctatgcggttgtgtgtgacatgcct

SEQ ID NO: 259656 - DNA, 30 bp, Artificial Sequence
  Synthetic oligonucleotide
ccacgggtaagtctcgaaggtttcatgcct

SEQ ID NO: 259657 - DNA, 30 bp, Artificial Sequence
  Synthetic oligonucleotide
ggacgcgtcagagctgcggccgttatgcct

SEQ ID NO: 259658 - DNA, 30 bp, Artificial Sequence
  Synthetic oligonucleotide
cttgcacagagaggtactcgacggctgcct

SEQ ID NO: 259659 - DNA, 30 bp, Artificial Sequence
  Synthetic oligonucleotide
aacgcgtccaatgtagcgatggatctgcct

SEQ ID NO: 259660 - DNA, 30 bp, Artificial Sequence
  Synthetic oligonucleotide
taatggttttggaataaggcgtatctgcct

SEQ ID NO: 259661 - DNA, 30 bp, Artificial Sequence
  Synthetic oligonucleotide
ctattgtctagctcgacagtcggtgtgcct

SEQ ID NO: 259662 - DNA, 30 bp, Artificial Sequence
  Synthetic oligonucleotide
gtcttagatcatattgctcggggtgtgcct

SEQ ID NO: 259663 - DNA, 30 bp, Artificial Sequence
  Synthetic oligonucleotide
tcgtttgtacgacggtatgcataattgcct

SEQ ID NO: 259664 - DNA, 30 bp, Artificial Sequence
  Synthetic oligonucleotide
caccttacagaaccttataatagaaatcct

SEQ ID NO: 259665 - DNA, 30 bp, Artificial Sequence
  Synthetic oligonucleotide
gcaaagtagccctgtacccgaataaatcct

SEQ ID NO: 259666 - DNA, 30 bp, Artificial Sequence
  Synthetic oligonucleotide
agcctcgattaggaaactcccaacaatcct

SEQ ID NO: 259667 - DNA, 30 bp, Artificial Sequence
  Synthetic oligonucleotide
gatcgccactgaaaattctacgccaatcct

SEQ ID NO: 259668 - DNA, 30 bp, Artificial Sequence
  Synthetic oligonucleotide
ttgattgcaaccatcgtgtacccgaatcct

SEQ ID NO: 259669 - DNA, 30 bp, Artificial Sequence
  Synthetic oligonucleotide
ggaaatgtgtccggcgaaccctttaatcct

SEQ ID NO: 259670 - DNA, 30 bp, Artificial Sequence
  Synthetic oligonucleotide
cacttggcggcactacagagaccacatcct

SEQ ID NO: 259671 - DNA, 30 bp, Artificial Sequence
  Synthetic oligonucleotide
ccggcgacaggcaaggtaaggtcacatcct

SEQ ID NO: 259672 - DNA, 30 bp, Artificial Sequence
  Synthetic oligonucleotide
tatcgtgttcagtgttcatatctacatcct

SEQ ID NO: 259673 - DNA, 30 bp, Artificial Sequence
  Synthetic oligonucleotide
catgctaatccgcttcctactggccatcct

SEQ ID NO: 259674 - DNA, 30 bp, Artificial Sequence
  Synthetic oligonucleotide
gaactaccaaccgcgtcaggggatcatcct

SEQ ID NO: 259675 - DNA, 30 bp, Artificial Sequence
  Synthetic oligonucleotide
tgaggttgtttaagtctgcggaccgatcct

SEQ ID NO: 259676 - DNA, 30 bp, Artificial Sequence
  Synthetic oligonucleotide
aaaacgagtggtgatgcatgccactatcct

SEQ ID NO: 259677 - DNA, 30 bp, Artificial Sequence
  Synthetic oligonucleotide
aagtaccgcataaagagaggctagtatcct

SEQ ID NO: 259678 - DNA, 30 bp, Artificial Sequence
  Synthetic oligonucleotide
cggctagacaaagccttatcgacgtatcct

SEQ ID NO: 259679 - DNA, 30 bp, Artificial Sequence
  Synthetic oligonucleotide
ggagcacttgaaggcgcctccgcgtatcct

SEQ ID NO: 259680 - DNA, 30 bp, Artificial Sequence
  Synthetic oligonucleotide
gcctaactcatacaccggaatacaactcct

SEQ ID NO: 259681 - DNA, 30 bp, Artificial Sequence
  Synthetic oligonucleotide
ccgatctccatactcaaaacttacactcct

SEQ ID NO: 259682 - DNA, 30 bp, Artificial Sequence
  Synthetic oligonucleotide
acgacttagacaaggcaggaccaccctcct

SEQ ID NO: 259683 - DNA, 30 bp, Artificial Sequence
  Synthetic oligonucleotide
tatcccgccataaaactaaattgccctcct

SEQ ID NO: 259684 - DNA, 31 bp, Artificial Sequence
  Synthetic oligonucleotide
ccacattcgtcgtccgagaaaaggtcctcct

SEQ ID NO: 259685 - DNA, 30 bp, Artificial Sequence
  Synthetic oligonucleotide
ggacctaccagatatacgcagtgtcctcct

SEQ ID NO: 259686 - DNA, 30 bp, Artificial Sequence
  Synthetic oligonucleotide
acttagactcacaggtccgacattcctcct

SEQ ID NO: 259687 - DNA, 30 bp, Artificial Sequence
  Synthetic oligonucleotide
gaagataaacaaatcaatgctgtagctcct

SEQ ID NO: 259688 - DNA, 30 bp, Artificial Sequence
  Synthetic oligonucleotide
tataagcccaataccatctatagtgctcct

SEQ ID NO: 259689 - DNA, 30 bp, Artificial Sequence
  Synthetic oligonucleotide
atgccaccttccccgcggaatccctctcct

SEQ ID NO: 259690 - DNA, 30 bp, Artificial Sequence
  Synthetic oligonucleotide
cagaggcagggagccggctaccccagtcct

SEQ ID NO: 259691 - DNA, 30 bp, Artificial Sequence
  Synthetic oligonucleotide
cagtgttcacactctcgcaacgccagtcct

SEQ ID NO: 259692 - DNA, 30 bp, Artificial Sequence
  Synthetic oligonucleotide
tgagtctcaccctaaaatgcatcgagtcct

SEQ ID NO: 259693 - DNA, 30 bp, Artificial Sequence
  Synthetic oligonucleotide
ctctaggtagggtgaaacggaactagtcct

SEQ ID NO: 259694 - DNA, 30 bp, Artificial Sequence
  Synthetic oligonucleotide
aagaaaaaccaaagcgctctgagtagtcct

SEQ ID NO: 259695 - DNA, 30 bp, Artificial Sequence
  Synthetic oligonucleotide
gataccttccattcttaaatgagacgtcct

SEQ ID NO: 259696 - DNA, 30 bp, Artificial Sequence
  Synthetic oligonucleotide
tgcaaccagaactagggtcgttgaggtcct

SEQ ID NO: 259697 - DNA, 30 bp, Artificial Sequence
  Synthetic oligonucleotide
aagggttggtaatgtaggggactaggtcct

SEQ ID NO: 259698 - DNA, 30 bp, Artificial Sequence
  Synthetic oligonucleotide
ttacatacggtgaatgctcatggcggtcct

SEQ ID NO: 259699 - DNA, 30 bp, Artificial Sequence
  Synthetic oligonucleotide
acatgcttgtacctagtgacggagggtcct

SEQ ID NO: 259700 - DNA, 30 bp, Artificial Sequence
  Synthetic oligonucleotide
tgacacaggtttaaagagccgctgggtcct

SEQ ID NO: 259701 - DNA, 30 bp, Artificial Sequence
  Synthetic oligonucleotide
agcaaggaacactgaacgacgtctggtcct

SEQ ID NO: 259702 - DNA, 30 bp, Artificial Sequence
  Synthetic oligonucleotide
ttcagctccgcggaaggtggaattggtcct

SEQ ID NO: 259703 - DNA, 30 bp, Artificial Sequence
  Synthetic oligonucleotide
gacagcgccaatttaaacagcccatgtcct

SEQ ID NO: 259704 - DNA, 30 bp, Artificial Sequence
  Synthetic oligonucleotide
cataattgatcgtgggggtaaccctgtcct

SEQ ID NO: 259705 - DNA, 30 bp, Artificial Sequence
  Synthetic oligonucleotide
tgtgacagattcttctacgtaagctgtcct

SEQ ID NO: 259706 - DNA, 30 bp, Artificial Sequence
  Synthetic oligonucleotide
gggttaagtccgcacctaatggtgtgtcct

SEQ ID NO: 259707 - DNA, 30 bp, Artificial Sequence
  Synthetic oligonucleotide
acacttagtacccacaagtttgattgtcct

SEQ ID NO: 259708 - DNA, 30 bp, Artificial Sequence
  Synthetic oligonucleotide
aacctaaaagcaaggtaaatactttgtcct

SEQ ID NO: 259709 - DNA, 30 bp, Artificial Sequence
  Synthetic oligonucleotide
ggtagatctggtcacaacgaacgcattcct

SEQ ID NO: 259710 - DNA, 30 bp, Artificial Sequence
  Synthetic oligonucleotide
acctggtagagcgtgtaactggatcttcct

SEQ ID NO: 259711 - DNA, 30 bp, Artificial Sequence
  Synthetic oligonucleotide
attagtatgggttacgtgttcagagttcct

SEQ ID NO: 259712 - DNA, 30 bp, Artificial Sequence
  Synthetic oligonucleotide
aggagacaggaggggttattgcgagttcct

SEQ ID NO: 259713 - DNA, 30 bp, Artificial Sequence
  Synthetic oligonucleotide
cacactgtaggtggagcatgaggagttcct

SEQ ID NO: 259714 - DNA, 30 bp, Artificial Sequence
  Synthetic oligonucleotide
gttaagtccttgcctcgccaattagttcct

SEQ ID NO: 259715 - DNA, 30 bp, Artificial Sequence
  Synthetic oligonucleotide
cccctgaaggcataggagtaagtcgttcct

SEQ ID NO: 259716 - DNA, 30 bp, Artificial Sequence
  Synthetic oligonucleotide
ggtcagcggttaaactgactgccgtttcct

SEQ ID NO: 259717 - DNA, 30 bp, Artificial Sequence
  Synthetic oligonucleotide
ggaacgaaacacgcgggacctatttttcct

SEQ ID NO: 259718 - DNA, 30 bp, Artificial Sequence
  Synthetic oligonucleotide
ctggcaagagtcgagttcgatacaaaagct

SEQ ID NO: 259719 - DNA, 31 bp, Artificial Sequence
  Synthetic oligonucleotide
ttccagatgcttccatcgagacccaaaagct

SEQ ID NO: 259720 - DNA, 30 bp, Artificial Sequence
  Synthetic oligonucleotide
acttggaggaccactgaggggcaacaagct

SEQ ID NO: 259721 - DNA, 30 bp, Artificial Sequence
  Synthetic oligonucleotide
catattaaattatcttgcccaagccaagct

SEQ ID NO: 259722 - DNA, 30 bp, Artificial Sequence
  Synthetic oligonucleotide
ggctagggctgcgcgtgtataggccaagct

SEQ ID NO: 259723 - DNA, 30 bp, Artificial Sequence
  Synthetic oligonucleotide
cgacgaactgcatggcgggttttccaagct

SEQ ID NO: 259724 - DNA, 30 bp, Artificial Sequence
  Synthetic oligonucleotide
gccaggaactatgacggcgactggcaagct

SEQ ID NO: 259725 - DNA, 30 bp, Artificial Sequence
  Synthetic oligonucleotide
agatggacagcagtggggtactttcaagct

SEQ ID NO: 259726 - DNA, 30 bp, Artificial Sequence
  Synthetic oligonucleotide
tttcgtcagaaaggccgctatacataagct

SEQ ID NO: 259727 - DNA, 30 bp, Artificial Sequence
  Synthetic oligonucleotide
cgataaataggcgctgtgagggcataagct

SEQ ID NO: 259728 - DNA, 30 bp, Artificial Sequence
  Synthetic oligonucleotide
cggtaatttatcaggtagtactgataagct

SEQ ID NO: 259729 - DNA, 30 bp, Artificial Sequence
  Synthetic oligonucleotide
cccggaccgttaattgaccggttataagct

SEQ ID NO: 259730 - DNA, 30 bp, Artificial Sequence
  Synthetic oligonucleotide
gcacgtagaacaacaagagccggctaagct

SEQ ID NO: 259731 - DNA, 30 bp, Artificial Sequence
  Synthetic oligonucleotide
gcgagctactggagctggaataacacagct

SEQ ID NO: 259732 - DNA, 30 bp, Artificial Sequence
  Synthetic oligonucleotide
cactcgacagaccctcggaaacggacagct

SEQ ID NO: 259733 - DNA, 30 bp, Artificial Sequence
  Synthetic oligonucleotide
gtgtattttgattgctagatcaaaccagct

SEQ ID NO: 259734 - DNA, 30 bp, Artificial Sequence
  Synthetic oligonucleotide
gcgcaaaataacaggcgtatcgggccagct

SEQ ID NO: 259735 - DNA, 30 bp, Artificial Sequence
  Synthetic oligonucleotide
tacaagttgttgttacagaatgggccagct

SEQ ID NO: 259736 - DNA, 30 bp, Artificial Sequence
  Synthetic oligonucleotide
tggggtgtcctttcatagatagttccagct

SEQ ID NO: 259737 - DNA, 30 bp, Artificial Sequence
  Synthetic oligonucleotide
ttcagacttacgaagtgggattcagcagct

SEQ ID NO: 259738 - DNA, 30 bp, Artificial Sequence
  Synthetic oligonucleotide
ggtgtgtaatgcgacgtgcaattagcagct

SEQ ID NO: 259739 - DNA, 31 bp, Artificial Sequence
  Synthetic oligonucleotide
aacgtaggtggaacttagttaataggcagct

SEQ ID NO: 259740 - DNA, 30 bp, Artificial Sequence
  Synthetic oligonucleotide
gctaccaaggttggcagtttgatggcagct

SEQ ID NO: 259741 - DNA, 30 bp, Artificial Sequence
  Synthetic oligonucleotide
cataaatccaaagctgtacggaatgcagct

SEQ ID NO: 259742 - DNA, 30 bp, Artificial Sequence
  Synthetic oligonucleotide
aacttcgtcattcgcgatctcagtgcagct

SEQ ID NO: 259743 - DNA, 30 bp, Artificial Sequence
  Synthetic oligonucleotide
ggctctgtccatgcgatcggaagatcagct

SEQ ID NO: 259744 - DNA, 30 bp, Artificial Sequence
  Synthetic oligonucleotide
ggcgtactggctctgtgatgtatatcagct

SEQ ID NO: 259745 - DNA, 30 bp, Artificial Sequence
  Synthetic oligonucleotide
ccgacatctctgttctttctattgtcagct

SEQ ID NO: 259746 - DNA, 30 bp, Artificial Sequence
  Synthetic oligonucleotide
tgcagaacatacaggcacttagcttcagct

SEQ ID NO: 259747 - DNA, 30 bp, Artificial Sequence
  Synthetic oligonucleotide
gtgtcgcccgtaagcaaagagatttcagct

SEQ ID NO: 259748 - DNA, 30 bp, Artificial Sequence
  Synthetic oligonucleotide
gacgagcatttcaggcgtgggccaagagct

SEQ ID NO: 259749 - DNA, 30 bp, Artificial Sequence
  Synthetic oligonucleotide
ccttataaaaacacagggtcgtggagagct

SEQ ID NO: 259750 - DNA, 30 bp, Artificial Sequence
  Synthetic oligonucleotide
atatatggggtcacttcatctgcccgagct

SEQ ID NO: 259751 - DNA, 30 bp, Artificial Sequence
  Synthetic oligonucleotide
gggataggattcgcggtcacacccggagct

SEQ ID NO: 259752 - DNA, 30 bp, Artificial Sequence
  Synthetic oligonucleotide
acggacgtagacatactgtgtccgggagct

SEQ ID NO: 259753 - DNA, 30 bp, Artificial Sequence
  Synthetic oligonucleotide
gtcttcggaggttgactaggttatggagct

SEQ ID NO: 259754 - DNA, 30 bp, Artificial Sequence
  Synthetic oligonucleotide
acttaactcgtgcgtcggttaagtggagct

SEQ ID NO: 259755 - DNA, 30 bp, Artificial Sequence
  Synthetic oligonucleotide
aagtccagctccctttagtcggggtgagct

SEQ ID NO: 259756 - DNA, 30 bp, Artificial Sequence
  Synthetic oligonucleotide
taggatccggccgagacgggagattgagct

SEQ ID NO: 259757 - DNA, 31 bp, Artificial Sequence
  Synthetic oligonucleotide
gtaggcaagacctagtcgcaatggcatagct

SEQ ID NO: 259758 - DNA, 30 bp, Artificial Sequence
  Synthetic oligonucleotide
tcccagaagcccattttattctcgatagct

SEQ ID NO: 259759 - DNA, 30 bp, Artificial Sequence
  Synthetic oligonucleotide
gtcactaattggaacattccaatgatagct

SEQ ID NO: 259760 - DNA, 30 bp, Artificial Sequence
  Synthetic oligonucleotide
gggccgcttgcacttagggcaggtatagct

SEQ ID NO: 259761 - DNA, 30 bp, Artificial Sequence
  Synthetic oligonucleotide
gtttaggtgtcacgaatagcaaaactagct

SEQ ID NO: 259762 - DNA, 30 bp, Artificial Sequence
  Synthetic oligonucleotide
atgcgataaactattactaattgactagct

SEQ ID NO: 259763 - DNA, 30 bp, Artificial Sequence
  Synthetic oligonucleotide
tcgcggcttgactccagggttgcgctagct

SEQ ID NO: 259764 - DNA, 30 bp, Artificial Sequence
  Synthetic oligonucleotide
acctagatttcaggcaaacacattctagct

SEQ ID NO: 259765 - DNA, 30 bp, Artificial Sequence
  Synthetic oligonucleotide
taacgggtctgtagtgttcatatagtagct

SEQ ID NO: 259766 - DNA, 30 bp, Artificial Sequence
  Synthetic oligonucleotide
cataaagccttctaggccctctacgtagct

SEQ ID NO: 259767 - DNA, 30 bp, Artificial Sequence
  Synthetic oligonucleotide
ccaatctgctgtttcttgaaaaccgtagct

SEQ ID NO: 259768 - DNA, 30 bp, Artificial Sequence
  Synthetic oligonucleotide
tgccggtgctcagactggatggaattagct

SEQ ID NO: 259769 - DNA, 30 bp, Artificial Sequence
  Synthetic oligonucleotide
agtgattccttttggaccactagattagct

SEQ ID NO: 259770 - DNA, 30 bp, Artificial Sequence
  Synthetic oligonucleotide
ggagttgacctttgcggatatggattagct

SEQ ID NO: 259771 - DNA, 30 bp, Artificial Sequence
  Synthetic oligonucleotide
aacacggtcgtttggagctcagaccacgct

SEQ ID NO: 259772 - DNA, 30 bp, Artificial Sequence
  Synthetic oligonucleotide
gcgactagggggatgtagggtgcccacgct

SEQ ID NO: 259773 - DNA, 30 bp, Artificial Sequence
  Synthetic oligonucleotide
gtcacactaaaggaactacttgtccacgct

SEQ ID NO: 259774 - DNA, 30 bp, Artificial Sequence
  Synthetic oligonucleotide
gagggacgataaagacaacgaaagcacgct

SEQ ID NO: 259775 - DNA, 30 bp, Artificial Sequence
  Synthetic oligonucleotide
ctcccgtctgggattttaactgcgcacgct

SEQ ID NO: 259776 - DNA, 30 bp, Artificial Sequence
  Synthetic oligonucleotide
atgtggtcgagtcatcgatcgtcgcacgct

SEQ ID NO: 259777 - DNA, 30 bp, Artificial Sequence
  Synthetic oligonucleotide
aacacggagagtaggggtgaggggcacgct

SEQ ID NO: 259778 - DNA, 30 bp, Artificial Sequence
  Synthetic oligonucleotide
ccctcatcacgtacatagtaggatcacgct

SEQ ID NO: 259779 - DNA, 30 bp, Artificial Sequence
  Synthetic oligonucleotide
ccagttcagccttaggttagacttcacgct

SEQ ID NO: 259780 - DNA, 30 bp, Artificial Sequence
  Synthetic oligonucleotide
ttcacagggggtcgagacacagccgacgct

SEQ ID NO: 259781 - DNA, 30 bp, Artificial Sequence
  Synthetic oligonucleotide
gatgggaacaccctctcacccggcgacgct

SEQ ID NO: 259782 - DNA, 30 bp, Artificial Sequence
  Synthetic oligonucleotide
tatctgggatgtgcggaggtaatatacgct

SEQ ID NO: 259783 - DNA, 30 bp, Artificial Sequence
  Synthetic oligonucleotide
atcctggtaagaaaacctctagactacgct

SEQ ID NO: 259784 - DNA, 30 bp, Artificial Sequence
  Synthetic oligonucleotide
agggtagacgggcacgcttctcgctacgct

SEQ ID NO: 259785 - DNA, 30 bp, Artificial Sequence
  Synthetic oligonucleotide
tcggctattacgcacatgatccgttacgct

SEQ ID NO: 259786 - DNA, 30 bp, Artificial Sequence
  Synthetic oligonucleotide
aactgcgagcaatgtctagttcaaaccgct

SEQ ID NO: 259787 - DNA, 30 bp, Artificial Sequence
  Synthetic oligonucleotide
cctattgatccgtaggcataggacaccgct

SEQ ID NO: 259788 - DNA, 30 bp, Artificial Sequence
  Synthetic oligonucleotide
gtgacactcaaatgcataggtgagaccgct

SEQ ID NO: 259789 - DNA, 30 bp, Artificial Sequence
  Synthetic oligonucleotide
gcggaagaaggtcgataccttgtacccgct

SEQ ID NO: 259790 - DNA, 30 bp, Artificial Sequence
  Synthetic oligonucleotide
acttagaactgtaagtagtcaccccccgct

SEQ ID NO: 259791 - DNA, 30 bp, Artificial Sequence
  Synthetic oligonucleotide
gagcttgatgcccgtagcagcagccccgct

SEQ ID NO: 259792 - DNA, 30 bp, Artificial Sequence
  Synthetic oligonucleotide
ggttaggtggcgaggggacccgcgcccgct

SEQ ID NO: 259793 - DNA, 30 bp, Artificial Sequence
  Synthetic oligonucleotide
accggaatgtccgccctctatcttcccgct

SEQ ID NO: 259794 - DNA, 30 bp, Artificial Sequence
  Synthetic oligonucleotide
caaaggatcgaaacgcgtttgtcagccgct

SEQ ID NO: 259795 - DNA, 30 bp, Artificial Sequence
  Synthetic oligonucleotide
gaagctagagcagctgaactgctagccgct

SEQ ID NO: 259796 - DNA, 30 bp, Artificial Sequence
  Synthetic oligonucleotide
gctaaagtgcagggccatgctaatgccgct

SEQ ID NO: 259797 - DNA, 30 bp, Artificial Sequence
  Synthetic oligonucleotide
ccgacaaattacggtgaacggtaatccgct

SEQ ID NO: 259798 - DNA, 30 bp, Artificial Sequence
  Synthetic oligonucleotide
cgtcggacacccgtcttactattctccgct

SEQ ID NO: 259799 - DNA, 30 bp, Artificial Sequence
  Synthetic oligonucleotide
agttgttgaaccatgttgactaatagcgct

SEQ ID NO: 259800 - DNA, 30 bp, Artificial Sequence
  Synthetic oligonucleotide
gcacgacaggacgtaacagtccttagcgct

SEQ ID NO: 259801 - DNA, 30 bp, Artificial Sequence
  Synthetic oligonucleotide
aaatcaatcggacgggtgagaaaccgcgct

SEQ ID NO: 259802 - DNA, 30 bp, Artificial Sequence
  Synthetic oligonucleotide
tgacgataggctaaggcgctccctcgcgct

SEQ ID NO: 259803 - DNA, 30 bp, Artificial Sequence
  Synthetic oligonucleotide
ctcaggtaaaatcgcacccaggggggcgct

SEQ ID NO: 259804 - DNA, 30 bp, Artificial Sequence
  Synthetic oligonucleotide
atctataacattggaaactatttgggcgct

SEQ ID NO: 259805 - DNA, 30 bp, Artificial Sequence
  Synthetic oligonucleotide
atccgtagggatcgcgtaggtaatggcgct

SEQ ID NO: 259806 - DNA, 30 bp, Artificial Sequence
  Synthetic oligonucleotide
taacgcatggtccccaacctgctctgcgct

SEQ ID NO: 259807 - DNA, 30 bp, Artificial Sequence
  Synthetic oligonucleotide
ccaagtgcaaaaatcgcatacacttgcgct

SEQ ID NO: 259808 - DNA, 30 bp, Artificial Sequence
  Synthetic oligonucleotide
tcaaagtcagcaccggaaattataatcgct

SEQ ID NO: 259809 - DNA, 30 bp, Artificial Sequence
  Synthetic oligonucleotide
actcaaaatcgggcactacttgggatcgct

SEQ ID NO: 259810 - DNA, 30 bp, Artificial Sequence
  Synthetic oligonucleotide
gcttgatctgtgaacggttgcgtgatcgct

SEQ ID NO: 259811 - DNA, 30 bp, Artificial Sequence
  Synthetic oligonucleotide
cggtcctgatgcggtcgcccctctatcgct

SEQ ID NO: 259812 - DNA, 30 bp, Artificial Sequence
  Synthetic oligonucleotide
acgtctgtagtggtacgtaatggactcgct

SEQ ID NO: 259813 - DNA, 30 bp, Artificial Sequence
  Synthetic oligonucleotide
cctcagggaggaaatatagatttactcgct

SEQ ID NO: 259814 - DNA, 30 bp, Artificial Sequence
  Synthetic oligonucleotide
ccaaagcttattctgtgcagaaacctcgct

SEQ ID NO: 259815 - DNA, 30 bp, Artificial Sequence
  Synthetic oligonucleotide
gcaatagacatgcaatcttgcattctcgct

SEQ ID NO: 259816 - DNA, 30 bp, Artificial Sequence
  Synthetic oligonucleotide
tagcagaacatttgactcatccttgtcgct

SEQ ID NO: 259817 - DNA, 30 bp, Artificial Sequence
  Synthetic oligonucleotide
gcggcatagctactggtaactcgcaaggct

SEQ ID NO: 259818 - DNA, 30 bp, Artificial Sequence
  Synthetic oligonucleotide
ctttgagaaacaaggtgtagatcgaaggct

SEQ ID NO: 259819 - DNA, 30 bp, Artificial Sequence
  Synthetic oligonucleotide
tcgcaacaagaactggtaaataggaaggct

SEQ ID NO: 259820 - DNA, 30 bp, Artificial Sequence
  Synthetic oligonucleotide
gtcgagtggtcaccgtggttaaaccaggct

SEQ ID NO: 259821 - DNA, 30 bp, Artificial Sequence
  Synthetic oligonucleotide
cggtgctctttgtcaggcaatttgcaggct

SEQ ID NO: 259822 - DNA, 30 bp, Artificial Sequence
  Synthetic oligonucleotide
gccctaattcggtttagatgtcacgaggct

SEQ ID NO: 259823 - DNA, 30 bp, Artificial Sequence
  Synthetic oligonucleotide
agaggggcaaaacctcattgggacgaggct

SEQ ID NO: 259824 - DNA, 30 bp, Artificial Sequence
  Synthetic oligonucleotide
caaacaatacacgacggcgtgtacgaggct

SEQ ID NO: 259825 - DNA, 30 bp, Artificial Sequence
  Synthetic oligonucleotide
ctaggcgttgttcactacgttcccgaggct

SEQ ID NO: 259826 - DNA, 30 bp, Artificial Sequence
  Synthetic oligonucleotide
cgtagtcgagcaaggtgttgattcgaggct

SEQ ID NO: 259827 - DNA, 30 bp, Artificial Sequence
  Synthetic oligonucleotide
gtcgttggtatgactgaagtctaggaggct

SEQ ID NO: 259828 - DNA, 30 bp, Artificial Sequence
  Synthetic oligonucleotide
aactgtaaggttgcattgttggcggaggct

SEQ ID NO: 259829 - DNA, 30 bp, Artificial Sequence
  Synthetic oligonucleotide
aggtatctcccgagcttaggtatggaggct

SEQ ID NO: 259830 - DNA, 30 bp, Artificial Sequence
  Synthetic oligonucleotide
tcccgaatacaggcgaataaacatgaggct

SEQ ID NO: 259831 - DNA, 30 bp, Artificial Sequence
  Synthetic oligonucleotide
attgtgcgtccgaaacacgatgttgaggct

SEQ ID NO: 259832 - DNA, 30 bp, Artificial Sequence
  Synthetic oligonucleotide
ggtaggtaggagccttaagagtcataggct

SEQ ID NO: 259833 - DNA, 30 bp, Artificial Sequence
  Synthetic oligonucleotide
agagtggcaccttaaaatctgatataggct

SEQ ID NO: 259834 - DNA, 30 bp, Artificial Sequence
  Synthetic oligonucleotide
tcgaaaagttctttgttcaatcggtaggct

SEQ ID NO: 259835 - DNA, 30 bp, Artificial Sequence
  Synthetic oligonucleotide
gcggggtctcagaaggaggagtggtaggct

SEQ ID NO: 259836 - DNA, 30 bp, Artificial Sequence
  Synthetic oligonucleotide
gaatgtcaagggatctagaggcgttaggct

SEQ ID NO: 259837 - DNA, 30 bp, Artificial Sequence
  Synthetic oligonucleotide
atgcgcgatgatgaatcgccatggacggct

SEQ ID NO: 259838 - DNA, 30 bp, Artificial Sequence
  Synthetic oligonucleotide
ccacactcgtaacgatacttagcaccggct

SEQ ID NO: 259839 - DNA, 30 bp, Artificial Sequence
  Synthetic oligonucleotide
cgagtgtcattcaccgtcagggtaccggct

SEQ ID NO: 259840 - DNA, 30 bp, Artificial Sequence
  Synthetic oligonucleotide
tgaacctactgattatgcgtcgaagcggct

SEQ ID NO: 259841 - DNA, 30 bp, Artificial Sequence
  Synthetic oligonucleotide
tccgttcgcgagcaaggagacatagcggct

SEQ ID NO: 259842 - DNA, 30 bp, Artificial Sequence
  Synthetic oligonucleotide
ttagtaggaatggagtcctgggtagcggct

SEQ ID NO: 259843 - DNA, 30 bp, Artificial Sequence
  Synthetic oligonucleotide
aatggtgcacgtgtggaactataggcggct

SEQ ID NO: 259844 - DNA, 30 bp, Artificial Sequence
  Synthetic oligonucleotide
ggaaactccagccgggctaagctggcggct

SEQ ID NO: 259845 - DNA, 30 bp, Artificial Sequence
  Synthetic oligonucleotide
ctacccacaggctacgtaatccttgcggct

SEQ ID NO: 259846 - DNA, 30 bp, Artificial Sequence
  Synthetic oligonucleotide
aagagccctgttatatatgtggcgtcggct

SEQ ID NO: 259847 - DNA, 30 bp, Artificial Sequence
  Synthetic oligonucleotide
tataaagcaacacaccgatacaacagggct

SEQ ID NO: 259848 - DNA, 30 bp, Artificial Sequence
  Synthetic oligonucleotide
agctcgttcctggccttggtgaggagggct

SEQ ID NO: 259849 - DNA, 30 bp, Artificial Sequence
  Synthetic oligonucleotide
agcatagtgatgatcctagcatatagggct

SEQ ID NO: 259850 - DNA, 30 bp, Artificial Sequence
  Synthetic oligonucleotide
cccaaggcaatatgggcgcgaccacgggct

SEQ ID NO: 259851 - DNA, 30 bp, Artificial Sequence
  Synthetic oligonucleotide
ttgtgtatatagcacgaaccgtaccgggct

SEQ ID NO: 259852 - DNA, 30 bp, Artificial Sequence
  Synthetic oligonucleotide
gccgtcaactaaatttggcaggcgcgggct

SEQ ID NO: 259853 - DNA, 30 bp, Artificial Sequence
  Synthetic oligonucleotide
ggagcgtcctgatttttcagatggcgggct

SEQ ID NO: 259854 - DNA, 30 bp, Artificial Sequence
  Synthetic oligonucleotide
ggattactagacgggaggcgttgtcgggct

SEQ ID NO: 259855 - DNA, 30 bp, Artificial Sequence
  Synthetic oligonucleotide
gctttagctggcagggaaaataaaggggct

SEQ ID NO: 259856 - DNA, 30 bp, Artificial Sequence
  Synthetic oligonucleotide
caaaagcaccacgacagtttcgaaggggct

SEQ ID NO: 259857 - DNA, 30 bp, Artificial Sequence
  Synthetic oligonucleotide
cagggtggatatctgcgccggcatggggct

SEQ ID NO: 259858 - DNA, 30 bp, Artificial Sequence
  Synthetic oligonucleotide
gcgtagctaaataaaagggtccctggggct

SEQ ID NO: 259859 - DNA, 30 bp, Artificial Sequence
  Synthetic oligonucleotide
acgatttagagtgcagggcaagttggggct

SEQ ID NO: 259860 - DNA, 30 bp, Artificial Sequence
  Synthetic oligonucleotide
aaaaccctgcaggactgtcgcgcctgggct

SEQ ID NO: 259861 - DNA, 30 bp, Artificial Sequence
  Synthetic oligonucleotide
tgagattgctgtggactcgcttgaatggct

SEQ ID NO: 259862 - DNA, 30 bp, Artificial Sequence
  Synthetic oligonucleotide
ggcttgatctgggaaaatagtttcatggct

SEQ ID NO: 259863 - DNA, 30 bp, Artificial Sequence
  Synthetic oligonucleotide
gcattcaggcattcaaggtcctagatggct

SEQ ID NO: 259864 - DNA, 30 bp, Artificial Sequence
  Synthetic oligonucleotide
caatcaataaaggttaagggcgggatggct

SEQ ID NO: 259865 - DNA, 30 bp, Artificial Sequence
  Synthetic oligonucleotide
gcaaaaagacctgtctatgccggtatggct

SEQ ID NO: 259866 - DNA, 30 bp, Artificial Sequence
  Synthetic oligonucleotide
gttggaataccgataataacgtttatggct

SEQ ID NO: 259867 - DNA, 30 bp, Artificial Sequence
  Synthetic oligonucleotide
taggtgaaagatcagccggcgcacgtggct

SEQ ID NO: 259868 - DNA, 30 bp, Artificial Sequence
  Synthetic oligonucleotide
ggtacatataggaggaatgactgcgtggct

SEQ ID NO: 259869 - DNA, 30 bp, Artificial Sequence
  Synthetic oligonucleotide
ggaaagggaggatcgcggaaagtcgtggct

SEQ ID NO: 259870 - DNA, 30 bp, Artificial Sequence
  Synthetic oligonucleotide
ctgaatgtcgcctaaaagacgcaggtggct

SEQ ID NO: 259871 - DNA, 30 bp, Artificial Sequence
  Synthetic oligonucleotide
tgtacttagtccaacggcattgtggtggct

SEQ ID NO: 259872 - DNA, 30 bp, Artificial Sequence
  Synthetic oligonucleotide
aataaagagcactggtatctttctgtggct

SEQ ID NO: 259873 - DNA, 30 bp, Artificial Sequence
  Synthetic oligonucleotide
tgatcggctagaccataagttaagttggct

SEQ ID NO: 259874 - DNA, 30 bp, Artificial Sequence
  Synthetic oligonucleotide
acaacgacgggctctgaagcgacgttggct

SEQ ID NO: 259875 - DNA, 30 bp, Artificial Sequence
  Synthetic oligonucleotide
gcacttgttcgtgaaaacctgcggaatgct

SEQ ID NO: 259876 - DNA, 30 bp, Artificial Sequence
  Synthetic oligonucleotide
taatttgcggcaggaacccatgggaatgct

SEQ ID NO: 259877 - DNA, 30 bp, Artificial Sequence
  Synthetic oligonucleotide
atccgaccatggccgcctataagtaatgct

SEQ ID NO: 259878 - DNA, 30 bp, Artificial Sequence
  Synthetic oligonucleotide
cggacgaaacgtgttggcctcgagcatgct

SEQ ID NO: 259879 - DNA, 30 bp, Artificial Sequence
  Synthetic oligonucleotide
ggagtggagtcctgaacgctttatcatgct

SEQ ID NO: 259880 - DNA, 30 bp, Artificial Sequence
  Synthetic oligonucleotide
cgcccagggttacaccgcacagcagatgct

SEQ ID NO: 259881 - DNA, 30 bp, Artificial Sequence
  Synthetic oligonucleotide
ggtgatggattttcatcatgagcagatgct

SEQ ID NO: 259882 - DNA, 30 bp, Artificial Sequence
  Synthetic oligonucleotide
gtgtaagatctgcaaggactcgccgatgct

SEQ ID NO: 259883 - DNA, 30 bp, Artificial Sequence
  Synthetic oligonucleotide
aagttagtgggggccgccaaaattgatgct

SEQ ID NO: 259884 - DNA, 30 bp, Artificial Sequence
  Synthetic oligonucleotide
tgactagtaagttcgtaagatagctatgct

SEQ ID NO: 259885 - DNA, 30 bp, Artificial Sequence
  Synthetic oligonucleotide
tagaaacgtccagtaatgattcgctatgct

SEQ ID NO: 259886 - DNA, 30 bp, Artificial Sequence
  Synthetic oligonucleotide
tcttaatgcttgaagtagtagcggtatgct

SEQ ID NO: 259887 - DNA, 30 bp, Artificial Sequence
  Synthetic oligonucleotide
ccctatcagtgcatgaaccccacaactgct

SEQ ID NO: 259888 - DNA, 30 bp, Artificial Sequence
  Synthetic oligonucleotide
cgtccagcgtgcccttggcttcacactgct

SEQ ID NO: 259889 - DNA, 30 bp, Artificial Sequence
  Synthetic oligonucleotide
ggggagcggttatgtttggaggccactgct

SEQ ID NO: 259890 - DNA, 30 bp, Artificial Sequence
  Synthetic oligonucleotide
agcccgtagcggcttagaaaaccgactgct

SEQ ID NO: 259891 - DNA, 30 bp, Artificial Sequence
  Synthetic oligonucleotide
caatttggtttgcaagtatctgtgactgct

SEQ ID NO: 259892 - DNA, 30 bp, Artificial Sequence
  Synthetic oligonucleotide
ttaatacttgtgcgagtgcgctctactgct

SEQ ID NO: 259893 - DNA, 30 bp, Artificial Sequence
  Synthetic oligonucleotide
tcaagaggcgtagcccacgcttgtactgct

SEQ ID NO: 259894 - DNA, 30 bp, Artificial Sequence
  Synthetic oligonucleotide
tacagccatcgaaggtggatgtgagctgct

SEQ ID NO: 259895 - DNA, 30 bp, Artificial Sequence
  Synthetic oligonucleotide
cctacgttgacctgtctagaccacgctgct

SEQ ID NO: 259896 - DNA, 30 bp, Artificial Sequence
  Synthetic oligonucleotide
agttcagtaaatcagttattatgggctgct

SEQ ID NO: 259897 - DNA, 30 bp, Artificial Sequence
  Synthetic oligonucleotide
aatgataggagataaggcgcaaatgctgct

SEQ ID NO: 259898 - DNA, 30 bp, Artificial Sequence
  Synthetic oligonucleotide
cgtgactctcaggtgtagggatcatctgct

SEQ ID NO: 259899 - DNA, 30 bp, Artificial Sequence
  Synthetic oligonucleotide
ctttcactaatatagcatatacactctgct

SEQ ID NO: 259900 - DNA, 30 bp, Artificial Sequence
  Synthetic oligonucleotide
atgcatattcatccaaatgtagtctctgct

SEQ ID NO: 259901 - DNA, 30 bp, Artificial Sequence
  Synthetic oligonucleotide
aatggtccgccggcatcatagcagtctgct

SEQ ID NO: 259902 - DNA, 30 bp, Artificial Sequence
  Synthetic oligonucleotide
tcgaatgccttaacgactcggatgtctgct

SEQ ID NO: 259903 - DNA, 30 bp, Artificial Sequence
  Synthetic oligonucleotide
gggccgacccgtaaagttactagcagtgct

SEQ ID NO: 259904 - DNA, 30 bp, Artificial Sequence
  Synthetic oligonucleotide
tagacccctcgggtcagggaccagagtgct

SEQ ID NO: 259905 - DNA, 30 bp, Artificial Sequence
  Synthetic oligonucleotide
cggactcttgccgtgcttagctagagtgct

SEQ ID NO: 259906 - DNA, 30 bp, Artificial Sequence
  Synthetic oligonucleotide
cgaacatgattactcgcaattccgagtgct

SEQ ID NO: 259907 - DNA, 30 bp, Artificial Sequence
  Synthetic oligonucleotide
gggcgcatcgttatagtatagtcacgtgct

SEQ ID NO: 259908 - DNA, 30 bp, Artificial Sequence
  Synthetic oligonucleotide
cgggtataacatatgttttaattccgtgct

SEQ ID NO: 259909 - DNA, 30 bp, Artificial Sequence
  Synthetic oligonucleotide
cggtatgcttaacgcgacaagtagcgtgct

SEQ ID NO: 259910 - DNA, 30 bp, Artificial Sequence
  Synthetic oligonucleotide
ctcacagcgcgaattaggtcaaatcgtgct

SEQ ID NO: 259911 - DNA, 30 bp, Artificial Sequence
  Synthetic oligonucleotide
gtgtggtgactaccatttcttgatcgtgct

SEQ ID NO: 259912 - DNA, 30 bp, Artificial Sequence
  Synthetic oligonucleotide
aaagatattgggggtagcctaggaggtgct

SEQ ID NO: 259913 - DNA, 30 bp, Artificial Sequence
  Synthetic oligonucleotide
acaggagtagaagggttataaaacggtgct

SEQ ID NO: 259914 - DNA, 30 bp, Artificial Sequence
  Synthetic oligonucleotide
gcaatttggtcagaacctgggcccggtgct

SEQ ID NO: 259915 - DNA, 30 bp, Artificial Sequence
  Synthetic oligonucleotide
cgggatattctcatgcgtggctggggtgct

SEQ ID NO: 259916 - DNA, 30 bp, Artificial Sequence
  Synthetic oligonucleotide
gtaatgatactcgctcacttggtctgtgct

SEQ ID NO: 259917 - DNA, 30 bp, Artificial Sequence
  Synthetic oligonucleotide
cagggagaatcattgaccttcccgtgtgct

SEQ ID NO: 259918 - DNA, 31 bp, Artificial Sequence
  Synthetic oligonucleotide
agtcccacttgtgaactcgtgtagttgtgct

SEQ ID NO: 259919 - DNA, 30 bp, Artificial Sequence
  Synthetic oligonucleotide
cacgcatatacaaattcgaaattaattgct

SEQ ID NO: 259920 - DNA, 30 bp, Artificial Sequence
  Synthetic oligonucleotide
gtttaggaacctattgttagatcgattgct

SEQ ID NO: 259921 - DNA, 30 bp, Artificial Sequence
  Synthetic oligonucleotide
gccatcatacataatctcgattgtattgct

SEQ ID NO: 259922 - DNA, 30 bp, Artificial Sequence
  Synthetic oligonucleotide
tgttcgatatatgtattagtagcacttgct

SEQ ID NO: 259923 - DNA, 30 bp, Artificial Sequence
  Synthetic oligonucleotide
attagaggtaacaagaattatggcgttgct

SEQ ID NO: 259924 - DNA, 30 bp, Artificial Sequence
  Synthetic oligonucleotide
gctagtgctgctgttgagtttggtgttgct

SEQ ID NO: 259925 - DNA, 30 bp, Artificial Sequence
  Synthetic oligonucleotide
tatggggggcatgcgtagttctttgttgct

SEQ ID NO: 259926 - DNA, 30 bp, Artificial Sequence
  Synthetic oligonucleotide
attccagacggttgaacgtgccagtttgct

SEQ ID NO: 259927 - DNA, 30 bp, Artificial Sequence
  Synthetic oligonucleotide
cacgtgagcgtcttaaccaaatagtttgct

SEQ ID NO: 259928 - DNA, 30 bp, Artificial Sequence
  Synthetic oligonucleotide
caaaggaggggatccatccgatagtttgct

SEQ ID NO: 259929 - DNA, 30 bp, Artificial Sequence
  Synthetic oligonucleotide
aacacaaactggttagtctaatcaaaatct

SEQ ID NO: 259930 - DNA, 30 bp, Artificial Sequence
  Synthetic oligonucleotide
atggggcgttgttttgacagctccaaatct

SEQ ID NO: 259931 - DNA, 30 bp, Artificial Sequence
  Synthetic oligonucleotide
actgactagatcgcgacacaaggcaaatct

SEQ ID NO: 259932 - DNA, 30 bp, Artificial Sequence
  Synthetic oligonucleotide
tgggctcatcttggcgctgggtgcaaatct

SEQ ID NO: 259933 - DNA, 30 bp, Artificial Sequence
  Synthetic oligonucleotide
gtcccggaagggtggtacttcggacaatct

SEQ ID NO: 259934 - DNA, 30 bp, Artificial Sequence
  Synthetic oligonucleotide
ctcaattttcagaccaaatccatgcaatct

SEQ ID NO: 259935 - DNA, 30 bp, Artificial Sequence
  Synthetic oligonucleotide
ctgacaatgcggtgttccatacaagaatct

SEQ ID NO: 259936 - DNA, 30 bp, Artificial Sequence
  Synthetic oligonucleotide
gacagtagctcgtacacatctcacgaatct

SEQ ID NO: 259937 - DNA, 30 bp, Artificial Sequence
  Synthetic oligonucleotide
ggactgttgacgaaaagttagcgcgaatct

SEQ ID NO: 259938 - DNA, 30 bp, Artificial Sequence
  Synthetic oligonucleotide
agaggtaagcaatttacttctgtcgaatct

SEQ ID NO: 259939 - DNA, 30 bp, Artificial Sequence
  Synthetic oligonucleotide
ggattgtatgcacttcgcgcttcggaatct

SEQ ID NO: 259940 - DNA, 30 bp, Artificial Sequence
  Synthetic oligonucleotide
gtaggaagtgctcgtgcaccttgggaatct

SEQ ID NO: 259941 - DNA, 30 bp, Artificial Sequence
  Synthetic oligonucleotide
aataagagctacggttgtgtacatgaatct

SEQ ID NO: 259942 - DNA, 30 bp, Artificial Sequence
  Synthetic oligonucleotide
aggagtcagtttgcgtcacaaacataatct

SEQ ID NO: 259943 - DNA, 30 bp, Artificial Sequence
  Synthetic oligonucleotide
tactaaaaaggcttcacagtttgctaatct

SEQ ID NO: 259944 - DNA, 30 bp, Artificial Sequence
  Synthetic oligonucleotide
aggctagaagcagcaggactgttctaatct

SEQ ID NO: 259945 - DNA, 30 bp, Artificial Sequence
  Synthetic oligonucleotide
gtaatacaatgcattgtacaagcgtaatct

SEQ ID NO: 259946 - DNA, 30 bp, Artificial Sequence
  Synthetic oligonucleotide
accaatgactttcgtcacctaaggtaatct

SEQ ID NO: 259947 - DNA, 30 bp, Artificial Sequence
  Synthetic oligonucleotide
tacagggttgtgctctaatccttgtaatct

SEQ ID NO: 259948 - DNA, 30 bp, Artificial Sequence
  Synthetic oligonucleotide
gatgagctgacgaaggaacacaattaatct

SEQ ID NO: 259949 - DNA, 30 bp, Artificial Sequence
  Synthetic oligonucleotide
tgtaccccggtggtatagcgaaacacatct

SEQ ID NO: 259950 - DNA, 30 bp, Artificial Sequence
  Synthetic oligonucleotide
cgatgactaaatgttcgacttagcacatct

SEQ ID NO: 259951 - DNA, 30 bp, Artificial Sequence
  Synthetic oligonucleotide
gagggatgcccattttccgtcttaccatct

SEQ ID NO: 259952 - DNA, 30 bp, Artificial Sequence
  Synthetic oligonucleotide
ctgaagcgttgggtgaattgcaacccatct

SEQ ID NO: 259953 - DNA, 30 bp, Artificial Sequence
  Synthetic oligonucleotide
atactcgacggctggcgaaagtacccatct

SEQ ID NO: 259954 - DNA, 30 bp, Artificial Sequence
  Synthetic oligonucleotide
gtgaaaaagaacctgtaacgggccccatct

SEQ ID NO: 259955 - DNA, 30 bp, Artificial Sequence
  Synthetic oligonucleotide
cattctctccccctatgattataagcatct

SEQ ID NO: 259956 - DNA, 30 bp, Artificial Sequence
  Synthetic oligonucleotide
tgcgctcctgtgacctgactcttagcatct

SEQ ID NO: 259957 - DNA, 30 bp, Artificial Sequence
  Synthetic oligonucleotide
gtgtactatcggttacattgggccgcatct

SEQ ID NO: 259958 - DNA, 30 bp, Artificial Sequence
  Synthetic oligonucleotide
cgtaattaaagtgcaggacggagcgcatct

SEQ ID NO: 259959 - DNA, 30 bp, Artificial Sequence
  Synthetic oligonucleotide
tgtgcaaatcaggcagatatctgctcatct

SEQ ID NO: 259960 - DNA, 30 bp, Artificial Sequence
  Synthetic oligonucleotide
ccgacagttaatactttggcaaaaagatct

SEQ ID NO: 259961 - DNA, 30 bp, Artificial Sequence
  Synthetic oligonucleotide
taggctttatctgaaagacataaaagatct

SEQ ID NO: 259962 - DNA, 30 bp, Artificial Sequence
  Synthetic oligonucleotide
ggcattaggggtacatcgtataaaagatct

SEQ ID NO: 259963 - DNA, 30 bp, Artificial Sequence
  Synthetic oligonucleotide
tgggaaattggaatctgaaaataaagatct

SEQ ID NO: 259964 - DNA, 30 bp, Artificial Sequence
  Synthetic oligonucleotide
tcataaaataagttattacaagcaagatct

SEQ ID NO: 259965 - DNA, 30 bp, Artificial Sequence
  Synthetic oligonucleotide
gctgtaagagtggcccattgactaagatct

SEQ ID NO: 259966 - DNA, 30 bp, Artificial Sequence
  Synthetic oligonucleotide
caaatgcccaaagctagtgtgaacagatct

SEQ ID NO: 259967 - DNA, 30 bp, Artificial Sequence
  Synthetic oligonucleotide
atagtgcaaaagtatagatgtgttcgatct

SEQ ID NO: 259968 - DNA, 30 bp, Artificial Sequence
  Synthetic oligonucleotide
ctttgtgctacgtgatctacgggcggatct

SEQ ID NO: 259969 - DNA, 30 bp, Artificial Sequence
  Synthetic oligonucleotide
atttcgacagagggtgcatatgggggatct

SEQ ID NO: 259970 - DNA, 30 bp, Artificial Sequence
  Synthetic oligonucleotide
atgataacatatgattaaccaatatgatct

SEQ ID NO: 259971 - DNA, 30 bp, Artificial Sequence
  Synthetic oligonucleotide
catgatgcggggtcacgaccaacgtgatct

SEQ ID NO: 259972 - DNA, 30 bp, Artificial Sequence
  Synthetic oligonucleotide
caggggactgctgaatagctattgtgatct

SEQ ID NO: 259973 - DNA, 30 bp, Artificial Sequence
  Synthetic oligonucleotide
tgaatatgtagttgggatccaagttgatct

SEQ ID NO: 259974 - DNA, 29 bp, Artificial Sequence
  Synthetic oligonucleotide
gggcaagcaattatgttattcgttgatct

SEQ ID NO: 259975 - DNA, 30 bp, Artificial Sequence
  Synthetic oligonucleotide
cgcggactcatcgaaatcctaaaaatatct

SEQ ID NO: 259976 - DNA, 30 bp, Artificial Sequence
  Synthetic oligonucleotide
taatggcaatttggaccagtctacatatct

SEQ ID NO: 259977 - DNA, 30 bp, Artificial Sequence
  Synthetic oligonucleotide
ccgcttagccgtgggacgatgaacctatct

SEQ ID NO: 259978 - DNA, 30 bp, Artificial Sequence
  Synthetic oligonucleotide
actaatgatgagcgcacccaaacgctatct

SEQ ID NO: 259979 - DNA, 30 bp, Artificial Sequence
  Synthetic oligonucleotide
tcggaaaggctttctttcagatggctatct

SEQ ID NO: 259980 - DNA, 30 bp, Artificial Sequence
  Synthetic oligonucleotide
ggctctcgctctaatctgaccttggtatct

SEQ ID NO: 259981 - DNA, 30 bp, Artificial Sequence
  Synthetic oligonucleotide
cactcagtacagcctgtcgagggtgtatct

SEQ ID NO: 259982 - DNA, 30 bp, Artificial Sequence
  Synthetic oligonucleotide
atgactcaatagaggttagccattgtatct

SEQ ID NO: 259983 - DNA, 30 bp, Artificial Sequence
  Synthetic oligonucleotide
ggggggatttatccggaagagccattatct

SEQ ID NO: 259984 - DNA, 30 bp, Artificial Sequence
  Synthetic oligonucleotide
ggacatcgctaattgacgagtttgttatct

SEQ ID NO: 259985 - DNA, 30 bp, Artificial Sequence
  Synthetic oligonucleotide
ttactcaagctctgagtacacttaaactct

SEQ ID NO: 259986 - DNA, 30 bp, Artificial Sequence
  Synthetic oligonucleotide
gcaatgagggaatacattccaaacaactct

SEQ ID NO: 259987 - DNA, 30 bp, Artificial Sequence
  Synthetic oligonucleotide
accctgtggaaatcgcaactttgcaactct

SEQ ID NO: 259988 - DNA, 30 bp, Artificial Sequence
  Synthetic oligonucleotide
gcgaacgcagtacaagtcaggatgaactct

SEQ ID NO: 259989 - DNA, 30 bp, Artificial Sequence
  Synthetic oligonucleotide
gggacttcgactcaacatgtatctaactct

SEQ ID NO: 259990 - DNA, 30 bp, Artificial Sequence
  Synthetic oligonucleotide
tgcatgttaagtaagcctgtgatacactct

SEQ ID NO: 259991 - DNA, 30 bp, Artificial Sequence
  Synthetic oligonucleotide
tactgcagccggcccaagcgggtacactct

SEQ ID NO: 259992 - DNA, 30 bp, Artificial Sequence
  Synthetic oligonucleotide
gaacaaaaacacctaacatagacccactct

SEQ ID NO: 259993 - DNA, 30 bp, Artificial Sequence
  Synthetic oligonucleotide
tgtgatcacagcgggtatagagatcactct

SEQ ID NO: 259994 - DNA, 30 bp, Artificial Sequence
  Synthetic oligonucleotide
cgctccgtccaattcctgagcactcactct

SEQ ID NO: 259995 - DNA, 30 bp, Artificial Sequence
  Synthetic oligonucleotide
ccttgggtaacccccgtcatttctcactct

SEQ ID NO: 259996 - DNA, 30 bp, Artificial Sequence
  Synthetic oligonucleotide
gctacacttatcaggtaccccagcgactct

SEQ ID NO: 259997 - DNA, 30 bp, Artificial Sequence
  Synthetic oligonucleotide
ctaggagacaagtgtcgggtaggcgactct

SEQ ID NO: 259998 - DNA, 30 bp, Artificial Sequence
  Synthetic oligonucleotide
tctttggtagtgctggaatttctcgactct

SEQ ID NO: 259999 - DNA, 30 bp, Artificial Sequence
  Synthetic oligonucleotide
aaggtaccgagtaatagtgtcaaggactct

SEQ ID NO: 260000 - DNA, 30 bp, Artificial Sequence
  Synthetic oligonucleotide
gcccataacacttacacggcacaatactct

SEQ ID NO: 260001 - DNA, 30 bp, Artificial Sequence
  Synthetic oligonucleotide
taacatcacgtgcaccgcgactggtactct

SEQ ID NO: 260002 - DNA, 30 bp, Artificial Sequence
  Synthetic oligonucleotide
caagtatgtgatgacatgtatcattactct

SEQ ID NO: 260003 - DNA, 30 bp, Artificial Sequence
  Synthetic oligonucleotide
aatacaattgcaagccgatccgaaacctct

SEQ ID NO: 260004 - DNA, 30 bp, Artificial Sequence
  Synthetic oligonucleotide
gggtgtacaaggaacgactgcggcccctct

SEQ ID NO: 260005 - DNA, 30 bp, Artificial Sequence
  Synthetic oligonucleotide
agtcagcacggttgtgcggggtgcccctct

SEQ ID NO: 260006 - DNA, 30 bp, Artificial Sequence
  Synthetic oligonucleotide
cgggtagacgagtcctctgtcttcccctct

SEQ ID NO: 260007 - DNA, 30 bp, Artificial Sequence
  Synthetic oligonucleotide
gcctgaagtttacaacgtgctcaagcctct

SEQ ID NO: 260008 - DNA, 30 bp, Artificial Sequence
  Synthetic oligonucleotide
tcatacaagaatgcaggtacaggagcctct

SEQ ID NO: 260009 - DNA, 30 bp, Artificial Sequence
  Synthetic oligonucleotide
ctgtaccgggaaagtccggtctacgcctct

SEQ ID NO: 260010 - DNA, 30 bp, Artificial Sequence
  Synthetic oligonucleotide
ggaaacacaatttatttagaactcgcctct

SEQ ID NO: 260011 - DNA, 30 bp, Artificial Sequence
  Synthetic oligonucleotide
ccagtgttatcacggcgccgtttcgcctct

SEQ ID NO: 260012 - DNA, 30 bp, Artificial Sequence
  Synthetic oligonucleotide
atgaccaatgcttcaaccggacgggcctct

SEQ ID NO: 260013 - DNA, 30 bp, Artificial Sequence
  Synthetic oligonucleotide
gtttggatattgcgggggtctccatcctct

SEQ ID NO: 260014 - DNA, 30 bp, Artificial Sequence
  Synthetic oligonucleotide
caaagataataggagaatatggattcctct

SEQ ID NO: 260015 - DNA, 30 bp, Artificial Sequence
  Synthetic oligonucleotide
gtatagtatgtggaccgaagctcttcctct

SEQ ID NO: 260016 - DNA, 30 bp, Artificial Sequence
  Synthetic oligonucleotide
agtgtctttgggaggccgcggttaagctct

SEQ ID NO: 260017 - DNA, 30 bp, Artificial Sequence
  Synthetic oligonucleotide
tacccagcgtgacattgttcactgagctct

SEQ ID NO: 260018 - DNA, 30 bp, Artificial Sequence
  Synthetic oligonucleotide
tttggcaaggtatattccggaaagcgctct

SEQ ID NO: 260019 - DNA, 30 bp, Artificial Sequence
  Synthetic oligonucleotide
tgcgagaccaactttagatgccaaggctct

SEQ ID NO: 260020 - DNA, 30 bp, Artificial Sequence
  Synthetic oligonucleotide
atggccctgtggccgtaccgaaacggctct

SEQ ID NO: 260021 - DNA, 30 bp, Artificial Sequence
  Synthetic oligonucleotide
gggtcatcttaacatactagaatttgctct

SEQ ID NO: 260022 - DNA, 30 bp, Artificial Sequence
  Synthetic oligonucleotide
tacgcgttcgacaaaaaataccaaatctct

SEQ ID NO: 260023 - DNA, 30 bp, Artificial Sequence
  Synthetic oligonucleotide
atcaatgagtgtatactggttatcatctct

SEQ ID NO: 260024 - DNA, 30 bp, Artificial Sequence
  Synthetic oligonucleotide
cgcttaggttcctcggagcacattatctct

SEQ ID NO: 260025 - DNA, 30 bp, Artificial Sequence
  Synthetic oligonucleotide
atggactgcgagggaaactctgacctctct

SEQ ID NO: 260026 - DNA, 30 bp, Artificial Sequence
  Synthetic oligonucleotide
agagtgctaggcctaaaaagtgccctctct

SEQ ID NO: 260027 - DNA, 30 bp, Artificial Sequence
  Synthetic oligonucleotide
catcaaagtttggtgaagataaagctctct

SEQ ID NO: 260028 - DNA, 30 bp, Artificial Sequence
  Synthetic oligonucleotide
aaagcgtttaagttcgaggtctcgctctct

SEQ ID NO: 260029 - DNA, 30 bp, Artificial Sequence
  Synthetic oligonucleotide
cgcaaattaagcataaagtcgaccgtctct

SEQ ID NO: 260030 - DNA, 30 bp, Artificial Sequence
  Synthetic oligonucleotide
ggtctcccggatccagtaactcccgtctct

SEQ ID NO: 260031 - DNA, 30 bp, Artificial Sequence
  Synthetic oligonucleotide
gagggctacggatgcgctaaggtcgtctct

SEQ ID NO: 260032 - DNA, 30 bp, Artificial Sequence
  Synthetic oligonucleotide
gatggcgcgctgtgcatgctcctggtctct

SEQ ID NO: 260033 - DNA, 29 bp, Artificial Sequence
  Synthetic oligonucleotide
ttggggtagacacgaacagcggtgtctct

SEQ ID NO: 260034 - DNA, 30 bp, Artificial Sequence
  Synthetic oligonucleotide
gacggaatatcccgcgtcgcaaaattctct

SEQ ID NO: 260035 - DNA, 30 bp, Artificial Sequence
  Synthetic oligonucleotide
gatgcttggtatcacacgtctcgattctct

SEQ ID NO: 260036 - DNA, 30 bp, Artificial Sequence
  Synthetic oligonucleotide
accagaaacgagtgataaggacgcttctct

SEQ ID NO: 260037 - DNA, 30 bp, Artificial Sequence
  Synthetic oligonucleotide
tgccgggtcctggtactcgaatgcttctct

SEQ ID NO: 260038 - DNA, 30 bp, Artificial Sequence
  Synthetic oligonucleotide
ccgctggatccctaagaacaaagaaagtct

SEQ ID NO: 260039 - DNA, 30 bp, Artificial Sequence
  Synthetic oligonucleotide
gtatctgggctaccgtaaaagttaaagtct

SEQ ID NO: 260040 - DNA, 30 bp, Artificial Sequence
  Synthetic oligonucleotide
attgggatgaggaacgcgacctacaagtct

SEQ ID NO: 260041 - DNA, 30 bp, Artificial Sequence
  Synthetic oligonucleotide
aatgccaggtccgttcaggcccccaagtct

SEQ ID NO: 260042 - DNA, 30 bp, Artificial Sequence
  Synthetic oligonucleotide
cgaagttgtacggatagagtcgtcaagtct

SEQ ID NO: 260043 - DNA, 30 bp, Artificial Sequence
  Synthetic oligonucleotide
gttcggaacaatgggggttacgagaagtct

SEQ ID NO: 260044 - DNA, 30 bp, Artificial Sequence
  Synthetic oligonucleotide
actgaagttcacggaaagtgtccgaagtct

SEQ ID NO: 260045 - DNA, 30 bp, Artificial Sequence
  Synthetic oligonucleotide
ctaatgcagaaggcaacacacagtaagtct

SEQ ID NO: 260046 - DNA, 30 bp, Artificial Sequence
  Synthetic oligonucleotide
acggcgcgtagtaatctacgcggtaagtct

SEQ ID NO: 260047 - DNA, 30 bp, Artificial Sequence
  Synthetic oligonucleotide
acagaggctatttttgcattaagacagtct

SEQ ID NO: 260048 - DNA, 30 bp, Artificial Sequence
  Synthetic oligonucleotide
atgcatcttttgttgttatcggcccagtct

SEQ ID NO: 260049 - DNA, 30 bp, Artificial Sequence
  Synthetic oligonucleotide
gcggttagttgggttccaccactgcagtct

SEQ ID NO: 260050 - DNA, 30 bp, Artificial Sequence
  Synthetic oligonucleotide
agtgggtggccaaggtctataggtcagtct

SEQ ID NO: 260051 - DNA, 30 bp, Artificial Sequence
  Synthetic oligonucleotide
actcggctattgcgcaccacctcagagtct

SEQ ID NO: 260052 - DNA, 30 bp, Artificial Sequence
  Synthetic oligonucleotide
tcgatacacattttttatcattgagagtct

SEQ ID NO: 260053 - DNA, 30 bp, Artificial Sequence
  Synthetic oligonucleotide
acctgagatagacgttgaacgcacgagtct

SEQ ID NO: 260054 - DNA, 30 bp, Artificial Sequence
  Synthetic oligonucleotide
attaggtataaagcaatgccaggcgagtct

SEQ ID NO: 260055 - DNA, 30 bp, Artificial Sequence
  Synthetic oligonucleotide
tctttaattcagcggggatattgcgagtct

SEQ ID NO: 260056 - DNA, 30 bp, Artificial Sequence
  Synthetic oligonucleotide
gcccgagcatattgttggacggaggagtct

SEQ ID NO: 260057 - DNA, 30 bp, Artificial Sequence
  Synthetic oligonucleotide
agaccaaagattaaagatgatgtggagtct

SEQ ID NO: 260058 - DNA, 30 bp, Artificial Sequence
  Synthetic oligonucleotide
ggattaccttgtttgataaacaaatagtct

SEQ ID NO: 260059 - DNA, 30 bp, Artificial Sequence
  Synthetic oligonucleotide
acaattgtggcttttccctctagatagtct

SEQ ID NO: 260060 - DNA, 30 bp, Artificial Sequence
  Synthetic oligonucleotide
ctttaaaatcgacctgccccggactagtct

SEQ ID NO: 260061 - DNA, 30 bp, Artificial Sequence
  Synthetic oligonucleotide
caccggacaacgcctaaaactaagtagtct

SEQ ID NO: 260062 - DNA, 30 bp, Artificial Sequence
  Synthetic oligonucleotide
cttgcgctgaaactcgcttaacagtagtct

SEQ ID NO: 260063 - DNA, 30 bp, Artificial Sequence
  Synthetic oligonucleotide
aattccagatgacgccactgacggtagtct

SEQ ID NO: 260064 - DNA, 30 bp, Artificial Sequence
  Synthetic oligonucleotide
tccaggtgctttgaataaaacgcaacgtct

SEQ ID NO: 260065 - DNA, 30 bp, Artificial Sequence
  Synthetic oligonucleotide
tctgttcatcctcttgaagattccacgtct

SEQ ID NO: 260066 - DNA, 30 bp, Artificial Sequence
  Synthetic oligonucleotide
cgaatacaccattaatcacgtcggacgtct

SEQ ID NO: 260067 - DNA, 30 bp, Artificial Sequence
  Synthetic oligonucleotide
tccggaccagaatctatcacacaagcgtct

SEQ ID NO: 260068 - DNA, 30 bp, Artificial Sequence
  Synthetic oligonucleotide
tgggataaagctataaattgaccagcgtct

SEQ ID NO: 260069 - DNA, 30 bp, Artificial Sequence
  Synthetic oligonucleotide
gtcagctgagattttgtaacttacgcgtct

SEQ ID NO: 260070 - DNA, 30 bp, Artificial Sequence
  Synthetic oligonucleotide
ttatgtaccaagggcgcagttatcgcgtct

SEQ ID NO: 260071 - DNA, 30 bp, Artificial Sequence
  Synthetic oligonucleotide
gaagaacataaaagggatacctcggcgtct

SEQ ID NO: 260072 - DNA, 30 bp, Artificial Sequence
  Synthetic oligonucleotide
cagaggctatccctaggggtaatggcgtct

SEQ ID NO: 260073 - DNA, 30 bp, Artificial Sequence
  Synthetic oligonucleotide
tctaaccccgaggccgcaaacagatcgtct

SEQ ID NO: 260074 - DNA, 30 bp, Artificial Sequence
  Synthetic oligonucleotide
agcctttagaattgtagttcctgttcgtct

SEQ ID NO: 260075 - DNA, 30 bp, Artificial Sequence
  Synthetic oligonucleotide
ccattgtataggacacgcgggtgaaggtct

SEQ ID NO: 260076 - DNA, 30 bp, Artificial Sequence
  Synthetic oligonucleotide
gtctcaatccttatcagctagtggaggtct

SEQ ID NO: 260077 - DNA, 30 bp, Artificial Sequence
  Synthetic oligonucleotide
catcccttaagaagtacctccattaggtct

SEQ ID NO: 260078 - DNA, 30 bp, Artificial Sequence
  Synthetic oligonucleotide
agatctgcacgaagacggcgacttaggtct

SEQ ID NO: 260079 - DNA, 30 bp, Artificial Sequence
  Synthetic oligonucleotide
ttccagtggccatacattgggctacggtct

SEQ ID NO: 260080 - DNA, 30 bp, Artificial Sequence
  Synthetic oligonucleotide
gggctacggatctggtgcagagtacggtct

SEQ ID NO: 260081 - DNA, 30 bp, Artificial Sequence
  Synthetic oligonucleotide
catcgctgaaagcaatttgcggaccggtct

SEQ ID NO: 260082 - DNA, 30 bp, Artificial Sequence
  Synthetic oligonucleotide
ttacgttatacagctgtagtagcccggtct

SEQ ID NO: 260083 - DNA, 30 bp, Artificial Sequence
  Synthetic oligonucleotide
cttacgggtgacggctgtgttggccggtct

SEQ ID NO: 260084 - DNA, 30 bp, Artificial Sequence
  Synthetic oligonucleotide
ccaacgggaacaaaagctcacccagggtct

SEQ ID NO: 260085 - DNA, 30 bp, Artificial Sequence
  Synthetic oligonucleotide
cgtcgtgctcaccgtttaatggaggggtct

SEQ ID NO: 260086 - DNA, 30 bp, Artificial Sequence
  Synthetic oligonucleotide
tacgcagtcgtgtgacaagaagttgggtct

SEQ ID NO: 260087 - DNA, 30 bp, Artificial Sequence
  Synthetic oligonucleotide
agggacaagcgaatgggagtgcaatggtct

SEQ ID NO: 260088 - DNA, 30 bp, Artificial Sequence
  Synthetic oligonucleotide
cattgctcgtcacatctgattagatggtct

SEQ ID NO: 260089 - DNA, 30 bp, Artificial Sequence
  Synthetic oligonucleotide
ggttaccgctacgtcggcgcaatatggtct

SEQ ID NO: 260090 - DNA, 30 bp, Artificial Sequence
  Synthetic oligonucleotide
agataatcagattaatgggacaggtggtct

SEQ ID NO: 260091 - DNA, 30 bp, Artificial Sequence
  Synthetic oligonucleotide
tcgcataatcaataacttgtgcattggtct

SEQ ID NO: 260092 - DNA, 30 bp, Artificial Sequence
  Synthetic oligonucleotide
gcgtatggtacgtacaactagcgttggtct

SEQ ID NO: 260093 - DNA, 30 bp, Artificial Sequence
  Synthetic oligonucleotide
ggcgaccaggagcgcaatgttgtttggtct

SEQ ID NO: 260094 - DNA, 30 bp, Artificial Sequence
  Synthetic oligonucleotide
ccgtatttaaattcttgaggggtcatgtct

SEQ ID NO: 260095 - DNA, 30 bp, Artificial Sequence
  Synthetic oligonucleotide
gaccgctcgcgcgattcaaagaggatgtct

SEQ ID NO: 260096 - DNA, 30 bp, Artificial Sequence
  Synthetic oligonucleotide
cccatccgcctcagctaacaagggatgtct

SEQ ID NO: 260097 - DNA, 30 bp, Artificial Sequence
  Synthetic oligonucleotide
atgaactaacgttgaacgcgatatctgtct

SEQ ID NO: 260098 - DNA, 30 bp, Artificial Sequence
  Synthetic oligonucleotide
cgcggacgagtgaacctggtgcctctgtct

SEQ ID NO: 260099 - DNA, 30 bp, Artificial Sequence
  Synthetic oligonucleotide
aagctcccccgcgtggcagaaaaagtgtct

SEQ ID NO: 260100 - DNA, 30 bp, Artificial Sequence
  Synthetic oligonucleotide
acggaccgggtttctgttgtgacagtgtct

SEQ ID NO: 260101 - DNA, 30 bp, Artificial Sequence
  Synthetic oligonucleotide
tgggtttacggcctgataggtaaggtgtct

SEQ ID NO: 260102 - DNA, 30 bp, Artificial Sequence
  Synthetic oligonucleotide
gtgcataggttgctcggcgaggttgtgtct

SEQ ID NO: 260103 - DNA, 30 bp, Artificial Sequence
  Synthetic oligonucleotide
ctcgagaaatcaatttatagctcattgtct

SEQ ID NO: 260104 - DNA, 30 bp, Artificial Sequence
  Synthetic oligonucleotide
cggaatccaacgcataggtactacttgtct

SEQ ID NO: 260105 - DNA, 30 bp, Artificial Sequence
  Synthetic oligonucleotide
gacgtgtgtcgaaaacattctgcgttgtct

SEQ ID NO: 260106 - DNA, 30 bp, Artificial Sequence
  Synthetic oligonucleotide
atataacgccagtagagattggggttgtct

SEQ ID NO: 260107 - DNA, 30 bp, Artificial Sequence
  Synthetic oligonucleotide
taaaaggcgcacgatctaagaccaaattct

SEQ ID NO: 260108 - DNA, 30 bp, Artificial Sequence
  Synthetic oligonucleotide
aacgaatatgaatgtcgtggctgaaattct

SEQ ID NO: 260109 - DNA, 30 bp, Artificial Sequence
  Synthetic oligonucleotide
ataaatggttaggataatgcgcccaattct

SEQ ID NO: 260110 - DNA, 30 bp, Artificial Sequence
  Synthetic oligonucleotide
cgcgagctggagattacaacgcggaattct

SEQ ID NO: 260111 - DNA, 30 bp, Artificial Sequence
  Synthetic oligonucleotide
caggtccgcaatgcagtttttgggaattct

SEQ ID NO: 260112 - DNA, 30 bp, Artificial Sequence
  Synthetic oligonucleotide
tcaccagtatgtacaaggattgataattct

SEQ ID NO: 260113 - DNA, 30 bp, Artificial Sequence
  Synthetic oligonucleotide
ggagctgaactcgaagtcccttgtaattct

SEQ ID NO: 260114 - DNA, 30 bp, Artificial Sequence
  Synthetic oligonucleotide
aaaggttgaacggtggtacaacaacattct

SEQ ID NO: 260115 - DNA, 30 bp, Artificial Sequence
  Synthetic oligonucleotide
tcgactacggtgcaaggctagaggcattct

SEQ ID NO: 260116 - DNA, 30 bp, Artificial Sequence
  Synthetic oligonucleotide
ggtagaggggtgtgaacattatgtcattct

SEQ ID NO: 260117 - DNA, 30 bp, Artificial Sequence
  Synthetic oligonucleotide
acaaaagggagtatcgggttttaagattct

SEQ ID NO: 260118 - DNA, 30 bp, Artificial Sequence
  Synthetic oligonucleotide
agatcggatggagatattacaccagattct

SEQ ID NO: 260119 - DNA, 30 bp, Artificial Sequence
  Synthetic oligonucleotide
gtttggcgggttcatgggatatgcgattct

SEQ ID NO: 260120 - DNA, 30 bp, Artificial Sequence
  Synthetic oligonucleotide
gaaggtcaccacggagtctagtgcgattct

SEQ ID NO: 260121 - DNA, 30 bp, Artificial Sequence
  Synthetic oligonucleotide
tactgtgagcttcaatcaatgaaggattct

SEQ ID NO: 260122 - DNA, 30 bp, Artificial Sequence
  Synthetic oligonucleotide
agagaacgtagatccaggatgggggattct

SEQ ID NO: 260123 - DNA, 30 bp, Artificial Sequence
  Synthetic oligonucleotide
agagtccgtgcataggtcaaaccctattct

SEQ ID NO: 260124 - DNA, 30 bp, Artificial Sequence
  Synthetic oligonucleotide
cacgttagtaagacgaaatagctgtattct

SEQ ID NO: 260125 - DNA, 30 bp, Artificial Sequence
  Synthetic oligonucleotide
ttagaactgaccataggaggctgttattct

SEQ ID NO: 260126 - DNA, 30 bp, Artificial Sequence
  Synthetic oligonucleotide
tacaaaagtgaaggtcaacccggaacttct

SEQ ID NO: 260127 - DNA, 30 bp, Artificial Sequence
  Synthetic oligonucleotide
ccgccgcaggcttgcgtgaggtgaccttct

SEQ ID NO: 260128 - DNA, 30 bp, Artificial Sequence
  Synthetic oligonucleotide
ttgcgaggtctcattaatccatgtccttct

SEQ ID NO: 260129 - DNA, 30 bp, Artificial Sequence
  Synthetic oligonucleotide
ggtggtagcctctaacaatacgacgcttct

SEQ ID NO: 260130 - DNA, 30 bp, Artificial Sequence
  Synthetic oligonucleotide
ccgaattcaatgcagccaaatggcgcttct

SEQ ID NO: 260131 - DNA, 30 bp, Artificial Sequence
  Synthetic oligonucleotide
gggaattatacagcacaccgctgcgcttct

SEQ ID NO: 260132 - DNA, 30 bp, Artificial Sequence
  Synthetic oligonucleotide
gagtgaatggttacatgggacttcgcttct

SEQ ID NO: 260133 - DNA, 30 bp, Artificial Sequence
  Synthetic oligonucleotide
agtccaagccccttttgagtacaggcttct

SEQ ID NO: 260134 - DNA, 30 bp, Artificial Sequence
  Synthetic oligonucleotide
tagtcctcacggatatgagcaaggagttct

SEQ ID NO: 260135 - DNA, 30 bp, Artificial Sequence
  Synthetic oligonucleotide
gtacgtgcgatagcgaggccgaggagttct

SEQ ID NO: 260136 - DNA, 30 bp, Artificial Sequence
  Synthetic oligonucleotide
caatcttcgctgcgggcacgttggagttct

SEQ ID NO: 260137 - DNA, 30 bp, Artificial Sequence
  Synthetic oligonucleotide
aaggcaaggtctgatgcaaacaaacgttct

SEQ ID NO: 260138 - DNA, 30 bp, Artificial Sequence
  Synthetic oligonucleotide
gcatacgcgaagaacgagaatgagcgttct

SEQ ID NO: 260139 - DNA, 30 bp, Artificial Sequence
  Synthetic oligonucleotide
tatggtctcgtggagaaactatatcgttct

SEQ ID NO: 260140 - DNA, 30 bp, Artificial Sequence
  Synthetic oligonucleotide
ggctgggaattagagcgggcttatcgttct

SEQ ID NO: 260141 - DNA, 30 bp, Artificial Sequence
  Synthetic oligonucleotide
cggcatctagctttcacggtaactcgttct

SEQ ID NO: 260142 - DNA, 30 bp, Artificial Sequence
  Synthetic oligonucleotide
ctaaatcgggagcaacatcctgttcgttct

SEQ ID NO: 260143 - DNA, 30 bp, Artificial Sequence
  Synthetic oligonucleotide
agaaagtacatggtaatatccggaggttct

SEQ ID NO: 260144 - DNA, 30 bp, Artificial Sequence
  Synthetic oligonucleotide
agtaagagggcgcccctgagtaacggttct

SEQ ID NO: 260145 - DNA, 30 bp, Artificial Sequence
  Synthetic oligonucleotide
gcggggcatgtgttcgagccccagggttct

SEQ ID NO: 260146 - DNA, 30 bp, Artificial Sequence
  Synthetic oligonucleotide
cacgtcgtgaagagatgattccagggttct

SEQ ID NO: 260147 - DNA, 30 bp, Artificial Sequence
  Synthetic oligonucleotide
tatagtcgtccatagctacccacatgttct

SEQ ID NO: 260148 - DNA, 30 bp, Artificial Sequence
  Synthetic oligonucleotide
aatctggctttcaacatactatgctgttct

SEQ ID NO: 260149 - DNA, 30 bp, Artificial Sequence
  Synthetic oligonucleotide
agtctggcacgaggtcgtggcaattgttct

SEQ ID NO: 260150 - DNA, 30 bp, Artificial Sequence
  Synthetic oligonucleotide
acttccgatgaccgttttttcgtcatttct

SEQ ID NO: 260151 - DNA, 30 bp, Artificial Sequence
  Synthetic oligonucleotide
ctaattgcattacgttgtctggtgctttct

SEQ ID NO: 260152 - DNA, 30 bp, Artificial Sequence
  Synthetic oligonucleotide
gtcagctcgaaaaatctctggaatctttct

SEQ ID NO: 260153 - DNA, 30 bp, Artificial Sequence
  Synthetic oligonucleotide
gtaatggaggtcacgccctacgatctttct

SEQ ID NO: 260154 - DNA, 30 bp, Artificial Sequence
  Synthetic oligonucleotide
actgcttcgtaggaatcatcaccagtttct

SEQ ID NO: 260155 - DNA, 30 bp, Artificial Sequence
  Synthetic oligonucleotide
aagcaaggtattaatgtggacatagtttct

SEQ ID NO: 260156 - DNA, 30 bp, Artificial Sequence
  Synthetic oligonucleotide
tgaattagaatatctgacagggcattttct

SEQ ID NO: 260157 - DNA, 30 bp, Artificial Sequence
  Synthetic oligonucleotide
acggcagatctgtaggctcagtagttttct

SEQ ID NO: 260158 - DNA, 30 bp, Artificial Sequence
  Synthetic oligonucleotide
acggtgagcgtcctcctcgctgcgttttct

SEQ ID NO: 260159 - DNA, 30 bp, Artificial Sequence
  Synthetic oligonucleotide
ttgagctcgtcagcgacctccaggttttct

SEQ ID NO: 260160 - DNA, 30 bp, Artificial Sequence
  Synthetic oligonucleotide
ggtaacgggaaacactctatagtgttttct

SEQ ID NO: 260161 - DNA, 30 bp, Artificial Sequence
  Synthetic oligonucleotide
ggggcatccagtctcgaagggaatttttct

SEQ ID NO: 260162 - DNA, 30 bp, Artificial Sequence
  Synthetic oligonucleotide
taagttcgaagaattggagggaatttttct

SEQ ID NO: 260163 - DNA, 30 bp, Artificial Sequence
  Synthetic oligonucleotide
gccatcttgccgtgacgttacgttttttct

SEQ ID NO: 260164 - DNA, 30 bp, Artificial Sequence
  Synthetic oligonucleotide
ctcacgcctgagactgattctaaaaaaagt

SEQ ID NO: 260165 - DNA, 30 bp, Artificial Sequence
  Synthetic oligonucleotide
gcccggcggatgtctccggcggacaaaagt

SEQ ID NO: 260166 - DNA, 30 bp, Artificial Sequence
  Synthetic oligonucleotide
ccaatagtggtatacaggatagtcaaaagt

SEQ ID NO: 260167 - DNA, 30 bp, Artificial Sequence
  Synthetic oligonucleotide
acactgtctggtccacacactaagaaaagt

SEQ ID NO: 260168 - DNA, 30 bp, Artificial Sequence
  Synthetic oligonucleotide
cccagttaacgatggcgcggccagaaaagt

SEQ ID NO: 260169 - DNA, 30 bp, Artificial Sequence
  Synthetic oligonucleotide
aagtagtgtcgttttatcgtggagaaaagt

SEQ ID NO: 260170 - DNA, 30 bp, Artificial Sequence
  Synthetic oligonucleotide
accaactcacaccgaaatagcgctaaaagt

SEQ ID NO: 260171 - DNA, 30 bp, Artificial Sequence
  Synthetic oligonucleotide
atggcttttgcctggtagttttctaaaagt

SEQ ID NO: 260172 - DNA, 30 bp, Artificial Sequence
  Synthetic oligonucleotide
cgcgacaaatgaagactacaatgtaaaagt

SEQ ID NO: 260173 - DNA, 30 bp, Artificial Sequence
  Synthetic oligonucleotide
gtcagaccgcaagactagtgctaacaaagt

SEQ ID NO: 260174 - DNA, 30 bp, Artificial Sequence
  Synthetic oligonucleotide
tcttcactaagggagcgttgacgacaaagt

SEQ ID NO: 260175 - DNA, 30 bp, Artificial Sequence
  Synthetic oligonucleotide
gtataaatctcctgttgagcacgccaaagt

SEQ ID NO: 260176 - DNA, 30 bp, Artificial Sequence
  Synthetic oligonucleotide
atggctctctggggatggggtctgcaaagt

SEQ ID NO: 260177 - DNA, 29 bp, Artificial Sequence
  Synthetic oligonucleotide
agaactatcctgctctgcgagctcaaagt

SEQ ID NO: 260178 - DNA, 30 bp, Artificial Sequence
  Synthetic oligonucleotide
gtcttgttgaacaactgatctgctcaaagt

SEQ ID NO: 260179 - DNA, 30 bp, Artificial Sequence
  Synthetic oligonucleotide
ctctctagtgctttaagtccgtaagaaagt

SEQ ID NO: 260180 - DNA, 30 bp, Artificial Sequence
  Synthetic oligonucleotide
gagacgctcggcgacaacccaagagaaagt

SEQ ID NO: 260181 - DNA, 30 bp, Artificial Sequence
  Synthetic oligonucleotide
cttaatgatatatgaaaaacgacggaaagt

SEQ ID NO: 260182 - DNA, 30 bp, Artificial Sequence
  Synthetic oligonucleotide
acctaacaccggtcccaagagcatgaaagt

SEQ ID NO: 260183 - DNA, 30 bp, Artificial Sequence
  Synthetic oligonucleotide
agatagcgcattcttctaaggattgaaagt

SEQ ID NO: 260184 - DNA, 30 bp, Artificial Sequence
  Synthetic oligonucleotide
ttgactaatgtcaaaggcgatcttgaaagt

SEQ ID NO: 260185 - DNA, 30 bp, Artificial Sequence
  Synthetic oligonucleotide
gtaggagacggctgaaccaactttgaaagt

SEQ ID NO: 260186 - DNA, 30 bp, Artificial Sequence
  Synthetic oligonucleotide
ttaaaaggtaattcgaatggaccataaagt

SEQ ID NO: 260187 - DNA, 30 bp, Artificial Sequence
  Synthetic oligonucleotide
gttccccctaggacgtgacgaagataaagt

SEQ ID NO: 260188 - DNA, 30 bp, Artificial Sequence
  Synthetic oligonucleotide
gccatcgttgtacaaatctaaggataaagt

SEQ ID NO: 260189 - DNA, 30 bp, Artificial Sequence
  Synthetic oligonucleotide
ggtgcaaaacaatatcagtacgtataaagt

SEQ ID NO: 260190 - DNA, 30 bp, Artificial Sequence
  Synthetic oligonucleotide
agcgacgtaagtagttcatttacctaaagt

SEQ ID NO: 260191 - DNA, 30 bp, Artificial Sequence
  Synthetic oligonucleotide
caatcgatcacccctagacagtgctaaagt

SEQ ID NO: 260192 - DNA, 30 bp, Artificial Sequence
  Synthetic oligonucleotide
tacttgtacaggggtacagactagtaaagt

SEQ ID NO: 260193 - DNA, 30 bp, Artificial Sequence
  Synthetic oligonucleotide
cgttgtctcactcctgctcaggggtaaagt

SEQ ID NO: 260194 - DNA, 31 bp, Artificial Sequence
  Synthetic oligonucleotide
cggggagtatgccaagagcaactattaaagt

SEQ ID NO: 260195 - DNA, 30 bp, Artificial Sequence
  Synthetic oligonucleotide
tcctacgatgcacctaaggtcagaacaagt

SEQ ID NO: 260196 - DNA, 30 bp, Artificial Sequence
  Synthetic oligonucleotide
ttccatggtgatgactggtccatgacaagt

SEQ ID NO: 260197 - DNA, 30 bp, Artificial Sequence
  Synthetic oligonucleotide
tgtacatagtgatatataattatgacaagt

SEQ ID NO: 260198 - DNA, 30 bp, Artificial Sequence
  Synthetic oligonucleotide
cagcataggctgtttaccccagttccaagt

SEQ ID NO: 260199 - DNA, 30 bp, Artificial Sequence
  Synthetic oligonucleotide
gtttatgggtccatacggtgaagagcaagt

SEQ ID NO: 260200 - DNA, 30 bp, Artificial Sequence
  Synthetic oligonucleotide
aggaaagacacttggaattgccacgcaagt

SEQ ID NO: 260201 - DNA, 30 bp, Artificial Sequence
  Synthetic oligonucleotide
gcttcgtgtcatgatccgggatacgcaagt

SEQ ID NO: 260202 - DNA, 30 bp, Artificial Sequence
  Synthetic oligonucleotide
aagcccccggctcggcacgcgcgcgcaagt

SEQ ID NO: 260203 - DNA, 30 bp, Artificial Sequence
  Synthetic oligonucleotide
cacccatggctaccgaccgccggcgcaagt

SEQ ID NO: 260204 - DNA, 30 bp, Artificial Sequence
  Synthetic oligonucleotide
catacgggacatgaatacatcgtggcaagt

SEQ ID NO: 260205 - DNA, 30 bp, Artificial Sequence
  Synthetic oligonucleotide
ggaggtaggaaggggtgctccgctgcaagt

SEQ ID NO: 260206 - DNA, 30 bp, Artificial Sequence
  Synthetic oligonucleotide
ggatttgacaaaagattatatggtgcaagt

SEQ ID NO: 260207 - DNA, 30 bp, Artificial Sequence
  Synthetic oligonucleotide
tcaacccaggcgcaaagacatcgatcaagt

SEQ ID NO: 260208 - DNA, 30 bp, Artificial Sequence
  Synthetic oligonucleotide
agaacatgatccaagtagcacgtctcaagt

SEQ ID NO: 260209 - DNA, 30 bp, Artificial Sequence
  Synthetic oligonucleotide
ctacttggtagctactgtggcgggtcaagt

SEQ ID NO: 260210 - DNA, 30 bp, Artificial Sequence
  Synthetic oligonucleotide
gccttgtgagtaccaaacgatcgttcaagt

SEQ ID NO: 260211 - DNA, 30 bp, Artificial Sequence
  Synthetic oligonucleotide
atcctcagatgtatcaggattcaaagaagt

SEQ ID NO: 260212 - DNA, 30 bp, Artificial Sequence
  Synthetic oligonucleotide
gagcatcgtacatccggtcaacgaagaagt

SEQ ID NO: 260213 - DNA, 30 bp, Artificial Sequence
  Synthetic oligonucleotide
tgcgggcctgagagatggcgatacagaagt

SEQ ID NO: 260214 - DNA, 30 bp, Artificial Sequence
  Synthetic oligonucleotide
ttcgggctatgtgttcgtcggtacagaagt

SEQ ID NO: 260215 - DNA, 30 bp, Artificial Sequence
  Synthetic oligonucleotide
ggactcggactaatattggcatagagaagt

SEQ ID NO: 260216 - DNA, 30 bp, Artificial Sequence
  Synthetic oligonucleotide
attatggctacaaagcccacgtagagaagt

SEQ ID NO: 260217 - DNA, 30 bp, Artificial Sequence
  Synthetic oligonucleotide
tctgattaaaggactagggagatgagaagt

SEQ ID NO: 260218 - DNA, 30 bp, Artificial Sequence
  Synthetic oligonucleotide
gcgggcttctgtccttgaggattgagaagt

SEQ ID NO: 260219 - DNA, 30 bp, Artificial Sequence
  Synthetic oligonucleotide
gccgacgaaatcaggggactacctagaagt

SEQ ID NO: 260220 - DNA, 30 bp, Artificial Sequence
  Synthetic oligonucleotide
gcgcgccgtgccttgggaggtcaacgaagt

SEQ ID NO: 260221 - DNA, 30 bp, Artificial Sequence
  Synthetic oligonucleotide
tgtgggaaaatggcatatcacatacgaagt

SEQ ID NO: 260222 - DNA, 30 bp, Artificial Sequence
  Synthetic oligonucleotide
gggtgcacctcatatctcaatctccgaagt

SEQ ID NO: 260223 - DNA, 30 bp, Artificial Sequence
  Synthetic oligonucleotide
atgacaatcgtgaacctatagcagcgaagt

SEQ ID NO: 260224 - DNA, 30 bp, Artificial Sequence
  Synthetic oligonucleotide
gaacatttggaaaagaaatgaatgcgaagt

SEQ ID NO: 260225 - DNA, 30 bp, Artificial Sequence
  Synthetic oligonucleotide
ctgattcaaccggtaggtgcgtacggaagt

SEQ ID NO: 260226 - DNA, 30 bp, Artificial Sequence
  Synthetic oligonucleotide
taagagcccctctccgtcgcttcgggaagt

SEQ ID NO: 260227 - DNA, 30 bp, Artificial Sequence
  Synthetic oligonucleotide
gggagttcacatttacttagagtgggaagt

SEQ ID NO: 260228 - DNA, 30 bp, Artificial Sequence
  Synthetic oligonucleotide
catgtgtggcagatcagcttatctggaagt

SEQ ID NO: 260229 - DNA, 30 bp, Artificial Sequence
  Synthetic oligonucleotide
gatcctggtccccttatcacatttggaagt

SEQ ID NO: 260230 - DNA, 30 bp, Artificial Sequence
  Synthetic oligonucleotide
tgttgaataacgtggcatcaaggatgaagt

SEQ ID NO: 260231 - DNA, 30 bp, Artificial Sequence
  Synthetic oligonucleotide
gccttagacacagatcctgccacgtgaagt

SEQ ID NO: 260232 - DNA, 30 bp, Artificial Sequence
  Synthetic oligonucleotide
aaccacacgaacttagcggatcggtgaagt

SEQ ID NO: 260233 - DNA, 30 bp, Artificial Sequence
  Synthetic oligonucleotide
ctacgttgcatgggggcataggcttgaagt

SEQ ID NO: 260234 - DNA, 30 bp, Artificial Sequence
  Synthetic oligonucleotide
acacatgtgcgcggacttggtacaataagt

SEQ ID NO: 260235 - DNA, 30 bp, Artificial Sequence
  Synthetic oligonucleotide
cggctgatggcattctgtgccagcataagt

SEQ ID NO: 260236 - DNA, 30 bp, Artificial Sequence
  Synthetic oligonucleotide
gactatctctaaagaactgggttcataagt

SEQ ID NO: 260237 - DNA, 30 bp, Artificial Sequence
  Synthetic oligonucleotide
ccattagggcagcgaagacttctgataagt

SEQ ID NO: 260238 - DNA, 30 bp, Artificial Sequence
  Synthetic oligonucleotide
ctcggcgatgacgacctggagcctataagt

SEQ ID NO: 260239 - DNA, 30 bp, Artificial Sequence
  Synthetic oligonucleotide
gaatcaggtgtgtcctggcaacgtataagt

SEQ ID NO: 260240 - DNA, 30 bp, Artificial Sequence
  Synthetic oligonucleotide
atgccctcggctgacccggacgcactaagt

SEQ ID NO: 260241 - DNA, 30 bp, Artificial Sequence
  Synthetic oligonucleotide
cgccatcgtggtctcacagtaaacctaagt

SEQ ID NO: 260242 - DNA, 30 bp, Artificial Sequence
  Synthetic oligonucleotide
agtgtcaaatgggaatgataacccctaagt

SEQ ID NO: 260243 - DNA, 30 bp, Artificial Sequence
  Synthetic oligonucleotide
caaggcaatcagtcaatggctgagctaagt

SEQ ID NO: 260244 - DNA, 30 bp, Artificial Sequence
  Synthetic oligonucleotide
ctgcggcgtcggggagtggaagggctaagt

SEQ ID NO: 260245 - DNA, 30 bp, Artificial Sequence
  Synthetic oligonucleotide
ccctttaatgttagaccacaggcagtaagt

SEQ ID NO: 260246 - DNA, 30 bp, Artificial Sequence
  Synthetic oligonucleotide
tcagccaagtgctacgcacataccgtaagt

SEQ ID NO: 260247 - DNA, 30 bp, Artificial Sequence
  Synthetic oligonucleotide
tgtttgacctgctaggtctgcggcgtaagt

SEQ ID NO: 260248 - DNA, 30 bp, Artificial Sequence
  Synthetic oligonucleotide
tgtaaaagattactgcccagccaggtaagt

SEQ ID NO: 260249 - DNA, 30 bp, Artificial Sequence
  Synthetic oligonucleotide
acactcgctggcgctcccgactcggtaagt

SEQ ID NO: 260250 - DNA, 30 bp, Artificial Sequence
  Synthetic oligonucleotide
tgagttcacggagcccaagttatggtaagt

SEQ ID NO: 260251 - DNA, 30 bp, Artificial Sequence
  Synthetic oligonucleotide
aattcgctgaattaatcaacgaatgtaagt

SEQ ID NO: 260252 - DNA, 30 bp, Artificial Sequence
  Synthetic oligonucleotide
tgatgtacggactcaatcagcgtattaagt

SEQ ID NO: 260253 - DNA, 30 bp, Artificial Sequence
  Synthetic oligonucleotide
aagatcggctaaggaggggataacttaagt

SEQ ID NO: 260254 - DNA, 30 bp, Artificial Sequence
  Synthetic oligonucleotide
gagaaggatttggaaagatggttcttaagt

SEQ ID NO: 260255 - DNA, 30 bp, Artificial Sequence
  Synthetic oligonucleotide
ctgctccaacagctcaggtaattgttaagt

SEQ ID NO: 260256 - DNA, 30 bp, Artificial Sequence
  Synthetic oligonucleotide
gattcgtctagattggagtaagttttaagt

SEQ ID NO: 260257 - DNA, 30 bp, Artificial Sequence
  Synthetic oligonucleotide
tcaccggtagccgtagccataggaaacagt

SEQ ID NO: 260258 - DNA, 30 bp, Artificial Sequence
  Synthetic oligonucleotide
ggctagtagagccagcgacctcacaacagt

SEQ ID NO: 260259 - DNA, 30 bp, Artificial Sequence
  Synthetic oligonucleotide
cttatgggcgaagagatgctttcgaacagt

SEQ ID NO: 260260 - DNA, 30 bp, Artificial Sequence
  Synthetic oligonucleotide
agttgaggcattctagggaacgggaacagt

SEQ ID NO: 260261 - DNA, 30 bp, Artificial Sequence
  Synthetic oligonucleotide
ggagcacctccccacgggtattgtaacagt

SEQ ID NO: 260262 - DNA, 30 bp, Artificial Sequence
  Synthetic oligonucleotide
taggcaagctccagagtgccttttaacagt

SEQ ID NO: 260263 - DNA, 30 bp, Artificial Sequence
  Synthetic oligonucleotide
gccataaggttaggggaagagcagcacagt

SEQ ID NO: 260264 - DNA, 30 bp, Artificial Sequence
  Synthetic oligonucleotide
acccagtttggagatttttcttgggacagt

SEQ ID NO: 260265 - DNA, 30 bp, Artificial Sequence
  Synthetic oligonucleotide
tcggtggaaagttccattcagatggacagt

SEQ ID NO: 260266 - DNA, 30 bp, Artificial Sequence
  Synthetic oligonucleotide
ggagcgaccgaaatccggcacttggacagt

SEQ ID NO: 260267 - DNA, 30 bp, Artificial Sequence
  Synthetic oligonucleotide
ttgaagattatcttgcaataaggtgacagt

SEQ ID NO: 260268 - DNA, 30 bp, Artificial Sequence
  Synthetic oligonucleotide
atcatatagattaactgacaaaaatacagt

SEQ ID NO: 260269 - DNA, 30 bp, Artificial Sequence
  Synthetic oligonucleotide
tcgcgggcgtcacaaattacggactacagt

SEQ ID NO: 260270 - DNA, 30 bp, Artificial Sequence
  Synthetic oligonucleotide
tggaacaaggagggatttgtaacctacagt

SEQ ID NO: 260271 - DNA, 30 bp, Artificial Sequence
  Synthetic oligonucleotide
cagtcgcgcgttctcgcaccgccgtacagt

SEQ ID NO: 260272 - DNA, 30 bp, Artificial Sequence
  Synthetic oligonucleotide
gttctacgtcgtacgagtatgccgtacagt

SEQ ID NO: 260273 - DNA, 30 bp, Artificial Sequence
  Synthetic oligonucleotide
tactcaaagtccagcggaatattgtacagt

SEQ ID NO: 260274 - DNA, 30 bp, Artificial Sequence
  Synthetic oligonucleotide
tactgctgggtaaggtattgcgattacagt

SEQ ID NO: 260275 - DNA, 30 bp, Artificial Sequence
  Synthetic oligonucleotide
tcattagatccgcttccctagatttacagt

SEQ ID NO: 260276 - DNA, 30 bp, Artificial Sequence
  Synthetic oligonucleotide
ggaggtgcaggattggagcgagtttacagt

SEQ ID NO: 260277 - DNA, 30 bp, Artificial Sequence
  Synthetic oligonucleotide
cagcttctaaataagtgaaatgacaccagt

SEQ ID NO: 260278 - DNA, 30 bp, Artificial Sequence
  Synthetic oligonucleotide
cttgctaacgatgttccttgtcgcaccagt

SEQ ID NO: 260279 - DNA, 30 bp, Artificial Sequence
  Synthetic oligonucleotide
gacgtgtcattgcagtactggttcaccagt

SEQ ID NO: 260280 - DNA, 30 bp, Artificial Sequence
  Synthetic oligonucleotide
aatttcggacattttgggcaatctaccagt

SEQ ID NO: 260281 - DNA, 31 bp, Artificial Sequence
  Synthetic oligonucleotide
gttaattaggaacgggtgctgagttaccagt

SEQ ID NO: 260282 - DNA, 30 bp, Artificial Sequence
  Synthetic oligonucleotide
gagtaacgggggcggacaggtgtacccagt

SEQ ID NO: 260283 - DNA, 30 bp, Artificial Sequence
  Synthetic oligonucleotide
ttcaatggcagaagatgtgaacagcccagt

SEQ ID NO: 260284 - DNA, 30 bp, Artificial Sequence
  Synthetic oligonucleotide
gttatgttctcacgtcccagagggcccagt

SEQ ID NO: 260285 - DNA, 30 bp, Artificial Sequence
  Synthetic oligonucleotide
ccaccgggtgcatgatcttagcaagccagt

SEQ ID NO: 260286 - DNA, 30 bp, Artificial Sequence
  Synthetic oligonucleotide
gcttcgaatatacttgaatgatgcgccagt

SEQ ID NO: 260287 - DNA, 30 bp, Artificial Sequence
  Synthetic oligonucleotide
cgaagatcaccttcctcggtgattgccagt

SEQ ID NO: 260288 - DNA, 30 bp, Artificial Sequence
  Synthetic oligonucleotide
gtcggtgaatccatttccgcacggtccagt

SEQ ID NO: 260289 - DNA, 30 bp, Artificial Sequence
  Synthetic oligonucleotide
aagtaatggtcaagctcgccgttgtccagt

SEQ ID NO: 260290 - DNA, 31 bp, Artificial Sequence
  Synthetic oligonucleotide
ggttcggggctcggactgcgtcaaaagcagt

SEQ ID NO: 260291 - DNA, 30 bp, Artificial Sequence
  Synthetic oligonucleotide
ggaccggttatatatggagacacaagcagt

SEQ ID NO: 260292 - DNA, 30 bp, Artificial Sequence
  Synthetic oligonucleotide
tcgttgagtatggccagctggcacagcagt

SEQ ID NO: 260293 - DNA, 30 bp, Artificial Sequence
  Synthetic oligonucleotide
tatcttactgtagtaacgatccatagcagt

SEQ ID NO: 260294 - DNA, 30 bp, Artificial Sequence
  Synthetic oligonucleotide
tgatacggccttcgcttctcagagcgcagt

SEQ ID NO: 260295 - DNA, 30 bp, Artificial Sequence
  Synthetic oligonucleotide
tatgtcaggcaactgaatttggatcgcagt

SEQ ID NO: 260296 - DNA, 30 bp, Artificial Sequence
  Synthetic oligonucleotide
gcacactactaggacggaaagaaaggcagt

SEQ ID NO: 260297 - DNA, 30 bp, Artificial Sequence
  Synthetic oligonucleotide
ttccattgggaacgtgcgttggaaggcagt

SEQ ID NO: 260298 - DNA, 30 bp, Artificial Sequence
  Synthetic oligonucleotide
tgtaataccgtcaaatttgggataggcagt

SEQ ID NO: 260299 - DNA, 30 bp, Artificial Sequence
  Synthetic oligonucleotide
accgcatgtgctctaggtaggtagggcagt

SEQ ID NO: 260300 - DNA, 30 bp, Artificial Sequence
  Synthetic oligonucleotide
ggaggcgtgcgtcctggattcgtgggcagt

SEQ ID NO: 260301 - DNA, 30 bp, Artificial Sequence
  Synthetic oligonucleotide
gcccccaactaaattatttcaaatggcagt

SEQ ID NO: 260302 - DNA, 30 bp, Artificial Sequence
  Synthetic oligonucleotide
gtcgactagtctgaatcatgtaatggcagt

SEQ ID NO: 260303 - DNA, 30 bp, Artificial Sequence
  Synthetic oligonucleotide
ctggcgccgacccatgcgctgtgtggcagt

SEQ ID NO: 260304 - DNA, 29 bp, Artificial Sequence
  Synthetic oligonucleotide
ttgaacgggacctgctatctgttggcagt

SEQ ID NO: 260305 - DNA, 30 bp, Artificial Sequence
  Synthetic oligonucleotide
agtctttggcaccatccggcaaaatgcagt

SEQ ID NO: 260306 - DNA, 30 bp, Artificial Sequence
  Synthetic oligonucleotide
aaataacctcaatcagcgacggggtgcagt

SEQ ID NO: 260307 - DNA, 30 bp, Artificial Sequence
  Synthetic oligonucleotide
tgaagtggtgatccccgaggtttgtgcagt

SEQ ID NO: 260308 - DNA, 30 bp, Artificial Sequence
  Synthetic oligonucleotide
cctcattgcttagtggtgtgtcattgcagt

SEQ ID NO: 260309 - DNA, 30 bp, Artificial Sequence
  Synthetic oligonucleotide
tccctctctggcttctagatcggttgcagt

SEQ ID NO: 260310 - DNA, 30 bp, Artificial Sequence
  Synthetic oligonucleotide
gatcaaaatacggatcgcgcggaaatcagt

SEQ ID NO: 260311 - DNA, 30 bp, Artificial Sequence
  Synthetic oligonucleotide
cgttttatgcatgagggtaaggcaatcagt

SEQ ID NO: 260312 - DNA, 30 bp, Artificial Sequence
  Synthetic oligonucleotide
gaacgttggcgacagatcgggaccatcagt

SEQ ID NO: 260313 - DNA, 30 bp, Artificial Sequence
  Synthetic oligonucleotide
tcctattctatgggaaggaaatggatcagt

SEQ ID NO: 260314 - DNA, 30 bp, Artificial Sequence
  Synthetic oligonucleotide
tcggattcgatcttgtacgacgatatcagt

SEQ ID NO: 260315 - DNA, 30 bp, Artificial Sequence
  Synthetic oligonucleotide
tagggccacgtgcatatctcatcactcagt

SEQ ID NO: 260316 - DNA, 30 bp, Artificial Sequence
  Synthetic oligonucleotide
ggacagttcatgagctgcgacttagtcagt

SEQ ID NO: 260317 - DNA, 30 bp, Artificial Sequence
  Synthetic oligonucleotide
tgtcaaaacaaaatgaaattgtacgtcagt

SEQ ID NO: 260318 - DNA, 30 bp, Artificial Sequence
  Synthetic oligonucleotide
caggcgtagcaattccacctaagcgtcagt

SEQ ID NO: 260319 - DNA, 30 bp, Artificial Sequence
  Synthetic oligonucleotide
tagagggcactcaggtaaccttcggtcagt

SEQ ID NO: 260320 - DNA, 30 bp, Artificial Sequence
  Synthetic oligonucleotide
taaacttatgggccaaccatcgaattcagt

SEQ ID NO: 260321 - DNA, 30 bp, Artificial Sequence
  Synthetic oligonucleotide
tcgtataattgcttttatgtttgattcagt

SEQ ID NO: 260322 - DNA, 30 bp, Artificial Sequence
  Synthetic oligonucleotide
gtcaccactcgtacaaagggtgccttcagt

SEQ ID NO: 260323 - DNA, 30 bp, Artificial Sequence
  Synthetic oligonucleotide
ttaggcgcaccgcttgttcgttagttcagt

SEQ ID NO: 260324 - DNA, 31 bp, Artificial Sequence
  Synthetic oligonucleotide
gtccgtgaaattgttaagatcacatttcagt

SEQ ID NO: 260325 - DNA, 30 bp, Artificial Sequence
  Synthetic oligonucleotide
cctgcataacataaagacatatctttcagt

SEQ ID NO: 260326 - DNA, 30 bp, Artificial Sequence
  Synthetic oligonucleotide
gctgatctcattctgggtctctgtttcagt

SEQ ID NO: 260327 - DNA, 30 bp, Artificial Sequence
  Synthetic oligonucleotide
gaaagggataccaaggtgtggaaaaagagt

SEQ ID NO: 260328 - DNA, 30 bp, Artificial Sequence
  Synthetic oligonucleotide
ggtgcttgcttacaggcgattcgaaagagt

SEQ ID NO: 260329 - DNA, 30 bp, Artificial Sequence
  Synthetic oligonucleotide
tttggtggttaaagtgtcggtttcaagagt

SEQ ID NO: 260330 - DNA, 30 bp, Artificial Sequence
  Synthetic oligonucleotide
gcgttgatccgacccgtcgctaagaagagt

SEQ ID NO: 260331 - DNA, 30 bp, Artificial Sequence
  Synthetic oligonucleotide
ctaacagtggaacgattggcagggaagagt

SEQ ID NO: 260332 - DNA, 30 bp, Artificial Sequence
  Synthetic oligonucleotide
catttcagtgtggggcaattgtcacagagt

SEQ ID NO: 260333 - DNA, 30 bp, Artificial Sequence
  Synthetic oligonucleotide
gctaacgcgtgctttggcggttaccagagt

SEQ ID NO: 260334 - DNA, 30 bp, Artificial Sequence
  Synthetic oligonucleotide
caccactgtagggcttgcccccagcagagt

SEQ ID NO: 260335 - DNA, 30 bp, Artificial Sequence
  Synthetic oligonucleotide
cgatatgcgttacaatgcttttagcagagt

SEQ ID NO: 260336 - DNA, 30 bp, Artificial Sequence
  Synthetic oligonucleotide
cggggcctcaagtcctcctctttgcagagt

SEQ ID NO: 260337 - DNA, 30 bp, Artificial Sequence
  Synthetic oligonucleotide
gtaaaggcgtgaatgagattgggggagagt

SEQ ID NO: 260338 - DNA, 30 bp, Artificial Sequence
  Synthetic oligonucleotide
ctcacaggcacccgccatcacagtgagagt

SEQ ID NO: 260339 - DNA, 30 bp, Artificial Sequence
  Synthetic oligonucleotide
gtcgcagttgagacacgctaggtatagagt

SEQ ID NO: 260340 - DNA, 30 bp, Artificial Sequence
  Synthetic oligonucleotide
accccgtaaggatcacgttatgactagagt

SEQ ID NO: 260341 - DNA, 30 bp, Artificial Sequence
  Synthetic oligonucleotide
atagggtttaaggaaatggagagttagagt

SEQ ID NO: 260342 - DNA, 30 bp, Artificial Sequence
  Synthetic oligonucleotide
aagcgttgagcctgcgcgaaacggacgagt

SEQ ID NO: 260343 - DNA, 30 bp, Artificial Sequence
  Synthetic oligonucleotide
ctgatgtttaatgcatactctcggacgagt

SEQ ID NO: 260344 - DNA, 30 bp, Artificial Sequence
  Synthetic oligonucleotide
gtcagatatgctccgttagcggggacgagt

SEQ ID NO: 260345 - DNA, 30 bp, Artificial Sequence
  Synthetic oligonucleotide
accattcccactctaggttccgtgacgagt

SEQ ID NO: 260346 - DNA, 30 bp, Artificial Sequence
  Synthetic oligonucleotide
tgctccagtttgataaaggtataaccgagt

SEQ ID NO: 260347 - DNA, 30 bp, Artificial Sequence
  Synthetic oligonucleotide
aaacggagataagatcgggcgtgaccgagt

SEQ ID NO: 260348 - DNA, 30 bp, Artificial Sequence
  Synthetic oligonucleotide
gatcgggtaatttcaaaatgaaacccgagt

SEQ ID NO: 260349 - DNA, 30 bp, Artificial Sequence
  Synthetic oligonucleotide
cgagaggctttccgagggctgcggccgagt

SEQ ID NO: 260350 - DNA, 30 bp, Artificial Sequence
  Synthetic oligonucleotide
gcttaggggaagtgcatgtatgtgccgagt

SEQ ID NO: 260351 - DNA, 30 bp, Artificial Sequence
  Synthetic oligonucleotide
ccgaatttatacctgttaccgactccgagt

SEQ ID NO: 260352 - DNA, 30 bp, Artificial Sequence
  Synthetic oligonucleotide
tagggcgccatagtcctggtccctccgagt

SEQ ID NO: 260353 - DNA, 30 bp, Artificial Sequence
  Synthetic oligonucleotide
ccgaatgggcatttgcacactgctccgagt

SEQ ID NO: 260354 - DNA, 30 bp, Artificial Sequence
  Synthetic oligonucleotide
atacccgaaggggaatttacgcgtccgagt

SEQ ID NO: 260355 - DNA, 30 bp, Artificial Sequence
  Synthetic oligonucleotide
gcccccatctcattccgcgcagcagcgagt

SEQ ID NO: 260356 - DNA, 30 bp, Artificial Sequence
  Synthetic oligonucleotide
cgttactcgagcgtactgtctcacgcgagt

SEQ ID NO: 260357 - DNA, 30 bp, Artificial Sequence
  Synthetic oligonucleotide
tgcctgcacagtagatgtggaaccgcgagt

SEQ ID NO: 260358 - DNA, 30 bp, Artificial Sequence
  Synthetic oligonucleotide
aaccttagcgtattatgaaggtgggcgagt

SEQ ID NO: 260359 - DNA, 30 bp, Artificial Sequence
  Synthetic oligonucleotide
tctttcggctagcgtaatcttcgtgcgagt

SEQ ID NO: 260360 - DNA, 30 bp, Artificial Sequence
  Synthetic oligonucleotide
ctttaaaaggccttagactactgatcgagt

SEQ ID NO: 260361 - DNA, 30 bp, Artificial Sequence
  Synthetic oligonucleotide
tggttaatgcgagagccgttggtatcgagt

SEQ ID NO: 260362 - DNA, 30 bp, Artificial Sequence
  Synthetic oligonucleotide
tgtatgattggaatgatgtggtagtcgagt

SEQ ID NO: 260363 - DNA, 30 bp, Artificial Sequence
  Synthetic oligonucleotide
atcactaacgatcccgcatgcaggtcgagt

SEQ ID NO: 260364 - DNA, 30 bp, Artificial Sequence
  Synthetic oligonucleotide
gtcattcccagacctgtctccgtgtcgagt

SEQ ID NO: 260365 - DNA, 30 bp, Artificial Sequence
  Synthetic oligonucleotide
tgaaacgtctttaatacgattatcaggagt

SEQ ID NO: 260366 - DNA, 30 bp, Artificial Sequence
  Synthetic oligonucleotide
gcaggctccagtaccaggtaaaataggagt

SEQ ID NO: 260367 - DNA, 30 bp, Artificial Sequence
  Synthetic oligonucleotide
tgacgcggtgaatctcgtccctgtaggagt

SEQ ID NO: 260368 - DNA, 30 bp, Artificial Sequence
  Synthetic oligonucleotide
agttcccatgcaggtcatatctcccggagt

SEQ ID NO: 260369 - DNA, 30 bp, Artificial Sequence
  Synthetic oligonucleotide
tcttataaatgccatcacccccaagggagt

SEQ ID NO: 260370 - DNA, 30 bp, Artificial Sequence
  Synthetic oligonucleotide
ccaaaagccgatgcacaccgtgacgggagt

SEQ ID NO: 260371 - DNA, 30 bp, Artificial Sequence
  Synthetic oligonucleotide
tacttattgtatacttggcgttaggggagt

SEQ ID NO: 260372 - DNA, 30 bp, Artificial Sequence
  Synthetic oligonucleotide
cactataattgcacggacaccatatggagt

SEQ ID NO: 260373 - DNA, 30 bp, Artificial Sequence
  Synthetic oligonucleotide
tgtcttgacacgatggaaaccaactggagt

SEQ ID NO: 260374 - DNA, 30 bp, Artificial Sequence
  Synthetic oligonucleotide
tacatgacgcggacgtattacggctggagt

SEQ ID NO: 260375 - DNA, 30 bp, Artificial Sequence
  Synthetic oligonucleotide
caacttcgacggacgtatccggggtggagt

SEQ ID NO: 260376 - DNA, 30 bp, Artificial Sequence
  Synthetic oligonucleotide
gataaatatcctaatccgcagatgtggagt

SEQ ID NO: 260377 - DNA, 30 bp, Artificial Sequence
  Synthetic oligonucleotide
ataacttcacttaagttaaagaaaatgagt

SEQ ID NO: 260378 - DNA, 30 bp, Artificial Sequence
  Synthetic oligonucleotide
aaaactcatcaaaaactggttcaaatgagt

SEQ ID NO: 260379 - DNA, 30 bp, Artificial Sequence
  Synthetic oligonucleotide
cgtacttgcaatttacttcgtgagatgagt

SEQ ID NO: 260380 - DNA, 30 bp, Artificial Sequence
  Synthetic oligonucleotide
agaattacaacaccctcgatatggatgagt

SEQ ID NO: 260381 - DNA, 30 bp, Artificial Sequence
  Synthetic oligonucleotide
tactggcgtgtaggcctaataaatatgagt

SEQ ID NO: 260382 - DNA, 30 bp, Artificial Sequence
  Synthetic oligonucleotide
aacagtctacgggagccagttggtatgagt

SEQ ID NO: 260383 - DNA, 30 bp, Artificial Sequence
  Synthetic oligonucleotide
agggtatgcgagtatttaggggcactgagt

SEQ ID NO: 260384 - DNA, 30 bp, Artificial Sequence
  Synthetic oligonucleotide
agtcactttccgcgggaaagagagctgagt

SEQ ID NO: 260385 - DNA, 30 bp, Artificial Sequence
  Synthetic oligonucleotide
gactacgaacaaggttctcttcgtctgagt

SEQ ID NO: 260386 - DNA, 30 bp, Artificial Sequence
  Synthetic oligonucleotide
atgaacttgttgctcaatcactttctgagt

SEQ ID NO: 260387 - DNA, 30 bp, Artificial Sequence
  Synthetic oligonucleotide
agcgcgtggaaatccttaatacgagtgagt

SEQ ID NO: 260388 - DNA, 30 bp, Artificial Sequence
  Synthetic oligonucleotide
taggactggtttggagtctataacgtgagt

SEQ ID NO: 260389 - DNA, 30 bp, Artificial Sequence
  Synthetic oligonucleotide
gacgggcttcagttcatttggtcggtgagt

SEQ ID NO: 260390 - DNA, 30 bp, Artificial Sequence
  Synthetic oligonucleotide
ccatactcgtcatatatgaggggggtgagt

SEQ ID NO: 260391 - DNA, 30 bp, Artificial Sequence
  Synthetic oligonucleotide
ccaaccgttatctggagggaagctgtgagt

SEQ ID NO: 260392 - DNA, 30 bp, Artificial Sequence
  Synthetic oligonucleotide
gtcccatgtggtctgttcgtgcaattgagt

SEQ ID NO: 260393 - DNA, 30 bp, Artificial Sequence
  Synthetic oligonucleotide
atttcgggcagcagggagacgtacttgagt

SEQ ID NO: 260394 - DNA, 30 bp, Artificial Sequence
  Synthetic oligonucleotide
acgagtaaataatgtttgccgagcttgagt

SEQ ID NO: 260395 - DNA, 30 bp, Artificial Sequence
  Synthetic oligonucleotide
gcaagagcgcccagcgaagaagggttgagt

SEQ ID NO: 260396 - DNA, 30 bp, Artificial Sequence
  Synthetic oligonucleotide
cattaagggatttgcactagattgttgagt

SEQ ID NO: 260397 - DNA, 30 bp, Artificial Sequence
  Synthetic oligonucleotide
tgtttcttatcgactaagcgcgtaaatagt

SEQ ID NO: 260398 - DNA, 30 bp, Artificial Sequence
  Synthetic oligonucleotide
gggggtttggcaatctatagagtcaatagt

SEQ ID NO: 260399 - DNA, 30 bp, Artificial Sequence
  Synthetic oligonucleotide
atatcggcaccgtagagagcctggaatagt

SEQ ID NO: 260400 - DNA, 30 bp, Artificial Sequence
  Synthetic oligonucleotide
cgtgcaacaaggaagcgtgcgctgaatagt

SEQ ID NO: 260401 - DNA, 30 bp, Artificial Sequence
  Synthetic oligonucleotide
cggctcggcgtattgatgaaggctaatagt

SEQ ID NO: 260402 - DNA, 30 bp, Artificial Sequence
  Synthetic oligonucleotide
gcgcgatgcagaaaaatcgtctttaatagt

SEQ ID NO: 260403 - DNA, 30 bp, Artificial Sequence
  Synthetic oligonucleotide
tttaaagctccaggttcaagagcacatagt

SEQ ID NO: 260404 - DNA, 30 bp, Artificial Sequence
  Synthetic oligonucleotide
gggagtcacagccattcgattcaccatagt

SEQ ID NO: 260405 - DNA, 30 bp, Artificial Sequence
  Synthetic oligonucleotide
ggaatattctagactaagcggcatcatagt

SEQ ID NO: 260406 - DNA, 30 bp, Artificial Sequence
  Synthetic oligonucleotide
atgaagatcgaccggcctcacactcatagt

SEQ ID NO: 260407 - DNA, 30 bp, Artificial Sequence
  Synthetic oligonucleotide
gttcaggatcgggggaacggacttcatagt

SEQ ID NO: 260408 - DNA, 30 bp, Artificial Sequence
  Synthetic oligonucleotide
actcagaatatgtaaactaattttcatagt

SEQ ID NO: 260409 - DNA, 30 bp, Artificial Sequence
  Synthetic oligonucleotide
agaggagcttgcctgatcaacgaagatagt

SEQ ID NO: 260410 - DNA, 30 bp, Artificial Sequence
  Synthetic oligonucleotide
acacactaactgaaagcggcgggagatagt

SEQ ID NO: 260411 - DNA, 30 bp, Artificial Sequence
  Synthetic oligonucleotide
gaatccgggcaccaatatcgctgagatagt

SEQ ID NO: 260412 - DNA, 30 bp, Artificial Sequence
  Synthetic oligonucleotide
gcgccaacgaatcaaatctcgtccgatagt

SEQ ID NO: 260413 - DNA, 30 bp, Artificial Sequence
  Synthetic oligonucleotide
tctgggcgcacacggctgatcagcgatagt

SEQ ID NO: 260414 - DNA, 30 bp, Artificial Sequence
  Synthetic oligonucleotide
catgtattgcgacatactacgcgggatagt

SEQ ID NO: 260415 - DNA, 30 bp, Artificial Sequence
  Synthetic oligonucleotide
ggggttatgcaaagacaaagtgcatatagt

SEQ ID NO: 260416 - DNA, 30 bp, Artificial Sequence
  Synthetic oligonucleotide
accactgacgctcgagcaaggcactatagt

SEQ ID NO: 260417 - DNA, 30 bp, Artificial Sequence
  Synthetic oligonucleotide
agaaggtagcgatcgggccccaagtatagt

SEQ ID NO: 260418 - DNA, 30 bp, Artificial Sequence
  Synthetic oligonucleotide
gatcgccaagccggcatcttctggtatagt

SEQ ID NO: 260419 - DNA, 30 bp, Artificial Sequence
  Synthetic oligonucleotide
atccgcgtcacgtaccaaggcatgtatagt

SEQ ID NO: 260420 - DNA, 30 bp, Artificial Sequence
  Synthetic oligonucleotide
tcccatatatcaattcgtatgtaaactagt

SEQ ID NO: 260421 - DNA, 30 bp, Artificial Sequence
  Synthetic oligonucleotide
acagctgacagggacccaatcgtaactagt

SEQ ID NO: 260422 - DNA, 30 bp, Artificial Sequence
  Synthetic oligonucleotide
caatcagactaatctgggaaattaactagt

SEQ ID NO: 260423 - DNA, 30 bp, Artificial Sequence
  Synthetic oligonucleotide
aatccatatttccagcatgtcagcactagt

SEQ ID NO: 260424 - DNA, 30 bp, Artificial Sequence
  Synthetic oligonucleotide
ccgatgtctcatcgggaaaggtagactagt

SEQ ID NO: 260425 - DNA, 30 bp, Artificial Sequence
  Synthetic oligonucleotide
acggtgcaaggtctgtttgtgtagactagt

SEQ ID NO: 260426 - DNA, 30 bp, Artificial Sequence
  Synthetic oligonucleotide
gacgatactttcggcagcagcctgactagt

SEQ ID NO: 260427 - DNA, 30 bp, Artificial Sequence
  Synthetic oligonucleotide
tcccccgaaaagccagtccaggaacctagt

SEQ ID NO: 260428 - DNA, 30 bp, Artificial Sequence
  Synthetic oligonucleotide
taggataagctcaggcatcgaatacctagt

SEQ ID NO: 260429 - DNA, 30 bp, Artificial Sequence
  Synthetic oligonucleotide
cattgatcttgtgacattaagacccctagt

SEQ ID NO: 260430 - DNA, 30 bp, Artificial Sequence
  Synthetic oligonucleotide
cagtaactcatcagcatttaagtccctagt

SEQ ID NO: 260431 - DNA, 30 bp, Artificial Sequence
  Synthetic oligonucleotide
cgttttccgagggctcaaggcatgcctagt

SEQ ID NO: 260432 - DNA, 30 bp, Artificial Sequence
  Synthetic oligonucleotide
ggtaaaattgtgcaccatcgcagagctagt

SEQ ID NO: 260433 - DNA, 30 bp, Artificial Sequence
  Synthetic oligonucleotide
tcgagacgaccacggttcttactagctagt

SEQ ID NO: 260434 - DNA, 30 bp, Artificial Sequence
  Synthetic oligonucleotide
tttagtgaatcattaacggttctcgctagt

SEQ ID NO: 260435 - DNA, 30 bp, Artificial Sequence
  Synthetic oligonucleotide
cgtacagattccatccccggtagggctagt

SEQ ID NO: 260436 - DNA, 30 bp, Artificial Sequence
  Synthetic oligonucleotide
gttttaagcaaacaatgctcactgtctagt

SEQ ID NO: 260437 - DNA, 30 bp, Artificial Sequence
  Synthetic oligonucleotide
tggtaagaacacatacctagacattctagt

SEQ ID NO: 260438 - DNA, 30 bp, Artificial Sequence
  Synthetic oligonucleotide
gttagtcggggaaaacatgggaaaagtagt

SEQ ID NO: 260439 - DNA, 30 bp, Artificial Sequence
  Synthetic oligonucleotide
ggctgtcggatcttgtattttccaagtagt

SEQ ID NO: 260440 - DNA, 30 bp, Artificial Sequence
  Synthetic oligonucleotide
tttggaaaggaaagctcgcggcgaagtagt

SEQ ID NO: 260441 - DNA, 30 bp, Artificial Sequence
  Synthetic oligonucleotide
atcatgcgaatgcgtgttttccggagtagt

SEQ ID NO: 260442 - DNA, 30 bp, Artificial Sequence
  Synthetic oligonucleotide
gatctccggtcagcccggtttatgagtagt

SEQ ID NO: 260443 - DNA, 30 bp, Artificial Sequence
  Synthetic oligonucleotide
caaccggccaactgtcatgccagacgtagt

SEQ ID NO: 260444 - DNA, 30 bp, Artificial Sequence
  Synthetic oligonucleotide
atgctgaacgccgatgtgctataccgtagt

SEQ ID NO: 260445 - DNA, 30 bp, Artificial Sequence
  Synthetic oligonucleotide
gttaacagctaataaggctctccccgtagt

SEQ ID NO: 260446 - DNA, 30 bp, Artificial Sequence
  Synthetic oligonucleotide
ggtacttttggtgcgtgtgccgagcgtagt

SEQ ID NO: 260447 - DNA, 30 bp, Artificial Sequence
  Synthetic oligonucleotide
atgtctgacattgttaattaacggcgtagt

SEQ ID NO: 260448 - DNA, 30 bp, Artificial Sequence
  Synthetic oligonucleotide
aaatcatggaagtggttaaatagaggtagt

SEQ ID NO: 260449 - DNA, 30 bp, Artificial Sequence
  Synthetic oligonucleotide
aaataggggtcattcgcatcggacggtagt

SEQ ID NO: 260450 - DNA, 30 bp, Artificial Sequence
  Synthetic oligonucleotide
ttgacaaggtgaaatgtgatgtgcggtagt

SEQ ID NO: 260451 - DNA, 30 bp, Artificial Sequence
  Synthetic oligonucleotide
gcgtcgggcgcgaatgacacctggggtagt

SEQ ID NO: 260452 - DNA, 30 bp, Artificial Sequence
  Synthetic oligonucleotide
ggagataatacttctacatgtatgggtagt

SEQ ID NO: 260453 - DNA, 30 bp, Artificial Sequence
  Synthetic oligonucleotide
cgagcgacgtaatctttcaagctgggtagt

SEQ ID NO: 260454 - DNA, 30 bp, Artificial Sequence
  Synthetic oligonucleotide
tcgcaggaagctaaccgggtgtatggtagt

SEQ ID NO: 260455 - DNA, 30 bp, Artificial Sequence
  Synthetic oligonucleotide
aggttactttatgtcgggcaaatatgtagt

SEQ ID NO: 260456 - DNA, 30 bp, Artificial Sequence
  Synthetic oligonucleotide
cttctgacacaaagctgtgtagactgtagt

SEQ ID NO: 260457 - DNA, 30 bp, Artificial Sequence
  Synthetic oligonucleotide
caagtcactcttacaggattggtctgtagt

SEQ ID NO: 260458 - DNA, 30 bp, Artificial Sequence
  Synthetic oligonucleotide
tatcatttgacaagttattatgagtgtagt

SEQ ID NO: 260459 - DNA, 30 bp, Artificial Sequence
  Synthetic oligonucleotide
cgtgaataccgcagggactcggattgtagt

SEQ ID NO: 260460 - DNA, 30 bp, Artificial Sequence
  Synthetic oligonucleotide
ggccctaaggccatgtgagcctaaattagt

SEQ ID NO: 260461 - DNA, 30 bp, Artificial Sequence
  Synthetic oligonucleotide
acaatgctggaaggctcaccaagaattagt

SEQ ID NO: 260462 - DNA, 30 bp, Artificial Sequence
  Synthetic oligonucleotide
ttgacgttcgtgcccggatgtataattagt

SEQ ID NO: 260463 - DNA, 30 bp, Artificial Sequence
  Synthetic oligonucleotide
ctcaacgtgcgcgttattcaattaattagt

SEQ ID NO: 260464 - DNA, 30 bp, Artificial Sequence
  Synthetic oligonucleotide
tatcgtcattaggggattgaagacattagt

SEQ ID NO: 260465 - DNA, 30 bp, Artificial Sequence
  Synthetic oligonucleotide
gagttggcctagttatccggaagcattagt

SEQ ID NO: 260466 - DNA, 30 bp, Artificial Sequence
  Synthetic oligonucleotide
tggacattaatgagccagcccccgattagt

SEQ ID NO: 260467 - DNA, 30 bp, Artificial Sequence
  Synthetic oligonucleotide
tttaaccatccgcgatcgatgctgattagt

SEQ ID NO: 260468 - DNA, 30 bp, Artificial Sequence
  Synthetic oligonucleotide
cggacttccgtggttcatgtatatattagt

SEQ ID NO: 260469 - DNA, 30 bp, Artificial Sequence
  Synthetic oligonucleotide
cggacccggggacataatagtaaacttagt

SEQ ID NO: 260470 - DNA, 30 bp, Artificial Sequence
  Synthetic oligonucleotide
cggctcccgtagccgaattttaaccttagt

SEQ ID NO: 260471 - DNA, 30 bp, Artificial Sequence
  Synthetic oligonucleotide
gggaagtcattaacttaagtgtgccttagt

SEQ ID NO: 260472 - DNA, 30 bp, Artificial Sequence
  Synthetic oligonucleotide
gaagacgtttacactaaacattgccttagt

SEQ ID NO: 260473 - DNA, 30 bp, Artificial Sequence
  Synthetic oligonucleotide
caatactggagacagcaggggtagcttagt

SEQ ID NO: 260474 - DNA, 30 bp, Artificial Sequence
  Synthetic oligonucleotide
aggcacgctcggaggtatctgggtcttagt

SEQ ID NO: 260475 - DNA, 30 bp, Artificial Sequence
  Synthetic oligonucleotide
tacacttagaagagggactttgttcttagt

SEQ ID NO: 260476 - DNA, 30 bp, Artificial Sequence
  Synthetic oligonucleotide
actatgcacagctgctagggcgacgttagt

SEQ ID NO: 260477 - DNA, 30 bp, Artificial Sequence
  Synthetic oligonucleotide
tagccgagcgccaaacggtgcatcgttagt

SEQ ID NO: 260478 - DNA, 30 bp, Artificial Sequence
  Synthetic oligonucleotide
cgttgtgagctaccgtaagcagaggttagt

SEQ ID NO: 260479 - DNA, 30 bp, Artificial Sequence
  Synthetic oligonucleotide
gggtgatgggttgtagttagaccggttagt

SEQ ID NO: 260480 - DNA, 30 bp, Artificial Sequence
  Synthetic oligonucleotide
atggaacaaagcgtggtatgcccggttagt

SEQ ID NO: 260481 - DNA, 30 bp, Artificial Sequence
  Synthetic oligonucleotide
gcagtcctgagaaagcaacactgggttagt

SEQ ID NO: 260482 - DNA, 30 bp, Artificial Sequence
  Synthetic oligonucleotide
cacatagtaggagaggaagataatgttagt

SEQ ID NO: 260483 - DNA, 30 bp, Artificial Sequence
  Synthetic oligonucleotide
gcttacggggatacatggaagcactttagt

SEQ ID NO: 260484 - DNA, 30 bp, Artificial Sequence
  Synthetic oligonucleotide
cagaacgattgatggagtggtcgctttagt

SEQ ID NO: 260485 - DNA, 30 bp, Artificial Sequence
  Synthetic oligonucleotide
ggtgcgggtacagggggtccagggtttagt

SEQ ID NO: 260486 - DNA, 30 bp, Artificial Sequence
  Synthetic oligonucleotide
tcacgtgcgccaacaggcttttggtttagt

SEQ ID NO: 260487 - DNA, 30 bp, Artificial Sequence
  Synthetic oligonucleotide
gtctcaaacacgcggaggcgattttttagt

SEQ ID NO: 260488 - DNA, 30 bp, Artificial Sequence
  Synthetic oligonucleotide
agcgtcccctaaggtacagtaccaaaacgt

SEQ ID NO: 260489 - DNA, 30 bp, Artificial Sequence
  Synthetic oligonucleotide
cgaaacggatggaggtagagatacaaacgt

SEQ ID NO: 260490 - DNA, 30 bp, Artificial Sequence
  Synthetic oligonucleotide
cagagatccctatacatgtggtacaaacgt

SEQ ID NO: 260491 - DNA, 30 bp, Artificial Sequence
  Synthetic oligonucleotide
tccctgaggtaatgtgatgttgcgaaacgt

SEQ ID NO: 260492 - DNA, 30 bp, Artificial Sequence
  Synthetic oligonucleotide
ttaactaaatccatacacttcgtgaaacgt

SEQ ID NO: 260493 - DNA, 30 bp, Artificial Sequence
  Synthetic oligonucleotide
acttgagcctccggatttgagtctaaacgt

SEQ ID NO: 260494 - DNA, 30 bp, Artificial Sequence
  Synthetic oligonucleotide
ggcattcggatgccttgatgccaacaacgt

SEQ ID NO: 260495 - DNA, 30 bp, Artificial Sequence
  Synthetic oligonucleotide
atattgcttatacggggtccgacccaacgt

SEQ ID NO: 260496 - DNA, 30 bp, Artificial Sequence
  Synthetic oligonucleotide
gagacgtccccgatcacctcgccccaacgt

SEQ ID NO: 260497 - DNA, 30 bp, Artificial Sequence
  Synthetic oligonucleotide
gtgtcagttcgtgtgaacccaagccaacgt

SEQ ID NO: 260498 - DNA, 30 bp, Artificial Sequence
  Synthetic oligonucleotide
attccggccgatacgtttaatcagcaacgt

SEQ ID NO: 260499 - DNA, 30 bp, Artificial Sequence
  Synthetic oligonucleotide
ttgggtgcggcccatctgtgcgatcaacgt

SEQ ID NO: 260500 - DNA, 30 bp, Artificial Sequence
  Synthetic oligonucleotide
aatcggacattgcaaactgcgagtcaacgt

SEQ ID NO: 260501 - DNA, 30 bp, Artificial Sequence
  Synthetic oligonucleotide
tgtgcgggttgcttataaccccaagaacgt

SEQ ID NO: 260502 - DNA, 30 bp, Artificial Sequence
  Synthetic oligonucleotide
gtgctttcgaggaacttatccagtgaacgt

SEQ ID NO: 260503 - DNA, 30 bp, Artificial Sequence
  Synthetic oligonucleotide
acatccctgggtgagtcccagcactaacgt

SEQ ID NO: 260504 - DNA, 30 bp, Artificial Sequence
  Synthetic oligonucleotide
caagaagaaatccctccacagacgtaacgt

SEQ ID NO: 260505 - DNA, 30 bp, Artificial Sequence
  Synthetic oligonucleotide
agggggccagcctcgaatcatgcgtaacgt

SEQ ID NO: 260506 - DNA, 30 bp, Artificial Sequence
  Synthetic oligonucleotide
gacacacccacgtacgagatggtgtaacgt

SEQ ID NO: 260507 - DNA, 30 bp, Artificial Sequence
  Synthetic oligonucleotide
tactccattcggctggttgctgtttaacgt

SEQ ID NO: 260508 - DNA, 30 bp, Artificial Sequence
  Synthetic oligonucleotide
taacacggggggctcctaggcgcaacacgt

SEQ ID NO: 260509 - DNA, 30 bp, Artificial Sequence
  Synthetic oligonucleotide
ctctcaatgctgccttcatagcgcacacgt

SEQ ID NO: 260510 - DNA, 30 bp, Artificial Sequence
  Synthetic oligonucleotide
aagatgtgaactggaccagataggacacgt

SEQ ID NO: 260511 - DNA, 30 bp, Artificial Sequence
  Synthetic oligonucleotide
tgtaaatcgcctctagatggggatacacgt

SEQ ID NO: 260512 - DNA, 30 bp, Artificial Sequence
  Synthetic oligonucleotide
tagcccgaatgcggtaacgggacaccacgt

SEQ ID NO: 260513 - DNA, 30 bp, Artificial Sequence
  Synthetic oligonucleotide
actgtaaagccggggtagcattcaccacgt

SEQ ID NO: 260514 - DNA, 26 bp, Artificial Sequence
  Synthetic oligonucleotide
actgtgaaagtatgcaacgcccacgt

SEQ ID NO: 260515 - DNA, 30 bp, Artificial Sequence
  Synthetic oligonucleotide
actaaaccgtaagtagcgatctttccacgt

SEQ ID NO: 260516 - DNA, 30 bp, Artificial Sequence
  Synthetic oligonucleotide
cagaaggtccatctaccgcactaggcacgt

SEQ ID NO: 260517 - DNA, 30 bp, Artificial Sequence
  Synthetic oligonucleotide
cgaacttgcagatattttggttatgcacgt

SEQ ID NO: 260518 - DNA, 30 bp, Artificial Sequence
  Synthetic oligonucleotide
ggagcagggcagttgcttctgcttgcacgt

SEQ ID NO: 260519 - DNA, 30 bp, Artificial Sequence
  Synthetic oligonucleotide
gtcggctcccgggatatatcgccatcacgt

SEQ ID NO: 260520 - DNA, 30 bp, Artificial Sequence
  Synthetic oligonucleotide
accaccgttatgaaaagttcatgatcacgt

SEQ ID NO: 260521 - DNA, 30 bp, Artificial Sequence
  Synthetic oligonucleotide
cagtaaaattgaggttgggtaaactcacgt

SEQ ID NO: 260522 - DNA, 30 bp, Artificial Sequence
  Synthetic oligonucleotide
ttacgtctgcgtcgactccctcgctcacgt

SEQ ID NO: 260523 - DNA, 30 bp, Artificial Sequence
  Synthetic oligonucleotide
gtcagcctctcgagcacggaattgtcacgt

SEQ ID NO: 260524 - DNA, 30 bp, Artificial Sequence
  Synthetic oligonucleotide
aacggaaatatggggcttaggaattcacgt

SEQ ID NO: 260525 - DNA, 30 bp, Artificial Sequence
  Synthetic oligonucleotide
aggctttgacctcgtgcagctacttcacgt

SEQ ID NO: 260526 - DNA, 30 bp, Artificial Sequence
  Synthetic oligonucleotide
ctcttgctaataacttgcgcatcttcacgt

SEQ ID NO: 260527 - DNA, 30 bp, Artificial Sequence
  Synthetic oligonucleotide
taagctaatgtaagtacaccggaaagacgt

SEQ ID NO: 260528 - DNA, 30 bp, Artificial Sequence
  Synthetic oligonucleotide
cgatcagaaatccgactccatgaaagacgt

SEQ ID NO: 260529 - DNA, 30 bp, Artificial Sequence
  Synthetic oligonucleotide
ttaacctaagacggcccgctcttaagacgt

SEQ ID NO: 260530 - DNA, 30 bp, Artificial Sequence
  Synthetic oligonucleotide
ttcataaatgggtctccatctcagagacgt

SEQ ID NO: 260531 - DNA, 30 bp, Artificial Sequence
  Synthetic oligonucleotide
ggatcgtgcacaagccgcggtatgagacgt

SEQ ID NO: 260532 - DNA, 30 bp, Artificial Sequence
  Synthetic oligonucleotide
actctaagacatcatacttaaattagacgt

SEQ ID NO: 260533 - DNA, 30 bp, Artificial Sequence
  Synthetic oligonucleotide
agtgcggttcgcggcctcatctaacgacgt

SEQ ID NO: 260534 - DNA, 30 bp, Artificial Sequence
  Synthetic oligonucleotide
tgactagcgcctgagtccagctaccgacgt

SEQ ID NO: 260535 - DNA, 30 bp, Artificial Sequence
  Synthetic oligonucleotide
cgccagtctaagatataacacagccgacgt

SEQ ID NO: 260536 - DNA, 30 bp, Artificial Sequence
  Synthetic oligonucleotide
tatggttgttttcgaatttcgtagcgacgt

SEQ ID NO: 260537 - DNA, 30 bp, Artificial Sequence
  Synthetic oligonucleotide
ggtaaagtcaattatacttcggatcgacgt

SEQ ID NO: 260538 - DNA, 30 bp, Artificial Sequence
  Synthetic oligonucleotide
tcttcaaaagtgtgttatgcctatcgacgt

SEQ ID NO: 260539 - DNA, 30 bp, Artificial Sequence
  Synthetic oligonucleotide
ggtatagctagtaccaccttcagcggacgt

SEQ ID NO: 260540 - DNA, 30 bp, Artificial Sequence
  Synthetic oligonucleotide
taatgtgggtgggcatctcaaatgggacgt

SEQ ID NO: 260541 - DNA, 30 bp, Artificial Sequence
  Synthetic oligonucleotide
tcgtccagccaagggctccataaatgacgt

SEQ ID NO: 260542 - DNA, 30 bp, Artificial Sequence
  Synthetic oligonucleotide
tgggatgcccatggctttgcggtatgacgt

SEQ ID NO: 260543 - DNA, 30 bp, Artificial Sequence
  Synthetic oligonucleotide
gctatcgacactgatagacgtccgtgacgt

SEQ ID NO: 260544 - DNA, 30 bp, Artificial Sequence
  Synthetic oligonucleotide
gttaatcaacgtacacgccacctgtgacgt

SEQ ID NO: 260545 - DNA, 30 bp, Artificial Sequence
  Synthetic oligonucleotide
gagggtaacaattcaattgagccaatacgt

SEQ ID NO: 260546 - DNA, 30 bp, Artificial Sequence
  Synthetic oligonucleotide
tcgtgttaagcttgcatttgcaacatacgt

SEQ ID NO: 260547 - DNA, 30 bp, Artificial Sequence
  Synthetic oligonucleotide
ataccggtacactactgtgcgaacatacgt

SEQ ID NO: 260548 - DNA, 30 bp, Artificial Sequence
  Synthetic oligonucleotide
cattctttgcactggacatcggagatacgt

SEQ ID NO: 260549 - DNA, 30 bp, Artificial Sequence
  Synthetic oligonucleotide
ttctgaaccaacttgtaaatttcgatacgt

SEQ ID NO: 260550 - DNA, 30 bp, Artificial Sequence
  Synthetic oligonucleotide
agtgtacgcataggcatgaagaatatacgt

SEQ ID NO: 260551 - DNA, 30 bp, Artificial Sequence
  Synthetic oligonucleotide
ctcgcaggtgcctatcgaccacgtctacgt

SEQ ID NO: 260552 - DNA, 30 bp, Artificial Sequence
  Synthetic oligonucleotide
tttgcgccggatcagcgaatcaaagtacgt

SEQ ID NO: 260553 - DNA, 30 bp, Artificial Sequence
  Synthetic oligonucleotide
tgggtcacgatatacatagtgtaagtacgt

SEQ ID NO: 260554 - DNA, 30 bp, Artificial Sequence
  Synthetic oligonucleotide
agaatacagtgggccgaagtaatagtacgt

SEQ ID NO: 260555 - DNA, 30 bp, Artificial Sequence
  Synthetic oligonucleotide
ttaacgcgcgtagtggtgtgatccgtacgt

SEQ ID NO: 260556 - DNA, 30 bp, Artificial Sequence
  Synthetic oligonucleotide
cgcgaacagttttcatcggagggtgtacgt

SEQ ID NO: 260557 - DNA, 30 bp, Artificial Sequence
  Synthetic oligonucleotide
ccttgggcgggttggctaatatatttacgt

SEQ ID NO: 260558 - DNA, 30 bp, Artificial Sequence
  Synthetic oligonucleotide
tacttacggctttatgaaatgtcaaaccgt

SEQ ID NO: 260559 - DNA, 30 bp, Artificial Sequence
  Synthetic oligonucleotide
taaggaaaaagagtccatctcgagaaccgt

SEQ ID NO: 260560 - DNA, 30 bp, Artificial Sequence
  Synthetic oligonucleotide
gtccatcatcgtgcaacccaagggaaccgt

SEQ ID NO: 260561 - DNA, 31 bp, Artificial Sequence
  Synthetic oligonucleotide
tggtggatagaatatattccgaggacaccgt

SEQ ID NO: 260562 - DNA, 30 bp, Artificial Sequence
  Synthetic oligonucleotide
tcacgccgatagcagcgtagccaccaccgt

SEQ ID NO: 260563 - DNA, 30 bp, Artificial Sequence
  Synthetic oligonucleotide
ctagaagggacattgttcatcccgcaccgt

SEQ ID NO: 260564 - DNA, 30 bp, Artificial Sequence
  Synthetic oligonucleotide
ggatgtcttggaaccgggggtgctcaccgt

SEQ ID NO: 260565 - DNA, 28 bp, Artificial Sequence
  Synthetic oligonucleotide
aggtacggtttaatatgttagagaccgt

SEQ ID NO: 260566 - DNA, 30 bp, Artificial Sequence
  Synthetic oligonucleotide
ccatgaatcgctaggtttcacttagaccgt

SEQ ID NO: 260567 - DNA, 30 bp, Artificial Sequence
  Synthetic oligonucleotide
tacgacagtgcgtgtgcttttaatgaccgt

SEQ ID NO: 260568 - DNA, 30 bp, Artificial Sequence
  Synthetic oligonucleotide
tcgagtaattggccagtcgaggctgaccgt

SEQ ID NO: 260569 - DNA, 30 bp, Artificial Sequence
  Synthetic oligonucleotide
gtttcaatccgtgggcatttacactaccgt

SEQ ID NO: 260570 - DNA, 30 bp, Artificial Sequence
  Synthetic oligonucleotide
aagttcagagaatatgcttataagtaccgt

SEQ ID NO: 260571 - DNA, 30 bp, Artificial Sequence
  Synthetic oligonucleotide
tttggaacccccctttgctccgtgtaccgt

SEQ ID NO: 260572 - DNA, 30 bp, Artificial Sequence
  Synthetic oligonucleotide
cgatgactcagcagtgccgaaagttaccgt

SEQ ID NO: 260573 - DNA, 30 bp, Artificial Sequence
  Synthetic oligonucleotide
catcgggcgataaacacctcgggttaccgt

SEQ ID NO: 260574 - DNA, 30 bp, Artificial Sequence
  Synthetic oligonucleotide
atacgagtctcgtaacgaaatgtaacccgt

SEQ ID NO: 260575 - DNA, 30 bp, Artificial Sequence
  Synthetic oligonucleotide
atgccctcatgatacgtacagactacccgt

SEQ ID NO: 260576 - DNA, 30 bp, Artificial Sequence
  Synthetic oligonucleotide
ctcggggtgccagggccataccctacccgt

SEQ ID NO: 260577 - DNA, 30 bp, Artificial Sequence
  Synthetic oligonucleotide
tattatatacgggcaagcgcaaacccccgt

SEQ ID NO: 260578 - DNA, 30 bp, Artificial Sequence
  Synthetic oligonucleotide
gtgccacggctcatgagcaacgaagcccgt

SEQ ID NO: 260579 - DNA, 30 bp, Artificial Sequence
  Synthetic oligonucleotide
gggagctatcgtaacggttcctcagcccgt

SEQ ID NO: 260580 - DNA, 30 bp, Artificial Sequence
  Synthetic oligonucleotide
gctcctcgcggagagttacgtaaatcccgt

SEQ ID NO: 260581 - DNA, 30 bp, Artificial Sequence
  Synthetic oligonucleotide
ctcacgaagtaccgccgtagtgtgtcccgt

SEQ ID NO: 260582 - DNA, 30 bp, Artificial Sequence
  Synthetic oligonucleotide
acccatagacaatccgttactccttcccgt

SEQ ID NO: 260583 - DNA, 30 bp, Artificial Sequence
  Synthetic oligonucleotide
caccggataggtccgtcctcagacagccgt

SEQ ID NO: 260584 - DNA, 30 bp, Artificial Sequence
  Synthetic oligonucleotide
ggaacgtctacgctttaagacaagagccgt

SEQ ID NO: 260585 - DNA, 30 bp, Artificial Sequence
  Synthetic oligonucleotide
gaagcattaacattcctcggttagagccgt

SEQ ID NO: 260586 - DNA, 30 bp, Artificial Sequence
  Synthetic oligonucleotide
aaggcagctgaaggagtacgagctagccgt

SEQ ID NO: 260587 - DNA, 30 bp, Artificial Sequence
  Synthetic oligonucleotide
tccatactcttcgactaagccgaacgccgt

SEQ ID NO: 260588 - DNA, 30 bp, Artificial Sequence
  Synthetic oligonucleotide
aaaacaacggttgtccagtattcacgccgt

SEQ ID NO: 260589 - DNA, 30 bp, Artificial Sequence
  Synthetic oligonucleotide
gcacgtgtttctccggaaaactcgcgccgt

SEQ ID NO: 260590 - DNA, 30 bp, Artificial Sequence
  Synthetic oligonucleotide
gaactataggcatacactgttcatcgccgt

SEQ ID NO: 260591 - DNA, 30 bp, Artificial Sequence
  Synthetic oligonucleotide
agttcataggtaatgtattagtggggccgt

SEQ ID NO: 260592 - DNA, 30 bp, Artificial Sequence
  Synthetic oligonucleotide
cagggatccttactgatggtacctggccgt

SEQ ID NO: 260593 - DNA, 30 bp, Artificial Sequence
  Synthetic oligonucleotide
tgctccaattgtcaaatcggctcatgccgt

SEQ ID NO: 260594 - DNA, 30 bp, Artificial Sequence
  Synthetic oligonucleotide
cgacgcgtggagcgcttctggggatgccgt

SEQ ID NO: 260595 - DNA, 30 bp, Artificial Sequence
  Synthetic oligonucleotide
acacagcatctagactaactgggctgccgt

SEQ ID NO: 260596 - DNA, 30 bp, Artificial Sequence
  Synthetic oligonucleotide
ttcgcgatagcagcgacttgggcaatccgt

SEQ ID NO: 260597 - DNA, 30 bp, Artificial Sequence
  Synthetic oligonucleotide
aggtgagaagttatcagccgttagatccgt

SEQ ID NO: 260598 - DNA, 30 bp, Artificial Sequence
  Synthetic oligonucleotide
tgtgaaacaacccgatgcgaacatatccgt

SEQ ID NO: 260599 - DNA, 30 bp, Artificial Sequence
  Synthetic oligonucleotide
ttgccatcgctgaggatagagcatatccgt

SEQ ID NO: 260600 - DNA, 30 bp, Artificial Sequence
  Synthetic oligonucleotide
gttgtcaggaagtagggcgacggactccgt

SEQ ID NO: 260601 - DNA, 30 bp, Artificial Sequence
  Synthetic oligonucleotide
ttcgtaactatgaacatattgaacctccgt

SEQ ID NO: 260602 - DNA, 30 bp, Artificial Sequence
  Synthetic oligonucleotide
aaagatgagaaatatcaccacatcctccgt

SEQ ID NO: 260603 - DNA, 30 bp, Artificial Sequence
  Synthetic oligonucleotide
cagctactggcagtaataagaaggctccgt

SEQ ID NO: 260604 - DNA, 30 bp, Artificial Sequence
  Synthetic oligonucleotide
ggcagacgggtagcggtggtgtctctccgt

SEQ ID NO: 260605 - DNA, 30 bp, Artificial Sequence
  Synthetic oligonucleotide
ggagctacatgataatacaagggtctccgt

SEQ ID NO: 260606 - DNA, 30 bp, Artificial Sequence
  Synthetic oligonucleotide
ggcacgtatgcacagtaaagctttctccgt

SEQ ID NO: 260607 - DNA, 30 bp, Artificial Sequence
  Synthetic oligonucleotide
ctaagagaaacttgttttcagcaagtccgt

SEQ ID NO: 260608 - DNA, 30 bp, Artificial Sequence
  Synthetic oligonucleotide
tttcgaatggtgagtccggagccattccgt

SEQ ID NO: 260609 - DNA, 30 bp, Artificial Sequence
  Synthetic oligonucleotide
gagcgcgctgtacgccgtataggattccgt

SEQ ID NO: 260610 - DNA, 30 bp, Artificial Sequence
  Synthetic oligonucleotide
tgatagaggtaagccctgcgtctcttccgt

SEQ ID NO: 260611 - DNA, 30 bp, Artificial Sequence
  Synthetic oligonucleotide
ccccgagtagtgaaattgatctcgttccgt

SEQ ID NO: 260612 - DNA, 30 bp, Artificial Sequence
  Synthetic oligonucleotide
ctacgaaagtggaagcagcactctttccgt

SEQ ID NO: 260613 - DNA, 30 bp, Artificial Sequence
  Synthetic oligonucleotide
agaataaccctgttacccccaaaaaagcgt

SEQ ID NO: 260614 - DNA, 30 bp, Artificial Sequence
  Synthetic oligonucleotide
gaccttccctaatacctaccgcaaaagcgt

SEQ ID NO: 260615 - DNA, 30 bp, Artificial Sequence
  Synthetic oligonucleotide
atatgagtgacctttcaagctgcaaagcgt

SEQ ID NO: 260616 - DNA, 30 bp, Artificial Sequence
  Synthetic oligonucleotide
tgaaaggatgactaatactacaacaagcgt

SEQ ID NO: 260617 - DNA, 30 bp, Artificial Sequence
  Synthetic oligonucleotide
gcaagcgataatcgcgtaaaccccaagcgt

SEQ ID NO: 260618 - DNA, 30 bp, Artificial Sequence
  Synthetic oligonucleotide
tgtccgagggaaccgtaaggtatcaagcgt

SEQ ID NO: 260619 - DNA, 30 bp, Artificial Sequence
  Synthetic oligonucleotide
atggctaagtttttagtgtaggcgaagcgt

SEQ ID NO: 260620 - DNA, 30 bp, Artificial Sequence
  Synthetic oligonucleotide
tccagtcgtaagtgcgttgtaaataagcgt

SEQ ID NO: 260621 - DNA, 30 bp, Artificial Sequence
  Synthetic oligonucleotide
ccagggtgctaacgtagatgtcttaagcgt

SEQ ID NO: 260622 - DNA, 30 bp, Artificial Sequence
  Synthetic oligonucleotide
tacgaattgaagggctcagattcacagcgt

SEQ ID NO: 260623 - DNA, 30 bp, Artificial Sequence
  Synthetic oligonucleotide
ggcagagatttaaaaaaagtagaccagcgt

SEQ ID NO: 260624 - DNA, 30 bp, Artificial Sequence
  Synthetic oligonucleotide
agtaaggcatctcgtcgatcttggcagcgt

SEQ ID NO: 260625 - DNA, 30 bp, Artificial Sequence
  Synthetic oligonucleotide
aacatctccttggacgtagtgggtcagcgt

SEQ ID NO: 260626 - DNA, 30 bp, Artificial Sequence
  Synthetic oligonucleotide
ctacgaccagcgtgtttcacgatagagcgt

SEQ ID NO: 260627 - DNA, 30 bp, Artificial Sequence
  Synthetic oligonucleotide
agcccctgatggccagccatagctgagcgt

SEQ ID NO: 260628 - DNA, 30 bp, Artificial Sequence
  Synthetic oligonucleotide
gggtccccccgccgtacggagcgtgagcgt

SEQ ID NO: 260629 - DNA, 30 bp, Artificial Sequence
  Synthetic oligonucleotide
ccacataattacggtaatttacaatagcgt

SEQ ID NO: 260630 - DNA, 30 bp, Artificial Sequence
  Synthetic oligonucleotide
atagatcaatacactggagctctctagcgt

SEQ ID NO: 260631 - DNA, 30 bp, Artificial Sequence
  Synthetic oligonucleotide
ttgaccactatctggtcggcgtattagcgt

SEQ ID NO: 260632 - DNA, 30 bp, Artificial Sequence
  Synthetic oligonucleotide
cacacggggcccttaaaattaaacacgcgt

SEQ ID NO: 260633 - DNA, 30 bp, Artificial Sequence
  Synthetic oligonucleotide
gtgtggattgcaatccgcacaccaccgcgt

SEQ ID NO: 260634 - DNA, 30 bp, Artificial Sequence
  Synthetic oligonucleotide
gcttagggggtataacaagcgcttccgcgt

SEQ ID NO: 260635 - DNA, 30 bp, Artificial Sequence
  Synthetic oligonucleotide
caaatatataggaactattgcgaagcgcgt

SEQ ID NO: 260636 - DNA, 30 bp, Artificial Sequence
  Synthetic oligonucleotide
ggaagttaaggccgctatcgagccgcgcgt

SEQ ID NO: 260637 - DNA, 30 bp, Artificial Sequence
  Synthetic oligonucleotide
ggtctggactgtgaacatactaaggcgcgt

SEQ ID NO: 260638 - DNA, 30 bp, Artificial Sequence
  Synthetic oligonucleotide
gaatggaacattattactattctggcgcgt

SEQ ID NO: 260639 - DNA, 30 bp, Artificial Sequence
  Synthetic oligonucleotide
ttgcatactagatatgcgttcgaatcgcgt

SEQ ID NO: 260640 - DNA, 30 bp, Artificial Sequence
  Synthetic oligonucleotide
atggcctgccgttaaatgcggggatcgcgt

SEQ ID NO: 260641 - DNA, 30 bp, Artificial Sequence
  Synthetic oligonucleotide
tacaggattggtccggggattgactcgcgt

SEQ ID NO: 260642 - DNA, 30 bp, Artificial Sequence
  Synthetic oligonucleotide
ctggacagcttttggtgtatcaggtcgcgt

SEQ ID NO: 260643 - DNA, 30 bp, Artificial Sequence
  Synthetic oligonucleotide
aagacgtgacgagaccagtacaattcgcgt

SEQ ID NO: 260644 - DNA, 30 bp, Artificial Sequence
  Synthetic oligonucleotide
ttgcgacagagaaaggagagctcttcgcgt

SEQ ID NO: 260645 - DNA, 30 bp, Artificial Sequence
  Synthetic oligonucleotide
ctatagtctcgccgaactatgatttcgcgt

SEQ ID NO: 260646 - DNA, 30 bp, Artificial Sequence
  Synthetic oligonucleotide
agtacgaaatggcggtgcgcatgaaggcgt

SEQ ID NO: 260647 - DNA, 30 bp, Artificial Sequence
  Synthetic oligonucleotide
cgggccgaccaacaccggccttgaaggcgt

SEQ ID NO: 260648 - DNA, 30 bp, Artificial Sequence
  Synthetic oligonucleotide
gattgctggcgtatccggtgggacaggcgt

SEQ ID NO: 260649 - DNA, 30 bp, Artificial Sequence
  Synthetic oligonucleotide
aggccgggctacgaagtctcaaagaggcgt

SEQ ID NO: 260650 - DNA, 30 bp, Artificial Sequence
  Synthetic oligonucleotide
gtagactggcgattgatcggacagaggcgt

SEQ ID NO: 260651 - DNA, 30 bp, Artificial Sequence
  Synthetic oligonucleotide
ttgcattgtctatcctgattgcagaggcgt

SEQ ID NO: 260652 - DNA, 30 bp, Artificial Sequence
  Synthetic oligonucleotide
ttattgaaaaagcgcgaaagaattaggcgt

SEQ ID NO: 260653 - DNA, 30 bp, Artificial Sequence
  Synthetic oligonucleotide
cgacctaagcaaagatcgttaattaggcgt

SEQ ID NO: 260654 - DNA, 30 bp, Artificial Sequence
  Synthetic oligonucleotide
ctatggggattgggacgtgtttcacggcgt

SEQ ID NO: 260655 - DNA, 30 bp, Artificial Sequence
  Synthetic oligonucleotide
gatacagtatgggcaaactatgcgcggcgt

SEQ ID NO: 260656 - DNA, 30 bp, Artificial Sequence
  Synthetic oligonucleotide
ttgggtgaagaaaggaaaaaagcagggcgt

SEQ ID NO: 260657 - DNA, 30 bp, Artificial Sequence
  Synthetic oligonucleotide
gtgtcaagcaagcaaagcgactgggggcgt

SEQ ID NO: 260658 - DNA, 35 bp, Artificial Sequence
  Synthetic oligonucleotide
atcgtggtgtggggtagtggtgaggggtggggcgt

SEQ ID NO: 260659 - DNA, 30 bp, Artificial Sequence
  Synthetic oligonucleotide
tagcccggacccgaatttagtcaatggcgt

SEQ ID NO: 260660 - DNA, 30 bp, Artificial Sequence
  Synthetic oligonucleotide
tcggcgcacgctacagtaatcccttggcgt

SEQ ID NO: 260661 - DNA, 30 bp, Artificial Sequence
  Synthetic oligonucleotide
gagccatcatgttaggtgtgcttttggcgt

SEQ ID NO: 260662 - DNA, 30 bp, Artificial Sequence
  Synthetic oligonucleotide
aatagtgtggaggatacaatgtctatgcgt

SEQ ID NO: 260663 - DNA, 30 bp, Artificial Sequence
  Synthetic oligonucleotide
ggtgcctgatatagaggttcgtttatgcgt

SEQ ID NO: 260664 - DNA, 30 bp, Artificial Sequence
  Synthetic oligonucleotide
tcaattcgtgcaacttgaattgagctgcgt

SEQ ID NO: 260665 - DNA, 30 bp, Artificial Sequence
  Synthetic oligonucleotide
tggtcgcatcaccgatttacaaggctgcgt

SEQ ID NO: 260666 - DNA, 30 bp, Artificial Sequence
  Synthetic oligonucleotide
ctgcgatgggggcaagacgtgcggctgcgt

SEQ ID NO: 260667 - DNA, 30 bp, Artificial Sequence
  Synthetic oligonucleotide
ctaatgggaatgcgtcatgcatatctgcgt

SEQ ID NO: 260668 - DNA, 30 bp, Artificial Sequence
  Synthetic oligonucleotide
acttagaaaatggagagtgacctagtgcgt

SEQ ID NO: 260669 - DNA, 30 bp, Artificial Sequence
  Synthetic oligonucleotide
gagcggtagttgcgatctttgttcgtgcgt

SEQ ID NO: 260670 - DNA, 30 bp, Artificial Sequence
  Synthetic oligonucleotide
tgcctaggatatttgatgctgggggtgcgt

SEQ ID NO: 260671 - DNA, 30 bp, Artificial Sequence
  Synthetic oligonucleotide
aacattgggtcacctcggtcggcattgcgt

SEQ ID NO: 260672 - DNA, 30 bp, Artificial Sequence
  Synthetic oligonucleotide
tcgtctcgtgtcctcccgaaagacttgcgt

SEQ ID NO: 260673 - DNA, 30 bp, Artificial Sequence
  Synthetic oligonucleotide
ttctgaatcatgaaacccttccccttgcgt

SEQ ID NO: 260674 - DNA, 30 bp, Artificial Sequence
  Synthetic oligonucleotide
cgtttattttgcattgaagctgaaaatcgt

SEQ ID NO: 260675 - DNA, 30 bp, Artificial Sequence
  Synthetic oligonucleotide
acgtaacacgtttacgcagaaatcaatcgt

SEQ ID NO: 260676 - DNA, 30 bp, Artificial Sequence
  Synthetic oligonucleotide
ttataggggggaacatacaacaagaatcgt

SEQ ID NO: 260677 - DNA, 30 bp, Artificial Sequence
  Synthetic oligonucleotide
acgccttttactggtgagcgtcagaatcgt

SEQ ID NO: 260678 - DNA, 30 bp, Artificial Sequence
  Synthetic oligonucleotide
tcacggatttccaatacatctgagaatcgt

SEQ ID NO: 260679 - DNA, 30 bp, Artificial Sequence
  Synthetic oligonucleotide
gttgtctcagcaaggacgaggtgtaatcgt

SEQ ID NO: 260680 - DNA, 30 bp, Artificial Sequence
  Synthetic oligonucleotide
cctcgcaatagaatgtggacacaacatcgt

SEQ ID NO: 260681 - DNA, 30 bp, Artificial Sequence
  Synthetic oligonucleotide
ggagagaaagcgttgcaaccggaacatcgt

SEQ ID NO: 260682 - DNA, 30 bp, Artificial Sequence
  Synthetic oligonucleotide
gaggatcggggccccataagtgaccatcgt

SEQ ID NO: 260683 - DNA, 30 bp, Artificial Sequence
  Synthetic oligonucleotide
ggatactaaaagaagtccaccacccatcgt

SEQ ID NO: 260684 - DNA, 30 bp, Artificial Sequence
  Synthetic oligonucleotide
gaggattatcgctgaagtattgcccatcgt

SEQ ID NO: 260685 - DNA, 30 bp, Artificial Sequence
  Synthetic oligonucleotide
gtgttagaacaggtggacagtggccatcgt

SEQ ID NO: 260686 - DNA, 30 bp, Artificial Sequence
  Synthetic oligonucleotide
gccggacagtgggtaatacctaagcatcgt

SEQ ID NO: 260687 - DNA, 30 bp, Artificial Sequence
  Synthetic oligonucleotide
catcgattgcgtgattgtatcatgcatcgt

SEQ ID NO: 260688 - DNA, 30 bp, Artificial Sequence
  Synthetic oligonucleotide
aattaactcttgtggaataaattgcatcgt

SEQ ID NO: 260689 - DNA, 30 bp, Artificial Sequence
  Synthetic oligonucleotide
aaaaggctaacgtcgtaacacggtcatcgt

SEQ ID NO: 260690 - DNA, 30 bp, Artificial Sequence
  Synthetic oligonucleotide
cggctccggcgtagcgcccgtctcgatcgt

SEQ ID NO: 260691 - DNA, 30 bp, Artificial Sequence
  Synthetic oligonucleotide
agataaccataatggtaattaggtgatcgt

SEQ ID NO: 260692 - DNA, 30 bp, Artificial Sequence
  Synthetic oligonucleotide
gctagtcagttgaattaatgtcgatatcgt

SEQ ID NO: 260693 - DNA, 30 bp, Artificial Sequence
  Synthetic oligonucleotide
gaccagtggtcgagtgctccgcggtatcgt

SEQ ID NO: 260694 - DNA, 30 bp, Artificial Sequence
  Synthetic oligonucleotide
atgtacagaactccgaagctgttgtatcgt

SEQ ID NO: 260695 - DNA, 30 bp, Artificial Sequence
  Synthetic oligonucleotide
agggaccacttcttaataattaacactcgt

SEQ ID NO: 260696 - DNA, 30 bp, Artificial Sequence
  Synthetic oligonucleotide
cggaatagcacattcactcataatactcgt

SEQ ID NO: 260697 - DNA, 30 bp, Artificial Sequence
  Synthetic oligonucleotide
ctagtgggtagtgtctgtcggattactcgt

SEQ ID NO: 260698 - DNA, 30 bp, Artificial Sequence
  Synthetic oligonucleotide
aacaataactaagaatctctgcgccctcgt

SEQ ID NO: 260699 - DNA, 30 bp, Artificial Sequence
  Synthetic oligonucleotide
tattcgcaccgctcacataccgtccctcgt

SEQ ID NO: 260700 - DNA, 30 bp, Artificial Sequence
  Synthetic oligonucleotide
tccttcaggtatagaaatctgtagcctcgt

SEQ ID NO: 260701 - DNA, 30 bp, Artificial Sequence
  Synthetic oligonucleotide
acactgtagctttaagctcataatcctcgt

SEQ ID NO: 260702 - DNA, 30 bp, Artificial Sequence
  Synthetic oligonucleotide
gggtaaccacgatgcaagggtgttcctcgt

SEQ ID NO: 260703 - DNA, 25 bp, Artificial Sequence
  Synthetic oligonucleotide
tacttgtgcacggtacccggctcgt

SEQ ID NO: 260704 - DNA, 30 bp, Artificial Sequence
  Synthetic oligonucleotide
ttcggtcgtcagccttgcaagattgctcgt

SEQ ID NO: 260705 - DNA, 30 bp, Artificial Sequence
  Synthetic oligonucleotide
ttgtgcgccggctaatagtcttttgctcgt

SEQ ID NO: 260706 - DNA, 30 bp, Artificial Sequence
  Synthetic oligonucleotide
agcatgagcgccgaaggattaatgtctcgt

SEQ ID NO: 260707 - DNA, 30 bp, Artificial Sequence
  Synthetic oligonucleotide
agattgcaaaaggggagacactcttctcgt

SEQ ID NO: 260708 - DNA, 30 bp, Artificial Sequence
  Synthetic oligonucleotide
ctcatcaccgcccgtagcgtatgaagtcgt

SEQ ID NO: 260709 - DNA, 30 bp, Artificial Sequence
  Synthetic oligonucleotide
ggttctcggtcaaagcgcaggttgagtcgt

SEQ ID NO: 260710 - DNA, 30 bp, Artificial Sequence
  Synthetic oligonucleotide
gcctttttcgaacctgaactccgtagtcgt

SEQ ID NO: 260711 - DNA, 30 bp, Artificial Sequence
  Synthetic oligonucleotide
gccggattgtaatagtctaaaacacgtcgt

SEQ ID NO: 260712 - DNA, 30 bp, Artificial Sequence
  Synthetic oligonucleotide
aactcacgattggtgcagtgttgacgtcgt

SEQ ID NO: 260713 - DNA, 30 bp, Artificial Sequence
  Synthetic oligonucleotide
tgattaactctagtctcatacgcgcgtcgt

SEQ ID NO: 260714 - DNA, 30 bp, Artificial Sequence
  Synthetic oligonucleotide
gcgacgagtgctaactaaattaaaggtcgt

SEQ ID NO: 260715 - DNA, 30 bp, Artificial Sequence
  Synthetic oligonucleotide
gctataaggaatggatatccgtgaggtcgt

SEQ ID NO: 260716 - DNA, 30 bp, Artificial Sequence
  Synthetic oligonucleotide
tagtcttgaatcagctcatccctaggtcgt

SEQ ID NO: 260717 - DNA, 30 bp, Artificial Sequence
  Synthetic oligonucleotide
ataggactacacaacgttgggtacggtcgt

SEQ ID NO: 260718 - DNA, 30 bp, Artificial Sequence
  Synthetic oligonucleotide
atagtcagagggtagacgtcattcggtcgt

SEQ ID NO: 260719 - DNA, 30 bp, Artificial Sequence
  Synthetic oligonucleotide
agtaatagcggtcttagacacttcggtcgt

SEQ ID NO: 260720 - DNA, 30 bp, Artificial Sequence
  Synthetic oligonucleotide
tacactcattcagaagtaggcccgggtcgt

SEQ ID NO: 260721 - DNA, 30 bp, Artificial Sequence
  Synthetic oligonucleotide
gaatagggttaaaggcgaatctaatgtcgt

SEQ ID NO: 260722 - DNA, 30 bp, Artificial Sequence
  Synthetic oligonucleotide
ctaacacttcttcatccaagaggatgtcgt

SEQ ID NO: 260723 - DNA, 30 bp, Artificial Sequence
  Synthetic oligonucleotide
gacttactatgcctaacactgacctgtcgt

SEQ ID NO: 260724 - DNA, 30 bp, Artificial Sequence
  Synthetic oligonucleotide
ataacgcttcttcggaaaacagcgtgtcgt

SEQ ID NO: 260725 - DNA, 30 bp, Artificial Sequence
  Synthetic oligonucleotide
tacggattacaatccggggatgcttgtcgt

SEQ ID NO: 260726 - DNA, 30 bp, Artificial Sequence
  Synthetic oligonucleotide
ttctggaaactgtcaagtcagcgttgtcgt

SEQ ID NO: 260727 - DNA, 30 bp, Artificial Sequence
  Synthetic oligonucleotide
ccgtctagccaccaggcattccggattcgt

SEQ ID NO: 260728 - DNA, 30 bp, Artificial Sequence
  Synthetic oligonucleotide
gttgcatcccttgcaggcctagctattcgt

SEQ ID NO: 260729 - DNA, 30 bp, Artificial Sequence
  Synthetic oligonucleotide
gcagataagtgcttggaggcacgtattcgt

SEQ ID NO: 260730 - DNA, 30 bp, Artificial Sequence
  Synthetic oligonucleotide
aaggtcgtgggttgaaaaattgtacttcgt

SEQ ID NO: 260731 - DNA, 30 bp, Artificial Sequence
  Synthetic oligonucleotide
cgggtcgccggtgacacttggcgagttcgt

SEQ ID NO: 260732 - DNA, 30 bp, Artificial Sequence
  Synthetic oligonucleotide
tgcttaaaaaagacatccatgtgagttcgt

SEQ ID NO: 260733 - DNA, 30 bp, Artificial Sequence
  Synthetic oligonucleotide
taattagggaccgaattattgtgagttcgt

SEQ ID NO: 260734 - DNA, 30 bp, Artificial Sequence
  Synthetic oligonucleotide
gacgctttcagccgggtcttgtgagttcgt

SEQ ID NO: 260735 - DNA, 30 bp, Artificial Sequence
  Synthetic oligonucleotide
gttgcgaccttagtacctgccgccgttcgt

SEQ ID NO: 260736 - DNA, 30 bp, Artificial Sequence
  Synthetic oligonucleotide
agtgaacacctgtaaatcttctatgttcgt

SEQ ID NO: 260737 - DNA, 30 bp, Artificial Sequence
  Synthetic oligonucleotide
atcacgacctacatgttgttaggtgttcgt

SEQ ID NO: 260738 - DNA, 30 bp, Artificial Sequence
  Synthetic oligonucleotide
gccggcggatttaaccatccctaatttcgt

SEQ ID NO: 260739 - DNA, 30 bp, Artificial Sequence
  Synthetic oligonucleotide
ataggaatctccgactcatctagatttcgt

SEQ ID NO: 260740 - DNA, 30 bp, Artificial Sequence
  Synthetic oligonucleotide
ataaagtacttatgcaccggatactttcgt

SEQ ID NO: 260741 - DNA, 30 bp, Artificial Sequence
  Synthetic oligonucleotide
tcaaaggtgataatctgtagcataaaaggt

SEQ ID NO: 260742 - DNA, 30 bp, Artificial Sequence
  Synthetic oligonucleotide
gcagagctgttattaccgtaaaagaaaggt

SEQ ID NO: 260743 - DNA, 30 bp, Artificial Sequence
  Synthetic oligonucleotide
atgcaatcctaggtcagatcatcgaaaggt

SEQ ID NO: 260744 - DNA, 30 bp, Artificial Sequence
  Synthetic oligonucleotide
gcaacaaaggatgtcacgttggtgaaaggt

SEQ ID NO: 260745 - DNA, 30 bp, Artificial Sequence
  Synthetic oligonucleotide
ttgcaccactaagtggtctctagacaaggt

SEQ ID NO: 260746 - DNA, 30 bp, Artificial Sequence
  Synthetic oligonucleotide
acacgttgggggtcaatgaaatgacaaggt

SEQ ID NO: 260747 - DNA, 30 bp, Artificial Sequence
  Synthetic oligonucleotide
gggggtatgcatttaattccaggccaaggt

SEQ ID NO: 260748 - DNA, 30 bp, Artificial Sequence
  Synthetic oligonucleotide
atgcggtgttatccgtacagtatgcaaggt

SEQ ID NO: 260749 - DNA, 30 bp, Artificial Sequence
  Synthetic oligonucleotide
acagaggtttatcttcttgaatgtcaaggt

SEQ ID NO: 260750 - DNA, 30 bp, Artificial Sequence
  Synthetic oligonucleotide
ggaactttagacgaaggctgcgaagaaggt

SEQ ID NO: 260751 - DNA, 30 bp, Artificial Sequence
  Synthetic oligonucleotide
cagtgtaaccctcaaccttgatcagaaggt

SEQ ID NO: 260752 - DNA, 30 bp, Artificial Sequence
  Synthetic oligonucleotide
gtgaggactccaccaaagactcacgaaggt

SEQ ID NO: 260753 - DNA, 30 bp, Artificial Sequence
  Synthetic oligonucleotide
aagtccacatgatgcagttgttaggaaggt

SEQ ID NO: 260754 - DNA, 30 bp, Artificial Sequence
  Synthetic oligonucleotide
gaaggtcgacctcagtatctgagctaaggt

SEQ ID NO: 260755 - DNA, 30 bp, Artificial Sequence
  Synthetic oligonucleotide
ggggtttggaagaaaggatttcgctaaggt

SEQ ID NO: 260756 - DNA, 30 bp, Artificial Sequence
  Synthetic oligonucleotide
tgcacgctgatgttgctatatttctaaggt

SEQ ID NO: 260757 - DNA, 30 bp, Artificial Sequence
  Synthetic oligonucleotide
aagacggatctggttcgacgaggaacaggt

SEQ ID NO: 260758 - DNA, 30 bp, Artificial Sequence
  Synthetic oligonucleotide
gtcggtttgaggtcgtgaccatcgacaggt

SEQ ID NO: 260759 - DNA, 30 bp, Artificial Sequence
  Synthetic oligonucleotide
ggaccaggaggagtaaggttcaggacaggt

SEQ ID NO: 260760 - DNA, 30 bp, Artificial Sequence
  Synthetic oligonucleotide
atgggtacccaacaaaacacgtatacaggt

SEQ ID NO: 260761 - DNA, 30 bp, Artificial Sequence
  Synthetic oligonucleotide
aggtgtcgtttgtcctttgagtttacaggt

SEQ ID NO: 260762 - DNA, 30 bp, Artificial Sequence
  Synthetic oligonucleotide
caatatataaaagctgatactctcccaggt

SEQ ID NO: 260763 - DNA, 30 bp, Artificial Sequence
  Synthetic oligonucleotide
gtcgctaggccccgagagttaaatccaggt

SEQ ID NO: 260764 - DNA, 30 bp, Artificial Sequence
  Synthetic oligonucleotide
atgctacagcaggactcggccgttccaggt

SEQ ID NO: 260765 - DNA, 30 bp, Artificial Sequence
  Synthetic oligonucleotide
gtggtctagtagacttcatcagaagcaggt

SEQ ID NO: 260766 - DNA, 30 bp, Artificial Sequence
  Synthetic oligonucleotide
taatctcactgggtcaaagctagggcaggt

SEQ ID NO: 260767 - DNA, 30 bp, Artificial Sequence
  Synthetic oligonucleotide
acccggtggagaatgctatcgggtgcaggt

SEQ ID NO: 260768 - DNA, 30 bp, Artificial Sequence
  Synthetic oligonucleotide
ggcattttcacatggtcacaggtatcaggt

SEQ ID NO: 260769 - DNA, 30 bp, Artificial Sequence
  Synthetic oligonucleotide
gctcgatacgtggttgacgacctctcaggt

SEQ ID NO: 260770 - DNA, 30 bp, Artificial Sequence
  Synthetic oligonucleotide
cagtttaaaacccgagaaccagtgtcaggt

SEQ ID NO: 260771 - DNA, 30 bp, Artificial Sequence
  Synthetic oligonucleotide
atcttcctggaggatagagggtgcagaggt

SEQ ID NO: 260772 - DNA, 30 bp, Artificial Sequence
  Synthetic oligonucleotide
aacgaatttgcatgtaaggatctgagaggt

SEQ ID NO: 260773 - DNA, 30 bp, Artificial Sequence
  Synthetic oligonucleotide
gtcagtgtacttcccgggacatatagaggt

SEQ ID NO: 260774 - DNA, 30 bp, Artificial Sequence
  Synthetic oligonucleotide
gatacaatcgcatacttatccgtacgaggt

SEQ ID NO: 260775 - DNA, 30 bp, Artificial Sequence
  Synthetic oligonucleotide
gtggagccgctgcttcatgatttccgaggt

SEQ ID NO: 260776 - DNA, 30 bp, Artificial Sequence
  Synthetic oligonucleotide
gaccagtgtttggttccccatatgcgaggt

SEQ ID NO: 260777 - DNA, 30 bp, Artificial Sequence
  Synthetic oligonucleotide
tcccgggatatccccgttcaatttcgaggt

SEQ ID NO: 260778 - DNA, 30 bp, Artificial Sequence
  Synthetic oligonucleotide
cagatgccataaacgctttctataggaggt

SEQ ID NO: 260779 - DNA, 30 bp, Artificial Sequence
  Synthetic oligonucleotide
aatctaaggatttaagcacaccccggaggt

SEQ ID NO: 260780 - DNA, 30 bp, Artificial Sequence
  Synthetic oligonucleotide
ttaatcacacgtgtggtaaattagggaggt

SEQ ID NO: 260781 - DNA, 30 bp, Artificial Sequence
  Synthetic oligonucleotide
cccagggagtaccattccgtgcatggaggt

SEQ ID NO: 260782 - DNA, 30 bp, Artificial Sequence
  Synthetic oligonucleotide
ttagtatagcggtatccaggtaaatgaggt

SEQ ID NO: 260783 - DNA, 30 bp, Artificial Sequence
  Synthetic oligonucleotide
tgtaatacctgatcgggcttagcatgaggt

SEQ ID NO: 260784 - DNA, 30 bp, Artificial Sequence
  Synthetic oligonucleotide
tccgacactcggtacactgaacgctgaggt

SEQ ID NO: 260785 - DNA, 30 bp, Artificial Sequence
  Synthetic oligonucleotide
tgtaagtgtcaaggtcaaaatcgctgaggt

SEQ ID NO: 260786 - DNA, 30 bp, Artificial Sequence
  Synthetic oligonucleotide
cgataaccgactgagctaccggtctgaggt

SEQ ID NO: 260787 - DNA, 30 bp, Artificial Sequence
  Synthetic oligonucleotide
taatcggtggggttttccagtacgtgaggt

SEQ ID NO: 260788 - DNA, 30 bp, Artificial Sequence
  Synthetic oligonucleotide
aacgcatggggttggccagtttggtgaggt

SEQ ID NO: 260789 - DNA, 30 bp, Artificial Sequence
  Synthetic oligonucleotide
gcaccatacacaatcaacatagattgaggt

SEQ ID NO: 260790 - DNA, 30 bp, Artificial Sequence
  Synthetic oligonucleotide
aagcaacgggaccggtgtataaaaataggt

SEQ ID NO: 260791 - DNA, 30 bp, Artificial Sequence
  Synthetic oligonucleotide
gcgtctctatgtacctatgagaacataggt

SEQ ID NO: 260792 - DNA, 30 bp, Artificial Sequence
  Synthetic oligonucleotide
agcggcgaagcttgaaccatattcataggt

SEQ ID NO: 260793 - DNA, 30 bp, Artificial Sequence
  Synthetic oligonucleotide
tgcctaaagcccaacggggtcacgataggt

SEQ ID NO: 260794 - DNA, 30 bp, Artificial Sequence
  Synthetic oligonucleotide
ggcctgggaggagcgcaactgccgataggt

SEQ ID NO: 260795 - DNA, 30 bp, Artificial Sequence
  Synthetic oligonucleotide
actcgacagatgtcaagtccccttataggt

SEQ ID NO: 260796 - DNA, 30 bp, Artificial Sequence
  Synthetic oligonucleotide
ttgaggaaccgggtagagtccgttataggt

SEQ ID NO: 260797 - DNA, 30 bp, Artificial Sequence
  Synthetic oligonucleotide
agagcgaaacacaagccaaacgccctaggt

SEQ ID NO: 260798 - DNA, 30 bp, Artificial Sequence
  Synthetic oligonucleotide
accctgaaaaatcagcgagtatggctaggt

SEQ ID NO: 260799 - DNA, 30 bp, Artificial Sequence
  Synthetic oligonucleotide
tctcttgatgctacaggtcgggtagtaggt

SEQ ID NO: 260800 - DNA, 30 bp, Artificial Sequence
  Synthetic oligonucleotide
aatgagcttgcgtttaagttagaggtaggt

SEQ ID NO: 260801 - DNA, 30 bp, Artificial Sequence
  Synthetic oligonucleotide
gcagggctattacattgattcggtgtaggt

SEQ ID NO: 260802 - DNA, 30 bp, Artificial Sequence
  Synthetic oligonucleotide
aagcagcaatgcaatgtcgttagattaggt

SEQ ID NO: 260803 - DNA, 30 bp, Artificial Sequence
  Synthetic oligonucleotide
ggtcccgtcaccggcctaatgaccttaggt

SEQ ID NO: 260804 - DNA, 30 bp, Artificial Sequence
  Synthetic oligonucleotide
cgagaagtttccccgggaatccagttaggt

SEQ ID NO: 260805 - DNA, 30 bp, Artificial Sequence
  Synthetic oligonucleotide
acagcggtctctcacttgataatgttaggt

SEQ ID NO: 260806 - DNA, 30 bp, Artificial Sequence
  Synthetic oligonucleotide
cgtgcagatcattaatgtgtggttttaggt

SEQ ID NO: 260807 - DNA, 30 bp, Artificial Sequence
  Synthetic oligonucleotide
tgctttgtactcaaaagaatgggaaacggt

SEQ ID NO: 260808 - DNA, 30 bp, Artificial Sequence
  Synthetic oligonucleotide
tcttgggaagagcaggatagggtaaacggt

SEQ ID NO: 260809 - DNA, 30 bp, Artificial Sequence
  Synthetic oligonucleotide
aagtatatccgcaacgatttactcaacggt

SEQ ID NO: 260810 - DNA, 30 bp, Artificial Sequence
  Synthetic oligonucleotide
gtacgtggcggatatgtcagatggaacggt

SEQ ID NO: 260811 - DNA, 30 bp, Artificial Sequence
  Synthetic oligonucleotide
ctggggtgcactaaagtatggcctaacggt

SEQ ID NO: 260812 - DNA, 30 bp, Artificial Sequence
  Synthetic oligonucleotide
gttacctcggagggctaaagtgaacacggt

SEQ ID NO: 260813 - DNA, 30 bp, Artificial Sequence
  Synthetic oligonucleotide
taggacattgttactattggcacacacggt

SEQ ID NO: 260814 - DNA, 30 bp, Artificial Sequence
  Synthetic oligonucleotide
cacttacggcagtaggcaggcatacacggt

SEQ ID NO: 260815 - DNA, 30 bp, Artificial Sequence
  Synthetic oligonucleotide
gtcaattaagatctataacaactgcacggt

SEQ ID NO: 260816 - DNA, 30 bp, Artificial Sequence
  Synthetic oligonucleotide
agcccgttttgattctcacctagggacggt

SEQ ID NO: 260817 - DNA, 30 bp, Artificial Sequence
  Synthetic oligonucleotide
tccgaaagatgtgtgtatgtcattgacggt

SEQ ID NO: 260818 - DNA, 30 bp, Artificial Sequence
  Synthetic oligonucleotide
aaggcggcttttagataacacacatacggt

SEQ ID NO: 260819 - DNA, 30 bp, Artificial Sequence
  Synthetic oligonucleotide
gatcagatgcgaatggttgatgcatacggt

SEQ ID NO: 260820 - DNA, 30 bp, Artificial Sequence
  Synthetic oligonucleotide
accgaattcatgcaggtcgggcgatacggt

SEQ ID NO: 260821 - DNA, 30 bp, Artificial Sequence
  Synthetic oligonucleotide
caagtatctgaggaactcagccactacggt

SEQ ID NO: 260822 - DNA, 30 bp, Artificial Sequence
  Synthetic oligonucleotide
atttggacaaatgtttggctaagctacggt

SEQ ID NO: 260823 - DNA, 31 bp, Artificial Sequence
  Synthetic oligonucleotide
ggagatctggatcagctatatcccgtacggt

SEQ ID NO: 260824 - DNA, 30 bp, Artificial Sequence
  Synthetic oligonucleotide
atgttagtcttcggagactaagcttacggt

SEQ ID NO: 260825 - DNA, 30 bp, Artificial Sequence
  Synthetic oligonucleotide
atgggatctttcaaagttattctttacggt

SEQ ID NO: 260826 - DNA, 30 bp, Artificial Sequence
  Synthetic oligonucleotide
tcggccataaggggatcctatgtcaccggt

SEQ ID NO: 260827 - DNA, 30 bp, Artificial Sequence
  Synthetic oligonucleotide
gcaccggagcaggtgggcagtgggaccggt

SEQ ID NO: 260828 - DNA, 30 bp, Artificial Sequence
  Synthetic oligonucleotide
tcaaaaagatagtctggtactcataccggt

SEQ ID NO: 260829 - DNA, 30 bp, Artificial Sequence
  Synthetic oligonucleotide
caagtactaggatgacgctagggtaccggt

SEQ ID NO: 260830 - DNA, 30 bp, Artificial Sequence
  Synthetic oligonucleotide
agagcctcatgcgatgatcagaaccccggt

SEQ ID NO: 260831 - DNA, 30 bp, Artificial Sequence
  Synthetic oligonucleotide
ttactttgagccgacaatttctgccccggt

SEQ ID NO: 260832 - DNA, 30 bp, Artificial Sequence
  Synthetic oligonucleotide
tcaactcccctcagccctggctggcccggt

SEQ ID NO: 260833 - DNA, 30 bp, Artificial Sequence
  Synthetic oligonucleotide
tatccgcgcccttgctggcaactgcccggt

SEQ ID NO: 260834 - DNA, 30 bp, Artificial Sequence
  Synthetic oligonucleotide
ttacgtgccatattgcctacgttgcccggt

SEQ ID NO: 260835 - DNA, 30 bp, Artificial Sequence
  Synthetic oligonucleotide
atccgatgacatctgtagggacctcccggt

SEQ ID NO: 260836 - DNA, 30 bp, Artificial Sequence
  Synthetic oligonucleotide
gcgagtcattcgtcatacgactcagccggt

SEQ ID NO: 260837 - DNA, 30 bp, Artificial Sequence
  Synthetic oligonucleotide
ttcgaatggtataatataacttcggccggt

SEQ ID NO: 260838 - DNA, 30 bp, Artificial Sequence
  Synthetic oligonucleotide
acatcatacgtcggaaagttatttgccggt

SEQ ID NO: 260839 - DNA, 30 bp, Artificial Sequence
  Synthetic oligonucleotide
cgatcggatgtacgcagtagggtaagcggt

SEQ ID NO: 260840 - DNA, 30 bp, Artificial Sequence
  Synthetic oligonucleotide
gtcaccatcgttgtcagtcagtacagcggt

SEQ ID NO: 260841 - DNA, 30 bp, Artificial Sequence
  Synthetic oligonucleotide
ggcccaacatccttgggtcgtgaacgcggt

SEQ ID NO: 260842 - DNA, 30 bp, Artificial Sequence
  Synthetic oligonucleotide
agaagttcatacatactcaaagcacgcggt

SEQ ID NO: 260843 - DNA, 30 bp, Artificial Sequence
  Synthetic oligonucleotide
aaagcgcaccccggatgagtcaagcgcggt

SEQ ID NO: 260844 - DNA, 30 bp, Artificial Sequence
  Synthetic oligonucleotide
gcaataaaagtcgacctgcgttcgcgcggt

SEQ ID NO: 260845 - DNA, 30 bp, Artificial Sequence
  Synthetic oligonucleotide
tcgcaaatctcagccagttctaggcgcggt

SEQ ID NO: 260846 - DNA, 30 bp, Artificial Sequence
  Synthetic oligonucleotide
aaaggcagctattctgtgacggttcgcggt

SEQ ID NO: 260847 - DNA, 29 bp, Artificial Sequence
  Synthetic oligonucleotide
tcttcggttaactggtagtaaacggcggt

SEQ ID NO: 260848 - DNA, 30 bp, Artificial Sequence
  Synthetic oligonucleotide
gatactccgagatgcattggagtgggcggt

SEQ ID NO: 260849 - DNA, 30 bp, Artificial Sequence
  Synthetic oligonucleotide
aataactctccgtagatcgtgttgggcggt

SEQ ID NO: 260850 - DNA, 30 bp, Artificial Sequence
  Synthetic oligonucleotide
taggcactggtacgcctgacggaatgcggt

SEQ ID NO: 260851 - DNA, 30 bp, Artificial Sequence
  Synthetic oligonucleotide
tgacaaggagaacccgtaatgagatgcggt

SEQ ID NO: 260852 - DNA, 30 bp, Artificial Sequence
  Synthetic oligonucleotide
tgaactaccacgaatcatggcatatgcggt

SEQ ID NO: 260853 - DNA, 30 bp, Artificial Sequence
  Synthetic oligonucleotide
tcacccgaagagacaaaggtgtcctgcggt

SEQ ID NO: 260854 - DNA, 30 bp, Artificial Sequence
  Synthetic oligonucleotide
atcaaactcatttcgaagcgaacttgcggt

SEQ ID NO: 260855 - DNA, 30 bp, Artificial Sequence
  Synthetic oligonucleotide
caatccccccttagagctgaccacatcggt

SEQ ID NO: 260856 - DNA, 30 bp, Artificial Sequence
  Synthetic oligonucleotide
gttcactcatacacacggccggacatcggt

SEQ ID NO: 260857 - DNA, 30 bp, Artificial Sequence
  Synthetic oligonucleotide
ttttagggaggggatcacgtaattatcggt

SEQ ID NO: 260858 - DNA, 30 bp, Artificial Sequence
  Synthetic oligonucleotide
tcagtacatttttgtaagagagtcctcggt

SEQ ID NO: 260859 - DNA, 30 bp, Artificial Sequence
  Synthetic oligonucleotide
gaattgctaccctagaacgaagtgctcggt

SEQ ID NO: 260860 - DNA, 30 bp, Artificial Sequence
  Synthetic oligonucleotide
ggccgactacgcgcactcgccgtgctcggt

SEQ ID NO: 260861 - DNA, 30 bp, Artificial Sequence
  Synthetic oligonucleotide
agcttgaaaggacgcgtatcttcagtcggt

SEQ ID NO: 260862 - DNA, 30 bp, Artificial Sequence
  Synthetic oligonucleotide
taaacggtcgcggaatgttagggagtcggt

SEQ ID NO: 260863 - DNA, 30 bp, Artificial Sequence
  Synthetic oligonucleotide
acagctgagcagcttgcatttcacgtcggt

SEQ ID NO: 260864 - DNA, 30 bp, Artificial Sequence
  Synthetic oligonucleotide
atgacctcacctttgacgaggcccgtcggt

SEQ ID NO: 260865 - DNA, 30 bp, Artificial Sequence
  Synthetic oligonucleotide
ttcacggtactcgtcgtgcgcgctgtcggt

SEQ ID NO: 260866 - DNA, 30 bp, Artificial Sequence
  Synthetic oligonucleotide
ttaagcgaaagaattgagtggtaattcggt

SEQ ID NO: 260867 - DNA, 30 bp, Artificial Sequence
  Synthetic oligonucleotide
ggtacgcacagtgatgggggtggattcggt

SEQ ID NO: 260868 - DNA, 30 bp, Artificial Sequence
  Synthetic oligonucleotide
taatagtgctttaatatgtaagccttcggt

SEQ ID NO: 260869 - DNA, 30 bp, Artificial Sequence
  Synthetic oligonucleotide
gtcaaaccgatatgtgaacacaggttcggt

SEQ ID NO: 260870 - DNA, 30 bp, Artificial Sequence
  Synthetic oligonucleotide
aatgagcgactctatgaataatgaaagggt

SEQ ID NO: 260871 - DNA, 30 bp, Artificial Sequence
  Synthetic oligonucleotide
gaggtgtacatgggcccggaactaaagggt

SEQ ID NO: 260872 - DNA, 30 bp, Artificial Sequence
  Synthetic oligonucleotide
ttgggatcagcgaaaagcgcggccaagggt

SEQ ID NO: 260873 - DNA, 30 bp, Artificial Sequence
  Synthetic oligonucleotide
gagacagccgagtgatgtcttactaagggt

SEQ ID NO: 260874 - DNA, 30 bp, Artificial Sequence
  Synthetic oligonucleotide
aaataaccattgaggatctcgtagcagggt

SEQ ID NO: 260875 - DNA, 30 bp, Artificial Sequence
  Synthetic oligonucleotide
agatactaagaggctgacttttatcagggt

SEQ ID NO: 260876 - DNA, 30 bp, Artificial Sequence
  Synthetic oligonucleotide
gagtccacttacataagagaacgtcagggt

SEQ ID NO: 260877 - DNA, 30 bp, Artificial Sequence
  Synthetic oligonucleotide
agtacttgcacagactgcaactgtcagggt

SEQ ID NO: 260878 - DNA, 30 bp, Artificial Sequence
  Synthetic oligonucleotide
atacctgtaggtggccgtgaatgagagggt

SEQ ID NO: 260879 - DNA, 30 bp, Artificial Sequence
  Synthetic oligonucleotide
cggtgcggtaaggaggggcgtcacgagggt

SEQ ID NO: 260880 - DNA, 30 bp, Artificial Sequence
  Synthetic oligonucleotide
cgtcattgcttagcggtcagcgacgagggt

SEQ ID NO: 260881 - DNA, 30 bp, Artificial Sequence
  Synthetic oligonucleotide
acggactcgcgtcaggcttttagcgagggt

SEQ ID NO: 260882 - DNA, 30 bp, Artificial Sequence
  Synthetic oligonucleotide
taacggcgactgcttaccatacaggagggt

SEQ ID NO: 260883 - DNA, 30 bp, Artificial Sequence
  Synthetic oligonucleotide
ccgctttaagagcaaactcagtaggagggt

SEQ ID NO: 260884 - DNA, 30 bp, Artificial Sequence
  Synthetic oligonucleotide
aaccagactcctcgtgcccccagggagggt

SEQ ID NO: 260885 - DNA, 30 bp, Artificial Sequence
  Synthetic oligonucleotide
ttgcggccagggtgtcggtaccatgagggt

SEQ ID NO: 260886 - DNA, 30 bp, Artificial Sequence
  Synthetic oligonucleotide
ccgtggatctaaaagatctacctatagggt

SEQ ID NO: 260887 - DNA, 30 bp, Artificial Sequence
  Synthetic oligonucleotide
ttgcggctgggtggagtatatgtatagggt

SEQ ID NO: 260888 - DNA, 30 bp, Artificial Sequence
  Synthetic oligonucleotide
tgtagaagaggattctctcactactagggt

SEQ ID NO: 260889 - DNA, 30 bp, Artificial Sequence
  Synthetic oligonucleotide
gagggtccgtagcccaccaaaagctagggt

SEQ ID NO: 260890 - DNA, 30 bp, Artificial Sequence
  Synthetic oligonucleotide
atataatttagcagcgtccccaagtagggt

SEQ ID NO: 260891 - DNA, 31 bp, Artificial Sequence
  Synthetic oligonucleotide
gggtcgaactcggactctcagataaacgggt

SEQ ID NO: 260892 - DNA, 30 bp, Artificial Sequence
  Synthetic oligonucleotide
ggtgggtaagccgcacatgtatatacgggt

SEQ ID NO: 260893 - DNA, 30 bp, Artificial Sequence
  Synthetic oligonucleotide
ccaggcagttcgcgtcaggggcgtacgggt

SEQ ID NO: 260894 - DNA, 30 bp, Artificial Sequence
  Synthetic oligonucleotide
tccgcccaaatggtttggagggaaccgggt

SEQ ID NO: 260895 - DNA, 30 bp, Artificial Sequence
  Synthetic oligonucleotide
tgttccgctgctacttaatttggaccgggt

SEQ ID NO: 260896 - DNA, 30 bp, Artificial Sequence
  Synthetic oligonucleotide
gcaatttcgacagtgaagggtttaccgggt

SEQ ID NO: 260897 - DNA, 30 bp, Artificial Sequence
  Synthetic oligonucleotide
gcaaggggtacgcaagatcataacccgggt

SEQ ID NO: 260898 - DNA, 30 bp, Artificial Sequence
  Synthetic oligonucleotide
agtgggcctccaacttggcagtacccgggt

SEQ ID NO: 260899 - DNA, 30 bp, Artificial Sequence
  Synthetic oligonucleotide
aagatctagagattggtcgacatcccgggt

SEQ ID NO: 260900 - DNA, 30 bp, Artificial Sequence
  Synthetic oligonucleotide
atggtacacccgatgatttcgaggccgggt

SEQ ID NO: 260901 - DNA, 30 bp, Artificial Sequence
  Synthetic oligonucleotide
taccagaataagcggggaccctgtccgggt

SEQ ID NO: 260902 - DNA, 30 bp, Artificial Sequence
  Synthetic oligonucleotide
aatggcgggtattagctgcataaagcgggt

SEQ ID NO: 260903 - DNA, 30 bp, Artificial Sequence
  Synthetic oligonucleotide
tcacgcagggtgacggttgaaggagcgggt

SEQ ID NO: 260904 - DNA, 30 bp, Artificial Sequence
  Synthetic oligonucleotide
ttatgaattcagtttggatgtaactcgggt

SEQ ID NO: 260905 - DNA, 30 bp, Artificial Sequence
  Synthetic oligonucleotide
cgcatccgtgaacacagagttccctcgggt

SEQ ID NO: 260906 - DNA, 30 bp, Artificial Sequence
  Synthetic oligonucleotide
ataccgagtgaaaaatcctcttagtcgggt

SEQ ID NO: 260907 - DNA, 30 bp, Artificial Sequence
  Synthetic oligonucleotide
gtaccaccctagattgtcgcggcttcgggt

SEQ ID NO: 260908 - DNA, 30 bp, Artificial Sequence
  Synthetic oligonucleotide
ggacgacggtaagctacggaatgttcgggt

SEQ ID NO: 260909 - DNA, 30 bp, Artificial Sequence
  Synthetic oligonucleotide
aagttggtcttgtttccatcgtgttcgggt

SEQ ID NO: 260910 - DNA, 30 bp, Artificial Sequence
  Synthetic oligonucleotide
tggcctcagtcattccatgttatttcgggt

SEQ ID NO: 260911 - DNA, 30 bp, Artificial Sequence
  Synthetic oligonucleotide
gagacgttaagtatccatggggaaaggggt

SEQ ID NO: 260912 - DNA, 30 bp, Artificial Sequence
  Synthetic oligonucleotide
acaatgaatcggcgggtacatgtaaggggt

SEQ ID NO: 260913 - DNA, 30 bp, Artificial Sequence
  Synthetic oligonucleotide
cggtgataggttggcatccgcggcaggggt

SEQ ID NO: 260914 - DNA, 30 bp, Artificial Sequence
  Synthetic oligonucleotide
tgtttgatcaatggaaatcatcagaggggt

SEQ ID NO: 260915 - DNA, 29 bp, Artificial Sequence
  Synthetic oligonucleotide
agcgccacttatggaatcaaacacggggt

SEQ ID NO: 260916 - DNA, 30 bp, Artificial Sequence
  Synthetic oligonucleotide
agatatccgacctcctacgagatgcggggt

SEQ ID NO: 260917 - DNA, 30 bp, Artificial Sequence
  Synthetic oligonucleotide
ggtatcatatatacgtttccgatgcggggt

SEQ ID NO: 260918 - DNA, 30 bp, Artificial Sequence
  Synthetic oligonucleotide
tttagcagaacgttgacgaggaatcggggt

SEQ ID NO: 260919 - DNA, 30 bp, Artificial Sequence
  Synthetic oligonucleotide
tatcgtggtaattcgcaaaatttagggggt

SEQ ID NO: 260920 - DNA, 30 bp, Artificial Sequence
  Synthetic oligonucleotide
ctagcacttgaacagctgcgcgaggggggt

SEQ ID NO: 260921 - DNA, 30 bp, Artificial Sequence
  Synthetic oligonucleotide
gtccgttagatgtcggtattgacggggggt

SEQ ID NO: 260922 - DNA, 30 bp, Artificial Sequence
  Synthetic oligonucleotide
caaattaagcactatgtattagtggggggt

SEQ ID NO: 260923 - DNA, 30 bp, Artificial Sequence
  Synthetic oligonucleotide
atatatatgtcaggtctcgcatatgggggt

SEQ ID NO: 260924 - DNA, 30 bp, Artificial Sequence
  Synthetic oligonucleotide
attcgtgtggttacggcaatataatggggt

SEQ ID NO: 260925 - DNA, 30 bp, Artificial Sequence
  Synthetic oligonucleotide
ggttgagtgtggacgcattggctctggggt

SEQ ID NO: 260926 - DNA, 30 bp, Artificial Sequence
  Synthetic oligonucleotide
ggcgtcaccagataccatcctccgtggggt

SEQ ID NO: 260927 - DNA, 30 bp, Artificial Sequence
  Synthetic oligonucleotide
accaatcgaaagagtaccgagcggtggggt

SEQ ID NO: 260928 - DNA, 30 bp, Artificial Sequence
  Synthetic oligonucleotide
ctagataaattctgtcttagccgaatgggt

SEQ ID NO: 260929 - DNA, 30 bp, Artificial Sequence
  Synthetic oligonucleotide
atagttcatacctctcgagaaaagatgggt

SEQ ID NO: 260930 - DNA, 30 bp, Artificial Sequence
  Synthetic oligonucleotide
ctctagcgtggcgccgtccaggtgatgggt

SEQ ID NO: 260931 - DNA, 30 bp, Artificial Sequence
  Synthetic oligonucleotide
gatccgcttcagcgccgtgctcaactgggt

SEQ ID NO: 260932 - DNA, 30 bp, Artificial Sequence
  Synthetic oligonucleotide
tcggcagcaccgtttatagggacactgggt

SEQ ID NO: 260933 - DNA, 30 bp, Artificial Sequence
  Synthetic oligonucleotide
cctacataaaggtaacgaccgccactgggt

SEQ ID NO: 260934 - DNA, 30 bp, Artificial Sequence
  Synthetic oligonucleotide
gcgtggccgtggatataatcgttcctgggt

SEQ ID NO: 260935 - DNA, 30 bp, Artificial Sequence
  Synthetic oligonucleotide
caatgataacacacgaaagttttcctgggt

SEQ ID NO: 260936 - DNA, 30 bp, Artificial Sequence
  Synthetic oligonucleotide
agtcacactcaatcctagggacaagtgggt

SEQ ID NO: 260937 - DNA, 30 bp, Artificial Sequence
  Synthetic oligonucleotide
agcagatatatgcgaagccttcaagtgggt

SEQ ID NO: 260938 - DNA, 30 bp, Artificial Sequence
  Synthetic oligonucleotide
tgattaggtgggggttctaaacgggtgggt

SEQ ID NO: 260939 - DNA, 30 bp, Artificial Sequence
  Synthetic oligonucleotide
cgataaacgcggtcttacccgtcattgggt

SEQ ID NO: 260940 - DNA, 30 bp, Artificial Sequence
  Synthetic oligonucleotide
tggtcgattggggctctaaagatattgggt

SEQ ID NO: 260941 - DNA, 30 bp, Artificial Sequence
  Synthetic oligonucleotide
cacggtcataggtaaaatctgatattgggt

SEQ ID NO: 260942 - DNA, 30 bp, Artificial Sequence
  Synthetic oligonucleotide
gcggcagctttcgtaggccttatattgggt

SEQ ID NO: 260943 - DNA, 30 bp, Artificial Sequence
  Synthetic oligonucleotide
ggaaaccgggcccggttcatcagcttgggt

SEQ ID NO: 260944 - DNA, 30 bp, Artificial Sequence
  Synthetic oligonucleotide
cccgacagctctgtagttcgggggttgggt

SEQ ID NO: 260945 - DNA, 30 bp, Artificial Sequence
  Synthetic oligonucleotide
tcagcattggtcctgatatagataaatggt

SEQ ID NO: 260946 - DNA, 30 bp, Artificial Sequence
  Synthetic oligonucleotide
tcagtcgcaatatcggcgtcgaacaatggt

SEQ ID NO: 260947 - DNA, 31 bp, Artificial Sequence
  Synthetic oligonucleotide
ggggcggaaaacgaaagcaccatagaatggt

SEQ ID NO: 260948 - DNA, 30 bp, Artificial Sequence
  Synthetic oligonucleotide
cattggatgagtgaggaaatttggaatggt

SEQ ID NO: 260949 - DNA, 30 bp, Artificial Sequence
  Synthetic oligonucleotide
tgggaaattaagtctcggctattgaatggt

SEQ ID NO: 260950 - DNA, 30 bp, Artificial Sequence
  Synthetic oligonucleotide
taatgagacaaggtctggacagttaatggt

SEQ ID NO: 260951 - DNA, 30 bp, Artificial Sequence
  Synthetic oligonucleotide
acttacgttgtcaattttgggtttaatggt

SEQ ID NO: 260952 - DNA, 30 bp, Artificial Sequence
  Synthetic oligonucleotide
gtcgacttaggagagactagatcacatggt

SEQ ID NO: 260953 - DNA, 30 bp, Artificial Sequence
  Synthetic oligonucleotide
gagagcaaaagacaattgtgggtccatggt

SEQ ID NO: 260954 - DNA, 30 bp, Artificial Sequence
  Synthetic oligonucleotide
gcggtatattgtttgtgagtggtccatggt

SEQ ID NO: 260955 - DNA, 30 bp, Artificial Sequence
  Synthetic oligonucleotide
ttttcatggaggcaactagaatcgcatggt

SEQ ID NO: 260956 - DNA, 30 bp, Artificial Sequence
  Synthetic oligonucleotide
gtggctagcatgatattacgatcgcatggt

SEQ ID NO: 260957 - DNA, 29 bp, Artificial Sequence
  Synthetic oligonucleotide
atactgtaggaggatttgtttggcatggt

SEQ ID NO: 260958 - DNA, 30 bp, Artificial Sequence
  Synthetic oligonucleotide
gatgtaggtgttatccaatcgtcagatggt

SEQ ID NO: 260959 - DNA, 30 bp, Artificial Sequence
  Synthetic oligonucleotide
gatcgattgccgcgaagtaagttagatggt

SEQ ID NO: 260960 - DNA, 30 bp, Artificial Sequence
  Synthetic oligonucleotide
atcgccagggttccccgtcgcaaggatggt

SEQ ID NO: 260961 - DNA, 30 bp, Artificial Sequence
  Synthetic oligonucleotide
aggaagtaagggatttcaatcaaatatggt

SEQ ID NO: 260962 - DNA, 30 bp, Artificial Sequence
  Synthetic oligonucleotide
accagatttaccgcatggcaggcatatggt

SEQ ID NO: 260963 - DNA, 30 bp, Artificial Sequence
  Synthetic oligonucleotide
tcaatttagagcagactataggcatatggt

SEQ ID NO: 260964 - DNA, 30 bp, Artificial Sequence
  Synthetic oligonucleotide
gagtcttgtaaactgccacgatcctatggt

SEQ ID NO: 260965 - DNA, 30 bp, Artificial Sequence
  Synthetic oligonucleotide
atctaagttctcggtgcccttgattatggt

SEQ ID NO: 260966 - DNA, 30 bp, Artificial Sequence
  Synthetic oligonucleotide
taaaagcctggaagtgtagtaccttatggt

SEQ ID NO: 260967 - DNA, 30 bp, Artificial Sequence
  Synthetic oligonucleotide
gtacaatgcgatcgtaggggatgaactggt

SEQ ID NO: 260968 - DNA, 30 bp, Artificial Sequence
  Synthetic oligonucleotide
aagcaagctgtgtacaaggggaacactggt

SEQ ID NO: 260969 - DNA, 30 bp, Artificial Sequence
  Synthetic oligonucleotide
tctgtgtaaatgcgaaggctccggactggt

SEQ ID NO: 260970 - DNA, 30 bp, Artificial Sequence
  Synthetic oligonucleotide
agtcgaaacactctccagtgctggactggt

SEQ ID NO: 260971 - DNA, 30 bp, Artificial Sequence
  Synthetic oligonucleotide
aatggatcgttgaattcgtacgctactggt

SEQ ID NO: 260972 - DNA, 30 bp, Artificial Sequence
  Synthetic oligonucleotide
taatgcgatcgaccatcatatacacctggt

SEQ ID NO: 260973 - DNA, 30 bp, Artificial Sequence
  Synthetic oligonucleotide
ctcggatcctttaggtgacgtcgacctggt

SEQ ID NO: 260974 - DNA, 30 bp, Artificial Sequence
  Synthetic oligonucleotide
ccgcaatagccggatgtaaatagccctggt

SEQ ID NO: 260975 - DNA, 30 bp, Artificial Sequence
  Synthetic oligonucleotide
tcgttattaatcatcgtttgagagcctggt

SEQ ID NO: 260976 - DNA, 30 bp, Artificial Sequence
  Synthetic oligonucleotide
atgtagtatagcaatattacggagcctggt

SEQ ID NO: 260977 - DNA, 30 bp, Artificial Sequence
  Synthetic oligonucleotide
gagtaggagttagcacgaaagactcctggt

SEQ ID NO: 260978 - DNA, 30 bp, Artificial Sequence
  Synthetic oligonucleotide
agttacagtagaattaaccaaattcctggt

SEQ ID NO: 260979 - DNA, 30 bp, Artificial Sequence
  Synthetic oligonucleotide
gtgacgagcaagtgaattgctattcctggt

SEQ ID NO: 260980 - DNA, 30 bp, Artificial Sequence
  Synthetic oligonucleotide
tttagcagggggtatgacactaatgctggt

SEQ ID NO: 260981 - DNA, 30 bp, Artificial Sequence
  Synthetic oligonucleotide
agaccgaattaggttctttcaaaatctggt

SEQ ID NO: 260982 - DNA, 30 bp, Artificial Sequence
  Synthetic oligonucleotide
acctagcttgaggtggtgtggagatctggt

SEQ ID NO: 260983 - DNA, 30 bp, Artificial Sequence
  Synthetic oligonucleotide
ctcgaatacggaagcctggatgactctggt

SEQ ID NO: 260984 - DNA, 30 bp, Artificial Sequence
  Synthetic oligonucleotide
tagcatgatggcatcgtctccttctctggt

SEQ ID NO: 260985 - DNA, 30 bp, Artificial Sequence
  Synthetic oligonucleotide
cgatccttccaatcatcaagtcggtctggt

SEQ ID NO: 260986 - DNA, 30 bp, Artificial Sequence
  Synthetic oligonucleotide
taggatggatatttattgtctgggtctggt

SEQ ID NO: 260987 - DNA, 29 bp, Artificial Sequence
  Synthetic oligonucleotide
tagggagaggacagtccgctagttctggt

SEQ ID NO: 260988 - DNA, 30 bp, Artificial Sequence
  Synthetic oligonucleotide
cattagaaacccgcgaaataaaatagtggt

SEQ ID NO: 260989 - DNA, 30 bp, Artificial Sequence
  Synthetic oligonucleotide
actaaagtgtacgtcgcatatcctagtggt

SEQ ID NO: 260990 - DNA, 30 bp, Artificial Sequence
  Synthetic oligonucleotide
ggccagggggtatactaagcggcacgtggt

SEQ ID NO: 260991 - DNA, 30 bp, Artificial Sequence
  Synthetic oligonucleotide
ggaaccctcctgcgatgggtacgacgtggt

SEQ ID NO: 260992 - DNA, 30 bp, Artificial Sequence
  Synthetic oligonucleotide
gggtttacgatcgtgacttcgatacgtggt

SEQ ID NO: 260993 - DNA, 30 bp, Artificial Sequence
  Synthetic oligonucleotide
attaggtgcacggacttattaagccgtggt

SEQ ID NO: 260994 - DNA, 30 bp, Artificial Sequence
  Synthetic oligonucleotide
tggggtttaaattactgcccactccgtggt

SEQ ID NO: 260995 - DNA, 30 bp, Artificial Sequence
  Synthetic oligonucleotide
tactggggaggagggtcgggcactcgtggt

SEQ ID NO: 260996 - DNA, 30 bp, Artificial Sequence
  Synthetic oligonucleotide
catcaggcgggatcatgtcaaacatgtggt

SEQ ID NO: 260997 - DNA, 30 bp, Artificial Sequence
  Synthetic oligonucleotide
gtggtcgagttgaaccgaatacgatgtggt

SEQ ID NO: 260998 - DNA, 30 bp, Artificial Sequence
  Synthetic oligonucleotide
aaaaacagctgcggaagagatatgtgtggt

SEQ ID NO: 260999 - DNA, 30 bp, Artificial Sequence
  Synthetic oligonucleotide
gaggttagtggttatactatggattgtggt

SEQ ID NO: 261000 - DNA, 31 bp, Artificial Sequence
  Synthetic oligonucleotide
tgtgcacagtactccttaaacttaaattggt

SEQ ID NO: 261001 - DNA, 30 bp, Artificial Sequence
  Synthetic oligonucleotide
atagtagatacgggtcctcagataattggt

SEQ ID NO: 261002 - DNA, 30 bp, Artificial Sequence
  Synthetic oligonucleotide
cgtatatcaaaagggacatccctaattggt

SEQ ID NO: 261003 - DNA, 30 bp, Artificial Sequence
  Synthetic oligonucleotide
catcatcagctaataagccggttaattggt

SEQ ID NO: 261004 - DNA, 30 bp, Artificial Sequence
  Synthetic oligonucleotide
gcgtctgcgggggtacaagctcgcattggt

SEQ ID NO: 261005 - DNA, 29 bp, Artificial Sequence
  Synthetic oligonucleotide
tcaatttaatgaacgtaatgacgattggt

SEQ ID NO: 261006 - DNA, 30 bp, Artificial Sequence
  Synthetic oligonucleotide
gggcctagcaattttgtgaccaggattggt

SEQ ID NO: 261007 - DNA, 30 bp, Artificial Sequence
  Synthetic oligonucleotide
cccatgtctcttggacggggtgggattggt

SEQ ID NO: 261008 - DNA, 30 bp, Artificial Sequence
  Synthetic oligonucleotide
gtgcatgtatgcagaataagcagtattggt

SEQ ID NO: 261009 - DNA, 30 bp, Artificial Sequence
  Synthetic oligonucleotide
agagtcgcactcacatctggaagacttggt

SEQ ID NO: 261010 - DNA, 30 bp, Artificial Sequence
  Synthetic oligonucleotide
cacagaactttaagtcgaggcggacttggt

SEQ ID NO: 261011 - DNA, 30 bp, Artificial Sequence
  Synthetic oligonucleotide
gggctaaattgtgaaacgtggtatcttggt

SEQ ID NO: 261012 - DNA, 30 bp, Artificial Sequence
  Synthetic oligonucleotide
aaaggtttccgtgtaagcatacgtcttggt

SEQ ID NO: 261013 - DNA, 30 bp, Artificial Sequence
  Synthetic oligonucleotide
aacttcctggtagaagacatcggtcttggt

SEQ ID NO: 261014 - DNA, 30 bp, Artificial Sequence
  Synthetic oligonucleotide
agggcttatgtacagttcgtttgggttggt

SEQ ID NO: 261015 - DNA, 30 bp, Artificial Sequence
  Synthetic oligonucleotide
ataattgtagtggtccatcaatcctttggt

SEQ ID NO: 261016 - DNA, 30 bp, Artificial Sequence
  Synthetic oligonucleotide
ataataatacggccgatagtgtgctttggt

SEQ ID NO: 261017 - DNA, 30 bp, Artificial Sequence
  Synthetic oligonucleotide
ttaccttgatatggaaatccgttctttggt

SEQ ID NO: 261018 - DNA, 30 bp, Artificial Sequence
  Synthetic oligonucleotide
aggaatatataatgtacagtaatgtttggt

SEQ ID NO: 261019 - DNA, 30 bp, Artificial Sequence
  Synthetic oligonucleotide
ttgctgagtagtatgctaataaataaatgt

SEQ ID NO: 261020 - DNA, 30 bp, Artificial Sequence
  Synthetic oligonucleotide
gcgatgcatagtctctaaccgcgtaaatgt

SEQ ID NO: 261021 - DNA, 30 bp, Artificial Sequence
  Synthetic oligonucleotide
aactgacaatcactagttgtctgacaatgt

SEQ ID NO: 261022 - DNA, 30 bp, Artificial Sequence
  Synthetic oligonucleotide
ataaaagggttagcaatcttggtacaatgt

SEQ ID NO: 261023 - DNA, 30 bp, Artificial Sequence
  Synthetic oligonucleotide
tttaccagataaatagaaagtaagcaatgt

SEQ ID NO: 261024 - DNA, 30 bp, Artificial Sequence
  Synthetic oligonucleotide
tagaggtgggcattaagcgcttagcaatgt

SEQ ID NO: 261025 - DNA, 30 bp, Artificial Sequence
  Synthetic oligonucleotide
gcaccgcacccacaggggctaccgcaatgt

SEQ ID NO: 261026 - DNA, 30 bp, Artificial Sequence
  Synthetic oligonucleotide
acagcgagaagccacctgattatgcaatgt

SEQ ID NO: 261027 - DNA, 30 bp, Artificial Sequence
  Synthetic oligonucleotide
gggaaggggtccgtggtaatggcagaatgt

SEQ ID NO: 261028 - DNA, 30 bp, Artificial Sequence
  Synthetic oligonucleotide
ctacataacaacgtctccgtgagggaatgt

SEQ ID NO: 261029 - DNA, 30 bp, Artificial Sequence
  Synthetic oligonucleotide
ggacgagatgaaatgcggccccatgaatgt

SEQ ID NO: 261030 - DNA, 30 bp, Artificial Sequence
  Synthetic oligonucleotide
gactaagaaggctaggcggctcctgaatgt

SEQ ID NO: 261031 - DNA, 30 bp, Artificial Sequence
  Synthetic oligonucleotide
tatgtcaggatcagtcttatgtcataatgt

SEQ ID NO: 261032 - DNA, 29 bp, Artificial Sequence
  Synthetic oligonucleotide
caggacatgtgaacgtggtggagtaatgt

SEQ ID NO: 261033 - DNA, 30 bp, Artificial Sequence
  Synthetic oligonucleotide
ttaacagggatgtctacgtactcgtaatgt

SEQ ID NO: 261034 - DNA, 30 bp, Artificial Sequence
  Synthetic oligonucleotide
ttgactatctcaaagtctaatctgtaatgt

SEQ ID NO: 261035 - DNA, 30 bp, Artificial Sequence
  Synthetic oligonucleotide
gggcagcaccagcaggaactattaacatgt

SEQ ID NO: 261036 - DNA, 30 bp, Artificial Sequence
  Synthetic oligonucleotide
aaatgtcaggctaagtaatggtacacatgt

SEQ ID NO: 261037 - DNA, 30 bp, Artificial Sequence
  Synthetic oligonucleotide
aggcctacgtcgctatgcagttccacatgt

SEQ ID NO: 261038 - DNA, 30 bp, Artificial Sequence
  Synthetic oligonucleotide
aagaaagtaggtcgccttgtcacgacatgt

SEQ ID NO: 261039 - DNA, 30 bp, Artificial Sequence
  Synthetic oligonucleotide
cggaccggtaccgatctgacgccgacatgt

SEQ ID NO: 261040 - DNA, 30 bp, Artificial Sequence
  Synthetic oligonucleotide
aacattcaccacgacaagcaagtgacatgt

SEQ ID NO: 261041 - DNA, 30 bp, Artificial Sequence
  Synthetic oligonucleotide
cccaagacgattaattgttttagtacatgt

SEQ ID NO: 261042 - DNA, 30 bp, Artificial Sequence
  Synthetic oligonucleotide
tcaaatcgctctagctccacagttacatgt

SEQ ID NO: 261043 - DNA, 30 bp, Artificial Sequence
  Synthetic oligonucleotide
cggtccttatgtaagacagggtttacatgt

SEQ ID NO: 261044 - DNA, 30 bp, Artificial Sequence
  Synthetic oligonucleotide
tccgtaatcattagaaacggtacaccatgt

SEQ ID NO: 261045 - DNA, 30 bp, Artificial Sequence
  Synthetic oligonucleotide
ggccgcacgggaattataggatcaccatgt

SEQ ID NO: 261046 - DNA, 30 bp, Artificial Sequence
  Synthetic oligonucleotide
ggtcaaaggatttgcgctattcacccatgt

SEQ ID NO: 261047 - DNA, 30 bp, Artificial Sequence
  Synthetic oligonucleotide
gagatccaactgtggccctgaagcccatgt

SEQ ID NO: 261048 - DNA, 30 bp, Artificial Sequence
  Synthetic oligonucleotide
cccgtgtcgggtaatgaaggactcccatgt

SEQ ID NO: 261049 - DNA, 30 bp, Artificial Sequence
  Synthetic oligonucleotide
ttcgctgccgaaggttacggacatccatgt

SEQ ID NO: 261050 - DNA, 30 bp, Artificial Sequence
  Synthetic oligonucleotide
ggtaaatgatacaactgagtttatccatgt

SEQ ID NO: 261051 - DNA, 31 bp, Artificial Sequence
  Synthetic oligonucleotide
ctggctatgatatgtccaagagaaagcatgt

SEQ ID NO: 261052 - DNA, 30 bp, Artificial Sequence
  Synthetic oligonucleotide
tcgcctgacattgtaatatcaatagcatgt

SEQ ID NO: 261053 - DNA, 30 bp, Artificial Sequence
  Synthetic oligonucleotide
ctctactgacagatatagcggatagcatgt

SEQ ID NO: 261054 - DNA, 30 bp, Artificial Sequence
  Synthetic oligonucleotide
agtcagttccgcttagaacccctcgcatgt

SEQ ID NO: 261055 - DNA, 30 bp, Artificial Sequence
  Synthetic oligonucleotide
ctaggagtgacctaatggacggcatcatgt

SEQ ID NO: 261056 - DNA, 30 bp, Artificial Sequence
  Synthetic oligonucleotide
tggaagggtttcaccatcgcgctatcatgt

SEQ ID NO: 261057 - DNA, 30 bp, Artificial Sequence
  Synthetic oligonucleotide
caccgctacggcagagaaggattatcatgt

SEQ ID NO: 261058 - DNA, 30 bp, Artificial Sequence
  Synthetic oligonucleotide
cgctcccgtggggcaatgaagttatcatgt

SEQ ID NO: 261059 - DNA, 30 bp, Artificial Sequence
  Synthetic oligonucleotide
aaacgtagatgccgtgttccactctcatgt

SEQ ID NO: 261060 - DNA, 30 bp, Artificial Sequence
  Synthetic oligonucleotide
taccatgtatgatccataagtccaagatgt

SEQ ID NO: 261061 - DNA, 30 bp, Artificial Sequence
  Synthetic oligonucleotide
cgtttaagttgggataaaacggcaagatgt

SEQ ID NO: 261062 - DNA, 30 bp, Artificial Sequence
  Synthetic oligonucleotide
ccatcgagttgtagttattctataagatgt

SEQ ID NO: 261063 - DNA, 30 bp, Artificial Sequence
  Synthetic oligonucleotide
gattaaatcgtgcggccccgagtgagatgt

SEQ ID NO: 261064 - DNA, 30 bp, Artificial Sequence
  Synthetic oligonucleotide
atatcgcttactatctcggccaatagatgt

SEQ ID NO: 261065 - DNA, 30 bp, Artificial Sequence
  Synthetic oligonucleotide
tagtatagtgtagagatcttgtctagatgt

SEQ ID NO: 261066 - DNA, 30 bp, Artificial Sequence
  Synthetic oligonucleotide
tacgccctatcattagaaacgcttagatgt

SEQ ID NO: 261067 - DNA, 30 bp, Artificial Sequence
  Synthetic oligonucleotide
atctcatcacggtaagctcaaccacgatgt

SEQ ID NO: 261068 - DNA, 30 bp, Artificial Sequence
  Synthetic oligonucleotide
tatatgagtcactggttcgtctggcgatgt

SEQ ID NO: 261069 - DNA, 30 bp, Artificial Sequence
  Synthetic oligonucleotide
cgagcgaataaaaatgcagagcatcgatgt

SEQ ID NO: 261070 - DNA, 30 bp, Artificial Sequence
  Synthetic oligonucleotide
atacttttctcacttaactgggaaggatgt

SEQ ID NO: 261071 - DNA, 30 bp, Artificial Sequence
  Synthetic oligonucleotide
acccattgtccagcaggcctaataggatgt

SEQ ID NO: 261072 - DNA, 30 bp, Artificial Sequence
  Synthetic oligonucleotide
cgcccaacgtttcaggccgaatacggatgt

SEQ ID NO: 261073 - DNA, 30 bp, Artificial Sequence
  Synthetic oligonucleotide
gcagcgcacggtgtataaaagggcggatgt

SEQ ID NO: 261074 - DNA, 30 bp, Artificial Sequence
  Synthetic oligonucleotide
ccgtggaagaaatcgcgtgccctcggatgt

SEQ ID NO: 261075 - DNA, 30 bp, Artificial Sequence
  Synthetic oligonucleotide
ctggagactaaccgacatgtcaggggatgt

SEQ ID NO: 261076 - DNA, 31 bp, Artificial Sequence
  Synthetic oligonucleotide
gggagcttcatgccatacaccaatgggatgt

SEQ ID NO: 261077 - DNA, 30 bp, Artificial Sequence
  Synthetic oligonucleotide
accgtacaaactttcggtttcatgggatgt

SEQ ID NO: 261078 - DNA, 30 bp, Artificial Sequence
  Synthetic oligonucleotide
ccattagtgtctcgtctacaactgggatgt

SEQ ID NO: 261079 - DNA, 30 bp, Artificial Sequence
  Synthetic oligonucleotide
ccgcctggaaaatctcgtcctattggatgt

SEQ ID NO: 261080 - DNA, 30 bp, Artificial Sequence
  Synthetic oligonucleotide
attgagtgaatttcttccatggttggatgt

SEQ ID NO: 261081 - DNA, 30 bp, Artificial Sequence
  Synthetic oligonucleotide
tgatcagatcgacgcagagtgaactgatgt

SEQ ID NO: 261082 - DNA, 30 bp, Artificial Sequence
  Synthetic oligonucleotide
tccaggttaagtagtgaactcaagtgatgt

SEQ ID NO: 261083 - DNA, 30 bp, Artificial Sequence
  Synthetic oligonucleotide
ccgcgcagagagactcctggagcgtgatgt

SEQ ID NO: 261084 - DNA, 30 bp, Artificial Sequence
  Synthetic oligonucleotide
aatcgaatccttgcaaggggcctgtgatgt

SEQ ID NO: 261085 - DNA, 30 bp, Artificial Sequence
  Synthetic oligonucleotide
gcatggctgtgtgtatagcgatgttgatgt

SEQ ID NO: 261086 - DNA, 30 bp, Artificial Sequence
  Synthetic oligonucleotide
cagttacgaaccgtacggtcgagcatatgt

SEQ ID NO: 261087 - DNA, 30 bp, Artificial Sequence
  Synthetic oligonucleotide
ttgtagtttagagcaattaggatcatatgt

SEQ ID NO: 261088 - DNA, 30 bp, Artificial Sequence
  Synthetic oligonucleotide
cagtcgaactcccattagtatctgatatgt

SEQ ID NO: 261089 - DNA, 30 bp, Artificial Sequence
  Synthetic oligonucleotide
agacccatcctggatccaggggtcctatgt

SEQ ID NO: 261090 - DNA, 30 bp, Artificial Sequence
  Synthetic oligonucleotide
acgagttaatcccgtagggcacggctatgt

SEQ ID NO: 261091 - DNA, 30 bp, Artificial Sequence
  Synthetic oligonucleotide
caaatacctagaggtagctcaaaagtatgt

SEQ ID NO: 261092 - DNA, 30 bp, Artificial Sequence
  Synthetic oligonucleotide
caacttacgtaattgaggtcgacagtatgt

SEQ ID NO: 261093 - DNA, 30 bp, Artificial Sequence
  Synthetic oligonucleotide
gaagaaagatagctagtttctgacgtatgt

SEQ ID NO: 261094 - DNA, 30 bp, Artificial Sequence
  Synthetic oligonucleotide
aaggggttcgtgcgctcatatcaggtatgt

SEQ ID NO: 261095 - DNA, 30 bp, Artificial Sequence
  Synthetic oligonucleotide
gtgtcagcaggtctgcgggtgggggtatgt

SEQ ID NO: 261096 - DNA, 30 bp, Artificial Sequence
  Synthetic oligonucleotide
gtaggtaaactcatcccataacatgtatgt

SEQ ID NO: 261097 - DNA, 30 bp, Artificial Sequence
  Synthetic oligonucleotide
atgggcagtcatacagaagatctattatgt

SEQ ID NO: 261098 - DNA, 30 bp, Artificial Sequence
  Synthetic oligonucleotide
aggtagaccactgctatagatcacttatgt

SEQ ID NO: 261099 - DNA, 30 bp, Artificial Sequence
  Synthetic oligonucleotide
gacgggccagaagggacggtagccttatgt

SEQ ID NO: 261100 - DNA, 30 bp, Artificial Sequence
  Synthetic oligonucleotide
actccacacggacgccctttagccttatgt

SEQ ID NO: 261101 - DNA, 30 bp, Artificial Sequence
  Synthetic oligonucleotide
atgtacagcaaaggttccggacaaaactgt

SEQ ID NO: 261102 - DNA, 30 bp, Artificial Sequence
  Synthetic oligonucleotide
ataacaagtgcctcgcggcattaaaactgt

SEQ ID NO: 261103 - DNA, 30 bp, Artificial Sequence
  Synthetic oligonucleotide
gaagaaatcgacgccgggggcataaactgt

SEQ ID NO: 261104 - DNA, 30 bp, Artificial Sequence
  Synthetic oligonucleotide
aatacagactgagatacacatttaaactgt

SEQ ID NO: 261105 - DNA, 30 bp, Artificial Sequence
  Synthetic oligonucleotide
tcatggtagtacgtttacggacacaactgt

SEQ ID NO: 261106 - DNA, 30 bp, Artificial Sequence
  Synthetic oligonucleotide
ggccgcctccggtaaaggccaatcaactgt

SEQ ID NO: 261107 - DNA, 30 bp, Artificial Sequence
  Synthetic oligonucleotide
catgaacagcaaagttccgaactcaactgt

SEQ ID NO: 261108 - DNA, 30 bp, Artificial Sequence
  Synthetic oligonucleotide
tcggagttgcaagtggcagctctcaactgt

SEQ ID NO: 261109 - DNA, 30 bp, Artificial Sequence
  Synthetic oligonucleotide
atggtcttcggctgcccatcagaacactgt

SEQ ID NO: 261110 - DNA, 30 bp, Artificial Sequence
  Synthetic oligonucleotide
tcaccctaccatgacacaaagttgcactgt

SEQ ID NO: 261111 - DNA, 30 bp, Artificial Sequence
  Synthetic oligonucleotide
tagtaaactggacgtccccaggaagactgt

SEQ ID NO: 261112 - DNA, 30 bp, Artificial Sequence
  Synthetic oligonucleotide
gtgatcatgctcatgttgccaacggactgt

SEQ ID NO: 261113 - DNA, 30 bp, Artificial Sequence
  Synthetic oligonucleotide
taaaaccgccgtccgaattgaggatactgt

SEQ ID NO: 261114 - DNA, 30 bp, Artificial Sequence
  Synthetic oligonucleotide
agaggtctgaacccatagtccggatactgt

SEQ ID NO: 261115 - DNA, 30 bp, Artificial Sequence
  Synthetic oligonucleotide
ctcgagaacgcaaaggggcttttctactgt

SEQ ID NO: 261116 - DNA, 30 bp, Artificial Sequence
  Synthetic oligonucleotide
ggcgtcgacatgcattcgaagccgtactgt

SEQ ID NO: 261117 - DNA, 30 bp, Artificial Sequence
  Synthetic oligonucleotide
ccacctagaatcagccctcggacttactgt

SEQ ID NO: 261118 - DNA, 30 bp, Artificial Sequence
  Synthetic oligonucleotide
gatagaaaattgttccgcaagttcacctgt

SEQ ID NO: 261119 - DNA, 30 bp, Artificial Sequence
  Synthetic oligonucleotide
gtcttgttccatctagcgaaaacgacctgt

SEQ ID NO: 261120 - DNA, 30 bp, Artificial Sequence
  Synthetic oligonucleotide
ccaatccgattgtcgctcataaggccctgt

SEQ ID NO: 261121 - DNA, 30 bp, Artificial Sequence
  Synthetic oligonucleotide
tttaacaggtgtacgcctaggagtgcctgt

SEQ ID NO: 261122 - DNA, 30 bp, Artificial Sequence
  Synthetic oligonucleotide
cgcgttcacggccttaaaattagtgcctgt

SEQ ID NO: 261123 - DNA, 30 bp, Artificial Sequence
  Synthetic oligonucleotide
ccgaggaaacattcttcgaatgttgcctgt

SEQ ID NO: 261124 - DNA, 30 bp, Artificial Sequence
  Synthetic oligonucleotide
tgagtgataaatttgggactcacatcctgt

SEQ ID NO: 261125 - DNA, 30 bp, Artificial Sequence
  Synthetic oligonucleotide
aacgctgttgggaccgcctaacgatcctgt

SEQ ID NO: 261126 - DNA, 30 bp, Artificial Sequence
  Synthetic oligonucleotide
cgacgttaggctacctgctgccaaagctgt

SEQ ID NO: 261127 - DNA, 30 bp, Artificial Sequence
  Synthetic oligonucleotide
tcaaccgtctaggattttgtctaaagctgt

SEQ ID NO: 261128 - DNA, 30 bp, Artificial Sequence
  Synthetic oligonucleotide
agcaatcttgcggtccgtgtggcaagctgt

SEQ ID NO: 261129 - DNA, 30 bp, Artificial Sequence
  Synthetic oligonucleotide
ggatgttcgaaattgcgcaagataagctgt

SEQ ID NO: 261130 - DNA, 30 bp, Artificial Sequence
  Synthetic oligonucleotide
tgtgaagtctttcgaacaaaccgcagctgt

SEQ ID NO: 261131 - DNA, 30 bp, Artificial Sequence
  Synthetic oligonucleotide
cgcgtgccgggaggaaacagattcagctgt

SEQ ID NO: 261132 - DNA, 30 bp, Artificial Sequence
  Synthetic oligonucleotide
tatgagaataagttggctaaagagagctgt

SEQ ID NO: 261133 - DNA, 30 bp, Artificial Sequence
  Synthetic oligonucleotide
tgggacctcatctctgatcagttgagctgt

SEQ ID NO: 261134 - DNA, 30 bp, Artificial Sequence
  Synthetic oligonucleotide
caagaatcatgagaggtatatcggcgctgt

SEQ ID NO: 261135 - DNA, 30 bp, Artificial Sequence
  Synthetic oligonucleotide
ggtaacagttgaggtataatttctcgctgt

SEQ ID NO: 261136 - DNA, 30 bp, Artificial Sequence
  Synthetic oligonucleotide
actgaccaatgatccattgagcaaggctgt

SEQ ID NO: 261137 - DNA, 30 bp, Artificial Sequence
  Synthetic oligonucleotide
gaagatatgtttatagatccagcaggctgt

SEQ ID NO: 261138 - DNA, 30 bp, Artificial Sequence
  Synthetic oligonucleotide
aagcgggctcgtctagaaagcataggctgt

SEQ ID NO: 261139 - DNA, 30 bp, Artificial Sequence
  Synthetic oligonucleotide
ggtgctatggggtatagtttttccggctgt

SEQ ID NO: 261140 - DNA, 30 bp, Artificial Sequence
  Synthetic oligonucleotide
cattaagtgattctctatcaatgcggctgt

SEQ ID NO: 261141 - DNA, 30 bp, Artificial Sequence
  Synthetic oligonucleotide
cccaaaacgtaccaaaaagccaagggctgt

SEQ ID NO: 261142 - DNA, 30 bp, Artificial Sequence
  Synthetic oligonucleotide
ggagtggggattagcgcacacaggggctgt

SEQ ID NO: 261143 - DNA, 30 bp, Artificial Sequence
  Synthetic oligonucleotide
gcagggagtaaaccactatcagggggctgt

SEQ ID NO: 261144 - DNA, 30 bp, Artificial Sequence
  Synthetic oligonucleotide
ggttaatggcgggcgacttctactggctgt

SEQ ID NO: 261145 - DNA, 30 bp, Artificial Sequence
  Synthetic oligonucleotide
ctatttaatcaaactgagtatggtggctgt

SEQ ID NO: 261146 - DNA, 30 bp, Artificial Sequence
  Synthetic oligonucleotide
agtaagagaatcatactccttatatgctgt

SEQ ID NO: 261147 - DNA, 30 bp, Artificial Sequence
  Synthetic oligonucleotide
gtggtggtcaccggggtgagagggtgctgt

SEQ ID NO: 261148 - DNA, 30 bp, Artificial Sequence
  Synthetic oligonucleotide
gaggtggggtcggaacagagtaattgctgt

SEQ ID NO: 261149 - DNA, 30 bp, Artificial Sequence
  Synthetic oligonucleotide
ggtaaaatacataggaattaggattgctgt

SEQ ID NO: 261150 - DNA, 30 bp, Artificial Sequence
  Synthetic oligonucleotide
tttacaggtgagggtagcccggcaatctgt

SEQ ID NO: 261151 - DNA, 30 bp, Artificial Sequence
  Synthetic oligonucleotide
ggcgagaagtcttgcgggtgtctcatctgt

SEQ ID NO: 261152 - DNA, 31 bp, Artificial Sequence
  Synthetic oligonucleotide
ttatctactaagagtttggcgtgcgatctgt

SEQ ID NO: 261153 - DNA, 30 bp, Artificial Sequence
  Synthetic oligonucleotide
aatgattcaagttgtttgatcctgatctgt

SEQ ID NO: 261154 - DNA, 30 bp, Artificial Sequence
  Synthetic oligonucleotide
agattaacaacgggcaataattttatctgt

SEQ ID NO: 261155 - DNA, 30 bp, Artificial Sequence
  Synthetic oligonucleotide
accagattggctgcggcgagaggactctgt

SEQ ID NO: 261156 - DNA, 30 bp, Artificial Sequence
  Synthetic oligonucleotide
ccttaaatcctatactgctacagcctctgt

SEQ ID NO: 261157 - DNA, 30 bp, Artificial Sequence
  Synthetic oligonucleotide
tatggacgcagacaagcacgactcctctgt

SEQ ID NO: 261158 - DNA, 30 bp, Artificial Sequence
  Synthetic oligonucleotide
gaaatgcccgagaaagtcgtgaatctctgt

SEQ ID NO: 261159 - DNA, 29 bp, Artificial Sequence
  Synthetic oligonucleotide
tcaaggtgtcgaattcgtgaaaagtctgt

SEQ ID NO: 261160 - DNA, 30 bp, Artificial Sequence
  Synthetic oligonucleotide
agtttggagagtgcgtgagcttaagtctgt

SEQ ID NO: 261161 - DNA, 30 bp, Artificial Sequence
  Synthetic oligonucleotide
ggagcatcagtcagcgtcagtgtcgtctgt

SEQ ID NO: 261162 - DNA, 30 bp, Artificial Sequence
  Synthetic oligonucleotide
tatgttcaaagtggaggtcagccggtctgt

SEQ ID NO: 261163 - DNA, 30 bp, Artificial Sequence
  Synthetic oligonucleotide
ggtgattctggctcctcgcgtctggtctgt

SEQ ID NO: 261164 - DNA, 30 bp, Artificial Sequence
  Synthetic oligonucleotide
ggggaatcctgacgtaaacattgtgtctgt

SEQ ID NO: 261165 - DNA, 30 bp, Artificial Sequence
  Synthetic oligonucleotide
ggttggatatgaacggtagctcttgtctgt

SEQ ID NO: 261166 - DNA, 30 bp, Artificial Sequence
  Synthetic oligonucleotide
gacacatcacgagcaagcaccctcttctgt

SEQ ID NO: 261167 - DNA, 30 bp, Artificial Sequence
  Synthetic oligonucleotide
gcgtctatacgagctcggggcagtttctgt

SEQ ID NO: 261168 - DNA, 30 bp, Artificial Sequence
  Synthetic oligonucleotide
gcatacaagttaattgaggtatcaaagtgt

SEQ ID NO: 261169 - DNA, 30 bp, Artificial Sequence
  Synthetic oligonucleotide
agttataaagagtgtggaattggaaagtgt

SEQ ID NO: 261170 - DNA, 30 bp, Artificial Sequence
  Synthetic oligonucleotide
atgtctacatgcgtatcatggataaagtgt

SEQ ID NO: 261171 - DNA, 30 bp, Artificial Sequence
  Synthetic oligonucleotide
ggttgcaaaatacaggtcaacaggaagtgt

SEQ ID NO: 261172 - DNA, 30 bp, Artificial Sequence
  Synthetic oligonucleotide
tatcatacgaaagagcgtcgttgacagtgt

SEQ ID NO: 261173 - DNA, 30 bp, Artificial Sequence
  Synthetic oligonucleotide
aactacagggcacatctacagttacagtgt

SEQ ID NO: 261174 - DNA, 30 bp, Artificial Sequence
  Synthetic oligonucleotide
gtgggcccatgatcctggtcgaaccagtgt

SEQ ID NO: 261175 - DNA, 30 bp, Artificial Sequence
  Synthetic oligonucleotide
actcttatcgcaagttggaagtaccagtgt

SEQ ID NO: 261176 - DNA, 30 bp, Artificial Sequence
  Synthetic oligonucleotide
gttataagcgaactataaccatcgcagtgt

SEQ ID NO: 261177 - DNA, 30 bp, Artificial Sequence
  Synthetic oligonucleotide
tacgttgtggcagagcatacagaagagtgt

SEQ ID NO: 261178 - DNA, 30 bp, Artificial Sequence
  Synthetic oligonucleotide
cctacacgaagcggcctgttggacgagtgt

SEQ ID NO: 261179 - DNA, 30 bp, Artificial Sequence
  Synthetic oligonucleotide
ctgtcaggataatagtgatggatcgagtgt

SEQ ID NO: 261180 - DNA, 30 bp, Artificial Sequence
  Synthetic oligonucleotide
ttgttcataagacattgactactcgagtgt

SEQ ID NO: 261181 - DNA, 30 bp, Artificial Sequence
  Synthetic oligonucleotide
agcaaggctgcagtcctgaccgtcgagtgt

SEQ ID NO: 261182 - DNA, 30 bp, Artificial Sequence
  Synthetic oligonucleotide
atcagtattatcattttcccgcgggagtgt

SEQ ID NO: 261183 - DNA, 30 bp, Artificial Sequence
  Synthetic oligonucleotide
atacttgggaacactatcattctggagtgt

SEQ ID NO: 261184 - DNA, 30 bp, Artificial Sequence
  Synthetic oligonucleotide
tccgaccgagtagagcatagtaatgagtgt

SEQ ID NO: 261185 - DNA, 30 bp, Artificial Sequence
  Synthetic oligonucleotide
cacgaagatcgtcctgtggcaatatagtgt

SEQ ID NO: 261186 - DNA, 30 bp, Artificial Sequence
  Synthetic oligonucleotide
ggaactggtgagtcgataaggtgctagtgt

SEQ ID NO: 261187 - DNA, 30 bp, Artificial Sequence
  Synthetic oligonucleotide
cattcgtatctgctgtcgggacagtagtgt

SEQ ID NO: 261188 - DNA, 30 bp, Artificial Sequence
  Synthetic oligonucleotide
gcgctgcatgaaaacctcgaacattagtgt

SEQ ID NO: 261189 - DNA, 30 bp, Artificial Sequence
  Synthetic oligonucleotide
gatccccgccggacagtggcgcattagtgt

SEQ ID NO: 261190 - DNA, 30 bp, Artificial Sequence
  Synthetic oligonucleotide
gccaaactgtgatgccacagagtttagtgt

SEQ ID NO: 261191 - DNA, 30 bp, Artificial Sequence
  Synthetic oligonucleotide
caccctcgacaatggaccttcgaaacgtgt

SEQ ID NO: 261192 - DNA, 30 bp, Artificial Sequence
  Synthetic oligonucleotide
tgacaatatacgattgtaagggacacgtgt

SEQ ID NO: 261193 - DNA, 30 bp, Artificial Sequence
  Synthetic oligonucleotide
cgcacactcatggagagtaggcccacgtgt

SEQ ID NO: 261194 - DNA, 30 bp, Artificial Sequence
  Synthetic oligonucleotide
gatacgtataatgctcaacaaaatacgtgt

SEQ ID NO: 261195 - DNA, 30 bp, Artificial Sequence
  Synthetic oligonucleotide
aagggaaggggtcatcttactccaccgtgt

SEQ ID NO: 261196 - DNA, 30 bp, Artificial Sequence
  Synthetic oligonucleotide
acgcgcacctttgtctttgagtcgccgtgt

SEQ ID NO: 261197 - DNA, 30 bp, Artificial Sequence
  Synthetic oligonucleotide
cgtattgcgcggattcgaagtatagcgtgt

SEQ ID NO: 261198 - DNA, 30 bp, Artificial Sequence
  Synthetic oligonucleotide
gcgtcgcgaatggcggtatcaagcgcgtgt

SEQ ID NO: 261199 - DNA, 30 bp, Artificial Sequence
  Synthetic oligonucleotide
acttcgaggacgagatggacgtcggcgtgt

SEQ ID NO: 261200 - DNA, 30 bp, Artificial Sequence
  Synthetic oligonucleotide
gctattagaggtgggataggcggggcgtgt

SEQ ID NO: 261201 - DNA, 30 bp, Artificial Sequence
  Synthetic oligonucleotide
tgtgcttggcaaaataaatagtaatcgtgt

SEQ ID NO: 261202 - DNA, 30 bp, Artificial Sequence
  Synthetic oligonucleotide
taaaagtccaaggtttcatgacgatcgtgt

SEQ ID NO: 261203 - DNA, 31 bp, Artificial Sequence
  Synthetic oligonucleotide
cggagcgatataagaccacaatttatcgtgt

SEQ ID NO: 261204 - DNA, 30 bp, Artificial Sequence
  Synthetic oligonucleotide
tctcaatggagttaaaggacgtactcgtgt

SEQ ID NO: 261205 - DNA, 30 bp, Artificial Sequence
  Synthetic oligonucleotide
acgctgtatggcagggtgaggccctcgtgt

SEQ ID NO: 261206 - DNA, 30 bp, Artificial Sequence
  Synthetic oligonucleotide
agaaagccgggcggtttgaacgtttcgtgt

SEQ ID NO: 261207 - DNA, 30 bp, Artificial Sequence
  Synthetic oligonucleotide
cgcgataattcggaccatctgcaaaggtgt

SEQ ID NO: 261208 - DNA, 30 bp, Artificial Sequence
  Synthetic oligonucleotide
atgcgtacctgctgaaaggttgaaaggtgt

SEQ ID NO: 261209 - DNA, 30 bp, Artificial Sequence
  Synthetic oligonucleotide
gtgctgcttgcacttcgatcggtcaggtgt

SEQ ID NO: 261210 - DNA, 30 bp, Artificial Sequence
  Synthetic oligonucleotide
accccacgcaccgggaatcaggataggtgt

SEQ ID NO: 261211 - DNA, 30 bp, Artificial Sequence
  Synthetic oligonucleotide
catttgagaatataattctctactaggtgt

SEQ ID NO: 261212 - DNA, 30 bp, Artificial Sequence
  Synthetic oligonucleotide
gtctacaacccatgcaagttcagtaggtgt

SEQ ID NO: 261213 - DNA, 30 bp, Artificial Sequence
  Synthetic oligonucleotide
gtcgcgttgtaacacgaatgcattaggtgt

SEQ ID NO: 261214 - DNA, 30 bp, Artificial Sequence
  Synthetic oligonucleotide
ctgggccttagttcgtctaaagcacggtgt

SEQ ID NO: 261215 - DNA, 30 bp, Artificial Sequence
  Synthetic oligonucleotide
catacgggactgcttttagctatacggtgt

SEQ ID NO: 261216 - DNA, 30 bp, Artificial Sequence
  Synthetic oligonucleotide
gacggtgtccttagacacgaacaccggtgt

SEQ ID NO: 261217 - DNA, 30 bp, Artificial Sequence
  Synthetic oligonucleotide
gggattaagtgcttaagtagcctccggtgt

SEQ ID NO: 261218 - DNA, 30 bp, Artificial Sequence
  Synthetic oligonucleotide
gtcttggtctcccatgtgcacgtccggtgt

SEQ ID NO: 261219 - DNA, 30 bp, Artificial Sequence
  Synthetic oligonucleotide
ccgtagaaagccatatttttgagtcggtgt

SEQ ID NO: 261220 - DNA, 30 bp, Artificial Sequence
  Synthetic oligonucleotide
gcaatacacgctaatcatgcgcgtcggtgt

SEQ ID NO: 261221 - DNA, 30 bp, Artificial Sequence
  Synthetic oligonucleotide
ggataatcgtctagcacagacaaagggtgt

SEQ ID NO: 261222 - DNA, 30 bp, Artificial Sequence
  Synthetic oligonucleotide
gcctagtgctgcccatggcatatagggtgt

SEQ ID NO: 261223 - DNA, 30 bp, Artificial Sequence
  Synthetic oligonucleotide
atggtacattaagtcggacgttccgggtgt

SEQ ID NO: 261224 - DNA, 30 bp, Artificial Sequence
  Synthetic oligonucleotide
agcttaccgctatccactgccagcgggtgt

SEQ ID NO: 261225 - DNA, 30 bp, Artificial Sequence
  Synthetic oligonucleotide
ccagccgcacggcagtccgtggaggggtgt

SEQ ID NO: 261226 - DNA, 30 bp, Artificial Sequence
  Synthetic oligonucleotide
atagcggagtgtatactctgttaggggtgt

SEQ ID NO: 261227 - DNA, 30 bp, Artificial Sequence
  Synthetic oligonucleotide
ccactaactgaaccgagtgaccaatggtgt

SEQ ID NO: 261228 - DNA, 30 bp, Artificial Sequence
  Synthetic oligonucleotide
agagcacgatgtcgctataagagatggtgt

SEQ ID NO: 261229 - DNA, 30 bp, Artificial Sequence
  Synthetic oligonucleotide
cagttatcactcattgcaaaacgatggtgt

SEQ ID NO: 261230 - DNA, 30 bp, Artificial Sequence
  Synthetic oligonucleotide
ctcacacttcactgagcatagcaaatgtgt

SEQ ID NO: 261231 - DNA, 30 bp, Artificial Sequence
  Synthetic oligonucleotide
aggatggaagcgggtcaaattggcatgtgt

SEQ ID NO: 261232 - DNA, 30 bp, Artificial Sequence
  Synthetic oligonucleotide
ggcgtagtccattaattagcatgcatgtgt

SEQ ID NO: 261233 - DNA, 30 bp, Artificial Sequence
  Synthetic oligonucleotide
taacgcaatcagatcaatcgtaagatgtgt

SEQ ID NO: 261234 - DNA, 30 bp, Artificial Sequence
  Synthetic oligonucleotide
ttcggtgttcctcggcgtactcggatgtgt

SEQ ID NO: 261235 - DNA, 30 bp, Artificial Sequence
  Synthetic oligonucleotide
cagacagtgcttcatctacaaacactgtgt

SEQ ID NO: 261236 - DNA, 30 bp, Artificial Sequence
  Synthetic oligonucleotide
cggaattggacctgacatgagatactgtgt

SEQ ID NO: 261237 - DNA, 30 bp, Artificial Sequence
  Synthetic oligonucleotide
gaggatgtatggcaagtttgaggcctgtgt

SEQ ID NO: 261238 - DNA, 30 bp, Artificial Sequence
  Synthetic oligonucleotide
aagcgtaacgaacttagtttcatcctgtgt

SEQ ID NO: 261239 - DNA, 30 bp, Artificial Sequence
  Synthetic oligonucleotide
tttctgacggcaggttccggaccagtgtgt

SEQ ID NO: 261240 - DNA, 30 bp, Artificial Sequence
  Synthetic oligonucleotide
gggatacgcacgacctttgccgacgtgtgt

SEQ ID NO: 261241 - DNA, 30 bp, Artificial Sequence
  Synthetic oligonucleotide
tatgattaaccggcccgcgatagcgtgtgt

SEQ ID NO: 261242 - DNA, 30 bp, Artificial Sequence
  Synthetic oligonucleotide
cctaccatctcgaccccattgcaggtgtgt

SEQ ID NO: 261243 - DNA, 30 bp, Artificial Sequence
  Synthetic oligonucleotide
cgttgttagttgtgctccctgctggtgtgt

SEQ ID NO: 261244 - DNA, 30 bp, Artificial Sequence
  Synthetic oligonucleotide
gggtgagtgagtcatcattccggtgtgtgt

SEQ ID NO: 261245 - DNA, 30 bp, Artificial Sequence
  Synthetic oligonucleotide
agtgactgtgtatttgaccttgcattgtgt

SEQ ID NO: 261246 - DNA, 30 bp, Artificial Sequence
  Synthetic oligonucleotide
cgtggttactacgatatcatacgattgtgt

SEQ ID NO: 261247 - DNA, 30 bp, Artificial Sequence
  Synthetic oligonucleotide
acgattcatcacggaagtcagatattgtgt

SEQ ID NO: 261248 - DNA, 30 bp, Artificial Sequence
  Synthetic oligonucleotide
ggaccaattcgccgtggaagctgcttgtgt

SEQ ID NO: 261249 - DNA, 30 bp, Artificial Sequence
  Synthetic oligonucleotide
tacaccaagtccaaaagatacgctttgtgt

SEQ ID NO: 261250 - DNA, 30 bp, Artificial Sequence
  Synthetic oligonucleotide
cagaatgtatgtacggttaagtttttgtgt

SEQ ID NO: 261251 - DNA, 30 bp, Artificial Sequence
  Synthetic oligonucleotide
ggaaactcatcacacgatccgcgcaattgt

SEQ ID NO: 261252 - DNA, 30 bp, Artificial Sequence
  Synthetic oligonucleotide
atcaagcactaccaaggtgcaacacattgt

SEQ ID NO: 261253 - DNA, 30 bp, Artificial Sequence
  Synthetic oligonucleotide
ctggagtgtgttagccctaggtgccattgt

SEQ ID NO: 261254 - DNA, 30 bp, Artificial Sequence
  Synthetic oligonucleotide
tggatctacgaatacgttcatgacgattgt

SEQ ID NO: 261255 - DNA, 30 bp, Artificial Sequence
  Synthetic oligonucleotide
gcagagtcagacaggcactccgtggattgt

SEQ ID NO: 261256 - DNA, 30 bp, Artificial Sequence
  Synthetic oligonucleotide
attcgaggaacgtggtgaggtgtatattgt

SEQ ID NO: 261257 - DNA, 30 bp, Artificial Sequence
  Synthetic oligonucleotide
cgttttgaaacagatactctcaagtattgt

SEQ ID NO: 261258 - DNA, 30 bp, Artificial Sequence
  Synthetic oligonucleotide
ccgtggccacggcatgtcactatttattgt

SEQ ID NO: 261259 - DNA, 30 bp, Artificial Sequence
  Synthetic oligonucleotide
gttaatggtgagagcttaatatacacttgt

SEQ ID NO: 261260 - DNA, 30 bp, Artificial Sequence
  Synthetic oligonucleotide
cgaacctgctaaggctattcagatacttgt

SEQ ID NO: 261261 - DNA, 30 bp, Artificial Sequence
  Synthetic oligonucleotide
gccgttatacataatggactaagtccttgt

SEQ ID NO: 261262 - DNA, 30 bp, Artificial Sequence
  Synthetic oligonucleotide
ccggttgggatcaagtcaaacgtagcttgt

SEQ ID NO: 261263 - DNA, 30 bp, Artificial Sequence
  Synthetic oligonucleotide
gcctaggcaaccgttaagtaaggtgcttgt

SEQ ID NO: 261264 - DNA, 30 bp, Artificial Sequence
  Synthetic oligonucleotide
catgtcaggagcgtctcaaggggtgcttgt

SEQ ID NO: 261265 - DNA, 30 bp, Artificial Sequence
  Synthetic oligonucleotide
atatacatactgtccagctctaactcttgt

SEQ ID NO: 261266 - DNA, 30 bp, Artificial Sequence
  Synthetic oligonucleotide
tgagtcgccgggccgtaaggatcgtcttgt

SEQ ID NO: 261267 - DNA, 30 bp, Artificial Sequence
  Synthetic oligonucleotide
gggaccaatctagtaatagtattttcttgt

SEQ ID NO: 261268 - DNA, 30 bp, Artificial Sequence
  Synthetic oligonucleotide
catgttatgtcttgaagtatggaaagttgt

SEQ ID NO: 261269 - DNA, 29 bp, Artificial Sequence
  Synthetic oligonucleotide
cttccgctgcggatgctagcctaagttgt

SEQ ID NO: 261270 - DNA, 30 bp, Artificial Sequence
  Synthetic oligonucleotide
gtatcacaattgcttattatatccagttgt

SEQ ID NO: 261271 - DNA, 30 bp, Artificial Sequence
  Synthetic oligonucleotide
ggtgtcccccatacccctactctcagttgt

SEQ ID NO: 261272 - DNA, 30 bp, Artificial Sequence
  Synthetic oligonucleotide
cgtgaactacagctctttgtggtcagttgt

SEQ ID NO: 261273 - DNA, 30 bp, Artificial Sequence
  Synthetic oligonucleotide
tagatagctttgaaccaccctaagagttgt

SEQ ID NO: 261274 - DNA, 29 bp, Artificial Sequence
  Synthetic oligonucleotide
tacgcagtcagtgcagtgatgtgagttgt

SEQ ID NO: 261275 - DNA, 30 bp, Artificial Sequence
  Synthetic oligonucleotide
cggggtgcagactccactttcccccgttgt

SEQ ID NO: 261276 - DNA, 30 bp, Artificial Sequence
  Synthetic oligonucleotide
tgaagacatccgcaggtacttatccgttgt

SEQ ID NO: 261277 - DNA, 30 bp, Artificial Sequence
  Synthetic oligonucleotide
gagtatggttcagaactctgaaggcgttgt

SEQ ID NO: 261278 - DNA, 30 bp, Artificial Sequence
  Synthetic oligonucleotide
tacgcccgaaatcgcgtccgggggcgttgt

SEQ ID NO: 261279 - DNA, 30 bp, Artificial Sequence
  Synthetic oligonucleotide
tcacccttgcaagtgatcggcgatcgttgt

SEQ ID NO: 261280 - DNA, 30 bp, Artificial Sequence
  Synthetic oligonucleotide
aagaaaacacgtactgcaggaaaaggttgt

SEQ ID NO: 261281 - DNA, 30 bp, Artificial Sequence
  Synthetic oligonucleotide
gcaatatttttaaggacaagtaaaggttgt

SEQ ID NO: 261282 - DNA, 30 bp, Artificial Sequence
  Synthetic oligonucleotide
gtgagtgataatataatcctatgaggttgt

SEQ ID NO: 261283 - DNA, 30 bp, Artificial Sequence
  Synthetic oligonucleotide
caaggtagccattgacgcatgtccggttgt

SEQ ID NO: 261284 - DNA, 30 bp, Artificial Sequence
  Synthetic oligonucleotide
atgaggaaacatgatcatgcggggggttgt

SEQ ID NO: 261285 - DNA, 30 bp, Artificial Sequence
  Synthetic oligonucleotide
tggcgatcgtatttagggatttgtggttgt

SEQ ID NO: 261286 - DNA, 30 bp, Artificial Sequence
  Synthetic oligonucleotide
gcgctagctcttttcataccgacatgttgt

SEQ ID NO: 261287 - DNA, 30 bp, Artificial Sequence
  Synthetic oligonucleotide
gattgtatgtgctaaccaaacccatgttgt

SEQ ID NO: 261288 - DNA, 30 bp, Artificial Sequence
  Synthetic oligonucleotide
tactagcccggaaggggtcttatctgttgt

SEQ ID NO: 261289 - DNA, 30 bp, Artificial Sequence
  Synthetic oligonucleotide
tgcgattctccatcattcttggagtgttgt

SEQ ID NO: 261290 - DNA, 30 bp, Artificial Sequence
  Synthetic oligonucleotide
ttccaggctatctggtaactcgtgtgttgt

SEQ ID NO: 261291 - DNA, 30 bp, Artificial Sequence
  Synthetic oligonucleotide
ccccgatcaacgtggtggaaagaaatttgt

SEQ ID NO: 261292 - DNA, 30 bp, Artificial Sequence
  Synthetic oligonucleotide
cagacatctagggtggccaggggaatttgt

SEQ ID NO: 261293 - DNA, 30 bp, Artificial Sequence
  Synthetic oligonucleotide
ggacagtggcattaaggcacatacatttgt

SEQ ID NO: 261294 - DNA, 31 bp, Artificial Sequence
  Synthetic oligonucleotide
agattaagtcgcgatgctaatcatcatttgt

SEQ ID NO: 261295 - DNA, 30 bp, Artificial Sequence
  Synthetic oligonucleotide
ttgaagttgaggacagaacgattcatttgt

SEQ ID NO: 261296 - DNA, 30 bp, Artificial Sequence
  Synthetic oligonucleotide
gctaacagtagttagcctaagttcatttgt

SEQ ID NO: 261297 - DNA, 30 bp, Artificial Sequence
  Synthetic oligonucleotide
gagtaaggtacggcgattttggcgatttgt

SEQ ID NO: 261298 - DNA, 30 bp, Artificial Sequence
  Synthetic oligonucleotide
taagttcttacgtagggtgtcgggatttgt

SEQ ID NO: 261299 - DNA, 30 bp, Artificial Sequence
  Synthetic oligonucleotide
ctccttgtacaggtacatggctggatttgt

SEQ ID NO: 261300 - DNA, 30 bp, Artificial Sequence
  Synthetic oligonucleotide
taagctgtcacgatccgtgagagtatttgt

SEQ ID NO: 261301 - DNA, 30 bp, Artificial Sequence
  Synthetic oligonucleotide
cggagtacgaatctcagactctttatttgt

SEQ ID NO: 261302 - DNA, 30 bp, Artificial Sequence
  Synthetic oligonucleotide
tggctggtggttaaaacagttagcctttgt

SEQ ID NO: 261303 - DNA, 30 bp, Artificial Sequence
  Synthetic oligonucleotide
ggcggctgggatagggatggacgtctttgt

SEQ ID NO: 261304 - DNA, 30 bp, Artificial Sequence
  Synthetic oligonucleotide
acgaccatgaaaccacggagcttagtttgt

SEQ ID NO: 261305 - DNA, 30 bp, Artificial Sequence
  Synthetic oligonucleotide
ggcagtgtacatgaaaattcctcggtttgt

SEQ ID NO: 261306 - DNA, 30 bp, Artificial Sequence
  Synthetic oligonucleotide
atgaaacgggatcgttttcgtactgtttgt

SEQ ID NO: 261307 - DNA, 30 bp, Artificial Sequence
  Synthetic oligonucleotide
tctaactagcgataatgatagatcttttgt

SEQ ID NO: 261308 - DNA, 29 bp, Artificial Sequence
  Synthetic oligonucleotide
tctgaccgccgatcgtaatagtcttttgt

SEQ ID NO: 261309 - DNA, 30 bp, Artificial Sequence
  Synthetic oligonucleotide
ttgtatctagacaagcgtaaccagttttgt

SEQ ID NO: 261310 - DNA, 30 bp, Artificial Sequence
  Synthetic oligonucleotide
ataatcactagcgccattcgttgtttttgt

SEQ ID NO: 261311 - DNA, 30 bp, Artificial Sequence
  Synthetic oligonucleotide
cacagtggtgtagagagcgtaacgaaaatt

SEQ ID NO: 261312 - DNA, 30 bp, Artificial Sequence
  Synthetic oligonucleotide
ttctcatttaactatgttattagtaaaatt

SEQ ID NO: 261313 - DNA, 30 bp, Artificial Sequence
  Synthetic oligonucleotide
gggccctacgcctggtatgttgaacaaatt

SEQ ID NO: 261314 - DNA, 30 bp, Artificial Sequence
  Synthetic oligonucleotide
gtcactgtcgttcgtgccttctaacaaatt

SEQ ID NO: 261315 - DNA, 30 bp, Artificial Sequence
  Synthetic oligonucleotide
acctctggaggggattaccggatacaaatt

SEQ ID NO: 261316 - DNA, 30 bp, Artificial Sequence
  Synthetic oligonucleotide
tggtggggtcgacgaaagacccgccaaatt

SEQ ID NO: 261317 - DNA, 30 bp, Artificial Sequence
  Synthetic oligonucleotide
tgtggtgaacggaagcgacactggcaaatt

SEQ ID NO: 261318 - DNA, 30 bp, Artificial Sequence
  Synthetic oligonucleotide
cacggcccgtaatggttcgggcttcaaatt

SEQ ID NO: 261319 - DNA, 30 bp, Artificial Sequence
  Synthetic oligonucleotide
tccccttgcggtgcctcggcctgagaaatt

SEQ ID NO: 261320 - DNA, 30 bp, Artificial Sequence
  Synthetic oligonucleotide
gagaataaggggggcaacgcttgagaaatt

SEQ ID NO: 261321 - DNA, 30 bp, Artificial Sequence
  Synthetic oligonucleotide
acagcttcagcacagtttatagtagaaatt

SEQ ID NO: 261322 - DNA, 30 bp, Artificial Sequence
  Synthetic oligonucleotide
ccggaccctaagatacagtccggggaaatt

SEQ ID NO: 261323 - DNA, 30 bp, Artificial Sequence
  Synthetic oligonucleotide
gaatctggcagtagatcatgctgggaaatt

SEQ ID NO: 261324 - DNA, 30 bp, Artificial Sequence
  Synthetic oligonucleotide
aaggctgtcagtgtgtgtagtatggaaatt

SEQ ID NO: 261325 - DNA, 30 bp, Artificial Sequence
  Synthetic oligonucleotide
cagaaacctggaggcggaggaacataaatt

SEQ ID NO: 261326 - DNA, 30 bp, Artificial Sequence
  Synthetic oligonucleotide
cacggtcaccgtcagagctcgtagtaaatt

SEQ ID NO: 261327 - DNA, 30 bp, Artificial Sequence
  Synthetic oligonucleotide
aggagcttccagcacatgcgagcgtaaatt

SEQ ID NO: 261328 - DNA, 30 bp, Artificial Sequence
  Synthetic oligonucleotide
cgatggttaatgctaactacacggtaaatt

SEQ ID NO: 261329 - DNA, 30 bp, Artificial Sequence
  Synthetic oligonucleotide
aagcgagcgattggggcacttctgtaaatt

SEQ ID NO: 261330 - DNA, 30 bp, Artificial Sequence
  Synthetic oligonucleotide
cgttcgggcactgtaaagcgcaattaaatt

SEQ ID NO: 261331 - DNA, 30 bp, Artificial Sequence
  Synthetic oligonucleotide
gcgagggagcaaacgtgtcactaaacaatt

SEQ ID NO: 261332 - DNA, 30 bp, Artificial Sequence
  Synthetic oligonucleotide
gggggtgcacaatattcttctggaacaatt

SEQ ID NO: 261333 - DNA, 30 bp, Artificial Sequence
  Synthetic oligonucleotide
ttacgggaggtggtttggctttgcacaatt

SEQ ID NO: 261334 - DNA, 30 bp, Artificial Sequence
  Synthetic oligonucleotide
gtacacttggtatctggacaccatacaatt

SEQ ID NO: 261335 - DNA, 30 bp, Artificial Sequence
  Synthetic oligonucleotide
gctgggtattgaagatgcatagttacaatt

SEQ ID NO: 261336 - DNA, 30 bp, Artificial Sequence
  Synthetic oligonucleotide
ctggtcatggctattaggtcggggccaatt

SEQ ID NO: 261337 - DNA, 30 bp, Artificial Sequence
  Synthetic oligonucleotide
gggctgtagcaagcccacgtgccagcaatt

SEQ ID NO: 261338 - DNA, 30 bp, Artificial Sequence
  Synthetic oligonucleotide
acaagacgttggactgacaaaccggcaatt

SEQ ID NO: 261339 - DNA, 30 bp, Artificial Sequence
  Synthetic oligonucleotide
acaatgcctgaaagaagcgtcatggcaatt

SEQ ID NO: 261340 - DNA, 30 bp, Artificial Sequence
  Synthetic oligonucleotide
tacctggactgcgataaaagccaatcaatt

SEQ ID NO: 261341 - DNA, 30 bp, Artificial Sequence
  Synthetic oligonucleotide
cttagtcactccgggtaacattaatcaatt

SEQ ID NO: 261342 - DNA, 30 bp, Artificial Sequence
  Synthetic oligonucleotide
tcgatttgcccccaaagcagcgtatcaatt

SEQ ID NO: 261343 - DNA, 30 bp, Artificial Sequence
  Synthetic oligonucleotide
cgctgagccagcggtgaccttatctcaatt

SEQ ID NO: 261344 - DNA, 30 bp, Artificial Sequence
  Synthetic oligonucleotide
tccagagaatggaacgttatctattcaatt

SEQ ID NO: 261345 - DNA, 30 bp, Artificial Sequence
  Synthetic oligonucleotide
aaaatcggagagctgaaatagtcttcaatt

SEQ ID NO: 261346 - DNA, 30 bp, Artificial Sequence
  Synthetic oligonucleotide
tacgtaaacagcaagtttggcttttcaatt

SEQ ID NO: 261347 - DNA, 30 bp, Artificial Sequence
  Synthetic oligonucleotide
caagcttcgactgtcgacggataaagaatt

SEQ ID NO: 261348 - DNA, 30 bp, Artificial Sequence
  Synthetic oligonucleotide
tgctcatgcaacaaagataagagaagaatt

SEQ ID NO: 261349 - DNA, 30 bp, Artificial Sequence
  Synthetic oligonucleotide
gggcatcagtaggcactgaaaggaagaatt

SEQ ID NO: 261350 - DNA, 30 bp, Artificial Sequence
  Synthetic oligonucleotide
gctgaattccgtgcaagggtaggaagaatt

SEQ ID NO: 261351 - DNA, 30 bp, Artificial Sequence
  Synthetic oligonucleotide
tcggtatcatgctaatccggggtaagaatt

SEQ ID NO: 261352 - DNA, 30 bp, Artificial Sequence
  Synthetic oligonucleotide
cttacgaaggctggggagtaaatcagaatt

SEQ ID NO: 261353 - DNA, 30 bp, Artificial Sequence
  Synthetic oligonucleotide
tctgactttaccatgcacctctggagaatt

SEQ ID NO: 261354 - DNA, 30 bp, Artificial Sequence
  Synthetic oligonucleotide
tgtgtccatggattgcgctgggatagaatt

SEQ ID NO: 261355 - DNA, 30 bp, Artificial Sequence
  Synthetic oligonucleotide
gctcaggtcttgtcgcctgctaaacgaatt

SEQ ID NO: 261356 - DNA, 30 bp, Artificial Sequence
  Synthetic oligonucleotide
aggacaaacgagttgcgcgtgccacgaatt

SEQ ID NO: 261357 - DNA, 30 bp, Artificial Sequence
  Synthetic oligonucleotide
gaactaacgattcgttgtaccgcacgaatt

SEQ ID NO: 261358 - DNA, 30 bp, Artificial Sequence
  Synthetic oligonucleotide
atatgcaacagacaattgtgcgatcgaatt

SEQ ID NO: 261359 - DNA, 30 bp, Artificial Sequence
  Synthetic oligonucleotide
cattcgccgacgatatgtctgaaaggaatt

SEQ ID NO: 261360 - DNA, 30 bp, Artificial Sequence
  Synthetic oligonucleotide
tagaacttgacatagggctattaaggaatt

SEQ ID NO: 261361 - DNA, 30 bp, Artificial Sequence
  Synthetic oligonucleotide
cttatgggcaaacccccttggcaatgaatt

SEQ ID NO: 261362 - DNA, 30 bp, Artificial Sequence
  Synthetic oligonucleotide
caacttgcactgacccttccaaggtgaatt

SEQ ID NO: 261363 - DNA, 30 bp, Artificial Sequence
  Synthetic oligonucleotide
tcggatagtatgccccacttgtggtgaatt

SEQ ID NO: 261364 - DNA, 30 bp, Artificial Sequence
  Synthetic oligonucleotide
gtcgatagcgtgtgccgtagactgtgaatt

SEQ ID NO: 261365 - DNA, 30 bp, Artificial Sequence
  Synthetic oligonucleotide
gagtactcttgggtactacaagcttgaatt

SEQ ID NO: 261366 - DNA, 30 bp, Artificial Sequence
  Synthetic oligonucleotide
agcgaaaagcctgggaataaggcttgaatt

SEQ ID NO: 261367 - DNA, 30 bp, Artificial Sequence
  Synthetic oligonucleotide
aattgcaatgtagagggcctgttaataatt

SEQ ID NO: 261368 - DNA, 30 bp, Artificial Sequence
  Synthetic oligonucleotide
acggtcgcgccaatgacgggaaacataatt

SEQ ID NO: 261369 - DNA, 30 bp, Artificial Sequence
  Synthetic oligonucleotide
ctcatgaatccatgtggtcaagagataatt

SEQ ID NO: 261370 - DNA, 30 bp, Artificial Sequence
  Synthetic oligonucleotide
ttcatcagtacccaaaggacacatataatt

SEQ ID NO: 261371 - DNA, 30 bp, Artificial Sequence
  Synthetic oligonucleotide
accgaccgtaggtatggtgcgcatataatt

SEQ ID NO: 261372 - DNA, 30 bp, Artificial Sequence
  Synthetic oligonucleotide
cagccacaacttgatttaggttgactaatt

SEQ ID NO: 261373 - DNA, 30 bp, Artificial Sequence
  Synthetic oligonucleotide
tacacacacggaatacgcgaggtcctaatt

SEQ ID NO: 261374 - DNA, 30 bp, Artificial Sequence
  Synthetic oligonucleotide
tggaaactccgcgggacaggggcgctaatt

SEQ ID NO: 261375 - DNA, 30 bp, Artificial Sequence
  Synthetic oligonucleotide
ataaggagggaagtcctcccgagtctaatt

SEQ ID NO: 261376 - DNA, 30 bp, Artificial Sequence
  Synthetic oligonucleotide
tgctagcagggattccgggaggaagtaatt

SEQ ID NO: 261377 - DNA, 30 bp, Artificial Sequence
  Synthetic oligonucleotide
gtcgtccttggcgattaacactacgtaatt

SEQ ID NO: 261378 - DNA, 30 bp, Artificial Sequence
  Synthetic oligonucleotide
aagtggtgttttgaactgaggtacgtaatt

SEQ ID NO: 261379 - DNA, 30 bp, Artificial Sequence
  Synthetic oligonucleotide
ggcgtgacgggatcacaccgggtggtaatt

SEQ ID NO: 261380 - DNA, 30 bp, Artificial Sequence
  Synthetic oligonucleotide
cttgcaaccctaatatcatactccttaatt

SEQ ID NO: 261381 - DNA, 30 bp, Artificial Sequence
  Synthetic oligonucleotide
cccgcagggaacatgttaaaaagcttaatt

SEQ ID NO: 261382 - DNA, 30 bp, Artificial Sequence
  Synthetic oligonucleotide
cgtatgggtgtgtgtttattggtcttaatt

SEQ ID NO: 261383 - DNA, 30 bp, Artificial Sequence
  Synthetic oligonucleotide
cgagcggcgtaaaaattgtcgccgttaatt

SEQ ID NO: 261384 - DNA, 30 bp, Artificial Sequence
  Synthetic oligonucleotide
attgtgccgtggtttagaaggcatttaatt

SEQ ID NO: 261385 - DNA, 30 bp, Artificial Sequence
  Synthetic oligonucleotide
acgtccgtgtgatctgcgaggcttttaatt

SEQ ID NO: 261386 - DNA, 30 bp, Artificial Sequence
  Synthetic oligonucleotide
acagtcaaattagcgccaatacgaaacatt

SEQ ID NO: 261387 - DNA, 30 bp, Artificial Sequence
  Synthetic oligonucleotide
atgccgggcaaacatgatgagatcaacatt

SEQ ID NO: 261388 - DNA, 30 bp, Artificial Sequence
  Synthetic oligonucleotide
ggctcctggccttttaggatctgtaacatt

SEQ ID NO: 261389 - DNA, 30 bp, Artificial Sequence
  Synthetic oligonucleotide
ttttatgggcgaggggcgtatggccacatt

SEQ ID NO: 261390 - DNA, 30 bp, Artificial Sequence
  Synthetic oligonucleotide
tccggcatggccaccaagattgctcacatt

SEQ ID NO: 261391 - DNA, 30 bp, Artificial Sequence
  Synthetic oligonucleotide
tgaaaacgtctgtttgaaatttctcacatt

SEQ ID NO: 261392 - DNA, 30 bp, Artificial Sequence
  Synthetic oligonucleotide
cactgcagcgggcagacatcgagtcacatt

SEQ ID NO: 261393 - DNA, 29 bp, Artificial Sequence
  Synthetic oligonucleotide
agccagtaaacgcggagatcctagacatt

SEQ ID NO: 261394 - DNA, 30 bp, Artificial Sequence
  Synthetic oligonucleotide
aagtaagcgacctattccgaataggacatt

SEQ ID NO: 261395 - DNA, 30 bp, Artificial Sequence
  Synthetic oligonucleotide
agagggccagctgtgttcgtgatggacatt

SEQ ID NO: 261396 - DNA, 30 bp, Artificial Sequence
  Synthetic oligonucleotide
agtaatgctacttggcgtgctaatgacatt

SEQ ID NO: 261397 - DNA, 30 bp, Artificial Sequence
  Synthetic oligonucleotide
acaggaagacttatagctattttatacatt

SEQ ID NO: 261398 - DNA, 30 bp, Artificial Sequence
  Synthetic oligonucleotide
ctggatgctgagagaatcatccgctacatt

SEQ ID NO: 261399 - DNA, 29 bp, Artificial Sequence
  Synthetic oligonucleotide
ggagtttcagacacttacatccgtacatt

SEQ ID NO: 261400 - DNA, 30 bp, Artificial Sequence
  Synthetic oligonucleotide
gacaacgatcggaaacacctattgtacatt

SEQ ID NO: 261401 - DNA, 30 bp, Artificial Sequence
  Synthetic oligonucleotide
ttgagtgatcgtctgttgcacccttacatt

SEQ ID NO: 261402 - DNA, 30 bp, Artificial Sequence
  Synthetic oligonucleotide
tacctagatgagataggtatgcgttacatt

SEQ ID NO: 261403 - DNA, 30 bp, Artificial Sequence
  Synthetic oligonucleotide
ggatctatatctgagagtagccaaaccatt

SEQ ID NO: 261404 - DNA, 30 bp, Artificial Sequence
  Synthetic oligonucleotide
ctacaatgtatcggtatgctctacaccatt

SEQ ID NO: 261405 - DNA, 30 bp, Artificial Sequence
  Synthetic oligonucleotide
tcctatgagcggcacagcctaccgaccatt

SEQ ID NO: 261406 - DNA, 30 bp, Artificial Sequence
  Synthetic oligonucleotide
gaactaaagagaagtacaaaacgacccatt

SEQ ID NO: 261407 - DNA, 30 bp, Artificial Sequence
  Synthetic oligonucleotide
caccgtacttcatcgcagggtcgccccatt

SEQ ID NO: 261408 - DNA, 30 bp, Artificial Sequence
  Synthetic oligonucleotide
caaaactcctcactaagcccagtccccatt

SEQ ID NO: 261409 - DNA, 30 bp, Artificial Sequence
  Synthetic oligonucleotide
tcctcaaacatttattaataagagcccatt

SEQ ID NO: 261410 - DNA, 30 bp, Artificial Sequence
  Synthetic oligonucleotide
cagaccctggataaagataatgttcccatt

SEQ ID NO: 261411 - DNA, 31 bp, Artificial Sequence
  Synthetic oligonucleotide
agtctgcgaggcttccaggtgctaagccatt

SEQ ID NO: 261412 - DNA, 30 bp, Artificial Sequence
  Synthetic oligonucleotide
ggtggactttccatatagagtaaggccatt

SEQ ID NO: 261413 - DNA, 31 bp, Artificial Sequence
  Synthetic oligonucleotide
tttgaagccctcagagtagaaattggccatt

SEQ ID NO: 261414 - DNA, 30 bp, Artificial Sequence
  Synthetic oligonucleotide
cataggaaaagaagaaaatttacctccatt

SEQ ID NO: 261415 - DNA, 30 bp, Artificial Sequence
  Synthetic oligonucleotide
tcatcacgggggtcatacaattcgtccatt

SEQ ID NO: 261416 - DNA, 30 bp, Artificial Sequence
  Synthetic oligonucleotide
tgcatcaattcttcggataaggacagcatt

SEQ ID NO: 261417 - DNA, 30 bp, Artificial Sequence
  Synthetic oligonucleotide
agagaggatcatacgggactgcccagcatt

SEQ ID NO: 261418 - DNA, 30 bp, Artificial Sequence
  Synthetic oligonucleotide
gaaaaaagggctagagtgtgcctcagcatt

SEQ ID NO: 261419 - DNA, 30 bp, Artificial Sequence
  Synthetic oligonucleotide
tacgaatcctaactttgtggaacgagcatt

SEQ ID NO: 261420 - DNA, 30 bp, Artificial Sequence
  Synthetic oligonucleotide
gcgttaacggtccggaactccaatagcatt

SEQ ID NO: 261421 - DNA, 30 bp, Artificial Sequence
  Synthetic oligonucleotide
aacaagaactgtatactaaagaatagcatt

SEQ ID NO: 261422 - DNA, 30 bp, Artificial Sequence
  Synthetic oligonucleotide
tcattgtcggtaaggtgttcgagtagcatt

SEQ ID NO: 261423 - DNA, 30 bp, Artificial Sequence
  Synthetic oligonucleotide
aaccccggcccagactaattatttagcatt

SEQ ID NO: 261424 - DNA, 30 bp, Artificial Sequence
  Synthetic oligonucleotide
taatgcgattcgcggtattttagccgcatt

SEQ ID NO: 261425 - DNA, 30 bp, Artificial Sequence
  Synthetic oligonucleotide
tggctgccacactgcgttccagtccgcatt

SEQ ID NO: 261426 - DNA, 30 bp, Artificial Sequence
  Synthetic oligonucleotide
agatataagtggggtcaaagtacgcgcatt

SEQ ID NO: 261427 - DNA, 30 bp, Artificial Sequence
  Synthetic oligonucleotide
ctggttgagattctctcaagggtgcgcatt

SEQ ID NO: 261428 - DNA, 30 bp, Artificial Sequence
  Synthetic oligonucleotide
ccagctcgacccaaagtgaggcctcgcatt

SEQ ID NO: 261429 - DNA, 30 bp, Artificial Sequence
  Synthetic oligonucleotide
ttgtctccgatgggacatgaatctcgcatt

SEQ ID NO: 261430 - DNA, 30 bp, Artificial Sequence
  Synthetic oligonucleotide
tggaaatacatcgtgggcttgcttcgcatt

SEQ ID NO: 261431 - DNA, 30 bp, Artificial Sequence
  Synthetic oligonucleotide
aaaccactgctcagtcaacttgtaggcatt

SEQ ID NO: 261432 - DNA, 30 bp, Artificial Sequence
  Synthetic oligonucleotide
gccgggtgggcgtagtaagcacagggcatt

SEQ ID NO: 261433 - DNA, 30 bp, Artificial Sequence
  Synthetic oligonucleotide
actcgatcataaagacggcgtcaatgcatt

SEQ ID NO: 261434 - DNA, 30 bp, Artificial Sequence
  Synthetic oligonucleotide
ctggacccactggcgcattattcatgcatt

SEQ ID NO: 261435 - DNA, 30 bp, Artificial Sequence
  Synthetic oligonucleotide
ctcagactggacaccataccctcgtgcatt

SEQ ID NO: 261436 - DNA, 30 bp, Artificial Sequence
  Synthetic oligonucleotide
caagtatgtttcatcgttttggggtgcatt

SEQ ID NO: 261437 - DNA, 30 bp, Artificial Sequence
  Synthetic oligonucleotide
ttacgtatagacacaggtacattgtgcatt

SEQ ID NO: 261438 - DNA, 30 bp, Artificial Sequence
  Synthetic oligonucleotide
gatccatctgcatattatgggtgttgcatt

SEQ ID NO: 261439 - DNA, 30 bp, Artificial Sequence
  Synthetic oligonucleotide
gactgtctctaacacctgtgattcatcatt

SEQ ID NO: 261440 - DNA, 30 bp, Artificial Sequence
  Synthetic oligonucleotide
aaagttatcattagcaatcgacagatcatt

SEQ ID NO: 261441 - DNA, 30 bp, Artificial Sequence
  Synthetic oligonucleotide
aaatataagtggaaatgaactgtactcatt

SEQ ID NO: 261442 - DNA, 30 bp, Artificial Sequence
  Synthetic oligonucleotide
agttaacttgtgtaactaggaagtctcatt

SEQ ID NO: 261443 - DNA, 30 bp, Artificial Sequence
  Synthetic oligonucleotide
ggcaacgatacattgcacgctaaagtcatt

SEQ ID NO: 261444 - DNA, 30 bp, Artificial Sequence
  Synthetic oligonucleotide
ctggttgcctgtccgtaaaacttcgtcatt

SEQ ID NO: 261445 - DNA, 30 bp, Artificial Sequence
  Synthetic oligonucleotide
catcacccggaggaatacgaagtggtcatt

SEQ ID NO: 261446 - DNA, 30 bp, Artificial Sequence
  Synthetic oligonucleotide
cgggaactcccttttatgtgggtggtcatt

SEQ ID NO: 261447 - DNA, 30 bp, Artificial Sequence
  Synthetic oligonucleotide
gataccggtgggctccgagcaattgtcatt

SEQ ID NO: 261448 - DNA, 30 bp, Artificial Sequence
  Synthetic oligonucleotide
gcttacggtagcgtcttgtccgttgtcatt

SEQ ID NO: 261449 - DNA, 30 bp, Artificial Sequence
  Synthetic oligonucleotide
gcaaatcccaagtacacaagataattcatt

SEQ ID NO: 261450 - DNA, 30 bp, Artificial Sequence
  Synthetic oligonucleotide
gcttacatagtcttctcataaatcttcatt

SEQ ID NO: 261451 - DNA, 30 bp, Artificial Sequence
  Synthetic oligonucleotide
gtccatgcctgcccttcgaacgagttcatt

SEQ ID NO: 261452 - DNA, 30 bp, Artificial Sequence
  Synthetic oligonucleotide
gtgtaaagaaaggcgtcgtcagctttcatt

SEQ ID NO: 261453 - DNA, 30 bp, Artificial Sequence
  Synthetic oligonucleotide
gtcatcgcttttcatcggacacccaagatt

SEQ ID NO: 261454 - DNA, 30 bp, Artificial Sequence
  Synthetic oligonucleotide
ctaattggcttcggggtccgggcgaagatt

SEQ ID NO: 261455 - DNA, 30 bp, Artificial Sequence
  Synthetic oligonucleotide
caccgggtgcaagtgttttcagggaagatt

SEQ ID NO: 261456 - DNA, 30 bp, Artificial Sequence
  Synthetic oligonucleotide
tctcgcgtcctccaggcaactattaagatt

SEQ ID NO: 261457 - DNA, 30 bp, Artificial Sequence
  Synthetic oligonucleotide
gttaatattgtgattcatccagtacagatt

SEQ ID NO: 261458 - DNA, 30 bp, Artificial Sequence
  Synthetic oligonucleotide
tgcgtagtccgtaagatctgcgtacagatt

SEQ ID NO: 261459 - DNA, 30 bp, Artificial Sequence
  Synthetic oligonucleotide
ctgattagctggtacgatatataccagatt

SEQ ID NO: 261460 - DNA, 30 bp, Artificial Sequence
  Synthetic oligonucleotide
ttgccgatcacgaggtgttggagccagatt

SEQ ID NO: 261461 - DNA, 30 bp, Artificial Sequence
  Synthetic oligonucleotide
accatatcgtgctgccaacactcagagatt

SEQ ID NO: 261462 - DNA, 30 bp, Artificial Sequence
  Synthetic oligonucleotide
gtagcggaataacataaaacctccgagatt

SEQ ID NO: 261463 - DNA, 30 bp, Artificial Sequence
  Synthetic oligonucleotide
tataccgggtagctccacgtgaaatagatt

SEQ ID NO: 261464 - DNA, 30 bp, Artificial Sequence
  Synthetic oligonucleotide
tggcgaagtgacgagtttaactaatagatt

SEQ ID NO: 261465 - DNA, 30 bp, Artificial Sequence
  Synthetic oligonucleotide
ctacgaacacctggttgcacaaactagatt

SEQ ID NO: 261466 - DNA, 30 bp, Artificial Sequence
  Synthetic oligonucleotide
atcgatcacaaccttgcgcagacctagatt

SEQ ID NO: 261467 - DNA, 30 bp, Artificial Sequence
  Synthetic oligonucleotide
agatacaggtgaatgcctctcacgtagatt

SEQ ID NO: 261468 - DNA, 30 bp, Artificial Sequence
  Synthetic oligonucleotide
caagataacgagtttgagaagaaaacgatt

SEQ ID NO: 261469 - DNA, 30 bp, Artificial Sequence
  Synthetic oligonucleotide
accaaaatctgacgtgatgagagaacgatt

SEQ ID NO: 261470 - DNA, 30 bp, Artificial Sequence
  Synthetic oligonucleotide
gtacataaaaatcgcgctatctgcacgatt

SEQ ID NO: 261471 - DNA, 30 bp, Artificial Sequence
  Synthetic oligonucleotide
cgtacgaagaacaccttctttctcacgatt

SEQ ID NO: 261472 - DNA, 30 bp, Artificial Sequence
  Synthetic oligonucleotide
cataatattagtctaattgaccagacgatt

SEQ ID NO: 261473 - DNA, 30 bp, Artificial Sequence
  Synthetic oligonucleotide
aggtattacgggatgtttcaggaaccgatt

SEQ ID NO: 261474 - DNA, 30 bp, Artificial Sequence
  Synthetic oligonucleotide
aattcgtaatcccgatgtgttgaaccgatt

SEQ ID NO: 261475 - DNA, 30 bp, Artificial Sequence
  Synthetic oligonucleotide
gtgttcctcgtgcattctagcaagccgatt

SEQ ID NO: 261476 - DNA, 30 bp, Artificial Sequence
  Synthetic oligonucleotide
ccagtcacgggtatttacgctcggccgatt

SEQ ID NO: 261477 - DNA, 30 bp, Artificial Sequence
  Synthetic oligonucleotide
tagaagccgcgagtagaacgtatgccgatt

SEQ ID NO: 261478 - DNA, 30 bp, Artificial Sequence
  Synthetic oligonucleotide
ggtccagaaaatgccgactttcgcgcgatt

SEQ ID NO: 261479 - DNA, 30 bp, Artificial Sequence
  Synthetic oligonucleotide
taggcgaccagtgtggtgcgaacggcgatt

SEQ ID NO: 261480 - DNA, 30 bp, Artificial Sequence
  Synthetic oligonucleotide
caggcgcgcgctctggtagcacaatcgatt

SEQ ID NO: 261481 - DNA, 30 bp, Artificial Sequence
  Synthetic oligonucleotide
agcgtggatgcataacgcgagtgctcgatt

SEQ ID NO: 261482 - DNA, 30 bp, Artificial Sequence
  Synthetic oligonucleotide
cgtttgacctcgcgttctagagagtcgatt

SEQ ID NO: 261483 - DNA, 30 bp, Artificial Sequence
  Synthetic oligonucleotide
actagtggaatggaaatttattattcgatt

SEQ ID NO: 261484 - DNA, 30 bp, Artificial Sequence
  Synthetic oligonucleotide
cttctgcattcggcaatggaagcttcgatt

SEQ ID NO: 261485 - DNA, 30 bp, Artificial Sequence
  Synthetic oligonucleotide
gagtagtaaccgtagaacgacagaaggatt

SEQ ID NO: 261486 - DNA, 30 bp, Artificial Sequence
  Synthetic oligonucleotide
aagagaaattggctgctattgaccaggatt

SEQ ID NO: 261487 - DNA, 30 bp, Artificial Sequence
  Synthetic oligonucleotide
tgtttggaattcgaactatggtagaggatt

SEQ ID NO: 261488 - DNA, 30 bp, Artificial Sequence
  Synthetic oligonucleotide
acccgagctttcgatatctggttgaggatt

SEQ ID NO: 261489 - DNA, 30 bp, Artificial Sequence
  Synthetic oligonucleotide
gggttcccgaatgaactgatggaccggatt

SEQ ID NO: 261490 - DNA, 30 bp, Artificial Sequence
  Synthetic oligonucleotide
atgacgacaatgaccccagtatgccggatt

SEQ ID NO: 261491 - DNA, 30 bp, Artificial Sequence
  Synthetic oligonucleotide
ccctggtgttgccgcgttggccggcggatt

SEQ ID NO: 261492 - DNA, 30 bp, Artificial Sequence
  Synthetic oligonucleotide
gttataccgcctaatagataaaatcggatt

SEQ ID NO: 261493 - DNA, 30 bp, Artificial Sequence
  Synthetic oligonucleotide
gctttgctgtatgagtccaaaagagggatt

SEQ ID NO: 261494 - DNA, 28 bp, Artificial Sequence
  Synthetic oligonucleotide
aagtaagattacagaggcaagagggatt

SEQ ID NO: 261495 - DNA, 30 bp, Artificial Sequence
  Synthetic oligonucleotide
ttaacgggaactctgatatcttgagggatt

SEQ ID NO: 261496 - DNA, 30 bp, Artificial Sequence
  Synthetic oligonucleotide
ttcggtccggagtccgtttatcgcgggatt

SEQ ID NO: 261497 - DNA, 30 bp, Artificial Sequence
  Synthetic oligonucleotide
acgtttcctagctcccgttcccaggggatt

SEQ ID NO: 261498 - DNA, 30 bp, Artificial Sequence
  Synthetic oligonucleotide
ttcatcccggtgacagagatctcggggatt

SEQ ID NO: 261499 - DNA, 30 bp, Artificial Sequence
  Synthetic oligonucleotide
acccgcgagtcaaggaagctcagggggatt

SEQ ID NO: 261500 - DNA, 30 bp, Artificial Sequence
  Synthetic oligonucleotide
tgcgttagttagcgtgagtcacatgggatt

SEQ ID NO: 261501 - DNA, 30 bp, Artificial Sequence
  Synthetic oligonucleotide
cacaccagttttggtacggaggctgggatt

SEQ ID NO: 261502 - DNA, 30 bp, Artificial Sequence
  Synthetic oligonucleotide
tatcacgtagcgggcaggctagcctggatt

SEQ ID NO: 261503 - DNA, 30 bp, Artificial Sequence
  Synthetic oligonucleotide
gggatttctcgatagcttaagcgctggatt

SEQ ID NO: 261504 - DNA, 30 bp, Artificial Sequence
  Synthetic oligonucleotide
ctacgaactcctaattccgcgtgctggatt

SEQ ID NO: 261505 - DNA, 31 bp, Artificial Sequence
  Synthetic oligonucleotide
gcccacattagtctcgagtagtatttggatt

SEQ ID NO: 261506 - DNA, 30 bp, Artificial Sequence
  Synthetic oligonucleotide
gccccggctgtctatcaggactaaatgatt

SEQ ID NO: 261507 - DNA, 30 bp, Artificial Sequence
  Synthetic oligonucleotide
ttaataaacgctaagggtgagaccatgatt

SEQ ID NO: 261508 - DNA, 30 bp, Artificial Sequence
  Synthetic oligonucleotide
gataaatgtattgcggaaagtagcatgatt

SEQ ID NO: 261509 - DNA, 30 bp, Artificial Sequence
  Synthetic oligonucleotide
gggtgtcatgcgagcgagtgacctatgatt

SEQ ID NO: 261510 - DNA, 30 bp, Artificial Sequence
  Synthetic oligonucleotide
tccacattgagcgttactacttgtatgatt

SEQ ID NO: 261511 - DNA, 30 bp, Artificial Sequence
  Synthetic oligonucleotide
aaatagagagaggacgcgatgcttatgatt

SEQ ID NO: 261512 - DNA, 30 bp, Artificial Sequence
  Synthetic oligonucleotide
gctctcggggagtaagcgacgagcctgatt

SEQ ID NO: 261513 - DNA, 30 bp, Artificial Sequence
  Synthetic oligonucleotide
ggcacgttgacgttctaccaagtcctgatt

SEQ ID NO: 261514 - DNA, 30 bp, Artificial Sequence
  Synthetic oligonucleotide
tgtacgacttgtccgcgaacaaacgtgatt

SEQ ID NO: 261515 - DNA, 30 bp, Artificial Sequence
  Synthetic oligonucleotide
tggtgggactgttattagtggtacgtgatt

SEQ ID NO: 261516 - DNA, 30 bp, Artificial Sequence
  Synthetic oligonucleotide
aaggaacacgttagtcgcgcgggcgtgatt

SEQ ID NO: 261517 - DNA, 30 bp, Artificial Sequence
  Synthetic oligonucleotide
agtatgaggagctagtcgtgaacggtgatt

SEQ ID NO: 261518 - DNA, 30 bp, Artificial Sequence
  Synthetic oligonucleotide
ttcgccaaggcactcataatgaatgtgatt

SEQ ID NO: 261519 - DNA, 30 bp, Artificial Sequence
  Synthetic oligonucleotide
cgggaatctaactgtgcagtgaatgtgatt

SEQ ID NO: 261520 - DNA, 30 bp, Artificial Sequence
  Synthetic oligonucleotide
gtgggatcgggacgcaatggcccattgatt

SEQ ID NO: 261521 - DNA, 30 bp, Artificial Sequence
  Synthetic oligonucleotide
gttgattaatagcaacgaagaggcttgatt

SEQ ID NO: 261522 - DNA, 30 bp, Artificial Sequence
  Synthetic oligonucleotide
ataggacggtggaaccgtttcttcttgatt

SEQ ID NO: 261523 - DNA, 30 bp, Artificial Sequence
  Synthetic oligonucleotide
gcaaagttagcgttaagtttttagttgatt

SEQ ID NO: 261524 - DNA, 30 bp, Artificial Sequence
  Synthetic oligonucleotide
acggccgaagcattatctgtcactttgatt

SEQ ID NO: 261525 - DNA, 30 bp, Artificial Sequence
  Synthetic oligonucleotide
tcaatgtctcgggaccaaacttgtttgatt

SEQ ID NO: 261526 - DNA, 30 bp, Artificial Sequence
  Synthetic oligonucleotide
agtctttaacaggccaaatggaataatatt

SEQ ID NO: 261527 - DNA, 30 bp, Artificial Sequence
  Synthetic oligonucleotide
agacagttagatagcgggagatgtaatatt

SEQ ID NO: 261528 - DNA, 30 bp, Artificial Sequence
  Synthetic oligonucleotide
caaccgtgcggacaagcaaggattaatatt

SEQ ID NO: 261529 - DNA, 30 bp, Artificial Sequence
  Synthetic oligonucleotide
tgttggcaagttgggggatagctcgatatt

SEQ ID NO: 261530 - DNA, 30 bp, Artificial Sequence
  Synthetic oligonucleotide
acctatctcctccgaaacgttatggatatt

SEQ ID NO: 261531 - DNA, 30 bp, Artificial Sequence
  Synthetic oligonucleotide
ggcctctcgaccagatcggattctgatatt

SEQ ID NO: 261532 - DNA, 30 bp, Artificial Sequence
  Synthetic oligonucleotide
ccttgtgattggcaattcggaggatatatt

SEQ ID NO: 261533 - DNA, 30 bp, Artificial Sequence
  Synthetic oligonucleotide
caaagagagctggtagctgataactatatt

SEQ ID NO: 261534 - DNA, 30 bp, Artificial Sequence
  Synthetic oligonucleotide
aaacatagtgggtgtaatggaccttatatt

SEQ ID NO: 261535 - DNA, 30 bp, Artificial Sequence
  Synthetic oligonucleotide
tggacccatcgaagcgcactagtttatatt

SEQ ID NO: 261536 - DNA, 30 bp, Artificial Sequence
  Synthetic oligonucleotide
actctgtcaaaaaaacagttatgaactatt

SEQ ID NO: 261537 - DNA, 30 bp, Artificial Sequence
  Synthetic oligonucleotide
gagccttgaattacttgaattaacactatt

SEQ ID NO: 261538 - DNA, 30 bp, Artificial Sequence
  Synthetic oligonucleotide
tcccggtgatccatggcgactaccactatt

SEQ ID NO: 261539 - DNA, 30 bp, Artificial Sequence
  Synthetic oligonucleotide
tccgttacgtattgcttgctctggactatt

SEQ ID NO: 261540 - DNA, 30 bp, Artificial Sequence
  Synthetic oligonucleotide
catctatacaatttgagcgaccttactatt

SEQ ID NO: 261541 - DNA, 30 bp, Artificial Sequence
  Synthetic oligonucleotide
gacttcaatttgcgataacctgcacctatt

SEQ ID NO: 261542 - DNA, 30 bp, Artificial Sequence
  Synthetic oligonucleotide
tgaagcattgcttcgggtaaatcacctatt

SEQ ID NO: 261543 - DNA, 30 bp, Artificial Sequence
  Synthetic oligonucleotide
atgctgggtccgatcgatgcatgacctatt

SEQ ID NO: 261544 - DNA, 30 bp, Artificial Sequence
  Synthetic oligonucleotide
cttgggcaaatagacggttaagtacctatt

SEQ ID NO: 261545 - DNA, 30 bp, Artificial Sequence
  Synthetic oligonucleotide
ccagggtaccggcggtaggcgccccctatt

SEQ ID NO: 261546 - DNA, 30 bp, Artificial Sequence
  Synthetic oligonucleotide
caatcggtaatgaaaagcgtatatcctatt

SEQ ID NO: 261547 - DNA, 30 bp, Artificial Sequence
  Synthetic oligonucleotide
atggaactatcaaaaagcatgactcctatt

SEQ ID NO: 261548 - DNA, 30 bp, Artificial Sequence
  Synthetic oligonucleotide
gcagggatgtaaaggaaattaagagctatt

SEQ ID NO: 261549 - DNA, 30 bp, Artificial Sequence
  Synthetic oligonucleotide
ggctgtgatgtcaatcaatagagagctatt

SEQ ID NO: 261550 - DNA, 30 bp, Artificial Sequence
  Synthetic oligonucleotide
cccttcttataaataaactgaggcgctatt

SEQ ID NO: 261551 - DNA, 30 bp, Artificial Sequence
  Synthetic oligonucleotide
atgcctatccatggatcccaattcgctatt

SEQ ID NO: 261552 - DNA, 30 bp, Artificial Sequence
  Synthetic oligonucleotide
tcgcatattgtgacccctaccctggctatt

SEQ ID NO: 261553 - DNA, 30 bp, Artificial Sequence
  Synthetic oligonucleotide
ggggtgtcaacctaacggttatatgctatt

SEQ ID NO: 261554 - DNA, 30 bp, Artificial Sequence
  Synthetic oligonucleotide
gactgggcgcacctgtaacaggctgctatt

SEQ ID NO: 261555 - DNA, 30 bp, Artificial Sequence
  Synthetic oligonucleotide
ggcaactctgtgctccgactgtgtgctatt

SEQ ID NO: 261556 - DNA, 30 bp, Artificial Sequence
  Synthetic oligonucleotide
atggttcaatcggccgcaaatattgctatt

SEQ ID NO: 261557 - DNA, 31 bp, Artificial Sequence
  Synthetic oligonucleotide
catctccagccgacgaatcaaactatctatt

SEQ ID NO: 261558 - DNA, 30 bp, Artificial Sequence
  Synthetic oligonucleotide
tgtgtgatgcacacgcccgcgcagtctatt

SEQ ID NO: 261559 - DNA, 30 bp, Artificial Sequence
  Synthetic oligonucleotide
gttagagcagggaacctggttaattctatt

SEQ ID NO: 261560 - DNA, 30 bp, Artificial Sequence
  Synthetic oligonucleotide
caagtcagtggcacgtgaggacgttctatt

SEQ ID NO: 261561 - DNA, 30 bp, Artificial Sequence
  Synthetic oligonucleotide
gtggccatgagggtcgccgtgttttctatt

SEQ ID NO: 261562 - DNA, 30 bp, Artificial Sequence
  Synthetic oligonucleotide
ggaagatagcgcgcgacttgtaaaagtatt

SEQ ID NO: 261563 - DNA, 30 bp, Artificial Sequence
  Synthetic oligonucleotide
gcctaaattgaagctaaaaataacagtatt

SEQ ID NO: 261564 - DNA, 30 bp, Artificial Sequence
  Synthetic oligonucleotide
tcaactggatgggatatgagtcccagtatt

SEQ ID NO: 261565 - DNA, 30 bp, Artificial Sequence
  Synthetic oligonucleotide
agctaagccaggggatactgccatagtatt

SEQ ID NO: 261566 - DNA, 30 bp, Artificial Sequence
  Synthetic oligonucleotide
ccaagaccaggcaccctcatagttagtatt

SEQ ID NO: 261567 - DNA, 30 bp, Artificial Sequence
  Synthetic oligonucleotide
agctaaaagagactgtcgcggtttagtatt

SEQ ID NO: 261568 - DNA, 30 bp, Artificial Sequence
  Synthetic oligonucleotide
aggcttgctacacggaagcgggtacgtatt

SEQ ID NO: 261569 - DNA, 30 bp, Artificial Sequence
  Synthetic oligonucleotide
cacatgatgagtatttggcctttacgtatt

SEQ ID NO: 261570 - DNA, 30 bp, Artificial Sequence
  Synthetic oligonucleotide
tcgatggggggtactctacgcgcgcgtatt

SEQ ID NO: 261571 - DNA, 30 bp, Artificial Sequence
  Synthetic oligonucleotide
cgtaatggcgataaattgattaatcgtatt

SEQ ID NO: 261572 - DNA, 30 bp, Artificial Sequence
  Synthetic oligonucleotide
gcaagatcgatctaaggcttatctcgtatt

SEQ ID NO: 261573 - DNA, 30 bp, Artificial Sequence
  Synthetic oligonucleotide
cgttggacatcgcggagcataagtcgtatt

SEQ ID NO: 261574 - DNA, 30 bp, Artificial Sequence
  Synthetic oligonucleotide
gatgcggtcaccgcaatagcgcttcgtatt

SEQ ID NO: 261575 - DNA, 30 bp, Artificial Sequence
  Synthetic oligonucleotide
gggcaccgcaaacccaggcatcgaggtatt

SEQ ID NO: 261576 - DNA, 30 bp, Artificial Sequence
  Synthetic oligonucleotide
acagtcgtttcgcatcgtcggggaggtatt

SEQ ID NO: 261577 - DNA, 30 bp, Artificial Sequence
  Synthetic oligonucleotide
aagacgcggattgtcgacggattaggtatt

SEQ ID NO: 261578 - DNA, 30 bp, Artificial Sequence
  Synthetic oligonucleotide
cgatccacttggatttagtcgaccggtatt

SEQ ID NO: 261579 - DNA, 30 bp, Artificial Sequence
  Synthetic oligonucleotide
acttgctcagcgatcgggaactggggtatt

SEQ ID NO: 261580 - DNA, 30 bp, Artificial Sequence
  Synthetic oligonucleotide
ccgtggtgctctcaatttacgtgatgtatt

SEQ ID NO: 261581 - DNA, 30 bp, Artificial Sequence
  Synthetic oligonucleotide
tttggacaagccttttttggcctatgtatt

SEQ ID NO: 261582 - DNA, 30 bp, Artificial Sequence
  Synthetic oligonucleotide
ggtaaaaggtgtccaaaaactcgctgtatt

SEQ ID NO: 261583 - DNA, 30 bp, Artificial Sequence
  Synthetic oligonucleotide
caattaaggagtacgttgatggtgtgtatt

SEQ ID NO: 261584 - DNA, 30 bp, Artificial Sequence
  Synthetic oligonucleotide
gacggaaccaagttgacggacaattgtatt

SEQ ID NO: 261585 - DNA, 30 bp, Artificial Sequence
  Synthetic oligonucleotide
tcgtgactttacccatgcaaatattgtatt

SEQ ID NO: 261586 - DNA, 30 bp, Artificial Sequence
  Synthetic oligonucleotide
atgacagctagaattggaacaggttgtatt

SEQ ID NO: 261587 - DNA, 30 bp, Artificial Sequence
  Synthetic oligonucleotide
cggggtgtatccataaaggtgtgttgtatt

SEQ ID NO: 261588 - DNA, 30 bp, Artificial Sequence
  Synthetic oligonucleotide
acaccatatgtattgatgatcctttgtatt

SEQ ID NO: 261589 - DNA, 30 bp, Artificial Sequence
  Synthetic oligonucleotide
aggatcttggcgtgaattttcgtttgtatt

SEQ ID NO: 261590 - DNA, 30 bp, Artificial Sequence
  Synthetic oligonucleotide
tggctgaggatcaatagctcgagaattatt

SEQ ID NO: 261591 - DNA, 30 bp, Artificial Sequence
  Synthetic oligonucleotide
catgtggagacgtgctggagccttattatt

SEQ ID NO: 261592 - DNA, 30 bp, Artificial Sequence
  Synthetic oligonucleotide
gtagagcttcacggcaatcggtttattatt

SEQ ID NO: 261593 - DNA, 30 bp, Artificial Sequence
  Synthetic oligonucleotide
ccgtcaccaaggggcgagtggcaccttatt

SEQ ID NO: 261594 - DNA, 30 bp, Artificial Sequence
  Synthetic oligonucleotide
gatgtatcgaggtaatggtttgagcttatt

SEQ ID NO: 261595 - DNA, 30 bp, Artificial Sequence
  Synthetic oligonucleotide
agggacttgtaagatagagctattcttatt

SEQ ID NO: 261596 - DNA, 30 bp, Artificial Sequence
  Synthetic oligonucleotide
atggttccatgggcgtagtcttaagttatt

SEQ ID NO: 261597 - DNA, 30 bp, Artificial Sequence
  Synthetic oligonucleotide
tccccacattagccaagagggcgcgttatt

SEQ ID NO: 261598 - DNA, 30 bp, Artificial Sequence
  Synthetic oligonucleotide
gcagaagggtgattgactcacaaggttatt

SEQ ID NO: 261599 - DNA, 30 bp, Artificial Sequence
  Synthetic oligonucleotide
gcatgggtaaaccggtcaggataggttatt

SEQ ID NO: 261600 - DNA, 30 bp, Artificial Sequence
  Synthetic oligonucleotide
gctatacaccattagaatgcaacatttatt

SEQ ID NO: 261601 - DNA, 30 bp, Artificial Sequence
  Synthetic oligonucleotide
tagcgctcggtgccccgacatacatttatt

SEQ ID NO: 261602 - DNA, 30 bp, Artificial Sequence
  Synthetic oligonucleotide
gcacacacttgtagtgtaacctgatttatt

SEQ ID NO: 261603 - DNA, 30 bp, Artificial Sequence
  Synthetic oligonucleotide
acgcttgaaaatgtgatcgttagctttatt

SEQ ID NO: 261604 - DNA, 30 bp, Artificial Sequence
  Synthetic oligonucleotide
gcaagattataaaggcttgattaaaaactt

SEQ ID NO: 261605 - DNA, 30 bp, Artificial Sequence
  Synthetic oligonucleotide
gcccaacatgctatcattatgctaaaactt

SEQ ID NO: 261606 - DNA, 30 bp, Artificial Sequence
  Synthetic oligonucleotide
taaggagatagattgacgaatgggaaactt

SEQ ID NO: 261607 - DNA, 30 bp, Artificial Sequence
  Synthetic oligonucleotide
gcatttgggctgtgtgcacagtggaaactt

SEQ ID NO: 261608 - DNA, 30 bp, Artificial Sequence
  Synthetic oligonucleotide
caagtccatctcagtgcagggctgcaactt

SEQ ID NO: 261609 - DNA, 30 bp, Artificial Sequence
  Synthetic oligonucleotide
aggtgaacccctcgtctcgagcaagaactt

SEQ ID NO: 261610 - DNA, 30 bp, Artificial Sequence
  Synthetic oligonucleotide
ggttcaggatcgatgtgactcacagaactt

SEQ ID NO: 261611 - DNA, 30 bp, Artificial Sequence
  Synthetic oligonucleotide
aagtgatagagagcaccagccatagaactt

SEQ ID NO: 261612 - DNA, 30 bp, Artificial Sequence
  Synthetic oligonucleotide
agtggagcagccatccaggaaaccgaactt

SEQ ID NO: 261613 - DNA, 30 bp, Artificial Sequence
  Synthetic oligonucleotide
tttactcgaagggagagagtacccgaactt

SEQ ID NO: 261614 - DNA, 30 bp, Artificial Sequence
  Synthetic oligonucleotide
cattcatgtttactgaggtgtcctgaactt

SEQ ID NO: 261615 - DNA, 30 bp, Artificial Sequence
  Synthetic oligonucleotide
ctgttgacatcgagcgtccgaccataactt

SEQ ID NO: 261616 - DNA, 30 bp, Artificial Sequence
  Synthetic oligonucleotide
gtggacgaaatcgtaacatacgtataactt

SEQ ID NO: 261617 - DNA, 30 bp, Artificial Sequence
  Synthetic oligonucleotide
cgcaccctcacatttgcagcgcgctaactt

SEQ ID NO: 261618 - DNA, 30 bp, Artificial Sequence
  Synthetic oligonucleotide
tttacaagtaatgccatcgatgagtaactt

SEQ ID NO: 261619 - DNA, 30 bp, Artificial Sequence
  Synthetic oligonucleotide
atccatttggtgagcttacgagtttaactt

SEQ ID NO: 261620 - DNA, 30 bp, Artificial Sequence
  Synthetic oligonucleotide
aaggatctgatggtagttggcacaacactt

SEQ ID NO: 261621 - DNA, 30 bp, Artificial Sequence
  Synthetic oligonucleotide
ggaacgcatggagtgagggacagaacactt

SEQ ID NO: 261622 - DNA, 30 bp, Artificial Sequence
  Synthetic oligonucleotide
aaaacgagttgcgtagcgtatcaagcactt

SEQ ID NO: 261623 - DNA, 30 bp, Artificial Sequence
  Synthetic oligonucleotide
tcggtgtcttcgacacacgctacagcactt

SEQ ID NO: 261624 - DNA, 30 bp, Artificial Sequence
  Synthetic oligonucleotide
acagtggtacgtgggcgacctgccgcactt

SEQ ID NO: 261625 - DNA, 30 bp, Artificial Sequence
  Synthetic oligonucleotide
agggcccgcagtgttaaatgaggcgcactt

SEQ ID NO: 261626 - DNA, 30 bp, Artificial Sequence
  Synthetic oligonucleotide
gctaagtataataagcgcaccagggcactt

SEQ ID NO: 261627 - DNA, 30 bp, Artificial Sequence
  Synthetic oligonucleotide
ctcggtaccagcgcaaagtgtacatcactt

SEQ ID NO: 261628 - DNA, 30 bp, Artificial Sequence
  Synthetic oligonucleotide
cacgacgtgatgggataacgcctatcactt

SEQ ID NO: 261629 - DNA, 30 bp, Artificial Sequence
  Synthetic oligonucleotide
ccgtggcacaaacccgcgtccttctcactt

SEQ ID NO: 261630 - DNA, 30 bp, Artificial Sequence
  Synthetic oligonucleotide
agctttgcatatctattaactaagtcactt

SEQ ID NO: 261631 - DNA, 30 bp, Artificial Sequence
  Synthetic oligonucleotide
cttatcaatgcggcgattaggcagtcactt

SEQ ID NO: 261632 - DNA, 30 bp, Artificial Sequence
  Synthetic oligonucleotide
ccctcagcgatggccgtccaggggtcactt

SEQ ID NO: 261633 - DNA, 30 bp, Artificial Sequence
  Synthetic oligonucleotide
accaatgttggtagccgggagttaagactt

SEQ ID NO: 261634 - DNA, 30 bp, Artificial Sequence
  Synthetic oligonucleotide
actcggaaaatgatttaggtcacacgactt

SEQ ID NO: 261635 - DNA, 30 bp, Artificial Sequence
  Synthetic oligonucleotide
gagcgatcattatcacaactatcacgactt

SEQ ID NO: 261636 - DNA, 30 bp, Artificial Sequence
  Synthetic oligonucleotide
cggtgcctgggtttcattcagtgacgactt

SEQ ID NO: 261637 - DNA, 30 bp, Artificial Sequence
  Synthetic oligonucleotide
acggggtctgtggcgccgcttcctcgactt

SEQ ID NO: 261638 - DNA, 30 bp, Artificial Sequence
  Synthetic oligonucleotide
agtttcaaggtgtaacttaatggtcgactt

SEQ ID NO: 261639 - DNA, 30 bp, Artificial Sequence
  Synthetic oligonucleotide
atagcgtcatttcggggctacggaggactt

SEQ ID NO: 261640 - DNA, 30 bp, Artificial Sequence
  Synthetic oligonucleotide
atgaagttgatgtaatgggtgataggactt

SEQ ID NO: 261641 - DNA, 30 bp, Artificial Sequence
  Synthetic oligonucleotide
ccttcaacggttagacacgtattaggactt

SEQ ID NO: 261642 - DNA, 30 bp, Artificial Sequence
  Synthetic oligonucleotide
attaggcattctcttgtgtagaacggactt

SEQ ID NO: 261643 - DNA, 31 bp, Artificial Sequence
  Synthetic oligonucleotide
tctgttctagtcgttgtgtggatacggactt

SEQ ID NO: 261644 - DNA, 30 bp, Artificial Sequence
  Synthetic oligonucleotide
ggacaaagttataacacaacgcctggactt

SEQ ID NO: 261645 - DNA, 30 bp, Artificial Sequence
  Synthetic oligonucleotide
gtaattgagaggagctgaccacagtgactt

SEQ ID NO: 261646 - DNA, 30 bp, Artificial Sequence
  Synthetic oligonucleotide
agcagccgatgaatacgtcgtaattgactt

SEQ ID NO: 261647 - DNA, 30 bp, Artificial Sequence
  Synthetic oligonucleotide
aaaccacagctgctctgcacattttgactt

SEQ ID NO: 261648 - DNA, 30 bp, Artificial Sequence
  Synthetic oligonucleotide
tatacctaatcacatctaggccaaatactt

SEQ ID NO: 261649 - DNA, 30 bp, Artificial Sequence
  Synthetic oligonucleotide
aattacaatgccccaaaaatcaagatactt

SEQ ID NO: 261650 - DNA, 30 bp, Artificial Sequence
  Synthetic oligonucleotide
gctggcggacgacggatatggaggatactt

SEQ ID NO: 261651 - DNA, 30 bp, Artificial Sequence
  Synthetic oligonucleotide
ggccgtgaaaagactcgtacgcgcctactt

SEQ ID NO: 261652 - DNA, 30 bp, Artificial Sequence
  Synthetic oligonucleotide
ttgaacatagcataaaattaaaggctactt

SEQ ID NO: 261653 - DNA, 30 bp, Artificial Sequence
  Synthetic oligonucleotide
atatggtctggtatgattaaggggctactt

SEQ ID NO: 261654 - DNA, 30 bp, Artificial Sequence
  Synthetic oligonucleotide
ggtctgatcatatcattaagtcgagtactt

SEQ ID NO: 261655 - DNA, 30 bp, Artificial Sequence
  Synthetic oligonucleotide
gccaagtagacaagatgactttccgtactt

SEQ ID NO: 261656 - DNA, 30 bp, Artificial Sequence
  Synthetic oligonucleotide
cctgaccgtatcatgcatcatcaggtactt

SEQ ID NO: 261657 - DNA, 30 bp, Artificial Sequence
  Synthetic oligonucleotide
gccgaggccatcgacggacgagatgtactt

SEQ ID NO: 261658 - DNA, 30 bp, Artificial Sequence
  Synthetic oligonucleotide
aacagaacacacttaagacaaagtgtactt

SEQ ID NO: 261659 - DNA, 30 bp, Artificial Sequence
  Synthetic oligonucleotide
aaggtgggtctagttcagccagttgtactt

SEQ ID NO: 261660 - DNA, 30 bp, Artificial Sequence
  Synthetic oligonucleotide
gtagagaccgcgatgtcatatctattactt

SEQ ID NO: 261661 - DNA, 30 bp, Artificial Sequence
  Synthetic oligonucleotide
gaagtcgatgatcgcgaatagaacttactt

SEQ ID NO: 261662 - DNA, 30 bp, Artificial Sequence
  Synthetic oligonucleotide
agcctcacgggggacacgtcagatttactt

SEQ ID NO: 261663 - DNA, 30 bp, Artificial Sequence
  Synthetic oligonucleotide
gatgtcgcatgtcttaccgactccaacctt

SEQ ID NO: 261664 - DNA, 30 bp, Artificial Sequence
  Synthetic oligonucleotide
tgttgcgaggggcgcccaatgaataacctt

SEQ ID NO: 261665 - DNA, 30 bp, Artificial Sequence
  Synthetic oligonucleotide
cccaacgtagagctgaaagattgacacctt

SEQ ID NO: 261666 - DNA, 30 bp, Artificial Sequence
  Synthetic oligonucleotide
gggcagcaacttcgccggacattacacctt

SEQ ID NO: 261667 - DNA, 30 bp, Artificial Sequence
  Synthetic oligonucleotide
tctgatcgtggtccatacagcacccacctt

SEQ ID NO: 261668 - DNA, 30 bp, Artificial Sequence
  Synthetic oligonucleotide
gataactagatgacatgtggttcccacctt

SEQ ID NO: 261669 - DNA, 30 bp, Artificial Sequence
  Synthetic oligonucleotide
ggggagggttggcaataatcgtgtcacctt

SEQ ID NO: 261670 - DNA, 30 bp, Artificial Sequence
  Synthetic oligonucleotide
ggacgtcgttcatcagagtcgccagacctt

SEQ ID NO: 261671 - DNA, 30 bp, Artificial Sequence
  Synthetic oligonucleotide
cagtgaagtttggcaaggagcccggacctt

SEQ ID NO: 261672 - DNA, 30 bp, Artificial Sequence
  Synthetic oligonucleotide
tgcgtggtggagtcccgggggtttgacctt

SEQ ID NO: 261673 - DNA, 30 bp, Artificial Sequence
  Synthetic oligonucleotide
acggcggcacgtctagaacccttgtacctt

SEQ ID NO: 261674 - DNA, 30 bp, Artificial Sequence
  Synthetic oligonucleotide
agtcttgagggtttcatcaaactttacctt

SEQ ID NO: 261675 - DNA, 30 bp, Artificial Sequence
  Synthetic oligonucleotide
ccaatgcaagatcatgttcccaacaccctt

SEQ ID NO: 261676 - DNA, 30 bp, Artificial Sequence
  Synthetic oligonucleotide
ataactgccagaggtcctgcgcacaccctt

SEQ ID NO: 261677 - DNA, 30 bp, Artificial Sequence
  Synthetic oligonucleotide
ggtggccgaaaaaaagtgtacaggaccctt

SEQ ID NO: 261678 - DNA, 30 bp, Artificial Sequence
  Synthetic oligonucleotide
agcggagtgccattatagatttgtaccctt

SEQ ID NO: 261679 - DNA, 30 bp, Artificial Sequence
  Synthetic oligonucleotide
ttgttccatcatctccgcatatcgcccctt

SEQ ID NO: 261680 - DNA, 30 bp, Artificial Sequence
  Synthetic oligonucleotide
cccatccctagagggatacggaaagccctt

SEQ ID NO: 261681 - DNA, 30 bp, Artificial Sequence
  Synthetic oligonucleotide
acgttactctaaaagctaagtcccgccctt

SEQ ID NO: 261682 - DNA, 30 bp, Artificial Sequence
  Synthetic oligonucleotide
tgcgcattttggatggaaaatcgggccctt

SEQ ID NO: 261683 - DNA, 30 bp, Artificial Sequence
  Synthetic oligonucleotide
agcatagggagtggtaaagtcactgccctt

SEQ ID NO: 261684 - DNA, 30 bp, Artificial Sequence
  Synthetic oligonucleotide
tagctgatcgtgtgcaccagctttgccctt

SEQ ID NO: 261685 - DNA, 30 bp, Artificial Sequence
  Synthetic oligonucleotide
ctcaatgtatggtgtgcctctatatccctt

SEQ ID NO: 261686 - DNA, 30 bp, Artificial Sequence
  Synthetic oligonucleotide
gcgggaaccaatttacaatgttggtccctt

SEQ ID NO: 261687 - DNA, 30 bp, Artificial Sequence
  Synthetic oligonucleotide
gcgtcggtctaatgatcagcaacaagcctt

SEQ ID NO: 261688 - DNA, 30 bp, Artificial Sequence
  Synthetic oligonucleotide
acggataacgggtcagagaagaccagcctt

SEQ ID NO: 261689 - DNA, 30 bp, Artificial Sequence
  Synthetic oligonucleotide
gcaagttagaaaatcgttcgtagcagcctt

SEQ ID NO: 261690 - DNA, 30 bp, Artificial Sequence
  Synthetic oligonucleotide
acaagggttttggacaactagggcagcctt

SEQ ID NO: 261691 - DNA, 30 bp, Artificial Sequence
  Synthetic oligonucleotide
ttgaactaacaaggatgcaattggagcctt

SEQ ID NO: 261692 - DNA, 30 bp, Artificial Sequence
  Synthetic oligonucleotide
aacaaggcgcatagaaggcaaactagcctt

SEQ ID NO: 261693 - DNA, 30 bp, Artificial Sequence
  Synthetic oligonucleotide
ggaaaagtcccgatgcatcccagtagcctt

SEQ ID NO: 261694 - DNA, 30 bp, Artificial Sequence
  Synthetic oligonucleotide
ttagatacaaaagaactttgcaatcgcctt

SEQ ID NO: 261695 - DNA, 30 bp, Artificial Sequence
  Synthetic oligonucleotide
atatcacgaaacgtggtctagtatcgcctt

SEQ ID NO: 261696 - DNA, 30 bp, Artificial Sequence
  Synthetic oligonucleotide
gctcctcgtaaagagcgtgaacgaggcctt

SEQ ID NO: 261697 - DNA, 30 bp, Artificial Sequence
  Synthetic oligonucleotide
ttactacccaagaatgtgacgatgggcctt

SEQ ID NO: 261698 - DNA, 30 bp, Artificial Sequence
  Synthetic oligonucleotide
acggttaccgtgggaacagaacgtggcctt

SEQ ID NO: 261699 - DNA, 30 bp, Artificial Sequence
  Synthetic oligonucleotide
cgacatgtcggtgtcaactataccatcctt

SEQ ID NO: 261700 - DNA, 30 bp, Artificial Sequence
  Synthetic oligonucleotide
cagtcatatctaagaagaacagggatcctt

SEQ ID NO: 261701 - DNA, 30 bp, Artificial Sequence
  Synthetic oligonucleotide
tgcgcgtgcggggggtaatgtctgatcctt

SEQ ID NO: 261702 - DNA, 30 bp, Artificial Sequence
  Synthetic oligonucleotide
agaccgggggggtaaataaccgacctcctt

SEQ ID NO: 261703 - DNA, 30 bp, Artificial Sequence
  Synthetic oligonucleotide
tagcgatatctaaggtccttcgccctcctt

SEQ ID NO: 261704 - DNA, 30 bp, Artificial Sequence
  Synthetic oligonucleotide
ataggccacttgtagagagggtggctcctt

SEQ ID NO: 261705 - DNA, 30 bp, Artificial Sequence
  Synthetic oligonucleotide
cattagtattgtaatagattcactctcctt

SEQ ID NO: 261706 - DNA, 30 bp, Artificial Sequence
  Synthetic oligonucleotide
gcggataaaccttacgtgacttcagtcctt

SEQ ID NO: 261707 - DNA, 30 bp, Artificial Sequence
  Synthetic oligonucleotide
gaaggtgcaatccttagtaatcacgtcctt

SEQ ID NO: 261708 - DNA, 30 bp, Artificial Sequence
  Synthetic oligonucleotide
accttgggaacgatgacagctgttgtcctt

SEQ ID NO: 261709 - DNA, 30 bp, Artificial Sequence
  Synthetic oligonucleotide
cattgtagtacacattggtcagacaagctt

SEQ ID NO: 261710 - DNA, 30 bp, Artificial Sequence
  Synthetic oligonucleotide
gggtctgagacccaagcattgggcaagctt

SEQ ID NO: 261711 - DNA, 30 bp, Artificial Sequence
  Synthetic oligonucleotide
agttacaaacgatgaattcgaatgaagctt

SEQ ID NO: 261712 - DNA, 30 bp, Artificial Sequence
  Synthetic oligonucleotide
tttagaggctggttcgtgtaatctaagctt

SEQ ID NO: 261713 - DNA, 30 bp, Artificial Sequence
  Synthetic oligonucleotide
gagggaagggccaattggtcaggtaagctt

SEQ ID NO: 261714 - DNA, 30 bp, Artificial Sequence
  Synthetic oligonucleotide
actgcaggaagtaacgtatccgaacagctt

SEQ ID NO: 261715 - DNA, 30 bp, Artificial Sequence
  Synthetic oligonucleotide
tacttatagcgattatgtgaccaccagctt

SEQ ID NO: 261716 - DNA, 30 bp, Artificial Sequence
  Synthetic oligonucleotide
aaaataacacgtttggacgcgtagcagctt

SEQ ID NO: 261717 - DNA, 30 bp, Artificial Sequence
  Synthetic oligonucleotide
cggggatcagaccgtatgtcagggcagctt

SEQ ID NO: 261718 - DNA, 30 bp, Artificial Sequence
  Synthetic oligonucleotide
gcaggttatagtgcgtgagaaattcagctt

SEQ ID NO: 261719 - DNA, 30 bp, Artificial Sequence
  Synthetic oligonucleotide
tgggtagggccggggctgcgaatcgagctt

SEQ ID NO: 261720 - DNA, 30 bp, Artificial Sequence
  Synthetic oligonucleotide
agggataacgccaatgtttgcacatagctt

SEQ ID NO: 261721 - DNA, 30 bp, Artificial Sequence
  Synthetic oligonucleotide
cagcagtagcgggccaaagttacgtagctt

SEQ ID NO: 261722 - DNA, 30 bp, Artificial Sequence
  Synthetic oligonucleotide
cgaaaaatctgcggcaaaatacgttagctt

SEQ ID NO: 261723 - DNA, 30 bp, Artificial Sequence
  Synthetic oligonucleotide
acaagtatagggtaagcggatggcacgctt

SEQ ID NO: 261724 - DNA, 30 bp, Artificial Sequence
  Synthetic oligonucleotide
aagtgattttggtctcgaagcctcacgctt

SEQ ID NO: 261725 - DNA, 30 bp, Artificial Sequence
  Synthetic oligonucleotide
agttaatgcattaataacgaggggacgctt

SEQ ID NO: 261726 - DNA, 30 bp, Artificial Sequence
  Synthetic oligonucleotide
cgaaccgggcactctaataggggaccgctt

SEQ ID NO: 261727 - DNA, 30 bp, Artificial Sequence
  Synthetic oligonucleotide
caccggggcagcttcacatagtgaccgctt

SEQ ID NO: 261728 - DNA, 30 bp, Artificial Sequence
  Synthetic oligonucleotide
ctatctaaatcaggactcttgcgcccgctt

SEQ ID NO: 261729 - DNA, 30 bp, Artificial Sequence
  Synthetic oligonucleotide
tagacggaatctagggattcgtggccgctt

SEQ ID NO: 261730 - DNA, 30 bp, Artificial Sequence
  Synthetic oligonucleotide
gactactgcataatgagcatgcttccgctt

SEQ ID NO: 261731 - DNA, 30 bp, Artificial Sequence
  Synthetic oligonucleotide
caagctacgcgtgcacgcgacttagcgctt

SEQ ID NO: 261732 - DNA, 30 bp, Artificial Sequence
  Synthetic oligonucleotide
agtctgggaatgaacaagaggctatcgctt

SEQ ID NO: 261733 - DNA, 30 bp, Artificial Sequence
  Synthetic oligonucleotide
gacaagatggtagcccatgtgtgctcgctt

SEQ ID NO: 261734 - DNA, 30 bp, Artificial Sequence
  Synthetic oligonucleotide
ttagcctgaggacatggcgtgtaaaggctt

SEQ ID NO: 261735 - DNA, 30 bp, Artificial Sequence
  Synthetic oligonucleotide
tctgtgggaaacgggcagcacaacaggctt

SEQ ID NO: 261736 - DNA, 30 bp, Artificial Sequence
  Synthetic oligonucleotide
cgaagccgagggaagtatgatcacaggctt

SEQ ID NO: 261737 - DNA, 30 bp, Artificial Sequence
  Synthetic oligonucleotide
aggatggcattttgaggatggtcgaggctt

SEQ ID NO: 261738 - DNA, 30 bp, Artificial Sequence
  Synthetic oligonucleotide
cagtatcgaccgtcataatggtctaggctt

SEQ ID NO: 261739 - DNA, 30 bp, Artificial Sequence
  Synthetic oligonucleotide
acttataattagtatgggttatcacggctt

SEQ ID NO: 261740 - DNA, 30 bp, Artificial Sequence
  Synthetic oligonucleotide
atggactagtttggttcggtgttacggctt

SEQ ID NO: 261741 - DNA, 30 bp, Artificial Sequence
  Synthetic oligonucleotide
ctgtggagcagagcttttggggtgcggctt

SEQ ID NO: 261742 - DNA, 30 bp, Artificial Sequence
  Synthetic oligonucleotide
atgatcgagcaggacatttatgttcggctt

SEQ ID NO: 261743 - DNA, 30 bp, Artificial Sequence
  Synthetic oligonucleotide
acaggcgctagttacaaattacgagggctt

SEQ ID NO: 261744 - DNA, 30 bp, Artificial Sequence
  Synthetic oligonucleotide
ttgataaacgagcacgcagtgcttgggctt

SEQ ID NO: 261745 - DNA, 30 bp, Artificial Sequence
  Synthetic oligonucleotide
ctttgaaggaaacatcacagctttgggctt

SEQ ID NO: 261746 - DNA, 30 bp, Artificial Sequence
  Synthetic oligonucleotide
tagaagtattaacaattaccggaatggctt

SEQ ID NO: 261747 - DNA, 30 bp, Artificial Sequence
  Synthetic oligonucleotide
tgtaagaacgtacttgcgcattcatggctt

SEQ ID NO: 261748 - DNA, 30 bp, Artificial Sequence
  Synthetic oligonucleotide
taatcacaagctttggtccggccgtggctt

SEQ ID NO: 261749 - DNA, 30 bp, Artificial Sequence
  Synthetic oligonucleotide
tcaataagttcatcatatgaattttggctt

SEQ ID NO: 261750 - DNA, 30 bp, Artificial Sequence
  Synthetic oligonucleotide
tcgcggcggtcagacattccttacatgctt

SEQ ID NO: 261751 - DNA, 29 bp, Artificial Sequence
  Synthetic oligonucleotide
gaagtcgtagatgtctatcaagcctgctt

SEQ ID NO: 261752 - DNA, 30 bp, Artificial Sequence
  Synthetic oligonucleotide
tgcaacagcaaacttcctcatctcctgctt

SEQ ID NO: 261753 - DNA, 30 bp, Artificial Sequence
  Synthetic oligonucleotide
atccagtggacgcgcgcaggattcctgctt

SEQ ID NO: 261754 - DNA, 30 bp, Artificial Sequence
  Synthetic oligonucleotide
gtagaacctcccgggtcacaacggctgctt

SEQ ID NO: 261755 - DNA, 30 bp, Artificial Sequence
  Synthetic oligonucleotide
ccatgagcgggtccgacccgagaagtgctt

SEQ ID NO: 261756 - DNA, 30 bp, Artificial Sequence
  Synthetic oligonucleotide
gatgaacgacgtcctccgacggacgtgctt

SEQ ID NO: 261757 - DNA, 30 bp, Artificial Sequence
  Synthetic oligonucleotide
taccgatttagtgttcgttcatctgtgctt

SEQ ID NO: 261758 - DNA, 30 bp, Artificial Sequence
  Synthetic oligonucleotide
caggaactcttcaggtgagtaagtgtgctt

SEQ ID NO: 261759 - DNA, 30 bp, Artificial Sequence
  Synthetic oligonucleotide
tcagttcaaacaaacagcgttcgtgtgctt

SEQ ID NO: 261760 - DNA, 30 bp, Artificial Sequence
  Synthetic oligonucleotide
gagcaatgatcgctgattaaaggtgtgctt

SEQ ID NO: 261761 - DNA, 30 bp, Artificial Sequence
  Synthetic oligonucleotide
agtctgtgtaccatgacccgctgtgtgctt

SEQ ID NO: 261762 - DNA, 30 bp, Artificial Sequence
  Synthetic oligonucleotide
tggataaatggtgtggagtttagtttgctt

SEQ ID NO: 261763 - DNA, 30 bp, Artificial Sequence
  Synthetic oligonucleotide
cacgtattgttgggatagtggagtaatctt

SEQ ID NO: 261764 - DNA, 30 bp, Artificial Sequence
  Synthetic oligonucleotide
cacgttcatcccgctagaccgggtaatctt

SEQ ID NO: 261765 - DNA, 30 bp, Artificial Sequence
  Synthetic oligonucleotide
gcaaacactgaagtgatagtcgcgcatctt

SEQ ID NO: 261766 - DNA, 30 bp, Artificial Sequence
  Synthetic oligonucleotide
ccaactgagggtattcggccttcgcatctt

SEQ ID NO: 261767 - DNA, 30 bp, Artificial Sequence
  Synthetic oligonucleotide
ctgggacgcgggcggtctcgctctcatctt

SEQ ID NO: 261768 - DNA, 30 bp, Artificial Sequence
  Synthetic oligonucleotide
tagcctacgccatctcaactagttcatctt

SEQ ID NO: 261769 - DNA, 30 bp, Artificial Sequence
  Synthetic oligonucleotide
aagcacagcttggacgcttacgaagatctt

SEQ ID NO: 261770 - DNA, 30 bp, Artificial Sequence
  Synthetic oligonucleotide
tactagggcaggatgcaagtgagagatctt

SEQ ID NO: 261771 - DNA, 30 bp, Artificial Sequence
  Synthetic oligonucleotide
ttggtaattgtcgccagacaactagatctt

SEQ ID NO: 261772 - DNA, 30 bp, Artificial Sequence
  Synthetic oligonucleotide
gttgagcagtgaccatcaaatgtagatctt

SEQ ID NO: 261773 - DNA, 30 bp, Artificial Sequence
  Synthetic oligonucleotide
acttacccggataaaagtccatgcgatctt

SEQ ID NO: 261774 - DNA, 30 bp, Artificial Sequence
  Synthetic oligonucleotide
tgatacacagatagttggcaagtcgatctt

SEQ ID NO: 261775 - DNA, 30 bp, Artificial Sequence
  Synthetic oligonucleotide
agaggtatgttgtcgtggaacgcggatctt

SEQ ID NO: 261776 - DNA, 30 bp, Artificial Sequence
  Synthetic oligonucleotide
gcgtccgcgcgcccgcgagaaaatgatctt

SEQ ID NO: 261777 - DNA, 30 bp, Artificial Sequence
  Synthetic oligonucleotide
tgcagccgacctgtcctggaaactgatctt

SEQ ID NO: 261778 - DNA, 30 bp, Artificial Sequence
  Synthetic oligonucleotide
ccatcggctataattaacctgcctgatctt

SEQ ID NO: 261779 - DNA, 30 bp, Artificial Sequence
  Synthetic oligonucleotide
gagaaattcgatctactagccagatatctt

SEQ ID NO: 261780 - DNA, 30 bp, Artificial Sequence
  Synthetic oligonucleotide
tatgtcggtgagcaagagcccggatatctt

SEQ ID NO: 261781 - DNA, 30 bp, Artificial Sequence
  Synthetic oligonucleotide
ctacacttagtaaattgaggttgatatctt

SEQ ID NO: 261782 - DNA, 30 bp, Artificial Sequence
  Synthetic oligonucleotide
aagcaaatgcaaatatattggagctatctt

SEQ ID NO: 261783 - DNA, 30 bp, Artificial Sequence
  Synthetic oligonucleotide
atgggcgtagaacgcgacagcgcgtatctt

SEQ ID NO: 261784 - DNA, 30 bp, Artificial Sequence
  Synthetic oligonucleotide
cactcgatgatcagatttcattctactctt

SEQ ID NO: 261785 - DNA, 30 bp, Artificial Sequence
  Synthetic oligonucleotide
ataaacaccagtgcaacccacgagcctctt

SEQ ID NO: 261786 - DNA, 30 bp, Artificial Sequence
  Synthetic oligonucleotide
gtacggtgagccaaaagggtcgcagctctt

SEQ ID NO: 261787 - DNA, 30 bp, Artificial Sequence
  Synthetic oligonucleotide
ttgatgcgtatctcttccgtcctagctctt

SEQ ID NO: 261788 - DNA, 30 bp, Artificial Sequence
  Synthetic oligonucleotide
ccgttagaggtctcagatgatgcggctctt

SEQ ID NO: 261789 - DNA, 30 bp, Artificial Sequence
  Synthetic oligonucleotide
cggtactgcgggaccaaaagagatgctctt

SEQ ID NO: 261790 - DNA, 31 bp, Artificial Sequence
  Synthetic oligonucleotide
ggagtttactgcggtgtagtagtgtgctctt

SEQ ID NO: 261791 - DNA, 30 bp, Artificial Sequence
  Synthetic oligonucleotide
tcagtgtgaaacatttgcaatgaatctctt

SEQ ID NO: 261792 - DNA, 30 bp, Artificial Sequence
  Synthetic oligonucleotide
tgcaactaggacggtcacgcgagatctctt

SEQ ID NO: 261793 - DNA, 30 bp, Artificial Sequence
  Synthetic oligonucleotide
aatgacgaaaatgtggcctcgacctctctt

SEQ ID NO: 261794 - DNA, 30 bp, Artificial Sequence
  Synthetic oligonucleotide
gcgggcatacctctatccaacctctctctt

SEQ ID NO: 261795 - DNA, 30 bp, Artificial Sequence
  Synthetic oligonucleotide
tacattagaacggctgaggattcgtctctt

SEQ ID NO: 261796 - DNA, 30 bp, Artificial Sequence
  Synthetic oligonucleotide
tcgggaggactcctacgcccttggtctctt

SEQ ID NO: 261797 - DNA, 30 bp, Artificial Sequence
  Synthetic oligonucleotide
ccagagatccacattatgattacaagtctt

SEQ ID NO: 261798 - DNA, 30 bp, Artificial Sequence
  Synthetic oligonucleotide
agcggttggtttgtcaagtccgagagtctt

SEQ ID NO: 261799 - DNA, 30 bp, Artificial Sequence
  Synthetic oligonucleotide
taaaagacaggaccccggaagattagtctt

SEQ ID NO: 261800 - DNA, 30 bp, Artificial Sequence
  Synthetic oligonucleotide
tctatcggtttatagggcaacggacgtctt

SEQ ID NO: 261801 - DNA, 30 bp, Artificial Sequence
  Synthetic oligonucleotide
ggatacaaaagtccgtacgattgacgtctt

SEQ ID NO: 261802 - DNA, 30 bp, Artificial Sequence
  Synthetic oligonucleotide
gcaatgatggccccgataaaataccgtctt

SEQ ID NO: 261803 - DNA, 30 bp, Artificial Sequence
  Synthetic oligonucleotide
tcgcaacacagcgggcggtcaaagcgtctt

SEQ ID NO: 261804 - DNA, 30 bp, Artificial Sequence
  Synthetic oligonucleotide
tacagtatgggacgaagaacgaagcgtctt

SEQ ID NO: 261805 - DNA, 30 bp, Artificial Sequence
  Synthetic oligonucleotide
aacactacctattgctgagatacgcgtctt

SEQ ID NO: 261806 - DNA, 31 bp, Artificial Sequence
  Synthetic oligonucleotide
taacgtttcacacaagtgccaagcgcgtctt

SEQ ID NO: 261807 - DNA, 30 bp, Artificial Sequence
  Synthetic oligonucleotide
tagaaaaaatcagggaggtgttctcgtctt

SEQ ID NO: 261808 - DNA, 30 bp, Artificial Sequence
  Synthetic oligonucleotide
taagttaacaggggcacttaaataggtctt

SEQ ID NO: 261809 - DNA, 30 bp, Artificial Sequence
  Synthetic oligonucleotide
tgaggagtttatatagagccgtactgtctt

SEQ ID NO: 261810 - DNA, 30 bp, Artificial Sequence
  Synthetic oligonucleotide
tggcagtcatcaggtatagaaccctgtctt

SEQ ID NO: 261811 - DNA, 30 bp, Artificial Sequence
  Synthetic oligonucleotide
cctagccccatagacagcctcagctgtctt

SEQ ID NO: 261812 - DNA, 30 bp, Artificial Sequence
  Synthetic oligonucleotide
accccagatattttgcaaggtgagtgtctt

SEQ ID NO: 261813 - DNA, 30 bp, Artificial Sequence
  Synthetic oligonucleotide
catgactagagtgaagcattttggtgtctt

SEQ ID NO: 261814 - DNA, 30 bp, Artificial Sequence
  Synthetic oligonucleotide
cttgcacgtgacgccgttgattgttgtctt

SEQ ID NO: 261815 - DNA, 30 bp, Artificial Sequence
  Synthetic oligonucleotide
tgggctattaagggtgttttttgttgtctt

SEQ ID NO: 261816 - DNA, 30 bp, Artificial Sequence
  Synthetic oligonucleotide
aacggctcgcaccgagaagtggtaattctt

SEQ ID NO: 261817 - DNA, 30 bp, Artificial Sequence
  Synthetic oligonucleotide
cggacggacaaacggttacgtaccattctt

SEQ ID NO: 261818 - DNA, 30 bp, Artificial Sequence
  Synthetic oligonucleotide
cgacaagaatcgagcggcctctgcattctt

SEQ ID NO: 261819 - DNA, 30 bp, Artificial Sequence
  Synthetic oligonucleotide
cgtgaagcataccaaaggagctaacttctt

SEQ ID NO: 261820 - DNA, 30 bp, Artificial Sequence
  Synthetic oligonucleotide
gtgatacgcacgattattatttaacttctt

SEQ ID NO: 261821 - DNA, 30 bp, Artificial Sequence
  Synthetic oligonucleotide
caatagccgaggtggtgagcttagcttctt

SEQ ID NO: 261822 - DNA, 30 bp, Artificial Sequence
  Synthetic oligonucleotide
gtgattaggccctaagagcgtcctcttctt

SEQ ID NO: 261823 - DNA, 30 bp, Artificial Sequence
  Synthetic oligonucleotide
cggcaattgctgctgaccttgctagttctt

SEQ ID NO: 261824 - DNA, 30 bp, Artificial Sequence
  Synthetic oligonucleotide
cacataataaggcagactcggtcggttctt

SEQ ID NO: 261825 - DNA, 30 bp, Artificial Sequence
  Synthetic oligonucleotide
gggtcggtcagtaatgttggtacctttctt

SEQ ID NO: 261826 - DNA, 30 bp, Artificial Sequence
  Synthetic oligonucleotide
acagggagaacatgggggagccagtttctt

SEQ ID NO: 261827 - DNA, 30 bp, Artificial Sequence
  Synthetic oligonucleotide
acaagatgaccgatttgccatacgtttctt

SEQ ID NO: 261828 - DNA, 30 bp, Artificial Sequence
  Synthetic oligonucleotide
tatacacccaattgggtcggactgtttctt

SEQ ID NO: 261829 - DNA, 30 bp, Artificial Sequence
  Synthetic oligonucleotide
cgcttgggagggctcattttcggaaaagtt

SEQ ID NO: 261830 - DNA, 30 bp, Artificial Sequence
  Synthetic oligonucleotide
accgtatagggttcaatcagggtaaaagtt

SEQ ID NO: 261831 - DNA, 30 bp, Artificial Sequence
  Synthetic oligonucleotide
attataaaggtacgacgtacgagcaaagtt

SEQ ID NO: 261832 - DNA, 30 bp, Artificial Sequence
  Synthetic oligonucleotide
tgctaattgaaatagatgcgatgcaaagtt

SEQ ID NO: 261833 - DNA, 30 bp, Artificial Sequence
  Synthetic oligonucleotide
agccgcgagtgaaacagccctgtcaaagtt

SEQ ID NO: 261834 - DNA, 30 bp, Artificial Sequence
  Synthetic oligonucleotide
tctttaaccaggaaacagacctagaaagtt

SEQ ID NO: 261835 - DNA, 30 bp, Artificial Sequence
  Synthetic oligonucleotide
tactagtggtgcggcactgggtagaaagtt

SEQ ID NO: 261836 - DNA, 30 bp, Artificial Sequence
  Synthetic oligonucleotide
gctttcgcggaagacggggcatataaagtt

SEQ ID NO: 261837 - DNA, 30 bp, Artificial Sequence
  Synthetic oligonucleotide
cctagtcacactgttggtatgtctaaagtt

SEQ ID NO: 261838 - DNA, 30 bp, Artificial Sequence
  Synthetic oligonucleotide
cgaaacgccgcctcgaaagcacgtaaagtt

SEQ ID NO: 261839 - DNA, 30 bp, Artificial Sequence
  Synthetic oligonucleotide
catatgttcgtgttgtaatcaccacaagtt

SEQ ID NO: 261840 - DNA, 30 bp, Artificial Sequence
  Synthetic oligonucleotide
agattggcatccggctaactgtcacaagtt

SEQ ID NO: 261841 - DNA, 30 bp, Artificial Sequence
  Synthetic oligonucleotide
ggaggtagtattcatagggtctatcaagtt

SEQ ID NO: 261842 - DNA, 30 bp, Artificial Sequence
  Synthetic oligonucleotide
aggaagatctgttcggtaaattatcaagtt

SEQ ID NO: 261843 - DNA, 30 bp, Artificial Sequence
  Synthetic oligonucleotide
accatcgaaatgccaacggaggctcaagtt

SEQ ID NO: 261844 - DNA, 30 bp, Artificial Sequence
  Synthetic oligonucleotide
acctcacgttccaacaagtcacgagaagtt

SEQ ID NO: 261845 - DNA, 30 bp, Artificial Sequence
  Synthetic oligonucleotide
tacgaattaggactatcacaatatgaagtt

SEQ ID NO: 261846 - DNA, 30 bp, Artificial Sequence
  Synthetic oligonucleotide
gtcacctgttgatggaggttgtctgaagtt

SEQ ID NO: 261847 - DNA, 30 bp, Artificial Sequence
  Synthetic oligonucleotide
gagccgccgggaattgagtgtaactaagtt

SEQ ID NO: 261848 - DNA, 30 bp, Artificial Sequence
  Synthetic oligonucleotide
tggcacgtatctcgaagaccaggctaagtt

SEQ ID NO: 261849 - DNA, 30 bp, Artificial Sequence
  Synthetic oligonucleotide
gatctcggatgttaaatagtgtgctaagtt

SEQ ID NO: 261850 - DNA, 30 bp, Artificial Sequence
  Synthetic oligonucleotide
ggctgttgaaggtatggcgcgccgtaagtt

SEQ ID NO: 261851 - DNA, 31 bp, Artificial Sequence
  Synthetic oligonucleotide
tcatcagcttccagtgcagtaatggtaagtt

SEQ ID NO: 261852 - DNA, 30 bp, Artificial Sequence
  Synthetic oligonucleotide
gttgcgtattagcgctttgaattgtaagtt

SEQ ID NO: 261853 - DNA, 30 bp, Artificial Sequence
  Synthetic oligonucleotide
aaaaaagccacaagcctcagacattaagtt

SEQ ID NO: 261854 - DNA, 30 bp, Artificial Sequence
  Synthetic oligonucleotide
actcttaaatggctaggaccatgaacagtt

SEQ ID NO: 261855 - DNA, 30 bp, Artificial Sequence
  Synthetic oligonucleotide
ggggtcacgtcacgaggcgtcttcacagtt

SEQ ID NO: 261856 - DNA, 30 bp, Artificial Sequence
  Synthetic oligonucleotide
cggtcatgagtcggagcaatccatacagtt

SEQ ID NO: 261857 - DNA, 30 bp, Artificial Sequence
  Synthetic oligonucleotide
gcgcagggggcgctcagaacacgtacagtt

SEQ ID NO: 261858 - DNA, 30 bp, Artificial Sequence
  Synthetic oligonucleotide
tgggccgatatgtatgagtaacttacagtt

SEQ ID NO: 261859 - DNA, 30 bp, Artificial Sequence
  Synthetic oligonucleotide
catcgtcgaattaacttgacggaaccagtt

SEQ ID NO: 261860 - DNA, 30 bp, Artificial Sequence
  Synthetic oligonucleotide
agcgcgggatcatatgggggcccaccagtt

SEQ ID NO: 261861 - DNA, 30 bp, Artificial Sequence
  Synthetic oligonucleotide
gatactaatttgggtgagtaggcaccagtt

SEQ ID NO: 261862 - DNA, 30 bp, Artificial Sequence
  Synthetic oligonucleotide
gtgtgttggtatttaaccagagccccagtt

SEQ ID NO: 261863 - DNA, 30 bp, Artificial Sequence
  Synthetic oligonucleotide
gaggtgctttggtcatgcggaaatccagtt

SEQ ID NO: 261864 - DNA, 30 bp, Artificial Sequence
  Synthetic oligonucleotide
agacaagtcctccatatccaacgtccagtt

SEQ ID NO: 261865 - DNA, 30 bp, Artificial Sequence
  Synthetic oligonucleotide
actcgagacacggattcataagaagcagtt

SEQ ID NO: 261866 - DNA, 30 bp, Artificial Sequence
  Synthetic oligonucleotide
cttaattagatccagccaaggtaagcagtt

SEQ ID NO: 261867 - DNA, 30 bp, Artificial Sequence
  Synthetic oligonucleotide
cacaccttgttctcagttacacttgcagtt

SEQ ID NO: 261868 - DNA, 30 bp, Artificial Sequence
  Synthetic oligonucleotide
atgattcctgtaggtcatcgaaaatcagtt

SEQ ID NO: 261869 - DNA, 30 bp, Artificial Sequence
  Synthetic oligonucleotide
ggacatccacggaacaatgcttgatcagtt

SEQ ID NO: 261870 - DNA, 30 bp, Artificial Sequence
  Synthetic oligonucleotide
tggtgattggaatctttattctagtcagtt

SEQ ID NO: 261871 - DNA, 30 bp, Artificial Sequence
  Synthetic oligonucleotide
gaggttcttgaaccgtgtgtgctgtcagtt

SEQ ID NO: 261872 - DNA, 30 bp, Artificial Sequence
  Synthetic oligonucleotide
gtagtatgcccctactccggtagttcagtt

SEQ ID NO: 261873 - DNA, 30 bp, Artificial Sequence
  Synthetic oligonucleotide
taggggtggcgccaatgaaagcgaagagtt

SEQ ID NO: 261874 - DNA, 30 bp, Artificial Sequence
  Synthetic oligonucleotide
atccatcaagttaggggaattataagagtt

SEQ ID NO: 261875 - DNA, 30 bp, Artificial Sequence
  Synthetic oligonucleotide
gagaaactttggtccagaaatgccagagtt

SEQ ID NO: 261876 - DNA, 30 bp, Artificial Sequence
  Synthetic oligonucleotide
agcactggacgcctctataattagagagtt

SEQ ID NO: 261877 - DNA, 30 bp, Artificial Sequence
  Synthetic oligonucleotide
agtaactacgttggggtaatgcggagagtt

SEQ ID NO: 261878 - DNA, 30 bp, Artificial Sequence
  Synthetic oligonucleotide
ccaattgtggaaggattgcagacacgagtt

SEQ ID NO: 261879 - DNA, 30 bp, Artificial Sequence
  Synthetic oligonucleotide
aaagcaaacgttacagcttaccagcgagtt

SEQ ID NO: 261880 - DNA, 30 bp, Artificial Sequence
  Synthetic oligonucleotide
tatcggggtaaaaatagcggtgagcgagtt

SEQ ID NO: 261881 - DNA, 30 bp, Artificial Sequence
  Synthetic oligonucleotide
caaagattcaattggaccattcggcgagtt

SEQ ID NO: 261882 - DNA, 30 bp, Artificial Sequence
  Synthetic oligonucleotide
ggagttggtttcataggtccatctcgagtt

SEQ ID NO: 261883 - DNA, 30 bp, Artificial Sequence
  Synthetic oligonucleotide
cataatgacatgacagtgtcgagtcgagtt

SEQ ID NO: 261884 - DNA, 30 bp, Artificial Sequence
  Synthetic oligonucleotide
gttatgtcgcgtagattgttgaaaggagtt

SEQ ID NO: 261885 - DNA, 30 bp, Artificial Sequence
  Synthetic oligonucleotide
agtaccgaatggaactcggccgaaggagtt

SEQ ID NO: 261886 - DNA, 30 bp, Artificial Sequence
  Synthetic oligonucleotide
gaatcacagaccagcacggtatgcggagtt

SEQ ID NO: 261887 - DNA, 30 bp, Artificial Sequence
  Synthetic oligonucleotide
tcagctcagatcgttactaatcagggagtt

SEQ ID NO: 261888 - DNA, 30 bp, Artificial Sequence
  Synthetic oligonucleotide
ttgtatctccgggtggttgcatggggagtt

SEQ ID NO: 261889 - DNA, 30 bp, Artificial Sequence
  Synthetic oligonucleotide
gagaagctaatagcagcgcatatgggagtt

SEQ ID NO: 261890 - DNA, 30 bp, Artificial Sequence
  Synthetic oligonucleotide
gtacacgtacgacaattggcttgtggagtt

SEQ ID NO: 261891 - DNA, 30 bp, Artificial Sequence
  Synthetic oligonucleotide
tcagatttgtaataagcagagattggagtt

SEQ ID NO: 261892 - DNA, 30 bp, Artificial Sequence
  Synthetic oligonucleotide
acttagttttgcttactattcgtctgagtt

SEQ ID NO: 261893 - DNA, 30 bp, Artificial Sequence
  Synthetic oligonucleotide
tggtgttgttaaattgtgcaagagtgagtt

SEQ ID NO: 261894 - DNA, 30 bp, Artificial Sequence
  Synthetic oligonucleotide
tcagcgaatatatgaatgggggcttgagtt

SEQ ID NO: 261895 - DNA, 30 bp, Artificial Sequence
  Synthetic oligonucleotide
gcacgtcctgtactacggaacgtttgagtt

SEQ ID NO: 261896 - DNA, 30 bp, Artificial Sequence
  Synthetic oligonucleotide
gggtactgcccgtcagaatacaaaatagtt

SEQ ID NO: 261897 - DNA, 30 bp, Artificial Sequence
  Synthetic oligonucleotide
cgagacgcagtgctctaagttcgaatagtt

SEQ ID NO: 261898 - DNA, 30 bp, Artificial Sequence
  Synthetic oligonucleotide
cgacacgtccaattcttccaggacatagtt

SEQ ID NO: 261899 - DNA, 30 bp, Artificial Sequence
  Synthetic oligonucleotide
aagtaggactagtacaaggctcagatagtt

SEQ ID NO: 261900 - DNA, 30 bp, Artificial Sequence
  Synthetic oligonucleotide
acagtcgttgatttgcgccaacgtatagtt

SEQ ID NO: 261901 - DNA, 29 bp, Artificial Sequence
  Synthetic oligonucleotide
cacagcttaacgaaacaaagattatagtt

SEQ ID NO: 261902 - DNA, 30 bp, Artificial Sequence
  Synthetic oligonucleotide
tcctatatgcttgttatgtgagttatagtt

SEQ ID NO: 261903 - DNA, 30 bp, Artificial Sequence
  Synthetic oligonucleotide
caacctacatgaacaacagacaggctagtt

SEQ ID NO: 261904 - DNA, 30 bp, Artificial Sequence
  Synthetic oligonucleotide
taatttactactaacgttagtgggctagtt

SEQ ID NO: 261905 - DNA, 30 bp, Artificial Sequence
  Synthetic oligonucleotide
gatcgaacagggaggatcccaattctagtt

SEQ ID NO: 261906 - DNA, 30 bp, Artificial Sequence
  Synthetic oligonucleotide
gtcgaatggagcgaggctattgttctagtt

SEQ ID NO: 261907 - DNA, 30 bp, Artificial Sequence
  Synthetic oligonucleotide
gggttagcgcaggtactgtactcagtagtt

SEQ ID NO: 261908 - DNA, 30 bp, Artificial Sequence
  Synthetic oligonucleotide
tcttgaattacgaagtcgcgtggagtagtt

SEQ ID NO: 261909 - DNA, 30 bp, Artificial Sequence
  Synthetic oligonucleotide
gtcttaccagaagaagataccttagtagtt

SEQ ID NO: 261910 - DNA, 30 bp, Artificial Sequence
  Synthetic oligonucleotide
gtccagtggtgaagaagggtgggcgtagtt

SEQ ID NO: 261911 - DNA, 30 bp, Artificial Sequence
  Synthetic oligonucleotide
aaaatattctacggaggcggtcatgtagtt

SEQ ID NO: 261912 - DNA, 30 bp, Artificial Sequence
  Synthetic oligonucleotide
ctgtggtttaagctaagagactccttagtt

SEQ ID NO: 261913 - DNA, 30 bp, Artificial Sequence
  Synthetic oligonucleotide
gcgggcttagactaccctattccgttagtt

SEQ ID NO: 261914 - DNA, 30 bp, Artificial Sequence
  Synthetic oligonucleotide
cgtatacgtaggcacgggaccaatttagtt

SEQ ID NO: 261915 - DNA, 30 bp, Artificial Sequence
  Synthetic oligonucleotide
ttaacacttacaactatgtagcgtttagtt

SEQ ID NO: 261916 - DNA, 30 bp, Artificial Sequence
  Synthetic oligonucleotide
accgcacattactagtgctttattttagtt

SEQ ID NO: 261917 - DNA, 30 bp, Artificial Sequence
  Synthetic oligonucleotide
gtagctggtgcaacagatgatccaaacgtt

SEQ ID NO: 261918 - DNA, 30 bp, Artificial Sequence
  Synthetic oligonucleotide
ccctcatgcaatgagtagttcgcaaacgtt

SEQ ID NO: 261919 - DNA, 30 bp, Artificial Sequence
  Synthetic oligonucleotide
tttacagattaaagaaaggactacaacgtt

SEQ ID NO: 261920 - DNA, 30 bp, Artificial Sequence
  Synthetic oligonucleotide
aaggggttcctcagtagagccaagaacgtt

SEQ ID NO: 261921 - DNA, 30 bp, Artificial Sequence
  Synthetic oligonucleotide
gatgacgaggggccaacggttgagaacgtt

SEQ ID NO: 261922 - DNA, 30 bp, Artificial Sequence
  Synthetic oligonucleotide
ttggagtggtgcagggatgagatacacgtt

SEQ ID NO: 261923 - DNA, 30 bp, Artificial Sequence
  Synthetic oligonucleotide
agtccatgtgggacgcgtgtgggccacgtt

SEQ ID NO: 261924 - DNA, 30 bp, Artificial Sequence
  Synthetic oligonucleotide
tagagtacatacgaaatcacgttccacgtt

SEQ ID NO: 261925 - DNA, 30 bp, Artificial Sequence
  Synthetic oligonucleotide
agagcatcggctcagtggacttcgcacgtt

SEQ ID NO: 261926 - DNA, 30 bp, Artificial Sequence
  Synthetic oligonucleotide
tccccatcagccttaaggacagtgcacgtt

SEQ ID NO: 261927 - DNA, 30 bp, Artificial Sequence
  Synthetic oligonucleotide
gggcctttgataggtgctcccagagacgtt

SEQ ID NO: 261928 - DNA, 30 bp, Artificial Sequence
  Synthetic oligonucleotide
agtcggcatgtcacctcggtgaccgacgtt

SEQ ID NO: 261929 - DNA, 30 bp, Artificial Sequence
  Synthetic oligonucleotide
tgcgttcaagcgtttacctaatccgacgtt

SEQ ID NO: 261930 - DNA, 30 bp, Artificial Sequence
  Synthetic oligonucleotide
aaagtaaaagtcggcttgaactcggacgtt

SEQ ID NO: 261931 - DNA, 30 bp, Artificial Sequence
  Synthetic oligonucleotide
ccagagtgaggagcttggcgacgatacgtt

SEQ ID NO: 261932 - DNA, 30 bp, Artificial Sequence
  Synthetic oligonucleotide
actcgtaggggatataagcagtcctacgtt

SEQ ID NO: 261933 - DNA, 30 bp, Artificial Sequence
  Synthetic oligonucleotide
gatgaggaagcgcacttgaaacagtacgtt

SEQ ID NO: 261934 - DNA, 30 bp, Artificial Sequence
  Synthetic oligonucleotide
ctcccgactaaatgcggacgagggtacgtt

SEQ ID NO: 261935 - DNA, 30 bp, Artificial Sequence
  Synthetic oligonucleotide
gacctatatgccaagaagattcattacgtt

SEQ ID NO: 261936 - DNA, 30 bp, Artificial Sequence
  Synthetic oligonucleotide
tcacaggctgggtaacacgcatattacgtt

SEQ ID NO: 261937 - DNA, 30 bp, Artificial Sequence
  Synthetic oligonucleotide
tgctacccatcattctcactattttacgtt

SEQ ID NO: 261938 - DNA, 30 bp, Artificial Sequence
  Synthetic oligonucleotide
aagtaactcggtctgggcgagagaaccgtt

SEQ ID NO: 261939 - DNA, 30 bp, Artificial Sequence
  Synthetic oligonucleotide
caaaagttccaacagggtacgttaaccgtt

SEQ ID NO: 261940 - DNA, 30 bp, Artificial Sequence
  Synthetic oligonucleotide
agcgggggggggatgtaagtttcgaccgtt

SEQ ID NO: 261941 - DNA, 30 bp, Artificial Sequence
  Synthetic oligonucleotide
tgagtgagtcatggatggaggacgcccgtt

SEQ ID NO: 261942 - DNA, 30 bp, Artificial Sequence
  Synthetic oligonucleotide
cataagggtcccccagcgcaaagagccgtt

SEQ ID NO: 261943 - DNA, 30 bp, Artificial Sequence
  Synthetic oligonucleotide
tgcatatcctaacgtgtgtcggtagccgtt

SEQ ID NO: 261944 - DNA, 30 bp, Artificial Sequence
  Synthetic oligonucleotide
tgctgctttaggcagttcaccagcgccgtt

SEQ ID NO: 261945 - DNA, 30 bp, Artificial Sequence
  Synthetic oligonucleotide
tgactggctctccaagtccagccggccgtt

SEQ ID NO: 261946 - DNA, 30 bp, Artificial Sequence
  Synthetic oligonucleotide
aaggagtagtgattacaccttcatgccgtt

SEQ ID NO: 261947 - DNA, 30 bp, Artificial Sequence
  Synthetic oligonucleotide
gcgcgcataatggctgcatgaaaatccgtt

SEQ ID NO: 261948 - DNA, 30 bp, Artificial Sequence
  Synthetic oligonucleotide
ttgtaggagtcctgtaacttttaatccgtt

SEQ ID NO: 261949 - DNA, 30 bp, Artificial Sequence
  Synthetic oligonucleotide
gttacggactaagaacggggcagatccgtt

SEQ ID NO: 261950 - DNA, 30 bp, Artificial Sequence
  Synthetic oligonucleotide
ttccatcccaacaaaacatcgtgatccgtt

SEQ ID NO: 261951 - DNA, 30 bp, Artificial Sequence
  Synthetic oligonucleotide
gacataaatattgggtaacccacctccgtt

SEQ ID NO: 261952 - DNA, 30 bp, Artificial Sequence
  Synthetic oligonucleotide
ggatgaagctctcagcgatgcgattccgtt

SEQ ID NO: 261953 - DNA, 30 bp, Artificial Sequence
  Synthetic oligonucleotide
gcgtaacattgatcaagaacgccaagcgtt

SEQ ID NO: 261954 - DNA, 30 bp, Artificial Sequence
  Synthetic oligonucleotide
gcatgaaactattgcgttgtatcaagcgtt

SEQ ID NO: 261955 - DNA, 30 bp, Artificial Sequence
  Synthetic oligonucleotide
cgttcgccgctgagtatctactgaagcgtt

SEQ ID NO: 261956 - DNA, 30 bp, Artificial Sequence
  Synthetic oligonucleotide
actgaaattaagagtagtttctatagcgtt

SEQ ID NO: 261957 - DNA, 30 bp, Artificial Sequence
  Synthetic oligonucleotide
gaatgtcctacggttgcatggcttagcgtt

SEQ ID NO: 261958 - DNA, 30 bp, Artificial Sequence
  Synthetic oligonucleotide
tatgtaaacggtacagtcgacacccgcgtt

SEQ ID NO: 261959 - DNA, 30 bp, Artificial Sequence
  Synthetic oligonucleotide
ggcctaaaaggctttctcagctcccgcgtt

SEQ ID NO: 261960 - DNA, 30 bp, Artificial Sequence
  Synthetic oligonucleotide
cgtggagcaccctgtggcttgtgccgcgtt

SEQ ID NO: 261961 - DNA, 30 bp, Artificial Sequence
  Synthetic oligonucleotide
accacgtccgaggtaatcaggaggcgcgtt

SEQ ID NO: 261962 - DNA, 31 bp, Artificial Sequence
  Synthetic oligonucleotide
gcattagaggacgacccgtgaagaaggcgtt

SEQ ID NO: 261963 - DNA, 30 bp, Artificial Sequence
  Synthetic oligonucleotide
tgcaaatgaagagtgtttcgctccggcgtt

SEQ ID NO: 261964 - DNA, 30 bp, Artificial Sequence
  Synthetic oligonucleotide
ggaaccggcgtatattcatttagcggcgtt

SEQ ID NO: 261965 - DNA, 30 bp, Artificial Sequence
  Synthetic oligonucleotide
cgcttgttgggtcgatattaactcggcgtt

SEQ ID NO: 261966 - DNA, 30 bp, Artificial Sequence
  Synthetic oligonucleotide
acatccacatttatgaagtcatcgggcgtt

SEQ ID NO: 261967 - DNA, 30 bp, Artificial Sequence
  Synthetic oligonucleotide
ggcatgcctcagatgtgattgttgggcgtt

SEQ ID NO: 261968 - DNA, 30 bp, Artificial Sequence
  Synthetic oligonucleotide
tccccaaaggttgattggctggatggcgtt

SEQ ID NO: 261969 - DNA, 30 bp, Artificial Sequence
  Synthetic oligonucleotide
acccacagctgtccctcatagacatgcgtt

SEQ ID NO: 261970 - DNA, 30 bp, Artificial Sequence
  Synthetic oligonucleotide
gcccgacgcactgcaagagtaccaatcgtt

SEQ ID NO: 261971 - DNA, 30 bp, Artificial Sequence
  Synthetic oligonucleotide
ggattaacattaagcatgcgtggaatcgtt

SEQ ID NO: 261972 - DNA, 30 bp, Artificial Sequence
  Synthetic oligonucleotide
gcctaccagccgaaatctggatgactcgtt

SEQ ID NO: 261973 - DNA, 30 bp, Artificial Sequence
  Synthetic oligonucleotide
attcgaaggggtcaagtcgaagaagtcgtt

SEQ ID NO: 261974 - DNA, 30 bp, Artificial Sequence
  Synthetic oligonucleotide
tgtacactgccgagtggtcatgaagtcgtt

SEQ ID NO: 261975 - DNA, 30 bp, Artificial Sequence
  Synthetic oligonucleotide
cacagattttaatggtgcaccgtcgtcgtt

SEQ ID NO: 261976 - DNA, 30 bp, Artificial Sequence
  Synthetic oligonucleotide
caatggaacggtcagaacacaatggtcgtt

SEQ ID NO: 261977 - DNA, 30 bp, Artificial Sequence
  Synthetic oligonucleotide
accagtacagagaattccaagaaattcgtt

SEQ ID NO: 261978 - DNA, 30 bp, Artificial Sequence
  Synthetic oligonucleotide
cgcgaagacaacagggaattcccattcgtt

SEQ ID NO: 261979 - DNA, 30 bp, Artificial Sequence
  Synthetic oligonucleotide
ttcccaaatatgtgccaagagagattcgtt

SEQ ID NO: 261980 - DNA, 30 bp, Artificial Sequence
  Synthetic oligonucleotide
cgcgcttgacggcgataatacagcttcgtt

SEQ ID NO: 261981 - DNA, 30 bp, Artificial Sequence
  Synthetic oligonucleotide
ctaaaactttatccggatctacaaaaggtt

SEQ ID NO: 261982 - DNA, 30 bp, Artificial Sequence
  Synthetic oligonucleotide
tacctcaaaggagattagggattaaaggtt

SEQ ID NO: 261983 - DNA, 30 bp, Artificial Sequence
  Synthetic oligonucleotide
attctgataaatacgtgtcggagcaaggtt

SEQ ID NO: 261984 - DNA, 30 bp, Artificial Sequence
  Synthetic oligonucleotide
gctagcggcttctgcgctggggcgaaggtt

SEQ ID NO: 261985 - DNA, 30 bp, Artificial Sequence
  Synthetic oligonucleotide
tgccacagcagtggacgggtgttgaaggtt

SEQ ID NO: 261986 - DNA, 30 bp, Artificial Sequence
  Synthetic oligonucleotide
tggtaaaccgtaaatccgggcactaaggtt

SEQ ID NO: 261987 - DNA, 30 bp, Artificial Sequence
  Synthetic oligonucleotide
agcgtacatcgacgtatgctgttacaggtt

SEQ ID NO: 261988 - DNA, 30 bp, Artificial Sequence
  Synthetic oligonucleotide
ccgttagtatggtatgtatacccccaggtt

SEQ ID NO: 261989 - DNA, 30 bp, Artificial Sequence
  Synthetic oligonucleotide
cataaacccagcgtcaactgtcgccaggtt

SEQ ID NO: 261990 - DNA, 30 bp, Artificial Sequence
  Synthetic oligonucleotide
aattgggtagggatacaaaagtgccaggtt

SEQ ID NO: 261991 - DNA, 30 bp, Artificial Sequence
  Synthetic oligonucleotide
gggcttgtgggaattcgggccaatcaggtt

SEQ ID NO: 261992 - DNA, 30 bp, Artificial Sequence
  Synthetic oligonucleotide
cggaaactattcacacaaatatatcaggtt

SEQ ID NO: 261993 - DNA, 30 bp, Artificial Sequence
  Synthetic oligonucleotide
gagagagcaggagggattctgagtcaggtt

SEQ ID NO: 261994 - DNA, 30 bp, Artificial Sequence
  Synthetic oligonucleotide
ccggcttttcaaaacataaacgttcaggtt

SEQ ID NO: 261995 - DNA, 30 bp, Artificial Sequence
  Synthetic oligonucleotide
taatcgggaacggtgagatagcgagaggtt

SEQ ID NO: 261996 - DNA, 30 bp, Artificial Sequence
  Synthetic oligonucleotide
agtttacagaaatggctggtctgggaggtt

SEQ ID NO: 261997 - DNA, 30 bp, Artificial Sequence
  Synthetic oligonucleotide
cacgacgcgtttcctttagcccaataggtt

SEQ ID NO: 261998 - DNA, 30 bp, Artificial Sequence
  Synthetic oligonucleotide
tatcacgtattggggtaaagcgtataggtt

SEQ ID NO: 261999 - DNA, 30 bp, Artificial Sequence
  Synthetic oligonucleotide
aagcctgtattgtgagtatccaactaggtt

SEQ ID NO: 262000 - DNA, 30 bp, Artificial Sequence
  Synthetic oligonucleotide
atcagcgtatatgggggttcccactaggtt

SEQ ID NO: 262001 - DNA, 30 bp, Artificial Sequence
  Synthetic oligonucleotide
tagactcgttcggagccctgaagctaggtt

SEQ ID NO: 262002 - DNA, 30 bp, Artificial Sequence
  Synthetic oligonucleotide
taaacgagttgaggttgaaacaattaggtt

SEQ ID NO: 262003 - DNA, 30 bp, Artificial Sequence
  Synthetic oligonucleotide
acgagagaggctagggaaccgacaacggtt

SEQ ID NO: 262004 - DNA, 30 bp, Artificial Sequence
  Synthetic oligonucleotide
atcggctagaaacatccaaaagcgacggtt

SEQ ID NO: 262005 - DNA, 30 bp, Artificial Sequence
  Synthetic oligonucleotide
gatctcttgccaacggtctcacatacggtt

SEQ ID NO: 262006 - DNA, 30 bp, Artificial Sequence
  Synthetic oligonucleotide
ctcaatccataaagatagagcacaccggtt

SEQ ID NO: 262007 - DNA, 30 bp, Artificial Sequence
  Synthetic oligonucleotide
ctcaggtgaaattctctaattacaccggtt

SEQ ID NO: 262008 - DNA, 30 bp, Artificial Sequence
  Synthetic oligonucleotide
ggggaatgggcacactgcttacacccggtt

SEQ ID NO: 262009 - DNA, 30 bp, Artificial Sequence
  Synthetic oligonucleotide
cagcgtgttacaccgaagagcggcccggtt

SEQ ID NO: 262010 - DNA, 30 bp, Artificial Sequence
  Synthetic oligonucleotide
tcggacgtgacctcgtctgccaggccggtt

SEQ ID NO: 262011 - DNA, 30 bp, Artificial Sequence
  Synthetic oligonucleotide
actgtttaactatttaaggttgggccggtt

SEQ ID NO: 262012 - DNA, 30 bp, Artificial Sequence
  Synthetic oligonucleotide
tgtagcgcccacggctaagggcatccggtt

SEQ ID NO: 262013 - DNA, 30 bp, Artificial Sequence
  Synthetic oligonucleotide
tggtcctaattgtctgggctacctccggtt

SEQ ID NO: 262014 - DNA, 30 bp, Artificial Sequence
  Synthetic oligonucleotide
cagaggaagttcgtctcgggccgtccggtt

SEQ ID NO: 262015 - DNA, 30 bp, Artificial Sequence
  Synthetic oligonucleotide
aagtgtaaccgagtgagcaatattccggtt

SEQ ID NO: 262016 - DNA, 30 bp, Artificial Sequence
  Synthetic oligonucleotide
gaaatgtcaccccctcggccgggagcggtt

SEQ ID NO: 262017 - DNA, 30 bp, Artificial Sequence
  Synthetic oligonucleotide
aatgctctagaggagtacgggaacgcggtt

SEQ ID NO: 262018 - DNA, 30 bp, Artificial Sequence
  Synthetic oligonucleotide
gtatgaagcaaaaggatgttgaacgcggtt

SEQ ID NO: 262019 - DNA, 30 bp, Artificial Sequence
  Synthetic oligonucleotide
tctttcgctaggcgttagtggcacgcggtt

SEQ ID NO: 262020 - DNA, 30 bp, Artificial Sequence
  Synthetic oligonucleotide
gctcacaagtcgttcttagttaaggcggtt

SEQ ID NO: 262021 - DNA, 30 bp, Artificial Sequence
  Synthetic oligonucleotide
tatacaacggcgggcaaggatcactcggtt

SEQ ID NO: 262022 - DNA, 30 bp, Artificial Sequence
  Synthetic oligonucleotide
gaggggtctttattcacaatgccttcggtt

SEQ ID NO: 262023 - DNA, 30 bp, Artificial Sequence
  Synthetic oligonucleotide
cgctggtgctctcagtatccctaaagggtt

SEQ ID NO: 262024 - DNA, 30 bp, Artificial Sequence
  Synthetic oligonucleotide
caacgtattaggattttagctgcaagggtt

SEQ ID NO: 262025 - DNA, 30 bp, Artificial Sequence
  Synthetic oligonucleotide
aggacgtaatgtttgatacatggaagggtt

SEQ ID NO: 262026 - DNA, 30 bp, Artificial Sequence
  Synthetic oligonucleotide
ggtgtcagcgagaagcgccctcgcagggtt

SEQ ID NO: 262027 - DNA, 30 bp, Artificial Sequence
  Synthetic oligonucleotide
ggggacacctggtgaaccagtatcagggtt

SEQ ID NO: 262028 - DNA, 30 bp, Artificial Sequence
  Synthetic oligonucleotide
gggtacccaacggctctatgcaagagggtt

SEQ ID NO: 262029 - DNA, 30 bp, Artificial Sequence
  Synthetic oligonucleotide
aagccatatagaagctcaggacagagggtt

SEQ ID NO: 262030 - DNA, 30 bp, Artificial Sequence
  Synthetic oligonucleotide
cctccggaagctcaaaagaaggctagggtt

SEQ ID NO: 262031 - DNA, 30 bp, Artificial Sequence
  Synthetic oligonucleotide
ccacaattgtagccctcaccaattagggtt

SEQ ID NO: 262032 - DNA, 30 bp, Artificial Sequence
  Synthetic oligonucleotide
ctcccaaggctatggaataactttagggtt

SEQ ID NO: 262033 - DNA, 30 bp, Artificial Sequence
  Synthetic oligonucleotide
ttctacagagactgtcggctaagccgggtt

SEQ ID NO: 262034 - DNA, 30 bp, Artificial Sequence
  Synthetic oligonucleotide
attgtcgctggttagcttgtggtccgggtt

SEQ ID NO: 262035 - DNA, 30 bp, Artificial Sequence
  Synthetic oligonucleotide
cacgtatcaagggtcacgtcgtggcgggtt

SEQ ID NO: 262036 - DNA, 30 bp, Artificial Sequence
  Synthetic oligonucleotide
gacgggatagtttagcgccaacatcgggtt

SEQ ID NO: 262037 - DNA, 31 bp, Artificial Sequence
  Synthetic oligonucleotide
gcatcgggcgtcggtactggtaaaaggggtt

SEQ ID NO: 262038 - DNA, 30 bp, Artificial Sequence
  Synthetic oligonucleotide
ttataggaaaaggggtacatcagaggggtt

SEQ ID NO: 262039 - DNA, 30 bp, Artificial Sequence
  Synthetic oligonucleotide
gtcgagggtaggtgcaggacaggaggggtt

SEQ ID NO: 262040 - DNA, 30 bp, Artificial Sequence
  Synthetic oligonucleotide
aacaggtaacacgctgtttgaaagggggtt

SEQ ID NO: 262041 - DNA, 30 bp, Artificial Sequence
  Synthetic oligonucleotide
cgtaggcctacgcacattgtagagggggtt

SEQ ID NO: 262042 - DNA, 30 bp, Artificial Sequence
  Synthetic oligonucleotide
ggagatggagagctataagggtagggggtt

SEQ ID NO: 262043 - DNA, 30 bp, Artificial Sequence
  Synthetic oligonucleotide
ccgagccgctaaaaatacaaaacgggggtt

SEQ ID NO: 262044 - DNA, 30 bp, Artificial Sequence
  Synthetic oligonucleotide
gtattgaaccgcgcgtcataaacgggggtt

SEQ ID NO: 262045 - DNA, 30 bp, Artificial Sequence
  Synthetic oligonucleotide
aattggcataagaagacactctcgggggtt

SEQ ID NO: 262046 - DNA, 30 bp, Artificial Sequence
  Synthetic oligonucleotide
tctgagggtaaggtctggttcgtgggggtt

SEQ ID NO: 262047 - DNA, 30 bp, Artificial Sequence
  Synthetic oligonucleotide
tacaaagatctgaattcctgtgaatgggtt

SEQ ID NO: 262048 - DNA, 30 bp, Artificial Sequence
  Synthetic oligonucleotide
cactcagtcacgagtgaatactaatgggtt

SEQ ID NO: 262049 - DNA, 30 bp, Artificial Sequence
  Synthetic oligonucleotide
attactattggtgagtagtttatctgggtt

SEQ ID NO: 262050 - DNA, 30 bp, Artificial Sequence
  Synthetic oligonucleotide
gcaaccaaagatgcgccggcctagtgggtt

SEQ ID NO: 262051 - DNA, 30 bp, Artificial Sequence
  Synthetic oligonucleotide
gttgtagcgcttaacgacactgattgggtt

SEQ ID NO: 262052 - DNA, 30 bp, Artificial Sequence
  Synthetic oligonucleotide
cgccaggactagtgcagcaatatttgggtt

SEQ ID NO: 262053 - DNA, 30 bp, Artificial Sequence
  Synthetic oligonucleotide
cctgcaagcgtcaggttttgagaaatggtt

SEQ ID NO: 262054 - DNA, 30 bp, Artificial Sequence
  Synthetic oligonucleotide
gcctggcattagtgtacagctagaatggtt

SEQ ID NO: 262055 - DNA, 30 bp, Artificial Sequence
  Synthetic oligonucleotide
tccggatttggggagaatttggccatggtt

SEQ ID NO: 262056 - DNA, 30 bp, Artificial Sequence
  Synthetic oligonucleotide
gctgttcttggatataggggacagatggtt

SEQ ID NO: 262057 - DNA, 30 bp, Artificial Sequence
  Synthetic oligonucleotide
caaaagaaggacacgtgcaatcggatggtt

SEQ ID NO: 262058 - DNA, 30 bp, Artificial Sequence
  Synthetic oligonucleotide
tgtctcactcgaagttcggcatggatggtt

SEQ ID NO: 262059 - DNA, 30 bp, Artificial Sequence
  Synthetic oligonucleotide
gtagattatggtatgggcaatttgatggtt

SEQ ID NO: 262060 - DNA, 30 bp, Artificial Sequence
  Synthetic oligonucleotide
ggtatcaaatacggcttccaaggtatggtt

SEQ ID NO: 262061 - DNA, 30 bp, Artificial Sequence
  Synthetic oligonucleotide
tgtcccagagttcaaatactggccctggtt

SEQ ID NO: 262062 - DNA, 30 bp, Artificial Sequence
  Synthetic oligonucleotide
ctccccatttccacccagtgtcggctggtt

SEQ ID NO: 262063 - DNA, 30 bp, Artificial Sequence
  Synthetic oligonucleotide
agtccggaaatcatcgagttagatctggtt

SEQ ID NO: 262064 - DNA, 30 bp, Artificial Sequence
  Synthetic oligonucleotide
ttccttgtgaccgtcaacgaaactctggtt

SEQ ID NO: 262065 - DNA, 30 bp, Artificial Sequence
  Synthetic oligonucleotide
tgaccattaaaggtgtttatctgagtggtt

SEQ ID NO: 262066 - DNA, 30 bp, Artificial Sequence
  Synthetic oligonucleotide
catcaacagggtaatcattcgactgtggtt

SEQ ID NO: 262067 - DNA, 30 bp, Artificial Sequence
  Synthetic oligonucleotide
atgactggtcaataggggttgactgtggtt

SEQ ID NO: 262068 - DNA, 30 bp, Artificial Sequence
  Synthetic oligonucleotide
gcaatataggtgtacgtaatgtgtgtggtt

SEQ ID NO: 262069 - DNA, 30 bp, Artificial Sequence
  Synthetic oligonucleotide
gggcgtaccgtgtgtctagagtgcttggtt

SEQ ID NO: 262070 - DNA, 30 bp, Artificial Sequence
  Synthetic oligonucleotide
ggacattggcctgggtagagtgcgttggtt

SEQ ID NO: 262071 - DNA, 30 bp, Artificial Sequence
  Synthetic oligonucleotide
aggaattcttgtagatgactagggttggtt

SEQ ID NO: 262072 - DNA, 30 bp, Artificial Sequence
  Synthetic oligonucleotide
accggatatcattagttggatgtgttggtt

SEQ ID NO: 262073 - DNA, 30 bp, Artificial Sequence
  Synthetic oligonucleotide
atatcggaagactcaactatcttgttggtt

SEQ ID NO: 262074 - DNA, 30 bp, Artificial Sequence
  Synthetic oligonucleotide
gatcttcagttcgaatagcgaaatttggtt

SEQ ID NO: 262075 - DNA, 30 bp, Artificial Sequence
  Synthetic oligonucleotide
tggtagcggaacgggaacgataatttggtt

SEQ ID NO: 262076 - DNA, 30 bp, Artificial Sequence
  Synthetic oligonucleotide
gtacaaaaggggcgcattttttcaaatgtt

SEQ ID NO: 262077 - DNA, 30 bp, Artificial Sequence
  Synthetic oligonucleotide
caagcgctggattacagaaaaaacaatgtt

SEQ ID NO: 262078 - DNA, 30 bp, Artificial Sequence
  Synthetic oligonucleotide
acaaatgtagaagatagaagagacaatgtt

SEQ ID NO: 262079 - DNA, 30 bp, Artificial Sequence
  Synthetic oligonucleotide
gagattacatcggcgggggattgcaatgtt

SEQ ID NO: 262080 - DNA, 30 bp, Artificial Sequence
  Synthetic oligonucleotide
cagagtggatgataaacctgcgagaatgtt

SEQ ID NO: 262081 - DNA, 30 bp, Artificial Sequence
  Synthetic oligonucleotide
aagtattaagcgccggaagaagtgaatgtt

SEQ ID NO: 262082 - DNA, 30 bp, Artificial Sequence
  Synthetic oligonucleotide
ttcggaaacaaggactttcaacaacatgtt

SEQ ID NO: 262083 - DNA, 30 bp, Artificial Sequence
  Synthetic oligonucleotide
gccagtgccaaaagtgttaagggacatgtt

SEQ ID NO: 262084 - DNA, 30 bp, Artificial Sequence
  Synthetic oligonucleotide
ggtggcaggggtctgcggaagtgacatgtt

SEQ ID NO: 262085 - DNA, 30 bp, Artificial Sequence
  Synthetic oligonucleotide
actaaaagggacatggtatgcgtccatgtt

SEQ ID NO: 262086 - DNA, 30 bp, Artificial Sequence
  Synthetic oligonucleotide
tcgtaggtccgctaaaatcggtagcatgtt

SEQ ID NO: 262087 - DNA, 30 bp, Artificial Sequence
  Synthetic oligonucleotide
agccgggaggtacttaccggatggcatgtt

SEQ ID NO: 262088 - DNA, 30 bp, Artificial Sequence
  Synthetic oligonucleotide
tgtagggtcattaacaaaaaaacagatgtt

SEQ ID NO: 262089 - DNA, 30 bp, Artificial Sequence
  Synthetic oligonucleotide
taatttggctcgtcaattatggcagatgtt

SEQ ID NO: 262090 - DNA, 30 bp, Artificial Sequence
  Synthetic oligonucleotide
aaacggaatgtaacacttgacggagatgtt

SEQ ID NO: 262091 - DNA, 30 bp, Artificial Sequence
  Synthetic oligonucleotide
aagttgacatcattcgactacgccgatgtt

SEQ ID NO: 262092 - DNA, 30 bp, Artificial Sequence
  Synthetic oligonucleotide
aaacacgaaaggccgtgagttaaggatgtt

SEQ ID NO: 262093 - DNA, 30 bp, Artificial Sequence
  Synthetic oligonucleotide
ttgaggtaaagttactaccatcaatatgtt

SEQ ID NO: 262094 - DNA, 30 bp, Artificial Sequence
  Synthetic oligonucleotide
agtggaggctgaagccctgtgcactatgtt

SEQ ID NO: 262095 - DNA, 30 bp, Artificial Sequence
  Synthetic oligonucleotide
tcgcggtcccatgggtggcgaatctatgtt

SEQ ID NO: 262096 - DNA, 30 bp, Artificial Sequence
  Synthetic oligonucleotide
atggagacgtccctcgtgccgaggtatgtt

SEQ ID NO: 262097 - DNA, 30 bp, Artificial Sequence
  Synthetic oligonucleotide
agtatttgaggtgctattagatgaactgtt

SEQ ID NO: 262098 - DNA, 30 bp, Artificial Sequence
  Synthetic oligonucleotide
tcttgggtcgaaggatttcgctgtactgtt

SEQ ID NO: 262099 - DNA, 30 bp, Artificial Sequence
  Synthetic oligonucleotide
ttgatatcgagtcacggtcagatacctgtt

SEQ ID NO: 262100 - DNA, 30 bp, Artificial Sequence
  Synthetic oligonucleotide
tataggattctggcagaagcacatcctgtt

SEQ ID NO: 262101 - DNA, 30 bp, Artificial Sequence
  Synthetic oligonucleotide
gaatacgtctatcacacgactagagctgtt

SEQ ID NO: 262102 - DNA, 30 bp, Artificial Sequence
  Synthetic oligonucleotide
cgaaacaagtaatcgctgcccatagctgtt

SEQ ID NO: 262103 - DNA, 30 bp, Artificial Sequence
  Synthetic oligonucleotide
accccgtaagatcgatgaaaagacgctgtt

SEQ ID NO: 262104 - DNA, 30 bp, Artificial Sequence
  Synthetic oligonucleotide
tattggccgaggggtgtgaggcccgctgtt

SEQ ID NO: 262105 - DNA, 30 bp, Artificial Sequence
  Synthetic oligonucleotide
tgggggcgtccgacagtctaccgggctgtt

SEQ ID NO: 262106 - DNA, 30 bp, Artificial Sequence
  Synthetic oligonucleotide
gattgtcaagtgtcgagagaatgtgctgtt

SEQ ID NO: 262107 - DNA, 30 bp, Artificial Sequence
  Synthetic oligonucleotide
aagatacgtgtttttaatctcacatctgtt

SEQ ID NO: 262108 - DNA, 30 bp, Artificial Sequence
  Synthetic oligonucleotide
ttcctaccgtcaacttctcaattctctgtt

SEQ ID NO: 262109 - DNA, 30 bp, Artificial Sequence
  Synthetic oligonucleotide
gctcgatcgcgcatcctctaagtttctgtt

SEQ ID NO: 262110 - DNA, 30 bp, Artificial Sequence
  Synthetic oligonucleotide
attatctaactagcgaaaggaaagagtgtt

SEQ ID NO: 262111 - DNA, 30 bp, Artificial Sequence
  Synthetic oligonucleotide
caatccaacctaacaaaaccggggagtgtt

SEQ ID NO: 262112 - DNA, 30 bp, Artificial Sequence
  Synthetic oligonucleotide
ttattacaaaaacttgcagtggggagtgtt

SEQ ID NO: 262113 - DNA, 30 bp, Artificial Sequence
  Synthetic oligonucleotide
taagtccatggaggaggtggtattagtgtt

SEQ ID NO: 262114 - DNA, 30 bp, Artificial Sequence
  Synthetic oligonucleotide
gagctgataagcatggaggcaccgcgtgtt

SEQ ID NO: 262115 - DNA, 30 bp, Artificial Sequence
  Synthetic oligonucleotide
gagagtggagagttccccacaatgcgtgtt

SEQ ID NO: 262116 - DNA, 30 bp, Artificial Sequence
  Synthetic oligonucleotide
gccgcatcctttggtacagtggtgcgtgtt

SEQ ID NO: 262117 - DNA, 30 bp, Artificial Sequence
  Synthetic oligonucleotide
ttagcccgctgcgccttgtagagtcgtgtt

SEQ ID NO: 262118 - DNA, 30 bp, Artificial Sequence
  Synthetic oligonucleotide
catgcatttattgggggatatcccggtgtt

SEQ ID NO: 262119 - DNA, 30 bp, Artificial Sequence
  Synthetic oligonucleotide
ttactggggttacccaacattcccggtgtt

SEQ ID NO: 262120 - DNA, 30 bp, Artificial Sequence
  Synthetic oligonucleotide
tgtgagggtcggggttagtgggccggtgtt

SEQ ID NO: 262121 - DNA, 30 bp, Artificial Sequence
  Synthetic oligonucleotide
gctctcggaatactcagaagcgagggtgtt

SEQ ID NO: 262122 - DNA, 30 bp, Artificial Sequence
  Synthetic oligonucleotide
cgaattaactctgaccgagagaatggtgtt

SEQ ID NO: 262123 - DNA, 30 bp, Artificial Sequence
  Synthetic oligonucleotide
ggatggaatcgacgacgtaatactggtgtt

SEQ ID NO: 262124 - DNA, 30 bp, Artificial Sequence
  Synthetic oligonucleotide
ggcctgcggaagtctacctcgcaatgtgtt

SEQ ID NO: 262125 - DNA, 30 bp, Artificial Sequence
  Synthetic oligonucleotide
taggcgctacagggttacccagattgtgtt

SEQ ID NO: 262126 - DNA, 30 bp, Artificial Sequence
  Synthetic oligonucleotide
ccacaatggcgtatcttgtgcccttgtgtt

SEQ ID NO: 262127 - DNA, 30 bp, Artificial Sequence
  Synthetic oligonucleotide
gtgtgcaagtcatttggtagcgtaattgtt

SEQ ID NO: 262128 - DNA, 30 bp, Artificial Sequence
  Synthetic oligonucleotide
acggtcttcttaagagatgtggcgattgtt

SEQ ID NO: 262129 - DNA, 30 bp, Artificial Sequence
  Synthetic oligonucleotide
cacatcggcgtagtcacagtcactattgtt

SEQ ID NO: 262130 - DNA, 30 bp, Artificial Sequence
  Synthetic oligonucleotide
agatattgttagcggtaaactacacttgtt

SEQ ID NO: 262131 - DNA, 30 bp, Artificial Sequence
  Synthetic oligonucleotide
taaagccgaatccgaatgtatcgccttgtt

SEQ ID NO: 262132 - DNA, 30 bp, Artificial Sequence
  Synthetic oligonucleotide
tcgtgaagtgattccaccacccgtcttgtt

SEQ ID NO: 262133 - DNA, 30 bp, Artificial Sequence
  Synthetic oligonucleotide
gccaggtgaagactgctctactgtcttgtt

SEQ ID NO: 262134 - DNA, 30 bp, Artificial Sequence
  Synthetic oligonucleotide
taccttcatcggctgggatctattcttgtt

SEQ ID NO: 262135 - DNA, 30 bp, Artificial Sequence
  Synthetic oligonucleotide
taagtctggaggccaacttcctttcttgtt

SEQ ID NO: 262136 - DNA, 30 bp, Artificial Sequence
  Synthetic oligonucleotide
tggtcgatccttacgtaataaccagttgtt

SEQ ID NO: 262137 - DNA, 30 bp, Artificial Sequence
  Synthetic oligonucleotide
ctatcgcagtcgagttcaatacgcgttgtt

SEQ ID NO: 262138 - DNA, 30 bp, Artificial Sequence
  Synthetic oligonucleotide
cactattcacttgtagacatcatcgttgtt

SEQ ID NO: 262139 - DNA, 30 bp, Artificial Sequence
  Synthetic oligonucleotide
ggctttcgtaatggtaggttactcgttgtt

SEQ ID NO: 262140 - DNA, 30 bp, Artificial Sequence
  Synthetic oligonucleotide
cgggaggagatagcaagcggaagggttgtt

SEQ ID NO: 262141 - DNA, 30 bp, Artificial Sequence
  Synthetic oligonucleotide
agcagaaggggtcagcgaaaagtatttgtt

SEQ ID NO: 262142 - DNA, 30 bp, Artificial Sequence
  Synthetic oligonucleotide
aagttgaaacaaaattcaatagtatttgtt

SEQ ID NO: 262143 - DNA, 30 bp, Artificial Sequence
  Synthetic oligonucleotide
catacggcggtaaatgcttaggggtttgtt

SEQ ID NO: 262144 - DNA, 30 bp, Artificial Sequence
  Synthetic oligonucleotide
acgtgtacgtataagaagagggtgtttgtt

SEQ ID NO: 262145 - DNA, 30 bp, Artificial Sequence
  Synthetic oligonucleotide
aagagcacacggggttaggctaaaaaattt

SEQ ID NO: 262146 - DNA, 30 bp, Artificial Sequence
  Synthetic oligonucleotide
agctagcgtaagcggttatgcggaaaattt

SEQ ID NO: 262147 - DNA, 30 bp, Artificial Sequence
  Synthetic oligonucleotide
tggtaattaaaggccatgagaaccaaattt

SEQ ID NO: 262148 - DNA, 30 bp, Artificial Sequence
  Synthetic oligonucleotide
aactatgcacgaacaatgttaagcaaattt

SEQ ID NO: 262149 - DNA, 30 bp, Artificial Sequence
  Synthetic oligonucleotide
gatcgacttaacgtgaggtagaagaaattt

SEQ ID NO: 262150 - DNA, 30 bp, Artificial Sequence
  Synthetic oligonucleotide
ttatcaaactggtgggtcggtgcgaaattt

SEQ ID NO: 262151 - DNA, 30 bp, Artificial Sequence
  Synthetic oligonucleotide
gtctaatagttaatgcatatggggaaattt

SEQ ID NO: 262152 - DNA, 30 bp, Artificial Sequence
  Synthetic oligonucleotide
ccaatacgctcggaagtacataataaattt

SEQ ID NO: 262153 - DNA, 30 bp, Artificial Sequence
  Synthetic oligonucleotide
ggaggtgtgcgatcagggcccctacaattt

SEQ ID NO: 262154 - DNA, 30 bp, Artificial Sequence
  Synthetic oligonucleotide
tatactaacggcgcatgagcattacaattt

SEQ ID NO: 262155 - DNA, 30 bp, Artificial Sequence
  Synthetic oligonucleotide
tctgcacagggatatcatcctaaccaattt

SEQ ID NO: 262156 - DNA, 30 bp, Artificial Sequence
  Synthetic oligonucleotide
aacgcgccacccggttgcagacaccaattt

SEQ ID NO: 262157 - DNA, 30 bp, Artificial Sequence
  Synthetic oligonucleotide
atctataaccactacaaagcactccaattt

SEQ ID NO: 262158 - DNA, 30 bp, Artificial Sequence
  Synthetic oligonucleotide
ttactagccactgcacctcgctctcaattt

SEQ ID NO: 262159 - DNA, 30 bp, Artificial Sequence
  Synthetic oligonucleotide
agtaggttcagtggggaccgaattcaattt

SEQ ID NO: 262160 - DNA, 30 bp, Artificial Sequence
  Synthetic oligonucleotide
ctcaaagaaaacgttcgaggtgaagaattt

SEQ ID NO: 262161 - DNA, 30 bp, Artificial Sequence
  Synthetic oligonucleotide
aagttgcaaagtttgaaaccttacgaattt

SEQ ID NO: 262162 - DNA, 30 bp, Artificial Sequence
  Synthetic oligonucleotide
gtacatacaagggagcccaataccgaattt

SEQ ID NO: 262163 - DNA, 30 bp, Artificial Sequence
  Synthetic oligonucleotide
gctgtacagtctattgggaaaattgaattt

SEQ ID NO: 262164 - DNA, 30 bp, Artificial Sequence
  Synthetic oligonucleotide
gtgcaagctttggtactaagtggataattt

SEQ ID NO: 262165 - DNA, 30 bp, Artificial Sequence
  Synthetic oligonucleotide
gaactacggcctgctggatatacctaattt

SEQ ID NO: 262166 - DNA, 30 bp, Artificial Sequence
  Synthetic oligonucleotide
aatgcataaggggcaagcgcagcctaattt

SEQ ID NO: 262167 - DNA, 30 bp, Artificial Sequence
  Synthetic oligonucleotide
ttagtctacgaggacgataacgtctaattt

SEQ ID NO: 262168 - DNA, 30 bp, Artificial Sequence
  Synthetic oligonucleotide
aacacctgatgtgtgcggcaatggtaattt

SEQ ID NO: 262169 - DNA, 30 bp, Artificial Sequence
  Synthetic oligonucleotide
gtgcccacagcagtgccaccttgttaattt

SEQ ID NO: 262170 - DNA, 30 bp, Artificial Sequence
  Synthetic oligonucleotide
ttatgtacactagtggctagggaaacattt

SEQ ID NO: 262171 - DNA, 30 bp, Artificial Sequence
  Synthetic oligonucleotide
tgcatgggagataagaatgaatcaacattt

SEQ ID NO: 262172 - DNA, 30 bp, Artificial Sequence
  Synthetic oligonucleotide
gaggtgtgctcgggtgccggcggaacattt

SEQ ID NO: 262173 - DNA, 30 bp, Artificial Sequence
  Synthetic oligonucleotide
tcattgatacattgtctgactctaacattt

SEQ ID NO: 262174 - DNA, 30 bp, Artificial Sequence
  Synthetic oligonucleotide
tataacacatcacatatttcaaggacattt

SEQ ID NO: 262175 - DNA, 30 bp, Artificial Sequence
  Synthetic oligonucleotide
ttcgcgagtatctgctaagaaatgacattt

SEQ ID NO: 262176 - DNA, 30 bp, Artificial Sequence
  Synthetic oligonucleotide
caggtggaagaagacatgtacttgacattt

SEQ ID NO: 262177 - DNA, 30 bp, Artificial Sequence
  Synthetic oligonucleotide
attgcaacgaagaagtcgtcacctacattt

SEQ ID NO: 262178 - DNA, 30 bp, Artificial Sequence
  Synthetic oligonucleotide
ggtacacggtagacccttgaccttacattt

SEQ ID NO: 262179 - DNA, 30 bp, Artificial Sequence
  Synthetic oligonucleotide
ttactatcagatcaacaacccccgccattt

SEQ ID NO: 262180 - DNA, 30 bp, Artificial Sequence
  Synthetic oligonucleotide
ctgttaagtggtggtgggggcctgccattt

SEQ ID NO: 262181 - DNA, 30 bp, Artificial Sequence
  Synthetic oligonucleotide
tgtacaaaatttcttgaaggaggtccattt

SEQ ID NO: 262182 - DNA, 30 bp, Artificial Sequence
  Synthetic oligonucleotide
tcgttgacggagagggattctcaagcattt

SEQ ID NO: 262183 - DNA, 30 bp, Artificial Sequence
  Synthetic oligonucleotide
cgagcttgtcttcgtagggcctgcgcattt

SEQ ID NO: 262184 - DNA, 30 bp, Artificial Sequence
  Synthetic oligonucleotide
ccatttcgaattacaccatgtgcggcattt

SEQ ID NO: 262185 - DNA, 30 bp, Artificial Sequence
  Synthetic oligonucleotide
ccatggtgtcttcagtccgaatcggcattt

SEQ ID NO: 262186 - DNA, 30 bp, Artificial Sequence
  Synthetic oligonucleotide
aagagacgttgataggagaagtatgcattt

SEQ ID NO: 262187 - DNA, 30 bp, Artificial Sequence
  Synthetic oligonucleotide
actatcatgaccctcggtctaaaatcattt

SEQ ID NO: 262188 - DNA, 30 bp, Artificial Sequence
  Synthetic oligonucleotide
attggaagtatgttaagggctgaatcattt

SEQ ID NO: 262189 - DNA, 30 bp, Artificial Sequence
  Synthetic oligonucleotide
acgtacgagcgcttcggtcgatgatcattt

SEQ ID NO: 262190 - DNA, 30 bp, Artificial Sequence
  Synthetic oligonucleotide
gcggagaatcggtaacgagagtactcattt

SEQ ID NO: 262191 - DNA, 30 bp, Artificial Sequence
  Synthetic oligonucleotide
atgtacgcgtaatgccattaaggctcattt

SEQ ID NO: 262192 - DNA, 30 bp, Artificial Sequence
  Synthetic oligonucleotide
agaagcgacgacaacactgcatgttcattt

SEQ ID NO: 262193 - DNA, 30 bp, Artificial Sequence
  Synthetic oligonucleotide
cccttacaggaccgtggggatgtttcattt

SEQ ID NO: 262194 - DNA, 30 bp, Artificial Sequence
  Synthetic oligonucleotide
cacactggatagctttttatggagagattt

SEQ ID NO: 262195 - DNA, 30 bp, Artificial Sequence
  Synthetic oligonucleotide
aacggcatcacttatgagttgtggagattt

SEQ ID NO: 262196 - DNA, 30 bp, Artificial Sequence
  Synthetic oligonucleotide
atagactatacgttggacacgatgagattt

SEQ ID NO: 262197 - DNA, 30 bp, Artificial Sequence
  Synthetic oligonucleotide
cgaaatagtcgtaactcggaacttagattt

SEQ ID NO: 262198 - DNA, 30 bp, Artificial Sequence
  Synthetic oligonucleotide
cattaattcaatgcggcagtgtgacgattt

SEQ ID NO: 262199 - DNA, 30 bp, Artificial Sequence
  Synthetic oligonucleotide
cgttatacatgggagggacatccccgattt

SEQ ID NO: 262200 - DNA, 30 bp, Artificial Sequence
  Synthetic oligonucleotide
taccttcgaacgtgtcctggtgatcgattt

SEQ ID NO: 262201 - DNA, 30 bp, Artificial Sequence
  Synthetic oligonucleotide
atcaatagcgagcctcattgcgttcgattt

SEQ ID NO: 262202 - DNA, 30 bp, Artificial Sequence
  Synthetic oligonucleotide
gggtgccgggtactgaagcacagaggattt

SEQ ID NO: 262203 - DNA, 30 bp, Artificial Sequence
  Synthetic oligonucleotide
gatgagaggtaaaaatgcccatagggattt

SEQ ID NO: 262204 - DNA, 30 bp, Artificial Sequence
  Synthetic oligonucleotide
gctattaacgaagctcgtagttagggattt

SEQ ID NO: 262205 - DNA, 30 bp, Artificial Sequence
  Synthetic oligonucleotide
ggcctataagtaccagggtgatttggattt

SEQ ID NO: 262206 - DNA, 30 bp, Artificial Sequence
  Synthetic oligonucleotide
gcttaacacatatttcgtacaaactgattt

SEQ ID NO: 262207 - DNA, 30 bp, Artificial Sequence
  Synthetic oligonucleotide
atgagaaatccgaacatcgagagctgattt

SEQ ID NO: 262208 - DNA, 30 bp, Artificial Sequence
  Synthetic oligonucleotide
cggaaatcgaatgttccttgaacgtgattt

SEQ ID NO: 262209 - DNA, 30 bp, Artificial Sequence
  Synthetic oligonucleotide
tcgctattttatgttattattgattgattt

SEQ ID NO: 262210 - DNA, 30 bp, Artificial Sequence
  Synthetic oligonucleotide
ttcaagcgctgatctaggcgggtttgattt

SEQ ID NO: 262211 - DNA, 30 bp, Artificial Sequence
  Synthetic oligonucleotide
gatggtgcgtccagagtcaagcgaatattt

SEQ ID NO: 262212 - DNA, 30 bp, Artificial Sequence
  Synthetic oligonucleotide
gaactgaggggctgagagaacctaatattt

SEQ ID NO: 262213 - DNA, 30 bp, Artificial Sequence
  Synthetic oligonucleotide
aagagagagctccccccggcaagcatattt

SEQ ID NO: 262214 - DNA, 30 bp, Artificial Sequence
  Synthetic oligonucleotide
taaggtcttgttacatcggaaggcatattt

SEQ ID NO: 262215 - DNA, 30 bp, Artificial Sequence
  Synthetic oligonucleotide
gtgccttataccccttcgggccggatattt

SEQ ID NO: 262216 - DNA, 30 bp, Artificial Sequence
  Synthetic oligonucleotide
tgaatgctcgtgaattgagcgcatatattt

SEQ ID NO: 262217 - DNA, 30 bp, Artificial Sequence
  Synthetic oligonucleotide
gttcggcaccctggcaaaagttgtatattt

SEQ ID NO: 262218 - DNA, 30 bp, Artificial Sequence
  Synthetic oligonucleotide
taaggacccattaaggctgataaactattt

SEQ ID NO: 262219 - DNA, 30 bp, Artificial Sequence
  Synthetic oligonucleotide
ggaccccacctaacttgtgcgcaactattt

SEQ ID NO: 262220 - DNA, 30 bp, Artificial Sequence
  Synthetic oligonucleotide
cctcgtcataaactggttctctatctattt

SEQ ID NO: 262221 - DNA, 30 bp, Artificial Sequence
  Synthetic oligonucleotide
aaggtagtactgaggaactgtcgagtattt

SEQ ID NO: 262222 - DNA, 30 bp, Artificial Sequence
  Synthetic oligonucleotide
aaatggggaagtgttctccaatgagtattt

SEQ ID NO: 262223 - DNA, 30 bp, Artificial Sequence
  Synthetic oligonucleotide
agagcccgccctaacaatactaccgtattt

SEQ ID NO: 262224 - DNA, 30 bp, Artificial Sequence
  Synthetic oligonucleotide
aatcagccgactagacttagtgtggtattt

SEQ ID NO: 262225 - DNA, 30 bp, Artificial Sequence
  Synthetic oligonucleotide
gccaaatcggcttgttatctagaattattt

SEQ ID NO: 262226 - DNA, 30 bp, Artificial Sequence
  Synthetic oligonucleotide
actggggctaagtccccatgtccattattt

SEQ ID NO: 262227 - DNA, 30 bp, Artificial Sequence
  Synthetic oligonucleotide
acttctatgcaatttaaagtggcattattt

SEQ ID NO: 262228 - DNA, 30 bp, Artificial Sequence
  Synthetic oligonucleotide
atgcctgcgccagtacttctctgattattt

SEQ ID NO: 262229 - DNA, 30 bp, Artificial Sequence
  Synthetic oligonucleotide
gatacccgtgaataaactaaactcttattt

SEQ ID NO: 262230 - DNA, 30 bp, Artificial Sequence
  Synthetic oligonucleotide
gtatatgcgtaatacatcctattcttattt

SEQ ID NO: 262231 - DNA, 30 bp, Artificial Sequence
  Synthetic oligonucleotide
gtggagcaaggagatgccgtcaagttattt

SEQ ID NO: 262232 - DNA, 30 bp, Artificial Sequence
  Synthetic oligonucleotide
gtattcacaaaatagaggaagcagttattt

SEQ ID NO: 262233 - DNA, 30 bp, Artificial Sequence
  Synthetic oligonucleotide
gcccgttgcaagcccagttcatagttattt

SEQ ID NO: 262234 - DNA, 30 bp, Artificial Sequence
  Synthetic oligonucleotide
ctatctaacctaaggatgtcctatttattt

SEQ ID NO: 262235 - DNA, 30 bp, Artificial Sequence
  Synthetic oligonucleotide
ttccgaatcagaatccggaattatttattt

SEQ ID NO: 262236 - DNA, 30 bp, Artificial Sequence
  Synthetic oligonucleotide
tgcatacggatctcgtttactgctttattt

SEQ ID NO: 262237 - DNA, 30 bp, Artificial Sequence
  Synthetic oligonucleotide
gtcttagagcacgggcgagttggtttattt

SEQ ID NO: 262238 - DNA, 30 bp, Artificial Sequence
  Synthetic oligonucleotide
gggctctttggccgaagtaccaagaacttt

SEQ ID NO: 262239 - DNA, 30 bp, Artificial Sequence
  Synthetic oligonucleotide
caggacaacctggagatggagacacacttt

SEQ ID NO: 262240 - DNA, 30 bp, Artificial Sequence
  Synthetic oligonucleotide
gattggcatgtgcacgagtagttccacttt

SEQ ID NO: 262241 - DNA, 30 bp, Artificial Sequence
  Synthetic oligonucleotide
cctgtaagggtaacgtgtccggcgcacttt

SEQ ID NO: 262242 - DNA, 30 bp, Artificial Sequence
  Synthetic oligonucleotide
agtatacgaattgaagtgcaacggcacttt

SEQ ID NO: 262243 - DNA, 30 bp, Artificial Sequence
  Synthetic oligonucleotide
gaaggatactataacctggcacaagacttt

SEQ ID NO: 262244 - DNA, 30 bp, Artificial Sequence
  Synthetic oligonucleotide
gcgtgaggtatatgcattggagaagacttt

SEQ ID NO: 262245 - DNA, 30 bp, Artificial Sequence
  Synthetic oligonucleotide
ggacctggataccatttgagtaaggacttt

SEQ ID NO: 262246 - DNA, 30 bp, Artificial Sequence
  Synthetic oligonucleotide
gcgggatttcgacgaatataggaggacttt

SEQ ID NO: 262247 - DNA, 30 bp, Artificial Sequence
  Synthetic oligonucleotide
gtatggcaggagatatgcgtgagtgacttt

SEQ ID NO: 262248 - DNA, 30 bp, Artificial Sequence
  Synthetic oligonucleotide
cagaccacaaaaacgtaagaagactacttt

SEQ ID NO: 262249 - DNA, 30 bp, Artificial Sequence
  Synthetic oligonucleotide
gtatctatgcctcagaaggcgcgctacttt

SEQ ID NO: 262250 - DNA, 30 bp, Artificial Sequence
  Synthetic oligonucleotide
cgctgttttattaaaaatggcatctacttt

SEQ ID NO: 262251 - DNA, 30 bp, Artificial Sequence
  Synthetic oligonucleotide
actacgcgtactgtaggaaatatctacttt

SEQ ID NO: 262252 - DNA, 30 bp, Artificial Sequence
  Synthetic oligonucleotide
taagggaagctctcccgagccagttacttt

SEQ ID NO: 262253 - DNA, 30 bp, Artificial Sequence
  Synthetic oligonucleotide
attagtgacactcgtgggacagtttacttt

SEQ ID NO: 262254 - DNA, 30 bp, Artificial Sequence
  Synthetic oligonucleotide
ggtgttgtctagtcgctcaggttttacttt

SEQ ID NO: 262255 - DNA, 30 bp, Artificial Sequence
  Synthetic oligonucleotide
atgctcaagaaaagcgagcaattcaccttt

SEQ ID NO: 262256 - DNA, 30 bp, Artificial Sequence
  Synthetic oligonucleotide
acgcttgccccttatattattggtaccttt

SEQ ID NO: 262257 - DNA, 30 bp, Artificial Sequence
  Synthetic oligonucleotide
agacccatgtaacagagctgcacacccttt

SEQ ID NO: 262258 - DNA, 30 bp, Artificial Sequence
  Synthetic oligonucleotide
cggccaacccaaacccgggtggcacccttt

SEQ ID NO: 262259 - DNA, 30 bp, Artificial Sequence
  Synthetic oligonucleotide
cctatagttatagtcggagaatcacccttt

SEQ ID NO: 262260 - DNA, 30 bp, Artificial Sequence
  Synthetic oligonucleotide
acgctaaggtaagatagaaatcggcccttt

SEQ ID NO: 262261 - DNA, 30 bp, Artificial Sequence
  Synthetic oligonucleotide
gactaccatccgaaagactcacaagccttt

SEQ ID NO: 262262 - DNA, 30 bp, Artificial Sequence
  Synthetic oligonucleotide
aggaacatccagccttgcgctgcagccttt

SEQ ID NO: 262263 - DNA, 30 bp, Artificial Sequence
  Synthetic oligonucleotide
agaatcagatagaatacaggtggagccttt

SEQ ID NO: 262264 - DNA, 30 bp, Artificial Sequence
  Synthetic oligonucleotide
tccttcccaacaacaattacttgagccttt

SEQ ID NO: 262265 - DNA, 30 bp, Artificial Sequence
  Synthetic oligonucleotide
aagcgcgacccggggtcttaagccagcttt

SEQ ID NO: 262266 - DNA, 30 bp, Artificial Sequence
  Synthetic oligonucleotide
ggcacgagccacttatactcacagagcttt

SEQ ID NO: 262267 - DNA, 30 bp, Artificial Sequence
  Synthetic oligonucleotide
gtcgaagggctatataatttttaacgcttt

SEQ ID NO: 262268 - DNA, 30 bp, Artificial Sequence
  Synthetic oligonucleotide
agacaagggcattctcaccgccgccgcttt

SEQ ID NO: 262269 - DNA, 30 bp, Artificial Sequence
  Synthetic oligonucleotide
acatcatagcagtttacacacgtccgcttt

SEQ ID NO: 262270 - DNA, 30 bp, Artificial Sequence
  Synthetic oligonucleotide
agggtggacagctaccgaaccgcgcgcttt

SEQ ID NO: 262271 - DNA, 30 bp, Artificial Sequence
  Synthetic oligonucleotide
tggccggatgcaagtaagttactgcgcttt

SEQ ID NO: 262272 - DNA, 30 bp, Artificial Sequence
  Synthetic oligonucleotide
cagacaggactagactttacctctcgcttt

SEQ ID NO: 262273 - DNA, 30 bp, Artificial Sequence
  Synthetic oligonucleotide
tccgagattgcgtgcaaacccagtcgcttt

SEQ ID NO: 262274 - DNA, 30 bp, Artificial Sequence
  Synthetic oligonucleotide
ttcggaacatttcccgaggaccaaggcttt

SEQ ID NO: 262275 - DNA, 30 bp, Artificial Sequence
  Synthetic oligonucleotide
gccataaactacggggaacacgtaggcttt

SEQ ID NO: 262276 - DNA, 30 bp, Artificial Sequence
  Synthetic oligonucleotide
ctgatcaagtacgtgcgtccaaagggcttt

SEQ ID NO: 262277 - DNA, 30 bp, Artificial Sequence
  Synthetic oligonucleotide
agagacatttgtcatcagaaagaatgcttt

SEQ ID NO: 262278 - DNA, 30 bp, Artificial Sequence
  Synthetic oligonucleotide
aggtcatcgacgggaagctaacgatgcttt

SEQ ID NO: 262279 - DNA, 30 bp, Artificial Sequence
  Synthetic oligonucleotide
ctcgagtcccaaacaaagaccccctgcttt

SEQ ID NO: 262280 - DNA, 30 bp, Artificial Sequence
  Synthetic oligonucleotide
cagttgacagaaagaccgagtgattgcttt

SEQ ID NO: 262281 - DNA, 30 bp, Artificial Sequence
  Synthetic oligonucleotide
atacaatcgtggcggtcggcggtttgcttt

SEQ ID NO: 262282 - DNA, 30 bp, Artificial Sequence
  Synthetic oligonucleotide
ctcggtgaatacgttagcgtaggcatcttt

SEQ ID NO: 262283 - DNA, 30 bp, Artificial Sequence
  Synthetic oligonucleotide
acatagccttacactttaatggtcctcttt

SEQ ID NO: 262284 - DNA, 30 bp, Artificial Sequence
  Synthetic oligonucleotide
aggcgtgataattatgtgattacaaagttt

SEQ ID NO: 262285 - DNA, 30 bp, Artificial Sequence
  Synthetic oligonucleotide
cgggtatcacactgagtttgtttaaagttt

SEQ ID NO: 262286 - DNA, 30 bp, Artificial Sequence
  Synthetic oligonucleotide
tttatgaagtaaggacgcgttggcaagttt

SEQ ID NO: 262287 - DNA, 30 bp, Artificial Sequence
  Synthetic oligonucleotide
cgcgctggctacgcgcccacacctaagttt

SEQ ID NO: 262288 - DNA, 30 bp, Artificial Sequence
  Synthetic oligonucleotide
ggagggtaccaaaaagaatcaggtaagttt

SEQ ID NO: 262289 - DNA, 30 bp, Artificial Sequence
  Synthetic oligonucleotide
ataagtcactctctacccttagttaagttt

SEQ ID NO: 262290 - DNA, 30 bp, Artificial Sequence
  Synthetic oligonucleotide
gagacagtatgtcatctctcggaacagttt

SEQ ID NO: 262291 - DNA, 29 bp, Artificial Sequence
  Synthetic oligonucleotide
ggcttacctgttcggaatggcaccagttt

SEQ ID NO: 262292 - DNA, 30 bp, Artificial Sequence
  Synthetic oligonucleotide
ggatccgtcttgcaacgtaccagtcagttt

SEQ ID NO: 262293 - DNA, 30 bp, Artificial Sequence
  Synthetic oligonucleotide
gcaggagaacaagcgcaatgctccgagttt

SEQ ID NO: 262294 - DNA, 30 bp, Artificial Sequence
  Synthetic oligonucleotide
ggagttatctcaggaaactctgtcgagttt

SEQ ID NO: 262295 - DNA, 30 bp, Artificial Sequence
  Synthetic oligonucleotide
aaaaggtatacagcaggtcgtttcgagttt

SEQ ID NO: 262296 - DNA, 30 bp, Artificial Sequence
  Synthetic oligonucleotide
ctccactagcggcatgtcgcgcgggagttt

SEQ ID NO: 262297 - DNA, 30 bp, Artificial Sequence
  Synthetic oligonucleotide
tgtcctgtatctactgggccaactgagttt

SEQ ID NO: 262298 - DNA, 30 bp, Artificial Sequence
  Synthetic oligonucleotide
agtgctaaaaggggcatattaaactagttt

SEQ ID NO: 262299 - DNA, 30 bp, Artificial Sequence
  Synthetic oligonucleotide
gagcgtgcgctcacaaggatcatctagttt

SEQ ID NO: 262300 - DNA, 30 bp, Artificial Sequence
  Synthetic oligonucleotide
ctgacgactctctaatagccatagtagttt

SEQ ID NO: 262301 - DNA, 30 bp, Artificial Sequence
  Synthetic oligonucleotide
ctcacgcaggctgagccacgcacgtagttt

SEQ ID NO: 262302 - DNA, 30 bp, Artificial Sequence
  Synthetic oligonucleotide
ggttatctgaccttgttaagccattagttt

SEQ ID NO: 262303 - DNA, 30 bp, Artificial Sequence
  Synthetic oligonucleotide
aggcccccagagaaagaggcgggttagttt

SEQ ID NO: 262304 - DNA, 30 bp, Artificial Sequence
  Synthetic oligonucleotide
aaagtaccaaacggctaagaaccaacgttt

SEQ ID NO: 262305 - DNA, 30 bp, Artificial Sequence
  Synthetic oligonucleotide
cgaccagatgcttgtatccgttacacgttt

SEQ ID NO: 262306 - DNA, 30 bp, Artificial Sequence
  Synthetic oligonucleotide
aagagaataacattcaggcggacgacgttt

SEQ ID NO: 262307 - DNA, 30 bp, Artificial Sequence
  Synthetic oligonucleotide
catcacacacggccccgatgagctacgttt

SEQ ID NO: 262308 - DNA, 30 bp, Artificial Sequence
  Synthetic oligonucleotide
aagcgtgcacctgacatttgagagccgttt

SEQ ID NO: 262309 - DNA, 30 bp, Artificial Sequence
  Synthetic oligonucleotide
gcggcttggtaggcgcgataacggccgttt

SEQ ID NO: 262310 - DNA, 30 bp, Artificial Sequence
  Synthetic oligonucleotide
agtcagtctcttcggcgaaaatacgcgttt

SEQ ID NO: 262311 - DNA, 30 bp, Artificial Sequence
  Synthetic oligonucleotide
cgggggttaccgtgtatgatccgggcgttt

SEQ ID NO: 262312 - DNA, 30 bp, Artificial Sequence
  Synthetic oligonucleotide
cgagtgctcctcgacagtctggtggcgttt

SEQ ID NO: 262313 - DNA, 30 bp, Artificial Sequence
  Synthetic oligonucleotide
atcacgcgtcaggaactcctctgtgcgttt

SEQ ID NO: 262314 - DNA, 30 bp, Artificial Sequence
  Synthetic oligonucleotide
gacgagtcaatgttacctgtcaagtcgttt

SEQ ID NO: 262315 - DNA, 30 bp, Artificial Sequence
  Synthetic oligonucleotide
tcgatagcgaagcgatcaacaccaaggttt

SEQ ID NO: 262316 - DNA, 30 bp, Artificial Sequence
  Synthetic oligonucleotide
attagagaagcatggggagatggaaggttt

SEQ ID NO: 262317 - DNA, 30 bp, Artificial Sequence
  Synthetic oligonucleotide
tgacgctgaaaggccgaatagctgaggttt

SEQ ID NO: 262318 - DNA, 30 bp, Artificial Sequence
  Synthetic oligonucleotide
cgtcgcagggttcccgatttgactaggttt

SEQ ID NO: 262319 - DNA, 30 bp, Artificial Sequence
  Synthetic oligonucleotide
gctgccataaaggtgaccgtccctaggttt

SEQ ID NO: 262320 - DNA, 30 bp, Artificial Sequence
  Synthetic oligonucleotide
cgagagttagagactcttaggaaacggttt

SEQ ID NO: 262321 - DNA, 30 bp, Artificial Sequence
  Synthetic oligonucleotide
acgattcacgttttgcgtagataccggttt

SEQ ID NO: 262322 - DNA, 30 bp, Artificial Sequence
  Synthetic oligonucleotide
ttgggatagtgagacaatgtctgccggttt

SEQ ID NO: 262323 - DNA, 30 bp, Artificial Sequence
  Synthetic oligonucleotide
cggcacttgggcctcgacgtatatcggttt

SEQ ID NO: 262324 - DNA, 30 bp, Artificial Sequence
  Synthetic oligonucleotide
aacaggcgtaaacgtggattagttcggttt

SEQ ID NO: 262325 - DNA, 30 bp, Artificial Sequence
  Synthetic oligonucleotide
gttcggcatctggtaccagtatttcggttt

SEQ ID NO: 262326 - DNA, 30 bp, Artificial Sequence
  Synthetic oligonucleotide
ggttagaaggtacaacccgtgacagggttt

SEQ ID NO: 262327 - DNA, 30 bp, Artificial Sequence
  Synthetic oligonucleotide
atcgtgtgtcgggttccccgtcgagggttt

SEQ ID NO: 262328 - DNA, 30 bp, Artificial Sequence
  Synthetic oligonucleotide
ggggcacagcgaggcaataccgaggggttt

SEQ ID NO: 262329 - DNA, 30 bp, Artificial Sequence
  Synthetic oligonucleotide
cttttctaccaagcagcgggaagtgggttt

SEQ ID NO: 262330 - DNA, 30 bp, Artificial Sequence
  Synthetic oligonucleotide
cggtaacactctgtgccaatgggtgggttt

SEQ ID NO: 262331 - DNA, 30 bp, Artificial Sequence
  Synthetic oligonucleotide
gttatgctgacacccgtctatcactggttt

SEQ ID NO: 262332 - DNA, 30 bp, Artificial Sequence
  Synthetic oligonucleotide
taactcttcacaaccccacgcacgtggttt

SEQ ID NO: 262333 - DNA, 30 bp, Artificial Sequence
  Synthetic oligonucleotide
ggcagtcgcatgttaaggatcatgtggttt

SEQ ID NO: 262334 - DNA, 30 bp, Artificial Sequence
  Synthetic oligonucleotide
cgtgagagcggcattgcgaatcattggttt

SEQ ID NO: 262335 - DNA, 30 bp, Artificial Sequence
  Synthetic oligonucleotide
cctcaatatatccaaagtcgcgattggttt

SEQ ID NO: 262336 - DNA, 30 bp, Artificial Sequence
  Synthetic oligonucleotide
aacgtggttagttagtcccgtataatgttt

SEQ ID NO: 262337 - DNA, 30 bp, Artificial Sequence
  Synthetic oligonucleotide
aaacggcaacggctatgacaagtaatgttt

SEQ ID NO: 262338 - DNA, 30 bp, Artificial Sequence
  Synthetic oligonucleotide
ttaagtgtgatacatggatcgtacatgttt

SEQ ID NO: 262339 - DNA, 30 bp, Artificial Sequence
  Synthetic oligonucleotide
tctggcacgcgaaaaaaacggatcatgttt

SEQ ID NO: 262340 - DNA, 30 bp, Artificial Sequence
  Synthetic oligonucleotide
taatgtaggattagtccctgggtcatgttt

SEQ ID NO: 262341 - DNA, 30 bp, Artificial Sequence
  Synthetic oligonucleotide
tctaaaaagtcaggtccagagaagatgttt

SEQ ID NO: 262342 - DNA, 30 bp, Artificial Sequence
  Synthetic oligonucleotide
cgggaacatagtagtaactaagggatgttt

SEQ ID NO: 262343 - DNA, 30 bp, Artificial Sequence
  Synthetic oligonucleotide
taccggaaacttgactcggctctgatgttt

SEQ ID NO: 262344 - DNA, 30 bp, Artificial Sequence
  Synthetic oligonucleotide
gagcgttaaagtagaatcgttactatgttt

SEQ ID NO: 262345 - DNA, 30 bp, Artificial Sequence
  Synthetic oligonucleotide
cccttgcagaaggtccaaacgtacctgttt

SEQ ID NO: 262346 - DNA, 30 bp, Artificial Sequence
  Synthetic oligonucleotide
aaatcaacatgaatttgctagtggctgttt

SEQ ID NO: 262347 - DNA, 30 bp, Artificial Sequence
  Synthetic oligonucleotide
gctatcgtgacgttgttatttcaagtgttt

SEQ ID NO: 262348 - DNA, 30 bp, Artificial Sequence
  Synthetic oligonucleotide
taggatggctggagctgtccgagagtgttt

SEQ ID NO: 262349 - DNA, 30 bp, Artificial Sequence
  Synthetic oligonucleotide
atccttttcaaggagaaaagcggagtgttt

SEQ ID NO: 262350 - DNA, 30 bp, Artificial Sequence
  Synthetic oligonucleotide
cattaggagtccgtgaccatagaattgttt

SEQ ID NO: 262351 - DNA, 30 bp, Artificial Sequence
  Synthetic oligonucleotide
cattccatgtgtagggattgcgacttgttt

SEQ ID NO: 262352 - DNA, 30 bp, Artificial Sequence
  Synthetic oligonucleotide
tcacagggaggtaatgtgaacgccttgttt

SEQ ID NO: 262353 - DNA, 30 bp, Artificial Sequence
  Synthetic oligonucleotide
agtcatcaaccaaagccggcctagttgttt

SEQ ID NO: 262354 - DNA, 30 bp, Artificial Sequence
  Synthetic oligonucleotide
aacgacagtggtgtgaaactcccgttgttt

SEQ ID NO: 262355 - DNA, 30 bp, Artificial Sequence
  Synthetic oligonucleotide
gcagataacgaagaaagaccataaaatttt

SEQ ID NO: 262356 - DNA, 30 bp, Artificial Sequence
  Synthetic oligonucleotide
tactatgcaacattacgagacacaaatttt

SEQ ID NO: 262357 - DNA, 30 bp, Artificial Sequence
  Synthetic oligonucleotide
acatcacagccttcgggcacaataaatttt

SEQ ID NO: 262358 - DNA, 30 bp, Artificial Sequence
  Synthetic oligonucleotide
accggagagtacatggagaagataaatttt

SEQ ID NO: 262359 - DNA, 30 bp, Artificial Sequence
  Synthetic oligonucleotide
gtctgcgaaaagcgcaggttcgaacatttt

SEQ ID NO: 262360 - DNA, 30 bp, Artificial Sequence
  Synthetic oligonucleotide
agcaatcaggcaaagcacaactgacatttt

SEQ ID NO: 262361 - DNA, 30 bp, Artificial Sequence
  Synthetic oligonucleotide
agtattcatcttactttgatcttccatttt

SEQ ID NO: 262362 - DNA, 30 bp, Artificial Sequence
  Synthetic oligonucleotide
taacacgattaacattcaggatggcatttt

SEQ ID NO: 262363 - DNA, 30 bp, Artificial Sequence
  Synthetic oligonucleotide
gaacgtttagaacacgggcggatgcatttt

SEQ ID NO: 262364 - DNA, 30 bp, Artificial Sequence
  Synthetic oligonucleotide
agctgcatggtgcacacggtttatcatttt

SEQ ID NO: 262365 - DNA, 30 bp, Artificial Sequence
  Synthetic oligonucleotide
agtagtcggtcgcgggcagctaaagatttt

SEQ ID NO: 262366 - DNA, 30 bp, Artificial Sequence
  Synthetic oligonucleotide
taatgggaaggatacggaccggcggatttt

SEQ ID NO: 262367 - DNA, 30 bp, Artificial Sequence
  Synthetic oligonucleotide
taccaaacacacccaattttagatgatttt

SEQ ID NO: 262368 - DNA, 30 bp, Artificial Sequence
  Synthetic oligonucleotide
gctaatcaaacggagtacacgcttgatttt

SEQ ID NO: 262369 - DNA, 30 bp, Artificial Sequence
  Synthetic oligonucleotide
tatggtacaccttcttgcccggactatttt

SEQ ID NO: 262370 - DNA, 30 bp, Artificial Sequence
  Synthetic oligonucleotide
cgtgacccgtcttttggtgtaagctatttt

SEQ ID NO: 262371 - DNA, 30 bp, Artificial Sequence
  Synthetic oligonucleotide
gtctgggggaatcacaagttcaggtatttt

SEQ ID NO: 262372 - DNA, 30 bp, Artificial Sequence
  Synthetic oligonucleotide
acctagtgcaggtggggtcgtacaactttt

SEQ ID NO: 262373 - DNA, 30 bp, Artificial Sequence
  Synthetic oligonucleotide
agtccagcccatgtcctgtgagacactttt

SEQ ID NO: 262374 - DNA, 30 bp, Artificial Sequence
  Synthetic oligonucleotide
aacgagattcataaagatgcgaggactttt

SEQ ID NO: 262375 - DNA, 30 bp, Artificial Sequence
  Synthetic oligonucleotide
atgtcacaagaggatcgaccgagacctttt

SEQ ID NO: 262376 - DNA, 30 bp, Artificial Sequence
  Synthetic oligonucleotide
tgagatggggagtcgaactggcgacctttt

SEQ ID NO: 262377 - DNA, 30 bp, Artificial Sequence
  Synthetic oligonucleotide
ggcgaagggactctgatacaagatcctttt

SEQ ID NO: 262378 - DNA, 30 bp, Artificial Sequence
  Synthetic oligonucleotide
agatagcgtaaatgaggtttgggagctttt

SEQ ID NO: 262379 - DNA, 30 bp, Artificial Sequence
  Synthetic oligonucleotide
ggttagcgccagactgctaatagcgctttt

SEQ ID NO: 262380 - DNA, 30 bp, Artificial Sequence
  Synthetic oligonucleotide
ttttgtccgccaggttcaactgactctttt

SEQ ID NO: 262381 - DNA, 30 bp, Artificial Sequence
  Synthetic oligonucleotide
tcatcaaagactataagacggttaagtttt

SEQ ID NO: 262382 - DNA, 30 bp, Artificial Sequence
  Synthetic oligonucleotide
ggacatcatttgtactagatgaacagtttt

SEQ ID NO: 262383 - DNA, 30 bp, Artificial Sequence
  Synthetic oligonucleotide
tcaggaaatagcggcgttattctcagtttt

SEQ ID NO: 262384 - DNA, 30 bp, Artificial Sequence
  Synthetic oligonucleotide
aggtgaagcaggatcactcggtcgagtttt

SEQ ID NO: 262385 - DNA, 30 bp, Artificial Sequence
  Synthetic oligonucleotide
caagtatggctatccttctcgaggagtttt

SEQ ID NO: 262386 - DNA, 30 bp, Artificial Sequence
  Synthetic oligonucleotide
tgagaccgtagctccatgctaaaacgtttt

SEQ ID NO: 262387 - DNA, 30 bp, Artificial Sequence
  Synthetic oligonucleotide
ggctcggctcctaagcataaatggcgtttt

SEQ ID NO: 262388 - DNA, 30 bp, Artificial Sequence
  Synthetic oligonucleotide
tcaacagttccccgtaaataattgcgtttt

SEQ ID NO: 262389 - DNA, 30 bp, Artificial Sequence
  Synthetic oligonucleotide
acataaagggaggtttagcttcgaggtttt

SEQ ID NO: 262390 - DNA, 30 bp, Artificial Sequence
  Synthetic oligonucleotide
atcagagtgtaataggtaacgcgcggtttt

SEQ ID NO: 262391 - DNA, 30 bp, Artificial Sequence
  Synthetic oligonucleotide
cacttatcgcttctcgtctaaaggggtttt

SEQ ID NO: 262392 - DNA, 30 bp, Artificial Sequence
  Synthetic oligonucleotide
cgtatatggacacgcgcatcttaatgtttt

SEQ ID NO: 262393 - DNA, 30 bp, Artificial Sequence
  Synthetic oligonucleotide
tcagtaccgtgatgggtgtcggtatgtttt

SEQ ID NO: 262394 - DNA, 30 bp, Artificial Sequence
  Synthetic oligonucleotide
agtaataataccgagatgaccgattgtttt

SEQ ID NO: 262395 - DNA, 30 bp, Artificial Sequence
  Synthetic oligonucleotide
aggtgccgctccactatagcctgcattttt

SEQ ID NO: 262396 - DNA, 30 bp, Artificial Sequence
  Synthetic oligonucleotide
tatgagtcgagtagcagaaacgagattttt

SEQ ID NO: 262397 - DNA, 30 bp, Artificial Sequence
  Synthetic oligonucleotide
gctagactgtcaaggtaaaggagccttttt

SEQ ID NO: 262398 - DNA, 30 bp, Artificial Sequence
  Synthetic oligonucleotide
tcgggtgctgccgagtgccagattcttttt

SEQ ID NO: 262399 - DNA, 30 bp, Artificial Sequence
  Synthetic oligonucleotide
cacctgaaccacgttttacgaccagttttt

SEQ ID NO: 262400 - DNA, 30 bp, Artificial Sequence
  Synthetic oligonucleotide
cgggaaaagcaatagtgaagtggagttttt

SEQ ID NO: 262401 - DNA, 30 bp, Artificial Sequence
  Synthetic oligonucleotide
ttggcgcgctgactcggtttacacgttttt

SEQ ID NO: 262402 - DNA, 30 bp, Artificial Sequence
  Synthetic oligonucleotide
gtcccgttggcgctggactagcacgttttt

SEQ ID NO: 262403 - DNA, 30 bp, Artificial Sequence
  Synthetic oligonucleotide
tcctggcagcttgctgtctggttcgttttt

SEQ ID NO: 262404 - DNA, 30 bp, Artificial Sequence
  Synthetic oligonucleotide
ctctgggccgcgcgggataggggtgttttt

SEQ ID NO: 262405 - DNA, 30 bp, Artificial Sequence
  Synthetic oligonucleotide
agacgcacgtgaacttggggcaaatttttt

SEQ ID NO: 262406 - DNA, 30 bp, Artificial Sequence
  Synthetic oligonucleotide
gtccgaatgcgaatgtactataaatttttt

SEQ ID NO: 262407 - DNA, 30 bp, Artificial Sequence
  Synthetic oligonucleotide
taggaaaggcagatcccaaaacaatttttt

SEQ ID NO: 262408 - DNA, 30 bp, Artificial Sequence
  Synthetic oligonucleotide
ccgggattaccgacaatattgctctttttt

SEQ ID NO: 262409 - DNA, 30 bp, Artificial Sequence
  Synthetic oligonucleotide
catatggcacagaattatcgtctgtttttt

SEQ ID NO: 262410 - DNA, 30 bp, Artificial Sequence
  Synthetic oligonucleotide
aatcattagacttgttgagcatgaaaaaaa

SEQ ID NO: 262411 - DNA, 30 bp, Artificial Sequence
  Synthetic oligonucleotide
gcgtggttggacccattagaaagcaaaaaa

SEQ ID NO: 262412 - DNA, 30 bp, Artificial Sequence
  Synthetic oligonucleotide
aagtaacaatcgagtgaggtcaagaaaaaa

SEQ ID NO: 262413 - DNA, 31 bp, Artificial Sequence
  Synthetic oligonucleotide
ttagtataaccacagcatataccctaaaaaa

SEQ ID NO: 262414 - DNA, 30 bp, Artificial Sequence
  Synthetic oligonucleotide
cgcggctgtatgccatagagacgacaaaaa

SEQ ID NO: 262415 - DNA, 30 bp, Artificial Sequence
  Synthetic oligonucleotide
tagagtcagctgtgtgagaagatacaaaaa

SEQ ID NO: 262416 - DNA, 30 bp, Artificial Sequence
  Synthetic oligonucleotide
gagcatggtcgcgctgcccgtaaccaaaaa

SEQ ID NO: 262417 - DNA, 30 bp, Artificial Sequence
  Synthetic oligonucleotide
ctgtagcttcggactaagggctcccaaaaa

SEQ ID NO: 262418 - DNA, 30 bp, Artificial Sequence
  Synthetic oligonucleotide
gggggtgtactgaaagcatttcgccaaaaa

SEQ ID NO: 262419 - DNA, 30 bp, Artificial Sequence
  Synthetic oligonucleotide
gtaaggaacgccctggtgggccagcaaaaa

SEQ ID NO: 262420 - DNA, 27 bp, Artificial Sequence
  Synthetic oligonucleotide
atgcgaacgcgcatctgggggcaaaaa

SEQ ID NO: 262421 - DNA, 30 bp, Artificial Sequence
  Synthetic oligonucleotide
tagttgatctaaatgaggcgtgggcaaaaa

SEQ ID NO: 262422 - DNA, 30 bp, Artificial Sequence
  Synthetic oligonucleotide
ggagaccgccgggacttagcctggcaaaaa

SEQ ID NO: 262423 - DNA, 30 bp, Artificial Sequence
  Synthetic oligonucleotide
tgggtcgtgtcaacgtatgtgaatcaaaaa

SEQ ID NO: 262424 - DNA, 30 bp, Artificial Sequence
  Synthetic oligonucleotide
tgtcaccaggcctacaaatatgatcaaaaa

SEQ ID NO: 262425 - DNA, 30 bp, Artificial Sequence
  Synthetic oligonucleotide
gcaccatagcgacccaggcccgctcaaaaa

SEQ ID NO: 262426 - DNA, 30 bp, Artificial Sequence
  Synthetic oligonucleotide
aagggcgtgaagagtatgacatgtcaaaaa

SEQ ID NO: 262427 - DNA, 30 bp, Artificial Sequence
  Synthetic oligonucleotide
tcaagaactcagatcatcaggtttcaaaaa

SEQ ID NO: 262428 - DNA, 30 bp, Artificial Sequence
  Synthetic oligonucleotide
ctatgagcggtggtacgaaattcagaaaaa

SEQ ID NO: 262429 - DNA, 30 bp, Artificial Sequence
  Synthetic oligonucleotide
taacatgaccaggatcctttgagagaaaaa

SEQ ID NO: 262430 - DNA, 30 bp, Artificial Sequence
  Synthetic oligonucleotide
agagagtccgggattagtctacgagaaaaa

SEQ ID NO: 262431 - DNA, 30 bp, Artificial Sequence
  Synthetic oligonucleotide
tagtggggccgtacgatggtcttagaaaaa

SEQ ID NO: 262432 - DNA, 30 bp, Artificial Sequence
  Synthetic oligonucleotide
tggattctggaacagtagtaggccgaaaaa

SEQ ID NO: 262433 - DNA, 30 bp, Artificial Sequence
  Synthetic oligonucleotide
ctggtcggcagtactgtacacttcgaaaaa

SEQ ID NO: 262434 - DNA, 30 bp, Artificial Sequence
  Synthetic oligonucleotide
gggtatcccagaagtttggtttcggaaaaa

SEQ ID NO: 262435 - DNA, 30 bp, Artificial Sequence
  Synthetic oligonucleotide
cacgcctgcgctggcgttagccatgaaaaa

SEQ ID NO: 262436 - DNA, 30 bp, Artificial Sequence
  Synthetic oligonucleotide
ctctatggtatcgagcgggccaaataaaaa

SEQ ID NO: 262437 - DNA, 30 bp, Artificial Sequence
  Synthetic oligonucleotide
cgttgggtaatgggcgcatcggcataaaaa

SEQ ID NO: 262438 - DNA, 29 bp, Artificial Sequence
  Synthetic oligonucleotide
gatgactgttgctgaggtaggtataaaaa

SEQ ID NO: 262439 - DNA, 30 bp, Artificial Sequence
  Synthetic oligonucleotide
gcgaactataggcgatgagagttataaaaa

SEQ ID NO: 262440 - DNA, 30 bp, Artificial Sequence
  Synthetic oligonucleotide
ggtgcaggcatatctatcaatagctaaaaa

SEQ ID NO: 262441 - DNA, 30 bp, Artificial Sequence
  Synthetic oligonucleotide
gcgggccttccagcggagtcagcgtaaaaa

SEQ ID NO: 262442 - DNA, 30 bp, Artificial Sequence
  Synthetic oligonucleotide
ataagattcgttaggacccctgggtaaaaa

SEQ ID NO: 262443 - DNA, 30 bp, Artificial Sequence
  Synthetic oligonucleotide
tacagagcgacaagagctcctgggtaaaaa

SEQ ID NO: 262444 - DNA, 30 bp, Artificial Sequence
  Synthetic oligonucleotide
aaacgcctgggtttggtaagcggttaaaaa

SEQ ID NO: 262445 - DNA, 30 bp, Artificial Sequence
  Synthetic oligonucleotide
aacatggcgcaatggttactgctttaaaaa

SEQ ID NO: 262446 - DNA, 30 bp, Artificial Sequence
  Synthetic oligonucleotide
gccctctaactaggctcggatcaaacaaaa

SEQ ID NO: 262447 - DNA, 30 bp, Artificial Sequence
  Synthetic oligonucleotide
cacgcggtcttcgtctcccgaggcacaaaa

SEQ ID NO: 262448 - DNA, 30 bp, Artificial Sequence
  Synthetic oligonucleotide
gtacaatgtacaaacgctaggatgacaaaa

SEQ ID NO: 262449 - DNA, 30 bp, Artificial Sequence
  Synthetic oligonucleotide
aagagattcaacttacacacgcatacaaaa

SEQ ID NO: 262450 - DNA, 30 bp, Artificial Sequence
  Synthetic oligonucleotide
ttaggggtcagcaagtggctatctacaaaa

SEQ ID NO: 262451 - DNA, 30 bp, Artificial Sequence
  Synthetic oligonucleotide
ggaagtcgtcctctatacaaagtaccaaaa

SEQ ID NO: 262452 - DNA, 30 bp, Artificial Sequence
  Synthetic oligonucleotide
ccaaagagttgcatgaaaactaccccaaaa

SEQ ID NO: 262453 - DNA, 30 bp, Artificial Sequence
  Synthetic oligonucleotide
atgtgcacgtgaattataatggtcccaaaa

SEQ ID NO: 262454 - DNA, 30 bp, Artificial Sequence
  Synthetic oligonucleotide
tgtaaaccgtttagcacacgtcagccaaaa

SEQ ID NO: 262455 - DNA, 30 bp, Artificial Sequence
  Synthetic oligonucleotide
taagtcacaattttattgtaagcgccaaaa

SEQ ID NO: 262456 - DNA, 30 bp, Artificial Sequence
  Synthetic oligonucleotide
atcgaatacgtctaaggaatgaatccaaaa

SEQ ID NO: 262457 - DNA, 30 bp, Artificial Sequence
  Synthetic oligonucleotide
ttgcacttagtaatctattcgggtccaaaa

SEQ ID NO: 262458 - DNA, 30 bp, Artificial Sequence
  Synthetic oligonucleotide
gagctagcgaacatgcttgtagttccaaaa

SEQ ID NO: 262459 - DNA, 30 bp, Artificial Sequence
  Synthetic oligonucleotide
aggagaattagtcggttgaggtaagcaaaa

SEQ ID NO: 262460 - DNA, 30 bp, Artificial Sequence
  Synthetic oligonucleotide
ccagccgaaagggatttctgcatagcaaaa

SEQ ID NO: 262461 - DNA, 30 bp, Artificial Sequence
  Synthetic oligonucleotide
gaggatctagaagtaactagattcgcaaaa

SEQ ID NO: 262462 - DNA, 30 bp, Artificial Sequence
  Synthetic oligonucleotide
cctactgctgacactactaagtatgcaaaa

SEQ ID NO: 262463 - DNA, 30 bp, Artificial Sequence
  Synthetic oligonucleotide
ctagtagtgatcatgctgccacttgcaaaa

SEQ ID NO: 262464 - DNA, 30 bp, Artificial Sequence
  Synthetic oligonucleotide
tcttaagttataaagatacgtatatcaaaa

SEQ ID NO: 262465 - DNA, 30 bp, Artificial Sequence
  Synthetic oligonucleotide
tcccacacaaagtgagatatcaagtcaaaa

SEQ ID NO: 262466 - DNA, 30 bp, Artificial Sequence
  Synthetic oligonucleotide
ccttttctttagaaaagacggaattcaaaa

SEQ ID NO: 262467 - DNA, 30 bp, Artificial Sequence
  Synthetic oligonucleotide
tgcgatagccggagatgccgacattcaaaa

SEQ ID NO: 262468 - DNA, 30 bp, Artificial Sequence
  Synthetic oligonucleotide
gcatcgagctagcaagggttctattcaaaa

SEQ ID NO: 262469 - DNA, 30 bp, Artificial Sequence
  Synthetic oligonucleotide
ggagggaactaggctgactgaccttcaaaa

SEQ ID NO: 262470 - DNA, 30 bp, Artificial Sequence
  Synthetic oligonucleotide
caaaagtagatagtcggtaggtcttcaaaa

SEQ ID NO: 262471 - DNA, 30 bp, Artificial Sequence
  Synthetic oligonucleotide
cttaatagggtcggtgatctgacaagaaaa

SEQ ID NO: 262472 - DNA, 30 bp, Artificial Sequence
  Synthetic oligonucleotide
aagatttacaggcttatgcgtccaagaaaa

SEQ ID NO: 262473 - DNA, 30 bp, Artificial Sequence
  Synthetic oligonucleotide
acttcgctttgtatacgtctccacagaaaa

SEQ ID NO: 262474 - DNA, 30 bp, Artificial Sequence
  Synthetic oligonucleotide
ctgcacacatacccttcgagacccagaaaa

SEQ ID NO: 262475 - DNA, 30 bp, Artificial Sequence
  Synthetic oligonucleotide
catgctgggtgctgctaccgtgccagaaaa

SEQ ID NO: 262476 - DNA, 30 bp, Artificial Sequence
  Synthetic oligonucleotide
ccggacatggtgcgcttgatagagagaaaa

SEQ ID NO: 262477 - DNA, 30 bp, Artificial Sequence
  Synthetic oligonucleotide
ctagggtggcctcccagacattagagaaaa

SEQ ID NO: 262478 - DNA, 30 bp, Artificial Sequence
  Synthetic oligonucleotide
acgccattgacatgcaccactactagaaaa

SEQ ID NO: 262479 - DNA, 30 bp, Artificial Sequence
  Synthetic oligonucleotide
actaattaagccataatgagttcacgaaaa

SEQ ID NO: 262480 - DNA, 30 bp, Artificial Sequence
  Synthetic oligonucleotide
cagtcagatgctcgtcgagctatacgaaaa

SEQ ID NO: 262481 - DNA, 30 bp, Artificial Sequence
  Synthetic oligonucleotide
acgctcaatggtatgaggtagcgccgaaaa

SEQ ID NO: 262482 - DNA, 30 bp, Artificial Sequence
  Synthetic oligonucleotide
gtatccatttgtcctggccgggagcgaaaa

SEQ ID NO: 262483 - DNA, 30 bp, Artificial Sequence
  Synthetic oligonucleotide
gaaggcgctaatcgccgattcaggcgaaaa

SEQ ID NO: 262484 - DNA, 30 bp, Artificial Sequence
  Synthetic oligonucleotide
agcgtgttatggattctactcgttcgaaaa

SEQ ID NO: 262485 - DNA, 30 bp, Artificial Sequence
  Synthetic oligonucleotide
ggaggggctgactcaagcaggtacggaaaa

SEQ ID NO: 262486 - DNA, 30 bp, Artificial Sequence
  Synthetic oligonucleotide
attgaacggccagacagggggcggggaaaa

SEQ ID NO: 262487 - DNA, 30 bp, Artificial Sequence
  Synthetic oligonucleotide
tgagagtgacgaggtccgtatcggggaaaa

SEQ ID NO: 262488 - DNA, 30 bp, Artificial Sequence
  Synthetic oligonucleotide
ccagttattggtatgtcaaggcgtggaaaa

SEQ ID NO: 262489 - DNA, 30 bp, Artificial Sequence
  Synthetic oligonucleotide
agggcgctacagatgtccatgcgtggaaaa

SEQ ID NO: 262490 - DNA, 30 bp, Artificial Sequence
  Synthetic oligonucleotide
tctcggaatcttgacggaaatggtggaaaa

SEQ ID NO: 262491 - DNA, 30 bp, Artificial Sequence
  Synthetic oligonucleotide
agtaatcatgaccgtcgtggcattggaaaa

SEQ ID NO: 262492 - DNA, 30 bp, Artificial Sequence
  Synthetic oligonucleotide
acgggtttctgactcatcatcggatgaaaa

SEQ ID NO: 262493 - DNA, 30 bp, Artificial Sequence
  Synthetic oligonucleotide
gctttccaataatacaaacgttactgaaaa

SEQ ID NO: 262494 - DNA, 30 bp, Artificial Sequence
  Synthetic oligonucleotide
gaaatactttgaggcacctatcggtgaaaa

SEQ ID NO: 262495 - DNA, 30 bp, Artificial Sequence
  Synthetic oligonucleotide
catgtaatgtcctggcgcgcctggtgaaaa

SEQ ID NO: 262496 - DNA, 30 bp, Artificial Sequence
  Synthetic oligonucleotide
attaatgtgctgcagtgaaaactgtgaaaa

SEQ ID NO: 262497 - DNA, 30 bp, Artificial Sequence
  Synthetic oligonucleotide
gttaaagctggtcctacctacacttgaaaa

SEQ ID NO: 262498 - DNA, 30 bp, Artificial Sequence
  Synthetic oligonucleotide
gaaggatgggcggaattcacaggttgaaaa

SEQ ID NO: 262499 - DNA, 30 bp, Artificial Sequence
  Synthetic oligonucleotide
gtccctaaggtgatacgaagtacaataaaa

SEQ ID NO: 262500 - DNA, 30 bp, Artificial Sequence
  Synthetic oligonucleotide
actcgtggaaaagtccataatagaataaaa

SEQ ID NO: 262501 - DNA, 30 bp, Artificial Sequence
  Synthetic oligonucleotide
gtaacaggccgcccgcctcagcagataaaa

SEQ ID NO: 262502 - DNA, 30 bp, Artificial Sequence
  Synthetic oligonucleotide
aacattaggcggcgtctatgtcttataaaa

SEQ ID NO: 262503 - DNA, 30 bp, Artificial Sequence
  Synthetic oligonucleotide
ttagaacattagcaactaaatgttataaaa

SEQ ID NO: 262504 - DNA, 30 bp, Artificial Sequence
  Synthetic oligonucleotide
taatcgagtagtacaccgcgacgactaaaa

SEQ ID NO: 262505 - DNA, 30 bp, Artificial Sequence
  Synthetic oligonucleotide
acgagggctagatttaatcagttactaaaa

SEQ ID NO: 262506 - DNA, 30 bp, Artificial Sequence
  Synthetic oligonucleotide
acgacccggtatcttggacaacccctaaaa

SEQ ID NO: 262507 - DNA, 30 bp, Artificial Sequence
  Synthetic oligonucleotide
tagtcgtagttcgattttcgtacgctaaaa

SEQ ID NO: 262508 - DNA, 30 bp, Artificial Sequence
  Synthetic oligonucleotide
cagcgttcacaggacttaacagcgctaaaa

SEQ ID NO: 262509 - DNA, 30 bp, Artificial Sequence
  Synthetic oligonucleotide
actgttacaaatacgtatgtaaggctaaaa

SEQ ID NO: 262510 - DNA, 30 bp, Artificial Sequence
  Synthetic oligonucleotide
ttctcattcccaccttggaaattgctaaaa

SEQ ID NO: 262511 - DNA, 30 bp, Artificial Sequence
  Synthetic oligonucleotide
cactatttatatggaggtctataagtaaaa

SEQ ID NO: 262512 - DNA, 30 bp, Artificial Sequence
  Synthetic oligonucleotide
cattcgactcatggcatggcaacagtaaaa

SEQ ID NO: 262513 - DNA, 30 bp, Artificial Sequence
  Synthetic oligonucleotide
gggggtaccctctgtgaatgagcagtaaaa

SEQ ID NO: 262514 - DNA, 30 bp, Artificial Sequence
  Synthetic oligonucleotide
cactaaagaaacaagtagcaattagtaaaa

SEQ ID NO: 262515 - DNA, 30 bp, Artificial Sequence
  Synthetic oligonucleotide
accttggggcgtgaatagttgaccgtaaaa

SEQ ID NO: 262516 - DNA, 30 bp, Artificial Sequence
  Synthetic oligonucleotide
gaaagtatgccagtaatctaatccgtaaaa

SEQ ID NO: 262517 - DNA, 30 bp, Artificial Sequence
  Synthetic oligonucleotide
gaaagtccgagcaattgggggattgtaaaa

SEQ ID NO: 262518 - DNA, 30 bp, Artificial Sequence
  Synthetic oligonucleotide
aaaaaaaggtcggcccgtttcgaattaaaa

SEQ ID NO: 262519 - DNA, 30 bp, Artificial Sequence
  Synthetic oligonucleotide
agagggcataaacttaggaattaattaaaa

SEQ ID NO: 262520 - DNA, 30 bp, Artificial Sequence
  Synthetic oligonucleotide
acatcaaaacttccgtggcgatgcttaaaa

SEQ ID NO: 262521 - DNA, 30 bp, Artificial Sequence
  Synthetic oligonucleotide
cgtgtatgggatgtgccatatctcttaaaa

SEQ ID NO: 262522 - DNA, 30 bp, Artificial Sequence
  Synthetic oligonucleotide
gtggatgcgtaaggcgcgtgccggttaaaa

SEQ ID NO: 262523 - DNA, 30 bp, Artificial Sequence
  Synthetic oligonucleotide
aaagtgacatggttctgaacgtatttaaaa

SEQ ID NO: 262524 - DNA, 30 bp, Artificial Sequence
  Synthetic oligonucleotide
acctcagctgaagcgtagaggtatttaaaa

SEQ ID NO: 262525 - DNA, 30 bp, Artificial Sequence
  Synthetic oligonucleotide
aagcggattctttccgtggtatgtttaaaa

SEQ ID NO: 262526 - DNA, 30 bp, Artificial Sequence
  Synthetic oligonucleotide
aaaaggctgagcgtcaaactagttttaaaa

SEQ ID NO: 262527 - DNA, 30 bp, Artificial Sequence
  Synthetic oligonucleotide
gagtgggggattagaggagaaggaaacaaa

SEQ ID NO: 262528 - DNA, 30 bp, Artificial Sequence
  Synthetic oligonucleotide
ttgtaaggacacatttatgcagtaaacaaa

SEQ ID NO: 262529 - DNA, 30 bp, Artificial Sequence
  Synthetic oligonucleotide
cccacgtacttgggcaagtgatgcaacaaa

SEQ ID NO: 262530 - DNA, 30 bp, Artificial Sequence
  Synthetic oligonucleotide
gcatagcaagcgatacgggcgcagaacaaa

SEQ ID NO: 262531 - DNA, 30 bp, Artificial Sequence
  Synthetic oligonucleotide
ttacatctagagcaacgtgctcagaacaaa

SEQ ID NO: 262532 - DNA, 30 bp, Artificial Sequence
  Synthetic oligonucleotide
tgtataagcatcataacgtgggagaacaaa

SEQ ID NO: 262533 - DNA, 30 bp, Artificial Sequence
  Synthetic oligonucleotide
ttttgacaagagtcaaggctccctaacaaa

SEQ ID NO: 262534 - DNA, 30 bp, Artificial Sequence
  Synthetic oligonucleotide
tcatgcgtggttgatcttgacattaacaaa

SEQ ID NO: 262535 - DNA, 30 bp, Artificial Sequence
  Synthetic oligonucleotide
ccgctaataatctacaaccagcaccacaaa

SEQ ID NO: 262536 - DNA, 30 bp, Artificial Sequence
  Synthetic oligonucleotide
ggggcattgtctggagaaccgtaccacaaa

SEQ ID NO: 262537 - DNA, 30 bp, Artificial Sequence
  Synthetic oligonucleotide
tgactactgtgttccctgcacgtccacaaa

SEQ ID NO: 262538 - DNA, 30 bp, Artificial Sequence
  Synthetic oligonucleotide
cgctgacttgaaacggtcacccatcacaaa

SEQ ID NO: 262539 - DNA, 30 bp, Artificial Sequence
  Synthetic oligonucleotide
aacgataaaactatgtcagcccctcacaaa

SEQ ID NO: 262540 - DNA, 30 bp, Artificial Sequence
  Synthetic oligonucleotide
gatgacggttgccctctacgctttcacaaa

SEQ ID NO: 262541 - DNA, 30 bp, Artificial Sequence
  Synthetic oligonucleotide
agatgaacgctatttatcggcttagacaaa

SEQ ID NO: 262542 - DNA, 30 bp, Artificial Sequence
  Synthetic oligonucleotide
ccacatcttgtaccggtaataaccgacaaa

SEQ ID NO: 262543 - DNA, 30 bp, Artificial Sequence
  Synthetic oligonucleotide
ggagattgggctagttgggttacggacaaa

SEQ ID NO: 262544 - DNA, 30 bp, Artificial Sequence
  Synthetic oligonucleotide
atgaaccaaaggttgaaaagttttgacaaa

SEQ ID NO: 262545 - DNA, 30 bp, Artificial Sequence
  Synthetic oligonucleotide
atccgttcgcgaataaaggcaagatacaaa

SEQ ID NO: 262546 - DNA, 30 bp, Artificial Sequence
  Synthetic oligonucleotide
gcagaaagaaacactagccatatatacaaa

SEQ ID NO: 262547 - DNA, 30 bp, Artificial Sequence
  Synthetic oligonucleotide
cacccggcaattcttaaccactcctacaaa

SEQ ID NO: 262548 - DNA, 30 bp, Artificial Sequence
  Synthetic oligonucleotide
cagattgcccggcgttctgccagttacaaa

SEQ ID NO: 262549 - DNA, 30 bp, Artificial Sequence
  Synthetic oligonucleotide
aattccggccgcatggaaaggctttacaaa

SEQ ID NO: 262550 - DNA, 30 bp, Artificial Sequence
  Synthetic oligonucleotide
gcaatgctgggcaccgacgtctcaaccaaa

SEQ ID NO: 262551 - DNA, 30 bp, Artificial Sequence
  Synthetic oligonucleotide
ttggggcgagatgcaggcgagcgaaccaaa

SEQ ID NO: 262552 - DNA, 30 bp, Artificial Sequence
  Synthetic oligonucleotide
gtacattggtagtcggtaaagttgaccaaa

SEQ ID NO: 262553 - DNA, 30 bp, Artificial Sequence
  Synthetic oligonucleotide
cagtaaagttcagagagagactataccaaa

SEQ ID NO: 262554 - DNA, 30 bp, Artificial Sequence
  Synthetic oligonucleotide
aagtgtaaagacacatagatgtataccaaa

SEQ ID NO: 262555 - DNA, 30 bp, Artificial Sequence
  Synthetic oligonucleotide
gggcctcaggccgttctcggataccccaaa

SEQ ID NO: 262556 - DNA, 30 bp, Artificial Sequence
  Synthetic oligonucleotide
ggccgtatacaatcggaaaaagagcccaaa

SEQ ID NO: 262557 - DNA, 30 bp, Artificial Sequence
  Synthetic oligonucleotide
tcagatcatctagtgtaggaaccgcccaaa

SEQ ID NO: 262558 - DNA, 30 bp, Artificial Sequence
  Synthetic oligonucleotide
accgaagcaagctaatccagtttgcccaaa

SEQ ID NO: 262559 - DNA, 30 bp, Artificial Sequence
  Synthetic oligonucleotide
gctgaccatctgtggcggcatgatcccaaa

SEQ ID NO: 262560 - DNA, 30 bp, Artificial Sequence
  Synthetic oligonucleotide
gaggagtggggcgaagcagttggtcccaaa

SEQ ID NO: 262561 - DNA, 30 bp, Artificial Sequence
  Synthetic oligonucleotide
tacatcgggaacccgcccaatgttcccaaa

SEQ ID NO: 262562 - DNA, 30 bp, Artificial Sequence
  Synthetic oligonucleotide
agaaaaacggtcaatcgggtcgaagccaaa

SEQ ID NO: 262563 - DNA, 30 bp, Artificial Sequence
  Synthetic oligonucleotide
ctagtcaaccaaaaagttaggctagccaaa

SEQ ID NO: 262564 - DNA, 30 bp, Artificial Sequence
  Synthetic oligonucleotide
tgccaatgccacaacgtcacccctgccaaa

SEQ ID NO: 262565 - DNA, 30 bp, Artificial Sequence
  Synthetic oligonucleotide
gaaccccctggactcaagagaccatccaaa

SEQ ID NO: 262566 - DNA, 30 bp, Artificial Sequence
  Synthetic oligonucleotide
gagtggacctaataaagggctggatccaaa

SEQ ID NO: 262567 - DNA, 30 bp, Artificial Sequence
  Synthetic oligonucleotide
agaggcaccagatccgggtaatagtccaaa

SEQ ID NO: 262568 - DNA, 30 bp, Artificial Sequence
  Synthetic oligonucleotide
cgggattactaatcccattaggtgtccaaa

SEQ ID NO: 262569 - DNA, 30 bp, Artificial Sequence
  Synthetic oligonucleotide
gggttggtggaatttaaaatgaattccaaa

SEQ ID NO: 262570 - DNA, 30 bp, Artificial Sequence
  Synthetic oligonucleotide
ggggacagttaatgtcggtgatgttccaaa

SEQ ID NO: 262571 - DNA, 30 bp, Artificial Sequence
  Synthetic oligonucleotide
ggttattaatttgtcgaccgaccaagcaaa

SEQ ID NO: 262572 - DNA, 30 bp, Artificial Sequence
  Synthetic oligonucleotide
cgaaacgccttctttgcactctcaagcaaa

SEQ ID NO: 262573 - DNA, 30 bp, Artificial Sequence
  Synthetic oligonucleotide
aaaaacgcagggaagtaccttcccagcaaa

SEQ ID NO: 262574 - DNA, 30 bp, Artificial Sequence
  Synthetic oligonucleotide
tcgccgtagtcaaacgtttatgcgagcaaa

SEQ ID NO: 262575 - DNA, 30 bp, Artificial Sequence
  Synthetic oligonucleotide
gcataatcgcagaagggcttaaggagcaaa

SEQ ID NO: 262576 - DNA, 30 bp, Artificial Sequence
  Synthetic oligonucleotide
ggtccagtcttgaggatgggcaggagcaaa

SEQ ID NO: 262577 - DNA, 30 bp, Artificial Sequence
  Synthetic oligonucleotide
tcctgcggcaaagatgaagtctatagcaaa

SEQ ID NO: 262578 - DNA, 30 bp, Artificial Sequence
  Synthetic oligonucleotide
tattgtacaataagctacaagtcccgcaaa

SEQ ID NO: 262579 - DNA, 30 bp, Artificial Sequence
  Synthetic oligonucleotide
caaattagaggacgccttgccaagcgcaaa

SEQ ID NO: 262580 - DNA, 30 bp, Artificial Sequence
  Synthetic oligonucleotide
ggtgaatcaggactaccggacgagcgcaaa

SEQ ID NO: 262581 - DNA, 30 bp, Artificial Sequence
  Synthetic oligonucleotide
gttacgcgactacatttacgtgagcgcaaa

SEQ ID NO: 262582 - DNA, 30 bp, Artificial Sequence
  Synthetic oligonucleotide
ccacacttctacttcacaggggcgcgcaaa

SEQ ID NO: 262583 - DNA, 30 bp, Artificial Sequence
  Synthetic oligonucleotide
gtgaaagggtgcacttcagttgatcgcaaa

SEQ ID NO: 262584 - DNA, 30 bp, Artificial Sequence
  Synthetic oligonucleotide
gattcacgtgaaagtgtgtcaataggcaaa

SEQ ID NO: 262585 - DNA, 30 bp, Artificial Sequence
  Synthetic oligonucleotide
tagagcccctcacgatgttgcaacggcaaa

SEQ ID NO: 262586 - DNA, 30 bp, Artificial Sequence
  Synthetic oligonucleotide
gtatactcttaaaggaatgggcacggcaaa

SEQ ID NO: 262587 - DNA, 30 bp, Artificial Sequence
  Synthetic oligonucleotide
cggtttcaacagaatgtttatatcggcaaa

SEQ ID NO: 262588 - DNA, 30 bp, Artificial Sequence
  Synthetic oligonucleotide
cgctaatataatctcagattagggggcaaa

SEQ ID NO: 262589 - DNA, 30 bp, Artificial Sequence
  Synthetic oligonucleotide
cggaatcgcagtgtggtgcagtggggcaaa

SEQ ID NO: 262590 - DNA, 30 bp, Artificial Sequence
  Synthetic oligonucleotide
gcgccccctagattaaaaatgcatggcaaa

SEQ ID NO: 262591 - DNA, 30 bp, Artificial Sequence
  Synthetic oligonucleotide
gctaaaaatgggttccgagttactggcaaa

SEQ ID NO: 262592 - DNA, 30 bp, Artificial Sequence
  Synthetic oligonucleotide
cagtgttacacctagattataggtggcaaa

SEQ ID NO: 262593 - DNA, 30 bp, Artificial Sequence
  Synthetic oligonucleotide
ctacgggcgggaccattcgcaccatgcaaa

SEQ ID NO: 262594 - DNA, 30 bp, Artificial Sequence
  Synthetic oligonucleotide
gttcatccacataacgctagttgatgcaaa

SEQ ID NO: 262595 - DNA, 30 bp, Artificial Sequence
  Synthetic oligonucleotide
ccaacgtctgttatattaagagactgcaaa

SEQ ID NO: 262596 - DNA, 30 bp, Artificial Sequence
  Synthetic oligonucleotide
agatttcatcttaacgctatggactgcaaa

SEQ ID NO: 262597 - DNA, 30 bp, Artificial Sequence
  Synthetic oligonucleotide
aaggatcggtccttgttttttgtttgcaaa

SEQ ID NO: 262598 - DNA, 30 bp, Artificial Sequence
  Synthetic oligonucleotide
caccagtaatcctgtggtgccttttgcaaa

SEQ ID NO: 262599 - DNA, 30 bp, Artificial Sequence
  Synthetic oligonucleotide
tgtgacgtcggcaaggggcgaccaatcaaa

SEQ ID NO: 262600 - DNA, 30 bp, Artificial Sequence
  Synthetic oligonucleotide
gggccgttatctgagtgctctagaatcaaa

SEQ ID NO: 262601 - DNA, 30 bp, Artificial Sequence
  Synthetic oligonucleotide
tcgatcttttggttaaacgaatgaatcaaa

SEQ ID NO: 262602 - DNA, 30 bp, Artificial Sequence
  Synthetic oligonucleotide
gtatagtcttacacggggcgaataatcaaa

SEQ ID NO: 262603 - DNA, 30 bp, Artificial Sequence
  Synthetic oligonucleotide
tgaggtattacagacgaactaataatcaaa

SEQ ID NO: 262604 - DNA, 30 bp, Artificial Sequence
  Synthetic oligonucleotide
atgcacaaccgttattatgcgtacatcaaa

SEQ ID NO: 262605 - DNA, 30 bp, Artificial Sequence
  Synthetic oligonucleotide
agagctgcattaatccgcatacaactcaaa

SEQ ID NO: 262606 - DNA, 30 bp, Artificial Sequence
  Synthetic oligonucleotide
gtcctgctaacagcatatctcgaactcaaa

SEQ ID NO: 262607 - DNA, 30 bp, Artificial Sequence
  Synthetic oligonucleotide
cgcaaaaagcgattcccagtggcactcaaa

SEQ ID NO: 262608 - DNA, 30 bp, Artificial Sequence
  Synthetic oligonucleotide
aataacgtttaggacgagaaaaggctcaaa

SEQ ID NO: 262609 - DNA, 30 bp, Artificial Sequence
  Synthetic oligonucleotide
gctatgaaccgtatcgaatctgggctcaaa

SEQ ID NO: 262610 - DNA, 30 bp, Artificial Sequence
  Synthetic oligonucleotide
acctatgccccctccactacttggctcaaa

SEQ ID NO: 262611 - DNA, 30 bp, Artificial Sequence
  Synthetic oligonucleotide
gtacagagcgcatacataaattctctcaaa

SEQ ID NO: 262612 - DNA, 28 bp, Artificial Sequence
  Synthetic oligonucleotide
gaagtgaattttgaaatgaggagtcaaa

SEQ ID NO: 262613 - DNA, 30 bp, Artificial Sequence
  Synthetic oligonucleotide
aatgcaattttacaaacatacggagtcaaa

SEQ ID NO: 262614 - DNA, 30 bp, Artificial Sequence
  Synthetic oligonucleotide
aacttgacattaggaagctatgacgtcaaa

SEQ ID NO: 262615 - DNA, 30 bp, Artificial Sequence
  Synthetic oligonucleotide
catgccctgggaaaatatatgcgcgtcaaa

SEQ ID NO: 262616 - DNA, 30 bp, Artificial Sequence
  Synthetic oligonucleotide
gttggagcactcgaccaacgaggcgtcaaa

SEQ ID NO: 262617 - DNA, 30 bp, Artificial Sequence
  Synthetic oligonucleotide
ctgaacagggttgcttactgaccggtcaaa

SEQ ID NO: 262618 - DNA, 30 bp, Artificial Sequence
  Synthetic oligonucleotide
tctgaaggaagatatggctacaaattcaaa

SEQ ID NO: 262619 - DNA, 30 bp, Artificial Sequence
  Synthetic oligonucleotide
tccggcgttcgaaggctacaacaattcaaa

SEQ ID NO: 262620 - DNA, 30 bp, Artificial Sequence
  Synthetic oligonucleotide
gcgtgggttaaggggattcaatgattcaaa

SEQ ID NO: 262621 - DNA, 30 bp, Artificial Sequence
  Synthetic oligonucleotide
tccacgcagaactactgatggtccttcaaa

SEQ ID NO: 262622 - DNA, 30 bp, Artificial Sequence
  Synthetic oligonucleotide
aggtcccagtgggaaccccaggtcttcaaa

SEQ ID NO: 262623 - DNA, 30 bp, Artificial Sequence
  Synthetic oligonucleotide
catggaaggaaaataaccggtaagttcaaa

SEQ ID NO: 262624 - DNA, 30 bp, Artificial Sequence
  Synthetic oligonucleotide
aaggtgagacatacccgttctgagttcaaa

SEQ ID NO: 262625 - DNA, 30 bp, Artificial Sequence
  Synthetic oligonucleotide
cccgaggcattgtactacggagatttcaaa

SEQ ID NO: 262626 - DNA, 30 bp, Artificial Sequence
  Synthetic oligonucleotide
taacgggattagcgagaggcatatttcaaa

SEQ ID NO: 262627 - DNA, 30 bp, Artificial Sequence
  Synthetic oligonucleotide
ccagcaacccgatttacgctcgaaaagaaa

SEQ ID NO: 262628 - DNA, 30 bp, Artificial Sequence
  Synthetic oligonucleotide
ctgaaaaactttggcggctaccgaaagaaa

SEQ ID NO: 262629 - DNA, 30 bp, Artificial Sequence
  Synthetic oligonucleotide
gggtagcgcggtaagccgcaggtaaagaaa

SEQ ID NO: 262630 - DNA, 30 bp, Artificial Sequence
  Synthetic oligonucleotide
agaatataagaatcagttagagagaagaaa

SEQ ID NO: 262631 - DNA, 30 bp, Artificial Sequence
  Synthetic oligonucleotide
ggcaatacgatgatgcgcgtatcgaagaaa

SEQ ID NO: 262632 - DNA, 30 bp, Artificial Sequence
  Synthetic oligonucleotide
taaaggacagatgtgcagggacataagaaa

SEQ ID NO: 262633 - DNA, 30 bp, Artificial Sequence
  Synthetic oligonucleotide
tgaatccgacctcattgataccgtaagaaa

SEQ ID NO: 262634 - DNA, 30 bp, Artificial Sequence
  Synthetic oligonucleotide
gaaagcctggtaaaaccaaatgttaagaaa

SEQ ID NO: 262635 - DNA, 30 bp, Artificial Sequence
  Synthetic oligonucleotide
cattcgtcctagctgtggcgacaacagaaa

SEQ ID NO: 262636 - DNA, 30 bp, Artificial Sequence
  Synthetic oligonucleotide
tgtggatagaaagaacggctaacacagaaa

SEQ ID NO: 262637 - DNA, 30 bp, Artificial Sequence
  Synthetic oligonucleotide
gatgcgagggattacatacctcatcagaaa

SEQ ID NO: 262638 - DNA, 30 bp, Artificial Sequence
  Synthetic oligonucleotide
atggctcaagagctccctccggatcagaaa

SEQ ID NO: 262639 - DNA, 29 bp, Artificial Sequence
  Synthetic oligonucleotide
accagggaattacaaggacagttcagaaa

SEQ ID NO: 262640 - DNA, 30 bp, Artificial Sequence
  Synthetic oligonucleotide
cgaccgatggtcgctcatagaccagagaaa

SEQ ID NO: 262641 - DNA, 30 bp, Artificial Sequence
  Synthetic oligonucleotide
tggttcagcctcgatgaatttatagagaaa

SEQ ID NO: 262642 - DNA, 31 bp, Artificial Sequence
  Synthetic oligonucleotide
tggcccacggcaagccgaggtgcatgagaaa

SEQ ID NO: 262643 - DNA, 30 bp, Artificial Sequence
  Synthetic oligonucleotide
acgatattgtgtgactacgtagctgagaaa

SEQ ID NO: 262644 - DNA, 30 bp, Artificial Sequence
  Synthetic oligonucleotide
cttctagtcaaatagtatctttgtgagaaa

SEQ ID NO: 262645 - DNA, 30 bp, Artificial Sequence
  Synthetic oligonucleotide
cgtatattgggcagatagggtacatagaaa

SEQ ID NO: 262646 - DNA, 30 bp, Artificial Sequence
  Synthetic oligonucleotide
aacccaatcaccaacagcgtgtcatagaaa

SEQ ID NO: 262647 - DNA, 30 bp, Artificial Sequence
  Synthetic oligonucleotide
ttcgcgacaagtgtcctcaacagctagaaa

SEQ ID NO: 262648 - DNA, 30 bp, Artificial Sequence
  Synthetic oligonucleotide
gcacgttgggaacatctacgacgctagaaa

SEQ ID NO: 262649 - DNA, 30 bp, Artificial Sequence
  Synthetic oligonucleotide
cattagtgtacatctacgacaggctagaaa

SEQ ID NO: 262650 - DNA, 30 bp, Artificial Sequence
  Synthetic oligonucleotide
gcaagttctcccacacgaaatgtctagaaa

SEQ ID NO: 262651 - DNA, 30 bp, Artificial Sequence
  Synthetic oligonucleotide
agttccagtttcgaactattgttctagaaa

SEQ ID NO: 262652 - DNA, 30 bp, Artificial Sequence
  Synthetic oligonucleotide
ggtacgagatgaggtcctcggacgtagaaa

SEQ ID NO: 262653 - DNA, 30 bp, Artificial Sequence
  Synthetic oligonucleotide
gcgtttaaacaccataccctgtggtagaaa

SEQ ID NO: 262654 - DNA, 30 bp, Artificial Sequence
  Synthetic oligonucleotide
acttgggtcttcagaaacgccaccacgaaa

SEQ ID NO: 262655 - DNA, 30 bp, Artificial Sequence
  Synthetic oligonucleotide
ggcaggctgcataaagggccctagacgaaa

SEQ ID NO: 262656 - DNA, 30 bp, Artificial Sequence
  Synthetic oligonucleotide
catctacagtgtcccatctccgcgacgaaa

SEQ ID NO: 262657 - DNA, 30 bp, Artificial Sequence
  Synthetic oligonucleotide
gcatcggcatcaccgttcacggggacgaaa

SEQ ID NO: 262658 - DNA, 30 bp, Artificial Sequence
  Synthetic oligonucleotide
aacagcttaaggttaaagcgcagtacgaaa

SEQ ID NO: 262659 - DNA, 30 bp, Artificial Sequence
  Synthetic oligonucleotide
ggttacgccccggcctcctctgacccgaaa

SEQ ID NO: 262660 - DNA, 30 bp, Artificial Sequence
  Synthetic oligonucleotide
aagatatattaggtacacacgaatccgaaa

SEQ ID NO: 262661 - DNA, 30 bp, Artificial Sequence
  Synthetic oligonucleotide
ttagcattgagcaattgtatgagagcgaaa

SEQ ID NO: 262662 - DNA, 30 bp, Artificial Sequence
  Synthetic oligonucleotide
gcgtacccgtagcaatacaaactagcgaaa

SEQ ID NO: 262663 - DNA, 30 bp, Artificial Sequence
  Synthetic oligonucleotide
tgcaccatctgtcggtctacgatcgcgaaa

SEQ ID NO: 262664 - DNA, 30 bp, Artificial Sequence
  Synthetic oligonucleotide
tagttagtgttgtaactaccagtcgcgaaa

SEQ ID NO: 262665 - DNA, 30 bp, Artificial Sequence
  Synthetic oligonucleotide
ggaggctggcgaccgccggaagcggcgaaa

SEQ ID NO: 262666 - DNA, 30 bp, Artificial Sequence
  Synthetic oligonucleotide
caatgtaaggccgaggatttcgtggcgaaa

SEQ ID NO: 262667 - DNA, 30 bp, Artificial Sequence
  Synthetic oligonucleotide
cttaatgttcacctactctgtgcctcgaaa

SEQ ID NO: 262668 - DNA, 30 bp, Artificial Sequence
  Synthetic oligonucleotide
taaacggagatgtaggcgtcttcctcgaaa

SEQ ID NO: 262669 - DNA, 30 bp, Artificial Sequence
  Synthetic oligonucleotide
ctgagctagacctttcggtgcgggtcgaaa

SEQ ID NO: 262670 - DNA, 30 bp, Artificial Sequence
  Synthetic oligonucleotide
actggtagtcttgttgtctggatgtcgaaa

SEQ ID NO: 262671 - DNA, 30 bp, Artificial Sequence
  Synthetic oligonucleotide
ataattgactttaccgggttagattcgaaa

SEQ ID NO: 262672 - DNA, 30 bp, Artificial Sequence
  Synthetic oligonucleotide
gatgcactaagtcggtgttgggattcgaaa

SEQ ID NO: 262673 - DNA, 30 bp, Artificial Sequence
  Synthetic oligonucleotide
catgcgtatttgcgatctctgtcttcgaaa

SEQ ID NO: 262674 - DNA, 30 bp, Artificial Sequence
  Synthetic oligonucleotide
gtttgaagcgttatcagctcgagttcgaaa

SEQ ID NO: 262675 - DNA, 30 bp, Artificial Sequence
  Synthetic oligonucleotide
gtttccatgggaaccaagaaaggttcgaaa

SEQ ID NO: 262676 - DNA, 30 bp, Artificial Sequence
  Synthetic oligonucleotide
tgtaagggaactggcagcggagaaaggaaa

SEQ ID NO: 262677 - DNA, 30 bp, Artificial Sequence
  Synthetic oligonucleotide
attttcggcagggatgccatcataaggaaa

SEQ ID NO: 262678 - DNA, 30 bp, Artificial Sequence
  Synthetic oligonucleotide
acgctaatgttagcgttacacaacaggaaa

SEQ ID NO: 262679 - DNA, 30 bp, Artificial Sequence
  Synthetic oligonucleotide
gaagagtatgcattcgttagtagcaggaaa

SEQ ID NO: 262680 - DNA, 30 bp, Artificial Sequence
  Synthetic oligonucleotide
tgtgattggcagcaaaggcattagaggaaa

SEQ ID NO: 262681 - DNA, 30 bp, Artificial Sequence
  Synthetic oligonucleotide
agtggggttaaccacatggcacataggaaa

SEQ ID NO: 262682 - DNA, 30 bp, Artificial Sequence
  Synthetic oligonucleotide
gggagactacgcttgatgtgtaaacggaaa

SEQ ID NO: 262683 - DNA, 30 bp, Artificial Sequence
  Synthetic oligonucleotide
tccgtgaaaatattcccgtgagcacggaaa

SEQ ID NO: 262684 - DNA, 30 bp, Artificial Sequence
  Synthetic oligonucleotide
cagagctcactcagaggcacagtacggaaa

SEQ ID NO: 262685 - DNA, 30 bp, Artificial Sequence
  Synthetic oligonucleotide
gatcgagtgtactgggggcggcaccggaaa

SEQ ID NO: 262686 - DNA, 30 bp, Artificial Sequence
  Synthetic oligonucleotide
gtatgataagtgtgtttgcactcccggaaa

SEQ ID NO: 262687 - DNA, 30 bp, Artificial Sequence
  Synthetic oligonucleotide
aacatggagtgatgacagcaaatgcggaaa

SEQ ID NO: 262688 - DNA, 30 bp, Artificial Sequence
  Synthetic oligonucleotide
taacatacggctactatcaatagtcggaaa

SEQ ID NO: 262689 - DNA, 30 bp, Artificial Sequence
  Synthetic oligonucleotide
taatgattaggaaggatagggggtcggaaa

SEQ ID NO: 262690 - DNA, 30 bp, Artificial Sequence
  Synthetic oligonucleotide
ggacgagttctcagagagcccgaagggaaa

SEQ ID NO: 262691 - DNA, 30 bp, Artificial Sequence
  Synthetic oligonucleotide
gttgagcgctatgtcgcatcaagagggaaa

SEQ ID NO: 262692 - DNA, 30 bp, Artificial Sequence
  Synthetic oligonucleotide
atagatgttcagtgggccacaatagggaaa

SEQ ID NO: 262693 - DNA, 30 bp, Artificial Sequence
  Synthetic oligonucleotide
ggatttgcacacttacagctagtagggaaa

SEQ ID NO: 262694 - DNA, 30 bp, Artificial Sequence
  Synthetic oligonucleotide
gacactcagttgaatatgtgggtagggaaa

SEQ ID NO: 262695 - DNA, 30 bp, Artificial Sequence
  Synthetic oligonucleotide
gaataccgagccccgactacctgcgggaaa

SEQ ID NO: 262696 - DNA, 30 bp, Artificial Sequence
  Synthetic oligonucleotide
gtttcggggtcttcttgtcctggggggaaa

SEQ ID NO: 262697 - DNA, 30 bp, Artificial Sequence
  Synthetic oligonucleotide
tttacgagtgttaatatacgtatggggaaa

SEQ ID NO: 262698 - DNA, 30 bp, Artificial Sequence
  Synthetic oligonucleotide
ttcctttgctcacgattttaggatgggaaa

SEQ ID NO: 262699 - DNA, 30 bp, Artificial Sequence
  Synthetic oligonucleotide
caacctatcgtcggaatgggtcaatggaaa

SEQ ID NO: 262700 - DNA, 30 bp, Artificial Sequence
  Synthetic oligonucleotide
agctagtctttaaacagttcagcatggaaa

SEQ ID NO: 262701 - DNA, 30 bp, Artificial Sequence
  Synthetic oligonucleotide
accaacggtgcaaggacgcatagatggaaa

SEQ ID NO: 262702 - DNA, 30 bp, Artificial Sequence
  Synthetic oligonucleotide
ttttgactacaaggtggtcatggatggaaa

SEQ ID NO: 262703 - DNA, 30 bp, Artificial Sequence
  Synthetic oligonucleotide
tctccttggcatgaaacaatatcctggaaa

SEQ ID NO: 262704 - DNA, 30 bp, Artificial Sequence
  Synthetic oligonucleotide
ggatataatgggaggttgttgtcctggaaa

SEQ ID NO: 262705 - DNA, 30 bp, Artificial Sequence
  Synthetic oligonucleotide
aaggaggaagatctactgctttcctggaaa

SEQ ID NO: 262706 - DNA, 30 bp, Artificial Sequence
  Synthetic oligonucleotide
atagcctggcataaagacatttgctggaaa

SEQ ID NO: 262707 - DNA, 30 bp, Artificial Sequence
  Synthetic oligonucleotide
tctgaagactgtattcatggggtctggaaa

SEQ ID NO: 262708 - DNA, 30 bp, Artificial Sequence
  Synthetic oligonucleotide
gccatttcactatactccaaggcgtggaaa

SEQ ID NO: 262709 - DNA, 30 bp, Artificial Sequence
  Synthetic oligonucleotide
atatagccttaattagcagctctgtggaaa

SEQ ID NO: 262710 - DNA, 30 bp, Artificial Sequence
  Synthetic oligonucleotide
atatcccatcgaaaccatgccacttggaaa

SEQ ID NO: 262711 - DNA, 30 bp, Artificial Sequence
  Synthetic oligonucleotide
gaacggttccgcagactagtagaaatgaaa

SEQ ID NO: 262712 - DNA, 30 bp, Artificial Sequence
  Synthetic oligonucleotide
gcacaccacccttcactcactcgaatgaaa

SEQ ID NO: 262713 - DNA, 30 bp, Artificial Sequence
  Synthetic oligonucleotide
ggttacgcattgccatagcccaacatgaaa

SEQ ID NO: 262714 - DNA, 30 bp, Artificial Sequence
  Synthetic oligonucleotide
acggtatgtacatatttccgagacatgaaa

SEQ ID NO: 262715 - DNA, 30 bp, Artificial Sequence
  Synthetic oligonucleotide
gggctcttggcttccggctcgccgatgaaa

SEQ ID NO: 262716 - DNA, 30 bp, Artificial Sequence
  Synthetic oligonucleotide
atggttagacgtacgttaaatccgatgaaa

SEQ ID NO: 262717 - DNA, 30 bp, Artificial Sequence
  Synthetic oligonucleotide
ccacaggaaacctttgatcgttcgatgaaa

SEQ ID NO: 262718 - DNA, 30 bp, Artificial Sequence
  Synthetic oligonucleotide
gtcatgattttagattcaataaatatgaaa

SEQ ID NO: 262719 - DNA, 30 bp, Artificial Sequence
  Synthetic oligonucleotide
gcaatgttagccggaattgtaggactgaaa

SEQ ID NO: 262720 - DNA, 30 bp, Artificial Sequence
  Synthetic oligonucleotide
atgttaggtaattggtctggccctctgaaa

SEQ ID NO: 262721 - DNA, 30 bp, Artificial Sequence
  Synthetic oligonucleotide
caagtgattgtggtgctaacccaagtgaaa

SEQ ID NO: 262722 - DNA, 30 bp, Artificial Sequence
  Synthetic oligonucleotide
tacgttttaggaattatttgtcaagtgaaa

SEQ ID NO: 262723 - DNA, 30 bp, Artificial Sequence
  Synthetic oligonucleotide
agattgaccttaacaatcccgccagtgaaa

SEQ ID NO: 262724 - DNA, 30 bp, Artificial Sequence
  Synthetic oligonucleotide
gtgattcgtcccatgaggctcttagtgaaa

SEQ ID NO: 262725 - DNA, 30 bp, Artificial Sequence
  Synthetic oligonucleotide
caactaacagcaacgtaaggggtcgtgaaa

SEQ ID NO: 262726 - DNA, 30 bp, Artificial Sequence
  Synthetic oligonucleotide
tttcgccaatcgacgctaagtttcgtgaaa

SEQ ID NO: 262727 - DNA, 30 bp, Artificial Sequence
  Synthetic oligonucleotide
gacatgaccccgtctgttgacttggtgaaa

SEQ ID NO: 262728 - DNA, 30 bp, Artificial Sequence
  Synthetic oligonucleotide
gttgatagcgcgcacctaccgcttgtgaaa

SEQ ID NO: 262729 - DNA, 30 bp, Artificial Sequence
  Synthetic oligonucleotide
gcttgagacattcaggaaaattgattgaaa

SEQ ID NO: 262730 - DNA, 30 bp, Artificial Sequence
  Synthetic oligonucleotide
actcgacttagcggcccgcgaaacttgaaa

SEQ ID NO: 262731 - DNA, 30 bp, Artificial Sequence
  Synthetic oligonucleotide
ggtccaggtgtctatttgtttaccttgaaa

SEQ ID NO: 262732 - DNA, 30 bp, Artificial Sequence
  Synthetic oligonucleotide
gtgctccatcctaggcgccacgtcttgaaa

SEQ ID NO: 262733 - DNA, 30 bp, Artificial Sequence
  Synthetic oligonucleotide
gctgagtcaggtgaggtcagccgtttgaaa

SEQ ID NO: 262734 - DNA, 30 bp, Artificial Sequence
  Synthetic oligonucleotide
cgttctggtattgaggaacacataaataaa

SEQ ID NO: 262735 - DNA, 30 bp, Artificial Sequence
  Synthetic oligonucleotide
gagggcatcgccgcaggctaaagcaataaa

SEQ ID NO: 262736 - DNA, 30 bp, Artificial Sequence
  Synthetic oligonucleotide
ctaagtttgaaatgaaaaaaccgcaataaa

SEQ ID NO: 262737 - DNA, 30 bp, Artificial Sequence
  Synthetic oligonucleotide
atatcggtgaacgatgttcgcatcaataaa

SEQ ID NO: 262738 - DNA, 30 bp, Artificial Sequence
  Synthetic oligonucleotide
ggatagacgctctaaaaaagactgaataaa

SEQ ID NO: 262739 - DNA, 30 bp, Artificial Sequence
  Synthetic oligonucleotide
gcactaagtgaccattagatgttgaataaa

SEQ ID NO: 262740 - DNA, 30 bp, Artificial Sequence
  Synthetic oligonucleotide
cttaagctgttctaaaatggggctaataaa

SEQ ID NO: 262741 - DNA, 30 bp, Artificial Sequence
  Synthetic oligonucleotide
acttagtgcaaccgtgaggcctaacataaa

SEQ ID NO: 262742 - DNA, 30 bp, Artificial Sequence
  Synthetic oligonucleotide
agcctaccatgggtatattacacacataaa

SEQ ID NO: 262743 - DNA, 30 bp, Artificial Sequence
  Synthetic oligonucleotide
tagatccgacctgtcggtaagatacataaa

SEQ ID NO: 262744 - DNA, 30 bp, Artificial Sequence
  Synthetic oligonucleotide
tcgcgtaaagtacaccggtagttacataaa

SEQ ID NO: 262745 - DNA, 30 bp, Artificial Sequence
  Synthetic oligonucleotide
gatttggggaggggataaatcgcccataaa

SEQ ID NO: 262746 - DNA, 30 bp, Artificial Sequence
  Synthetic oligonucleotide
tagtgggatcgaataatggctcagcataaa

SEQ ID NO: 262747 - DNA, 30 bp, Artificial Sequence
  Synthetic oligonucleotide
tcaaatcggattgcacgcttgaggcataaa

SEQ ID NO: 262748 - DNA, 30 bp, Artificial Sequence
  Synthetic oligonucleotide
cctcagtatacacctaatcctcggcataaa

SEQ ID NO: 262749 - DNA, 30 bp, Artificial Sequence
  Synthetic oligonucleotide
cccagcgtcgctaccgttacgaaagataaa

SEQ ID NO: 262750 - DNA, 30 bp, Artificial Sequence
  Synthetic oligonucleotide
aggctcgcaattattcgtgctctggataaa

SEQ ID NO: 262751 - DNA, 30 bp, Artificial Sequence
  Synthetic oligonucleotide
ttatctgtgacgagcgcgtgttaatataaa

SEQ ID NO: 262752 - DNA, 30 bp, Artificial Sequence
  Synthetic oligonucleotide
ccaaggttccaatctatcacgggatataaa

SEQ ID NO: 262753 - DNA, 30 bp, Artificial Sequence
  Synthetic oligonucleotide
ggaagttttaatgtgagggtgaactataaa

SEQ ID NO: 262754 - DNA, 30 bp, Artificial Sequence
  Synthetic oligonucleotide
taattatcatctataatttggcgctataaa

SEQ ID NO: 262755 - DNA, 30 bp, Artificial Sequence
  Synthetic oligonucleotide
cccgtacgaagagaatgcctcatctataaa

SEQ ID NO: 262756 - DNA, 30 bp, Artificial Sequence
  Synthetic oligonucleotide
gaatacattaatggacatcaaaattataaa

SEQ ID NO: 262757 - DNA, 30 bp, Artificial Sequence
  Synthetic oligonucleotide
tagaggtgatagtacctattaggaactaaa

SEQ ID NO: 262758 - DNA, 30 bp, Artificial Sequence
  Synthetic oligonucleotide
atccccgtgccaaaatttaccttcactaaa

SEQ ID NO: 262759 - DNA, 30 bp, Artificial Sequence
  Synthetic oligonucleotide
ctcataagtcacattggtcttcggactaaa

SEQ ID NO: 262760 - DNA, 30 bp, Artificial Sequence
  Synthetic oligonucleotide
ccgctttactgttgcaaaaggtggactaaa

SEQ ID NO: 262761 - DNA, 30 bp, Artificial Sequence
  Synthetic oligonucleotide
ttactacagtttcgtcaggacacacctaaa

SEQ ID NO: 262762 - DNA, 30 bp, Artificial Sequence
  Synthetic oligonucleotide
gacggttagaagattcgcagctgccctaaa

SEQ ID NO: 262763 - DNA, 30 bp, Artificial Sequence
  Synthetic oligonucleotide
atatcagatcaggcgcgtcaatcgcctaaa

SEQ ID NO: 262764 - DNA, 30 bp, Artificial Sequence
  Synthetic oligonucleotide
gctgcagggaaacaaccgaggcatcctaaa

SEQ ID NO: 262765 - DNA, 30 bp, Artificial Sequence
  Synthetic oligonucleotide
attgtgtcgccaaaggtagaaatagctaaa

SEQ ID NO: 262766 - DNA, 30 bp, Artificial Sequence
  Synthetic oligonucleotide
gtaggttaagcccaagatcaagccgctaaa

SEQ ID NO: 262767 - DNA, 30 bp, Artificial Sequence
  Synthetic oligonucleotide
gcaacacaggcgtcacaaggactcgctaaa

SEQ ID NO: 262768 - DNA, 30 bp, Artificial Sequence
  Synthetic oligonucleotide
atatggtaggaagggaaatgggaggctaaa

SEQ ID NO: 262769 - DNA, 30 bp, Artificial Sequence
  Synthetic oligonucleotide
gaaaccaactcctggcggtggggggctaaa

SEQ ID NO: 262770 - DNA, 30 bp, Artificial Sequence
  Synthetic oligonucleotide
tggtgtttggcggccgtgctctgggctaaa

SEQ ID NO: 262771 - DNA, 30 bp, Artificial Sequence
  Synthetic oligonucleotide
gataaagcagcaatagtaatccatgctaaa

SEQ ID NO: 262772 - DNA, 30 bp, Artificial Sequence
  Synthetic oligonucleotide
ataagcgcatataaaacgccggatgctaaa

SEQ ID NO: 262773 - DNA, 30 bp, Artificial Sequence
  Synthetic oligonucleotide
tgatgctcttacgaacacactgctgctaaa

SEQ ID NO: 262774 - DNA, 30 bp, Artificial Sequence
  Synthetic oligonucleotide
cccggaggaagcggtacgccaacatctaaa

SEQ ID NO: 262775 - DNA, 30 bp, Artificial Sequence
  Synthetic oligonucleotide
tccatgcagaaaaggatccactcatctaaa

SEQ ID NO: 262776 - DNA, 30 bp, Artificial Sequence
  Synthetic oligonucleotide
gacagccacgtgcttaggccaggatctaaa

SEQ ID NO: 262777 - DNA, 30 bp, Artificial Sequence
  Synthetic oligonucleotide
gtgccggaatcgggaaaggttctatctaaa

SEQ ID NO: 262778 - DNA, 30 bp, Artificial Sequence
  Synthetic oligonucleotide
tcccaagctcgcgggaagggcgactctaaa

SEQ ID NO: 262779 - DNA, 30 bp, Artificial Sequence
  Synthetic oligonucleotide
cacacgctacggctggcaagtgattctaaa

SEQ ID NO: 262780 - DNA, 30 bp, Artificial Sequence
  Synthetic oligonucleotide
gtggcctggggttattaagtagacagtaaa

SEQ ID NO: 262781 - DNA, 30 bp, Artificial Sequence
  Synthetic oligonucleotide
acagtaccttataagcgataaaccagtaaa

SEQ ID NO: 262782 - DNA, 30 bp, Artificial Sequence
  Synthetic oligonucleotide
gatgtgccaacactggagacttgcagtaaa

SEQ ID NO: 262783 - DNA, 30 bp, Artificial Sequence
  Synthetic oligonucleotide
tctcgacgtgcatacagatggtagagtaaa

SEQ ID NO: 262784 - DNA, 30 bp, Artificial Sequence
  Synthetic oligonucleotide
tgcgaccgtattcgagggcaaagtagtaaa

SEQ ID NO: 262785 - DNA, 30 bp, Artificial Sequence
  Synthetic oligonucleotide
ctctagggatgtgctcgtggcaaccgtaaa

SEQ ID NO: 262786 - DNA, 30 bp, Artificial Sequence
  Synthetic oligonucleotide
tccaatggtaagccctcagcagagcgtaaa

SEQ ID NO: 262787 - DNA, 30 bp, Artificial Sequence
  Synthetic oligonucleotide
tacagccgtgcggcacaactaataggtaaa

SEQ ID NO: 262788 - DNA, 30 bp, Artificial Sequence
  Synthetic oligonucleotide
cgtgatctagtgttgatggcagacggtaaa

SEQ ID NO: 262789 - DNA, 30 bp, Artificial Sequence
  Synthetic oligonucleotide
ccaggtgtttaataccaaccatacggtaaa

SEQ ID NO: 262790 - DNA, 30 bp, Artificial Sequence
  Synthetic oligonucleotide
ccgaccaatatactttatcaaaccggtaaa

SEQ ID NO: 262791 - DNA, 30 bp, Artificial Sequence
  Synthetic oligonucleotide
cagaaaggtcgaacgttgccaaccggtaaa

SEQ ID NO: 262792 - DNA, 30 bp, Artificial Sequence
  Synthetic oligonucleotide
aatccactctagtgttatcgtcagggtaaa

SEQ ID NO: 262793 - DNA, 30 bp, Artificial Sequence
  Synthetic oligonucleotide
gcctaacctgtctcgaagaatgcgggtaaa

SEQ ID NO: 262794 - DNA, 30 bp, Artificial Sequence
  Synthetic oligonucleotide
ggcgtcgcgaccgtggggtactcgggtaaa

SEQ ID NO: 262795 - DNA, 30 bp, Artificial Sequence
  Synthetic oligonucleotide
gcagcctgcgttgcccgtggcgtgggtaaa

SEQ ID NO: 262796 - DNA, 30 bp, Artificial Sequence
  Synthetic oligonucleotide
ctgataggagtataggtaatgttgggtaaa

SEQ ID NO: 262797 - DNA, 30 bp, Artificial Sequence
  Synthetic oligonucleotide
tcgggatataatacgacactgcctggtaaa

SEQ ID NO: 262798 - DNA, 30 bp, Artificial Sequence
  Synthetic oligonucleotide
cttgacaagacgtgcgtttcgacatgtaaa

SEQ ID NO: 262799 - DNA, 30 bp, Artificial Sequence
  Synthetic oligonucleotide
cctctatcatttgaagttaggccatgtaaa

SEQ ID NO: 262800 - DNA, 30 bp, Artificial Sequence
  Synthetic oligonucleotide
gggtcggtaaaccagggtggtatctgtaaa

SEQ ID NO: 262801 - DNA, 30 bp, Artificial Sequence
  Synthetic oligonucleotide
ggagatgcgtagtaaatcgcagtctgtaaa

SEQ ID NO: 262802 - DNA, 30 bp, Artificial Sequence
  Synthetic oligonucleotide
ggacctacgggaagcgcaccctggtgtaaa

SEQ ID NO: 262803 - DNA, 30 bp, Artificial Sequence
  Synthetic oligonucleotide
ttgataacttctttgcccttatggattaaa

SEQ ID NO: 262804 - DNA, 30 bp, Artificial Sequence
  Synthetic oligonucleotide
gggttggacctaacatagcatgtgattaaa

SEQ ID NO: 262805 - DNA, 30 bp, Artificial Sequence
  Synthetic oligonucleotide
tttagggccaaacgtcagggcaatattaaa

SEQ ID NO: 262806 - DNA, 30 bp, Artificial Sequence
  Synthetic oligonucleotide
ccatactcgtcaagtcacccgcatattaaa

SEQ ID NO: 262807 - DNA, 30 bp, Artificial Sequence
  Synthetic oligonucleotide
cttgtaaaggagattcttcgagatattaaa

SEQ ID NO: 262808 - DNA, 30 bp, Artificial Sequence
  Synthetic oligonucleotide
cagaacgtaagttggatgtatgtacttaaa

SEQ ID NO: 262809 - DNA, 30 bp, Artificial Sequence
  Synthetic oligonucleotide
gatgtcagctcagatttctttaggcttaaa

SEQ ID NO: 262810 - DNA, 30 bp, Artificial Sequence
  Synthetic oligonucleotide
tggcaagtgcgacgtagactgactcttaaa

SEQ ID NO: 262811 - DNA, 30 bp, Artificial Sequence
  Synthetic oligonucleotide
tcataccacgtcagtcaccgggttcttaaa

SEQ ID NO: 262812 - DNA, 30 bp, Artificial Sequence
  Synthetic oligonucleotide
tgtgacacgatagtccgtacgtaagttaaa

SEQ ID NO: 262813 - DNA, 30 bp, Artificial Sequence
  Synthetic oligonucleotide
ttcttaccatatatcacattcggagttaaa

SEQ ID NO: 262814 - DNA, 30 bp, Artificial Sequence
  Synthetic oligonucleotide
acgttctgttaccttaactgggacgttaaa

SEQ ID NO: 262815 - DNA, 30 bp, Artificial Sequence
  Synthetic oligonucleotide
cgtactaaaggttaaagtctgctcgttaaa

SEQ ID NO: 262816 - DNA, 30 bp, Artificial Sequence
  Synthetic oligonucleotide
ccgagcatggcaacatacgatgtggttaaa

SEQ ID NO: 262817 - DNA, 30 bp, Artificial Sequence
  Synthetic oligonucleotide
ttcatgcatagtcaaaagggaaatgttaaa

SEQ ID NO: 262818 - DNA, 30 bp, Artificial Sequence
  Synthetic oligonucleotide
aacatttggggagcctgggcgaatgttaaa

SEQ ID NO: 262819 - DNA, 30 bp, Artificial Sequence
  Synthetic oligonucleotide
tgagcgctgattagtcagttgagctttaaa

SEQ ID NO: 262820 - DNA, 30 bp, Artificial Sequence
  Synthetic oligonucleotide
gggaggagagcgtaagtatataattttaaa

SEQ ID NO: 262821 - DNA, 30 bp, Artificial Sequence
  Synthetic oligonucleotide
cgccttacgacacgtcgtagtccttttaaa

SEQ ID NO: 262822 - DNA, 30 bp, Artificial Sequence
  Synthetic oligonucleotide
gtagtaaccacgaaagtctggtgttttaaa

SEQ ID NO: 262823 - DNA, 30 bp, Artificial Sequence
  Synthetic oligonucleotide
cggttggcgagtggcgaagaggcaaaacaa

SEQ ID NO: 262824 - DNA, 30 bp, Artificial Sequence
  Synthetic oligonucleotide
taaaccggttggcgagagctgagaaaacaa

SEQ ID NO: 262825 - DNA, 30 bp, Artificial Sequence
  Synthetic oligonucleotide
agcagatttacctgttgttaagacaaacaa

SEQ ID NO: 262826 - DNA, 30 bp, Artificial Sequence
  Synthetic oligonucleotide
gaatacgtccccgacgacagcgacaaacaa

SEQ ID NO: 262827 - DNA, 30 bp, Artificial Sequence
  Synthetic oligonucleotide
gtcgagccacttaggcacgggaataaacaa

SEQ ID NO: 262828 - DNA, 30 bp, Artificial Sequence
  Synthetic oligonucleotide
gcctgcctatatgatagtgaaggtaaacaa

SEQ ID NO: 262829 - DNA, 30 bp, Artificial Sequence
  Synthetic oligonucleotide
atggcctttgctcaacacagccttaaacaa

SEQ ID NO: 262830 - DNA, 30 bp, Artificial Sequence
  Synthetic oligonucleotide
ttaaacctgccaactggggaataacaacaa

SEQ ID NO: 262831 - DNA, 30 bp, Artificial Sequence
  Synthetic oligonucleotide
taatccataacagcatgtacaaatcaacaa

SEQ ID NO: 262832 - DNA, 30 bp, Artificial Sequence
  Synthetic oligonucleotide
ttatggggcaattacataagcactcaacaa

SEQ ID NO: 262833 - DNA, 30 bp, Artificial Sequence
  Synthetic oligonucleotide
attagctttttggatccaccctccgaacaa

SEQ ID NO: 262834 - DNA, 30 bp, Artificial Sequence
  Synthetic oligonucleotide
tacgcatcgagaaccaggctctaggaacaa

SEQ ID NO: 262835 - DNA, 30 bp, Artificial Sequence
  Synthetic oligonucleotide
cttagactcggagctgcgtcgacggaacaa

SEQ ID NO: 262836 - DNA, 30 bp, Artificial Sequence
  Synthetic oligonucleotide
gtgagacctattgcttaacaagatgaacaa

SEQ ID NO: 262837 - DNA, 30 bp, Artificial Sequence
  Synthetic oligonucleotide
ggggcttaggattaccagagaatataacaa

SEQ ID NO: 262838 - DNA, 30 bp, Artificial Sequence
  Synthetic oligonucleotide
gaaccgagcatgtatcgaaaaaggtaacaa

SEQ ID NO: 262839 - DNA, 30 bp, Artificial Sequence
  Synthetic oligonucleotide
ggcgcaggctcgtgtagtcgggtttaacaa

SEQ ID NO: 262840 - DNA, 30 bp, Artificial Sequence
  Synthetic oligonucleotide
ggatacatgccattgtatttggaaacacaa

SEQ ID NO: 262841 - DNA, 30 bp, Artificial Sequence
  Synthetic oligonucleotide
ctttaccgtgtaaagtcagttatcacacaa

SEQ ID NO: 262842 - DNA, 30 bp, Artificial Sequence
  Synthetic oligonucleotide
gcggcgtcccggaggttaatatgtacacaa

SEQ ID NO: 262843 - DNA, 30 bp, Artificial Sequence
  Synthetic oligonucleotide
gaggattttagttcctggaagtttacacaa

SEQ ID NO: 262844 - DNA, 30 bp, Artificial Sequence
  Synthetic oligonucleotide
accaggcgttcgaacaagtacgaaccacaa

SEQ ID NO: 262845 - DNA, 30 bp, Artificial Sequence
  Synthetic oligonucleotide
tcttaaaattaatacgagacttagccacaa

SEQ ID NO: 262846 - DNA, 30 bp, Artificial Sequence
  Synthetic oligonucleotide
aactatgaattattggggcgggcgccacaa

SEQ ID NO: 262847 - DNA, 30 bp, Artificial Sequence
  Synthetic oligonucleotide
gcaagcattggaaggtatggttcgccacaa

SEQ ID NO: 262848 - DNA, 30 bp, Artificial Sequence
  Synthetic oligonucleotide
tatctcccagtcgaacaggtgtaggcacaa

SEQ ID NO: 262849 - DNA, 30 bp, Artificial Sequence
  Synthetic oligonucleotide
gaatatgcgacagagagtccaggggcacaa

SEQ ID NO: 262850 - DNA, 30 bp, Artificial Sequence
  Synthetic oligonucleotide
gactccaattggcgttcagcatgggcacaa

SEQ ID NO: 262851 - DNA, 30 bp, Artificial Sequence
  Synthetic oligonucleotide
taccttagacgaagatgtcaagcatcacaa

SEQ ID NO: 262852 - DNA, 30 bp, Artificial Sequence
  Synthetic oligonucleotide
tacatggtggtgatgccgttgatatcacaa

SEQ ID NO: 262853 - DNA, 30 bp, Artificial Sequence
  Synthetic oligonucleotide
ttctccaacttttgtccgtgggactcacaa

SEQ ID NO: 262854 - DNA, 30 bp, Artificial Sequence
  Synthetic oligonucleotide
cggcgaattgtatatgtctagcattcacaa

SEQ ID NO: 262855 - DNA, 30 bp, Artificial Sequence
  Synthetic oligonucleotide
taccgataaaggtagtatcggtattcacaa

SEQ ID NO: 262856 - DNA, 30 bp, Artificial Sequence
  Synthetic oligonucleotide
cccacagggctgacgatcgcaacttcacaa

SEQ ID NO: 262857 - DNA, 30 bp, Artificial Sequence
  Synthetic oligonucleotide
tcagacaatataacattttacatttcacaa

SEQ ID NO: 262858 - DNA, 30 bp, Artificial Sequence
  Synthetic oligonucleotide
cactgtggacaggatgcacggtcaagacaa

SEQ ID NO: 262859 - DNA, 30 bp, Artificial Sequence
  Synthetic oligonucleotide
tttgttaaaattggttagttagtaagacaa

SEQ ID NO: 262860 - DNA, 30 bp, Artificial Sequence
  Synthetic oligonucleotide
tcgatcctggcaaacctaaaggccagacaa

SEQ ID NO: 262861 - DNA, 30 bp, Artificial Sequence
  Synthetic oligonucleotide
attgcgattatcttaaataagaatagacaa

SEQ ID NO: 262862 - DNA, 30 bp, Artificial Sequence
  Synthetic oligonucleotide
ctggtcgtgtaattccgggtgtctagacaa

SEQ ID NO: 262863 - DNA, 30 bp, Artificial Sequence
  Synthetic oligonucleotide
gaacctaaactttgctctcaagaccgacaa

SEQ ID NO: 262864 - DNA, 30 bp, Artificial Sequence
  Synthetic oligonucleotide
aggagttccggccaagttcacccccgacaa

SEQ ID NO: 262865 - DNA, 30 bp, Artificial Sequence
  Synthetic oligonucleotide
aatcacaggtgaacaattggcgatcgacaa

SEQ ID NO: 262866 - DNA, 30 bp, Artificial Sequence
  Synthetic oligonucleotide
gtcgtatctagggcgttcgtgcaaggacaa

SEQ ID NO: 262867 - DNA, 30 bp, Artificial Sequence
  Synthetic oligonucleotide
aagggtttgaactcatttccataaggacaa

SEQ ID NO: 262868 - DNA, 30 bp, Artificial Sequence
  Synthetic oligonucleotide
catgggtctaagttcccatgtagaggacaa

SEQ ID NO: 262869 - DNA, 30 bp, Artificial Sequence
  Synthetic oligonucleotide
ccggtgtaattatcaatatatataggacaa

SEQ ID NO: 262870 - DNA, 30 bp, Artificial Sequence
  Synthetic oligonucleotide
ggcgtatggcaatgctcaactgacggacaa

SEQ ID NO: 262871 - DNA, 30 bp, Artificial Sequence
  Synthetic oligonucleotide
agtagcgtggctctgcgcgcgtagggacaa

SEQ ID NO: 262872 - DNA, 30 bp, Artificial Sequence
  Synthetic oligonucleotide
tcttttggtataaatcttgaagggggacaa

SEQ ID NO: 262873 - DNA, 30 bp, Artificial Sequence
  Synthetic oligonucleotide
tgtataggtttgtatatagtagatggacaa

SEQ ID NO: 262874 - DNA, 30 bp, Artificial Sequence
  Synthetic oligonucleotide
gaattgacatgtaaatgttgggatggacaa

SEQ ID NO: 262875 - DNA, 30 bp, Artificial Sequence
  Synthetic oligonucleotide
ccgcacgaaaaccttgcccggcctggacaa

SEQ ID NO: 262876 - DNA, 30 bp, Artificial Sequence
  Synthetic oligonucleotide
tctaatttggtcttcaaggatattggacaa

SEQ ID NO: 262877 - DNA, 30 bp, Artificial Sequence
  Synthetic oligonucleotide
tcagacgtaaaatttaggaaaacatgacaa

SEQ ID NO: 262878 - DNA, 30 bp, Artificial Sequence
  Synthetic oligonucleotide
agaggtatctcccctgagccgcgatgacaa

SEQ ID NO: 262879 - DNA, 30 bp, Artificial Sequence
  Synthetic oligonucleotide
atggtgttggtagtagaaggatcctgacaa

SEQ ID NO: 262880 - DNA, 30 bp, Artificial Sequence
  Synthetic oligonucleotide
tccaggtacagcagtaggacttagtgacaa

SEQ ID NO: 262881 - DNA, 30 bp, Artificial Sequence
  Synthetic oligonucleotide
ctgattgataatgacttgtcaccgtgacaa

SEQ ID NO: 262882 - DNA, 30 bp, Artificial Sequence
  Synthetic oligonucleotide
gacttggtgccctaatcaaatccgtgacaa

SEQ ID NO: 262883 - DNA, 30 bp, Artificial Sequence
  Synthetic oligonucleotide
ccccacggaacgtagaacaagcattgacaa

SEQ ID NO: 262884 - DNA, 30 bp, Artificial Sequence
  Synthetic oligonucleotide
aggtatccatcgagaacgcaaccttgacaa

SEQ ID NO: 262885 - DNA, 30 bp, Artificial Sequence
  Synthetic oligonucleotide
aaaggggcctgacttcgcgaagcaatacaa

SEQ ID NO: 262886 - DNA, 30 bp, Artificial Sequence
  Synthetic oligonucleotide
ccttaggacttgaccgaacttggaatacaa

SEQ ID NO: 262887 - DNA, 30 bp, Artificial Sequence
  Synthetic oligonucleotide
aactggctgtacttatgcacaccgatacaa

SEQ ID NO: 262888 - DNA, 30 bp, Artificial Sequence
  Synthetic oligonucleotide
taattaccccaaggagagacgctgatacaa

SEQ ID NO: 262889 - DNA, 30 bp, Artificial Sequence
  Synthetic oligonucleotide
atgcacgctgatagcgctagggtgatacaa

SEQ ID NO: 262890 - DNA, 30 bp, Artificial Sequence
  Synthetic oligonucleotide
ttacctatccgttgaccagctactatacaa

SEQ ID NO: 262891 - DNA, 30 bp, Artificial Sequence
  Synthetic oligonucleotide
tccggcgttaaaatccgccttagactacaa

SEQ ID NO: 262892 - DNA, 30 bp, Artificial Sequence
  Synthetic oligonucleotide
ctgagacggagcgcgctagtctttctacaa

SEQ ID NO: 262893 - DNA, 30 bp, Artificial Sequence
  Synthetic oligonucleotide
caccctacaaatggtgagatttaagtacaa

SEQ ID NO: 262894 - DNA, 30 bp, Artificial Sequence
  Synthetic oligonucleotide
cgctaggacgttgttggatgggcagtacaa

SEQ ID NO: 262895 - DNA, 30 bp, Artificial Sequence
  Synthetic oligonucleotide
gcattggattacttgcatataatagtacaa

SEQ ID NO: 262896 - DNA, 30 bp, Artificial Sequence
  Synthetic oligonucleotide
tgtctaatgcgcctctcaagagtagtacaa

SEQ ID NO: 262897 - DNA, 30 bp, Artificial Sequence
  Synthetic oligonucleotide
gatgtgttttaggcaccgtacgctgtacaa

SEQ ID NO: 262898 - DNA, 30 bp, Artificial Sequence
  Synthetic oligonucleotide
tgtgtttagagcagggggacgcggttacaa

SEQ ID NO: 262899 - DNA, 30 bp, Artificial Sequence
  Synthetic oligonucleotide
gtgaaacaatggaagtagccaagtttacaa

SEQ ID NO: 262900 - DNA, 29 bp, Artificial Sequence
  Synthetic oligonucleotide
gccatacactacgtaaaccttccaaccaa

SEQ ID NO: 262901 - DNA, 30 bp, Artificial Sequence
  Synthetic oligonucleotide
acagaccgattcaagaatcaattcaaccaa

SEQ ID NO: 262902 - DNA, 30 bp, Artificial Sequence
  Synthetic oligonucleotide
accttatgcttttggcgatgattgaaccaa

SEQ ID NO: 262903 - DNA, 30 bp, Artificial Sequence
  Synthetic oligonucleotide
ctgtagcgctaaagtccttcgccacaccaa

SEQ ID NO: 262904 - DNA, 30 bp, Artificial Sequence
  Synthetic oligonucleotide
ttaggaagcatctttagctattttcaccaa

SEQ ID NO: 262905 - DNA, 30 bp, Artificial Sequence
  Synthetic oligonucleotide
agagcagaatcgttgtaggtatgagaccaa

SEQ ID NO: 262906 - DNA, 30 bp, Artificial Sequence
  Synthetic oligonucleotide
agggaattgcagcggactggtagtgaccaa

SEQ ID NO: 262907 - DNA, 30 bp, Artificial Sequence
  Synthetic oligonucleotide
tgggagatgtatccgatggtccgtgaccaa

SEQ ID NO: 262908 - DNA, 30 bp, Artificial Sequence
  Synthetic oligonucleotide
aattggaacgtgtgggatagttaataccaa

SEQ ID NO: 262909 - DNA, 30 bp, Artificial Sequence
  Synthetic oligonucleotide
tggaccgccagtatgtgggcgcactaccaa

SEQ ID NO: 262910 - DNA, 30 bp, Artificial Sequence
  Synthetic oligonucleotide
ggccggaagttgcccgtcacacagtaccaa

SEQ ID NO: 262911 - DNA, 30 bp, Artificial Sequence
  Synthetic oligonucleotide
ccacctaccaagttgacttatttgtaccaa

SEQ ID NO: 262912 - DNA, 30 bp, Artificial Sequence
  Synthetic oligonucleotide
ccccattaaccctgtctcttagaaacccaa

SEQ ID NO: 262913 - DNA, 30 bp, Artificial Sequence
  Synthetic oligonucleotide
tcttttcggcacgttatatgtatcacccaa

SEQ ID NO: 262914 - DNA, 30 bp, Artificial Sequence
  Synthetic oligonucleotide
tgatgcgcggggattaatgagcagacccaa

SEQ ID NO: 262915 - DNA, 30 bp, Artificial Sequence
  Synthetic oligonucleotide
ccggaaattgataaggccacggctacccaa

SEQ ID NO: 262916 - DNA, 30 bp, Artificial Sequence
  Synthetic oligonucleotide
acgaccgggtacgcacttgggcaaccccaa

SEQ ID NO: 262917 - DNA, 30 bp, Artificial Sequence
  Synthetic oligonucleotide
tagccctcaaagtatgccttgcaaccccaa

SEQ ID NO: 262918 - DNA, 30 bp, Artificial Sequence
  Synthetic oligonucleotide
acgtgttgtgtctcttcggaatgaccccaa

SEQ ID NO: 262919 - DNA, 30 bp, Artificial Sequence
  Synthetic oligonucleotide
gtggaagtaataggggtttgcaagccccaa

SEQ ID NO: 262920 - DNA, 30 bp, Artificial Sequence
  Synthetic oligonucleotide
cggggatgaacctggggggggaagccccaa

SEQ ID NO: 262921 - DNA, 30 bp, Artificial Sequence
  Synthetic oligonucleotide
tagtcaaggagggtttatgaatagccccaa

SEQ ID NO: 262922 - DNA, 30 bp, Artificial Sequence
  Synthetic oligonucleotide
tttagccacaaaaccctacgacgtccccaa

SEQ ID NO: 262923 - DNA, 30 bp, Artificial Sequence
  Synthetic oligonucleotide
actaacggcccgttgcaaaagtttccccaa

SEQ ID NO: 262924 - DNA, 30 bp, Artificial Sequence
  Synthetic oligonucleotide
gcgtgcacacgtatgtgttaggcagcccaa

SEQ ID NO: 262925 - DNA, 30 bp, Artificial Sequence
  Synthetic oligonucleotide
tccacaaaaataacttttctactagcccaa

SEQ ID NO: 262926 - DNA, 30 bp, Artificial Sequence
  Synthetic oligonucleotide
cttttgaagaatcggtgtaatttagcccaa

SEQ ID NO: 262927 - DNA, 30 bp, Artificial Sequence
  Synthetic oligonucleotide
cagtgcaggagacccttaagacgctcccaa

SEQ ID NO: 262928 - DNA, 30 bp, Artificial Sequence
  Synthetic oligonucleotide
aaaaaggccggacagggctcatagtcccaa

SEQ ID NO: 262929 - DNA, 30 bp, Artificial Sequence
  Synthetic oligonucleotide
accgaatttaactcacaaggttgaagccaa

SEQ ID NO: 262930 - DNA, 30 bp, Artificial Sequence
  Synthetic oligonucleotide
ctggaccaatctaagaaacgtctaagccaa

SEQ ID NO: 262931 - DNA, 30 bp, Artificial Sequence
  Synthetic oligonucleotide
acaatgtacgaactattgtaccacagccaa

SEQ ID NO: 262932 - DNA, 30 bp, Artificial Sequence
  Synthetic oligonucleotide
atacattttatttgtacaatccacagccaa

SEQ ID NO: 262933 - DNA, 30 bp, Artificial Sequence
  Synthetic oligonucleotide
ttttaataggaaatggagcgcacgagccaa

SEQ ID NO: 262934 - DNA, 30 bp, Artificial Sequence
  Synthetic oligonucleotide
accgtggccccgtcctttagatctagccaa

SEQ ID NO: 262935 - DNA, 30 bp, Artificial Sequence
  Synthetic oligonucleotide
gatggggctaactaaacttccccgcgccaa

SEQ ID NO: 262936 - DNA, 30 bp, Artificial Sequence
  Synthetic oligonucleotide
gcatcggggctcacagtgctgcggcgccaa

SEQ ID NO: 262937 - DNA, 30 bp, Artificial Sequence
  Synthetic oligonucleotide
aaagtggaatagcatccactgcccggccaa

SEQ ID NO: 262938 - DNA, 30 bp, Artificial Sequence
  Synthetic oligonucleotide
tggtgccaatactaatgtttcatgggccaa

SEQ ID NO: 262939 - DNA, 30 bp, Artificial Sequence
  Synthetic oligonucleotide
tcgtaggcgggtggacggctcgatggccaa

SEQ ID NO: 262940 - DNA, 30 bp, Artificial Sequence
  Synthetic oligonucleotide
catattacgtattaacaaccataatgccaa

SEQ ID NO: 262941 - DNA, 30 bp, Artificial Sequence
  Synthetic oligonucleotide
caggctgtcataagggcaaggatatgccaa

SEQ ID NO: 262942 - DNA, 30 bp, Artificial Sequence
  Synthetic oligonucleotide
gggagatttcaagatatgcaccggtgccaa

SEQ ID NO: 262943 - DNA, 30 bp, Artificial Sequence
  Synthetic oligonucleotide
aattggctagtcgagaatgcactttgccaa

SEQ ID NO: 262944 - DNA, 30 bp, Artificial Sequence
  Synthetic oligonucleotide
cggcggagctcagacttcgcatacatccaa

SEQ ID NO: 262945 - DNA, 30 bp, Artificial Sequence
  Synthetic oligonucleotide
aaggtgacattgggcacgttagtgatccaa

SEQ ID NO: 262946 - DNA, 30 bp, Artificial Sequence
  Synthetic oligonucleotide
tgcgacgactaggcagaatttttgatccaa

SEQ ID NO: 262947 - DNA, 30 bp, Artificial Sequence
  Synthetic oligonucleotide
cagatctcttgcagccacccaaatatccaa

SEQ ID NO: 262948 - DNA, 30 bp, Artificial Sequence
  Synthetic oligonucleotide
ggtccgaaaccccaattgttagttatccaa

SEQ ID NO: 262949 - DNA, 30 bp, Artificial Sequence
  Synthetic oligonucleotide
tatcggcatgtcggaggggcatcactccaa

SEQ ID NO: 262950 - DNA, 30 bp, Artificial Sequence
  Synthetic oligonucleotide
gggagacgcaatgaaaatatactactccaa

SEQ ID NO: 262951 - DNA, 30 bp, Artificial Sequence
  Synthetic oligonucleotide
ctattatgacggggatcacaagacctccaa

SEQ ID NO: 262952 - DNA, 30 bp, Artificial Sequence
  Synthetic oligonucleotide
ttgaacagtgggcttggcacacgcctccaa

SEQ ID NO: 262953 - DNA, 30 bp, Artificial Sequence
  Synthetic oligonucleotide
aaagggcctgggcggattcacgaagtccaa

SEQ ID NO: 262954 - DNA, 30 bp, Artificial Sequence
  Synthetic oligonucleotide
taaaaccgagtaaacgcaaatcgagtccaa

SEQ ID NO: 262955 - DNA, 30 bp, Artificial Sequence
  Synthetic oligonucleotide
cgtacgtagttgaagggcctattagtccaa

SEQ ID NO: 262956 - DNA, 30 bp, Artificial Sequence
  Synthetic oligonucleotide
tggtaggggttatttagggagcacgtccaa

SEQ ID NO: 262957 - DNA, 30 bp, Artificial Sequence
  Synthetic oligonucleotide
atgctatgttcaggaccggctagcgtccaa

SEQ ID NO: 262958 - DNA, 30 bp, Artificial Sequence
  Synthetic oligonucleotide
gtcgatttaaaatagttaatgagattccaa

SEQ ID NO: 262959 - DNA, 30 bp, Artificial Sequence
  Synthetic oligonucleotide
tcctcattaactgtctgtacgatattccaa

SEQ ID NO: 262960 - DNA, 30 bp, Artificial Sequence
  Synthetic oligonucleotide
cgtgtgtaaggctaaagggaatggttccaa

SEQ ID NO: 262961 - DNA, 30 bp, Artificial Sequence
  Synthetic oligonucleotide
gatctctaactcctaggctaatgtttccaa

SEQ ID NO: 262962 - DNA, 30 bp, Artificial Sequence
  Synthetic oligonucleotide
agtcaacccttggtatcgccaaccaagcaa

SEQ ID NO: 262963 - DNA, 30 bp, Artificial Sequence
  Synthetic oligonucleotide
acaggcagagcgctggttagggtcaagcaa

SEQ ID NO: 262964 - DNA, 30 bp, Artificial Sequence
  Synthetic oligonucleotide
ttacggctaatttcaattaggtgtaagcaa

SEQ ID NO: 262965 - DNA, 30 bp, Artificial Sequence
  Synthetic oligonucleotide
gtaagcaattgctttgtaatataacagcaa

SEQ ID NO: 262966 - DNA, 30 bp, Artificial Sequence
  Synthetic oligonucleotide
cctatcgccccaaccagtcattgacagcaa

SEQ ID NO: 262967 - DNA, 30 bp, Artificial Sequence
  Synthetic oligonucleotide
acgaatagcctgttcagggattcccagcaa

SEQ ID NO: 262968 - DNA, 30 bp, Artificial Sequence
  Synthetic oligonucleotide
atcaagatcgtcccttgatctaggcagcaa

SEQ ID NO: 262969 - DNA, 30 bp, Artificial Sequence
  Synthetic oligonucleotide
cctgttccttcggacaagtgattgcagcaa

SEQ ID NO: 262970 - DNA, 30 bp, Artificial Sequence
  Synthetic oligonucleotide
gaataaggtctgtcactatgggcagagcaa

SEQ ID NO: 262971 - DNA, 30 bp, Artificial Sequence
  Synthetic oligonucleotide
cctaggacgtctccagcgaggtcagagcaa

SEQ ID NO: 262972 - DNA, 30 bp, Artificial Sequence
  Synthetic oligonucleotide
ccaggggtgtatgcgcaccattgagagcaa

SEQ ID NO: 262973 - DNA, 30 bp, Artificial Sequence
  Synthetic oligonucleotide
ctgtcttactactgggctgtcgacgagcaa

SEQ ID NO: 262974 - DNA, 30 bp, Artificial Sequence
  Synthetic oligonucleotide
aatccccgatgcctactcatttacgagcaa

SEQ ID NO: 262975 - DNA, 30 bp, Artificial Sequence
  Synthetic oligonucleotide
taggttggattaggttaactaatcgagcaa

SEQ ID NO: 262976 - DNA, 30 bp, Artificial Sequence
  Synthetic oligonucleotide
tccattgtcgacatatcctagctcgagcaa

SEQ ID NO: 262977 - DNA, 30 bp, Artificial Sequence
  Synthetic oligonucleotide
tatggggaaggcctggacggcgtcgagcaa

SEQ ID NO: 262978 - DNA, 31 bp, Artificial Sequence
  Synthetic oligonucleotide
acgctcaaaagctgagtctagaattgagcaa

SEQ ID NO: 262979 - DNA, 30 bp, Artificial Sequence
  Synthetic oligonucleotide
gttgttgcacctgttaaaagtattgagcaa

SEQ ID NO: 262980 - DNA, 30 bp, Artificial Sequence
  Synthetic oligonucleotide
ctagagtgtaacttttttcggagatagcaa

SEQ ID NO: 262981 - DNA, 30 bp, Artificial Sequence
  Synthetic oligonucleotide
ggttcccttgataacctgaacccctagcaa

SEQ ID NO: 262982 - DNA, 30 bp, Artificial Sequence
  Synthetic oligonucleotide
attacgtcagttccgcataaaaagtagcaa

SEQ ID NO: 262983 - DNA, 30 bp, Artificial Sequence
  Synthetic oligonucleotide
ggcatggtatcgacttactgtacgtagcaa

SEQ ID NO: 262984 - DNA, 30 bp, Artificial Sequence
  Synthetic oligonucleotide
aaatgattctccttgggatagcattagcaa

SEQ ID NO: 262985 - DNA, 30 bp, Artificial Sequence
  Synthetic oligonucleotide
ctatcgttcattcccagacgtgcttagcaa

SEQ ID NO: 262986 - DNA, 30 bp, Artificial Sequence
  Synthetic oligonucleotide
agggatagggagaggtatggcttttagcaa

SEQ ID NO: 262987 - DNA, 30 bp, Artificial Sequence
  Synthetic oligonucleotide
cttggatccctgtagtgcgcatacacgcaa

SEQ ID NO: 262988 - DNA, 30 bp, Artificial Sequence
  Synthetic oligonucleotide
gaaggtctattgtaaatgtcgagcacgcaa

SEQ ID NO: 262989 - DNA, 30 bp, Artificial Sequence
  Synthetic oligonucleotide
tcgacaacattcgacccaaacaggacgcaa

SEQ ID NO: 262990 - DNA, 30 bp, Artificial Sequence
  Synthetic oligonucleotide
ctaagcgaactactgagttcacatacgcaa

SEQ ID NO: 262991 - DNA, 30 bp, Artificial Sequence
  Synthetic oligonucleotide
tcccgttaggtttacgtatagtgtacgcaa

SEQ ID NO: 262992 - DNA, 30 bp, Artificial Sequence
  Synthetic oligonucleotide
caatctccgattgcgagcatcaccccgcaa

SEQ ID NO: 262993 - DNA, 30 bp, Artificial Sequence
  Synthetic oligonucleotide
catagcaataatatatcctgtgccccgcaa

SEQ ID NO: 262994 - DNA, 30 bp, Artificial Sequence
  Synthetic oligonucleotide
gtgcgttcgcggatcgctggaacgccgcaa

SEQ ID NO: 262995 - DNA, 30 bp, Artificial Sequence
  Synthetic oligonucleotide
tcgtaagcatgacgaaaccggtggccgcaa

SEQ ID NO: 262996 - DNA, 30 bp, Artificial Sequence
  Synthetic oligonucleotide
gctaacggagcagtccgtgggtggccgcaa

SEQ ID NO: 262997 - DNA, 30 bp, Artificial Sequence
  Synthetic oligonucleotide
ttgaatgaggttttaacctctcgtccgcaa

SEQ ID NO: 262998 - DNA, 30 bp, Artificial Sequence
  Synthetic oligonucleotide
aacggtcaaaggctgttccgaggcgcgcaa

SEQ ID NO: 262999 - DNA, 30 bp, Artificial Sequence
  Synthetic oligonucleotide
acccaagctttccgagtagcaacggcgcaa

SEQ ID NO: 263000 - DNA, 30 bp, Artificial Sequence
  Synthetic oligonucleotide
gttggtctttgatatagggtaaatgcgcaa

SEQ ID NO: 263001 - DNA, 30 bp, Artificial Sequence
  Synthetic oligonucleotide
attaatattcagtaagcatacggtgcgcaa

SEQ ID NO: 263002 - DNA, 30 bp, Artificial Sequence
  Synthetic oligonucleotide
tattggccctgggctaagtactactcgcaa

SEQ ID NO: 263003 - DNA, 30 bp, Artificial Sequence
  Synthetic oligonucleotide
actgccccgacgttaaactgcccctcgcaa

SEQ ID NO: 263004 - DNA, 30 bp, Artificial Sequence
  Synthetic oligonucleotide
gaaacgcactgaagaggcctgagctcgcaa

SEQ ID NO: 263005 - DNA, 30 bp, Artificial Sequence
  Synthetic oligonucleotide
ggttgtccggcggtagtagaactgtcgcaa

SEQ ID NO: 263006 - DNA, 30 bp, Artificial Sequence
  Synthetic oligonucleotide
tggagtcagacattggtgagcgcttcgcaa

SEQ ID NO: 263007 - DNA, 30 bp, Artificial Sequence
  Synthetic oligonucleotide
tagcctgatcttagcgaccgaggaaggcaa

SEQ ID NO: 263008 - DNA, 30 bp, Artificial Sequence
  Synthetic oligonucleotide
gggagaaccagattgtcctaaataaggcaa

SEQ ID NO: 263009 - DNA, 30 bp, Artificial Sequence
  Synthetic oligonucleotide
ataagtggcttgggccttatacacaggcaa

SEQ ID NO: 263010 - DNA, 30 bp, Artificial Sequence
  Synthetic oligonucleotide
agtcacgaatggcttaatccggccaggcaa

SEQ ID NO: 263011 - DNA, 30 bp, Artificial Sequence
  Synthetic oligonucleotide
gcaatagttaaaaagatccagttcaggcaa

SEQ ID NO: 263012 - DNA, 30 bp, Artificial Sequence
  Synthetic oligonucleotide
tccgtgaagtatcgataacctgagaggcaa

SEQ ID NO: 263013 - DNA, 31 bp, Artificial Sequence
  Synthetic oligonucleotide
tcagaaagtcgggtatacgcctttgaggcaa

SEQ ID NO: 263014 - DNA, 30 bp, Artificial Sequence
  Synthetic oligonucleotide
aatagtatacataacagagggtataggcaa

SEQ ID NO: 263015 - DNA, 29 bp, Artificial Sequence
  Synthetic oligonucleotide
ggtgtatacccgcatctccggttaggcaa

SEQ ID NO: 263016 - DNA, 30 bp, Artificial Sequence
  Synthetic oligonucleotide
aggtacccggcccgttaaggatttaggcaa

SEQ ID NO: 263017 - DNA, 30 bp, Artificial Sequence
  Synthetic oligonucleotide
ggcatcatgccctgtcacgaatcacggcaa

SEQ ID NO: 263018 - DNA, 30 bp, Artificial Sequence
  Synthetic oligonucleotide
ctctcaaggtaggcactaagacgacggcaa

SEQ ID NO: 263019 - DNA, 30 bp, Artificial Sequence
  Synthetic oligonucleotide
tttcgagccctggaacaacctttacggcaa

SEQ ID NO: 263020 - DNA, 30 bp, Artificial Sequence
  Synthetic oligonucleotide
cgtgggtggacccctggcgtcgaccggcaa

SEQ ID NO: 263021 - DNA, 30 bp, Artificial Sequence
  Synthetic oligonucleotide
tgaaatagaaccgtcgacgtacagcggcaa

SEQ ID NO: 263022 - DNA, 30 bp, Artificial Sequence
  Synthetic oligonucleotide
aattaccatatcggggacggcggtcggcaa

SEQ ID NO: 263023 - DNA, 30 bp, Artificial Sequence
  Synthetic oligonucleotide
ctagtagtactattccaagcgtttcggcaa

SEQ ID NO: 263024 - DNA, 30 bp, Artificial Sequence
  Synthetic oligonucleotide
gtgcctctctaggttgaaccatcagggcaa

SEQ ID NO: 263025 - DNA, 30 bp, Artificial Sequence
  Synthetic oligonucleotide
acagccggcatcgggaccaccatcgggcaa

SEQ ID NO: 263026 - DNA, 30 bp, Artificial Sequence
  Synthetic oligonucleotide
attgaataacgacatgtcggataggggcaa

SEQ ID NO: 263027 - DNA, 30 bp, Artificial Sequence
  Synthetic oligonucleotide
agaagtcaaggaatagtttaagcggggcaa

SEQ ID NO: 263028 - DNA, 30 bp, Artificial Sequence
  Synthetic oligonucleotide
tccggtgtataaggtgtctcagcggggcaa

SEQ ID NO: 263029 - DNA, 30 bp, Artificial Sequence
  Synthetic oligonucleotide
ggactagttacgttcagagttgcggggcaa

SEQ ID NO: 263030 - DNA, 30 bp, Artificial Sequence
  Synthetic oligonucleotide
agaatactcgaactatgtgacaatgggcaa

SEQ ID NO: 263031 - DNA, 30 bp, Artificial Sequence
  Synthetic oligonucleotide
gattgttcgtaggggacgtccggatggcaa

SEQ ID NO: 263032 - DNA, 30 bp, Artificial Sequence
  Synthetic oligonucleotide
gcctttcaaaggggcattacgtgatggcaa

SEQ ID NO: 263033 - DNA, 30 bp, Artificial Sequence
  Synthetic oligonucleotide
cagcaggtaaacaaatcagctctatggcaa

SEQ ID NO: 263034 - DNA, 30 bp, Artificial Sequence
  Synthetic oligonucleotide
cgtagcggtggcagccgtgcctagtggcaa

SEQ ID NO: 263035 - DNA, 30 bp, Artificial Sequence
  Synthetic oligonucleotide
tgccataaaccaggtcttaagcgaatgcaa

SEQ ID NO: 263036 - DNA, 30 bp, Artificial Sequence
  Synthetic oligonucleotide
tgattagtgttaatttagggtctcatgcaa

SEQ ID NO: 263037 - DNA, 30 bp, Artificial Sequence
  Synthetic oligonucleotide
tcaatactttcgtcgaaattcgtgatgcaa

SEQ ID NO: 263038 - DNA, 30 bp, Artificial Sequence
  Synthetic oligonucleotide
gagaagtgcactgctattagagatatgcaa

SEQ ID NO: 263039 - DNA, 30 bp, Artificial Sequence
  Synthetic oligonucleotide
cgtatgactcggctgactcccacactgcaa

SEQ ID NO: 263040 - DNA, 30 bp, Artificial Sequence
  Synthetic oligonucleotide
caactccgcgctaggatttatgtactgcaa

SEQ ID NO: 263041 - DNA, 30 bp, Artificial Sequence
  Synthetic oligonucleotide
tgcatggttggcggagatatccacctgcaa

SEQ ID NO: 263042 - DNA, 30 bp, Artificial Sequence
  Synthetic oligonucleotide
gatgcaccttcaatactaatgtccctgcaa

SEQ ID NO: 263043 - DNA, 30 bp, Artificial Sequence
  Synthetic oligonucleotide
actataccgggtcaggtatgaagcctgcaa

SEQ ID NO: 263044 - DNA, 30 bp, Artificial Sequence
  Synthetic oligonucleotide
gtgctcggtaggccaagatgtgcgctgcaa

SEQ ID NO: 263045 - DNA, 30 bp, Artificial Sequence
  Synthetic oligonucleotide
gtcgtagagaagaggcgaattgcgctgcaa

SEQ ID NO: 263046 - DNA, 30 bp, Artificial Sequence
  Synthetic oligonucleotide
tgctttctagagaaaagagccctgctgcaa

SEQ ID NO: 263047 - DNA, 30 bp, Artificial Sequence
  Synthetic oligonucleotide
gtactgggacactttttcatctatctgcaa

SEQ ID NO: 263048 - DNA, 30 bp, Artificial Sequence
  Synthetic oligonucleotide
ttagcgtgtgtattgacgtgcttagtgcaa

SEQ ID NO: 263049 - DNA, 30 bp, Artificial Sequence
  Synthetic oligonucleotide
ttggttacacgagttgcatccccggtgcaa

SEQ ID NO: 263050 - DNA, 30 bp, Artificial Sequence
  Synthetic oligonucleotide
gaaggaaaacattcggaacacgcggtgcaa

SEQ ID NO: 263051 - DNA, 30 bp, Artificial Sequence
  Synthetic oligonucleotide
cgaagatcccatagcatccgacaattgcaa

SEQ ID NO: 263052 - DNA, 30 bp, Artificial Sequence
  Synthetic oligonucleotide
agttccttacacgggcaaagatagttgcaa

SEQ ID NO: 263053 - DNA, 30 bp, Artificial Sequence
  Synthetic oligonucleotide
cttcaatgcgacatacgccatgggttgcaa

SEQ ID NO: 263054 - DNA, 30 bp, Artificial Sequence
  Synthetic oligonucleotide
attaggtgccatcaggtcagcgtgttgcaa

SEQ ID NO: 263055 - DNA, 30 bp, Artificial Sequence
  Synthetic oligonucleotide
gaacgatggtcccaaacctctgttttgcaa

SEQ ID NO: 263056 - DNA, 30 bp, Artificial Sequence
  Synthetic oligonucleotide
tgagatgagtatcatcggagtcgcaatcaa

SEQ ID NO: 263057 - DNA, 30 bp, Artificial Sequence
  Synthetic oligonucleotide
cgccgaaagcgcggccagcactgcaatcaa

SEQ ID NO: 263058 - DNA, 30 bp, Artificial Sequence
  Synthetic oligonucleotide
atggcccttacactaaaaggtatcaatcaa

SEQ ID NO: 263059 - DNA, 30 bp, Artificial Sequence
  Synthetic oligonucleotide
gagcgtatcaatgcagcacgcgcgaatcaa

SEQ ID NO: 263060 - DNA, 30 bp, Artificial Sequence
  Synthetic oligonucleotide
acagctgtccagcagtccttagtgaatcaa

SEQ ID NO: 263061 - DNA, 30 bp, Artificial Sequence
  Synthetic oligonucleotide
attacagaagttacggaaaaggctaatcaa

SEQ ID NO: 263062 - DNA, 30 bp, Artificial Sequence
  Synthetic oligonucleotide
tccgctacctggaatataagggttaatcaa

SEQ ID NO: 263063 - DNA, 30 bp, Artificial Sequence
  Synthetic oligonucleotide
attcggtacacgtccaaaggcaaacatcaa

SEQ ID NO: 263064 - DNA, 30 bp, Artificial Sequence
  Synthetic oligonucleotide
tacctccgtgggttaattcattagcatcaa

SEQ ID NO: 263065 - DNA, 30 bp, Artificial Sequence
  Synthetic oligonucleotide
atgttttttgctagccatagtccgcatcaa

SEQ ID NO: 263066 - DNA, 30 bp, Artificial Sequence
  Synthetic oligonucleotide
gttgtagcgcatgcggctgccctgcatcaa

SEQ ID NO: 263067 - DNA, 30 bp, Artificial Sequence
  Synthetic oligonucleotide
cggttctggatcaaagcgaaagatcatcaa

SEQ ID NO: 263068 - DNA, 30 bp, Artificial Sequence
  Synthetic oligonucleotide
tggcacccagggtcggggtgtcgtcatcaa

SEQ ID NO: 263069 - DNA, 30 bp, Artificial Sequence
  Synthetic oligonucleotide
ccatacccgatgacgtacaagcttcatcaa

SEQ ID NO: 263070 - DNA, 30 bp, Artificial Sequence
  Synthetic oligonucleotide
catcatctcagggcgttcctcacagatcaa

SEQ ID NO: 263071 - DNA, 30 bp, Artificial Sequence
  Synthetic oligonucleotide
aaagtgccgttacataatcaaccagatcaa

SEQ ID NO: 263072 - DNA, 30 bp, Artificial Sequence
  Synthetic oligonucleotide
ctcaaacagcgcaactttactctagatcaa

SEQ ID NO: 263073 - DNA, 30 bp, Artificial Sequence
  Synthetic oligonucleotide
ccagatccaagtcgcccggggcgcgatcaa

SEQ ID NO: 263074 - DNA, 30 bp, Artificial Sequence
  Synthetic oligonucleotide
agtcggcgcgttcaagcgttttgggatcaa

SEQ ID NO: 263075 - DNA, 30 bp, Artificial Sequence
  Synthetic oligonucleotide
agtagttacgcgaattcgtcaacctatcaa

SEQ ID NO: 263076 - DNA, 31 bp, Artificial Sequence
  Synthetic oligonucleotide
gagacatcaggataagacgcccgcctatcaa

SEQ ID NO: 263077 - DNA, 30 bp, Artificial Sequence
  Synthetic oligonucleotide
gattcggtggtggtctcttcgtgctatcaa

SEQ ID NO: 263078 - DNA, 30 bp, Artificial Sequence
  Synthetic oligonucleotide
atacaattatatgagtattcacagtatcaa

SEQ ID NO: 263079 - DNA, 30 bp, Artificial Sequence
  Synthetic oligonucleotide
acccggctagcgacatggaacgagtatcaa

SEQ ID NO: 263080 - DNA, 30 bp, Artificial Sequence
  Synthetic oligonucleotide
tgacccggaaggacgacaatatcgtatcaa

SEQ ID NO: 263081 - DNA, 30 bp, Artificial Sequence
  Synthetic oligonucleotide
ccgagaagggccggtgactttcggtatcaa

SEQ ID NO: 263082 - DNA, 30 bp, Artificial Sequence
  Synthetic oligonucleotide
ctgttacatatctccccaccaatgtatcaa

SEQ ID NO: 263083 - DNA, 30 bp, Artificial Sequence
  Synthetic oligonucleotide
atgagtaggcggagcatcaggtattatcaa

SEQ ID NO: 263084 - DNA, 30 bp, Artificial Sequence
  Synthetic oligonucleotide
tgggagttcgtttggccaacgagaactcaa

SEQ ID NO: 263085 - DNA, 30 bp, Artificial Sequence
  Synthetic oligonucleotide
tggcgaagggtaggatcagtatgaactcaa

SEQ ID NO: 263086 - DNA, 30 bp, Artificial Sequence
  Synthetic oligonucleotide
agctccccctatctgcttacaaacactcaa

SEQ ID NO: 263087 - DNA, 30 bp, Artificial Sequence
  Synthetic oligonucleotide
ttgcgagccatggaaatctaagtcactcaa

SEQ ID NO: 263088 - DNA, 30 bp, Artificial Sequence
  Synthetic oligonucleotide
acaaggacgccttccacaattcctactcaa

SEQ ID NO: 263089 - DNA, 30 bp, Artificial Sequence
  Synthetic oligonucleotide
aatatcaacatctactatacagctactcaa

SEQ ID NO: 263090 - DNA, 30 bp, Artificial Sequence
  Synthetic oligonucleotide
ggactctcgatgggtataatacgtactcaa

SEQ ID NO: 263091 - DNA, 30 bp, Artificial Sequence
  Synthetic oligonucleotide
gtggaggtaataactcatgcagcacctcaa

SEQ ID NO: 263092 - DNA, 30 bp, Artificial Sequence
  Synthetic oligonucleotide
gttcgaattggtggcaaggatgtccctcaa

SEQ ID NO: 263093 - DNA, 30 bp, Artificial Sequence
  Synthetic oligonucleotide
gtatataccagctatcaactaccgcctcaa

SEQ ID NO: 263094 - DNA, 30 bp, Artificial Sequence
  Synthetic oligonucleotide
aatagatagccaggctaagggtggcctcaa

SEQ ID NO: 263095 - DNA, 30 bp, Artificial Sequence
  Synthetic oligonucleotide
tgaacacaggacctgacgtgcatagctcaa

SEQ ID NO: 263096 - DNA, 30 bp, Artificial Sequence
  Synthetic oligonucleotide
cagagggacctgcgttgcataacatctcaa

SEQ ID NO: 263097 - DNA, 30 bp, Artificial Sequence
  Synthetic oligonucleotide
cgcacgcttagattgaagtccggctctcaa

SEQ ID NO: 263098 - DNA, 28 bp, Artificial Sequence
  Synthetic oligonucleotide
ggaataccctttcctgggattgtctcaa

SEQ ID NO: 263099 - DNA, 30 bp, Artificial Sequence
  Synthetic oligonucleotide
ttctatggatggggcgatttggccagtcaa

SEQ ID NO: 263100 - DNA, 30 bp, Artificial Sequence
  Synthetic oligonucleotide
gaaaaaatcgggtaattttggaggagtcaa

SEQ ID NO: 263101 - DNA, 30 bp, Artificial Sequence
  Synthetic oligonucleotide
cccgacgggatccgcactacagggagtcaa

SEQ ID NO: 263102 - DNA, 30 bp, Artificial Sequence
  Synthetic oligonucleotide
agccaggtatgattacaaccgtgtagtcaa

SEQ ID NO: 263103 - DNA, 30 bp, Artificial Sequence
  Synthetic oligonucleotide
aattgggagttattccctgtttgtagtcaa

SEQ ID NO: 263104 - DNA, 30 bp, Artificial Sequence
  Synthetic oligonucleotide
gcagggctccccgagcgtccacggcgtcaa

SEQ ID NO: 263105 - DNA, 30 bp, Artificial Sequence
  Synthetic oligonucleotide
tcggcgttcagtagcttttcgctgcgtcaa

SEQ ID NO: 263106 - DNA, 30 bp, Artificial Sequence
  Synthetic oligonucleotide
acagcacgtggctaccatacacatcgtcaa

SEQ ID NO: 263107 - DNA, 30 bp, Artificial Sequence
  Synthetic oligonucleotide
gggatgatgcgtttgctgggaagaggtcaa

SEQ ID NO: 263108 - DNA, 30 bp, Artificial Sequence
  Synthetic oligonucleotide
tagcgaaagttatcctgtgacgggggtcaa

SEQ ID NO: 263109 - DNA, 30 bp, Artificial Sequence
  Synthetic oligonucleotide
acatgatttgccggcaacgcaagtggtcaa

SEQ ID NO: 263110 - DNA, 30 bp, Artificial Sequence
  Synthetic oligonucleotide
ctcgtgctccatgtgtcgtggtttggtcaa

SEQ ID NO: 263111 - DNA, 30 bp, Artificial Sequence
  Synthetic oligonucleotide
gggggcacccccaaacacgtttagtgtcaa

SEQ ID NO: 263112 - DNA, 30 bp, Artificial Sequence
  Synthetic oligonucleotide
cgaattttagcctgataacctaggtgtcaa

SEQ ID NO: 263113 - DNA, 30 bp, Artificial Sequence
  Synthetic oligonucleotide
aggggggagcttggcgcaacatattgtcaa

SEQ ID NO: 263114 - DNA, 30 bp, Artificial Sequence
  Synthetic oligonucleotide
tgtctctactgccaccttgaaacttgtcaa

SEQ ID NO: 263115 - DNA, 30 bp, Artificial Sequence
  Synthetic oligonucleotide
gacttgctagccctaaattcatgttgtcaa

SEQ ID NO: 263116 - DNA, 30 bp, Artificial Sequence
  Synthetic oligonucleotide
taagccacaaacggtgaggaataaattcaa

SEQ ID NO: 263117 - DNA, 30 bp, Artificial Sequence
  Synthetic oligonucleotide
ggcttcgaaaggaagactgaagcaattcaa

SEQ ID NO: 263118 - DNA, 30 bp, Artificial Sequence
  Synthetic oligonucleotide
gctctcttattagagtaagttagaattcaa

SEQ ID NO: 263119 - DNA, 30 bp, Artificial Sequence
  Synthetic oligonucleotide
cgggcgggtgacccgtcgccacagattcaa

SEQ ID NO: 263120 - DNA, 30 bp, Artificial Sequence
  Synthetic oligonucleotide
tagtgacaagagtcgatgttacagattcaa

SEQ ID NO: 263121 - DNA, 30 bp, Artificial Sequence
  Synthetic oligonucleotide
agctatcgctatgctaacaagcatattcaa

SEQ ID NO: 263122 - DNA, 30 bp, Artificial Sequence
  Synthetic oligonucleotide
caaatgaatacggtgcacgcgcaacttcaa

SEQ ID NO: 263123 - DNA, 30 bp, Artificial Sequence
  Synthetic oligonucleotide
accgtaattatttggaattgcgcacttcaa

SEQ ID NO: 263124 - DNA, 30 bp, Artificial Sequence
  Synthetic oligonucleotide
atttcgtgctgccggtctggacgccttcaa

SEQ ID NO: 263125 - DNA, 30 bp, Artificial Sequence
  Synthetic oligonucleotide
aggttttatatcatgataaagtcgcttcaa

SEQ ID NO: 263126 - DNA, 30 bp, Artificial Sequence
  Synthetic oligonucleotide
ctaatcgcaccgttaagttcctatcttcaa

SEQ ID NO: 263127 - DNA, 30 bp, Artificial Sequence
  Synthetic oligonucleotide
actatggaaaaaaactgccatgtcgttcaa

SEQ ID NO: 263128 - DNA, 30 bp, Artificial Sequence
  Synthetic oligonucleotide
catgtggtactgacttgtcagtaggttcaa

SEQ ID NO: 263129 - DNA, 30 bp, Artificial Sequence
  Synthetic oligonucleotide
tgggccccgagaagccctcagacggttcaa

SEQ ID NO: 263130 - DNA, 30 bp, Artificial Sequence
  Synthetic oligonucleotide
agctgaagctattttgaggccgttgttcaa

SEQ ID NO: 263131 - DNA, 30 bp, Artificial Sequence
  Synthetic oligonucleotide
acgaagcataccaggggttagatatttcaa

SEQ ID NO: 263132 - DNA, 30 bp, Artificial Sequence
  Synthetic oligonucleotide
tgaatggacggcgtacgtgaccactttcaa

SEQ ID NO: 263133 - DNA, 30 bp, Artificial Sequence
  Synthetic oligonucleotide
agaatcgtgagtctctgctacgactttcaa

SEQ ID NO: 263134 - DNA, 30 bp, Artificial Sequence
  Synthetic oligonucleotide
accaacattagactcgcgcctgcgtttcaa

SEQ ID NO: 263135 - DNA, 30 bp, Artificial Sequence
  Synthetic oligonucleotide
ttgcgtatctacggactaacgaggtttcaa

SEQ ID NO: 263136 - DNA, 30 bp, Artificial Sequence
  Synthetic oligonucleotide
tctacatagacatttgagttatggtttcaa

SEQ ID NO: 263137 - DNA, 30 bp, Artificial Sequence
  Synthetic oligonucleotide
aaaggatttagtgggggggagtcttttcaa

SEQ ID NO: 263138 - DNA, 30 bp, Artificial Sequence
  Synthetic oligonucleotide
gagcaagctttagcgaaacgcagttttcaa

SEQ ID NO: 263139 - DNA, 30 bp, Artificial Sequence
  Synthetic oligonucleotide
gggtggaactgtcaacgacaggtttttcaa

SEQ ID NO: 263140 - DNA, 30 bp, Artificial Sequence
  Synthetic oligonucleotide
agttctcatacgtcgtaagtccaaaaagaa

SEQ ID NO: 263141 - DNA, 29 bp, Artificial Sequence
  Synthetic oligonucleotide
tcatggtcgggttaaccgtttgaaaagaa

SEQ ID NO: 263142 - DNA, 30 bp, Artificial Sequence
  Synthetic oligonucleotide
acagtcgacgaatcagtcaaagtaaaagaa

SEQ ID NO: 263143 - DNA, 30 bp, Artificial Sequence
  Synthetic oligonucleotide
agcagctcattcacccacagtaccaaagaa

SEQ ID NO: 263144 - DNA, 30 bp, Artificial Sequence
  Synthetic oligonucleotide
tttgttggagggctatacagatgcaaagaa

SEQ ID NO: 263145 - DNA, 30 bp, Artificial Sequence
  Synthetic oligonucleotide
cttagatatcagtagattgagcataaagaa

SEQ ID NO: 263146 - DNA, 30 bp, Artificial Sequence
  Synthetic oligonucleotide
ggacagtaccccaccacctttactaaagaa

SEQ ID NO: 263147 - DNA, 30 bp, Artificial Sequence
  Synthetic oligonucleotide
tgacgggaaatgcaaaaatgtgtacaagaa

SEQ ID NO: 263148 - DNA, 30 bp, Artificial Sequence
  Synthetic oligonucleotide
acagcattttgaaaatatcgaaaccaagaa

SEQ ID NO: 263149 - DNA, 30 bp, Artificial Sequence
  Synthetic oligonucleotide
gcagatggggctcgtacgtgagaccaagaa

SEQ ID NO: 263150 - DNA, 30 bp, Artificial Sequence
  Synthetic oligonucleotide
agagtcgttttacaagtcccctcccaagaa

SEQ ID NO: 263151 - DNA, 30 bp, Artificial Sequence
  Synthetic oligonucleotide
aaggacacgtacctactacgcgagcaagaa

SEQ ID NO: 263152 - DNA, 30 bp, Artificial Sequence
  Synthetic oligonucleotide
tctaataatatggcaccgcgggggcaagaa

SEQ ID NO: 263153 - DNA, 30 bp, Artificial Sequence
  Synthetic oligonucleotide
ggatataaacaatacttggcaaatcaagaa

SEQ ID NO: 263154 - DNA, 30 bp, Artificial Sequence
  Synthetic oligonucleotide
ttgtccatgggtaagtctgggcgtcaagaa

SEQ ID NO: 263155 - DNA, 30 bp, Artificial Sequence
  Synthetic oligonucleotide
gcttccaaatgtcggggttagggtcaagaa

SEQ ID NO: 263156 - DNA, 30 bp, Artificial Sequence
  Synthetic oligonucleotide
tcccaggtcaatgtgctcaatggtcaagaa

SEQ ID NO: 263157 - DNA, 30 bp, Artificial Sequence
  Synthetic oligonucleotide
atttccgctaacctatcagaggttcaagaa

SEQ ID NO: 263158 - DNA, 30 bp, Artificial Sequence
  Synthetic oligonucleotide
gttcatatgagtccggatagggcagaagaa

SEQ ID NO: 263159 - DNA, 30 bp, Artificial Sequence
  Synthetic oligonucleotide
ggacttcggttaacaggtggcagagaagaa

SEQ ID NO: 263160 - DNA, 30 bp, Artificial Sequence
  Synthetic oligonucleotide
gtgttgatctctagggtgagtcacgaagaa

SEQ ID NO: 263161 - DNA, 30 bp, Artificial Sequence
  Synthetic oligonucleotide
gttcagccagggattgaagcaccggaagaa

SEQ ID NO: 263162 - DNA, 30 bp, Artificial Sequence
  Synthetic oligonucleotide
gaatcgttgtctaacagggcccgggaagaa

SEQ ID NO: 263163 - DNA, 30 bp, Artificial Sequence
  Synthetic oligonucleotide
aactacgagccataggctggaggtgaagaa

SEQ ID NO: 263164 - DNA, 30 bp, Artificial Sequence
  Synthetic oligonucleotide
ttctcccgtaaatataaccctgcataagaa

SEQ ID NO: 263165 - DNA, 30 bp, Artificial Sequence
  Synthetic oligonucleotide
gcgtaatgcgttatcgcttcagactaagaa

SEQ ID NO: 263166 - DNA, 30 bp, Artificial Sequence
  Synthetic oligonucleotide
catccattcgcatcttacagggtctaagaa

SEQ ID NO: 263167 - DNA, 30 bp, Artificial Sequence
  Synthetic oligonucleotide
agcatttcaaaaccaacgacagagtaagaa

SEQ ID NO: 263168 - DNA, 30 bp, Artificial Sequence
  Synthetic oligonucleotide
ttcgataggtcgaccctcgtgttttaagaa

SEQ ID NO: 263169 - DNA, 30 bp, Artificial Sequence
  Synthetic oligonucleotide
tggtcttcacgagtgctctaaaaaacagaa

SEQ ID NO: 263170 - DNA, 30 bp, Artificial Sequence
  Synthetic oligonucleotide
ccacggcagggttagagctccgcaacagaa

SEQ ID NO: 263171 - DNA, 30 bp, Artificial Sequence
  Synthetic oligonucleotide
taagtcaacgatcatcgcgatagcacagaa

SEQ ID NO: 263172 - DNA, 30 bp, Artificial Sequence
  Synthetic oligonucleotide
tcagggcgacgttaagcgactcgcacagaa

SEQ ID NO: 263173 - DNA, 30 bp, Artificial Sequence
  Synthetic oligonucleotide
tgtcatactaaggatactccagggacagaa

SEQ ID NO: 263174 - DNA, 30 bp, Artificial Sequence
  Synthetic oligonucleotide
tatggttagatgggcggaaactgtacagaa

SEQ ID NO: 263175 - DNA, 30 bp, Artificial Sequence
  Synthetic oligonucleotide
ggcttgatgcacggggtaatccttacagaa

SEQ ID NO: 263176 - DNA, 30 bp, Artificial Sequence
  Synthetic oligonucleotide
tcagagtggtacgcctatgcgagaccagaa

SEQ ID NO: 263177 - DNA, 30 bp, Artificial Sequence
  Synthetic oligonucleotide
aagcttctctaatatcttgttcgaccagaa

SEQ ID NO: 263178 - DNA, 30 bp, Artificial Sequence
  Synthetic oligonucleotide
gtcgcctttcctaaccactcgggcccagaa

SEQ ID NO: 263179 - DNA, 30 bp, Artificial Sequence
  Synthetic oligonucleotide
gcagtcgaaatcgcttccgtctagccagaa

SEQ ID NO: 263180 - DNA, 30 bp, Artificial Sequence
  Synthetic oligonucleotide
ggcagggcctcgggttcaataaatccagaa

SEQ ID NO: 263181 - DNA, 30 bp, Artificial Sequence
  Synthetic oligonucleotide
tgctaagggggtcagcatatgtatccagaa

SEQ ID NO: 263182 - DNA, 30 bp, Artificial Sequence
  Synthetic oligonucleotide
gttactgttaaattacatgctccagcagaa

SEQ ID NO: 263183 - DNA, 30 bp, Artificial Sequence
  Synthetic oligonucleotide
gtcgctttactagcacataggcgagcagaa

SEQ ID NO: 263184 - DNA, 30 bp, Artificial Sequence
  Synthetic oligonucleotide
atgcaaatatagaggttcgctcccgcagaa

SEQ ID NO: 263185 - DNA, 30 bp, Artificial Sequence
  Synthetic oligonucleotide
catatgggcgaagtgactggagccgcagaa

SEQ ID NO: 263186 - DNA, 30 bp, Artificial Sequence
  Synthetic oligonucleotide
ctatgccttttcgattacaaaagcgcagaa

SEQ ID NO: 263187 - DNA, 30 bp, Artificial Sequence
  Synthetic oligonucleotide
cgtagcataatggcagaatttcgggcagaa

SEQ ID NO: 263188 - DNA, 30 bp, Artificial Sequence
  Synthetic oligonucleotide
tggtgccggagattgttttaacatgcagaa

SEQ ID NO: 263189 - DNA, 30 bp, Artificial Sequence
  Synthetic oligonucleotide
gtgtttgtgtcgaggtatgtctgtgcagaa

SEQ ID NO: 263190 - DNA, 30 bp, Artificial Sequence
  Synthetic oligonucleotide
gtcacgccactgaagtagggacactcagaa

SEQ ID NO: 263191 - DNA, 30 bp, Artificial Sequence
  Synthetic oligonucleotide
caattcttggcctacataaacgactcagaa

SEQ ID NO: 263192 - DNA, 30 bp, Artificial Sequence
  Synthetic oligonucleotide
attcaagtgcttacaccggtttactcagaa

SEQ ID NO: 263193 - DNA, 30 bp, Artificial Sequence
  Synthetic oligonucleotide
caactggctgttgtggtgctcctgtcagaa

SEQ ID NO: 263194 - DNA, 30 bp, Artificial Sequence
  Synthetic oligonucleotide
tgggtccatcggaatattatagtgtcagaa

SEQ ID NO: 263195 - DNA, 30 bp, Artificial Sequence
  Synthetic oligonucleotide
tgcaatgtgcctgttccatgattaagagaa

SEQ ID NO: 263196 - DNA, 30 bp, Artificial Sequence
  Synthetic oligonucleotide
agcggtataaatagcttagacgacagagaa

SEQ ID NO: 263197 - DNA, 30 bp, Artificial Sequence
  Synthetic oligonucleotide
aaatatggaggaagcatccaggccagagaa

SEQ ID NO: 263198 - DNA, 30 bp, Artificial Sequence
  Synthetic oligonucleotide
ttgtaagaataagcagcgtagtccagagaa

SEQ ID NO: 263199 - DNA, 30 bp, Artificial Sequence
  Synthetic oligonucleotide
gccccaaggcttaccgtgttactcagagaa

SEQ ID NO: 263200 - DNA, 30 bp, Artificial Sequence
  Synthetic oligonucleotide
gggtgacatttagaattttcatggagagaa

SEQ ID NO: 263201 - DNA, 30 bp, Artificial Sequence
  Synthetic oligonucleotide
atttcaggtggttgagggaatttgagagaa

SEQ ID NO: 263202 - DNA, 30 bp, Artificial Sequence
  Synthetic oligonucleotide
cctcgtaggaaatcagcggtcccacgagaa

SEQ ID NO: 263203 - DNA, 30 bp, Artificial Sequence
  Synthetic oligonucleotide
taatgaagcgctacacaagtatgccgagaa

SEQ ID NO: 263204 - DNA, 30 bp, Artificial Sequence
  Synthetic oligonucleotide
ccttttgttatacacaattacaagcgagaa

SEQ ID NO: 263205 - DNA, 28 bp, Artificial Sequence
  Synthetic oligonucleotide
ttatcggaaattgactgcccatcgagaa

SEQ ID NO: 263206 - DNA, 30 bp, Artificial Sequence
  Synthetic oligonucleotide
cttgtcggacaagtgttaggaagtcgagaa

SEQ ID NO: 263207 - DNA, 30 bp, Artificial Sequence
  Synthetic oligonucleotide
agcaagccgtagggcgaacctgttcgagaa

SEQ ID NO: 263208 - DNA, 30 bp, Artificial Sequence
  Synthetic oligonucleotide
ggttaacctctatccaaatgaaaaggagaa

SEQ ID NO: 263209 - DNA, 30 bp, Artificial Sequence
  Synthetic oligonucleotide
tgaggtgcccccaaggccggttaaggagaa

SEQ ID NO: 263210 - DNA, 28 bp, Artificial Sequence
  Synthetic oligonucleotide
aagctgcccaatatcagtctgaggagaa

SEQ ID NO: 263211 - DNA, 30 bp, Artificial Sequence
  Synthetic oligonucleotide
ggcatcaattgcgaacttgattgaggagaa

SEQ ID NO: 263212 - DNA, 30 bp, Artificial Sequence
  Synthetic oligonucleotide
aagtaagggcactccgttaagcgcggagaa

SEQ ID NO: 263213 - DNA, 30 bp, Artificial Sequence
  Synthetic oligonucleotide
gccggcctcgttctgaggtgattgggagaa

SEQ ID NO: 263214 - DNA, 30 bp, Artificial Sequence
  Synthetic oligonucleotide
tttgtcgaattgccagatccgattggagaa

SEQ ID NO: 263215 - DNA, 30 bp, Artificial Sequence
  Synthetic oligonucleotide
ttccggaagggaatgggccggattggagaa

SEQ ID NO: 263216 - DNA, 30 bp, Artificial Sequence
  Synthetic oligonucleotide
cttcggaaaggttaaactacctttggagaa

SEQ ID NO: 263217 - DNA, 30 bp, Artificial Sequence
  Synthetic oligonucleotide
agtgtcgagttgtaaccagtataatgagaa

SEQ ID NO: 263218 - DNA, 30 bp, Artificial Sequence
  Synthetic oligonucleotide
tcgaacgaacggtggtttccgtcatgagaa

SEQ ID NO: 263219 - DNA, 30 bp, Artificial Sequence
  Synthetic oligonucleotide
aactcaattcacggtgcgtggagatgagaa

SEQ ID NO: 263220 - DNA, 30 bp, Artificial Sequence
  Synthetic oligonucleotide
tatgaatcggcagagtccggggtatgagaa

SEQ ID NO: 263221 - DNA, 30 bp, Artificial Sequence
  Synthetic oligonucleotide
gacaattttcatgaatttagcagctgagaa

SEQ ID NO: 263222 - DNA, 30 bp, Artificial Sequence
  Synthetic oligonucleotide
ttggtagacgtatatcttgggcagtgagaa

SEQ ID NO: 263223 - DNA, 30 bp, Artificial Sequence
  Synthetic oligonucleotide
agatcaatcgtctcatggtgtctgtgagaa

SEQ ID NO: 263224 - DNA, 30 bp, Artificial Sequence
  Synthetic oligonucleotide
cccctgagtcatggtgtcctaagttgagaa

SEQ ID NO: 263225 - DNA, 30 bp, Artificial Sequence
  Synthetic oligonucleotide
tgattacatccaaggcattagaaaatagaa

SEQ ID NO: 263226 - DNA, 30 bp, Artificial Sequence
  Synthetic oligonucleotide
gtggccgggttacataggcgtcaaatagaa

SEQ ID NO: 263227 - DNA, 30 bp, Artificial Sequence
  Synthetic oligonucleotide
tccgcactgacgcaatttatcaccatagaa

SEQ ID NO: 263228 - DNA, 30 bp, Artificial Sequence
  Synthetic oligonucleotide
gatgctccggctgagggcgtaagcatagaa

SEQ ID NO: 263229 - DNA, 30 bp, Artificial Sequence
  Synthetic oligonucleotide
gaggttgtgctatgtctcggcttgatagaa

SEQ ID NO: 263230 - DNA, 30 bp, Artificial Sequence
  Synthetic oligonucleotide
atcgagggcgtactaatacaacgtatagaa

SEQ ID NO: 263231 - DNA, 30 bp, Artificial Sequence
  Synthetic oligonucleotide
gtgtggcaatacctagactaagttatagaa

SEQ ID NO: 263232 - DNA, 30 bp, Artificial Sequence
  Synthetic oligonucleotide
cggtgtggagtaagttgtgagtcactagaa

SEQ ID NO: 263233 - DNA, 30 bp, Artificial Sequence
  Synthetic oligonucleotide
cagtaattgtaggaccgaatcctactagaa

SEQ ID NO: 263234 - DNA, 30 bp, Artificial Sequence
  Synthetic oligonucleotide
gatttatccctgccacgagtctgtctagaa

SEQ ID NO: 263235 - DNA, 30 bp, Artificial Sequence
  Synthetic oligonucleotide
gctgatccggcggtaagagcgtgtctagaa

SEQ ID NO: 263236 - DNA, 30 bp, Artificial Sequence
  Synthetic oligonucleotide
ttaattacggggagtggaacgattctagaa

SEQ ID NO: 263237 - DNA, 30 bp, Artificial Sequence
  Synthetic oligonucleotide
actcagttgtgttatgggagcgttctagaa

SEQ ID NO: 263238 - DNA, 30 bp, Artificial Sequence
  Synthetic oligonucleotide
ctgttcctactggcctaagggcgagtagaa

SEQ ID NO: 263239 - DNA, 30 bp, Artificial Sequence
  Synthetic oligonucleotide
atccggttccagtacagaaaaccggtagaa

SEQ ID NO: 263240 - DNA, 30 bp, Artificial Sequence
  Synthetic oligonucleotide
ccgtatcagcttctctgacccattgtagaa

SEQ ID NO: 263241 - DNA, 30 bp, Artificial Sequence
  Synthetic oligonucleotide
gggtaggacgcgttgttgaaaaaattagaa

SEQ ID NO: 263242 - DNA, 30 bp, Artificial Sequence
  Synthetic oligonucleotide
gaaccggctggcccttataggtaattagaa

SEQ ID NO: 263243 - DNA, 30 bp, Artificial Sequence
  Synthetic oligonucleotide
gtacattataatatctttagccgattagaa

SEQ ID NO: 263244 - DNA, 30 bp, Artificial Sequence
  Synthetic oligonucleotide
ggcactaacttactgagattagacttagaa

SEQ ID NO: 263245 - DNA, 30 bp, Artificial Sequence
  Synthetic oligonucleotide
aattgaaacggaagagtcctctggttagaa

SEQ ID NO: 263246 - DNA, 30 bp, Artificial Sequence
  Synthetic oligonucleotide
gcatctgaaagacgcggttttggcaacgaa

SEQ ID NO: 263247 - DNA, 30 bp, Artificial Sequence
  Synthetic oligonucleotide
taggaccagccctttctgtaaaggaacgaa

SEQ ID NO: 263248 - DNA, 30 bp, Artificial Sequence
  Synthetic oligonucleotide
tgtgatactacctttgtcgatatgaacgaa

SEQ ID NO: 263249 - DNA, 30 bp, Artificial Sequence
  Synthetic oligonucleotide
acgcaacggggattcaccttcgctaacgaa

SEQ ID NO: 263250 - DNA, 30 bp, Artificial Sequence
  Synthetic oligonucleotide
gcaaatgtcaccagtttattcattaacgaa

SEQ ID NO: 263251 - DNA, 30 bp, Artificial Sequence
  Synthetic oligonucleotide
tgaactttgtaaactcacattcttaacgaa

SEQ ID NO: 263252 - DNA, 30 bp, Artificial Sequence
  Synthetic oligonucleotide
cctcgcagtttgtaaacgcgcgcacacgaa

SEQ ID NO: 263253 - DNA, 30 bp, Artificial Sequence
  Synthetic oligonucleotide
gtaggagggcccgccggtaaaagacacgaa

SEQ ID NO: 263254 - DNA, 30 bp, Artificial Sequence
  Synthetic oligonucleotide
ctctccccactagacttaatgggggacgaa

SEQ ID NO: 263255 - DNA, 30 bp, Artificial Sequence
  Synthetic oligonucleotide
aatttaacgagcatgaaagcatttgacgaa

SEQ ID NO: 263256 - DNA, 30 bp, Artificial Sequence
  Synthetic oligonucleotide
acgcagaatcctaaagtccctccatacgaa

SEQ ID NO: 263257 - DNA, 30 bp, Artificial Sequence
  Synthetic oligonucleotide
tacatctaggaagaagtttctcgctacgaa

SEQ ID NO: 263258 - DNA, 30 bp, Artificial Sequence
  Synthetic oligonucleotide
agagggggttacaggactgaagattacgaa

SEQ ID NO: 263259 - DNA, 30 bp, Artificial Sequence
  Synthetic oligonucleotide
gatcgtaccacccctatttatccaaccgaa

SEQ ID NO: 263260 - DNA, 30 bp, Artificial Sequence
  Synthetic oligonucleotide
tctcatactcttgacgcgtgtgtaaccgaa

SEQ ID NO: 263261 - DNA, 30 bp, Artificial Sequence
  Synthetic oligonucleotide
tggctcgggttccaagcggacacgaccgaa

SEQ ID NO: 263262 - DNA, 30 bp, Artificial Sequence
  Synthetic oligonucleotide
ggagttctgattaagaaagccaggaccgaa

SEQ ID NO: 263263 - DNA, 30 bp, Artificial Sequence
  Synthetic oligonucleotide
taatattcccacgggttctacgggaccgaa

SEQ ID NO: 263264 - DNA, 30 bp, Artificial Sequence
  Synthetic oligonucleotide
taacgcactagagcaccggtcctgaccgaa

SEQ ID NO: 263265 - DNA, 30 bp, Artificial Sequence
  Synthetic oligonucleotide
aaccaggagttacgggcaggaacacccgaa

SEQ ID NO: 263266 - DNA, 30 bp, Artificial Sequence
  Synthetic oligonucleotide
gacgtagtaatgggccgctatacacccgaa

SEQ ID NO: 263267 - DNA, 30 bp, Artificial Sequence
  Synthetic oligonucleotide
gggaagcgcaactcaggcgaataccccgaa

SEQ ID NO: 263268 - DNA, 30 bp, Artificial Sequence
  Synthetic oligonucleotide
tggacacttgcttgatttcgcgggcccgaa

SEQ ID NO: 263269 - DNA, 30 bp, Artificial Sequence
  Synthetic oligonucleotide
attcgggaactatgaaggggcttgcccgaa

SEQ ID NO: 263270 - DNA, 30 bp, Artificial Sequence
  Synthetic oligonucleotide
cttcgacgcgtatcgacaactggtcccgaa

SEQ ID NO: 263271 - DNA, 30 bp, Artificial Sequence
  Synthetic oligonucleotide
ctgctgggcgactaggtgatctaggccgaa

SEQ ID NO: 263272 - DNA, 30 bp, Artificial Sequence
  Synthetic oligonucleotide
gggcttaggtggacgcgtgcggctgccgaa

SEQ ID NO: 263273 - DNA, 30 bp, Artificial Sequence
  Synthetic oligonucleotide
cagggcatatactctcgcgctcgtgccgaa

SEQ ID NO: 263274 - DNA, 30 bp, Artificial Sequence
  Synthetic oligonucleotide
cgtcgattatacgagcagacacttgccgaa

SEQ ID NO: 263275 - DNA, 30 bp, Artificial Sequence
  Synthetic oligonucleotide
ggttacggctcgaactctcggtactccgaa

SEQ ID NO: 263276 - DNA, 28 bp, Artificial Sequence
  Synthetic oligonucleotide
tcgtggcgcctctcaccgatagtccgaa

SEQ ID NO: 263277 - DNA, 30 bp, Artificial Sequence
  Synthetic oligonucleotide
ttaatgggatcatactttacaacttccgaa

SEQ ID NO: 263278 - DNA, 30 bp, Artificial Sequence
  Synthetic oligonucleotide
ataagttggatttgttaagtcatttccgaa

SEQ ID NO: 263279 - DNA, 30 bp, Artificial Sequence
  Synthetic oligonucleotide
cgctgtcaaatctaaaagtctaccagcgaa

SEQ ID NO: 263280 - DNA, 30 bp, Artificial Sequence
  Synthetic oligonucleotide
aacaaaaggggtgatcctgagttcagcgaa

SEQ ID NO: 263281 - DNA, 30 bp, Artificial Sequence
  Synthetic oligonucleotide
aaccaagatgcagataataccctgagcgaa

SEQ ID NO: 263282 - DNA, 30 bp, Artificial Sequence
  Synthetic oligonucleotide
gagcaaatgctaagctcttctgaccgcgaa

SEQ ID NO: 263283 - DNA, 30 bp, Artificial Sequence
  Synthetic oligonucleotide
gtgtcctacctctctcgccaaattcgcgaa

SEQ ID NO: 263284 - DNA, 30 bp, Artificial Sequence
  Synthetic oligonucleotide
cgggtcaccgtggttttatctgaaggcgaa

SEQ ID NO: 263285 - DNA, 30 bp, Artificial Sequence
  Synthetic oligonucleotide
cctcgtgtagcccataaggcttacggcgaa

SEQ ID NO: 263286 - DNA, 30 bp, Artificial Sequence
  Synthetic oligonucleotide
gcatttgcgcgctggtcaggcaccggcgaa

SEQ ID NO: 263287 - DNA, 30 bp, Artificial Sequence
  Synthetic oligonucleotide
cattgtgaaaacgatgctcttgccggcgaa

SEQ ID NO: 263288 - DNA, 30 bp, Artificial Sequence
  Synthetic oligonucleotide
caagaccatgaccgttccagttccggcgaa

SEQ ID NO: 263289 - DNA, 30 bp, Artificial Sequence
  Synthetic oligonucleotide
cgcggttgatgtagtcatataggcggcgaa

SEQ ID NO: 263290 - DNA, 30 bp, Artificial Sequence
  Synthetic oligonucleotide
gttgggcattacgatccgtacagtggcgaa

SEQ ID NO: 263291 - DNA, 30 bp, Artificial Sequence
  Synthetic oligonucleotide
tgaggttctacctcgcccctaggctgcgaa

SEQ ID NO: 263292 - DNA, 30 bp, Artificial Sequence
  Synthetic oligonucleotide
tagcagcctagtacagcggctcaaatcgaa

SEQ ID NO: 263293 - DNA, 30 bp, Artificial Sequence
  Synthetic oligonucleotide
actgttgggattgacggcggtttaatcgaa

SEQ ID NO: 263294 - DNA, 30 bp, Artificial Sequence
  Synthetic oligonucleotide
tctggagcggaccatcatgcaaatatcgaa

SEQ ID NO: 263295 - DNA, 30 bp, Artificial Sequence
  Synthetic oligonucleotide
cttcacacggtacgcgggctcgagctcgaa

SEQ ID NO: 263296 - DNA, 30 bp, Artificial Sequence
  Synthetic oligonucleotide
gactgtgggaataccgatggatagctcgaa

SEQ ID NO: 263297 - DNA, 30 bp, Artificial Sequence
  Synthetic oligonucleotide
tacgtgtccggttcagtcagggttctcgaa

SEQ ID NO: 263298 - DNA, 30 bp, Artificial Sequence
  Synthetic oligonucleotide
ttggcaacgaattacgagcccggagtcgaa

SEQ ID NO: 263299 - DNA, 30 bp, Artificial Sequence
  Synthetic oligonucleotide
taacggtcgtagcccgtgttcgtagtcgaa

SEQ ID NO: 263300 - DNA, 30 bp, Artificial Sequence
  Synthetic oligonucleotide
accaagagaaaagcatccgtataggtcgaa

SEQ ID NO: 263301 - DNA, 30 bp, Artificial Sequence
  Synthetic oligonucleotide
tcgctagccgttaacccgaaggcggtcgaa

SEQ ID NO: 263302 - DNA, 30 bp, Artificial Sequence
  Synthetic oligonucleotide
attgtacagtctcggcgtagtgttgtcgaa

SEQ ID NO: 263303 - DNA, 30 bp, Artificial Sequence
  Synthetic oligonucleotide
tccaaatcgctagtcacggtatttgtcgaa

SEQ ID NO: 263304 - DNA, 30 bp, Artificial Sequence
  Synthetic oligonucleotide
caattattttacaaaatatgaccgttcgaa

SEQ ID NO: 263305 - DNA, 30 bp, Artificial Sequence
  Synthetic oligonucleotide
gctatttgtgggttggatactaggttcgaa

SEQ ID NO: 263306 - DNA, 30 bp, Artificial Sequence
  Synthetic oligonucleotide
cggtaatgaccaagtttatcactgttcgaa

SEQ ID NO: 263307 - DNA, 30 bp, Artificial Sequence
  Synthetic oligonucleotide
acctgcaggggacacttactgctgttcgaa

SEQ ID NO: 263308 - DNA, 30 bp, Artificial Sequence
  Synthetic oligonucleotide
cattcctggaagtaggatcgatcaaaggaa

SEQ ID NO: 263309 - DNA, 30 bp, Artificial Sequence
  Synthetic oligonucleotide
tgaggtccgcgtccgcatcggagcaaggaa

SEQ ID NO: 263310 - DNA, 30 bp, Artificial Sequence
  Synthetic oligonucleotide
cataccggcatgtacactacagtcaaggaa

SEQ ID NO: 263311 - DNA, 30 bp, Artificial Sequence
  Synthetic oligonucleotide
agttttaaactcagtagccgggtgaaggaa

SEQ ID NO: 263312 - DNA, 30 bp, Artificial Sequence
  Synthetic oligonucleotide
actgttactgttggtatatcgaataaggaa

SEQ ID NO: 263313 - DNA, 30 bp, Artificial Sequence
  Synthetic oligonucleotide
tgacgtactccgatttcacaaacacaggaa

SEQ ID NO: 263314 - DNA, 30 bp, Artificial Sequence
  Synthetic oligonucleotide
agggaggcgtgaaggacacggttccaggaa

SEQ ID NO: 263315 - DNA, 30 bp, Artificial Sequence
  Synthetic oligonucleotide
gtgttactcccacgaccaaaatcgcaggaa

SEQ ID NO: 263316 - DNA, 30 bp, Artificial Sequence
  Synthetic oligonucleotide
actgtcgcggcgactggctgaaggcaggaa

SEQ ID NO: 263317 - DNA, 30 bp, Artificial Sequence
  Synthetic oligonucleotide
tagcgtcatctgtgccggggctggcaggaa

SEQ ID NO: 263318 - DNA, 30 bp, Artificial Sequence
  Synthetic oligonucleotide
gtattggctgatacattgcatgctcaggaa

SEQ ID NO: 263319 - DNA, 30 bp, Artificial Sequence
  Synthetic oligonucleotide
gaactgcgtacgttacgtcacgttcaggaa

SEQ ID NO: 263320 - DNA, 30 bp, Artificial Sequence
  Synthetic oligonucleotide
ctctaaacgttaaagtgcaaggttcaggaa

SEQ ID NO: 263321 - DNA, 30 bp, Artificial Sequence
  Synthetic oligonucleotide
ccacattcctagtctaaaaattaagaggaa

SEQ ID NO: 263322 - DNA, 30 bp, Artificial Sequence
  Synthetic oligonucleotide
taaccgacctctagacgtggagaggaggaa

SEQ ID NO: 263323 - DNA, 30 bp, Artificial Sequence
  Synthetic oligonucleotide
gcaattgatagtaggagatagagggaggaa

SEQ ID NO: 263324 - DNA, 30 bp, Artificial Sequence
  Synthetic oligonucleotide
tcgcttgctatgtaaccgcacagtgaggaa

SEQ ID NO: 263325 - DNA, 30 bp, Artificial Sequence
  Synthetic oligonucleotide
ttgggcaggtctggcgattggggtgaggaa

SEQ ID NO: 263326 - DNA, 30 bp, Artificial Sequence
  Synthetic oligonucleotide
gtgagacactggcacactttggggtaggaa

SEQ ID NO: 263327 - DNA, 30 bp, Artificial Sequence
  Synthetic oligonucleotide
ccgggtattccgacattttcttggtaggaa

SEQ ID NO: 263328 - DNA, 30 bp, Artificial Sequence
  Synthetic oligonucleotide
tacggccggtcagcctcagggtattaggaa

SEQ ID NO: 263329 - DNA, 30 bp, Artificial Sequence
  Synthetic oligonucleotide
ttagtgggcgataggttcccgccaacggaa

SEQ ID NO: 263330 - DNA, 30 bp, Artificial Sequence
  Synthetic oligonucleotide
tgtattacgtaagattgagcatcaacggaa

SEQ ID NO: 263331 - DNA, 30 bp, Artificial Sequence
  Synthetic oligonucleotide
tgctcaccggagggtagtttttcaacggaa

SEQ ID NO: 263332 - DNA, 30 bp, Artificial Sequence
  Synthetic oligonucleotide
cgaataaagtaaagttcctatcacacggaa

SEQ ID NO: 263333 - DNA, 30 bp, Artificial Sequence
  Synthetic oligonucleotide
gagtcggctggaatcaacagccagacggaa

SEQ ID NO: 263334 - DNA, 30 bp, Artificial Sequence
  Synthetic oligonucleotide
cgattcccctttaaatccgactatacggaa

SEQ ID NO: 263335 - DNA, 30 bp, Artificial Sequence
  Synthetic oligonucleotide
atactacaacggggtcggtggccaccggaa

SEQ ID NO: 263336 - DNA, 30 bp, Artificial Sequence
  Synthetic oligonucleotide
agccagtatcatggccaactactaccggaa

SEQ ID NO: 263337 - DNA, 30 bp, Artificial Sequence
  Synthetic oligonucleotide
acgctgctgggataataggcggacccggaa

SEQ ID NO: 263338 - DNA, 30 bp, Artificial Sequence
  Synthetic oligonucleotide
aattagcgccaacacgtcataatcccggaa

SEQ ID NO: 263339 - DNA, 30 bp, Artificial Sequence
  Synthetic oligonucleotide
tagatgaccgtgcttatacattggccggaa

SEQ ID NO: 263340 - DNA, 30 bp, Artificial Sequence
  Synthetic oligonucleotide
tagtgctcagcgagtgtatacgatccggaa

SEQ ID NO: 263341 - DNA, 30 bp, Artificial Sequence
  Synthetic oligonucleotide
tcatcacgttggcaactatccggtccggaa

SEQ ID NO: 263342 - DNA, 30 bp, Artificial Sequence
  Synthetic oligonucleotide
agaaccagcctccgttaagcaaaagcggaa

SEQ ID NO: 263343 - DNA, 30 bp, Artificial Sequence
  Synthetic oligonucleotide
gctcacttcaatattctgcaatgagcggaa

SEQ ID NO: 263344 - DNA, 30 bp, Artificial Sequence
  Synthetic oligonucleotide
gataatcaccgtgacagatggagcgcggaa

SEQ ID NO: 263345 - DNA, 30 bp, Artificial Sequence
  Synthetic oligonucleotide
acatttcgcgtcattacattatatgcggaa

SEQ ID NO: 263346 - DNA, 30 bp, Artificial Sequence
  Synthetic oligonucleotide
agggtgatgagcgagttgcactcatcggaa

SEQ ID NO: 263347 - DNA, 30 bp, Artificial Sequence
  Synthetic oligonucleotide
tcagggtgctttaatcctataagatcggaa

SEQ ID NO: 263348 - DNA, 30 bp, Artificial Sequence
  Synthetic oligonucleotide
gctagagtccggtaaattacgttatcggaa

SEQ ID NO: 263349 - DNA, 30 bp, Artificial Sequence
  Synthetic oligonucleotide
tgttgcggcacaatcgtgaattcgtcggaa

SEQ ID NO: 263350 - DNA, 30 bp, Artificial Sequence
  Synthetic oligonucleotide
cttcaaaacagcacggaaacgctttcggaa

SEQ ID NO: 263351 - DNA, 30 bp, Artificial Sequence
  Synthetic oligonucleotide
agccggggtcagcctgtcgatgtaagggaa

SEQ ID NO: 263352 - DNA, 30 bp, Artificial Sequence
  Synthetic oligonucleotide
tcgaactatccataggggaacgtcagggaa

SEQ ID NO: 263353 - DNA, 30 bp, Artificial Sequence
  Synthetic oligonucleotide
tgtcctctcggcatgatgtttagtagggaa

SEQ ID NO: 263354 - DNA, 30 bp, Artificial Sequence
  Synthetic oligonucleotide
gtgattttcactggttccgagagccgggaa

SEQ ID NO: 263355 - DNA, 30 bp, Artificial Sequence
  Synthetic oligonucleotide
gttagagttagtgcaaatgcctagcgggaa

SEQ ID NO: 263356 - DNA, 30 bp, Artificial Sequence
  Synthetic oligonucleotide
aggttgaacgcagacggaccggggcgggaa

SEQ ID NO: 263357 - DNA, 30 bp, Artificial Sequence
  Synthetic oligonucleotide
gaacggttcgtttttcatatcctgcgggaa

SEQ ID NO: 263358 - DNA, 30 bp, Artificial Sequence
  Synthetic oligonucleotide
ccggttagcccataattggctgatcgggaa

SEQ ID NO: 263359 - DNA, 30 bp, Artificial Sequence
  Synthetic oligonucleotide
atttaatgcgtggcgggcgattgtcgggaa

SEQ ID NO: 263360 - DNA, 30 bp, Artificial Sequence
  Synthetic oligonucleotide
gttaaaactcttaagtcaaaaaaaggggaa

SEQ ID NO: 263361 - DNA, 30 bp, Artificial Sequence
  Synthetic oligonucleotide
actctgtatgttcgcgtaacctaaggggaa

SEQ ID NO: 263362 - DNA, 30 bp, Artificial Sequence
  Synthetic oligonucleotide
ttcagcatgatcagcctggccgacggggaa

SEQ ID NO: 263363 - DNA, 30 bp, Artificial Sequence
  Synthetic oligonucleotide
aaacatatggtaccaggtacattcggggaa

SEQ ID NO: 263364 - DNA, 30 bp, Artificial Sequence
  Synthetic oligonucleotide
atgaaacagctattaaatgcagagggggaa

SEQ ID NO: 263365 - DNA, 30 bp, Artificial Sequence
  Synthetic oligonucleotide
gagacacctgaaatggtcataccgggggaa

SEQ ID NO: 263366 - DNA, 30 bp, Artificial Sequence
  Synthetic oligonucleotide
tgtcgatattcagtgctgagagctggggaa

SEQ ID NO: 263367 - DNA, 30 bp, Artificial Sequence
  Synthetic oligonucleotide
cgtttatcggctggcactccgattggggaa

SEQ ID NO: 263368 - DNA, 30 bp, Artificial Sequence
  Synthetic oligonucleotide
gcagtctagctaactttttgcgaatgggaa

SEQ ID NO: 263369 - DNA, 30 bp, Artificial Sequence
  Synthetic oligonucleotide
ctatacagcatttaaatgtaccactgggaa

SEQ ID NO: 263370 - DNA, 30 bp, Artificial Sequence
  Synthetic oligonucleotide
catggtcctggctataccctgccctgggaa

SEQ ID NO: 263371 - DNA, 30 bp, Artificial Sequence
  Synthetic oligonucleotide
agcgagtttgtggcgtgtccctgctgggaa

SEQ ID NO: 263372 - DNA, 30 bp, Artificial Sequence
  Synthetic oligonucleotide
aagaggggctactggctatattagtgggaa

SEQ ID NO: 263373 - DNA, 30 bp, Artificial Sequence
  Synthetic oligonucleotide
tgcggactgatatccctatcacggtgggaa

SEQ ID NO: 263374 - DNA, 30 bp, Artificial Sequence
  Synthetic oligonucleotide
ggtgacgcgtaacaggctggatggtgggaa

SEQ ID NO: 263375 - DNA, 30 bp, Artificial Sequence
  Synthetic oligonucleotide
ctcttgtaagataattcatatgtgtgggaa

SEQ ID NO: 263376 - DNA, 30 bp, Artificial Sequence
  Synthetic oligonucleotide
ggcgcaacgagcatacaggatagttgggaa

SEQ ID NO: 263377 - DNA, 30 bp, Artificial Sequence
  Synthetic oligonucleotide
gaaaggggtacagtgaattacggttgggaa

SEQ ID NO: 263378 - DNA, 30 bp, Artificial Sequence
  Synthetic oligonucleotide
ccgatcaaagatctacgggaatttatggaa

SEQ ID NO: 263379 - DNA, 30 bp, Artificial Sequence
  Synthetic oligonucleotide
tgtctgtagaacacggaatctcaactggaa

SEQ ID NO: 263380 - DNA, 30 bp, Artificial Sequence
  Synthetic oligonucleotide
aactagggctaacaagggactccactggaa

SEQ ID NO: 263381 - DNA, 30 bp, Artificial Sequence
  Synthetic oligonucleotide
cggtattcaataacgagagttatactggaa

SEQ ID NO: 263382 - DNA, 30 bp, Artificial Sequence
  Synthetic oligonucleotide
agggtaaactagctgtatagggtactggaa

SEQ ID NO: 263383 - DNA, 30 bp, Artificial Sequence
  Synthetic oligonucleotide
cctcaattgacccaacttgatgagctggaa

SEQ ID NO: 263384 - DNA, 30 bp, Artificial Sequence
  Synthetic oligonucleotide
caccatttgggtaccgtgttacatctggaa

SEQ ID NO: 263385 - DNA, 30 bp, Artificial Sequence
  Synthetic oligonucleotide
gttacgcattggaacgggtttcatctggaa

SEQ ID NO: 263386 - DNA, 30 bp, Artificial Sequence
  Synthetic oligonucleotide
catttacctatcgcttaatgcgtagtggaa

SEQ ID NO: 263387 - DNA, 30 bp, Artificial Sequence
  Synthetic oligonucleotide
gactgagagcacgcgatctggtgcgtggaa

SEQ ID NO: 263388 - DNA, 30 bp, Artificial Sequence
  Synthetic oligonucleotide
caaaccgggagcgaccggaggggggtggaa

SEQ ID NO: 263389 - DNA, 30 bp, Artificial Sequence
  Synthetic oligonucleotide
ggacacctagaactgcaagtgtgggtggaa

SEQ ID NO: 263390 - DNA, 30 bp, Artificial Sequence
  Synthetic oligonucleotide
ctgcagtgatcccagagcgtaagtgtggaa

SEQ ID NO: 263391 - DNA, 29 bp, Artificial Sequence
  Synthetic oligonucleotide
gtgtgggagcgttggcaagtgaattggaa

SEQ ID NO: 263392 - DNA, 30 bp, Artificial Sequence
  Synthetic oligonucleotide
tcatagtccatatagaataagggattggaa

SEQ ID NO: 263393 - DNA, 30 bp, Artificial Sequence
  Synthetic oligonucleotide
gctaggaggcgacgtgggtctggattggaa

SEQ ID NO: 263394 - DNA, 30 bp, Artificial Sequence
  Synthetic oligonucleotide
gtcatacacctagatctcgcctgattggaa

SEQ ID NO: 263395 - DNA, 30 bp, Artificial Sequence
  Synthetic oligonucleotide
tcctagccgctctcggaacggaacttggaa

SEQ ID NO: 263396 - DNA, 30 bp, Artificial Sequence
  Synthetic oligonucleotide
accgagagtgtaggccagcctgacttggaa

SEQ ID NO: 263397 - DNA, 30 bp, Artificial Sequence
  Synthetic oligonucleotide
aatgctggcacctgcccagctctcttggaa

SEQ ID NO: 263398 - DNA, 30 bp, Artificial Sequence
  Synthetic oligonucleotide
gagagcatacatgtggtacgcgctttggaa

SEQ ID NO: 263399 - DNA, 30 bp, Artificial Sequence
  Synthetic oligonucleotide
aatgggctagactagttacaaagtttggaa

SEQ ID NO: 263400 - DNA, 30 bp, Artificial Sequence
  Synthetic oligonucleotide
aggcatcccgatagagcatctcttttggaa

SEQ ID NO: 263401 - DNA, 30 bp, Artificial Sequence
  Synthetic oligonucleotide
tactcccaccaaatatttcgcaaaaatgaa

SEQ ID NO: 263402 - DNA, 30 bp, Artificial Sequence
  Synthetic oligonucleotide
ccttcgggaccctggaagagtccaaatgaa

SEQ ID NO: 263403 - DNA, 30 bp, Artificial Sequence
  Synthetic oligonucleotide
gtacaataatctcctctcagctcaaatgaa

SEQ ID NO: 263404 - DNA, 30 bp, Artificial Sequence
  Synthetic oligonucleotide
attaagtgtcttcgttggcggtgaaatgaa

SEQ ID NO: 263405 - DNA, 30 bp, Artificial Sequence
  Synthetic oligonucleotide
tcactaagcacggcccgcgcggccaatgaa

SEQ ID NO: 263406 - DNA, 30 bp, Artificial Sequence
  Synthetic oligonucleotide
ttcaccaaatccagcatgaaacagaatgaa

SEQ ID NO: 263407 - DNA, 30 bp, Artificial Sequence
  Synthetic oligonucleotide
gtattgcacagtatcaagactaggaatgaa

SEQ ID NO: 263408 - DNA, 30 bp, Artificial Sequence
  Synthetic oligonucleotide
tagggagtttgatactgtggaatgaatgaa

SEQ ID NO: 263409 - DNA, 30 bp, Artificial Sequence
  Synthetic oligonucleotide
cctgttgtcaggttagaaaatatgaatgaa

SEQ ID NO: 263410 - DNA, 30 bp, Artificial Sequence
  Synthetic oligonucleotide
ccgcggaacgcttaccttgaccataatgaa

SEQ ID NO: 263411 - DNA, 30 bp, Artificial Sequence
  Synthetic oligonucleotide
gggaaaaatatcatcttaatgggtaatgaa

SEQ ID NO: 263412 - DNA, 30 bp, Artificial Sequence
  Synthetic oligonucleotide
ctctctgatcgctcaggggacattaatgaa

SEQ ID NO: 263413 - DNA, 30 bp, Artificial Sequence
  Synthetic oligonucleotide
gacacggctagcaatgctgctcgacatgaa

SEQ ID NO: 263414 - DNA, 30 bp, Artificial Sequence
  Synthetic oligonucleotide
ctcccgagctggcccttaatatgacatgaa

SEQ ID NO: 263415 - DNA, 30 bp, Artificial Sequence
  Synthetic oligonucleotide
agacgcagggtgcaggaacgactacatgaa

SEQ ID NO: 263416 - DNA, 30 bp, Artificial Sequence
  Synthetic oligonucleotide
tacatggacctcaattaaggaccccatgaa

SEQ ID NO: 263417 - DNA, 30 bp, Artificial Sequence
  Synthetic oligonucleotide
gtagccggcaccaagccgagatcccatgaa

SEQ ID NO: 263418 - DNA, 30 bp, Artificial Sequence
  Synthetic oligonucleotide
acatattataagcgcgtggcacgtcatgaa

SEQ ID NO: 263419 - DNA, 30 bp, Artificial Sequence
  Synthetic oligonucleotide
tggaacatctcgtcagagacggaagatgaa

SEQ ID NO: 263420 - DNA, 30 bp, Artificial Sequence
  Synthetic oligonucleotide
agggaatattttagacatcgttgagatgaa

SEQ ID NO: 263421 - DNA, 31 bp, Artificial Sequence
  Synthetic oligonucleotide
atcttcgaaacggtcatgagggacatatgaa

SEQ ID NO: 263422 - DNA, 30 bp, Artificial Sequence
  Synthetic oligonucleotide
caggtgttgctacgccaacgtagatatgaa

SEQ ID NO: 263423 - DNA, 30 bp, Artificial Sequence
  Synthetic oligonucleotide
gtaaaacgccagacgccaccgggatatgaa

SEQ ID NO: 263424 - DNA, 30 bp, Artificial Sequence
  Synthetic oligonucleotide
ttccagaagtcagcgagtttcgtatatgaa

SEQ ID NO: 263425 - DNA, 30 bp, Artificial Sequence
  Synthetic oligonucleotide
cagtatgttgaatgcatgtattcctatgaa

SEQ ID NO: 263426 - DNA, 30 bp, Artificial Sequence
  Synthetic oligonucleotide
ttcgaatagattagatcgcgaatctatgaa

SEQ ID NO: 263427 - DNA, 30 bp, Artificial Sequence
  Synthetic oligonucleotide
gagacgaataccatagaatttctctatgaa

SEQ ID NO: 263428 - DNA, 30 bp, Artificial Sequence
  Synthetic oligonucleotide
gcacaacgatacgtgaggcagtcttatgaa

SEQ ID NO: 263429 - DNA, 30 bp, Artificial Sequence
  Synthetic oligonucleotide
aggacgatttggaaatacatgggttatgaa

SEQ ID NO: 263430 - DNA, 30 bp, Artificial Sequence
  Synthetic oligonucleotide
cctatcgaccaaaatcccgcatcaactgaa

SEQ ID NO: 263431 - DNA, 30 bp, Artificial Sequence
  Synthetic oligonucleotide
gggaagggccgcgtttcttgattaactgaa

SEQ ID NO: 263432 - DNA, 30 bp, Artificial Sequence
  Synthetic oligonucleotide
aggcaccgattgctataagtattaactgaa

SEQ ID NO: 263433 - DNA, 30 bp, Artificial Sequence
  Synthetic oligonucleotide
ccgcgtgcgacagtcacagcggcgactgaa

SEQ ID NO: 263434 - DNA, 30 bp, Artificial Sequence
  Synthetic oligonucleotide
gattagcaaatttgtactctagctactgaa

SEQ ID NO: 263435 - DNA, 30 bp, Artificial Sequence
  Synthetic oligonucleotide
ttaagacggtaatgacagtgtgaccctgaa

SEQ ID NO: 263436 - DNA, 30 bp, Artificial Sequence
  Synthetic oligonucleotide
cttagtggactctacgaagagagccctgaa

SEQ ID NO: 263437 - DNA, 30 bp, Artificial Sequence
  Synthetic oligonucleotide
ggacggtcgtttgaacaattgttccctgaa

SEQ ID NO: 263438 - DNA, 30 bp, Artificial Sequence
  Synthetic oligonucleotide
aaaacgttggaatttaccggagggcctgaa

SEQ ID NO: 263439 - DNA, 30 bp, Artificial Sequence
  Synthetic oligonucleotide
tgtactaatctgccccgtcccaaagctgaa

SEQ ID NO: 263440 - DNA, 30 bp, Artificial Sequence
  Synthetic oligonucleotide
tcatacttggcaccggtcatacacgctgaa

SEQ ID NO: 263441 - DNA, 30 bp, Artificial Sequence
  Synthetic oligonucleotide
ggcgtcatttgacgcccatagattgctgaa

SEQ ID NO: 263442 - DNA, 30 bp, Artificial Sequence
  Synthetic oligonucleotide
caaggattgaagtaaaaattcacatctgaa

SEQ ID NO: 263443 - DNA, 30 bp, Artificial Sequence
  Synthetic oligonucleotide
agtaggaaccaacacacagaactatctgaa

SEQ ID NO: 263444 - DNA, 30 bp, Artificial Sequence
  Synthetic oligonucleotide
tagacccggcctgacttgcacctatctgaa

SEQ ID NO: 263445 - DNA, 30 bp, Artificial Sequence
  Synthetic oligonucleotide
ttatctagtgcgatcgcacggcattctgaa

SEQ ID NO: 263446 - DNA, 30 bp, Artificial Sequence
  Synthetic oligonucleotide
ggattaggcactagagttggatattctgaa

SEQ ID NO: 263447 - DNA, 30 bp, Artificial Sequence
  Synthetic oligonucleotide
gctgaaaaatgggacgcttgtgcttctgaa

SEQ ID NO: 263448 - DNA, 30 bp, Artificial Sequence
  Synthetic oligonucleotide
gctcacccatggcccttgagatcttctgaa

SEQ ID NO: 263449 - DNA, 30 bp, Artificial Sequence
  Synthetic oligonucleotide
gaaaacgcagggcgctaggatggaagtgaa

SEQ ID NO: 263450 - DNA, 30 bp, Artificial Sequence
  Synthetic oligonucleotide
agagaattaatatgagtaaccgtaagtgaa

SEQ ID NO: 263451 - DNA, 30 bp, Artificial Sequence
  Synthetic oligonucleotide
tcaaagctattgggaatcgtcgacagtgaa

SEQ ID NO: 263452 - DNA, 30 bp, Artificial Sequence
  Synthetic oligonucleotide
ccccgacccgaaaccaacgagcagagtgaa

SEQ ID NO: 263453 - DNA, 30 bp, Artificial Sequence
  Synthetic oligonucleotide
taatgcgagagaaggattatgtaacgtgaa

SEQ ID NO: 263454 - DNA, 30 bp, Artificial Sequence
  Synthetic oligonucleotide
ttagtcaatttagcaaaattcccacgtgaa

SEQ ID NO: 263455 - DNA, 30 bp, Artificial Sequence
  Synthetic oligonucleotide
ataccaagcctgggaatgtgagcacgtgaa

SEQ ID NO: 263456 - DNA, 30 bp, Artificial Sequence
  Synthetic oligonucleotide
aatactcgtaatcgtgaagcatcacgtgaa

SEQ ID NO: 263457 - DNA, 30 bp, Artificial Sequence
  Synthetic oligonucleotide
ccatacccattgaggaacagctgacgtgaa

SEQ ID NO: 263458 - DNA, 30 bp, Artificial Sequence
  Synthetic oligonucleotide
gtctctcagtaagggagagcgaagcgtgaa

SEQ ID NO: 263459 - DNA, 30 bp, Artificial Sequence
  Synthetic oligonucleotide
taagcttgtgccgggattagcggtcgtgaa

SEQ ID NO: 263460 - DNA, 30 bp, Artificial Sequence
  Synthetic oligonucleotide
gaaagccgttttatggacacataaggtgaa

SEQ ID NO: 263461 - DNA, 30 bp, Artificial Sequence
  Synthetic oligonucleotide
aacggtgcactggtgcttgcaacaggtgaa

SEQ ID NO: 263462 - DNA, 30 bp, Artificial Sequence
  Synthetic oligonucleotide
aggcggtagaataccgaatatggaggtgaa

SEQ ID NO: 263463 - DNA, 30 bp, Artificial Sequence
  Synthetic oligonucleotide
tacgataagactcgacctcctttaggtgaa

SEQ ID NO: 263464 - DNA, 30 bp, Artificial Sequence
  Synthetic oligonucleotide
ggggtagtgctcgcggtctctagcggtgaa

SEQ ID NO: 263465 - DNA, 30 bp, Artificial Sequence
  Synthetic oligonucleotide
ctcctggagggcggagggggtagcggtgaa

SEQ ID NO: 263466 - DNA, 30 bp, Artificial Sequence
  Synthetic oligonucleotide
acactcttacctaactgcgccatcggtgaa

SEQ ID NO: 263467 - DNA, 30 bp, Artificial Sequence
  Synthetic oligonucleotide
catggccggacatttaatacaactggtgaa

SEQ ID NO: 263468 - DNA, 30 bp, Artificial Sequence
  Synthetic oligonucleotide
tacgttgcggtcgaatacgagggtggtgaa

SEQ ID NO: 263469 - DNA, 29 bp, Artificial Sequence
  Synthetic oligonucleotide
cagacgctccgtccgaactaattggtgaa

SEQ ID NO: 263470 - DNA, 30 bp, Artificial Sequence
  Synthetic oligonucleotide
caactattcagagttgttgtacaatgtgaa

SEQ ID NO: 263471 - DNA, 30 bp, Artificial Sequence
  Synthetic oligonucleotide
aatgttattacaggtagtagcgtatgtgaa

SEQ ID NO: 263472 - DNA, 30 bp, Artificial Sequence
  Synthetic oligonucleotide
cgaccttttatgtagaagtattgctgtgaa

SEQ ID NO: 263473 - DNA, 30 bp, Artificial Sequence
  Synthetic oligonucleotide
atgagagtgtgtgtacggcacacgtgtgaa

SEQ ID NO: 263474 - DNA, 30 bp, Artificial Sequence
  Synthetic oligonucleotide
gaactctcagtgggtggtaaatggtgtgaa

SEQ ID NO: 263475 - DNA, 30 bp, Artificial Sequence
  Synthetic oligonucleotide
ttatgatgtagacctgttgtcagttgtgaa

SEQ ID NO: 263476 - DNA, 30 bp, Artificial Sequence
  Synthetic oligonucleotide
gggggcgcattcttgaccgcttaaattgaa

SEQ ID NO: 263477 - DNA, 30 bp, Artificial Sequence
  Synthetic oligonucleotide
atagattaatattatctagagagaattgaa

SEQ ID NO: 263478 - DNA, 30 bp, Artificial Sequence
  Synthetic oligonucleotide
gtctaatgtctaactagatgtagaattgaa

SEQ ID NO: 263479 - DNA, 30 bp, Artificial Sequence
  Synthetic oligonucleotide
tgaagaggttttgtcgtcataggaattgaa

SEQ ID NO: 263480 - DNA, 30 bp, Artificial Sequence
  Synthetic oligonucleotide
gctgtttagggtatatcggtggccattgaa

SEQ ID NO: 263481 - DNA, 30 bp, Artificial Sequence
  Synthetic oligonucleotide
gcggtaaatcacagttactttcagattgaa

SEQ ID NO: 263482 - DNA, 30 bp, Artificial Sequence
  Synthetic oligonucleotide
gatcatatagaacgatagactaggattgaa

SEQ ID NO: 263483 - DNA, 30 bp, Artificial Sequence
  Synthetic oligonucleotide
cgtattcggtcatacgtcaaggatattgaa

SEQ ID NO: 263484 - DNA, 30 bp, Artificial Sequence
  Synthetic oligonucleotide
actatgacgaagcgtgcccccactattgaa

SEQ ID NO: 263485 - DNA, 30 bp, Artificial Sequence
  Synthetic oligonucleotide
tgttcgggtcttacaagtacggcacttgaa

SEQ ID NO: 263486 - DNA, 30 bp, Artificial Sequence
  Synthetic oligonucleotide
ccagctcttaggctcgaaagtgatcttgaa

SEQ ID NO: 263487 - DNA, 30 bp, Artificial Sequence
  Synthetic oligonucleotide
attcgtaaccttaacctcctagttcttgaa

SEQ ID NO: 263488 - DNA, 30 bp, Artificial Sequence
  Synthetic oligonucleotide
gttagccgtcacaaggaggtgacagttgaa

SEQ ID NO: 263489 - DNA, 30 bp, Artificial Sequence
  Synthetic oligonucleotide
tagccggtcgtgactactaatggcgttgaa

SEQ ID NO: 263490 - DNA, 30 bp, Artificial Sequence
  Synthetic oligonucleotide
agcctgggtctgttggttgggtcggttgaa

SEQ ID NO: 263491 - DNA, 30 bp, Artificial Sequence
  Synthetic oligonucleotide
gcaatcttcattaacactcaaagtgttgaa

SEQ ID NO: 263492 - DNA, 30 bp, Artificial Sequence
  Synthetic oligonucleotide
aggacaagtcggtactctaagtgtgttgaa

SEQ ID NO: 263493 - DNA, 30 bp, Artificial Sequence
  Synthetic oligonucleotide
tctagaataatactgtccacatttgttgaa

SEQ ID NO: 263494 - DNA, 30 bp, Artificial Sequence
  Synthetic oligonucleotide
ccgcatcctaagctatgataaaagtttgaa

SEQ ID NO: 263495 - DNA, 30 bp, Artificial Sequence
  Synthetic oligonucleotide
gtaaaaatcatagctttcaatcagtttgaa

SEQ ID NO: 263496 - DNA, 30 bp, Artificial Sequence
  Synthetic oligonucleotide
cgaaggccacctccaggacccttgtttgaa

SEQ ID NO: 263497 - DNA, 30 bp, Artificial Sequence
  Synthetic oligonucleotide
agctgttcctcgaacaacctgcaaaaataa

SEQ ID NO: 263498 - DNA, 30 bp, Artificial Sequence
  Synthetic oligonucleotide
agtatgaaacgtgatcgtgggtaaaaataa

SEQ ID NO: 263499 - DNA, 30 bp, Artificial Sequence
  Synthetic oligonucleotide
actcctaacgagaccgcgaaaacaaaataa

SEQ ID NO: 263500 - DNA, 30 bp, Artificial Sequence
  Synthetic oligonucleotide
cgccctataagtcccaagcgacacaaataa

SEQ ID NO: 263501 - DNA, 30 bp, Artificial Sequence
  Synthetic oligonucleotide
tcgatggtacctaatgaagcgagcaaataa

SEQ ID NO: 263502 - DNA, 30 bp, Artificial Sequence
  Synthetic oligonucleotide
caccattggactagaggtcagatcaaataa

SEQ ID NO: 263503 - DNA, 30 bp, Artificial Sequence
  Synthetic oligonucleotide
taaatcaatgcgaaaaaacctatcaaataa

SEQ ID NO: 263504 - DNA, 30 bp, Artificial Sequence
  Synthetic oligonucleotide
tattatgagaagacgggaagctggaaataa

SEQ ID NO: 263505 - DNA, 30 bp, Artificial Sequence
  Synthetic oligonucleotide
cgcctcggcttaacggactgccgtaaataa

SEQ ID NO: 263506 - DNA, 30 bp, Artificial Sequence
  Synthetic oligonucleotide
tggagagtgataatttgttgttaacaataa

SEQ ID NO: 263507 - DNA, 27 bp, Artificial Sequence
  Synthetic oligonucleotide
ctaggcttcagggaacatggccaataa

SEQ ID NO: 263508 - DNA, 30 bp, Artificial Sequence
  Synthetic oligonucleotide
tttagggcgctagaatccaactggcaataa

SEQ ID NO: 263509 - DNA, 30 bp, Artificial Sequence
  Synthetic oligonucleotide
cttgaacaggtttagtgatatatgcaataa

SEQ ID NO: 263510 - DNA, 30 bp, Artificial Sequence
  Synthetic oligonucleotide
gttactatccgtgaagctacaattcaataa

SEQ ID NO: 263511 - DNA, 30 bp, Artificial Sequence
  Synthetic oligonucleotide
ggaatcgtgaggattgctacgagagaataa

SEQ ID NO: 263512 - DNA, 30 bp, Artificial Sequence
  Synthetic oligonucleotide
gtgccgtgccatttagtaagaggagaataa

SEQ ID NO: 263513 - DNA, 30 bp, Artificial Sequence
  Synthetic oligonucleotide
acaacagctgcttcgataccgggcgaataa

SEQ ID NO: 263514 - DNA, 30 bp, Artificial Sequence
  Synthetic oligonucleotide
ggcccgtaacggattactgaattcgaataa

SEQ ID NO: 263515 - DNA, 30 bp, Artificial Sequence
  Synthetic oligonucleotide
agctatgcctctcaccttcaaaaggaataa

SEQ ID NO: 263516 - DNA, 30 bp, Artificial Sequence
  Synthetic oligonucleotide
cctaaggcaatatgaccgggaggggaataa

SEQ ID NO: 263517 - DNA, 30 bp, Artificial Sequence
  Synthetic oligonucleotide
gaatgtcaagttatggcgagttgggaataa

SEQ ID NO: 263518 - DNA, 30 bp, Artificial Sequence
  Synthetic oligonucleotide
tgtcaaaccgctgaggagacctgtgaataa

SEQ ID NO: 263519 - DNA, 30 bp, Artificial Sequence
  Synthetic oligonucleotide
aggtttgtgtcaggtgtaatgccataataa

SEQ ID NO: 263520 - DNA, 30 bp, Artificial Sequence
  Synthetic oligonucleotide
cgtgcgtggctagaaacactcatataataa

SEQ ID NO: 263521 - DNA, 30 bp, Artificial Sequence
  Synthetic oligonucleotide
cagccagtcggaaatcgagcgtactaataa

SEQ ID NO: 263522 - DNA, 30 bp, Artificial Sequence
  Synthetic oligonucleotide
ctgataagaactgcgaaacacgtctaataa

SEQ ID NO: 263523 - DNA, 30 bp, Artificial Sequence
  Synthetic oligonucleotide
tgcgagagtccgatgttgatgcattaataa

SEQ ID NO: 263524 - DNA, 30 bp, Artificial Sequence
  Synthetic oligonucleotide
gcggtcggtcacaatccaccgacttaataa

SEQ ID NO: 263525 - DNA, 30 bp, Artificial Sequence
  Synthetic oligonucleotide
ttacatgaccactggggccgtggttaataa

SEQ ID NO: 263526 - DNA, 30 bp, Artificial Sequence
  Synthetic oligonucleotide
ctggtgaatggattccgcgtttgttaataa

SEQ ID NO: 263527 - DNA, 30 bp, Artificial Sequence
  Synthetic oligonucleotide
ctccaagaaaagctatgcaattcaacataa

SEQ ID NO: 263528 - DNA, 30 bp, Artificial Sequence
  Synthetic oligonucleotide
acggagttagtaaaggccgttgcgacataa

SEQ ID NO: 263529 - DNA, 30 bp, Artificial Sequence
  Synthetic oligonucleotide
gcgtttaatcggatacattgacatacataa

SEQ ID NO: 263530 - DNA, 30 bp, Artificial Sequence
  Synthetic oligonucleotide
acaagaaacctatgctagctcactacataa

SEQ ID NO: 263531 - DNA, 30 bp, Artificial Sequence
  Synthetic oligonucleotide
gccaggttaattacctagttctcgccataa

SEQ ID NO: 263532 - DNA, 30 bp, Artificial Sequence
  Synthetic oligonucleotide
aaaggtgtttgctcaaggtattatccataa

SEQ ID NO: 263533 - DNA, 30 bp, Artificial Sequence
  Synthetic oligonucleotide
taacacgaatacagggcttcgtctccataa

SEQ ID NO: 263534 - DNA, 30 bp, Artificial Sequence
  Synthetic oligonucleotide
agtctttcgcgtgggacatcacaagcataa

SEQ ID NO: 263535 - DNA, 30 bp, Artificial Sequence
  Synthetic oligonucleotide
cgtcattataggcgtagtatagacgcataa

SEQ ID NO: 263536 - DNA, 30 bp, Artificial Sequence
  Synthetic oligonucleotide
tacaacaacatcatggcagatctcgcataa

SEQ ID NO: 263537 - DNA, 30 bp, Artificial Sequence
  Synthetic oligonucleotide
attatcgattcgaatttcataaaatcataa

SEQ ID NO: 263538 - DNA, 30 bp, Artificial Sequence
  Synthetic oligonucleotide
caaattgttaagctcgtaatctcctcataa

SEQ ID NO: 263539 - DNA, 30 bp, Artificial Sequence
  Synthetic oligonucleotide
catatgagatagtagtaaatgtcgtcataa

SEQ ID NO: 263540 - DNA, 30 bp, Artificial Sequence
  Synthetic oligonucleotide
gaaaacccggatactaaaccagcaagataa

SEQ ID NO: 263541 - DNA, 30 bp, Artificial Sequence
  Synthetic oligonucleotide
agcatagactcgaaattcgatcatagataa

SEQ ID NO: 263542 - DNA, 30 bp, Artificial Sequence
  Synthetic oligonucleotide
aataaccattagagcaaagcgactagataa

SEQ ID NO: 263543 - DNA, 30 bp, Artificial Sequence
  Synthetic oligonucleotide
cgtggatatccgtccagcaattctagataa

SEQ ID NO: 263544 - DNA, 30 bp, Artificial Sequence
  Synthetic oligonucleotide
tattaataacggcaagcaggaattagataa

SEQ ID NO: 263545 - DNA, 30 bp, Artificial Sequence
  Synthetic oligonucleotide
gtcagttaaaaccatacctttctacgataa

SEQ ID NO: 263546 - DNA, 30 bp, Artificial Sequence
  Synthetic oligonucleotide
cgccaacttgccagtgcgggacaccgataa

SEQ ID NO: 263547 - DNA, 30 bp, Artificial Sequence
  Synthetic oligonucleotide
ctccggagccccgctgatcgagcaggataa

SEQ ID NO: 263548 - DNA, 30 bp, Artificial Sequence
  Synthetic oligonucleotide
gtgagccgcttttaccattaatgaggataa

SEQ ID NO: 263549 - DNA, 30 bp, Artificial Sequence
  Synthetic oligonucleotide
gaatcccttgcacttacctaatacggataa

SEQ ID NO: 263550 - DNA, 30 bp, Artificial Sequence
  Synthetic oligonucleotide
tttatgatggttcgagtaaactctggataa

SEQ ID NO: 263551 - DNA, 29 bp, Artificial Sequence
  Synthetic oligonucleotide
ttggctaacgctgggaacacggatgataa

SEQ ID NO: 263552 - DNA, 30 bp, Artificial Sequence
  Synthetic oligonucleotide
accctccgtccttccgttatcggctgataa

SEQ ID NO: 263553 - DNA, 30 bp, Artificial Sequence
  Synthetic oligonucleotide
cgatcgggcattgcgtgcttggagtgataa

SEQ ID NO: 263554 - DNA, 30 bp, Artificial Sequence
  Synthetic oligonucleotide
tgggaaatagacatttcaagttgaatataa

SEQ ID NO: 263555 - DNA, 30 bp, Artificial Sequence
  Synthetic oligonucleotide
aagggccagggtaaattccatataatataa

SEQ ID NO: 263556 - DNA, 30 bp, Artificial Sequence
  Synthetic oligonucleotide
cggtcccgtccaaggttagcattcatataa

SEQ ID NO: 263557 - DNA, 30 bp, Artificial Sequence
  Synthetic oligonucleotide
ctattggcgggaggatccggcttcatataa

SEQ ID NO: 263558 - DNA, 28 bp, Artificial Sequence
  Synthetic oligonucleotide
aagaggttatcgttaactcgagatataa

SEQ ID NO: 263559 - DNA, 30 bp, Artificial Sequence
  Synthetic oligonucleotide
cataaaatatactggtaaccaccgatataa

SEQ ID NO: 263560 - DNA, 30 bp, Artificial Sequence
  Synthetic oligonucleotide
acgtttcatcctagtcctgaccctatataa

SEQ ID NO: 263561 - DNA, 30 bp, Artificial Sequence
  Synthetic oligonucleotide
taatatggtgagtccgatagacgtatataa

SEQ ID NO: 263562 - DNA, 30 bp, Artificial Sequence
  Synthetic oligonucleotide
acttaagtggatgaatcttccgtactataa

SEQ ID NO: 263563 - DNA, 29 bp, Artificial Sequence
  Synthetic oligonucleotide
agtaagatggagtgttgtgcgacctataa

SEQ ID NO: 263564 - DNA, 30 bp, Artificial Sequence
  Synthetic oligonucleotide
gtactagaatcgacatcggtttacctataa

SEQ ID NO: 263565 - DNA, 30 bp, Artificial Sequence
  Synthetic oligonucleotide
gtgtaacacacaatattcaataccctataa

SEQ ID NO: 263566 - DNA, 30 bp, Artificial Sequence
  Synthetic oligonucleotide
gctccattctacggagttgtggcgctataa

SEQ ID NO: 263567 - DNA, 30 bp, Artificial Sequence
  Synthetic oligonucleotide
aggcgatttgaaagactttagagtctataa

SEQ ID NO: 263568 - DNA, 30 bp, Artificial Sequence
  Synthetic oligonucleotide
agtatggaagttaggtccttatttctataa

SEQ ID NO: 263569 - DNA, 30 bp, Artificial Sequence
  Synthetic oligonucleotide
ctaggcttatccccagcaacagcagtataa

SEQ ID NO: 263570 - DNA, 31 bp, Artificial Sequence
  Synthetic oligonucleotide
gaatgcgtttggctttggagcaaaggtataa

SEQ ID NO: 263571 - DNA, 30 bp, Artificial Sequence
  Synthetic oligonucleotide
ggtgcggattgcgataggatatcggtataa

SEQ ID NO: 263572 - DNA, 30 bp, Artificial Sequence
  Synthetic oligonucleotide
aaacagccaatagtagttgcattattataa

SEQ ID NO: 263573 - DNA, 30 bp, Artificial Sequence
  Synthetic oligonucleotide
ggaaactaatacgcacaacgtaagttataa

SEQ ID NO: 263574 - DNA, 30 bp, Artificial Sequence
  Synthetic oligonucleotide
tcaacactacgccttgtatggcctttataa

SEQ ID NO: 263575 - DNA, 30 bp, Artificial Sequence
  Synthetic oligonucleotide
gcataatgtttgagttatcgtagtttataa

SEQ ID NO: 263576 - DNA, 30 bp, Artificial Sequence
  Synthetic oligonucleotide
ccagtaaggtggtgactgggtcgtttataa

SEQ ID NO: 263577 - DNA, 30 bp, Artificial Sequence
  Synthetic oligonucleotide
ggaagctaaactacagttctagagaactaa

SEQ ID NO: 263578 - DNA, 30 bp, Artificial Sequence
  Synthetic oligonucleotide
ctacgttgtctgtgctactggtataactaa

SEQ ID NO: 263579 - DNA, 30 bp, Artificial Sequence
  Synthetic oligonucleotide
agacttggatagtcgccccgaacacactaa

SEQ ID NO: 263580 - DNA, 30 bp, Artificial Sequence
  Synthetic oligonucleotide
ggtcctacaggtactgcaacggcacactaa

SEQ ID NO: 263581 - DNA, 30 bp, Artificial Sequence
  Synthetic oligonucleotide
taatgtaaattaaacagctgaaggcactaa

SEQ ID NO: 263582 - DNA, 30 bp, Artificial Sequence
  Synthetic oligonucleotide
gttgctcgtctgaagagggccaggcactaa

SEQ ID NO: 263583 - DNA, 30 bp, Artificial Sequence
  Synthetic oligonucleotide
atttgccggctgcttaaaacacttcactaa

SEQ ID NO: 263584 - DNA, 30 bp, Artificial Sequence
  Synthetic oligonucleotide
atcttgcgttctgctcggttgccagactaa

SEQ ID NO: 263585 - DNA, 30 bp, Artificial Sequence
  Synthetic oligonucleotide
gatgtgattactagaacatatagagactaa

SEQ ID NO: 263586 - DNA, 30 bp, Artificial Sequence
  Synthetic oligonucleotide
gggtcgtcacaagttctaaaaatagactaa

SEQ ID NO: 263587 - DNA, 30 bp, Artificial Sequence
  Synthetic oligonucleotide
taaatctgtggcgtgacttatcccgactaa

SEQ ID NO: 263588 - DNA, 30 bp, Artificial Sequence
  Synthetic oligonucleotide
gagtccgagtatctcaatggtagggactaa

SEQ ID NO: 263589 - DNA, 30 bp, Artificial Sequence
  Synthetic oligonucleotide
gcagagacgtatctattggtttgtgactaa

SEQ ID NO: 263590 - DNA, 30 bp, Artificial Sequence
  Synthetic oligonucleotide
atggattattctaggcgaaatattgactaa

SEQ ID NO: 263591 - DNA, 30 bp, Artificial Sequence
  Synthetic oligonucleotide
taagagtaaacgttctgcggaatatactaa

SEQ ID NO: 263592 - DNA, 30 bp, Artificial Sequence
  Synthetic oligonucleotide
tattgctgacgcgcgtcagtcaactactaa

SEQ ID NO: 263593 - DNA, 30 bp, Artificial Sequence
  Synthetic oligonucleotide
attgtcctctagaacagttgcaagtactaa

SEQ ID NO: 263594 - DNA, 30 bp, Artificial Sequence
  Synthetic oligonucleotide
ggtgggaattcttgagcacggtggtactaa

SEQ ID NO: 263595 - DNA, 29 bp, Artificial Sequence
  Synthetic oligonucleotide
taataggacagcccatatgattgtactaa

SEQ ID NO: 263596 - DNA, 30 bp, Artificial Sequence
  Synthetic oligonucleotide
tgtgcatctttaccatgggagcattactaa

SEQ ID NO: 263597 - DNA, 30 bp, Artificial Sequence
  Synthetic oligonucleotide
cgtgtttctacttgctggaatccaccctaa

SEQ ID NO: 263598 - DNA, 30 bp, Artificial Sequence
  Synthetic oligonucleotide
attctccgtattcccgcgagtcgaccctaa

SEQ ID NO: 263599 - DNA, 30 bp, Artificial Sequence
  Synthetic oligonucleotide
ataggagggccaggtaagcctaagccctaa

SEQ ID NO: 263600 - DNA, 30 bp, Artificial Sequence
  Synthetic oligonucleotide
agtattctgttctacgtggaaaggccctaa

SEQ ID NO: 263601 - DNA, 30 bp, Artificial Sequence
  Synthetic oligonucleotide
aggagcgaaaaattgtattatggagcctaa

SEQ ID NO: 263602 - DNA, 30 bp, Artificial Sequence
  Synthetic oligonucleotide
gtagaggcagttcacgagggtatagcctaa

SEQ ID NO: 263603 - DNA, 30 bp, Artificial Sequence
  Synthetic oligonucleotide
actcggataaacacgatcttctgcgcctaa

SEQ ID NO: 263604 - DNA, 30 bp, Artificial Sequence
  Synthetic oligonucleotide
tcgtcatggagggagcgtaggtaggcctaa

SEQ ID NO: 263605 - DNA, 30 bp, Artificial Sequence
  Synthetic oligonucleotide
agcaatagtaatcagaatcattaggcctaa

SEQ ID NO: 263606 - DNA, 30 bp, Artificial Sequence
  Synthetic oligonucleotide
accgcatctacggggagattgcctgcctaa

SEQ ID NO: 263607 - DNA, 30 bp, Artificial Sequence
  Synthetic oligonucleotide
tcctgtgaacgtcccaaataaggtgcctaa

SEQ ID NO: 263608 - DNA, 30 bp, Artificial Sequence
  Synthetic oligonucleotide
tcagccccaacaaaacccagcattgcctaa

SEQ ID NO: 263609 - DNA, 30 bp, Artificial Sequence
  Synthetic oligonucleotide
aggtatgatctgttatatctaagatcctaa

SEQ ID NO: 263610 - DNA, 30 bp, Artificial Sequence
  Synthetic oligonucleotide
gcgaggtccactttgagatacgcctcctaa

SEQ ID NO: 263611 - DNA, 30 bp, Artificial Sequence
  Synthetic oligonucleotide
tgtcgaattgccatggcaaccaagtcctaa

SEQ ID NO: 263612 - DNA, 30 bp, Artificial Sequence
  Synthetic oligonucleotide
gcatccggagtctcccgtagtacttcctaa

SEQ ID NO: 263613 - DNA, 30 bp, Artificial Sequence
  Synthetic oligonucleotide
tcgatttgaggtatagtattgtcttcctaa

SEQ ID NO: 263614 - DNA, 30 bp, Artificial Sequence
  Synthetic oligonucleotide
ggcgggggcgtagccggagatataagctaa

SEQ ID NO: 263615 - DNA, 30 bp, Artificial Sequence
  Synthetic oligonucleotide
gctggggactatggttaaaagaacagctaa

SEQ ID NO: 263616 - DNA, 30 bp, Artificial Sequence
  Synthetic oligonucleotide
ggagaggtatcgtcggctttctccagctaa

SEQ ID NO: 263617 - DNA, 30 bp, Artificial Sequence
  Synthetic oligonucleotide
ttaactggagaggtggacactagcagctaa

SEQ ID NO: 263618 - DNA, 30 bp, Artificial Sequence
  Synthetic oligonucleotide
accgtagaccgtagctgcgacttgagctaa

SEQ ID NO: 263619 - DNA, 30 bp, Artificial Sequence
  Synthetic oligonucleotide
tatccgcctgttcccccacgatcacgctaa

SEQ ID NO: 263620 - DNA, 30 bp, Artificial Sequence
  Synthetic oligonucleotide
cgagtgaatgtgtaaacagggctccgctaa

SEQ ID NO: 263621 - DNA, 30 bp, Artificial Sequence
  Synthetic oligonucleotide
attggttgggctaaaatgcggcagcgctaa

SEQ ID NO: 263622 - DNA, 30 bp, Artificial Sequence
  Synthetic oligonucleotide
actgtgcgcggggtaatccgccggcgctaa

SEQ ID NO: 263623 - DNA, 30 bp, Artificial Sequence
  Synthetic oligonucleotide
caacggcgtaagccagaggtagtgcgctaa

SEQ ID NO: 263624 - DNA, 30 bp, Artificial Sequence
  Synthetic oligonucleotide
atgatttgtcaaattcggtacttgcgctaa

SEQ ID NO: 263625 - DNA, 30 bp, Artificial Sequence
  Synthetic oligonucleotide
cgcaattctatcccttaggtaccaggctaa

SEQ ID NO: 263626 - DNA, 30 bp, Artificial Sequence
  Synthetic oligonucleotide
cacacctttgcggaaacgtgctccggctaa

SEQ ID NO: 263627 - DNA, 30 bp, Artificial Sequence
  Synthetic oligonucleotide
aacaatgccgcctgtttcataatcggctaa

SEQ ID NO: 263628 - DNA, 30 bp, Artificial Sequence
  Synthetic oligonucleotide
gtataaaaccttctggtccagtgtggctaa

SEQ ID NO: 263629 - DNA, 30 bp, Artificial Sequence
  Synthetic oligonucleotide
ataacaaagctagaatcaagacgttgctaa

SEQ ID NO: 263630 - DNA, 30 bp, Artificial Sequence
  Synthetic oligonucleotide
ttcggtaagccccccgttggtttttgctaa

SEQ ID NO: 263631 - DNA, 30 bp, Artificial Sequence
  Synthetic oligonucleotide
cgtattctcgacatccattacggaatctaa

SEQ ID NO: 263632 - DNA, 30 bp, Artificial Sequence
  Synthetic oligonucleotide
agacagcgtactgtccgcacgagcatctaa

SEQ ID NO: 263633 - DNA, 30 bp, Artificial Sequence
  Synthetic oligonucleotide
ctagggtgaggtcaagtcgctctcatctaa

SEQ ID NO: 263634 - DNA, 30 bp, Artificial Sequence
  Synthetic oligonucleotide
tacccttaggacttacctttcacgatctaa

SEQ ID NO: 263635 - DNA, 30 bp, Artificial Sequence
  Synthetic oligonucleotide
ttctgacagaaaggaggagtgacgatctaa

SEQ ID NO: 263636 - DNA, 30 bp, Artificial Sequence
  Synthetic oligonucleotide
gcagtcgtcacaattggtgttcggatctaa

SEQ ID NO: 263637 - DNA, 30 bp, Artificial Sequence
  Synthetic oligonucleotide
tcctacgaatctagaggaaactcactctaa

SEQ ID NO: 263638 - DNA, 30 bp, Artificial Sequence
  Synthetic oligonucleotide
ctaagcgcccgtgctcccgtgtgactctaa

SEQ ID NO: 263639 - DNA, 30 bp, Artificial Sequence
  Synthetic oligonucleotide
gcgtcctccttaatgcaccctttgctctaa

SEQ ID NO: 263640 - DNA, 30 bp, Artificial Sequence
  Synthetic oligonucleotide
gacgcacctggggaccgcgattatctctaa

SEQ ID NO: 263641 - DNA, 30 bp, Artificial Sequence
  Synthetic oligonucleotide
atggtcttattctgcaacaaaatagtctaa

SEQ ID NO: 263642 - DNA, 30 bp, Artificial Sequence
  Synthetic oligonucleotide
tcaggaggacgtcatgaaatagccgtctaa

SEQ ID NO: 263643 - DNA, 30 bp, Artificial Sequence
  Synthetic oligonucleotide
ggcctttactaactggaggtagccgtctaa

SEQ ID NO: 263644 - DNA, 30 bp, Artificial Sequence
  Synthetic oligonucleotide
tctatgcgtcacgagctcaagctcgtctaa

SEQ ID NO: 263645 - DNA, 30 bp, Artificial Sequence
  Synthetic oligonucleotide
acttactagcgtaaattgatcagggtctaa

SEQ ID NO: 263646 - DNA, 30 bp, Artificial Sequence
  Synthetic oligonucleotide
ttgtatggaagaggtgcagcagctgtctaa

SEQ ID NO: 263647 - DNA, 30 bp, Artificial Sequence
  Synthetic oligonucleotide
aaaagttgcccggactaggggtttgtctaa

SEQ ID NO: 263648 - DNA, 30 bp, Artificial Sequence
  Synthetic oligonucleotide
ttctgtctcgtcgtaggcgtccaattctaa

SEQ ID NO: 263649 - DNA, 30 bp, Artificial Sequence
  Synthetic oligonucleotide
gaatgtgtaagcagaatcgctacattctaa

SEQ ID NO: 263650 - DNA, 30 bp, Artificial Sequence
  Synthetic oligonucleotide
acgtatcctatggaaaggcgtgtattctaa

SEQ ID NO: 263651 - DNA, 30 bp, Artificial Sequence
  Synthetic oligonucleotide
cactacggaaatactgagtttgccttctaa

SEQ ID NO: 263652 - DNA, 30 bp, Artificial Sequence
  Synthetic oligonucleotide
cgcacacggagaagttccagcgatttctaa

SEQ ID NO: 263653 - DNA, 30 bp, Artificial Sequence
  Synthetic oligonucleotide
aacggtgccacagtctattgcggtttctaa

SEQ ID NO: 263654 - DNA, 30 bp, Artificial Sequence
  Synthetic oligonucleotide
gatgtaagatgctccttcaaatgtttctaa

SEQ ID NO: 263655 - DNA, 30 bp, Artificial Sequence
  Synthetic oligonucleotide
acgttcaggtggctcgcaccactaaagtaa

SEQ ID NO: 263656 - DNA, 30 bp, Artificial Sequence
  Synthetic oligonucleotide
ttgatgtacgaactacgagtccagaagtaa

SEQ ID NO: 263657 - DNA, 30 bp, Artificial Sequence
  Synthetic oligonucleotide
tttaggagctgacagacttgcgcgaagtaa

SEQ ID NO: 263658 - DNA, 30 bp, Artificial Sequence
  Synthetic oligonucleotide
ccccctgaactaaaccaaagttggaagtaa

SEQ ID NO: 263659 - DNA, 30 bp, Artificial Sequence
  Synthetic oligonucleotide
ttgggcagcggcttcttatttagacagtaa

SEQ ID NO: 263660 - DNA, 30 bp, Artificial Sequence
  Synthetic oligonucleotide
tcattggatgacggtctcctaggacagtaa

SEQ ID NO: 263661 - DNA, 30 bp, Artificial Sequence
  Synthetic oligonucleotide
tgcaaattgcgattctctcttggacagtaa

SEQ ID NO: 263662 - DNA, 30 bp, Artificial Sequence
  Synthetic oligonucleotide
ttttgggagcacggaaattttctacagtaa

SEQ ID NO: 263663 - DNA, 30 bp, Artificial Sequence
  Synthetic oligonucleotide
cgtatgaatatcgtgaagggtccccagtaa

SEQ ID NO: 263664 - DNA, 30 bp, Artificial Sequence
  Synthetic oligonucleotide
ccagatacgccttacggctagttgcagtaa

SEQ ID NO: 263665 - DNA, 30 bp, Artificial Sequence
  Synthetic oligonucleotide
aggctactggcaaaccggaagcatcagtaa

SEQ ID NO: 263666 - DNA, 30 bp, Artificial Sequence
  Synthetic oligonucleotide
ttacccctctcatgaataccatttcagtaa

SEQ ID NO: 263667 - DNA, 30 bp, Artificial Sequence
  Synthetic oligonucleotide
tacaaagaccgcaaaaactaacgagagtaa

SEQ ID NO: 263668 - DNA, 30 bp, Artificial Sequence
  Synthetic oligonucleotide
cgctggcctcttgagatacatggagagtaa

SEQ ID NO: 263669 - DNA, 30 bp, Artificial Sequence
  Synthetic oligonucleotide
ggcgtcctcgatacttcactctgggagtaa

SEQ ID NO: 263670 - DNA, 30 bp, Artificial Sequence
  Synthetic oligonucleotide
gcacttataatcactattcaaatggagtaa

SEQ ID NO: 263671 - DNA, 30 bp, Artificial Sequence
  Synthetic oligonucleotide
cataggagtgggtaagctttaaatgagtaa

SEQ ID NO: 263672 - DNA, 30 bp, Artificial Sequence
  Synthetic oligonucleotide
agcggccggggttttacttcgattgagtaa

SEQ ID NO: 263673 - DNA, 30 bp, Artificial Sequence
  Synthetic oligonucleotide
cgaaaatcctgcggattcagttcatagtaa

SEQ ID NO: 263674 - DNA, 30 bp, Artificial Sequence
  Synthetic oligonucleotide
tctaactcaagcactccagggttgtagtaa

SEQ ID NO: 263675 - DNA, 30 bp, Artificial Sequence
  Synthetic oligonucleotide
acctcaggggtatcacaaagtaattagtaa

SEQ ID NO: 263676 - DNA, 30 bp, Artificial Sequence
  Synthetic oligonucleotide
caatgtatgatgataacacaccattagtaa

SEQ ID NO: 263677 - DNA, 30 bp, Artificial Sequence
  Synthetic oligonucleotide
agagaagcccaacctcgccactattagtaa

SEQ ID NO: 263678 - DNA, 30 bp, Artificial Sequence
  Synthetic oligonucleotide
tcaatcctaacgtaaagtctctaaacgtaa

SEQ ID NO: 263679 - DNA, 30 bp, Artificial Sequence
  Synthetic oligonucleotide
ttgcagggggagttttctgccccaacgtaa

SEQ ID NO: 263680 - DNA, 30 bp, Artificial Sequence
  Synthetic oligonucleotide
aatctgacggtgatggccctgctcacgtaa

SEQ ID NO: 263681 - DNA, 30 bp, Artificial Sequence
  Synthetic oligonucleotide
cattatgacgtggttggtgttacgacgtaa

SEQ ID NO: 263682 - DNA, 30 bp, Artificial Sequence
  Synthetic oligonucleotide
ccttatttatggcacaagtatatgacgtaa

SEQ ID NO: 263683 - DNA, 30 bp, Artificial Sequence
  Synthetic oligonucleotide
gggcgttgaggtttccgaagtagtacgtaa

SEQ ID NO: 263684 - DNA, 30 bp, Artificial Sequence
  Synthetic oligonucleotide
aaagggctattgcttcaatttcgtacgtaa

SEQ ID NO: 263685 - DNA, 30 bp, Artificial Sequence
  Synthetic oligonucleotide
acccagtttcgggttggggggtcaccgtaa

SEQ ID NO: 263686 - DNA, 30 bp, Artificial Sequence
  Synthetic oligonucleotide
ggcatcgtaaaagccgatgggctcccgtaa

SEQ ID NO: 263687 - DNA, 30 bp, Artificial Sequence
  Synthetic oligonucleotide
caagagattacgctcgtgtaagggccgtaa

SEQ ID NO: 263688 - DNA, 30 bp, Artificial Sequence
  Synthetic oligonucleotide
tatacgcgggcgcacccttacgggccgtaa

SEQ ID NO: 263689 - DNA, 30 bp, Artificial Sequence
  Synthetic oligonucleotide
cggcacggatgcgtgcccctgcctccgtaa

SEQ ID NO: 263690 - DNA, 30 bp, Artificial Sequence
  Synthetic oligonucleotide
tgagaaaaattgtagtcactaaaagcgtaa

SEQ ID NO: 263691 - DNA, 30 bp, Artificial Sequence
  Synthetic oligonucleotide
gaactggcaaatcaacacgccgtagcgtaa

SEQ ID NO: 263692 - DNA, 30 bp, Artificial Sequence
  Synthetic oligonucleotide
aaccaagcgcgcgtgtacggtgacgcgtaa

SEQ ID NO: 263693 - DNA, 30 bp, Artificial Sequence
  Synthetic oligonucleotide
ggctgctcacccgggacaaaatccgcgtaa

SEQ ID NO: 263694 - DNA, 30 bp, Artificial Sequence
  Synthetic oligonucleotide
tttaggaataggggtccacgaaaggcgtaa

SEQ ID NO: 263695 - DNA, 30 bp, Artificial Sequence
  Synthetic oligonucleotide
tcaatcgcccccaggtatgggcaggcgtaa

SEQ ID NO: 263696 - DNA, 30 bp, Artificial Sequence
  Synthetic oligonucleotide
acgtttataatcaggatgtatggggcgtaa

SEQ ID NO: 263697 - DNA, 30 bp, Artificial Sequence
  Synthetic oligonucleotide
acccgttccaggttatgagggtgggcgtaa

SEQ ID NO: 263698 - DNA, 30 bp, Artificial Sequence
  Synthetic oligonucleotide
ctgggttgacttggggtgctgctggcgtaa

SEQ ID NO: 263699 - DNA, 30 bp, Artificial Sequence
  Synthetic oligonucleotide
gtacacaatctttctaccattaatgcgtaa

SEQ ID NO: 263700 - DNA, 30 bp, Artificial Sequence
  Synthetic oligonucleotide
acctctataaggtgcctttccccatcgtaa

SEQ ID NO: 263701 - DNA, 30 bp, Artificial Sequence
  Synthetic oligonucleotide
ggccttcgatcggggaacagcggctcgtaa

SEQ ID NO: 263702 - DNA, 30 bp, Artificial Sequence
  Synthetic oligonucleotide
attactggtgggccaaatccagcgtcgtaa

SEQ ID NO: 263703 - DNA, 30 bp, Artificial Sequence
  Synthetic oligonucleotide
gcattatttggcagccggcaagattcgtaa

SEQ ID NO: 263704 - DNA, 30 bp, Artificial Sequence
  Synthetic oligonucleotide
ttatacgtaattttcagacagcgttcgtaa

SEQ ID NO: 263705 - DNA, 30 bp, Artificial Sequence
  Synthetic oligonucleotide
cggcttctgatccgaaatggtgtcaggtaa

SEQ ID NO: 263706 - DNA, 30 bp, Artificial Sequence
  Synthetic oligonucleotide
tataagtcgaccgaataaagcacacggtaa

SEQ ID NO: 263707 - DNA, 30 bp, Artificial Sequence
  Synthetic oligonucleotide
cccctaggttacgagaagaatgcacggtaa

SEQ ID NO: 263708 - DNA, 30 bp, Artificial Sequence
  Synthetic oligonucleotide
tggaagggcccgacaatgtatgcccggtaa

SEQ ID NO: 263709 - DNA, 30 bp, Artificial Sequence
  Synthetic oligonucleotide
tagctaggagtacgataatacatccggtaa

SEQ ID NO: 263710 - DNA, 30 bp, Artificial Sequence
  Synthetic oligonucleotide
aagccaagataacaatacccagatcggtaa

SEQ ID NO: 263711 - DNA, 30 bp, Artificial Sequence
  Synthetic oligonucleotide
ttaatctgtcgaggtcgaggtactcggtaa

SEQ ID NO: 263712 - DNA, 30 bp, Artificial Sequence
  Synthetic oligonucleotide
acggttacgtggtttgggccgacagggtaa

SEQ ID NO: 263713 - DNA, 30 bp, Artificial Sequence
  Synthetic oligonucleotide
tcccaggttggtacttaggtcgcagggtaa

SEQ ID NO: 263714 - DNA, 30 bp, Artificial Sequence
  Synthetic oligonucleotide
aaaggccacccaatgatccgctgagggtaa

SEQ ID NO: 263715 - DNA, 30 bp, Artificial Sequence
  Synthetic oligonucleotide
tggatcgattgaatgtcgttaatagggtaa

SEQ ID NO: 263716 - DNA, 30 bp, Artificial Sequence
  Synthetic oligonucleotide
tagacggtgtcatgaaatgtcgtagggtaa

SEQ ID NO: 263717 - DNA, 30 bp, Artificial Sequence
  Synthetic oligonucleotide
ttgtgatagtggtaaggcgacgcggggtaa

SEQ ID NO: 263718 - DNA, 30 bp, Artificial Sequence
  Synthetic oligonucleotide
ccgtccaataaagtcccacgaagggggtaa

SEQ ID NO: 263719 - DNA, 30 bp, Artificial Sequence
  Synthetic oligonucleotide
tatgtcggtctcgtcctacatgatgggtaa

SEQ ID NO: 263720 - DNA, 30 bp, Artificial Sequence
  Synthetic oligonucleotide
cggaattagaaaggatatcacgctgggtaa

SEQ ID NO: 263721 - DNA, 30 bp, Artificial Sequence
  Synthetic oligonucleotide
catttggaaggacggaacgcgagtgggtaa

SEQ ID NO: 263722 - DNA, 30 bp, Artificial Sequence
  Synthetic oligonucleotide
ccaatgcccatcgtggggacaggtgggtaa

SEQ ID NO: 263723 - DNA, 30 bp, Artificial Sequence
  Synthetic oligonucleotide
aggtggtggggggtcgggcgtctatggtaa

SEQ ID NO: 263724 - DNA, 30 bp, Artificial Sequence
  Synthetic oligonucleotide
acagctgaggcacataatggcgtatggtaa

SEQ ID NO: 263725 - DNA, 29 bp, Artificial Sequence
  Synthetic oligonucleotide
cctcccacagacaaatcaaattatggtaa

SEQ ID NO: 263726 - DNA, 30 bp, Artificial Sequence
  Synthetic oligonucleotide
tgagctatgagaattcggtggaactggtaa

SEQ ID NO: 263727 - DNA, 30 bp, Artificial Sequence
  Synthetic oligonucleotide
aaggacgtttaagtatgcggacactggtaa

SEQ ID NO: 263728 - DNA, 30 bp, Artificial Sequence
  Synthetic oligonucleotide
ccttgccagtcttagggtaggggctggtaa

SEQ ID NO: 263729 - DNA, 30 bp, Artificial Sequence
  Synthetic oligonucleotide
gcgaaattcggagcgaagcgaaggtggtaa

SEQ ID NO: 263730 - DNA, 29 bp, Artificial Sequence
  Synthetic oligonucleotide
cttattgaccgggtatagacatgtggtaa

SEQ ID NO: 263731 - DNA, 30 bp, Artificial Sequence
  Synthetic oligonucleotide
gcttaatcagcatgtttgagtaaaatgtaa

SEQ ID NO: 263732 - DNA, 30 bp, Artificial Sequence
  Synthetic oligonucleotide
aaaaggagttaagtcccaaggtaaatgtaa

SEQ ID NO: 263733 - DNA, 30 bp, Artificial Sequence
  Synthetic oligonucleotide
aggagatccgcttaactttagtcaatgtaa

SEQ ID NO: 263734 - DNA, 30 bp, Artificial Sequence
  Synthetic oligonucleotide
gttgctattcaagcagttgcagtaatgtaa

SEQ ID NO: 263735 - DNA, 30 bp, Artificial Sequence
  Synthetic oligonucleotide
tggtaccgatatacatgttgcaacatgtaa

SEQ ID NO: 263736 - DNA, 30 bp, Artificial Sequence
  Synthetic oligonucleotide
taacccggacgcgtcctgaattggatgtaa

SEQ ID NO: 263737 - DNA, 30 bp, Artificial Sequence
  Synthetic oligonucleotide
ctcaaaacatcggtggatttacatatgtaa

SEQ ID NO: 263738 - DNA, 30 bp, Artificial Sequence
  Synthetic oligonucleotide
acaacagggacccaatatccgtcactgtaa

SEQ ID NO: 263739 - DNA, 30 bp, Artificial Sequence
  Synthetic oligonucleotide
ctgaagtatcaggcaagggcagtcctgtaa

SEQ ID NO: 263740 - DNA, 30 bp, Artificial Sequence
  Synthetic oligonucleotide
aatcatggtttggtacacgaggagctgtaa

SEQ ID NO: 263741 - DNA, 30 bp, Artificial Sequence
  Synthetic oligonucleotide
gagtaatttactcgaggatggtagctgtaa

SEQ ID NO: 263742 - DNA, 30 bp, Artificial Sequence
  Synthetic oligonucleotide
ctttgttacaactgatgattagcgctgtaa

SEQ ID NO: 263743 - DNA, 30 bp, Artificial Sequence
  Synthetic oligonucleotide
gcagaattccttatttggttagctctgtaa

SEQ ID NO: 263744 - DNA, 30 bp, Artificial Sequence
  Synthetic oligonucleotide
cctatgtccgaagggaaaatcgctctgtaa

SEQ ID NO: 263745 - DNA, 30 bp, Artificial Sequence
  Synthetic oligonucleotide
ttcaagggatatcgagtaacgcgtctgtaa

SEQ ID NO: 263746 - DNA, 30 bp, Artificial Sequence
  Synthetic oligonucleotide
ttgctgagatctggcacggcatgtctgtaa

SEQ ID NO: 263747 - DNA, 30 bp, Artificial Sequence
  Synthetic oligonucleotide
accgcaagcaacccgcatacctttctgtaa

SEQ ID NO: 263748 - DNA, 30 bp, Artificial Sequence
  Synthetic oligonucleotide
tttcacagctaacgagggacacgagtgtaa

SEQ ID NO: 263749 - DNA, 30 bp, Artificial Sequence
  Synthetic oligonucleotide
tagtaaagattaccaacaggcttagtgtaa

SEQ ID NO: 263750 - DNA, 30 bp, Artificial Sequence
  Synthetic oligonucleotide
gactcgtagcagtaaggttaagacgtgtaa

SEQ ID NO: 263751 - DNA, 30 bp, Artificial Sequence
  Synthetic oligonucleotide
gggcccttgtaacgtcccgggtccgtgtaa

SEQ ID NO: 263752 - DNA, 30 bp, Artificial Sequence
  Synthetic oligonucleotide
tgctccagattttaaaagcatttcgtgtaa

SEQ ID NO: 263753 - DNA, 30 bp, Artificial Sequence
  Synthetic oligonucleotide
tacatctcgtctatttcggttcaggtgtaa

SEQ ID NO: 263754 - DNA, 30 bp, Artificial Sequence
  Synthetic oligonucleotide
acgccggtccattatcaagtcggggtgtaa

SEQ ID NO: 263755 - DNA, 30 bp, Artificial Sequence
  Synthetic oligonucleotide
attcgaaaaagtgttcgagtgtgtgtgtaa

SEQ ID NO: 263756 - DNA, 30 bp, Artificial Sequence
  Synthetic oligonucleotide
cgaggtgtactggtccttcagttattgtaa

SEQ ID NO: 263757 - DNA, 30 bp, Artificial Sequence
  Synthetic oligonucleotide
ttccgagagcagcttcagtctttattgtaa

SEQ ID NO: 263758 - DNA, 30 bp, Artificial Sequence
  Synthetic oligonucleotide
caagtaatcatgttctaagaccctttgtaa

SEQ ID NO: 263759 - DNA, 30 bp, Artificial Sequence
  Synthetic oligonucleotide
acgtctggatggggacgcccctttttgtaa

SEQ ID NO: 263760 - DNA, 30 bp, Artificial Sequence
  Synthetic oligonucleotide
cacgcctgggaatgatagacctaaaattaa

SEQ ID NO: 263761 - DNA, 31 bp, Artificial Sequence
  Synthetic oligonucleotide
gtggacgaccggcataacgtgatccaattaa

SEQ ID NO: 263762 - DNA, 30 bp, Artificial Sequence
  Synthetic oligonucleotide
cggaagagttaagggcttctgtgcaattaa

SEQ ID NO: 263763 - DNA, 30 bp, Artificial Sequence
  Synthetic oligonucleotide
ctcgcaaagttggttcatgtaccgaattaa

SEQ ID NO: 263764 - DNA, 30 bp, Artificial Sequence
  Synthetic oligonucleotide
gggtgttttagagaagggataaggaattaa

SEQ ID NO: 263765 - DNA, 30 bp, Artificial Sequence
  Synthetic oligonucleotide
caagtagtgtagatcattgagaggaattaa

SEQ ID NO: 263766 - DNA, 30 bp, Artificial Sequence
  Synthetic oligonucleotide
tatggtgccaaagtggactttatgaattaa

SEQ ID NO: 263767 - DNA, 30 bp, Artificial Sequence
  Synthetic oligonucleotide
atatccgccccctataataaggcacattaa

SEQ ID NO: 263768 - DNA, 30 bp, Artificial Sequence
  Synthetic oligonucleotide
acccacgtgacaagtgccaggatacattaa

SEQ ID NO: 263769 - DNA, 30 bp, Artificial Sequence
  Synthetic oligonucleotide
ccgcagggaattggtaggtttttgcattaa

SEQ ID NO: 263770 - DNA, 30 bp, Artificial Sequence
  Synthetic oligonucleotide
ggctaatgcgtgtcgccactgcaagattaa

SEQ ID NO: 263771 - DNA, 30 bp, Artificial Sequence
  Synthetic oligonucleotide
cgccacatctcgtactcccgcggagattaa

SEQ ID NO: 263772 - DNA, 30 bp, Artificial Sequence
  Synthetic oligonucleotide
tttattctcacggaaccgagaaacgattaa

SEQ ID NO: 263773 - DNA, 30 bp, Artificial Sequence
  Synthetic oligonucleotide
ggagcgggttcaggttttatcaaggattaa

SEQ ID NO: 263774 - DNA, 30 bp, Artificial Sequence
  Synthetic oligonucleotide
taggatcagcctgccttaaggaaggattaa

SEQ ID NO: 263775 - DNA, 30 bp, Artificial Sequence
  Synthetic oligonucleotide
aacccgaggtattggcagcaggcggattaa

SEQ ID NO: 263776 - DNA, 30 bp, Artificial Sequence
  Synthetic oligonucleotide
agaccagagtattcaccgcgagctgattaa

SEQ ID NO: 263777 - DNA, 30 bp, Artificial Sequence
  Synthetic oligonucleotide
agggtggaattgtgactccatgaatattaa

SEQ ID NO: 263778 - DNA, 31 bp, Artificial Sequence
  Synthetic oligonucleotide
tgaatctcgactgcctgcggcttgatattaa

SEQ ID NO: 263779 - DNA, 30 bp, Artificial Sequence
  Synthetic oligonucleotide
taaaccgcggggataggtttccagtattaa

SEQ ID NO: 263780 - DNA, 30 bp, Artificial Sequence
  Synthetic oligonucleotide
tgcctgccttggaatccagccgcttattaa

SEQ ID NO: 263781 - DNA, 30 bp, Artificial Sequence
  Synthetic oligonucleotide
actcataaggatctgtatctgtcttattaa

SEQ ID NO: 263782 - DNA, 30 bp, Artificial Sequence
  Synthetic oligonucleotide
gggctggttcctattcaaatcggttattaa

SEQ ID NO: 263783 - DNA, 30 bp, Artificial Sequence
  Synthetic oligonucleotide
ggtagccgcgagtagactgcaccaacttaa

SEQ ID NO: 263784 - DNA, 30 bp, Artificial Sequence
  Synthetic oligonucleotide
agtatattgaacatcttcaacataacttaa

SEQ ID NO: 263785 - DNA, 30 bp, Artificial Sequence
  Synthetic oligonucleotide
gtcttatcgaactatacttccaacacttaa

SEQ ID NO: 263786 - DNA, 30 bp, Artificial Sequence
  Synthetic oligonucleotide
cagcgcttttggtcgtataaaatcacttaa

SEQ ID NO: 263787 - DNA, 30 bp, Artificial Sequence
  Synthetic oligonucleotide
atggaaggcctggataaacgatatacttaa

SEQ ID NO: 263788 - DNA, 30 bp, Artificial Sequence
  Synthetic oligonucleotide
tgcataagtggcaaacaaaagtctacttaa

SEQ ID NO: 263789 - DNA, 30 bp, Artificial Sequence
  Synthetic oligonucleotide
caagacgctagctagttggtacaaccttaa

SEQ ID NO: 263790 - DNA, 30 bp, Artificial Sequence
  Synthetic oligonucleotide
tccgtattacgattattaattcgaccttaa

SEQ ID NO: 263791 - DNA, 30 bp, Artificial Sequence
  Synthetic oligonucleotide
gactgcctcagtggatacggatccccttaa

SEQ ID NO: 263792 - DNA, 30 bp, Artificial Sequence
  Synthetic oligonucleotide
tcttcacttgcgtgatcagaagcgccttaa

SEQ ID NO: 263793 - DNA, 30 bp, Artificial Sequence
  Synthetic oligonucleotide
taaaacacgtaaattgagggcatgccttaa

SEQ ID NO: 263794 - DNA, 30 bp, Artificial Sequence
  Synthetic oligonucleotide
ggggctttccggaaactaaacgctccttaa

SEQ ID NO: 263795 - DNA, 30 bp, Artificial Sequence
  Synthetic oligonucleotide
tccgggagactaccggcttaatgtccttaa

SEQ ID NO: 263796 - DNA, 30 bp, Artificial Sequence
  Synthetic oligonucleotide
cagcggaccggccgtagtgaaattccttaa

SEQ ID NO: 263797 - DNA, 30 bp, Artificial Sequence
  Synthetic oligonucleotide
gggcacccaccagtcttaactcgagcttaa

SEQ ID NO: 263798 - DNA, 30 bp, Artificial Sequence
  Synthetic oligonucleotide
gtcgttgggcgaaaaaggctagctgcttaa

SEQ ID NO: 263799 - DNA, 30 bp, Artificial Sequence
  Synthetic oligonucleotide
tatcgtgcttcatatgacgatggtgcttaa

SEQ ID NO: 263800 - DNA, 30 bp, Artificial Sequence
  Synthetic oligonucleotide
atcaataacccaattgagcaagaatcttaa

SEQ ID NO: 263801 - DNA, 30 bp, Artificial Sequence
  Synthetic oligonucleotide
acctcgccaccccgacccacgtaatcttaa

SEQ ID NO: 263802 - DNA, 30 bp, Artificial Sequence
  Synthetic oligonucleotide
tgaacattgtaggtacatggacagtcttaa

SEQ ID NO: 263803 - DNA, 30 bp, Artificial Sequence
  Synthetic oligonucleotide
ttggttcgctccgactatttacgttcttaa

SEQ ID NO: 263804 - DNA, 30 bp, Artificial Sequence
  Synthetic oligonucleotide
tggatgtgaagttggacatgaggaagttaa

SEQ ID NO: 263805 - DNA, 30 bp, Artificial Sequence
  Synthetic oligonucleotide
acagcgttcgaaaggcccaatggaagttaa

SEQ ID NO: 263806 - DNA, 30 bp, Artificial Sequence
  Synthetic oligonucleotide
aacagcggcgagaattacaacgtaagttaa

SEQ ID NO: 263807 - DNA, 30 bp, Artificial Sequence
  Synthetic oligonucleotide
gctaccattgcagattggctggacagttaa

SEQ ID NO: 263808 - DNA, 30 bp, Artificial Sequence
  Synthetic oligonucleotide
cggccaggagaagtacaacctgtgagttaa

SEQ ID NO: 263809 - DNA, 30 bp, Artificial Sequence
  Synthetic oligonucleotide
gtgatgggggaacccatttcacctagttaa

SEQ ID NO: 263810 - DNA, 30 bp, Artificial Sequence
  Synthetic oligonucleotide
cgtatggattgtgtgcacgatcagcgttaa

SEQ ID NO: 263811 - DNA, 30 bp, Artificial Sequence
  Synthetic oligonucleotide
ttatagaggccggttttttctaggcgttaa

SEQ ID NO: 263812 - DNA, 30 bp, Artificial Sequence
  Synthetic oligonucleotide
aacttcgatctcttccagggcgaaggttaa

SEQ ID NO: 263813 - DNA, 30 bp, Artificial Sequence
  Synthetic oligonucleotide
catggttaacaaccgtgagaccagggttaa

SEQ ID NO: 263814 - DNA, 30 bp, Artificial Sequence
  Synthetic oligonucleotide
agtaattagtccaacagaccagcgggttaa

SEQ ID NO: 263815 - DNA, 30 bp, Artificial Sequence
  Synthetic oligonucleotide
cgagcgtaccacaaggtacgttggggttaa

SEQ ID NO: 263816 - DNA, 30 bp, Artificial Sequence
  Synthetic oligonucleotide
acttcaggcaattattctaccttgggttaa

SEQ ID NO: 263817 - DNA, 30 bp, Artificial Sequence
  Synthetic oligonucleotide
gtcgcgggtgacacacgtatatctggttaa

SEQ ID NO: 263818 - DNA, 30 bp, Artificial Sequence
  Synthetic oligonucleotide
ggtcctccaagtgttcgatttgttggttaa

SEQ ID NO: 263819 - DNA, 30 bp, Artificial Sequence
  Synthetic oligonucleotide
cagtccttattaatgctttggtcatgttaa

SEQ ID NO: 263820 - DNA, 30 bp, Artificial Sequence
  Synthetic oligonucleotide
aggccgcaagcgatgttcgccatatgttaa

SEQ ID NO: 263821 - DNA, 30 bp, Artificial Sequence
  Synthetic oligonucleotide
gaagcttaatcttcgcgatctttatgttaa

SEQ ID NO: 263822 - DNA, 30 bp, Artificial Sequence
  Synthetic oligonucleotide
tagttatatgtttgttttcagatgtgttaa

SEQ ID NO: 263823 - DNA, 30 bp, Artificial Sequence
  Synthetic oligonucleotide
cttggacccccagaactcgttgcgatttaa

SEQ ID NO: 263824 - DNA, 30 bp, Artificial Sequence
  Synthetic oligonucleotide
tagggccgaacgctctccaagttgatttaa

SEQ ID NO: 263825 - DNA, 30 bp, Artificial Sequence
  Synthetic oligonucleotide
tccaggatcagatcgtaagttactatttaa

SEQ ID NO: 263826 - DNA, 30 bp, Artificial Sequence
  Synthetic oligonucleotide
gagactctcgatagcccacgttgtatttaa

SEQ ID NO: 263827 - DNA, 30 bp, Artificial Sequence
  Synthetic oligonucleotide
agtgcgatttaaagaagctggattatttaa

SEQ ID NO: 263828 - DNA, 30 bp, Artificial Sequence
  Synthetic oligonucleotide
ggggccggtctttaatgctcccgactttaa

SEQ ID NO: 263829 - DNA, 30 bp, Artificial Sequence
  Synthetic oligonucleotide
gtgtccgagagcttggaactttatctttaa

SEQ ID NO: 263830 - DNA, 30 bp, Artificial Sequence
  Synthetic oligonucleotide
atgacaatgtaccgcattgctattctttaa

SEQ ID NO: 263831 - DNA, 30 bp, Artificial Sequence
  Synthetic oligonucleotide
cgaggtgtacggcagcaattcagagtttaa

SEQ ID NO: 263832 - DNA, 30 bp, Artificial Sequence
  Synthetic oligonucleotide
gttaacaaacctcaggactggctagtttaa

SEQ ID NO: 263833 - DNA, 30 bp, Artificial Sequence
  Synthetic oligonucleotide
ttcatctgcctgtagcaacgacacgtttaa

SEQ ID NO: 263834 - DNA, 30 bp, Artificial Sequence
  Synthetic oligonucleotide
ctggagcacagtaatattgctagcgtttaa

SEQ ID NO: 263835 - DNA, 30 bp, Artificial Sequence
  Synthetic oligonucleotide
taggggatctcgaagaatttggtcgtttaa

SEQ ID NO: 263836 - DNA, 30 bp, Artificial Sequence
  Synthetic oligonucleotide
ttaaggataagctatttgaaagcggtttaa

SEQ ID NO: 263837 - DNA, 30 bp, Artificial Sequence
  Synthetic oligonucleotide
aactaggatcctcatacctggactgtttaa

SEQ ID NO: 263838 - DNA, 30 bp, Artificial Sequence
  Synthetic oligonucleotide
actagatagcatcatgtggtatctgtttaa

SEQ ID NO: 263839 - DNA, 30 bp, Artificial Sequence
  Synthetic oligonucleotide
ttcagaacgcactagagtgtatttgtttaa

SEQ ID NO: 263840 - DNA, 30 bp, Artificial Sequence
  Synthetic oligonucleotide
ccaacacataatcttctcgagtgattttaa

SEQ ID NO: 263841 - DNA, 30 bp, Artificial Sequence
  Synthetic oligonucleotide
catgaggcccaacgtctggaagacttttaa

SEQ ID NO: 263842 - DNA, 30 bp, Artificial Sequence
  Synthetic oligonucleotide
actaaaccagtagggtagagggtcttttaa

SEQ ID NO: 263843 - DNA, 30 bp, Artificial Sequence
  Synthetic oligonucleotide
gtgggaatgtggtgtgcgaactagttttaa

SEQ ID NO: 263844 - DNA, 30 bp, Artificial Sequence
  Synthetic oligonucleotide
gcctcaaataccgtacagtcacatttttaa

SEQ ID NO: 263845 - DNA, 30 bp, Artificial Sequence
  Synthetic oligonucleotide
agcgtgtgacggacccctcatcatttttaa

SEQ ID NO: 263846 - DNA, 30 bp, Artificial Sequence
  Synthetic oligonucleotide
ttcacacgcgaaattacgcatgaaaaaaca

SEQ ID NO: 263847 - DNA, 30 bp, Artificial Sequence
  Synthetic oligonucleotide
gttgacacatacaagctcacccgaaaaaca

SEQ ID NO: 263848 - DNA, 30 bp, Artificial Sequence
  Synthetic oligonucleotide
atctcctgctcactgcggaatggaaaaaca

SEQ ID NO: 263849 - DNA, 30 bp, Artificial Sequence
  Synthetic oligonucleotide
agaatatctcgagacgtgaagtgaaaaaca

SEQ ID NO: 263850 - DNA, 30 bp, Artificial Sequence
  Synthetic oligonucleotide
gcaagacgggcttgtccatgtggcaaaaca

SEQ ID NO: 263851 - DNA, 30 bp, Artificial Sequence
  Synthetic oligonucleotide
attcattggactgtacggcaactgaaaaca

SEQ ID NO: 263852 - DNA, 30 bp, Artificial Sequence
  Synthetic oligonucleotide
atgggcttcagggcagaggccagtaaaaca

SEQ ID NO: 263853 - DNA, 30 bp, Artificial Sequence
  Synthetic oligonucleotide
cctcacttagaaaagtacggaggtaaaaca

SEQ ID NO: 263854 - DNA, 30 bp, Artificial Sequence
  Synthetic oligonucleotide
gtctcctcttgcgtctaaccgtcacaaaca

SEQ ID NO: 263855 - DNA, 30 bp, Artificial Sequence
  Synthetic oligonucleotide
gcaaccaatgcttatgatgtgcgacaaaca

SEQ ID NO: 263856 - DNA, 30 bp, Artificial Sequence
  Synthetic oligonucleotide
tagagtaagttgcagccgtcccgccaaaca

SEQ ID NO: 263857 - DNA, 30 bp, Artificial Sequence
  Synthetic oligonucleotide
acgaaccaaacgtgcctttcaggccaaaca

SEQ ID NO: 263858 - DNA, 30 bp, Artificial Sequence
  Synthetic oligonucleotide
caaggtaattaggttacaggcctccaaaca

SEQ ID NO: 263859 - DNA, 30 bp, Artificial Sequence
  Synthetic oligonucleotide
aaagagcggtgcgacgaagttcagcaaaca

SEQ ID NO: 263860 - DNA, 30 bp, Artificial Sequence
  Synthetic oligonucleotide
atgacgcacaagggaggatcgaggcaaaca

SEQ ID NO: 263861 - DNA, 30 bp, Artificial Sequence
  Synthetic oligonucleotide
atccatgcagacaattgaagggtgcaaaca

SEQ ID NO: 263862 - DNA, 30 bp, Artificial Sequence
  Synthetic oligonucleotide
gcgcccacaggactcggtttcgctcaaaca

SEQ ID NO: 263863 - DNA, 30 bp, Artificial Sequence
  Synthetic oligonucleotide
aaaatccaggaagtatgcccaagtcaaaca

SEQ ID NO: 263864 - DNA, 30 bp, Artificial Sequence
  Synthetic oligonucleotide
tatggcagaatatccagcactccagaaaca

SEQ ID NO: 263865 - DNA, 30 bp, Artificial Sequence
  Synthetic oligonucleotide
tagtgcatctgcgtggcgccaatcgaaaca

SEQ ID NO: 263866 - DNA, 30 bp, Artificial Sequence
  Synthetic oligonucleotide
cgaagtcctatgtccgatcttgaggaaaca

SEQ ID NO: 263867 - DNA, 30 bp, Artificial Sequence
  Synthetic oligonucleotide
ctaaagacgacacgcaatgcgtatgaaaca

SEQ ID NO: 263868 - DNA, 30 bp, Artificial Sequence
  Synthetic oligonucleotide
taactgttctgactattcaatggtgaaaca

SEQ ID NO: 263869 - DNA, 30 bp, Artificial Sequence
  Synthetic oligonucleotide
attagcctataaaggccccgacaataaaca

SEQ ID NO: 263870 - DNA, 30 bp, Artificial Sequence
  Synthetic oligonucleotide
tgcctggaagacataaagcgtatataaaca

SEQ ID NO: 263871 - DNA, 30 bp, Artificial Sequence
  Synthetic oligonucleotide
aagcttaatgagaacactcggtgctaaaca

SEQ ID NO: 263872 - DNA, 30 bp, Artificial Sequence
  Synthetic oligonucleotide
tactgtatggaggtaagcctgacgtaaaca

SEQ ID NO: 263873 - DNA, 30 bp, Artificial Sequence
  Synthetic oligonucleotide
gtcagtcgggacgttccgtggatgtaaaca

SEQ ID NO: 263874 - DNA, 30 bp, Artificial Sequence
  Synthetic oligonucleotide
actctaagggcggatcaatactcttaaaca

SEQ ID NO: 263875 - DNA, 30 bp, Artificial Sequence
  Synthetic oligonucleotide
acgtgttaggggacacgcgcattttaaaca

SEQ ID NO: 263876 - DNA, 30 bp, Artificial Sequence
  Synthetic oligonucleotide
atagatgcgagtgagttggataaaacaaca

SEQ ID NO: 263877 - DNA, 30 bp, Artificial Sequence
  Synthetic oligonucleotide
ctctcatgcgaactaagagcaagaacaaca

SEQ ID NO: 263878 - DNA, 30 bp, Artificial Sequence
  Synthetic oligonucleotide
aaagggtctacgagagattatagaacaaca

SEQ ID NO: 263879 - DNA, 30 bp, Artificial Sequence
  Synthetic oligonucleotide
tacgtctatgaacggggcgcagtaacaaca

SEQ ID NO: 263880 - DNA, 28 bp, Artificial Sequence
  Synthetic oligonucleotide
gcgattcactcaaccctcgaacacaaca

SEQ ID NO: 263881 - DNA, 30 bp, Artificial Sequence
  Synthetic oligonucleotide
acatcgccgggaactcgactggtcacaaca

SEQ ID NO: 263882 - DNA, 30 bp, Artificial Sequence
  Synthetic oligonucleotide
accagcctgttcgaattttgtgatacaaca

SEQ ID NO: 263883 - DNA, 30 bp, Artificial Sequence
  Synthetic oligonucleotide
ggttacggctacccgcatttaaaaccaaca

SEQ ID NO: 263884 - DNA, 30 bp, Artificial Sequence
  Synthetic oligonucleotide
agctgactgcgctgggtctggcaaccaaca

SEQ ID NO: 263885 - DNA, 30 bp, Artificial Sequence
  Synthetic oligonucleotide
gaaggggatattctagaaatgacaccaaca

SEQ ID NO: 263886 - DNA, 30 bp, Artificial Sequence
  Synthetic oligonucleotide
acattccatctcgcatgtcagacgccaaca

SEQ ID NO: 263887 - DNA, 30 bp, Artificial Sequence
  Synthetic oligonucleotide
cacacgaggcgcttccaaatgtaagcaaca

SEQ ID NO: 263888 - DNA, 31 bp, Artificial Sequence
  Synthetic oligonucleotide
caatttagtttggtgtagtaggagagcaaca

SEQ ID NO: 263889 - DNA, 30 bp, Artificial Sequence
  Synthetic oligonucleotide
gcaggaaacgctaatatcgtcgtagcaaca

SEQ ID NO: 263890 - DNA, 30 bp, Artificial Sequence
  Synthetic oligonucleotide
gggcatgtcggggttaaagagaatgcaaca

SEQ ID NO: 263891 - DNA, 30 bp, Artificial Sequence
  Synthetic oligonucleotide
tatcgcccaggaccgtttacgcctgcaaca

SEQ ID NO: 263892 - DNA, 30 bp, Artificial Sequence
  Synthetic oligonucleotide
tacggctatttcacttcactcggtgcaaca

SEQ ID NO: 263893 - DNA, 30 bp, Artificial Sequence
  Synthetic oligonucleotide
ttagacgtaaagaagatcttcggatcaaca

SEQ ID NO: 263894 - DNA, 30 bp, Artificial Sequence
  Synthetic oligonucleotide
agtcgacccattttaaatttgtactcaaca

SEQ ID NO: 263895 - DNA, 30 bp, Artificial Sequence
  Synthetic oligonucleotide
gtgtgggggttatgttgatgattctcaaca

SEQ ID NO: 263896 - DNA, 30 bp, Artificial Sequence
  Synthetic oligonucleotide
taccctaaataccatacttctctgtcaaca

SEQ ID NO: 263897 - DNA, 30 bp, Artificial Sequence
  Synthetic oligonucleotide
acttacgctctacttgctctgagttcaaca

SEQ ID NO: 263898 - DNA, 30 bp, Artificial Sequence
  Synthetic oligonucleotide
ctcagaaattcaagatataacgtaagaaca

SEQ ID NO: 263899 - DNA, 30 bp, Artificial Sequence
  Synthetic oligonucleotide
ccacaggctttgcgcttcgtacggagaaca

SEQ ID NO: 263900 - DNA, 30 bp, Artificial Sequence
  Synthetic oligonucleotide
caacgcttcgagttattaccaaatagaaca

SEQ ID NO: 263901 - DNA, 30 bp, Artificial Sequence
  Synthetic oligonucleotide
cggttgattccgaggggttctgatagaaca

SEQ ID NO: 263902 - DNA, 30 bp, Artificial Sequence
  Synthetic oligonucleotide
ttcgggctgttctgcgggtgagaccgaaca

SEQ ID NO: 263903 - DNA, 30 bp, Artificial Sequence
  Synthetic oligonucleotide
gacgttacgaccgtgctgctccatcgaaca

SEQ ID NO: 263904 - DNA, 30 bp, Artificial Sequence
  Synthetic oligonucleotide
ctcatgttccactaaattggagaaggaaca

SEQ ID NO: 263905 - DNA, 30 bp, Artificial Sequence
  Synthetic oligonucleotide
tccccacttgtgtgtatcctctaaggaaca

SEQ ID NO: 263906 - DNA, 30 bp, Artificial Sequence
  Synthetic oligonucleotide
aagcggctggagctttctctcgcaggaaca

SEQ ID NO: 263907 - DNA, 30 bp, Artificial Sequence
  Synthetic oligonucleotide
gatagtactcccatcaagtatcgaggaaca

SEQ ID NO: 263908 - DNA, 30 bp, Artificial Sequence
  Synthetic oligonucleotide
tcttaggtgtttgttacgtcgcgcggaaca

SEQ ID NO: 263909 - DNA, 30 bp, Artificial Sequence
  Synthetic oligonucleotide
gcactagcccacataagcgcctgcggaaca

SEQ ID NO: 263910 - DNA, 30 bp, Artificial Sequence
  Synthetic oligonucleotide
ttcgttaacgagagcaggcgccagggaaca

SEQ ID NO: 263911 - DNA, 30 bp, Artificial Sequence
  Synthetic oligonucleotide
ccgctcgagtagaggtagggacatggaaca

SEQ ID NO: 263912 - DNA, 30 bp, Artificial Sequence
  Synthetic oligonucleotide
cgtttttgtgatagagcgaaagttggaaca

SEQ ID NO: 263913 - DNA, 30 bp, Artificial Sequence
  Synthetic oligonucleotide
cgttgcaggaaacttcgttccgttggaaca

SEQ ID NO: 263914 - DNA, 30 bp, Artificial Sequence
  Synthetic oligonucleotide
ccacgcggtccaatgaaggtctttggaaca

SEQ ID NO: 263915 - DNA, 30 bp, Artificial Sequence
  Synthetic oligonucleotide
tgtgtcgatcgtacttctcggtaatgaaca

SEQ ID NO: 263916 - DNA, 30 bp, Artificial Sequence
  Synthetic oligonucleotide
gcactgtcgttaatgtgggccacatgaaca

SEQ ID NO: 263917 - DNA, 30 bp, Artificial Sequence
  Synthetic oligonucleotide
acaagctcgcaggtccctaccgcatgaaca

SEQ ID NO: 263918 - DNA, 30 bp, Artificial Sequence
  Synthetic oligonucleotide
aacaacattaagtggatgagagtatgaaca

SEQ ID NO: 263919 - DNA, 30 bp, Artificial Sequence
  Synthetic oligonucleotide
cagtaccggttggcgtagttacgctgaaca

SEQ ID NO: 263920 - DNA, 30 bp, Artificial Sequence
  Synthetic oligonucleotide
cttatgacgtgaggctttctaaagtgaaca

SEQ ID NO: 263921 - DNA, 30 bp, Artificial Sequence
  Synthetic oligonucleotide
tttcgggtctcgatccaatcattttgaaca

SEQ ID NO: 263922 - DNA, 30 bp, Artificial Sequence
  Synthetic oligonucleotide
tcagtggatccaaagttaagtcgaataaca

SEQ ID NO: 263923 - DNA, 30 bp, Artificial Sequence
  Synthetic oligonucleotide
atgggatagtcccgcgtggatataataaca

SEQ ID NO: 263924 - DNA, 30 bp, Artificial Sequence
  Synthetic oligonucleotide
gtgggtgtgaaagcccgacttggcataaca

SEQ ID NO: 263925 - DNA, 30 bp, Artificial Sequence
  Synthetic oligonucleotide
tacggacactaaagcggcatgatcataaca

SEQ ID NO: 263926 - DNA, 30 bp, Artificial Sequence
  Synthetic oligonucleotide
ggcttttgaggtgggagggaggctataaca

SEQ ID NO: 263927 - DNA, 30 bp, Artificial Sequence
  Synthetic oligonucleotide
aatccggaagagctaactaatcttataaca

SEQ ID NO: 263928 - DNA, 30 bp, Artificial Sequence
  Synthetic oligonucleotide
aagatctaacttagtaagggggttataaca

SEQ ID NO: 263929 - DNA, 30 bp, Artificial Sequence
  Synthetic oligonucleotide
tcggagggggctctagcaacgatactaaca

SEQ ID NO: 263930 - DNA, 30 bp, Artificial Sequence
  Synthetic oligonucleotide
aaggggagccagggagagttccctctaaca

SEQ ID NO: 263931 - DNA, 30 bp, Artificial Sequence
  Synthetic oligonucleotide
ggggcgaataaggtcgacggatttctaaca

SEQ ID NO: 263932 - DNA, 30 bp, Artificial Sequence
  Synthetic oligonucleotide
ttatcgcgctcggaacatccgtccgtaaca

SEQ ID NO: 263933 - DNA, 30 bp, Artificial Sequence
  Synthetic oligonucleotide
gatcgaacggattatctgtatggggtaaca

SEQ ID NO: 263934 - DNA, 30 bp, Artificial Sequence
  Synthetic oligonucleotide
taaccctgaattgcgtcatcgcgtgtaaca

SEQ ID NO: 263935 - DNA, 30 bp, Artificial Sequence
  Synthetic oligonucleotide
aaagcagtacggaatgtgcacgttgtaaca

SEQ ID NO: 263936 - DNA, 30 bp, Artificial Sequence
  Synthetic oligonucleotide
gaaaggaccggcctcacaccagaattaaca

SEQ ID NO: 263937 - DNA, 30 bp, Artificial Sequence
  Synthetic oligonucleotide
gcatgttgcacgctccgagggctcttaaca

SEQ ID NO: 263938 - DNA, 30 bp, Artificial Sequence
  Synthetic oligonucleotide
ttttcggttgcttggagggcccagttaaca

SEQ ID NO: 263939 - DNA, 30 bp, Artificial Sequence
  Synthetic oligonucleotide
gtggtacaattacaaaccagcctgttaaca

SEQ ID NO: 263940 - DNA, 30 bp, Artificial Sequence
  Synthetic oligonucleotide
aaacagatggcagatgttccgtctttaaca

SEQ ID NO: 263941 - DNA, 30 bp, Artificial Sequence
  Synthetic oligonucleotide
tcgccaatggagttcccccagattaacaca

SEQ ID NO: 263942 - DNA, 30 bp, Artificial Sequence
  Synthetic oligonucleotide
atatggcggagcccatacaccgttaacaca

SEQ ID NO: 263943 - DNA, 30 bp, Artificial Sequence
  Synthetic oligonucleotide
cggcgaatatctaattacgcggaacacaca

SEQ ID NO: 263944 - DNA, 30 bp, Artificial Sequence
  Synthetic oligonucleotide
aaaccatgacgaaattcagcaactcacaca

SEQ ID NO: 263945 - DNA, 30 bp, Artificial Sequence
  Synthetic oligonucleotide
gatccggtcgatatgagtacgtttcacaca

SEQ ID NO: 263946 - DNA, 30 bp, Artificial Sequence
  Synthetic oligonucleotide
caggaagcgtcatcttgctacgacgacaca

SEQ ID NO: 263947 - DNA, 30 bp, Artificial Sequence
  Synthetic oligonucleotide
tcgttacttgaggaagaccacagcgacaca

SEQ ID NO: 263948 - DNA, 30 bp, Artificial Sequence
  Synthetic oligonucleotide
ccctcctccccagagctactccgcgacaca

SEQ ID NO: 263949 - DNA, 30 bp, Artificial Sequence
  Synthetic oligonucleotide
aagagtgcttcggtgcgatagtgcgacaca

SEQ ID NO: 263950 - DNA, 30 bp, Artificial Sequence
  Synthetic oligonucleotide
ctccccaagcgggtcatcatagatgacaca

SEQ ID NO: 263951 - DNA, 30 bp, Artificial Sequence
  Synthetic oligonucleotide
gcggaacgcatccgtcgattgtatgacaca

SEQ ID NO: 263952 - DNA, 30 bp, Artificial Sequence
  Synthetic oligonucleotide
accaggaatcaggctccgtagcaatacaca

SEQ ID NO: 263953 - DNA, 30 bp, Artificial Sequence
  Synthetic oligonucleotide
cgcacaggttcactaggagtgatatacaca

SEQ ID NO: 263954 - DNA, 30 bp, Artificial Sequence
  Synthetic oligonucleotide
atcggcggctgttaatatcgatactacaca

SEQ ID NO: 263955 - DNA, 30 bp, Artificial Sequence
  Synthetic oligonucleotide
ttactctggttaatcatagtccgctacaca

SEQ ID NO: 263956 - DNA, 30 bp, Artificial Sequence
  Synthetic oligonucleotide
actaaccaccgcgctccgtctcgctacaca

SEQ ID NO: 263957 - DNA, 30 bp, Artificial Sequence
  Synthetic oligonucleotide
tgagtgaagcggttcggctctggaaccaca

SEQ ID NO: 263958 - DNA, 30 bp, Artificial Sequence
  Synthetic oligonucleotide
gtagcctctggaaacactgtcctcaccaca

SEQ ID NO: 263959 - DNA, 30 bp, Artificial Sequence
  Synthetic oligonucleotide
aacgtatatatactaatgcggaagaccaca

SEQ ID NO: 263960 - DNA, 30 bp, Artificial Sequence
  Synthetic oligonucleotide
tgagatcccgggagacggttatagaccaca

SEQ ID NO: 263961 - DNA, 30 bp, Artificial Sequence
  Synthetic oligonucleotide
aggttccctgctgtttgggacgggaccaca

SEQ ID NO: 263962 - DNA, 30 bp, Artificial Sequence
  Synthetic oligonucleotide
tcagatagttggtgctctagatggaccaca

SEQ ID NO: 263963 - DNA, 30 bp, Artificial Sequence
  Synthetic oligonucleotide
gggggctttcggcatgaagctgataccaca

SEQ ID NO: 263964 - DNA, 30 bp, Artificial Sequence
  Synthetic oligonucleotide
ataaattgggcctcgcgtctcgaacccaca

SEQ ID NO: 263965 - DNA, 30 bp, Artificial Sequence
  Synthetic oligonucleotide
tattaactaatgtagtgcagataacccaca

SEQ ID NO: 263966 - DNA, 30 bp, Artificial Sequence
  Synthetic oligonucleotide
gacacaaacgcaccatagtaatcccccaca

SEQ ID NO: 263967 - DNA, 30 bp, Artificial Sequence
  Synthetic oligonucleotide
acctgcttgcatgatatccagagccccaca

SEQ ID NO: 263968 - DNA, 30 bp, Artificial Sequence
  Synthetic oligonucleotide
tatcagtttcctggagggaagtcgcccaca

SEQ ID NO: 263969 - DNA, 30 bp, Artificial Sequence
  Synthetic oligonucleotide
tcaaggtaatattgccttaacatgcccaca

SEQ ID NO: 263970 - DNA, 30 bp, Artificial Sequence
  Synthetic oligonucleotide
accagttcgacgctcggttccttggccaca

SEQ ID NO: 263971 - DNA, 30 bp, Artificial Sequence
  Synthetic oligonucleotide
gtatatcatggagttattatgcctgccaca

SEQ ID NO: 263972 - DNA, 30 bp, Artificial Sequence
  Synthetic oligonucleotide
aaggttcactgcgtgctaaacgttgccaca

SEQ ID NO: 263973 - DNA, 30 bp, Artificial Sequence
  Synthetic oligonucleotide
atggggaaggggcacggtcccaggtccaca

SEQ ID NO: 263974 - DNA, 30 bp, Artificial Sequence
  Synthetic oligonucleotide
agtgctgaaggaccgtcctggataagcaca

SEQ ID NO: 263975 - DNA, 30 bp, Artificial Sequence
  Synthetic oligonucleotide
agtggtgttcattgattgcctcacagcaca

SEQ ID NO: 263976 - DNA, 30 bp, Artificial Sequence
  Synthetic oligonucleotide
tttgcaaagcgatgattccgtgccagcaca

SEQ ID NO: 263977 - DNA, 30 bp, Artificial Sequence
  Synthetic oligonucleotide
gtttacctgacggacgtgccttagagcaca

SEQ ID NO: 263978 - DNA, 30 bp, Artificial Sequence
  Synthetic oligonucleotide
gcgactatactatgctttccctgtagcaca

SEQ ID NO: 263979 - DNA, 30 bp, Artificial Sequence
  Synthetic oligonucleotide
cccagtcacgtaatatgcgagcgccgcaca

SEQ ID NO: 263980 - DNA, 30 bp, Artificial Sequence
  Synthetic oligonucleotide
agtagaaggacacccttgtaaccgcgcaca

SEQ ID NO: 263981 - DNA, 30 bp, Artificial Sequence
  Synthetic oligonucleotide
gttgcggccggttgtcgggagataggcaca

SEQ ID NO: 263982 - DNA, 30 bp, Artificial Sequence
  Synthetic oligonucleotide
atggggcggcttcctgacctagtgggcaca

SEQ ID NO: 263983 - DNA, 30 bp, Artificial Sequence
  Synthetic oligonucleotide
gatagcgcgcaaggattcgctttgggcaca

SEQ ID NO: 263984 - DNA, 30 bp, Artificial Sequence
  Synthetic oligonucleotide
gcggatttggtagctaagagctctggcaca

SEQ ID NO: 263985 - DNA, 30 bp, Artificial Sequence
  Synthetic oligonucleotide
ggttgggtctagttcaaaaggctatgcaca

SEQ ID NO: 263986 - DNA, 30 bp, Artificial Sequence
  Synthetic oligonucleotide
attggggctatgagatcgaatggctgcaca

SEQ ID NO: 263987 - DNA, 30 bp, Artificial Sequence
  Synthetic oligonucleotide
tgaaaggtgcatgtaactcgtgattgcaca

SEQ ID NO: 263988 - DNA, 30 bp, Artificial Sequence
  Synthetic oligonucleotide
agtactccaggcgttcagggtagcatcaca

SEQ ID NO: 263989 - DNA, 30 bp, Artificial Sequence
  Synthetic oligonucleotide
agcgtaatctacgtggtaaagacgatcaca

SEQ ID NO: 263990 - DNA, 30 bp, Artificial Sequence
  Synthetic oligonucleotide
aactaatactaggcaagtgggcggatcaca

SEQ ID NO: 263991 - DNA, 30 bp, Artificial Sequence
  Synthetic oligonucleotide
gtccaatcggacatgcatgtaaccctcaca

SEQ ID NO: 263992 - DNA, 30 bp, Artificial Sequence
  Synthetic oligonucleotide
tatagcgtaacttgtaccggtgtgctcaca

SEQ ID NO: 263993 - DNA, 30 bp, Artificial Sequence
  Synthetic oligonucleotide
gacaggtggaatatgggaacctttctcaca

SEQ ID NO: 263994 - DNA, 30 bp, Artificial Sequence
  Synthetic oligonucleotide
gctcgcatggcctagcgaccccgcgtcaca

SEQ ID NO: 263995 - DNA, 30 bp, Artificial Sequence
  Synthetic oligonucleotide
gcattgattttcatgaatagaacggtcaca

SEQ ID NO: 263996 - DNA, 30 bp, Artificial Sequence
  Synthetic oligonucleotide
atcaccgttgtggtaccactgagggtcaca

SEQ ID NO: 263997 - DNA, 30 bp, Artificial Sequence
  Synthetic oligonucleotide
ctcttaagagggcggccaatacgcttcaca

SEQ ID NO: 263998 - DNA, 30 bp, Artificial Sequence
  Synthetic oligonucleotide
cgttttcgtaatctgacagccgtcttcaca

SEQ ID NO: 263999 - DNA, 30 bp, Artificial Sequence
  Synthetic oligonucleotide
cttagttgctttacatgtcagaggttcaca

SEQ ID NO: 264000 - DNA, 30 bp, Artificial Sequence
  Synthetic oligonucleotide
ggtgcgagcgggaggtcttcatggttcaca

SEQ ID NO: 264001 - DNA, 30 bp, Artificial Sequence
  Synthetic oligonucleotide
catattgtcgatgtcttcgactatttcaca

SEQ ID NO: 264002 - DNA, 27 bp, Artificial Sequence
  Synthetic oligonucleotide
ataacagtttaaagggaatttttcaca

SEQ ID NO: 264003 - DNA, 30 bp, Artificial Sequence
  Synthetic oligonucleotide
ctaaagaattgcacattgtttaaaaagaca

SEQ ID NO: 264004 - DNA, 30 bp, Artificial Sequence
  Synthetic oligonucleotide
gggcttcttcgggaatctgacagaaagaca

SEQ ID NO: 264005 - DNA, 30 bp, Artificial Sequence
  Synthetic oligonucleotide
ccaactttacctgggagcgctggaaagaca

SEQ ID NO: 264006 - DNA, 30 bp, Artificial Sequence
  Synthetic oligonucleotide
tttgagatcacaaggctattgcacaagaca

SEQ ID NO: 264007 - DNA, 30 bp, Artificial Sequence
  Synthetic oligonucleotide
caagcccgaatcagaagcggctgcaagaca

SEQ ID NO: 264008 - DNA, 30 bp, Artificial Sequence
  Synthetic oligonucleotide
aattcagggtgcgcgacgagtccgaagaca

SEQ ID NO: 264009 - DNA, 30 bp, Artificial Sequence
  Synthetic oligonucleotide
cctgacaattgtgttggtcgtttgaagaca

SEQ ID NO: 264010 - DNA, 30 bp, Artificial Sequence
  Synthetic oligonucleotide
attgcgctatgtggacgtagatttaagaca

SEQ ID NO: 264011 - DNA, 30 bp, Artificial Sequence
  Synthetic oligonucleotide
tggaagaagagctgagatttgttacagaca

SEQ ID NO: 264012 - DNA, 30 bp, Artificial Sequence
  Synthetic oligonucleotide
gtagagtagttttcttacgaggcccagaca

SEQ ID NO: 264013 - DNA, 40 bp, Artificial Sequence
  Synthetic oligonucleotide
cccgttcctatgtacccagaaggattgatcctgccagaca

SEQ ID NO: 264014 - DNA, 29 bp, Artificial Sequence
  Synthetic oligonucleotide
atcgcacttattacgaccagatccagaca

SEQ ID NO: 264015 - DNA, 30 bp, Artificial Sequence
  Synthetic oligonucleotide
gggttctccctagagtccggttagcagaca

SEQ ID NO: 264016 - DNA, 30 bp, Artificial Sequence
  Synthetic oligonucleotide
gcgcctaaaggtttacatacttcgcagaca

SEQ ID NO: 264017 - DNA, 30 bp, Artificial Sequence
  Synthetic oligonucleotide
agactcttaggcgcaccgctaagtcagaca

SEQ ID NO: 264018 - DNA, 30 bp, Artificial Sequence
  Synthetic oligonucleotide
cgatattctaactgtaatccgtttcagaca

SEQ ID NO: 264019 - DNA, 30 bp, Artificial Sequence
  Synthetic oligonucleotide
aaccacgatttgttccagcaaaaagagaca

SEQ ID NO: 264020 - DNA, 30 bp, Artificial Sequence
  Synthetic oligonucleotide
caggcaccggtaactccgggcaccgagaca

SEQ ID NO: 264021 - DNA, 30 bp, Artificial Sequence
  Synthetic oligonucleotide
ttgctcccccacaggagtaagacggagaca

SEQ ID NO: 264022 - DNA, 30 bp, Artificial Sequence
  Synthetic oligonucleotide
gacggtcttaatataatgaggagggagaca

SEQ ID NO: 264023 - DNA, 30 bp, Artificial Sequence
  Synthetic oligonucleotide
ctagatctaggtacctgaactggggagaca

SEQ ID NO: 264024 - DNA, 30 bp, Artificial Sequence
  Synthetic oligonucleotide
tgaacattatcatgtgaagccatggagaca

SEQ ID NO: 264025 - DNA, 30 bp, Artificial Sequence
  Synthetic oligonucleotide
tggatgtaaatatcgcctcctttggagaca

SEQ ID NO: 264026 - DNA, 30 bp, Artificial Sequence
  Synthetic oligonucleotide
tacgctcaaagcgcacatgaagctgagaca

SEQ ID NO: 264027 - DNA, 30 bp, Artificial Sequence
  Synthetic oligonucleotide
ataggggatttggggttaatcagtgagaca

SEQ ID NO: 264028 - DNA, 30 bp, Artificial Sequence
  Synthetic oligonucleotide
gggggccatccgaaaataagtagtgagaca

SEQ ID NO: 264029 - DNA, 30 bp, Artificial Sequence
  Synthetic oligonucleotide
aagccgatgttgacgcggtaaggtgagaca

SEQ ID NO: 264030 - DNA, 30 bp, Artificial Sequence
  Synthetic oligonucleotide
gcctgaaagctccctccggggtttgagaca

SEQ ID NO: 264031 - DNA, 30 bp, Artificial Sequence
  Synthetic oligonucleotide
ttaagcaaggctaacgccacgtcctagaca

SEQ ID NO: 264032 - DNA, 30 bp, Artificial Sequence
  Synthetic oligonucleotide
attgaggtgatttagagtaattcctagaca

SEQ ID NO: 264033 - DNA, 30 bp, Artificial Sequence
  Synthetic oligonucleotide
taaagaaagatcgatcctcggcggtagaca

SEQ ID NO: 264034 - DNA, 30 bp, Artificial Sequence
  Synthetic oligonucleotide
aagaaagagtagtgaaaattcctgtagaca

SEQ ID NO: 264035 - DNA, 30 bp, Artificial Sequence
  Synthetic oligonucleotide
ccggagaaggtttatagtacttcttagaca

SEQ ID NO: 264036 - DNA, 30 bp, Artificial Sequence
  Synthetic oligonucleotide
cagtgacaagggcgaaaacatgcaacgaca

SEQ ID NO: 264037 - DNA, 30 bp, Artificial Sequence
  Synthetic oligonucleotide
tttacttgatagcgaacgaggctaacgaca

SEQ ID NO: 264038 - DNA, 30 bp, Artificial Sequence
  Synthetic oligonucleotide
cggggtagcaatgttgagattgagacgaca

SEQ ID NO: 264039 - DNA, 30 bp, Artificial Sequence
  Synthetic oligonucleotide
cggcaatggcgtgtcctacggcatacgaca

SEQ ID NO: 264040 - DNA, 30 bp, Artificial Sequence
  Synthetic oligonucleotide
gtgcttacttgtctaaagttttgtacgaca

SEQ ID NO: 264041 - DNA, 30 bp, Artificial Sequence
  Synthetic oligonucleotide
catcagtgagacttgagcattaaaccgaca

SEQ ID NO: 264042 - DNA, 30 bp, Artificial Sequence
  Synthetic oligonucleotide
gccgcaatacttagtcacggcataccgaca

SEQ ID NO: 264043 - DNA, 30 bp, Artificial Sequence
  Synthetic oligonucleotide
gaagtacacgggagacacttgaacccgaca

SEQ ID NO: 264044 - DNA, 30 bp, Artificial Sequence
  Synthetic oligonucleotide
cgagccccggggtacaacggacccccgaca

SEQ ID NO: 264045 - DNA, 30 bp, Artificial Sequence
  Synthetic oligonucleotide
tgcacgttggggggcagtatcgcgccgaca

SEQ ID NO: 264046 - DNA, 30 bp, Artificial Sequence
  Synthetic oligonucleotide
ttcttttcatgttccgacgatgtgccgaca

SEQ ID NO: 264047 - DNA, 30 bp, Artificial Sequence
  Synthetic oligonucleotide
acggctctgtcccccaaaactttgccgaca

SEQ ID NO: 264048 - DNA, 30 bp, Artificial Sequence
  Synthetic oligonucleotide
ggccactgtaaaatagaatgtagtccgaca

SEQ ID NO: 264049 - DNA, 30 bp, Artificial Sequence
  Synthetic oligonucleotide
cttatgtggaacgtgctgacgtttccgaca

SEQ ID NO: 264050 - DNA, 30 bp, Artificial Sequence
  Synthetic oligonucleotide
acgggtaggacacattagtaatgtgcgaca

SEQ ID NO: 264051 - DNA, 30 bp, Artificial Sequence
  Synthetic oligonucleotide
gctaaatgaggttgtcttattgtatcgaca

SEQ ID NO: 264052 - DNA, 30 bp, Artificial Sequence
  Synthetic oligonucleotide
ctgtggccggtatcctatcagtactcgaca

SEQ ID NO: 264053 - DNA, 30 bp, Artificial Sequence
  Synthetic oligonucleotide
ccaacgtcggggtgaatccacccctcgaca

SEQ ID NO: 264054 - DNA, 30 bp, Artificial Sequence
  Synthetic oligonucleotide
ggtgatgcgagcggtatcagaaagtcgaca

SEQ ID NO: 264055 - DNA, 30 bp, Artificial Sequence
  Synthetic oligonucleotide
ctcaaacaatttctttgaaccaagtcgaca

SEQ ID NO: 264056 - DNA, 30 bp, Artificial Sequence
  Synthetic oligonucleotide
tcgcgggtcatcatggcactcaggtcgaca

SEQ ID NO: 264057 - DNA, 30 bp, Artificial Sequence
  Synthetic oligonucleotide
gtaccgtaaggaaatcataggaggtcgaca

SEQ ID NO: 264058 - DNA, 30 bp, Artificial Sequence
  Synthetic oligonucleotide
gaagctaatatgggtcgcgtagggtcgaca

SEQ ID NO: 264059 - DNA, 30 bp, Artificial Sequence
  Synthetic oligonucleotide
aataataacttatcataatcgaaaaggaca

SEQ ID NO: 264060 - DNA, 31 bp, Artificial Sequence
  Synthetic oligonucleotide
atcactgtaatatttgcgtgagggcaggaca

SEQ ID NO: 264061 - DNA, 30 bp, Artificial Sequence
  Synthetic oligonucleotide
gggatgtatgacataggggtaatcaggaca

SEQ ID NO: 264062 - DNA, 30 bp, Artificial Sequence
  Synthetic oligonucleotide
aggttatagtggcctttgagctggaggaca

SEQ ID NO: 264063 - DNA, 30 bp, Artificial Sequence
  Synthetic oligonucleotide
tgaatgcgggtaggtccatgggtgaggaca

SEQ ID NO: 264064 - DNA, 30 bp, Artificial Sequence
  Synthetic oligonucleotide
cggagggcgctggccaagttacgacggaca

SEQ ID NO: 264065 - DNA, 30 bp, Artificial Sequence
  Synthetic oligonucleotide
gaggggcaggtctacttaacgggacggaca

SEQ ID NO: 264066 - DNA, 30 bp, Artificial Sequence
  Synthetic oligonucleotide
tatagtgaatgaaccaatgacacccggaca

SEQ ID NO: 264067 - DNA, 30 bp, Artificial Sequence
  Synthetic oligonucleotide
cgcctccattttaccgagatccgccggaca

SEQ ID NO: 264068 - DNA, 30 bp, Artificial Sequence
  Synthetic oligonucleotide
accattgaaacgcatcttatgtagcggaca

SEQ ID NO: 264069 - DNA, 30 bp, Artificial Sequence
  Synthetic oligonucleotide
ttcagtgcagaaaaatttccagctcggaca

SEQ ID NO: 264070 - DNA, 30 bp, Artificial Sequence
  Synthetic oligonucleotide
agctacgtgtgcggtgtgacacgtcggaca

SEQ ID NO: 264071 - DNA, 30 bp, Artificial Sequence
  Synthetic oligonucleotide
tgtatttgttctagagcattcggtcggaca

SEQ ID NO: 264072 - DNA, 30 bp, Artificial Sequence
  Synthetic oligonucleotide
actaacggtataaggcggtactgtcggaca

SEQ ID NO: 264073 - DNA, 30 bp, Artificial Sequence
  Synthetic oligonucleotide
gatgaccggaatattgtcaggtaagggaca

SEQ ID NO: 264074 - DNA, 30 bp, Artificial Sequence
  Synthetic oligonucleotide
ggaacatagagggaactcatgggagggaca

SEQ ID NO: 264075 - DNA, 30 bp, Artificial Sequence
  Synthetic oligonucleotide
gtttggcggtaattagacttccccgggaca

SEQ ID NO: 264076 - DNA, 30 bp, Artificial Sequence
  Synthetic oligonucleotide
caagtaactagtggtaggcagacatggaca

SEQ ID NO: 264077 - DNA, 30 bp, Artificial Sequence
  Synthetic oligonucleotide
cgtgctgtcaaatcgaatcagacgtggaca

SEQ ID NO: 264078 - DNA, 30 bp, Artificial Sequence
  Synthetic oligonucleotide
gatatgccaagagtggttagcgcgtggaca

SEQ ID NO: 264079 - DNA, 30 bp, Artificial Sequence
  Synthetic oligonucleotide
agtgcgcaccgggtatcggtcttgtggaca

SEQ ID NO: 264080 - DNA, 30 bp, Artificial Sequence
  Synthetic oligonucleotide
agcgttttatgatcggggggccattggaca

SEQ ID NO: 264081 - DNA, 30 bp, Artificial Sequence
  Synthetic oligonucleotide
tagtttagcttcagaatgcatcattggaca

SEQ ID NO: 264082 - DNA, 30 bp, Artificial Sequence
  Synthetic oligonucleotide
ggtgataatcgagtctagttgtattggaca

SEQ ID NO: 264083 - DNA, 30 bp, Artificial Sequence
  Synthetic oligonucleotide
tctgcggcgagttattttcaggcttggaca

SEQ ID NO: 264084 - DNA, 30 bp, Artificial Sequence
  Synthetic oligonucleotide
tcattagtccatcaccagcatatttggaca

SEQ ID NO: 264085 - DNA, 30 bp, Artificial Sequence
  Synthetic oligonucleotide
cggttgactgtggagcgtcactaaatgaca

SEQ ID NO: 264086 - DNA, 30 bp, Artificial Sequence
  Synthetic oligonucleotide
tgtctaaagtatgattggctgctgatgaca

SEQ ID NO: 264087 - DNA, 30 bp, Artificial Sequence
  Synthetic oligonucleotide
tttgcgtctaaggacaatagacctatgaca

SEQ ID NO: 264088 - DNA, 30 bp, Artificial Sequence
  Synthetic oligonucleotide
ggttgtcgtaggatgcggtcacccctgaca

SEQ ID NO: 264089 - DNA, 30 bp, Artificial Sequence
  Synthetic oligonucleotide
cgaagataattgttttgtcgctcgctgaca

SEQ ID NO: 264090 - DNA, 30 bp, Artificial Sequence
  Synthetic oligonucleotide
gagcaacgaagtaggcttccctctctgaca

SEQ ID NO: 264091 - DNA, 30 bp, Artificial Sequence
  Synthetic oligonucleotide
gccggctattacacgtcggtgcgtctgaca

SEQ ID NO: 264092 - DNA, 30 bp, Artificial Sequence
  Synthetic oligonucleotide
acggaactacccctgtgggacacagtgaca

SEQ ID NO: 264093 - DNA, 30 bp, Artificial Sequence
  Synthetic oligonucleotide
aaattcctcaccaggacttccctagtgaca

SEQ ID NO: 264094 - DNA, 30 bp, Artificial Sequence
  Synthetic oligonucleotide
agaatgtcacccggactaaaacccgtgaca

SEQ ID NO: 264095 - DNA, 30 bp, Artificial Sequence
  Synthetic oligonucleotide
ttattccaaaatccgatgacaacggtgaca

SEQ ID NO: 264096 - DNA, 30 bp, Artificial Sequence
  Synthetic oligonucleotide
tcgtgtcatgacccagttcgccttgtgaca

SEQ ID NO: 264097 - DNA, 30 bp, Artificial Sequence
  Synthetic oligonucleotide
tgaacggctaattattagacagttgtgaca

SEQ ID NO: 264098 - DNA, 30 bp, Artificial Sequence
  Synthetic oligonucleotide
aatccacgggctggaagactgatattgaca

SEQ ID NO: 264099 - DNA, 30 bp, Artificial Sequence
  Synthetic oligonucleotide
gcaaaatcgacatagccacccttattgaca

SEQ ID NO: 264100 - DNA, 30 bp, Artificial Sequence
  Synthetic oligonucleotide
catttgagaatatcaaccgtctgcttgaca

SEQ ID NO: 264101 - DNA, 30 bp, Artificial Sequence
  Synthetic oligonucleotide
tgatcaagtccttatggtgtttatttgaca

SEQ ID NO: 264102 - DNA, 30 bp, Artificial Sequence
  Synthetic oligonucleotide
gtcacaggttaaaaggagtatactttgaca

SEQ ID NO: 264103 - DNA, 30 bp, Artificial Sequence
  Synthetic oligonucleotide
gggggtcgtaataggcagacaccaaataca

SEQ ID NO: 264104 - DNA, 30 bp, Artificial Sequence
  Synthetic oligonucleotide
gttaagacctctgactatagttacaataca

SEQ ID NO: 264105 - DNA, 30 bp, Artificial Sequence
  Synthetic oligonucleotide
gaattaaaaccatattcgtcgatcaataca

SEQ ID NO: 264106 - DNA, 30 bp, Artificial Sequence
  Synthetic oligonucleotide
gagggagcgtcctcgcattgagtcaataca

SEQ ID NO: 264107 - DNA, 30 bp, Artificial Sequence
  Synthetic oligonucleotide
gttcgcccaagctagttcacagagaataca

SEQ ID NO: 264108 - DNA, 30 bp, Artificial Sequence
  Synthetic oligonucleotide
gtacctcctagtggcgtgaaatcgaataca

SEQ ID NO: 264109 - DNA, 30 bp, Artificial Sequence
  Synthetic oligonucleotide
tggcatattgtcggtcgagccaataataca

SEQ ID NO: 264110 - DNA, 30 bp, Artificial Sequence
  Synthetic oligonucleotide
atggacactagatctcgggcgcctaataca

SEQ ID NO: 264111 - DNA, 30 bp, Artificial Sequence
  Synthetic oligonucleotide
aatgataaacttcggattgcggtccataca

SEQ ID NO: 264112 - DNA, 30 bp, Artificial Sequence
  Synthetic oligonucleotide
tccgcgtttgatggtcgacattgtcataca

SEQ ID NO: 264113 - DNA, 30 bp, Artificial Sequence
  Synthetic oligonucleotide
gactcccgacaaattcccaaccaagataca

SEQ ID NO: 264114 - DNA, 30 bp, Artificial Sequence
  Synthetic oligonucleotide
tcttctggaagagacccctacgcagataca

SEQ ID NO: 264115 - DNA, 30 bp, Artificial Sequence
  Synthetic oligonucleotide
ctgggtgtattaattaagggcatagataca

SEQ ID NO: 264116 - DNA, 30 bp, Artificial Sequence
  Synthetic oligonucleotide
gtaagttcgttgtaaggctcgcccgataca

SEQ ID NO: 264117 - DNA, 30 bp, Artificial Sequence
  Synthetic oligonucleotide
tacatattaaattagtcctagtcggataca

SEQ ID NO: 264118 - DNA, 30 bp, Artificial Sequence
  Synthetic oligonucleotide
ctcttaagctcaaaaagccgaactgataca

SEQ ID NO: 264119 - DNA, 30 bp, Artificial Sequence
  Synthetic oligonucleotide
gggaccccaacattgttgctccagtataca

SEQ ID NO: 264120 - DNA, 30 bp, Artificial Sequence
  Synthetic oligonucleotide
cgaaaagcggccttatatactttgtataca

SEQ ID NO: 264121 - DNA, 30 bp, Artificial Sequence
  Synthetic oligonucleotide
gagcccagtcgccagtgatctttgtataca

SEQ ID NO: 264122 - DNA, 30 bp, Artificial Sequence
  Synthetic oligonucleotide
atcgcgcttagggatcaggagcgttataca

SEQ ID NO: 264123 - DNA, 30 bp, Artificial Sequence
  Synthetic oligonucleotide
atcggggcgcagacaaatatgggttataca

SEQ ID NO: 264124 - DNA, 30 bp, Artificial Sequence
  Synthetic oligonucleotide
gcaggtagcatctaaatataatacactaca

SEQ ID NO: 264125 - DNA, 30 bp, Artificial Sequence
  Synthetic oligonucleotide
gatcaaacgtactttaaatcctggactaca

SEQ ID NO: 264126 - DNA, 30 bp, Artificial Sequence
  Synthetic oligonucleotide
gatccaggcacatttgacattgaacctaca

SEQ ID NO: 264127 - DNA, 30 bp, Artificial Sequence
  Synthetic oligonucleotide
agcgcgacgtggtcaagaaggcatcctaca

SEQ ID NO: 264128 - DNA, 30 bp, Artificial Sequence
  Synthetic oligonucleotide
ccaggactgtattatattagcgatcctaca

SEQ ID NO: 264129 - DNA, 30 bp, Artificial Sequence
  Synthetic oligonucleotide
tgctaaacggataaaagggactgtcctaca

SEQ ID NO: 264130 - DNA, 30 bp, Artificial Sequence
  Synthetic oligonucleotide
cttccaagggggtcactaacgcttcctaca

SEQ ID NO: 264131 - DNA, 30 bp, Artificial Sequence
  Synthetic oligonucleotide
aaggtgaatgttccccatgcaaaagctaca

SEQ ID NO: 264132 - DNA, 30 bp, Artificial Sequence
  Synthetic oligonucleotide
gacaccctaactcatacccgcctagctaca

SEQ ID NO: 264133 - DNA, 30 bp, Artificial Sequence
  Synthetic oligonucleotide
atgtgtgagagacttccggtaaccgctaca

SEQ ID NO: 264134 - DNA, 30 bp, Artificial Sequence
  Synthetic oligonucleotide
cgaagcgcagaagtcgtggaccccgctaca

SEQ ID NO: 264135 - DNA, 30 bp, Artificial Sequence
  Synthetic oligonucleotide
tgatcgatgagtagtagagcgcgggctaca

SEQ ID NO: 264136 - DNA, 30 bp, Artificial Sequence
  Synthetic oligonucleotide
gccgtatagctatacccctgatgggctaca

SEQ ID NO: 264137 - DNA, 30 bp, Artificial Sequence
  Synthetic oligonucleotide
tgggcaccgtgtggccatatagatgctaca

SEQ ID NO: 264138 - DNA, 30 bp, Artificial Sequence
  Synthetic oligonucleotide
caggcccgatgcttggcaatgactgctaca

SEQ ID NO: 264139 - DNA, 30 bp, Artificial Sequence
  Synthetic oligonucleotide
aggcccaacatgaggagggcccgctctaca

SEQ ID NO: 264140 - DNA, 30 bp, Artificial Sequence
  Synthetic oligonucleotide
gtagatctcctcatttagggtaggtctaca

SEQ ID NO: 264141 - DNA, 30 bp, Artificial Sequence
  Synthetic oligonucleotide
cggtcgtcgaagctactggcaggttctaca

SEQ ID NO: 264142 - DNA, 30 bp, Artificial Sequence
  Synthetic oligonucleotide
tgtcgaggtcagttgatggttgtaagtaca

SEQ ID NO: 264143 - DNA, 30 bp, Artificial Sequence
  Synthetic oligonucleotide
caagcctgataaagccgagtattaagtaca

SEQ ID NO: 264144 - DNA, 30 bp, Artificial Sequence
  Synthetic oligonucleotide
agcagttaagtcttagatatggacagtaca

SEQ ID NO: 264145 - DNA, 30 bp, Artificial Sequence
  Synthetic oligonucleotide
aaggcgaagatacagcctggaggcagtaca

SEQ ID NO: 264146 - DNA, 30 bp, Artificial Sequence
  Synthetic oligonucleotide
ctatcaaggttgaagggagttttgagtaca

SEQ ID NO: 264147 - DNA, 31 bp, Artificial Sequence
  Synthetic oligonucleotide
gaggatgcaggggtattctcaagatagtaca

SEQ ID NO: 264148 - DNA, 30 bp, Artificial Sequence
  Synthetic oligonucleotide
gcaggatacaaaatggcaatagttagtaca

SEQ ID NO: 264149 - DNA, 30 bp, Artificial Sequence
  Synthetic oligonucleotide
gccaacatcgggcagggtcaagcccgtaca

SEQ ID NO: 264150 - DNA, 30 bp, Artificial Sequence
  Synthetic oligonucleotide
tctaacgtagtctgcccttccagccgtaca

SEQ ID NO: 264151 - DNA, 30 bp, Artificial Sequence
  Synthetic oligonucleotide
atagatccatggtgaaccttcatccgtaca

SEQ ID NO: 264152 - DNA, 30 bp, Artificial Sequence
  Synthetic oligonucleotide
tggagacgcgcgcagtggaccgagcgtaca

SEQ ID NO: 264153 - DNA, 30 bp, Artificial Sequence
  Synthetic oligonucleotide
gggggttgtatgggatgtgatcatcgtaca

SEQ ID NO: 264154 - DNA, 30 bp, Artificial Sequence
  Synthetic oligonucleotide
aaatatacgatacgtcgaagcgctcgtaca

SEQ ID NO: 264155 - DNA, 30 bp, Artificial Sequence
  Synthetic oligonucleotide
accagggagacttacctactaggtcgtaca

SEQ ID NO: 264156 - DNA, 30 bp, Artificial Sequence
  Synthetic oligonucleotide
ggatgcggagcgtacacgcagagaggtaca

SEQ ID NO: 264157 - DNA, 30 bp, Artificial Sequence
  Synthetic oligonucleotide
aaataaacattaataaagtaaataggtaca

SEQ ID NO: 264158 - DNA, 30 bp, Artificial Sequence
  Synthetic oligonucleotide
agaagtgtgaagccaactcccaggggtaca

SEQ ID NO: 264159 - DNA, 30 bp, Artificial Sequence
  Synthetic oligonucleotide
taggggatcaaactaaattgagtgggtaca

SEQ ID NO: 264160 - DNA, 30 bp, Artificial Sequence
  Synthetic oligonucleotide
atcgctcgggaacaccagccgcatggtaca

SEQ ID NO: 264161 - DNA, 30 bp, Artificial Sequence
  Synthetic oligonucleotide
attgtatacacccggtctaagagtggtaca

SEQ ID NO: 264162 - DNA, 30 bp, Artificial Sequence
  Synthetic oligonucleotide
agacaatcgggcgtgcagactagtggtaca

SEQ ID NO: 264163 - DNA, 30 bp, Artificial Sequence
  Synthetic oligonucleotide
gataaactcgattaagagtttcgtggtaca

SEQ ID NO: 264164 - DNA, 30 bp, Artificial Sequence
  Synthetic oligonucleotide
cagttgtacactggtagcaagggtggtaca

SEQ ID NO: 264165 - DNA, 30 bp, Artificial Sequence
  Synthetic oligonucleotide
gtaggatgacaggctatggaagtatgtaca

SEQ ID NO: 264166 - DNA, 29 bp, Artificial Sequence
  Synthetic oligonucleotide
ggcgagcgccatgatttgcgtactgtaca

SEQ ID NO: 264167 - DNA, 30 bp, Artificial Sequence
  Synthetic oligonucleotide
aagtcattccaatgtcggacttgttgtaca

SEQ ID NO: 264168 - DNA, 30 bp, Artificial Sequence
  Synthetic oligonucleotide
acataccagtaagtagtcaaatacattaca

SEQ ID NO: 264169 - DNA, 30 bp, Artificial Sequence
  Synthetic oligonucleotide
cgcgagcgtcaccaaagtgcgtacattaca

SEQ ID NO: 264170 - DNA, 30 bp, Artificial Sequence
  Synthetic oligonucleotide
agattaagctatgatataattacgattaca

SEQ ID NO: 264171 - DNA, 30 bp, Artificial Sequence
  Synthetic oligonucleotide
tctatacacgctgtccattcccggattaca

SEQ ID NO: 264172 - DNA, 30 bp, Artificial Sequence
  Synthetic oligonucleotide
taatgttaataaaactctcgcctgattaca

SEQ ID NO: 264173 - DNA, 30 bp, Artificial Sequence
  Synthetic oligonucleotide
ggtatcgttccttgacaccgatttattaca

SEQ ID NO: 264174 - DNA, 30 bp, Artificial Sequence
  Synthetic oligonucleotide
ctacggcaagtagtgccgcctgcacttaca

SEQ ID NO: 264175 - DNA, 30 bp, Artificial Sequence
  Synthetic oligonucleotide
cggctttagcagatccctttaagacttaca

SEQ ID NO: 264176 - DNA, 30 bp, Artificial Sequence
  Synthetic oligonucleotide
ggtgttcactagttaaggctacgacttaca

SEQ ID NO: 264177 - DNA, 30 bp, Artificial Sequence
  Synthetic oligonucleotide
tgcttacaagttactggagtcatacttaca

SEQ ID NO: 264178 - DNA, 30 bp, Artificial Sequence
  Synthetic oligonucleotide
tatgctaggaacccgatcgccatccttaca

SEQ ID NO: 264179 - DNA, 30 bp, Artificial Sequence
  Synthetic oligonucleotide
ctttggatgaaacggttgtaagagcttaca

SEQ ID NO: 264180 - DNA, 30 bp, Artificial Sequence
  Synthetic oligonucleotide
tttacgctaagaagggtatggactcttaca

SEQ ID NO: 264181 - DNA, 30 bp, Artificial Sequence
  Synthetic oligonucleotide
aagaaaggaacacaattacgtactcttaca

SEQ ID NO: 264182 - DNA, 30 bp, Artificial Sequence
  Synthetic oligonucleotide
tctgcggatcagggtccttctgctcttaca

SEQ ID NO: 264183 - DNA, 30 bp, Artificial Sequence
  Synthetic oligonucleotide
agttcccgatataggttataatctcttaca

SEQ ID NO: 264184 - DNA, 30 bp, Artificial Sequence
  Synthetic oligonucleotide
tggatttacgcgaggacctccattcttaca

SEQ ID NO: 264185 - DNA, 30 bp, Artificial Sequence
  Synthetic oligonucleotide
cacctagatttgtgctttccgagcgttaca

SEQ ID NO: 264186 - DNA, 30 bp, Artificial Sequence
  Synthetic oligonucleotide
ccaaagggaggccccgggagtgaggttaca

SEQ ID NO: 264187 - DNA, 30 bp, Artificial Sequence
  Synthetic oligonucleotide
agacgcaaaacgtcagaggccacggttaca

SEQ ID NO: 264188 - DNA, 30 bp, Artificial Sequence
  Synthetic oligonucleotide
gccgcaaaggatgccggtaatccggttaca

SEQ ID NO: 264189 - DNA, 30 bp, Artificial Sequence
  Synthetic oligonucleotide
aaagtgacgttgcttggtcacatggttaca

SEQ ID NO: 264190 - DNA, 30 bp, Artificial Sequence
  Synthetic oligonucleotide
cacctgtcccgtcgtatatcattggttaca

SEQ ID NO: 264191 - DNA, 30 bp, Artificial Sequence
  Synthetic oligonucleotide
tcatgtatcaattcttggatatctgttaca

SEQ ID NO: 264192 - DNA, 30 bp, Artificial Sequence
  Synthetic oligonucleotide
atagaacccaggctacaaagcggtgttaca

SEQ ID NO: 264193 - DNA, 30 bp, Artificial Sequence
  Synthetic oligonucleotide
gagcattatggtaccgcgccccgatttaca

SEQ ID NO: 264194 - DNA, 30 bp, Artificial Sequence
  Synthetic oligonucleotide
actcccctaactttattatgtgactttaca

SEQ ID NO: 264195 - DNA, 30 bp, Artificial Sequence
  Synthetic oligonucleotide
ggactagccgacgctcgtgagtcctttaca

SEQ ID NO: 264196 - DNA, 30 bp, Artificial Sequence
  Synthetic oligonucleotide
ataaacattgatggtggtctgtgctttaca

SEQ ID NO: 264197 - DNA, 30 bp, Artificial Sequence
  Synthetic oligonucleotide
ttacgagttggagctctcagaacgtttaca

SEQ ID NO: 264198 - DNA, 30 bp, Artificial Sequence
  Synthetic oligonucleotide
taacgatctggagcattatgcacgtttaca

SEQ ID NO: 264199 - DNA, 30 bp, Artificial Sequence
  Synthetic oligonucleotide
gctccgtggtaattaccgattcggtttaca

SEQ ID NO: 264200 - DNA, 30 bp, Artificial Sequence
  Synthetic oligonucleotide
tgactggaataccttgtacaggggtttaca

SEQ ID NO: 264201 - DNA, 30 bp, Artificial Sequence
  Synthetic oligonucleotide
ctggggcgcatgggattatcgctgtttaca

SEQ ID NO: 264202 - DNA, 30 bp, Artificial Sequence
  Synthetic oligonucleotide
gcaaaatcgttaggagtcagtgattttaca

SEQ ID NO: 264203 - DNA, 30 bp, Artificial Sequence
  Synthetic oligonucleotide
ccgtcaacccgttaatcaaataacaaacca

SEQ ID NO: 264204 - DNA, 30 bp, Artificial Sequence
  Synthetic oligonucleotide
ttgacgcgtgtatgaacttctaataaacca

SEQ ID NO: 264205 - DNA, 30 bp, Artificial Sequence
  Synthetic oligonucleotide
ctgtttttcgatgacttatatgctaaacca

SEQ ID NO: 264206 - DNA, 30 bp, Artificial Sequence
  Synthetic oligonucleotide
cggctggattccgagggaaggacacaacca

SEQ ID NO: 264207 - DNA, 30 bp, Artificial Sequence
  Synthetic oligonucleotide
tgttaacctaaaagcgaaaagccacaacca

SEQ ID NO: 264208 - DNA, 30 bp, Artificial Sequence
  Synthetic oligonucleotide
gctcccggatcacagtgcgatttacaacca

SEQ ID NO: 264209 - DNA, 30 bp, Artificial Sequence
  Synthetic oligonucleotide
gcgggaaaagacccttgcggccgccaacca

SEQ ID NO: 264210 - DNA, 30 bp, Artificial Sequence
  Synthetic oligonucleotide
ctcacgggcttaagcattatacatcaacca

SEQ ID NO: 264211 - DNA, 30 bp, Artificial Sequence
  Synthetic oligonucleotide
gagatagtgctattagagctcctggaacca

SEQ ID NO: 264212 - DNA, 30 bp, Artificial Sequence
  Synthetic oligonucleotide
cgaccatttccctaatctaaatttgaacca

SEQ ID NO: 264213 - DNA, 30 bp, Artificial Sequence
  Synthetic oligonucleotide
agcatccgcaacgtactggagaaataacca

SEQ ID NO: 264214 - DNA, 30 bp, Artificial Sequence
  Synthetic oligonucleotide
tgatgcgagcttagggtcaaagtataacca

SEQ ID NO: 264215 - DNA, 30 bp, Artificial Sequence
  Synthetic oligonucleotide
tcagtgatgtgctgggtgacgctctaacca

SEQ ID NO: 264216 - DNA, 30 bp, Artificial Sequence
  Synthetic oligonucleotide
cgggtaagcagctacggtcagtcgtaacca

SEQ ID NO: 264217 - DNA, 30 bp, Artificial Sequence
  Synthetic oligonucleotide
accattaaaaaaataatcttgtcttaacca

SEQ ID NO: 264218 - DNA, 30 bp, Artificial Sequence
  Synthetic oligonucleotide
gtttgggctaatcgttgtgcgagttaacca

SEQ ID NO: 264219 - DNA, 30 bp, Artificial Sequence
  Synthetic oligonucleotide
gcgacaaacgtgacgcgaaaagtttaacca

SEQ ID NO: 264220 - DNA, 30 bp, Artificial Sequence
  Synthetic oligonucleotide
tttcatcaatagccaaagtcgaaaacacca

SEQ ID NO: 264221 - DNA, 30 bp, Artificial Sequence
  Synthetic oligonucleotide
ctatgggtacccccctccatacgaacacca

SEQ ID NO: 264222 - DNA, 30 bp, Artificial Sequence
  Synthetic oligonucleotide
attgtattctggagaccgtgtgagacacca

SEQ ID NO: 264223 - DNA, 30 bp, Artificial Sequence
  Synthetic oligonucleotide
tcaaataagtaacccggtgaatgtacacca

SEQ ID NO: 264224 - DNA, 30 bp, Artificial Sequence
  Synthetic oligonucleotide
tctgacctaccggctaagcataaaccacca

SEQ ID NO: 264225 - DNA, 30 bp, Artificial Sequence
  Synthetic oligonucleotide
tttagcgttccattcagtgatagaccacca

SEQ ID NO: 264226 - DNA, 30 bp, Artificial Sequence
  Synthetic oligonucleotide
gtggctcagtgtggaagagttagaccacca

SEQ ID NO: 264227 - DNA, 30 bp, Artificial Sequence
  Synthetic oligonucleotide
cgtgaaacggttaatggcagcaacccacca

SEQ ID NO: 264228 - DNA, 30 bp, Artificial Sequence
  Synthetic oligonucleotide
cagggcctgttcgaatttcttggcccacca

SEQ ID NO: 264229 - DNA, 30 bp, Artificial Sequence
  Synthetic oligonucleotide
ccttatacgacaccggattttaatccacca

SEQ ID NO: 264230 - DNA, 30 bp, Artificial Sequence
  Synthetic oligonucleotide
tgcaactacttgttcctatgcagagcacca

SEQ ID NO: 264231 - DNA, 30 bp, Artificial Sequence
  Synthetic oligonucleotide
ctagcgggatgcccactagtcggagcacca

SEQ ID NO: 264232 - DNA, 31 bp, Artificial Sequence
  Synthetic oligonucleotide
tgtggttgaccggacataaaagaaggcacca

SEQ ID NO: 264233 - DNA, 30 bp, Artificial Sequence
  Synthetic oligonucleotide
gatacattagcggtgtgaagtaaggcacca

SEQ ID NO: 264234 - DNA, 30 bp, Artificial Sequence
  Synthetic oligonucleotide
gttatggcaattactgcttaagtggcacca

SEQ ID NO: 264235 - DNA, 30 bp, Artificial Sequence
  Synthetic oligonucleotide
aagatgaacaggtgggtgcttgtggcacca

SEQ ID NO: 264236 - DNA, 30 bp, Artificial Sequence
  Synthetic oligonucleotide
tatgtcagaaggccggaattagcatcacca

SEQ ID NO: 264237 - DNA, 30 bp, Artificial Sequence
  Synthetic oligonucleotide
aataaatataggagagcttcatgctcacca

SEQ ID NO: 264238 - DNA, 30 bp, Artificial Sequence
  Synthetic oligonucleotide
cgatgacgctgactacacgcgtcgagacca

SEQ ID NO: 264239 - DNA, 30 bp, Artificial Sequence
  Synthetic oligonucleotide
agtattggcagtgcggtagaggcccgacca

SEQ ID NO: 264240 - DNA, 30 bp, Artificial Sequence
  Synthetic oligonucleotide
ataaacacgcgaaagacctgcggccgacca

SEQ ID NO: 264241 - DNA, 30 bp, Artificial Sequence
  Synthetic oligonucleotide
ttcttcaccacgaagaaacgcgagcgacca

SEQ ID NO: 264242 - DNA, 30 bp, Artificial Sequence
  Synthetic oligonucleotide
ccggttcatggcaaacagatatggcgacca

SEQ ID NO: 264243 - DNA, 30 bp, Artificial Sequence
  Synthetic oligonucleotide
atcgtttgcgacgtgtatgcgcatcgacca

SEQ ID NO: 264244 - DNA, 30 bp, Artificial Sequence
  Synthetic oligonucleotide
gatctgcccggacagactgaccgtcgacca

SEQ ID NO: 264245 - DNA, 30 bp, Artificial Sequence
  Synthetic oligonucleotide
cttaccgagaacacgagcctcgttcgacca

SEQ ID NO: 264246 - DNA, 30 bp, Artificial Sequence
  Synthetic oligonucleotide
gcgtggacgattggacttgcatcaggacca

SEQ ID NO: 264247 - DNA, 30 bp, Artificial Sequence
  Synthetic oligonucleotide
tgatggtactataagttaacgataggacca

SEQ ID NO: 264248 - DNA, 30 bp, Artificial Sequence
  Synthetic oligonucleotide
tgaacagaggtgtaatggtatcatggacca

SEQ ID NO: 264249 - DNA, 30 bp, Artificial Sequence
  Synthetic oligonucleotide
aaaagttaaaccaacgtgagatctggacca

SEQ ID NO: 264250 - DNA, 30 bp, Artificial Sequence
  Synthetic oligonucleotide
tgcagtgatcgttacggcctccgtggacca

SEQ ID NO: 264251 - DNA, 30 bp, Artificial Sequence
  Synthetic oligonucleotide
actaggggcgaagccttgcactttggacca

SEQ ID NO: 264252 - DNA, 30 bp, Artificial Sequence
  Synthetic oligonucleotide
gctgacgaagaactaactacataatgacca

SEQ ID NO: 264253 - DNA, 30 bp, Artificial Sequence
  Synthetic oligonucleotide
ttaggatatggaccgccacgtatatgacca

SEQ ID NO: 264254 - DNA, 30 bp, Artificial Sequence
  Synthetic oligonucleotide
agccagcaatcggatgatcgattctgacca

SEQ ID NO: 264255 - DNA, 30 bp, Artificial Sequence
  Synthetic oligonucleotide
cgaacttgtaccgattgttccaagtgacca

SEQ ID NO: 264256 - DNA, 30 bp, Artificial Sequence
  Synthetic oligonucleotide
gacttggatgaagcccaggaccggtgacca

SEQ ID NO: 264257 - DNA, 30 bp, Artificial Sequence
  Synthetic oligonucleotide
ggtggcgtgaattgcgcgtattcgatacca

SEQ ID NO: 264258 - DNA, 30 bp, Artificial Sequence
  Synthetic oligonucleotide
ttaccatcaacttcgacaacacatatacca

SEQ ID NO: 264259 - DNA, 30 bp, Artificial Sequence
  Synthetic oligonucleotide
accccacatcggtgccattcaggtatacca

SEQ ID NO: 264260 - DNA, 31 bp, Artificial Sequence
  Synthetic oligonucleotide
gctcccagagtataggctgaattgtatacca

SEQ ID NO: 264261 - DNA, 30 bp, Artificial Sequence
  Synthetic oligonucleotide
ctcatgagggagtatataccggaactacca

SEQ ID NO: 264262 - DNA, 30 bp, Artificial Sequence
  Synthetic oligonucleotide
taagaccattctaggtaagcttaactacca

SEQ ID NO: 264263 - DNA, 30 bp, Artificial Sequence
  Synthetic oligonucleotide
ccgggagtcagaccgaggatgttactacca

SEQ ID NO: 264264 - DNA, 31 bp, Artificial Sequence
  Synthetic oligonucleotide
gtcaagcagttgtaggggtacagcgctacca

SEQ ID NO: 264265 - DNA, 30 bp, Artificial Sequence
  Synthetic oligonucleotide
cacgttcgcagcgcaaagacaaggctacca

SEQ ID NO: 264266 - DNA, 30 bp, Artificial Sequence
  Synthetic oligonucleotide
gagcaaaatgtatgtgtccaaagtctacca

SEQ ID NO: 264267 - DNA, 30 bp, Artificial Sequence
  Synthetic oligonucleotide
ttttgggacacgcagggtgcgcacgtacca

SEQ ID NO: 264268 - DNA, 30 bp, Artificial Sequence
  Synthetic oligonucleotide
cccagtccttcacaccatgggggggtacca

SEQ ID NO: 264269 - DNA, 30 bp, Artificial Sequence
  Synthetic oligonucleotide
cgtgccaatacgctctagatagttgtacca

SEQ ID NO: 264270 - DNA, 30 bp, Artificial Sequence
  Synthetic oligonucleotide
ccaagcccaccgtgtctccctaccttacca

SEQ ID NO: 264271 - DNA, 30 bp, Artificial Sequence
  Synthetic oligonucleotide
cgacagacgctaccgttttatcgcttacca

SEQ ID NO: 264272 - DNA, 30 bp, Artificial Sequence
  Synthetic oligonucleotide
ggaacagctcgtaaacggtccgctttacca

SEQ ID NO: 264273 - DNA, 30 bp, Artificial Sequence
  Synthetic oligonucleotide
aacgaacgctgacggtcagatacaaaccca

SEQ ID NO: 264274 - DNA, 30 bp, Artificial Sequence
  Synthetic oligonucleotide
agtgtgctcgacgaactctagataaaccca

SEQ ID NO: 264275 - DNA, 30 bp, Artificial Sequence
  Synthetic oligonucleotide
tattaaaagttttcggtgaagctaaaccca

SEQ ID NO: 264276 - DNA, 30 bp, Artificial Sequence
  Synthetic oligonucleotide
ttcagaggttgaaactatgtggacaaccca

SEQ ID NO: 264277 - DNA, 30 bp, Artificial Sequence
  Synthetic oligonucleotide
tccggggagccagtccattgggtcaaccca

SEQ ID NO: 264278 - DNA, 30 bp, Artificial Sequence
  Synthetic oligonucleotide
tgagtttaggagtccgaaagctgtcaccca

SEQ ID NO: 264279 - DNA, 30 bp, Artificial Sequence
  Synthetic oligonucleotide
gtaactccagagccaggcgcggttcaccca

SEQ ID NO: 264280 - DNA, 30 bp, Artificial Sequence
  Synthetic oligonucleotide
agggccggtgtcgtctcaacggacgaccca

SEQ ID NO: 264281 - DNA, 30 bp, Artificial Sequence
  Synthetic oligonucleotide
gaaagcgtcacgtggaacccataggaccca

SEQ ID NO: 264282 - DNA, 30 bp, Artificial Sequence
  Synthetic oligonucleotide
gtatgtatataactcctgaatggggaccca

SEQ ID NO: 264283 - DNA, 30 bp, Artificial Sequence
  Synthetic oligonucleotide
ataggttcattatacctcggctgggaccca

SEQ ID NO: 264284 - DNA, 30 bp, Artificial Sequence
  Synthetic oligonucleotide
gggaaacgagccgatttccggtgggaccca

SEQ ID NO: 264285 - DNA, 31 bp, Artificial Sequence
  Synthetic oligonucleotide
gcgtatccagtttcagaaacactgataccca

SEQ ID NO: 264286 - DNA, 30 bp, Artificial Sequence
  Synthetic oligonucleotide
ctgcgcacttctccccttgagtactaccca

SEQ ID NO: 264287 - DNA, 30 bp, Artificial Sequence
  Synthetic oligonucleotide
tgtctctaagtagcagtataagagtaccca

SEQ ID NO: 264288 - DNA, 30 bp, Artificial Sequence
  Synthetic oligonucleotide
gttcataaacaactggggtaacaaacccca

SEQ ID NO: 264289 - DNA, 31 bp, Artificial Sequence
  Synthetic oligonucleotide
gtcgtggtattttagtcctagataaacccca

SEQ ID NO: 264290 - DNA, 30 bp, Artificial Sequence
  Synthetic oligonucleotide
tgcaaaattatagtgacggtcccaacccca

SEQ ID NO: 264291 - DNA, 30 bp, Artificial Sequence
  Synthetic oligonucleotide
gggtccccaacatttataaaactcacccca

SEQ ID NO: 264292 - DNA, 30 bp, Artificial Sequence
  Synthetic oligonucleotide
agacggggtgttagtgagtctaagacccca

SEQ ID NO: 264293 - DNA, 30 bp, Artificial Sequence
  Synthetic oligonucleotide
atctcgagaccgtactgtacacagacccca

SEQ ID NO: 264294 - DNA, 30 bp, Artificial Sequence
  Synthetic oligonucleotide
atagggtccgcagtggaacctgagacccca

SEQ ID NO: 264295 - DNA, 30 bp, Artificial Sequence
  Synthetic oligonucleotide
gtccagtcttgccaaacggatagtacccca

SEQ ID NO: 264296 - DNA, 30 bp, Artificial Sequence
  Synthetic oligonucleotide
ttacttgtacactgagtgggtcgtacccca

SEQ ID NO: 264297 - DNA, 30 bp, Artificial Sequence
  Synthetic oligonucleotide
ggcacagcttcacttatgttgtggccccca

SEQ ID NO: 264298 - DNA, 30 bp, Artificial Sequence
  Synthetic oligonucleotide
ggttacgatgaaggtcaatatttcgcccca

SEQ ID NO: 264299 - DNA, 30 bp, Artificial Sequence
  Synthetic oligonucleotide
taaataatattcctgatgcgcaaggcccca

SEQ ID NO: 264300 - DNA, 30 bp, Artificial Sequence
  Synthetic oligonucleotide
gagaaggtgaggttgttttttcgggcccca

SEQ ID NO: 264301 - DNA, 30 bp, Artificial Sequence
  Synthetic oligonucleotide
tagcggagcgcattagggccaatggcccca

SEQ ID NO: 264302 - DNA, 30 bp, Artificial Sequence
  Synthetic oligonucleotide
gctagggggacgtcatttcgggtggcccca

SEQ ID NO: 264303 - DNA, 30 bp, Artificial Sequence
  Synthetic oligonucleotide
tttcaaggcaagaaattgaaactttcccca

SEQ ID NO: 264304 - DNA, 30 bp, Artificial Sequence
  Synthetic oligonucleotide
tatgttgataacgagcaggagaaaagccca

SEQ ID NO: 264305 - DNA, 30 bp, Artificial Sequence
  Synthetic oligonucleotide
catcgttccgtgatagggcctgaaagccca

SEQ ID NO: 264306 - DNA, 30 bp, Artificial Sequence
  Synthetic oligonucleotide
tgttacaacactctcggaatagtaagccca

SEQ ID NO: 264307 - DNA, 30 bp, Artificial Sequence
  Synthetic oligonucleotide
agactacttgaatactaccacggtagccca

SEQ ID NO: 264308 - DNA, 30 bp, Artificial Sequence
  Synthetic oligonucleotide
ggggccccgggccacgatatctaacgccca

SEQ ID NO: 264309 - DNA, 30 bp, Artificial Sequence
  Synthetic oligonucleotide
ggtcttagttgtctgatccgataccgccca

SEQ ID NO: 264310 - DNA, 30 bp, Artificial Sequence
  Synthetic oligonucleotide
cgactttgtttcacaaaccaggaaggccca

SEQ ID NO: 264311 - DNA, 30 bp, Artificial Sequence
  Synthetic oligonucleotide
gaccttatctggatctttgccagaggccca

SEQ ID NO: 264312 - DNA, 30 bp, Artificial Sequence
  Synthetic oligonucleotide
ttatgtttcaatgaatactggaccggccca

SEQ ID NO: 264313 - DNA, 30 bp, Artificial Sequence
  Synthetic oligonucleotide
acgacggcggggcggctaatgtgcggccca

SEQ ID NO: 264314 - DNA, 30 bp, Artificial Sequence
  Synthetic oligonucleotide
ggccactaggctatagactgggttggccca

SEQ ID NO: 264315 - DNA, 30 bp, Artificial Sequence
  Synthetic oligonucleotide
atcaagcactcttcgcattacgtatgccca

SEQ ID NO: 264316 - DNA, 30 bp, Artificial Sequence
  Synthetic oligonucleotide
tcaatttcgggacaccgcctaaggtgccca

SEQ ID NO: 264317 - DNA, 30 bp, Artificial Sequence
  Synthetic oligonucleotide
aagatagtaaggttgatctacgcttgccca

SEQ ID NO: 264318 - DNA, 30 bp, Artificial Sequence
  Synthetic oligonucleotide
agaaaagatagccgttagtttccaatccca

SEQ ID NO: 264319 - DNA, 30 bp, Artificial Sequence
  Synthetic oligonucleotide
gagagacgagagtgttgttgaaccatccca

SEQ ID NO: 264320 - DNA, 30 bp, Artificial Sequence
  Synthetic oligonucleotide
gattagagggctcaacccctccgcatccca

SEQ ID NO: 264321 - DNA, 30 bp, Artificial Sequence
  Synthetic oligonucleotide
cggacagcggattttttgttgtgcatccca

SEQ ID NO: 264322 - DNA, 30 bp, Artificial Sequence
  Synthetic oligonucleotide
caactaattcatccggcagctacgatccca

SEQ ID NO: 264323 - DNA, 30 bp, Artificial Sequence
  Synthetic oligonucleotide
agtgtctacggtcatagggagtgtatccca

SEQ ID NO: 264324 - DNA, 30 bp, Artificial Sequence
  Synthetic oligonucleotide
tacgcctacgtcagctccactcacctccca

SEQ ID NO: 264325 - DNA, 30 bp, Artificial Sequence
  Synthetic oligonucleotide
cgcttacgtgatcagggtactcacctccca

SEQ ID NO: 264326 - DNA, 30 bp, Artificial Sequence
  Synthetic oligonucleotide
gacgtggagtcaaacgtggaaatcctccca

SEQ ID NO: 264327 - DNA, 30 bp, Artificial Sequence
  Synthetic oligonucleotide
gatcccacgcgtatatgatgatttctccca

SEQ ID NO: 264328 - DNA, 30 bp, Artificial Sequence
  Synthetic oligonucleotide
gccaatcatgcggttacatcacgcgtccca

SEQ ID NO: 264329 - DNA, 30 bp, Artificial Sequence
  Synthetic oligonucleotide
taagcaaaggttcagatataagatgtccca

SEQ ID NO: 264330 - DNA, 30 bp, Artificial Sequence
  Synthetic oligonucleotide
agagtaacaacacgtacgctgcagttccca

SEQ ID NO: 264331 - DNA, 30 bp, Artificial Sequence
  Synthetic oligonucleotide
aggtatcccattcagaaggccgcgttccca

SEQ ID NO: 264332 - DNA, 30 bp, Artificial Sequence
  Synthetic oligonucleotide
cagctatgtgcagtgctccagtggttccca

SEQ ID NO: 264333 - DNA, 30 bp, Artificial Sequence
  Synthetic oligonucleotide
atatgtaaggatcacaaaagaactttccca

SEQ ID NO: 264334 - DNA, 30 bp, Artificial Sequence
  Synthetic oligonucleotide
gaaagatatttgggaacggatggaaagcca

SEQ ID NO: 264335 - DNA, 30 bp, Artificial Sequence
  Synthetic oligonucleotide
aagccacggtaaacgttgtatgttaagcca

SEQ ID NO: 264336 - DNA, 30 bp, Artificial Sequence
  Synthetic oligonucleotide
ccagtgacaactgggggaccgaaacagcca

SEQ ID NO: 264337 - DNA, 30 bp, Artificial Sequence
  Synthetic oligonucleotide
agatcccactggccataagcaggacagcca

SEQ ID NO: 264338 - DNA, 30 bp, Artificial Sequence
  Synthetic oligonucleotide
gactacccgatggcaaatgggggacagcca

SEQ ID NO: 264339 - DNA, 30 bp, Artificial Sequence
  Synthetic oligonucleotide
gggattagcactgagaatcccatacagcca

SEQ ID NO: 264340 - DNA, 30 bp, Artificial Sequence
  Synthetic oligonucleotide
cggttcatgctctggatacgaattcagcca

SEQ ID NO: 264341 - DNA, 30 bp, Artificial Sequence
  Synthetic oligonucleotide
gaggtcagggtttaagaaaaggttcagcca

SEQ ID NO: 264342 - DNA, 30 bp, Artificial Sequence
  Synthetic oligonucleotide
ctattaaattcttccagattcgtcgagcca

SEQ ID NO: 264343 - DNA, 30 bp, Artificial Sequence
  Synthetic oligonucleotide
ctcctcagtcttataagttctagggagcca

SEQ ID NO: 264344 - DNA, 30 bp, Artificial Sequence
  Synthetic oligonucleotide
taggggccctcctaaccccgaaatgagcca

SEQ ID NO: 264345 - DNA, 30 bp, Artificial Sequence
  Synthetic oligonucleotide
atacctgttggccagcggacgcgatagcca

SEQ ID NO: 264346 - DNA, 30 bp, Artificial Sequence
  Synthetic oligonucleotide
ggaaggagttttggtgtaccaggatagcca

SEQ ID NO: 264347 - DNA, 30 bp, Artificial Sequence
  Synthetic oligonucleotide
tcatccgtgtagttagtttaagtctagcca

SEQ ID NO: 264348 - DNA, 30 bp, Artificial Sequence
  Synthetic oligonucleotide
tgaccgccccgggaacggacagtttagcca

SEQ ID NO: 264349 - DNA, 30 bp, Artificial Sequence
  Synthetic oligonucleotide
taccctcgtgcggaactctcgtaaacgcca

SEQ ID NO: 264350 - DNA, 30 bp, Artificial Sequence
  Synthetic oligonucleotide
gggtgaatatgcgggtctgcggggacgcca

SEQ ID NO: 264351 - DNA, 30 bp, Artificial Sequence
  Synthetic oligonucleotide
agcccccctaattatagagcagctacgcca

SEQ ID NO: 264352 - DNA, 30 bp, Artificial Sequence
  Synthetic oligonucleotide
aagtaaaccgctcccgggttgtaaccgcca

SEQ ID NO: 264353 - DNA, 30 bp, Artificial Sequence
  Synthetic oligonucleotide
tcacaagttgtcgggcgaggcttaccgcca

SEQ ID NO: 264354 - DNA, 30 bp, Artificial Sequence
  Synthetic oligonucleotide
ttagtaagagtaatcgaggcaaatccgcca

SEQ ID NO: 264355 - DNA, 30 bp, Artificial Sequence
  Synthetic oligonucleotide
ccagatgaagcagcaattatacatccgcca

SEQ ID NO: 264356 - DNA, 30 bp, Artificial Sequence
  Synthetic oligonucleotide
gaaaaagtacgcggtgtccgggcagcgcca

SEQ ID NO: 264357 - DNA, 30 bp, Artificial Sequence
  Synthetic oligonucleotide
acagcatggttattaatcatctgagcgcca

SEQ ID NO: 264358 - DNA, 30 bp, Artificial Sequence
  Synthetic oligonucleotide
tttaatggaaaatgtctaggttgagcgcca

SEQ ID NO: 264359 - DNA, 30 bp, Artificial Sequence
  Synthetic oligonucleotide
ccactggagttagtcaacactgtagcgcca

SEQ ID NO: 264360 - DNA, 30 bp, Artificial Sequence
  Synthetic oligonucleotide
aacttcgtgctggttagatgtaacgcgcca

SEQ ID NO: 264361 - DNA, 30 bp, Artificial Sequence
  Synthetic oligonucleotide
ccggtcttatgccattcaagtgcggcgcca

SEQ ID NO: 264362 - DNA, 30 bp, Artificial Sequence
  Synthetic oligonucleotide
ggtcatccgagtagtatatgcaaatcgcca

SEQ ID NO: 264363 - DNA, 30 bp, Artificial Sequence
  Synthetic oligonucleotide
gattgtcggtgggactgtggggaatcgcca

SEQ ID NO: 264364 - DNA, 30 bp, Artificial Sequence
  Synthetic oligonucleotide
aaatggtagtcattagcgcgttcatcgcca

SEQ ID NO: 264365 - DNA, 30 bp, Artificial Sequence
  Synthetic oligonucleotide
gttaggcgatgacttcgtagtagatcgcca

SEQ ID NO: 264366 - DNA, 30 bp, Artificial Sequence
  Synthetic oligonucleotide
tgagggggcgatataattccttagtcgcca

SEQ ID NO: 264367 - DNA, 30 bp, Artificial Sequence
  Synthetic oligonucleotide
tggtccccgcatcaagcagtgttgtcgcca

SEQ ID NO: 264368 - DNA, 30 bp, Artificial Sequence
  Synthetic oligonucleotide
gcctaaaggactccgtctaggaaaaggcca

SEQ ID NO: 264369 - DNA, 30 bp, Artificial Sequence
  Synthetic oligonucleotide
ttcaacgggcagtggacctaatcaaggcca

SEQ ID NO: 264370 - DNA, 30 bp, Artificial Sequence
  Synthetic oligonucleotide
gacatggacccggcaagcaaacgcaggcca

SEQ ID NO: 264371 - DNA, 30 bp, Artificial Sequence
  Synthetic oligonucleotide
gcagaccatcgggaacccattggcaggcca

SEQ ID NO: 264372 - DNA, 30 bp, Artificial Sequence
  Synthetic oligonucleotide
cccgagcgtatgtgcccctataagaggcca

SEQ ID NO: 264373 - DNA, 30 bp, Artificial Sequence
  Synthetic oligonucleotide
aatgaattgctacgtaagcgccagaggcca

SEQ ID NO: 264374 - DNA, 30 bp, Artificial Sequence
  Synthetic oligonucleotide
gggcatgccccctagtttggaaggaggcca

SEQ ID NO: 264375 - DNA, 30 bp, Artificial Sequence
  Synthetic oligonucleotide
attggtcggataatatacagtgctaggcca

SEQ ID NO: 264376 - DNA, 30 bp, Artificial Sequence
  Synthetic oligonucleotide
gtccgtggttgttcgtatgttgctaggcca

SEQ ID NO: 264377 - DNA, 30 bp, Artificial Sequence
  Synthetic oligonucleotide
gacacctacgtgctctagtgggaacggcca

SEQ ID NO: 264378 - DNA, 30 bp, Artificial Sequence
  Synthetic oligonucleotide
tgagcgcagtcatagatgacactacggcca

SEQ ID NO: 264379 - DNA, 30 bp, Artificial Sequence
  Synthetic oligonucleotide
tattgcactaggttacctttttctcggcca

SEQ ID NO: 264380 - DNA, 30 bp, Artificial Sequence
  Synthetic oligonucleotide
cattttatgtaaaagaccctgtgtcggcca

SEQ ID NO: 264381 - DNA, 30 bp, Artificial Sequence
  Synthetic oligonucleotide
gcagaggcgcgggcagctcttccagggcca

SEQ ID NO: 264382 - DNA, 30 bp, Artificial Sequence
  Synthetic oligonucleotide
aggtcggtttggagatttcgatgcgggcca

SEQ ID NO: 264383 - DNA, 30 bp, Artificial Sequence
  Synthetic oligonucleotide
gtcatcgttcaacgcgttatcgtcgggcca

SEQ ID NO: 264384 - DNA, 30 bp, Artificial Sequence
  Synthetic oligonucleotide
gaatcactggacatccactcataggggcca

SEQ ID NO: 264385 - DNA, 30 bp, Artificial Sequence
  Synthetic oligonucleotide
aaggatgttctcgaccttaatcgggggcca

SEQ ID NO: 264386 - DNA, 30 bp, Artificial Sequence
  Synthetic oligonucleotide
agatgtaaagagcgggtcttaatggggcca

SEQ ID NO: 264387 - DNA, 30 bp, Artificial Sequence
  Synthetic oligonucleotide
aatagacccgaagaaagttaggtggggcca

SEQ ID NO: 264388 - DNA, 30 bp, Artificial Sequence
  Synthetic oligonucleotide
ctgtcacccacacgttatatcaagtggcca

SEQ ID NO: 264389 - DNA, 30 bp, Artificial Sequence
  Synthetic oligonucleotide
gggattgggtcattatgggctaagtggcca

SEQ ID NO: 264390 - DNA, 30 bp, Artificial Sequence
  Synthetic oligonucleotide
ggctaccgcgagttgctagagtcgtggcca

SEQ ID NO: 264391 - DNA, 30 bp, Artificial Sequence
  Synthetic oligonucleotide
gttggattaaatataattccagggtggcca

SEQ ID NO: 264392 - DNA, 30 bp, Artificial Sequence
  Synthetic oligonucleotide
ataggtggttctcaagaattcgattggcca

SEQ ID NO: 264393 - DNA, 30 bp, Artificial Sequence
  Synthetic oligonucleotide
ttaacctcaggaccggcaccctcaatgcca

SEQ ID NO: 264394 - DNA, 30 bp, Artificial Sequence
  Synthetic oligonucleotide
gtgtatctcggggaggagtggtcaatgcca

SEQ ID NO: 264395 - DNA, 30 bp, Artificial Sequence
  Synthetic oligonucleotide
ttaagtaacttggattgcgtgaccatgcca

SEQ ID NO: 264396 - DNA, 30 bp, Artificial Sequence
  Synthetic oligonucleotide
ggggtgcgtagcgtgtaacgccagatgcca

SEQ ID NO: 264397 - DNA, 30 bp, Artificial Sequence
  Synthetic oligonucleotide
tgttctggtccgggataccctgtgatgcca

SEQ ID NO: 264398 - DNA, 30 bp, Artificial Sequence
  Synthetic oligonucleotide
aagaccacgctctgagacgcacgtatgcca

SEQ ID NO: 264399 - DNA, 30 bp, Artificial Sequence
  Synthetic oligonucleotide
tgaatgcagttgaggaatgacagtctgcca

SEQ ID NO: 264400 - DNA, 30 bp, Artificial Sequence
  Synthetic oligonucleotide
ttacatctagaaagctgcgtggaagtgcca

SEQ ID NO: 264401 - DNA, 30 bp, Artificial Sequence
  Synthetic oligonucleotide
tgcgacgagagagcacggagcttagtgcca

SEQ ID NO: 264402 - DNA, 30 bp, Artificial Sequence
  Synthetic oligonucleotide
ttgggacgactgctccataaagaggtgcca

SEQ ID NO: 264403 - DNA, 30 bp, Artificial Sequence
  Synthetic oligonucleotide
gcgtagggtggtagcggtcgatatgtgcca

SEQ ID NO: 264404 - DNA, 30 bp, Artificial Sequence
  Synthetic oligonucleotide
tgcaaaaatcggaaaacggaagttttgcca

SEQ ID NO: 264405 - DNA, 30 bp, Artificial Sequence
  Synthetic oligonucleotide
gttaccggctattggccaccagaaaatcca

SEQ ID NO: 264406 - DNA, 30 bp, Artificial Sequence
  Synthetic oligonucleotide
agtataccttatcatcacagataaaatcca

SEQ ID NO: 264407 - DNA, 30 bp, Artificial Sequence
  Synthetic oligonucleotide
aatggggtttgggggaaagagccaaatcca

SEQ ID NO: 264408 - DNA, 30 bp, Artificial Sequence
  Synthetic oligonucleotide
gttaagagacacgccgcaaaccgcaatcca

SEQ ID NO: 264409 - DNA, 30 bp, Artificial Sequence
  Synthetic oligonucleotide
cacagtcctatcctagaggattttaatcca

SEQ ID NO: 264410 - DNA, 30 bp, Artificial Sequence
  Synthetic oligonucleotide
tgcgctactgcttaaggcagttcacatcca

SEQ ID NO: 264411 - DNA, 30 bp, Artificial Sequence
  Synthetic oligonucleotide
ggacatggcggtttcaacactggccatcca

SEQ ID NO: 264412 - DNA, 30 bp, Artificial Sequence
  Synthetic oligonucleotide
catgtgagagatagacgagggatccatcca

SEQ ID NO: 264413 - DNA, 30 bp, Artificial Sequence
  Synthetic oligonucleotide
ttgcttctagactgcaaaatctatcatcca

SEQ ID NO: 264414 - DNA, 30 bp, Artificial Sequence
  Synthetic oligonucleotide
cccataggaaaccaccatagttgagatcca

SEQ ID NO: 264415 - DNA, 30 bp, Artificial Sequence
  Synthetic oligonucleotide
cttgctatacattggaccactcacgatcca

SEQ ID NO: 264416 - DNA, 30 bp, Artificial Sequence
  Synthetic oligonucleotide
gagtatacttcacctaggtccagggatcca

SEQ ID NO: 264417 - DNA, 30 bp, Artificial Sequence
  Synthetic oligonucleotide
acctgcctcgacctgtaattcagggatcca

SEQ ID NO: 264418 - DNA, 30 bp, Artificial Sequence
  Synthetic oligonucleotide
tacccagtggaggaacgtagaattgatcca

SEQ ID NO: 264419 - DNA, 30 bp, Artificial Sequence
  Synthetic oligonucleotide
tccacagtccatgccacatggtttgatcca

SEQ ID NO: 264420 - DNA, 30 bp, Artificial Sequence
  Synthetic oligonucleotide
aagtatctgtggtctgcgtacgaatatcca

SEQ ID NO: 264421 - DNA, 30 bp, Artificial Sequence
  Synthetic oligonucleotide
atcgattatcaatcatgatactcctatcca

SEQ ID NO: 264422 - DNA, 30 bp, Artificial Sequence
  Synthetic oligonucleotide
cgcttcccagcttaaagatcgtaaactcca

SEQ ID NO: 264423 - DNA, 30 bp, Artificial Sequence
  Synthetic oligonucleotide
agcagttcccaaaagtcagcgtacactcca

SEQ ID NO: 264424 - DNA, 30 bp, Artificial Sequence
  Synthetic oligonucleotide
ctctctgctcgatttgtatttagcactcca

SEQ ID NO: 264425 - DNA, 30 bp, Artificial Sequence
  Synthetic oligonucleotide
gccgttcgcgcatagcacccaatcactcca

SEQ ID NO: 264426 - DNA, 30 bp, Artificial Sequence
  Synthetic oligonucleotide
agtcatgcgttaacagttcctgagactcca

SEQ ID NO: 264427 - DNA, 30 bp, Artificial Sequence
  Synthetic oligonucleotide
tggcataaagcatgatctcgtagtactcca

SEQ ID NO: 264428 - DNA, 30 bp, Artificial Sequence
  Synthetic oligonucleotide
gcaagtgactttataattaacctccctcca

SEQ ID NO: 264429 - DNA, 30 bp, Artificial Sequence
  Synthetic oligonucleotide
gaaagtagtcgtcagcgatcaaagcctcca

SEQ ID NO: 264430 - DNA, 30 bp, Artificial Sequence
  Synthetic oligonucleotide
gaatggacgaagtcaaactaagggcctcca

SEQ ID NO: 264431 - DNA, 30 bp, Artificial Sequence
  Synthetic oligonucleotide
tgtagggctattatagataggttgcctcca

SEQ ID NO: 264432 - DNA, 30 bp, Artificial Sequence
  Synthetic oligonucleotide
gtcctaataacctaacgaaagcatcctcca

SEQ ID NO: 264433 - DNA, 30 bp, Artificial Sequence
  Synthetic oligonucleotide
ttaagatatcctctagttagacttcctcca

SEQ ID NO: 264434 - DNA, 30 bp, Artificial Sequence
  Synthetic oligonucleotide
tgtcgcacgtcatttatgctacttcctcca

SEQ ID NO: 264435 - DNA, 30 bp, Artificial Sequence
  Synthetic oligonucleotide
tcgcgacaacacggctatccggcagctcca

SEQ ID NO: 264436 - DNA, 30 bp, Artificial Sequence
  Synthetic oligonucleotide
agatatgtgttgtcaggtagagacgctcca

SEQ ID NO: 264437 - DNA, 30 bp, Artificial Sequence
  Synthetic oligonucleotide
tcattcgtacgggtaaagggaatcgctcca

SEQ ID NO: 264438 - DNA, 30 bp, Artificial Sequence
  Synthetic oligonucleotide
gcctgaactagtgagaaacggttggctcca

SEQ ID NO: 264439 - DNA, 30 bp, Artificial Sequence
  Synthetic oligonucleotide
ggctgcgggctggaaatgcaaactgctcca

SEQ ID NO: 264440 - DNA, 30 bp, Artificial Sequence
  Synthetic oligonucleotide
tcacctctaccgtaatgatgccaatctcca

SEQ ID NO: 264441 - DNA, 30 bp, Artificial Sequence
  Synthetic oligonucleotide
tccatacaaatgaggtaaggcagctctcca

SEQ ID NO: 264442 - DNA, 30 bp, Artificial Sequence
  Synthetic oligonucleotide
cgagcagaagtgtggcgggacctttctcca

SEQ ID NO: 264443 - DNA, 30 bp, Artificial Sequence
  Synthetic oligonucleotide
tcgcgggtcttgcgccaacagcaaagtcca

SEQ ID NO: 264444 - DNA, 30 bp, Artificial Sequence
  Synthetic oligonucleotide
ttaaagcttcatttaatacgggaaagtcca

SEQ ID NO: 264445 - DNA, 30 bp, Artificial Sequence
  Synthetic oligonucleotide
gcgaaaccgaacagccgggtatgcagtcca

SEQ ID NO: 264446 - DNA, 30 bp, Artificial Sequence
  Synthetic oligonucleotide
aagtacgagctgtaatgtagccggagtcca

SEQ ID NO: 264447 - DNA, 30 bp, Artificial Sequence
  Synthetic oligonucleotide
gcttgatcgaaaccttgcgatatgagtcca

SEQ ID NO: 264448 - DNA, 30 bp, Artificial Sequence
  Synthetic oligonucleotide
aacacatcgttgtaggtggggttgagtcca

SEQ ID NO: 264449 - DNA, 30 bp, Artificial Sequence
  Synthetic oligonucleotide
ggacatgtcactgagacaccgcgtagtcca

SEQ ID NO: 264450 - DNA, 30 bp, Artificial Sequence
  Synthetic oligonucleotide
ccaccctgttatatggtggagattagtcca

SEQ ID NO: 264451 - DNA, 30 bp, Artificial Sequence
  Synthetic oligonucleotide
aactcagtggttaatccgctcgaacgtcca

SEQ ID NO: 264452 - DNA, 30 bp, Artificial Sequence
  Synthetic oligonucleotide
ccataaggcatgaactgtaattgacgtcca

SEQ ID NO: 264453 - DNA, 30 bp, Artificial Sequence
  Synthetic oligonucleotide
aatagcgtctgtggagggtaattgcgtcca

SEQ ID NO: 264454 - DNA, 30 bp, Artificial Sequence
  Synthetic oligonucleotide
ctatcacaatattaagggcgaactcgtcca

SEQ ID NO: 264455 - DNA, 30 bp, Artificial Sequence
  Synthetic oligonucleotide
tcttgtctatgtgccaaggtcaaaggtcca

SEQ ID NO: 264456 - DNA, 30 bp, Artificial Sequence
  Synthetic oligonucleotide
tacttcaaatcgcaagtggtatgaggtcca

SEQ ID NO: 264457 - DNA, 30 bp, Artificial Sequence
  Synthetic oligonucleotide
ttagtacaactaggtgggtttaacggtcca

SEQ ID NO: 264458 - DNA, 30 bp, Artificial Sequence
  Synthetic oligonucleotide
cattcgatccacagttcatcgcgcggtcca

SEQ ID NO: 264459 - DNA, 30 bp, Artificial Sequence
  Synthetic oligonucleotide
ggggctggtcggtaacaattatcgggtcca

SEQ ID NO: 264460 - DNA, 30 bp, Artificial Sequence
  Synthetic oligonucleotide
tcctggtctatatttatgggatgtggtcca

SEQ ID NO: 264461 - DNA, 30 bp, Artificial Sequence
  Synthetic oligonucleotide
aagttaatggcccgaaatgtgtgtggtcca

SEQ ID NO: 264462 - DNA, 30 bp, Artificial Sequence
  Synthetic oligonucleotide
atattgaaactggcgtgttctcaatgtcca

SEQ ID NO: 264463 - DNA, 30 bp, Artificial Sequence
  Synthetic oligonucleotide
tcgacataagtcgatttctataactgtcca

SEQ ID NO: 264464 - DNA, 30 bp, Artificial Sequence
  Synthetic oligonucleotide
ctcttgcgttagccacgcgtctcctgtcca

SEQ ID NO: 264465 - DNA, 30 bp, Artificial Sequence
  Synthetic oligonucleotide
tgcaggagacataattttcgtagctgtcca

SEQ ID NO: 264466 - DNA, 30 bp, Artificial Sequence
  Synthetic oligonucleotide
agtccccaaaaaaatgcgggctgctgtcca

SEQ ID NO: 264467 - DNA, 30 bp, Artificial Sequence
  Synthetic oligonucleotide
gtcaggagctggagttcggatctctgtcca

SEQ ID NO: 264468 - DNA, 30 bp, Artificial Sequence
  Synthetic oligonucleotide
ccctaatatagccttataccctattgtcca

SEQ ID NO: 264469 - DNA, 30 bp, Artificial Sequence
  Synthetic oligonucleotide
tgcatttattgccgctaaaacggttgtcca

SEQ ID NO: 264470 - DNA, 30 bp, Artificial Sequence
  Synthetic oligonucleotide
catgtgctcgggtgtaagaaaacaattcca

SEQ ID NO: 264471 - DNA, 30 bp, Artificial Sequence
  Synthetic oligonucleotide
ctcattggctgcataagggttatcattcca

SEQ ID NO: 264472 - DNA, 30 bp, Artificial Sequence
  Synthetic oligonucleotide
tgggtaaggcgacgaagggatgagattcca

SEQ ID NO: 264473 - DNA, 30 bp, Artificial Sequence
  Synthetic oligonucleotide
tctcccgactacactgagtcaacgattcca

SEQ ID NO: 264474 - DNA, 30 bp, Artificial Sequence
  Synthetic oligonucleotide
gatggagattgtatgaacgtggaacttcca

SEQ ID NO: 264475 - DNA, 30 bp, Artificial Sequence
  Synthetic oligonucleotide
tccgcaaatagttacgcgatgatacttcca

SEQ ID NO: 264476 - DNA, 30 bp, Artificial Sequence
  Synthetic oligonucleotide
gaggaggatataatttgtacctgcgttcca

SEQ ID NO: 264477 - DNA, 30 bp, Artificial Sequence
  Synthetic oligonucleotide
gcggcactgcactggaggaggctcgttcca

SEQ ID NO: 264478 - DNA, 30 bp, Artificial Sequence
  Synthetic oligonucleotide
tggggtcggggtcaaaaatatgtcgttcca

SEQ ID NO: 264479 - DNA, 30 bp, Artificial Sequence
  Synthetic oligonucleotide
gttgggaagctggaagtccgttctgttcca

SEQ ID NO: 264480 - DNA, 30 bp, Artificial Sequence
  Synthetic oligonucleotide
tgattggcccaaacttcggtcaaatttcca

SEQ ID NO: 264481 - DNA, 30 bp, Artificial Sequence
  Synthetic oligonucleotide
aatcgtgtaagctccggtgggtcatttcca

SEQ ID NO: 264482 - DNA, 30 bp, Artificial Sequence
  Synthetic oligonucleotide
ggctgttattttcagaaacgaagatttcca

SEQ ID NO: 264483 - DNA, 30 bp, Artificial Sequence
  Synthetic oligonucleotide
tattcgacccaccacccggtgtgatttcca

SEQ ID NO: 264484 - DNA, 30 bp, Artificial Sequence
  Synthetic oligonucleotide
aatccgcaagatgattgagatggctttcca

SEQ ID NO: 264485 - DNA, 30 bp, Artificial Sequence
  Synthetic oligonucleotide
acttacatctcaatacaaatatagtttcca

SEQ ID NO: 264486 - DNA, 30 bp, Artificial Sequence
  Synthetic oligonucleotide
gaagaccccgaaaaacttatatagtttcca

SEQ ID NO: 264487 - DNA, 30 bp, Artificial Sequence
  Synthetic oligonucleotide
ctggaaacagtggcgtccaaggattttcca

SEQ ID NO: 264488 - DNA, 30 bp, Artificial Sequence
  Synthetic oligonucleotide
cgtctattgaccggggcagaactttttcca

SEQ ID NO: 264489 - DNA, 30 bp, Artificial Sequence
  Synthetic oligonucleotide
cttcaatcaatacggtatccagtttttcca

SEQ ID NO: 264490 - DNA, 30 bp, Artificial Sequence
  Synthetic oligonucleotide
atagagcctgcgctgtggacaccaaaagca

SEQ ID NO: 264491 - DNA, 30 bp, Artificial Sequence
  Synthetic oligonucleotide
atactatttcgtagacagtacagaaaagca

SEQ ID NO: 264492 - DNA, 30 bp, Artificial Sequence
  Synthetic oligonucleotide
accatgctccgaataacaggggtaaaagca

SEQ ID NO: 264493 - DNA, 30 bp, Artificial Sequence
  Synthetic oligonucleotide
cgtgataacgtgacacacacgaccaaagca

SEQ ID NO: 264494 - DNA, 30 bp, Artificial Sequence
  Synthetic oligonucleotide
cttataacacgcgcctgaaaatgcaaagca

SEQ ID NO: 264495 - DNA, 30 bp, Artificial Sequence
  Synthetic oligonucleotide
agtattaggataggtccgcacgtcaaagca

SEQ ID NO: 264496 - DNA, 30 bp, Artificial Sequence
  Synthetic oligonucleotide
ttgcagcggcgtctatagcatcgccaagca

SEQ ID NO: 264497 - DNA, 30 bp, Artificial Sequence
  Synthetic oligonucleotide
gtccctgagggggaactgatgaggcaagca

SEQ ID NO: 264498 - DNA, 30 bp, Artificial Sequence
  Synthetic oligonucleotide
aaaaagatggccacataacgaagtcaagca

SEQ ID NO: 264499 - DNA, 30 bp, Artificial Sequence
  Synthetic oligonucleotide
gtgtgcaatgcactgtaaaattttcaagca

SEQ ID NO: 264500 - DNA, 30 bp, Artificial Sequence
  Synthetic oligonucleotide
cacataaaacttatacatcatgcagaagca

SEQ ID NO: 264501 - DNA, 30 bp, Artificial Sequence
  Synthetic oligonucleotide
gtagtgcctcttcgtaccagctgagaagca

SEQ ID NO: 264502 - DNA, 30 bp, Artificial Sequence
  Synthetic oligonucleotide
gagaagttgtgcgtgacgggtggcgaagca

SEQ ID NO: 264503 - DNA, 30 bp, Artificial Sequence
  Synthetic oligonucleotide
cgcgcaagtcactgtcttgcgctcgaagca

SEQ ID NO: 264504 - DNA, 30 bp, Artificial Sequence
  Synthetic oligonucleotide
tctgtactgcatgttgaatatccggaagca

SEQ ID NO: 264505 - DNA, 30 bp, Artificial Sequence
  Synthetic oligonucleotide
ccccgaagcgtcgttaatgttgtggaagca

SEQ ID NO: 264506 - DNA, 30 bp, Artificial Sequence
  Synthetic oligonucleotide
tctgaaaatcaaggtccgaaacatgaagca

SEQ ID NO: 264507 - DNA, 30 bp, Artificial Sequence
  Synthetic oligonucleotide
tgtacaaacagcaatcctgtgtgtgaagca

SEQ ID NO: 264508 - DNA, 30 bp, Artificial Sequence
  Synthetic oligonucleotide
cgcgccgtgcacgcgcgacacttataagca

SEQ ID NO: 264509 - DNA, 30 bp, Artificial Sequence
  Synthetic oligonucleotide
gtcatgtctaagtttgatcatatctaagca

SEQ ID NO: 264510 - DNA, 30 bp, Artificial Sequence
  Synthetic oligonucleotide
gggtagatatttattgaagactattaagca

SEQ ID NO: 264511 - DNA, 30 bp, Artificial Sequence
  Synthetic oligonucleotide
cagatacggtctacaggggtcatttaagca

SEQ ID NO: 264512 - DNA, 30 bp, Artificial Sequence
  Synthetic oligonucleotide
tgatcgtaggcttcagtagtgctttaagca

SEQ ID NO: 264513 - DNA, 30 bp, Artificial Sequence
  Synthetic oligonucleotide
ggtaacttctcggtcgttccggcaacagca

SEQ ID NO: 264514 - DNA, 30 bp, Artificial Sequence
  Synthetic oligonucleotide
cagccgagatcgcgggccatcgcgacagca

SEQ ID NO: 264515 - DNA, 30 bp, Artificial Sequence
  Synthetic oligonucleotide
gtgccgtagtttggccgacataggacagca

SEQ ID NO: 264516 - DNA, 30 bp, Artificial Sequence
  Synthetic oligonucleotide
aaaaactacctggactgcaacaatacagca

SEQ ID NO: 264517 - DNA, 30 bp, Artificial Sequence
  Synthetic oligonucleotide
tattgtgggaccagtgtacctgaaccagca

SEQ ID NO: 264518 - DNA, 30 bp, Artificial Sequence
  Synthetic oligonucleotide
acttcataatattggggattaacaccagca

SEQ ID NO: 264519 - DNA, 30 bp, Artificial Sequence
  Synthetic oligonucleotide
gtgatcattgtgccagaaacacacccagca

SEQ ID NO: 264520 - DNA, 30 bp, Artificial Sequence
  Synthetic oligonucleotide
agtttgttataacggttggaatttccagca

SEQ ID NO: 264521 - DNA, 30 bp, Artificial Sequence
  Synthetic oligonucleotide
tttaggggtatgggtctggctaccgcagca

SEQ ID NO: 264522 - DNA, 30 bp, Artificial Sequence
  Synthetic oligonucleotide
atgtaagttcgatggttagtaagggcagca

SEQ ID NO: 264523 - DNA, 30 bp, Artificial Sequence
  Synthetic oligonucleotide
gcaggtagtcttataggttaaacatcagca

SEQ ID NO: 264524 - DNA, 30 bp, Artificial Sequence
  Synthetic oligonucleotide
attgggggcaacttccccggtacttcagca

SEQ ID NO: 264525 - DNA, 30 bp, Artificial Sequence
  Synthetic oligonucleotide
cccactgaggcattcaatacctcttcagca

SEQ ID NO: 264526 - DNA, 30 bp, Artificial Sequence
  Synthetic oligonucleotide
gggataacaatcaaatactcttgttcagca

SEQ ID NO: 264527 - DNA, 30 bp, Artificial Sequence
  Synthetic oligonucleotide
gtttggggcgtcagctaggtattttcagca

SEQ ID NO: 264528 - DNA, 30 bp, Artificial Sequence
  Synthetic oligonucleotide
tgtgcagaagttccgccttggacaagagca

SEQ ID NO: 264529 - DNA, 30 bp, Artificial Sequence
  Synthetic oligonucleotide
aaaatggctgttagcgtataatcaagagca

SEQ ID NO: 264530 - DNA, 30 bp, Artificial Sequence
  Synthetic oligonucleotide
taaatcctcacgtaaattcgttgaagagca

SEQ ID NO: 264531 - DNA, 30 bp, Artificial Sequence
  Synthetic oligonucleotide
gaagtttacacccacgttttagtgagagca

SEQ ID NO: 264532 - DNA, 30 bp, Artificial Sequence
  Synthetic oligonucleotide
ccgggtcatctggcagattacactcgagca

SEQ ID NO: 264533 - DNA, 30 bp, Artificial Sequence
  Synthetic oligonucleotide
cttaaattaattggtccacatacaggagca

SEQ ID NO: 264534 - DNA, 30 bp, Artificial Sequence
  Synthetic oligonucleotide
ataccctgactggcctacccatgaggagca

SEQ ID NO: 264535 - DNA, 30 bp, Artificial Sequence
  Synthetic oligonucleotide
gaccgaattctgttaccgaatctaggagca

SEQ ID NO: 264536 - DNA, 30 bp, Artificial Sequence
  Synthetic oligonucleotide
tgacaacctgattagattgcgcgcggagca

SEQ ID NO: 264537 - DNA, 30 bp, Artificial Sequence
  Synthetic oligonucleotide
aaatgaactgaagaaatgcttgtgggagca

SEQ ID NO: 264538 - DNA, 30 bp, Artificial Sequence
  Synthetic oligonucleotide
ctgcggggtgtaggagggcggcatggagca

SEQ ID NO: 264539 - DNA, 30 bp, Artificial Sequence
  Synthetic oligonucleotide
gaatggtgatacttcgagaccattggagca

SEQ ID NO: 264540 - DNA, 30 bp, Artificial Sequence
  Synthetic oligonucleotide
aagatactttcttcgtcggggtaatgagca

SEQ ID NO: 264541 - DNA, 30 bp, Artificial Sequence
  Synthetic oligonucleotide
ggtgatcactaaaagacccatttatgagca

SEQ ID NO: 264542 - DNA, 30 bp, Artificial Sequence
  Synthetic oligonucleotide
tgacgcgcggtgatgcgcggttcctgagca

SEQ ID NO: 264543 - DNA, 30 bp, Artificial Sequence
  Synthetic oligonucleotide
ggataagcgggcgttttcatacgctgagca

SEQ ID NO: 264544 - DNA, 30 bp, Artificial Sequence
  Synthetic oligonucleotide
gcccaggtttatagataaattttgtgagca

SEQ ID NO: 264545 - DNA, 30 bp, Artificial Sequence
  Synthetic oligonucleotide
ttatgattgagctatcatacgccttgagca

SEQ ID NO: 264546 - DNA, 30 bp, Artificial Sequence
  Synthetic oligonucleotide
atcataataaaggtgtacgctcacatagca

SEQ ID NO: 264547 - DNA, 30 bp, Artificial Sequence
  Synthetic oligonucleotide
gctggtatctaaaagtacgtttccatagca

SEQ ID NO: 264548 - DNA, 30 bp, Artificial Sequence
  Synthetic oligonucleotide
ttcgttcgtatctgttcgccgtttatagca

SEQ ID NO: 264549 - DNA, 30 bp, Artificial Sequence
  Synthetic oligonucleotide
cagtacccgaggggatttggatcactagca

SEQ ID NO: 264550 - DNA, 30 bp, Artificial Sequence
  Synthetic oligonucleotide
taatcccttctacaaagcgggttactagca

SEQ ID NO: 264551 - DNA, 30 bp, Artificial Sequence
  Synthetic oligonucleotide
tcatactttgaagcgggtctacacctagca

SEQ ID NO: 264552 - DNA, 30 bp, Artificial Sequence
  Synthetic oligonucleotide
tccgtatgcaacacgtcgcttctcctagca

SEQ ID NO: 264553 - DNA, 31 bp, Artificial Sequence
  Synthetic oligonucleotide
tgtaatctatattcgggatttgaagctagca

SEQ ID NO: 264554 - DNA, 30 bp, Artificial Sequence
  Synthetic oligonucleotide
ggactgaggcgtttttttgagtagctagca

SEQ ID NO: 264555 - DNA, 30 bp, Artificial Sequence
  Synthetic oligonucleotide
gtgcacgcacaatcaaagccgcttctagca

SEQ ID NO: 264556 - DNA, 30 bp, Artificial Sequence
  Synthetic oligonucleotide
acggcgaaaccaagccctcggtttctagca

SEQ ID NO: 264557 - DNA, 30 bp, Artificial Sequence
  Synthetic oligonucleotide
tcacgtgcgagggagcgctctgaagtagca

SEQ ID NO: 264558 - DNA, 30 bp, Artificial Sequence
  Synthetic oligonucleotide
cgagggcgcgcttgcatagaacacgtagca

SEQ ID NO: 264559 - DNA, 30 bp, Artificial Sequence
  Synthetic oligonucleotide
cgtcgtagcacttggcttcacccggtagca

SEQ ID NO: 264560 - DNA, 30 bp, Artificial Sequence
  Synthetic oligonucleotide
gactgttggtgtgcaagtgggtctgtagca

SEQ ID NO: 264561 - DNA, 30 bp, Artificial Sequence
  Synthetic oligonucleotide
agccgcggacgtcctagactatttgtagca

SEQ ID NO: 264562 - DNA, 30 bp, Artificial Sequence
  Synthetic oligonucleotide
agcatagagttgctgtgtaaataattagca

SEQ ID NO: 264563 - DNA, 30 bp, Artificial Sequence
  Synthetic oligonucleotide
agtggtcaatacgcacatctgacattagca

SEQ ID NO: 264564 - DNA, 30 bp, Artificial Sequence
  Synthetic oligonucleotide
tggttaacgattaattatcaaatcttagca

SEQ ID NO: 264565 - DNA, 30 bp, Artificial Sequence
  Synthetic oligonucleotide
tagcgcaaggagcaattgcggcggttagca

SEQ ID NO: 264566 - DNA, 30 bp, Artificial Sequence
  Synthetic oligonucleotide
tctgtgagctatagccagctttggttagca

SEQ ID NO: 264567 - DNA, 30 bp, Artificial Sequence
  Synthetic oligonucleotide
tcccctcgtggatatcattagtaaaacgca

SEQ ID NO: 264568 - DNA, 30 bp, Artificial Sequence
  Synthetic oligonucleotide
ggtatgcgtaccttacatgtttgcaacgca

SEQ ID NO: 264569 - DNA, 30 bp, Artificial Sequence
  Synthetic oligonucleotide
atgttgggaaccctaacctacaggaacgca

SEQ ID NO: 264570 - DNA, 30 bp, Artificial Sequence
  Synthetic oligonucleotide
ttatccccaaccaaacaccctattaacgca

SEQ ID NO: 264571 - DNA, 30 bp, Artificial Sequence
  Synthetic oligonucleotide
acccgagctccggacagacttatgcacgca

SEQ ID NO: 264572 - DNA, 30 bp, Artificial Sequence
  Synthetic oligonucleotide
gctactggtattaatgcggtcaatcacgca

SEQ ID NO: 264573 - DNA, 30 bp, Artificial Sequence
  Synthetic oligonucleotide
ccttttggaagatcgagcttccatcacgca

SEQ ID NO: 264574 - DNA, 30 bp, Artificial Sequence
  Synthetic oligonucleotide
gagcctagcgacatgatactgtatcacgca

SEQ ID NO: 264575 - DNA, 30 bp, Artificial Sequence
  Synthetic oligonucleotide
tcccacgcaagtcatgatatccttcacgca

SEQ ID NO: 264576 - DNA, 30 bp, Artificial Sequence
  Synthetic oligonucleotide
ccatcatccagagagtcgatgggcgacgca

SEQ ID NO: 264577 - DNA, 30 bp, Artificial Sequence
  Synthetic oligonucleotide
acgtcgcgagaaacagtcaggaaggacgca

SEQ ID NO: 264578 - DNA, 30 bp, Artificial Sequence
  Synthetic oligonucleotide
cgatcctgtcacccgagacagcctgacgca

SEQ ID NO: 264579 - DNA, 30 bp, Artificial Sequence
  Synthetic oligonucleotide
cctgccaagaatcgtcgagagtctgacgca

SEQ ID NO: 264580 - DNA, 30 bp, Artificial Sequence
  Synthetic oligonucleotide
tagacagctcgtcggcgctacttatacgca

SEQ ID NO: 264581 - DNA, 30 bp, Artificial Sequence
  Synthetic oligonucleotide
tcaaacatcctacgtaaaaaccactacgca

SEQ ID NO: 264582 - DNA, 30 bp, Artificial Sequence
  Synthetic oligonucleotide
tcaaagacaagttatgcatcttactacgca

SEQ ID NO: 264583 - DNA, 30 bp, Artificial Sequence
  Synthetic oligonucleotide
tcgttcgcgatagcgctacgaagctacgca

SEQ ID NO: 264584 - DNA, 30 bp, Artificial Sequence
  Synthetic oligonucleotide
atctggatgaggttcccattggattacgca

SEQ ID NO: 264585 - DNA, 30 bp, Artificial Sequence
  Synthetic oligonucleotide
tgggatggggggcttacagactgttacgca

SEQ ID NO: 264586 - DNA, 30 bp, Artificial Sequence
  Synthetic oligonucleotide
gggagccacatacaccgagttaaaaccgca

SEQ ID NO: 264587 - DNA, 30 bp, Artificial Sequence
  Synthetic oligonucleotide
catgcagagtttgacccacgacccaccgca

SEQ ID NO: 264588 - DNA, 30 bp, Artificial Sequence
  Synthetic oligonucleotide
ctggttagggagctcggagttagcaccgca

SEQ ID NO: 264589 - DNA, 30 bp, Artificial Sequence
  Synthetic oligonucleotide
aggagtaccttttcagggagtccgaccgca

SEQ ID NO: 264590 - DNA, 30 bp, Artificial Sequence
  Synthetic oligonucleotide
ggcttatcagagctgtatgaagctaccgca

SEQ ID NO: 264591 - DNA, 30 bp, Artificial Sequence
  Synthetic oligonucleotide
atgcgtattatgatactgggatttaccgca

SEQ ID NO: 264592 - DNA, 30 bp, Artificial Sequence
  Synthetic oligonucleotide
gtataaccacagggcagtaaaagacccgca

SEQ ID NO: 264593 - DNA, 30 bp, Artificial Sequence
  Synthetic oligonucleotide
accataagcatattgttcagtgcgcccgca

SEQ ID NO: 264594 - DNA, 30 bp, Artificial Sequence
  Synthetic oligonucleotide
ctataattcacccgacaggcactgcccgca

SEQ ID NO: 264595 - DNA, 30 bp, Artificial Sequence
  Synthetic oligonucleotide
gggtgggcagacaccgttcgggatcccgca

SEQ ID NO: 264596 - DNA, 30 bp, Artificial Sequence
  Synthetic oligonucleotide
aatgaacatcaagggtagacattagccgca

SEQ ID NO: 264597 - DNA, 30 bp, Artificial Sequence
  Synthetic oligonucleotide
tgaaacggctcatcatatagtcacgccgca

SEQ ID NO: 264598 - DNA, 30 bp, Artificial Sequence
  Synthetic oligonucleotide
gtctcgtcgtaatcggactaacaggccgca

SEQ ID NO: 264599 - DNA, 30 bp, Artificial Sequence
  Synthetic oligonucleotide
ggtgcatgatgggacccagcgagggccgca

SEQ ID NO: 264600 - DNA, 30 bp, Artificial Sequence
  Synthetic oligonucleotide
tacttagaatcaacctcatcgcgggccgca

SEQ ID NO: 264601 - DNA, 30 bp, Artificial Sequence
  Synthetic oligonucleotide
tgaaccgttgtggtaccataaggtgccgca

SEQ ID NO: 264602 - DNA, 30 bp, Artificial Sequence
  Synthetic oligonucleotide
atccagaacgctggataggggcattccgca

SEQ ID NO: 264603 - DNA, 30 bp, Artificial Sequence
  Synthetic oligonucleotide
agctggctctaacctacagtctgttccgca

SEQ ID NO: 264604 - DNA, 30 bp, Artificial Sequence
  Synthetic oligonucleotide
ggggttactaagaatcgtcgttcaagcgca

SEQ ID NO: 264605 - DNA, 30 bp, Artificial Sequence
  Synthetic oligonucleotide
cgtctctagctactaagctggggaagcgca

SEQ ID NO: 264606 - DNA, 30 bp, Artificial Sequence
  Synthetic oligonucleotide
aaccataggtgtgataccagatgaagcgca

SEQ ID NO: 264607 - DNA, 30 bp, Artificial Sequence
  Synthetic oligonucleotide
atgacgcgaagcaaacatggttagagcgca

SEQ ID NO: 264608 - DNA, 30 bp, Artificial Sequence
  Synthetic oligonucleotide
ctccgcgtatgatccagatcccgacgcgca

SEQ ID NO: 264609 - DNA, 30 bp, Artificial Sequence
  Synthetic oligonucleotide
aatatccgaccgtggattattcgacgcgca

SEQ ID NO: 264610 - DNA, 30 bp, Artificial Sequence
  Synthetic oligonucleotide
acgtaattacgtagcatagactgacgcgca

SEQ ID NO: 264611 - DNA, 30 bp, Artificial Sequence
  Synthetic oligonucleotide
tcgcagccctttctaaacatctcgcgcgca

SEQ ID NO: 264612 - DNA, 30 bp, Artificial Sequence
  Synthetic oligonucleotide
acacggtcgaactgcgaacacaggcgcgca

SEQ ID NO: 264613 - DNA, 30 bp, Artificial Sequence
  Synthetic oligonucleotide
gataactcgcataccttaactcatcgcgca

SEQ ID NO: 264614 - DNA, 30 bp, Artificial Sequence
  Synthetic oligonucleotide
tttagaaagaactattgtcatgaaggcgca

SEQ ID NO: 264615 - DNA, 30 bp, Artificial Sequence
  Synthetic oligonucleotide
catcttacatagaatgaattagccggcgca

SEQ ID NO: 264616 - DNA, 30 bp, Artificial Sequence
  Synthetic oligonucleotide
ggatagaagagcgtggccctaagtggcgca

SEQ ID NO: 264617 - DNA, 30 bp, Artificial Sequence
  Synthetic oligonucleotide
gaccaacgtattagtctctgggaatgcgca

SEQ ID NO: 264618 - DNA, 30 bp, Artificial Sequence
  Synthetic oligonucleotide
agtatatggccagtaggtaattgatgcgca

SEQ ID NO: 264619 - DNA, 30 bp, Artificial Sequence
  Synthetic oligonucleotide
cgattcagtgaaccaatggggcgctgcgca

SEQ ID NO: 264620 - DNA, 30 bp, Artificial Sequence
  Synthetic oligonucleotide
gattctggggtacctaagaatacaatcgca

SEQ ID NO: 264621 - DNA, 30 bp, Artificial Sequence
  Synthetic oligonucleotide
gagctggttaataccctcccacggatcgca

SEQ ID NO: 264622 - DNA, 30 bp, Artificial Sequence
  Synthetic oligonucleotide
gctgctcattaatatatactggggatcgca

SEQ ID NO: 264623 - DNA, 30 bp, Artificial Sequence
  Synthetic oligonucleotide
aatgtatccgccggggtaaatctgatcgca

SEQ ID NO: 264624 - DNA, 30 bp, Artificial Sequence
  Synthetic oligonucleotide
gcacggtcactagcgtacgggcttatcgca

SEQ ID NO: 264625 - DNA, 30 bp, Artificial Sequence
  Synthetic oligonucleotide
tagtacctgtgcacttataccaacctcgca

SEQ ID NO: 264626 - DNA, 30 bp, Artificial Sequence
  Synthetic oligonucleotide
acccgcaaggtccacggctggcacctcgca

SEQ ID NO: 264627 - DNA, 30 bp, Artificial Sequence
  Synthetic oligonucleotide
cggacgagcggtatggctattagcctcgca

SEQ ID NO: 264628 - DNA, 30 bp, Artificial Sequence
  Synthetic oligonucleotide
agtattaaacgtgaatgtaagacgctcgca

SEQ ID NO: 264629 - DNA, 30 bp, Artificial Sequence
  Synthetic oligonucleotide
cgtacagaacccgtggttgatcggctcgca

SEQ ID NO: 264630 - DNA, 30 bp, Artificial Sequence
  Synthetic oligonucleotide
agtgattgtaagccaatggctcttctcgca

SEQ ID NO: 264631 - DNA, 30 bp, Artificial Sequence
  Synthetic oligonucleotide
accgactttaaaccagatgagaacgtcgca

SEQ ID NO: 264632 - DNA, 30 bp, Artificial Sequence
  Synthetic oligonucleotide
gaggtcgggtagtgagcggataccgtcgca

SEQ ID NO: 264633 - DNA, 30 bp, Artificial Sequence
  Synthetic oligonucleotide
tcggtatcaattgggaataaatccgtcgca

SEQ ID NO: 264634 - DNA, 30 bp, Artificial Sequence
  Synthetic oligonucleotide
tttccagagacacacataattcaggtcgca

SEQ ID NO: 264635 - DNA, 30 bp, Artificial Sequence
  Synthetic oligonucleotide
ggactaggctgtgtcgcagtccgggtcgca

SEQ ID NO: 264636 - DNA, 30 bp, Artificial Sequence
  Synthetic oligonucleotide
ggcaagggggaccattttcgaattgtcgca

SEQ ID NO: 264637 - DNA, 30 bp, Artificial Sequence
  Synthetic oligonucleotide
taggtatggttacaggtctgacgattcgca

SEQ ID NO: 264638 - DNA, 30 bp, Artificial Sequence
  Synthetic oligonucleotide
attagcggcaaccatcggattagcttcgca

SEQ ID NO: 264639 - DNA, 30 bp, Artificial Sequence
  Synthetic oligonucleotide
gacctcccttcgacaacaccgacgttcgca

SEQ ID NO: 264640 - DNA, 30 bp, Artificial Sequence
  Synthetic oligonucleotide
tggttagtaatttaatcggaagcgttcgca

SEQ ID NO: 264641 - DNA, 30 bp, Artificial Sequence
  Synthetic oligonucleotide
acattgagatggaacatgggagcgttcgca

SEQ ID NO: 264642 - DNA, 30 bp, Artificial Sequence
  Synthetic oligonucleotide
tgtatagtggatagttacacacggttcgca

SEQ ID NO: 264643 - DNA, 30 bp, Artificial Sequence
  Synthetic oligonucleotide
ctatgaactcctagaggttactggttcgca

SEQ ID NO: 264644 - DNA, 30 bp, Artificial Sequence
  Synthetic oligonucleotide
gcaactcgcacaaggcgagcgggaaaggca

SEQ ID NO: 264645 - DNA, 30 bp, Artificial Sequence
  Synthetic oligonucleotide
ggtaggcttagcaatgtaattggcaaggca

SEQ ID NO: 264646 - DNA, 30 bp, Artificial Sequence
  Synthetic oligonucleotide
taatatgcgtcccgaacttaaacgaaggca

SEQ ID NO: 264647 - DNA, 30 bp, Artificial Sequence
  Synthetic oligonucleotide
catcgggatcatcctcaccgtgtgaaggca

SEQ ID NO: 264648 - DNA, 30 bp, Artificial Sequence
  Synthetic oligonucleotide
tcgtcaaatagacatgagacccagcaggca

SEQ ID NO: 264649 - DNA, 30 bp, Artificial Sequence
  Synthetic oligonucleotide
gtcaccttgtttcactgtccatctcaggca

SEQ ID NO: 264650 - DNA, 30 bp, Artificial Sequence
  Synthetic oligonucleotide
gggcagagtcttggtggagatgaagaggca

SEQ ID NO: 264651 - DNA, 30 bp, Artificial Sequence
  Synthetic oligonucleotide
tgttcgcggctgcgaacccataccgaggca

SEQ ID NO: 264652 - DNA, 27 bp, Artificial Sequence
  Synthetic oligonucleotide
ttaggttgtccggagtcgatcgaggca

SEQ ID NO: 264653 - DNA, 30 bp, Artificial Sequence
  Synthetic oligonucleotide
taagtgaggccacctgatcgttaggaggca

SEQ ID NO: 264654 - DNA, 30 bp, Artificial Sequence
  Synthetic oligonucleotide
cacccggtattggtgtatggcgttgaggca

SEQ ID NO: 264655 - DNA, 30 bp, Artificial Sequence
  Synthetic oligonucleotide
acacactacgaggatggcaacccataggca

SEQ ID NO: 264656 - DNA, 30 bp, Artificial Sequence
  Synthetic oligonucleotide
tgaacaaggcccttatgagctgcataggca

SEQ ID NO: 264657 - DNA, 30 bp, Artificial Sequence
  Synthetic oligonucleotide
ctgcgtagtcagccacccatcatataggca

SEQ ID NO: 264658 - DNA, 30 bp, Artificial Sequence
  Synthetic oligonucleotide
gatcagcggataaaaaacagcgtctaggca

SEQ ID NO: 264659 - DNA, 30 bp, Artificial Sequence
  Synthetic oligonucleotide
cgtaagggtactcacagcgatgagtaggca

SEQ ID NO: 264660 - DNA, 30 bp, Artificial Sequence
  Synthetic oligonucleotide
gaaataggtgaactgcatactggaacggca

SEQ ID NO: 264661 - DNA, 30 bp, Artificial Sequence
  Synthetic oligonucleotide
gtatagtaacccagattatcgaccacggca

SEQ ID NO: 264662 - DNA, 30 bp, Artificial Sequence
  Synthetic oligonucleotide
gattgatttacgcaactcaggtgcacggca

SEQ ID NO: 264663 - DNA, 30 bp, Artificial Sequence
  Synthetic oligonucleotide
ggccggctatgtttatcaaggcagacggca

SEQ ID NO: 264664 - DNA, 30 bp, Artificial Sequence
  Synthetic oligonucleotide
cgttcatgccaacgtatgtttgagacggca

SEQ ID NO: 264665 - DNA, 30 bp, Artificial Sequence
  Synthetic oligonucleotide
tgtagtgattgagaaacgggttggacggca

SEQ ID NO: 264666 - DNA, 30 bp, Artificial Sequence
  Synthetic oligonucleotide
aaagcgttccggtaaagtgttattacggca

SEQ ID NO: 264667 - DNA, 30 bp, Artificial Sequence
  Synthetic oligonucleotide
cttatcgataccctagcgaacggaccggca

SEQ ID NO: 264668 - DNA, 29 bp, Artificial Sequence
  Synthetic oligonucleotide
gagaagtgttacgtagagtgctcccggca

SEQ ID NO: 264669 - DNA, 30 bp, Artificial Sequence
  Synthetic oligonucleotide
gtaccgagcgaaatattaccgccgccggca

SEQ ID NO: 264670 - DNA, 30 bp, Artificial Sequence
  Synthetic oligonucleotide
cgtaattagtgtatagggtcattgccggca

SEQ ID NO: 264671 - DNA, 30 bp, Artificial Sequence
  Synthetic oligonucleotide
actggaccccggggtggtgtcgatccggca

SEQ ID NO: 264672 - DNA, 30 bp, Artificial Sequence
  Synthetic oligonucleotide
ggatgaatcaaccagagcgacaaagcggca

SEQ ID NO: 264673 - DNA, 30 bp, Artificial Sequence
  Synthetic oligonucleotide
catgcgggtaacatagaagccacggcggca

SEQ ID NO: 264674 - DNA, 30 bp, Artificial Sequence
  Synthetic oligonucleotide
gttgtccgaaagccgcgtgaaggggcggca

SEQ ID NO: 264675 - DNA, 30 bp, Artificial Sequence
  Synthetic oligonucleotide
cgcacagtgccatagtccacgtgggcggca

SEQ ID NO: 264676 - DNA, 30 bp, Artificial Sequence
  Synthetic oligonucleotide
ccccaaaagcactcggtgttgatggcggca

SEQ ID NO: 264677 - DNA, 30 bp, Artificial Sequence
  Synthetic oligonucleotide
gcgttattaatacactttgtcccatcggca

SEQ ID NO: 264678 - DNA, 30 bp, Artificial Sequence
  Synthetic oligonucleotide
ttgagcgtacgcatcaaacagtagtcggca

SEQ ID NO: 264679 - DNA, 30 bp, Artificial Sequence
  Synthetic oligonucleotide
aggagacggtaattggccgtggggtcggca

SEQ ID NO: 264680 - DNA, 30 bp, Artificial Sequence
  Synthetic oligonucleotide
cagatgagtgccgaaaaatttgattcggca

SEQ ID NO: 264681 - DNA, 30 bp, Artificial Sequence
  Synthetic oligonucleotide
tacctatcgatggggtcgcgtacttcggca

SEQ ID NO: 264682 - DNA, 30 bp, Artificial Sequence
  Synthetic oligonucleotide
attcgtcaatcggccttaaaacgttcggca

SEQ ID NO: 264683 - DNA, 30 bp, Artificial Sequence
  Synthetic oligonucleotide
tgggtctactcgtaggcgggtatttcggca

SEQ ID NO: 264684 - DNA, 29 bp, Artificial Sequence
  Synthetic oligonucleotide
gcaccccgtccttggtcgcgaacagggca

SEQ ID NO: 264685 - DNA, 30 bp, Artificial Sequence
  Synthetic oligonucleotide
aataagctcaaagcaacggatcacagggca

SEQ ID NO: 264686 - DNA, 30 bp, Artificial Sequence
  Synthetic oligonucleotide
tggctttgcttttgatagtatggtagggca

SEQ ID NO: 264687 - DNA, 30 bp, Artificial Sequence
  Synthetic oligonucleotide
cgcatgaagccgtctctgcgccttagggca

SEQ ID NO: 264688 - DNA, 30 bp, Artificial Sequence
  Synthetic oligonucleotide
tttcagcatcgacattttggcgttagggca

SEQ ID NO: 264689 - DNA, 30 bp, Artificial Sequence
  Synthetic oligonucleotide
tccttcataggagattcggtgggacgggca

SEQ ID NO: 264690 - DNA, 30 bp, Artificial Sequence
  Synthetic oligonucleotide
tccaaggttctgggcgtaggttcccgggca

SEQ ID NO: 264691 - DNA, 30 bp, Artificial Sequence
  Synthetic oligonucleotide
tatgcacgagcacactgggctatgcgggca

SEQ ID NO: 264692 - DNA, 30 bp, Artificial Sequence
  Synthetic oligonucleotide
ctagggctatctgcgaccggtattcgggca

SEQ ID NO: 264693 - DNA, 30 bp, Artificial Sequence
  Synthetic oligonucleotide
caacgtttctccctggagagctttcgggca

SEQ ID NO: 264694 - DNA, 30 bp, Artificial Sequence
  Synthetic oligonucleotide
aggcattcgtgttgttttaaagccggggca

SEQ ID NO: 264695 - DNA, 30 bp, Artificial Sequence
  Synthetic oligonucleotide
tttaagggctcagtaagtttctgcggggca

SEQ ID NO: 264696 - DNA, 30 bp, Artificial Sequence
  Synthetic oligonucleotide
cctgaagtttataccttcaacatatgggca

SEQ ID NO: 264697 - DNA, 31 bp, Artificial Sequence
  Synthetic oligonucleotide
gactatagggaaacgctcaagtcactgggca

SEQ ID NO: 264698 - DNA, 30 bp, Artificial Sequence
  Synthetic oligonucleotide
tacatttgctcgagttacctccgctgggca

SEQ ID NO: 264699 - DNA, 30 bp, Artificial Sequence
  Synthetic oligonucleotide
ctaaaatctaattaggtgcaaaattgggca

SEQ ID NO: 264700 - DNA, 30 bp, Artificial Sequence
  Synthetic oligonucleotide
ccagcggccgcacgcaatcagaattgggca

SEQ ID NO: 264701 - DNA, 30 bp, Artificial Sequence
  Synthetic oligonucleotide
agtcctccagaaatagataggctttgggca

SEQ ID NO: 264702 - DNA, 30 bp, Artificial Sequence
  Synthetic oligonucleotide
tcgtagggacgtcggcgcaaagcaatggca

SEQ ID NO: 264703 - DNA, 30 bp, Artificial Sequence
  Synthetic oligonucleotide
ttcgaacgcctccctgatcaacgaatggca

SEQ ID NO: 264704 - DNA, 30 bp, Artificial Sequence
  Synthetic oligonucleotide
cgcctttccggaagtatctctataatggca

SEQ ID NO: 264705 - DNA, 30 bp, Artificial Sequence
  Synthetic oligonucleotide
caatgcgggtctgggatcagcctaatggca

SEQ ID NO: 264706 - DNA, 30 bp, Artificial Sequence
  Synthetic oligonucleotide
actgttaccatgtcaagctttctaatggca

SEQ ID NO: 264707 - DNA, 30 bp, Artificial Sequence
  Synthetic oligonucleotide
gtcgtgtgggggcatcggcgctggatggca

SEQ ID NO: 264708 - DNA, 30 bp, Artificial Sequence
  Synthetic oligonucleotide
ctcagtcggctaggaaagtggactatggca

SEQ ID NO: 264709 - DNA, 30 bp, Artificial Sequence
  Synthetic oligonucleotide
tcgcgtgcgatcgaatcagatcttatggca

SEQ ID NO: 264710 - DNA, 30 bp, Artificial Sequence
  Synthetic oligonucleotide
atcagagggaggtcatgttatagactggca

SEQ ID NO: 264711 - DNA, 30 bp, Artificial Sequence
  Synthetic oligonucleotide
atgaggcttcaactttgtcgttacctggca

SEQ ID NO: 264712 - DNA, 30 bp, Artificial Sequence
  Synthetic oligonucleotide
aagcgtaaaacggttggctgcaccctggca

SEQ ID NO: 264713 - DNA, 30 bp, Artificial Sequence
  Synthetic oligonucleotide
ttacttttctctcgttgggtgaccctggca

SEQ ID NO: 264714 - DNA, 30 bp, Artificial Sequence
  Synthetic oligonucleotide
tacgacgtgatgctagtcgatgcagtggca

SEQ ID NO: 264715 - DNA, 31 bp, Artificial Sequence
  Synthetic oligonucleotide
tcacgccattgccaaagcccggactgtggca

SEQ ID NO: 264716 - DNA, 30 bp, Artificial Sequence
  Synthetic oligonucleotide
cgatttgacctgaggcctgtgattgtggca

SEQ ID NO: 264717 - DNA, 30 bp, Artificial Sequence
  Synthetic oligonucleotide
aagcaatgcggtaccgagaaatcattggca

SEQ ID NO: 264718 - DNA, 30 bp, Artificial Sequence
  Synthetic oligonucleotide
cctgtgtattgatggaattacttattggca

SEQ ID NO: 264719 - DNA, 30 bp, Artificial Sequence
  Synthetic oligonucleotide
cacgtaagccacgtcttaaccgtcttggca

SEQ ID NO: 264720 - DNA, 30 bp, Artificial Sequence
  Synthetic oligonucleotide
cgtaaacgcgaacatgtccgggagttggca

SEQ ID NO: 264721 - DNA, 30 bp, Artificial Sequence
  Synthetic oligonucleotide
ggaacgtttaatagattaaactcgttggca

SEQ ID NO: 264722 - DNA, 30 bp, Artificial Sequence
  Synthetic oligonucleotide
gaatggtgagagtgagcgacaacaaatgca

SEQ ID NO: 264723 - DNA, 30 bp, Artificial Sequence
  Synthetic oligonucleotide
tggggagattacccgctacagttgaatgca

SEQ ID NO: 264724 - DNA, 30 bp, Artificial Sequence
  Synthetic oligonucleotide
agggatatacaagcgggtggggtgcatgca

SEQ ID NO: 264725 - DNA, 30 bp, Artificial Sequence
  Synthetic oligonucleotide
agccatcatctggaataaacctttcatgca

SEQ ID NO: 264726 - DNA, 30 bp, Artificial Sequence
  Synthetic oligonucleotide
tgggcaatccaccgcgccttcgaagatgca

SEQ ID NO: 264727 - DNA, 30 bp, Artificial Sequence
  Synthetic oligonucleotide
gagaattgagtaatgagatccacagatgca

SEQ ID NO: 264728 - DNA, 30 bp, Artificial Sequence
  Synthetic oligonucleotide
atcggtaacgaacccagttactgagatgca

SEQ ID NO: 264729 - DNA, 30 bp, Artificial Sequence
  Synthetic oligonucleotide
tacattagggcatgcctgaaacaggatgca

SEQ ID NO: 264730 - DNA, 30 bp, Artificial Sequence
  Synthetic oligonucleotide
cagtcgggactaggtgtgcctagggatgca

SEQ ID NO: 264731 - DNA, 30 bp, Artificial Sequence
  Synthetic oligonucleotide
gaccacatgagctagcgggttcctgatgca

SEQ ID NO: 264732 - DNA, 30 bp, Artificial Sequence
  Synthetic oligonucleotide
taagccatcacgtggatgttttttgatgca

SEQ ID NO: 264733 - DNA, 30 bp, Artificial Sequence
  Synthetic oligonucleotide
acgcgccggtggaattagagtggctatgca

SEQ ID NO: 264734 - DNA, 30 bp, Artificial Sequence
  Synthetic oligonucleotide
gtcggtttttggagggtagtacagtatgca

SEQ ID NO: 264735 - DNA, 30 bp, Artificial Sequence
  Synthetic oligonucleotide
ccgggttgcctgaatgatgatcccactgca

SEQ ID NO: 264736 - DNA, 30 bp, Artificial Sequence
  Synthetic oligonucleotide
gtagaataccgtgcactggaactcactgca

SEQ ID NO: 264737 - DNA, 30 bp, Artificial Sequence
  Synthetic oligonucleotide
gtacgagctggttcatccgttgatactgca

SEQ ID NO: 264738 - DNA, 30 bp, Artificial Sequence
  Synthetic oligonucleotide
gaaagttaggggaactgccgttctactgca

SEQ ID NO: 264739 - DNA, 30 bp, Artificial Sequence
  Synthetic oligonucleotide
cacgtcattcataatatctttattactgca

SEQ ID NO: 264740 - DNA, 30 bp, Artificial Sequence
  Synthetic oligonucleotide
ccaactaagtgtggacgttatccacctgca

SEQ ID NO: 264741 - DNA, 30 bp, Artificial Sequence
  Synthetic oligonucleotide
ccggatccgtgagcaattcttgcccctgca

SEQ ID NO: 264742 - DNA, 30 bp, Artificial Sequence
  Synthetic oligonucleotide
tcattatccctcaaagttgaaatccctgca

SEQ ID NO: 264743 - DNA, 30 bp, Artificial Sequence
  Synthetic oligonucleotide
caaccggtccaggtagactaggctcctgca

SEQ ID NO: 264744 - DNA, 30 bp, Artificial Sequence
  Synthetic oligonucleotide
gggattaaaggatagataagtgaagctgca

SEQ ID NO: 264745 - DNA, 30 bp, Artificial Sequence
  Synthetic oligonucleotide
aagtcaattgtactataggaaccagctgca

SEQ ID NO: 264746 - DNA, 30 bp, Artificial Sequence
  Synthetic oligonucleotide
attcatccgtagaagctcagtctagctgca

SEQ ID NO: 264747 - DNA, 30 bp, Artificial Sequence
  Synthetic oligonucleotide
gttcgccgtctaggtcttttctaggctgca

SEQ ID NO: 264748 - DNA, 30 bp, Artificial Sequence
  Synthetic oligonucleotide
atagcgaaaaaaaattcttgggcatctgca

SEQ ID NO: 264749 - DNA, 30 bp, Artificial Sequence
  Synthetic oligonucleotide
aggctatgatgagatgcttttgtctctgca

SEQ ID NO: 264750 - DNA, 30 bp, Artificial Sequence
  Synthetic oligonucleotide
gcatcgaaatgtgggtcacaatcgtctgca

SEQ ID NO: 264751 - DNA, 30 bp, Artificial Sequence
  Synthetic oligonucleotide
agcggcgctgtttgtaagcgcatgtctgca

SEQ ID NO: 264752 - DNA, 30 bp, Artificial Sequence
  Synthetic oligonucleotide
cgaccctctttgacgctcgcctgttctgca

SEQ ID NO: 264753 - DNA, 30 bp, Artificial Sequence
  Synthetic oligonucleotide
catgcacgtggcatcagctaagtaagtgca

SEQ ID NO: 264754 - DNA, 30 bp, Artificial Sequence
  Synthetic oligonucleotide
gttaattatgggttaccaagtttaagtgca

SEQ ID NO: 264755 - DNA, 30 bp, Artificial Sequence
  Synthetic oligonucleotide
ggctatcatgcgttgaatcacgccagtgca

SEQ ID NO: 264756 - DNA, 30 bp, Artificial Sequence
  Synthetic oligonucleotide
agctatcatccttccgaaatcactagtgca

SEQ ID NO: 264757 - DNA, 30 bp, Artificial Sequence
  Synthetic oligonucleotide
cccggattaaaatacaaaccgggtagtgca

SEQ ID NO: 264758 - DNA, 30 bp, Artificial Sequence
  Synthetic oligonucleotide
tgggggagttcctaaaatatatgacgtgca

SEQ ID NO: 264759 - DNA, 30 bp, Artificial Sequence
  Synthetic oligonucleotide
tgggacttatgcatcacaattagtcgtgca

SEQ ID NO: 264760 - DNA, 30 bp, Artificial Sequence
  Synthetic oligonucleotide
tgtggttgtgggaattccaaccttcgtgca

SEQ ID NO: 264761 - DNA, 30 bp, Artificial Sequence
  Synthetic oligonucleotide
acaaacagacggagcctgttaacaggtgca

SEQ ID NO: 264762 - DNA, 30 bp, Artificial Sequence
  Synthetic oligonucleotide
gagtatgtgtcatctgttctcccaggtgca

SEQ ID NO: 264763 - DNA, 30 bp, Artificial Sequence
  Synthetic oligonucleotide
gtaagcaacttgttgcagattcgcggtgca

SEQ ID NO: 264764 - DNA, 30 bp, Artificial Sequence
  Synthetic oligonucleotide
caacatcagagatgcggatgtggcggtgca

SEQ ID NO: 264765 - DNA, 30 bp, Artificial Sequence
  Synthetic oligonucleotide
atcttacgaatgtgagattaggggggtgca

SEQ ID NO: 264766 - DNA, 30 bp, Artificial Sequence
  Synthetic oligonucleotide
cgagtggctcaccagtgctgtgggggtgca

SEQ ID NO: 264767 - DNA, 30 bp, Artificial Sequence
  Synthetic oligonucleotide
gggtaagccaaagtttggttcgtgggtgca

SEQ ID NO: 264768 - DNA, 30 bp, Artificial Sequence
  Synthetic oligonucleotide
tgacggtatgcgatttcggaggtgggtgca

SEQ ID NO: 264769 - DNA, 30 bp, Artificial Sequence
  Synthetic oligonucleotide
aatcattggtatgatgtacagttgggtgca

SEQ ID NO: 264770 - DNA, 30 bp, Artificial Sequence
  Synthetic oligonucleotide
gttcgtggacggtatagcatatgtggtgca

SEQ ID NO: 264771 - DNA, 30 bp, Artificial Sequence
  Synthetic oligonucleotide
taaccaaggggttatataatgtaatgtgca

SEQ ID NO: 264772 - DNA, 30 bp, Artificial Sequence
  Synthetic oligonucleotide
atgtgccgctaggagaatactctctgtgca

SEQ ID NO: 264773 - DNA, 30 bp, Artificial Sequence
  Synthetic oligonucleotide
cagcacgtgagtgaaggtgttgtctgtgca

SEQ ID NO: 264774 - DNA, 30 bp, Artificial Sequence
  Synthetic oligonucleotide
aaaaaacacgacgttgatacttcgtgtgca

SEQ ID NO: 264775 - DNA, 30 bp, Artificial Sequence
  Synthetic oligonucleotide
ataggtcgattttaaatttacaattgtgca

SEQ ID NO: 264776 - DNA, 30 bp, Artificial Sequence
  Synthetic oligonucleotide
ggggggccccagtcattcggcacttgtgca

SEQ ID NO: 264777 - DNA, 30 bp, Artificial Sequence
  Synthetic oligonucleotide
agtttaaaacgatgaataatatgttgtgca

SEQ ID NO: 264778 - DNA, 30 bp, Artificial Sequence
  Synthetic oligonucleotide
acttgggaactaatacgctatcaaattgca

SEQ ID NO: 264779 - DNA, 30 bp, Artificial Sequence
  Synthetic oligonucleotide
aggtctcttaacacccccggagcgattgca

SEQ ID NO: 264780 - DNA, 30 bp, Artificial Sequence
  Synthetic oligonucleotide
gcagtgcacagaggggaagccaatattgca

SEQ ID NO: 264781 - DNA, 30 bp, Artificial Sequence
  Synthetic oligonucleotide
acccatcgaaagtgcttcaatagtattgca

SEQ ID NO: 264782 - DNA, 30 bp, Artificial Sequence
  Synthetic oligonucleotide
tcttgaattttactgaacttcgaacttgca

SEQ ID NO: 264783 - DNA, 30 bp, Artificial Sequence
  Synthetic oligonucleotide
gatcatacgtgccgatatggttaacttgca

SEQ ID NO: 264784 - DNA, 30 bp, Artificial Sequence
  Synthetic oligonucleotide
acatcacgaacgcactcgtgtaaccttgca

SEQ ID NO: 264785 - DNA, 30 bp, Artificial Sequence
  Synthetic oligonucleotide
agttagaaccggtgttagtgataccttgca

SEQ ID NO: 264786 - DNA, 30 bp, Artificial Sequence
  Synthetic oligonucleotide
ggttacgtgagttaaagtggatcgcttgca

SEQ ID NO: 264787 - DNA, 30 bp, Artificial Sequence
  Synthetic oligonucleotide
gggggtcacaggtcggtttgttaagttgca

SEQ ID NO: 264788 - DNA, 30 bp, Artificial Sequence
  Synthetic oligonucleotide
aagatggtaagggtttccttattggttgca

SEQ ID NO: 264789 - DNA, 30 bp, Artificial Sequence
  Synthetic oligonucleotide
cagccggtgcaaatatcatgctgatttgca

SEQ ID NO: 264790 - DNA, 30 bp, Artificial Sequence
  Synthetic oligonucleotide
ctccgggcggtaaacgaattatgctttgca

SEQ ID NO: 264791 - DNA, 30 bp, Artificial Sequence
  Synthetic oligonucleotide
cgaagtaaagtttttcactggatctttgca

SEQ ID NO: 264792 - DNA, 30 bp, Artificial Sequence
  Synthetic oligonucleotide
atcttccggttaccagtgcccacaaaatca

SEQ ID NO: 264793 - DNA, 30 bp, Artificial Sequence
  Synthetic oligonucleotide
agaaggtcagacacgacctcatacaaatca

SEQ ID NO: 264794 - DNA, 30 bp, Artificial Sequence
  Synthetic oligonucleotide
tacgtcatcgcatggcaaaagaccaaatca

SEQ ID NO: 264795 - DNA, 30 bp, Artificial Sequence
  Synthetic oligonucleotide
gcggtaactctatcgtaccgagtcaaatca

SEQ ID NO: 264796 - DNA, 30 bp, Artificial Sequence
  Synthetic oligonucleotide
gaggcagaggcaattgcgatgaagaaatca

SEQ ID NO: 264797 - DNA, 30 bp, Artificial Sequence
  Synthetic oligonucleotide
aggcaccaccaggggctagcagagaaatca

SEQ ID NO: 264798 - DNA, 30 bp, Artificial Sequence
  Synthetic oligonucleotide
cttacttcggagtgcacggaaatgaaatca

SEQ ID NO: 264799 - DNA, 30 bp, Artificial Sequence
  Synthetic oligonucleotide
atcattagtgcatgtatatatgtgaaatca

SEQ ID NO: 264800 - DNA, 30 bp, Artificial Sequence
  Synthetic oligonucleotide
gtcattagaatacatccacgtgataaatca

SEQ ID NO: 264801 - DNA, 30 bp, Artificial Sequence
  Synthetic oligonucleotide
gaactgtgattcgtcatccgttataaatca

SEQ ID NO: 264802 - DNA, 30 bp, Artificial Sequence
  Synthetic oligonucleotide
ataatggtgcgtagcaaagtaaaacaatca

SEQ ID NO: 264803 - DNA, 30 bp, Artificial Sequence
  Synthetic oligonucleotide
gcccttgtactggaggattgcgcacaatca

SEQ ID NO: 264804 - DNA, 30 bp, Artificial Sequence
  Synthetic oligonucleotide
tcacccctatactccgagagcatacaatca

SEQ ID NO: 264805 - DNA, 30 bp, Artificial Sequence
  Synthetic oligonucleotide
ggcataggcaccgaaaacgtcggccaatca

SEQ ID NO: 264806 - DNA, 30 bp, Artificial Sequence
  Synthetic oligonucleotide
gaaagccaatggtagagattactccaatca

SEQ ID NO: 264807 - DNA, 30 bp, Artificial Sequence
  Synthetic oligonucleotide
ctaagaattgtaccacgtctgtggcaatca

SEQ ID NO: 264808 - DNA, 30 bp, Artificial Sequence
  Synthetic oligonucleotide
gccctgaccagaatattcaagttgcaatca

SEQ ID NO: 264809 - DNA, 30 bp, Artificial Sequence
  Synthetic oligonucleotide
agtcgcaagtcgttgagtagggctcaatca

SEQ ID NO: 264810 - DNA, 30 bp, Artificial Sequence
  Synthetic oligonucleotide
agggatgttttcttattatgacgtcaatca

SEQ ID NO: 264811 - DNA, 30 bp, Artificial Sequence
  Synthetic oligonucleotide
cccatcgtaggatctaatagggtagaatca

SEQ ID NO: 264812 - DNA, 30 bp, Artificial Sequence
  Synthetic oligonucleotide
cgtgtcgacttactgtggccaaacgaatca

SEQ ID NO: 264813 - DNA, 30 bp, Artificial Sequence
  Synthetic oligonucleotide
tgtagtgaatagctattgatacacgaatca

SEQ ID NO: 264814 - DNA, 30 bp, Artificial Sequence
  Synthetic oligonucleotide
gtgctagtggtttcgtcacactgggaatca

SEQ ID NO: 264815 - DNA, 30 bp, Artificial Sequence
  Synthetic oligonucleotide
gggcgcccaatctaggttctgatggaatca

SEQ ID NO: 264816 - DNA, 30 bp, Artificial Sequence
  Synthetic oligonucleotide
agtgaatttgggtatgacgatatggaatca

SEQ ID NO: 264817 - DNA, 30 bp, Artificial Sequence
  Synthetic oligonucleotide
ataggctaggctatagcttaccatgaatca

SEQ ID NO: 264818 - DNA, 30 bp, Artificial Sequence
  Synthetic oligonucleotide
ttagtaagtttaaccggtaacgatgaatca

SEQ ID NO: 264819 - DNA, 30 bp, Artificial Sequence
  Synthetic oligonucleotide
tggagtgattcttattaaatcattgaatca

SEQ ID NO: 264820 - DNA, 30 bp, Artificial Sequence
  Synthetic oligonucleotide
ctacggatacacatccagatcgaataatca

SEQ ID NO: 264821 - DNA, 30 bp, Artificial Sequence
  Synthetic oligonucleotide
cacaaaaatactcttattttgctctaatca

SEQ ID NO: 264822 - DNA, 30 bp, Artificial Sequence
  Synthetic oligonucleotide
gggggagccggaacggctgtcaggtaatca

SEQ ID NO: 264823 - DNA, 30 bp, Artificial Sequence
  Synthetic oligonucleotide
ttcgcaatgcggctcactaaagattaatca

SEQ ID NO: 264824 - DNA, 30 bp, Artificial Sequence
  Synthetic oligonucleotide
gggtgtaacgtaaccgcgcacgtttaatca

SEQ ID NO: 264825 - DNA, 30 bp, Artificial Sequence
  Synthetic oligonucleotide
ggctgccacgcccctttaagataaacatca

SEQ ID NO: 264826 - DNA, 30 bp, Artificial Sequence
  Synthetic oligonucleotide
attaggctaaattccgctacagacacatca

SEQ ID NO: 264827 - DNA, 30 bp, Artificial Sequence
  Synthetic oligonucleotide
aagacaaatacgtgccgttcggacacatca

SEQ ID NO: 264828 - DNA, 30 bp, Artificial Sequence
  Synthetic oligonucleotide
ggacagtataaccaacttcagtccacatca

SEQ ID NO: 264829 - DNA, 30 bp, Artificial Sequence
  Synthetic oligonucleotide
acgtgactctggtatcatacttgcacatca

SEQ ID NO: 264830 - DNA, 30 bp, Artificial Sequence
  Synthetic oligonucleotide
ataaaacccttaggtggctcattgacatca

SEQ ID NO: 264831 - DNA, 30 bp, Artificial Sequence
  Synthetic oligonucleotide
cgcgaagacttactgattttcacaccatca

SEQ ID NO: 264832 - DNA, 30 bp, Artificial Sequence
  Synthetic oligonucleotide
cgcttcctgtgcgtgttagcggcaccatca

SEQ ID NO: 264833 - DNA, 30 bp, Artificial Sequence
  Synthetic oligonucleotide
ctcgtttgagaccttgtggataggccatca

SEQ ID NO: 264834 - DNA, 30 bp, Artificial Sequence
  Synthetic oligonucleotide
gtcgacatcctggggcgatgtctgccatca

SEQ ID NO: 264835 - DNA, 30 bp, Artificial Sequence
  Synthetic oligonucleotide
ttcaatcccatgaatgccactgcagcatca

SEQ ID NO: 264836 - DNA, 30 bp, Artificial Sequence
  Synthetic oligonucleotide
gagcagagtggggatggtagaatagcatca

SEQ ID NO: 264837 - DNA, 30 bp, Artificial Sequence
  Synthetic oligonucleotide
ggagcgcaacagctatctcctctagcatca

SEQ ID NO: 264838 - DNA, 30 bp, Artificial Sequence
  Synthetic oligonucleotide
cattgggcggcggatcctagctacgcatca

SEQ ID NO: 264839 - DNA, 30 bp, Artificial Sequence
  Synthetic oligonucleotide
gcgctccagtctgcgatctgggaggcatca

SEQ ID NO: 264840 - DNA, 30 bp, Artificial Sequence
  Synthetic oligonucleotide
agaggttaccacgttttaagcgatgcatca

SEQ ID NO: 264841 - DNA, 30 bp, Artificial Sequence
  Synthetic oligonucleotide
acgaagtcgatatcattatacgctgcatca

SEQ ID NO: 264842 - DNA, 30 bp, Artificial Sequence
  Synthetic oligonucleotide
atggtcggttgctaccgtcgcctatcatca

SEQ ID NO: 264843 - DNA, 30 bp, Artificial Sequence
  Synthetic oligonucleotide
ttggcatgaagggggttcaagggctcatca

SEQ ID NO: 264844 - DNA, 30 bp, Artificial Sequence
  Synthetic oligonucleotide
caagacgggtacggtagaaacgtctcatca

SEQ ID NO: 264845 - DNA, 30 bp, Artificial Sequence
  Synthetic oligonucleotide
ctttgaatgcgtttaatagcacagtcatca

SEQ ID NO: 264846 - DNA, 30 bp, Artificial Sequence
  Synthetic oligonucleotide
atctcctgctcgagtaactaagtttcatca

SEQ ID NO: 264847 - DNA, 30 bp, Artificial Sequence
  Synthetic oligonucleotide
gacaatctggggtagacacgaccaagatca

SEQ ID NO: 264848 - DNA, 30 bp, Artificial Sequence
  Synthetic oligonucleotide
aaggactcaatgtagggtacgaatagatca

SEQ ID NO: 264849 - DNA, 30 bp, Artificial Sequence
  Synthetic oligonucleotide
accatggactgtttagtggtgcgtagatca

SEQ ID NO: 264850 - DNA, 30 bp, Artificial Sequence
  Synthetic oligonucleotide
tggagatgcaatgagcatccaacacgatca

SEQ ID NO: 264851 - DNA, 30 bp, Artificial Sequence
  Synthetic oligonucleotide
tgacttcgcactcatatacggacccgatca

SEQ ID NO: 264852 - DNA, 30 bp, Artificial Sequence
  Synthetic oligonucleotide
tgacataagccgttgtcgtaccgccgatca

SEQ ID NO: 264853 - DNA, 30 bp, Artificial Sequence
  Synthetic oligonucleotide
aatgtggggtgttaaaaaaccttccgatca

SEQ ID NO: 264854 - DNA, 30 bp, Artificial Sequence
  Synthetic oligonucleotide
gtctcaaggttgtcagccgtcgttcgatca

SEQ ID NO: 264855 - DNA, 30 bp, Artificial Sequence
  Synthetic oligonucleotide
catgactggttgtgatcaaaccaaggatca

SEQ ID NO: 264856 - DNA, 30 bp, Artificial Sequence
  Synthetic oligonucleotide
ggactttcactccaactattctcaggatca

SEQ ID NO: 264857 - DNA, 30 bp, Artificial Sequence
  Synthetic oligonucleotide
gcagtcgcaccggcgttatggaccggatca

SEQ ID NO: 264858 - DNA, 30 bp, Artificial Sequence
  Synthetic oligonucleotide
attgatgacgtccaaggcattgtatgatca

SEQ ID NO: 264859 - DNA, 30 bp, Artificial Sequence
  Synthetic oligonucleotide
gttgaagcgtctgggcgactgggctgatca

SEQ ID NO: 264860 - DNA, 30 bp, Artificial Sequence
  Synthetic oligonucleotide
tcagtcaacataatcgtatgcatgtgatca

SEQ ID NO: 264861 - DNA, 30 bp, Artificial Sequence
  Synthetic oligonucleotide
ggggatagactaatggtgtgcgtgtgatca

SEQ ID NO: 264862 - DNA, 30 bp, Artificial Sequence
  Synthetic oligonucleotide
cctagctcggggtaagaccaaggttgatca

SEQ ID NO: 264863 - DNA, 30 bp, Artificial Sequence
  Synthetic oligonucleotide
aatcttcacccagtcgaccagatttgatca

SEQ ID NO: 264864 - DNA, 30 bp, Artificial Sequence
  Synthetic oligonucleotide
ccacaattacatactatcgtcagcatatca

SEQ ID NO: 264865 - DNA, 30 bp, Artificial Sequence
  Synthetic oligonucleotide
tgcgagattcgtgggtgcattttcatatca

SEQ ID NO: 264866 - DNA, 30 bp, Artificial Sequence
  Synthetic oligonucleotide
accgtagcgaaccccattcgaatgatatca

SEQ ID NO: 264867 - DNA, 30 bp, Artificial Sequence
  Synthetic oligonucleotide
tcgttattgagcttggcgcttactatatca

SEQ ID NO: 264868 - DNA, 30 bp, Artificial Sequence
  Synthetic oligonucleotide
acgtacggtgaagtttaacgataactatca

SEQ ID NO: 264869 - DNA, 30 bp, Artificial Sequence
  Synthetic oligonucleotide
gttcggacatggactagtatgggactatca

SEQ ID NO: 264870 - DNA, 30 bp, Artificial Sequence
  Synthetic oligonucleotide
accagacaaggactgtcaacgatactatca

SEQ ID NO: 264871 - DNA, 30 bp, Artificial Sequence
  Synthetic oligonucleotide
ctaatcacacagcaaaacccactgctatca

SEQ ID NO: 264872 - DNA, 30 bp, Artificial Sequence
  Synthetic oligonucleotide
cgtactagtttatttctacgatctctatca

SEQ ID NO: 264873 - DNA, 30 bp, Artificial Sequence
  Synthetic oligonucleotide
agggacattgaagtgggttccattctatca

SEQ ID NO: 264874 - DNA, 30 bp, Artificial Sequence
  Synthetic oligonucleotide
tgccttcggccgagtcacaggcgcgtatca

SEQ ID NO: 264875 - DNA, 30 bp, Artificial Sequence
  Synthetic oligonucleotide
agtagacgaaagggtaacgactcggtatca

SEQ ID NO: 264876 - DNA, 30 bp, Artificial Sequence
  Synthetic oligonucleotide
taagatgtgggcataagaggtatggtatca

SEQ ID NO: 264877 - DNA, 30 bp, Artificial Sequence
  Synthetic oligonucleotide
tctgtgcgcagttaagtgagtctggtatca

SEQ ID NO: 264878 - DNA, 30 bp, Artificial Sequence
  Synthetic oligonucleotide
gagaccgatccagacttaccctatgtatca

SEQ ID NO: 264879 - DNA, 30 bp, Artificial Sequence
  Synthetic oligonucleotide
gcattaatgaggcgcactaaatgtgtatca

SEQ ID NO: 264880 - DNA, 30 bp, Artificial Sequence
  Synthetic oligonucleotide
acgataaggattgcggcgatcgcattatca

SEQ ID NO: 264881 - DNA, 30 bp, Artificial Sequence
  Synthetic oligonucleotide
gctattctaaggaagcaaattagattatca

SEQ ID NO: 264882 - DNA, 30 bp, Artificial Sequence
  Synthetic oligonucleotide
ctgaatacaggcctaggcctgacgttatca

SEQ ID NO: 264883 - DNA, 30 bp, Artificial Sequence
  Synthetic oligonucleotide
taagtgctgtggcttgggttgaggttatca

SEQ ID NO: 264884 - DNA, 30 bp, Artificial Sequence
  Synthetic oligonucleotide
aacgctcggtgccctgtgaatttaaactca

SEQ ID NO: 264885 - DNA, 30 bp, Artificial Sequence
  Synthetic oligonucleotide
tagggtccaagaacaaatttacgcaactca

SEQ ID NO: 264886 - DNA, 30 bp, Artificial Sequence
  Synthetic oligonucleotide
acgctttatggttgggagtaaggtcactca

SEQ ID NO: 264887 - DNA, 30 bp, Artificial Sequence
  Synthetic oligonucleotide
ggcttgaaggaaggtgcttatctcgactca

SEQ ID NO: 264888 - DNA, 30 bp, Artificial Sequence
  Synthetic oligonucleotide
gcaatcagggcccgaacatagacggactca

SEQ ID NO: 264889 - DNA, 30 bp, Artificial Sequence
  Synthetic oligonucleotide
taacgtattgcttcgaaaggagttgactca

SEQ ID NO: 264890 - DNA, 30 bp, Artificial Sequence
  Synthetic oligonucleotide
ggggttgtatgcccacaaagttcatactca

SEQ ID NO: 264891 - DNA, 30 bp, Artificial Sequence
  Synthetic oligonucleotide
aagatatagggcgcctggcgaaagtactca

SEQ ID NO: 264892 - DNA, 30 bp, Artificial Sequence
  Synthetic oligonucleotide
agatgtaggagccaagatgatacgtactca

SEQ ID NO: 264893 - DNA, 30 bp, Artificial Sequence
  Synthetic oligonucleotide
aaattcacacgatcttcgaacgtttactca

SEQ ID NO: 264894 - DNA, 30 bp, Artificial Sequence
  Synthetic oligonucleotide
gtatctatagaacgtgtgcgcgatacctca

SEQ ID NO: 264895 - DNA, 30 bp, Artificial Sequence
  Synthetic oligonucleotide
aggcctctccgacgtcctgttggaccctca

SEQ ID NO: 264896 - DNA, 30 bp, Artificial Sequence
  Synthetic oligonucleotide
tccgggtactcaactagacctttcccctca

SEQ ID NO: 264897 - DNA, 30 bp, Artificial Sequence
  Synthetic oligonucleotide
taagatcacagcgacttttatcggccctca

SEQ ID NO: 264898 - DNA, 30 bp, Artificial Sequence
  Synthetic oligonucleotide
taactcggaggaattacatagatgccctca

SEQ ID NO: 264899 - DNA, 30 bp, Artificial Sequence
  Synthetic oligonucleotide
gcctcgcggatctaaaagataactccctca

SEQ ID NO: 264900 - DNA, 30 bp, Artificial Sequence
  Synthetic oligonucleotide
ggaggcaacacacaccaaacgtaagcctca

SEQ ID NO: 264901 - DNA, 30 bp, Artificial Sequence
  Synthetic oligonucleotide
gattaatctgctcgtggcattgcagcctca

SEQ ID NO: 264902 - DNA, 30 bp, Artificial Sequence
  Synthetic oligonucleotide
ttgattggattaggtgtgccgtcagcctca

SEQ ID NO: 264903 - DNA, 30 bp, Artificial Sequence
  Synthetic oligonucleotide
atcgatactgcctatcccgaggtagcctca

SEQ ID NO: 264904 - DNA, 30 bp, Artificial Sequence
  Synthetic oligonucleotide
gagtataaacccgatcttatttaggcctca

SEQ ID NO: 264905 - DNA, 30 bp, Artificial Sequence
  Synthetic oligonucleotide
cacgcccaccgattgttctgcagtgcctca

SEQ ID NO: 264906 - DNA, 30 bp, Artificial Sequence
  Synthetic oligonucleotide
tccacggcgattacagtgacccgtgcctca

SEQ ID NO: 264907 - DNA, 30 bp, Artificial Sequence
  Synthetic oligonucleotide
tgcagggtccagtcaggggtaagatcctca

SEQ ID NO: 264908 - DNA, 30 bp, Artificial Sequence
  Synthetic oligonucleotide
gggcccagacatttcgtgtttctatcctca

SEQ ID NO: 264909 - DNA, 30 bp, Artificial Sequence
  Synthetic oligonucleotide
aggtctcaaacagcccgcatgtcctcctca

SEQ ID NO: 264910 - DNA, 30 bp, Artificial Sequence
  Synthetic oligonucleotide
tagtgagacgtttggggaccacagtcctca

SEQ ID NO: 264911 - DNA, 30 bp, Artificial Sequence
  Synthetic oligonucleotide
actcaggtaaaatatggtttggcgtcctca

SEQ ID NO: 264912 - DNA, 30 bp, Artificial Sequence
  Synthetic oligonucleotide
ttcgcctgcctgcctttagcgaggtcctca

SEQ ID NO: 264913 - DNA, 30 bp, Artificial Sequence
  Synthetic oligonucleotide
ccatgcatcgtattttgggaaatgtcctca

SEQ ID NO: 264914 - DNA, 30 bp, Artificial Sequence
  Synthetic oligonucleotide
ggatcacaggcatggcgatggaattcctca

SEQ ID NO: 264915 - DNA, 30 bp, Artificial Sequence
  Synthetic oligonucleotide
caatagaaggggccacctccctcaagctca

SEQ ID NO: 264916 - DNA, 30 bp, Artificial Sequence
  Synthetic oligonucleotide
tgaaccctgtggcacgagggcaacagctca

SEQ ID NO: 264917 - DNA, 30 bp, Artificial Sequence
  Synthetic oligonucleotide
aattggacagttgtaatagaattgagctca

SEQ ID NO: 264918 - DNA, 30 bp, Artificial Sequence
  Synthetic oligonucleotide
ggtgccaggggtacccattctgaacgctca

SEQ ID NO: 264919 - DNA, 30 bp, Artificial Sequence
  Synthetic oligonucleotide
tacagctaacgaacatctgggacacgctca

SEQ ID NO: 264920 - DNA, 30 bp, Artificial Sequence
  Synthetic oligonucleotide
tcataattgaggggcacatgatgacgctca

SEQ ID NO: 264921 - DNA, 30 bp, Artificial Sequence
  Synthetic oligonucleotide
tcaagttactcggactggatctaccgctca

SEQ ID NO: 264922 - DNA, 30 bp, Artificial Sequence
  Synthetic oligonucleotide
ttacacaatatcggaaactagacccgctca

SEQ ID NO: 264923 - DNA, 30 bp, Artificial Sequence
  Synthetic oligonucleotide
cgtaagtggagtccttgaagcccgcgctca

SEQ ID NO: 264924 - DNA, 30 bp, Artificial Sequence
  Synthetic oligonucleotide
tcgcttgaaaggcgcggtagcaccggctca

SEQ ID NO: 264925 - DNA, 30 bp, Artificial Sequence
  Synthetic oligonucleotide
tctagcaggggcgcacgtgactagggctca

SEQ ID NO: 264926 - DNA, 30 bp, Artificial Sequence
  Synthetic oligonucleotide
gacgttcgcagactcctacgtccgggctca

SEQ ID NO: 264927 - DNA, 30 bp, Artificial Sequence
  Synthetic oligonucleotide
gcggtgaagagaccaggctgactgggctca

SEQ ID NO: 264928 - DNA, 30 bp, Artificial Sequence
  Synthetic oligonucleotide
tcaatattaatctcttaacaataatgctca

SEQ ID NO: 264929 - DNA, 30 bp, Artificial Sequence
  Synthetic oligonucleotide
gggtccgggtaaaccgacaccctatgctca

SEQ ID NO: 264930 - DNA, 30 bp, Artificial Sequence
  Synthetic oligonucleotide
tatgggcgcacatagatggctttatgctca

SEQ ID NO: 264931 - DNA, 30 bp, Artificial Sequence
  Synthetic oligonucleotide
tccatgggaacaccagtcccggactgctca

SEQ ID NO: 264932 - DNA, 30 bp, Artificial Sequence
  Synthetic oligonucleotide
ctggtaatcaagttcgccctacagtgctca

SEQ ID NO: 264933 - DNA, 30 bp, Artificial Sequence
  Synthetic oligonucleotide
ttgtcaggcctagacggaaagtcgtgctca

SEQ ID NO: 264934 - DNA, 30 bp, Artificial Sequence
  Synthetic oligonucleotide
cggactttcgtccgtcacaaagggtgctca

SEQ ID NO: 264935 - DNA, 30 bp, Artificial Sequence
  Synthetic oligonucleotide
gaaagccgtattcgtcggggttggtgctca

SEQ ID NO: 264936 - DNA, 30 bp, Artificial Sequence
  Synthetic oligonucleotide
tggagaggtattgcatgcgacctgtgctca

SEQ ID NO: 264937 - DNA, 30 bp, Artificial Sequence
  Synthetic oligonucleotide
atatatcaacccaagtggcgagaaatctca

SEQ ID NO: 264938 - DNA, 30 bp, Artificial Sequence
  Synthetic oligonucleotide
tctccacccgtaaggggaggtccaatctca

SEQ ID NO: 264939 - DNA, 30 bp, Artificial Sequence
  Synthetic oligonucleotide
agttagagcaatcgtaagcgtctcatctca

SEQ ID NO: 264940 - DNA, 30 bp, Artificial Sequence
  Synthetic oligonucleotide
ccgaagcagttacctgaacagggtatctca

SEQ ID NO: 264941 - DNA, 30 bp, Artificial Sequence
  Synthetic oligonucleotide
agcacggacatgcagaattagatactctca

SEQ ID NO: 264942 - DNA, 30 bp, Artificial Sequence
  Synthetic oligonucleotide
catgcagcgaagagtcacccctacctctca

SEQ ID NO: 264943 - DNA, 30 bp, Artificial Sequence
  Synthetic oligonucleotide
gtggtcctagaatgctaatccatcctctca

SEQ ID NO: 264944 - DNA, 30 bp, Artificial Sequence
  Synthetic oligonucleotide
gggatctggccgaccgttgtatcgctctca

SEQ ID NO: 264945 - DNA, 30 bp, Artificial Sequence
  Synthetic oligonucleotide
tatagagtgggtttgcagtttctgctctca

SEQ ID NO: 264946 - DNA, 30 bp, Artificial Sequence
  Synthetic oligonucleotide
gaaagactaaaccccgtatatgctctctca

SEQ ID NO: 264947 - DNA, 30 bp, Artificial Sequence
  Synthetic oligonucleotide
gaccgtcgggttccgttcttcagagtctca

SEQ ID NO: 264948 - DNA, 30 bp, Artificial Sequence
  Synthetic oligonucleotide
ccgggcgggcggacccgttgatacgtctca

SEQ ID NO: 264949 - DNA, 30 bp, Artificial Sequence
  Synthetic oligonucleotide
tggcaagggaatgcgcctggccgcgtctca

SEQ ID NO: 264950 - DNA, 30 bp, Artificial Sequence
  Synthetic oligonucleotide
agacaatcgagggacatgaaatgggtctca

SEQ ID NO: 264951 - DNA, 30 bp, Artificial Sequence
  Synthetic oligonucleotide
gagttctactttttataagcaaatgtctca

SEQ ID NO: 264952 - DNA, 28 bp, Artificial Sequence
  Synthetic oligonucleotide
accgtggttgccgtgtgttaatgtctca

SEQ ID NO: 264953 - DNA, 30 bp, Artificial Sequence
  Synthetic oligonucleotide
tggtactacgttggttcgatgcaattctca

SEQ ID NO: 264954 - DNA, 30 bp, Artificial Sequence
  Synthetic oligonucleotide
gcctccagcccgggggcggatctattctca

SEQ ID NO: 264955 - DNA, 30 bp, Artificial Sequence
  Synthetic oligonucleotide
tgctacgaatcctggcgttcggacttctca

SEQ ID NO: 264956 - DNA, 30 bp, Artificial Sequence
  Synthetic oligonucleotide
acaggaagacgtctctgtctgtctttctca

SEQ ID NO: 264957 - DNA, 30 bp, Artificial Sequence
  Synthetic oligonucleotide
actatgaggagcgagcgtgtgtttttctca

SEQ ID NO: 264958 - DNA, 30 bp, Artificial Sequence
  Synthetic oligonucleotide
tggttagtgtatctcaaccgttttttctca

SEQ ID NO: 264959 - DNA, 30 bp, Artificial Sequence
  Synthetic oligonucleotide
atgatctgttaaggttgggatagaaagtca

SEQ ID NO: 264960 - DNA, 30 bp, Artificial Sequence
  Synthetic oligonucleotide
gtgaacggtattcgaccatcaccgaagtca

SEQ ID NO: 264961 - DNA, 30 bp, Artificial Sequence
  Synthetic oligonucleotide
tatgggaatatatatgtaggtgggaagtca

SEQ ID NO: 264962 - DNA, 30 bp, Artificial Sequence
  Synthetic oligonucleotide
tcgcaaactgtagcagagaatttgaagtca

SEQ ID NO: 264963 - DNA, 30 bp, Artificial Sequence
  Synthetic oligonucleotide
atggacgatttgctgggtcatcgacagtca

SEQ ID NO: 264964 - DNA, 30 bp, Artificial Sequence
  Synthetic oligonucleotide
aaagacatgaagggcgatttctgacagtca

SEQ ID NO: 264965 - DNA, 30 bp, Artificial Sequence
  Synthetic oligonucleotide
cgagaccctgcaatttgcgctctacagtca

SEQ ID NO: 264966 - DNA, 30 bp, Artificial Sequence
  Synthetic oligonucleotide
tcagtatgtaagtagatcatggaccagtca

SEQ ID NO: 264967 - DNA, 30 bp, Artificial Sequence
  Synthetic oligonucleotide
taatttgttgcctctttttacatccagtca

SEQ ID NO: 264968 - DNA, 30 bp, Artificial Sequence
  Synthetic oligonucleotide
actgagtagccctggattattatccagtca

SEQ ID NO: 264969 - DNA, 30 bp, Artificial Sequence
  Synthetic oligonucleotide
gttgcggaacagtttcgccttgggcagtca

SEQ ID NO: 264970 - DNA, 30 bp, Artificial Sequence
  Synthetic oligonucleotide
tagacatactttggggtagtacctcagtca

SEQ ID NO: 264971 - DNA, 30 bp, Artificial Sequence
  Synthetic oligonucleotide
tccggggatgtacttggcatcgaagagtca

SEQ ID NO: 264972 - DNA, 30 bp, Artificial Sequence
  Synthetic oligonucleotide
ttcgttgatgctaggtcaacttcagagtca

SEQ ID NO: 264973 - DNA, 30 bp, Artificial Sequence
  Synthetic oligonucleotide
tcagttgcctagggagcctttcaggagtca

SEQ ID NO: 264974 - DNA, 30 bp, Artificial Sequence
  Synthetic oligonucleotide
attgtggcatatacaccttggtaggagtca

SEQ ID NO: 264975 - DNA, 31 bp, Artificial Sequence
  Synthetic oligonucleotide
gttaatgtacatggaacgatgaagatagtca

SEQ ID NO: 264976 - DNA, 30 bp, Artificial Sequence
  Synthetic oligonucleotide
taccgccagtcttgtgacagagactagtca

SEQ ID NO: 264977 - DNA, 30 bp, Artificial Sequence
  Synthetic oligonucleotide
gtcaccagctgagtgcaacactcctagtca

SEQ ID NO: 264978 - DNA, 30 bp, Artificial Sequence
  Synthetic oligonucleotide
tcattcgttgcccagaattacttctagtca

SEQ ID NO: 264979 - DNA, 30 bp, Artificial Sequence
  Synthetic oligonucleotide
ttatacggaatgcgtccaaaatcgtagtca

SEQ ID NO: 264980 - DNA, 30 bp, Artificial Sequence
  Synthetic oligonucleotide
atgtgatgacaataggtcgttctgtagtca

SEQ ID NO: 264981 - DNA, 30 bp, Artificial Sequence
  Synthetic oligonucleotide
aacctcccgctgaacgagtgcacttagtca

SEQ ID NO: 264982 - DNA, 30 bp, Artificial Sequence
  Synthetic oligonucleotide
cgagaatcctctccggcatggagttagtca

SEQ ID NO: 264983 - DNA, 30 bp, Artificial Sequence
  Synthetic oligonucleotide
ctaccctgcgtcgattgtatcatttagtca

SEQ ID NO: 264984 - DNA, 30 bp, Artificial Sequence
  Synthetic oligonucleotide
tccctcgagtaagcaccgtaacgcacgtca

SEQ ID NO: 264985 - DNA, 30 bp, Artificial Sequence
  Synthetic oligonucleotide
gttctatgaacaacgattgtgtggacgtca

SEQ ID NO: 264986 - DNA, 30 bp, Artificial Sequence
  Synthetic oligonucleotide
cgacagaaatgcgacgcaactattacgtca

SEQ ID NO: 264987 - DNA, 30 bp, Artificial Sequence
  Synthetic oligonucleotide
agtccatcgagtgtcttacaggacccgtca

SEQ ID NO: 264988 - DNA, 30 bp, Artificial Sequence
  Synthetic oligonucleotide
gtaattaacggtacaatcaaaggcccgtca

SEQ ID NO: 264989 - DNA, 30 bp, Artificial Sequence
  Synthetic oligonucleotide
acaggataagtgcacaggcgtaagccgtca

SEQ ID NO: 264990 - DNA, 30 bp, Artificial Sequence
  Synthetic oligonucleotide
atctgaaaactttacggcaaccagccgtca

SEQ ID NO: 264991 - DNA, 30 bp, Artificial Sequence
  Synthetic oligonucleotide
gtggtagtggggaccggatgagggccgtca

SEQ ID NO: 264992 - DNA, 30 bp, Artificial Sequence
  Synthetic oligonucleotide
taaaagcgagccgatcttggctggccgtca

SEQ ID NO: 264993 - DNA, 30 bp, Artificial Sequence
  Synthetic oligonucleotide
acccttcatagaccatgcgtgtgagcgtca

SEQ ID NO: 264994 - DNA, 30 bp, Artificial Sequence
  Synthetic oligonucleotide
ggatagcagtgaatgatagagatagcgtca

SEQ ID NO: 264995 - DNA, 30 bp, Artificial Sequence
  Synthetic oligonucleotide
taatttcgtattgttcaaggtatggcgtca

SEQ ID NO: 264996 - DNA, 30 bp, Artificial Sequence
  Synthetic oligonucleotide
agcgggaacgcaggacccacaaatgcgtca

SEQ ID NO: 264997 - DNA, 30 bp, Artificial Sequence
  Synthetic oligonucleotide
gcgttaccttaaaaatgaaggtaatcgtca

SEQ ID NO: 264998 - DNA, 30 bp, Artificial Sequence
  Synthetic oligonucleotide
gcaggtgtctgaaattccatgccctcgtca

SEQ ID NO: 264999 - DNA, 30 bp, Artificial Sequence
  Synthetic oligonucleotide
tctgtatccctcgtgggaaccccttcgtca

SEQ ID NO: 265000 - DNA, 30 bp, Artificial Sequence
  Synthetic oligonucleotide
tgagcgcgatatggattctatggttcgtca

SEQ ID NO: 265001 - DNA, 30 bp, Artificial Sequence
  Synthetic oligonucleotide
tttaagtggtgtggggacttggtttcgtca

SEQ ID NO: 265002 - DNA, 30 bp, Artificial Sequence
  Synthetic oligonucleotide
aaaaatcatcacgtacactacacaaggtca

SEQ ID NO: 265003 - DNA, 30 bp, Artificial Sequence
  Synthetic oligonucleotide
gggcgtgttcattcgtcgatgccaaggtca

SEQ ID NO: 265004 - DNA, 30 bp, Artificial Sequence
  Synthetic oligonucleotide
tggtctggaggcatactgggcagaaggtca

SEQ ID NO: 265005 - DNA, 30 bp, Artificial Sequence
  Synthetic oligonucleotide
gaaccgcatatgaaaatggtgcggaggtca

SEQ ID NO: 265006 - DNA, 30 bp, Artificial Sequence
  Synthetic oligonucleotide
cgaaattgcaccgagcttttcgtgaggtca

SEQ ID NO: 265007 - DNA, 30 bp, Artificial Sequence
  Synthetic oligonucleotide
tttaatggacaggccgggtagcctaggtca

SEQ ID NO: 265008 - DNA, 30 bp, Artificial Sequence
  Synthetic oligonucleotide
gcatgggagatactttagatcattaggtca

SEQ ID NO: 265009 - DNA, 30 bp, Artificial Sequence
  Synthetic oligonucleotide
gattaatcgaaggagacatcataacggtca

SEQ ID NO: 265010 - DNA, 30 bp, Artificial Sequence
  Synthetic oligonucleotide
tgtaaccagtagatagctattagacggtca

SEQ ID NO: 265011 - DNA, 30 bp, Artificial Sequence
  Synthetic oligonucleotide
caactaacctaggttccgttagagcggtca

SEQ ID NO: 265012 - DNA, 30 bp, Artificial Sequence
  Synthetic oligonucleotide
tacgggagtaactgacccgcaacgcggtca

SEQ ID NO: 265013 - DNA, 30 bp, Artificial Sequence
  Synthetic oligonucleotide
agacctcaaatggcgagattttaagggtca

SEQ ID NO: 265014 - DNA, 30 bp, Artificial Sequence
  Synthetic oligonucleotide
ccagccctggtggcggcaaacacagggtca

SEQ ID NO: 265015 - DNA, 30 bp, Artificial Sequence
  Synthetic oligonucleotide
ggggttactttagatctcccgcacgggtca

SEQ ID NO: 265016 - DNA, 30 bp, Artificial Sequence
  Synthetic oligonucleotide
tttcatgtgaacctactcaaaagcgggtca

SEQ ID NO: 265017 - DNA, 30 bp, Artificial Sequence
  Synthetic oligonucleotide
tcgtctccattctacgagctaagcgggtca

SEQ ID NO: 265018 - DNA, 30 bp, Artificial Sequence
  Synthetic oligonucleotide
gcatatcctcacgtcatctaactcgggtca

SEQ ID NO: 265019 - DNA, 30 bp, Artificial Sequence
  Synthetic oligonucleotide
ggcacgctgtgactcttatcagtcgggtca

SEQ ID NO: 265020 - DNA, 30 bp, Artificial Sequence
  Synthetic oligonucleotide
ggaatgcaaacgggtgccctggtcgggtca

SEQ ID NO: 265021 - DNA, 30 bp, Artificial Sequence
  Synthetic oligonucleotide
gtagttccgctcaaacgggtgcgggggtca

SEQ ID NO: 265022 - DNA, 30 bp, Artificial Sequence
  Synthetic oligonucleotide
atcggctaccgcaactctgcttctgggtca

SEQ ID NO: 265023 - DNA, 30 bp, Artificial Sequence
  Synthetic oligonucleotide
agagttattgatactgctacgggatggtca

SEQ ID NO: 265024 - DNA, 30 bp, Artificial Sequence
  Synthetic oligonucleotide
tccttaaggatgactattgagggctggtca

SEQ ID NO: 265025 - DNA, 30 bp, Artificial Sequence
  Synthetic oligonucleotide
tccgtaggacgcacacgtcaatgctggtca

SEQ ID NO: 265026 - DNA, 30 bp, Artificial Sequence
  Synthetic oligonucleotide
agacggtaaatttgtgcaaggaagtggtca

SEQ ID NO: 265027 - DNA, 30 bp, Artificial Sequence
  Synthetic oligonucleotide
tatgaacatgacgcctcggagtagtggtca

SEQ ID NO: 265028 - DNA, 30 bp, Artificial Sequence
  Synthetic oligonucleotide
ctcacggcttaaaaattgaccggttggtca

SEQ ID NO: 265029 - DNA, 30 bp, Artificial Sequence
  Synthetic oligonucleotide
gtatctcatagctgcttgactgtaatgtca

SEQ ID NO: 265030 - DNA, 30 bp, Artificial Sequence
  Synthetic oligonucleotide
cgacattccccctaagccgaggcgatgtca

SEQ ID NO: 265031 - DNA, 30 bp, Artificial Sequence
  Synthetic oligonucleotide
tacttatgaaggaatgtatgtgggatgtca

SEQ ID NO: 265032 - DNA, 30 bp, Artificial Sequence
  Synthetic oligonucleotide
agcttagttatcgtacaccggatgatgtca

SEQ ID NO: 265033 - DNA, 30 bp, Artificial Sequence
  Synthetic oligonucleotide
tttcgttcgttgtcttatatggtgatgtca

SEQ ID NO: 265034 - DNA, 30 bp, Artificial Sequence
  Synthetic oligonucleotide
tggtcctaaaaacgcggctgacgtatgtca

SEQ ID NO: 265035 - DNA, 30 bp, Artificial Sequence
  Synthetic oligonucleotide
attgcaagaatcatattgttctttatgtca

SEQ ID NO: 265036 - DNA, 30 bp, Artificial Sequence
  Synthetic oligonucleotide
atgggcaactcagtgacggactccctgtca

SEQ ID NO: 265037 - DNA, 30 bp, Artificial Sequence
  Synthetic oligonucleotide
ccaaatctatcgtgacatacctcgctgtca

SEQ ID NO: 265038 - DNA, 30 bp, Artificial Sequence
  Synthetic oligonucleotide
agtcattgggcaggtgcggctaggctgtca

SEQ ID NO: 265039 - DNA, 30 bp, Artificial Sequence
  Synthetic oligonucleotide
gatacaaatgatcatataggcaaagtgtca

SEQ ID NO: 265040 - DNA, 30 bp, Artificial Sequence
  Synthetic oligonucleotide
taagtatagtatttagttcaggaagtgtca

SEQ ID NO: 265041 - DNA, 30 bp, Artificial Sequence
  Synthetic oligonucleotide
tatgttatgggtctacgaactccagtgtca

SEQ ID NO: 265042 - DNA, 30 bp, Artificial Sequence
  Synthetic oligonucleotide
cgtccctaatgcaagttaacatgagtgtca

SEQ ID NO: 265043 - DNA, 30 bp, Artificial Sequence
  Synthetic oligonucleotide
ttcaactgctttacgtggtgattagtgtca

SEQ ID NO: 265044 - DNA, 30 bp, Artificial Sequence
  Synthetic oligonucleotide
acacacgcagtgacttcgtcaatcgtgtca

SEQ ID NO: 265045 - DNA, 30 bp, Artificial Sequence
  Synthetic oligonucleotide
ttaaaggtgaaacacaaggaggcggtgtca

SEQ ID NO: 265046 - DNA, 30 bp, Artificial Sequence
  Synthetic oligonucleotide
cagctggcggtgcgagcgttctgggtgtca

SEQ ID NO: 265047 - DNA, 30 bp, Artificial Sequence
  Synthetic oligonucleotide
ccgtcctatgacctatctccgaaattgtca

SEQ ID NO: 265048 - DNA, 30 bp, Artificial Sequence
  Synthetic oligonucleotide
agtactaaggattagcctcttggattgtca

SEQ ID NO: 265049 - DNA, 30 bp, Artificial Sequence
  Synthetic oligonucleotide
atggtattctacagatccatccagaattca

SEQ ID NO: 265050 - DNA, 30 bp, Artificial Sequence
  Synthetic oligonucleotide
acggatcagcggaatagagcgtcgaattca

SEQ ID NO: 265051 - DNA, 30 bp, Artificial Sequence
  Synthetic oligonucleotide
ctagggacccatgatgctttcgggaattca

SEQ ID NO: 265052 - DNA, 30 bp, Artificial Sequence
  Synthetic oligonucleotide
atcgggagtatgtgcacctttgggaattca

SEQ ID NO: 265053 - DNA, 30 bp, Artificial Sequence
  Synthetic oligonucleotide
cagatatagttaaggctatctatgaattca

SEQ ID NO: 265054 - DNA, 30 bp, Artificial Sequence
  Synthetic oligonucleotide
acttgatcacatataggtatgactaattca

SEQ ID NO: 265055 - DNA, 30 bp, Artificial Sequence
  Synthetic oligonucleotide
tgggcttacacgacatagcaatcacattca

SEQ ID NO: 265056 - DNA, 30 bp, Artificial Sequence
  Synthetic oligonucleotide
acagtattttcctagaccccagagcattca

SEQ ID NO: 265057 - DNA, 30 bp, Artificial Sequence
  Synthetic oligonucleotide
ttagatggttaatagatgttcgagcattca

SEQ ID NO: 265058 - DNA, 30 bp, Artificial Sequence
  Synthetic oligonucleotide
aagacagagactggtgacacgagtcattca

SEQ ID NO: 265059 - DNA, 30 bp, Artificial Sequence
  Synthetic oligonucleotide
tagaagggcgttgtcagtccctgagattca

SEQ ID NO: 265060 - DNA, 30 bp, Artificial Sequence
  Synthetic oligonucleotide
gcgacatctagtcccggctagttcgattca

SEQ ID NO: 265061 - DNA, 30 bp, Artificial Sequence
  Synthetic oligonucleotide
gctggggggcacagctttgtcgggtattca

SEQ ID NO: 265062 - DNA, 30 bp, Artificial Sequence
  Synthetic oligonucleotide
gcgggtaaaggatacgcatcggggtattca

SEQ ID NO: 265063 - DNA, 30 bp, Artificial Sequence
  Synthetic oligonucleotide
gtttgtcaggcatactgggagacttattca

SEQ ID NO: 265064 - DNA, 30 bp, Artificial Sequence
  Synthetic oligonucleotide
tactaagtcgcgtatactttttgttattca

SEQ ID NO: 265065 - DNA, 30 bp, Artificial Sequence
  Synthetic oligonucleotide
acgcgcgccctttacgacaaacaaacttca

SEQ ID NO: 265066 - DNA, 30 bp, Artificial Sequence
  Synthetic oligonucleotide
agttccaaaaaattaattctacaaacttca

SEQ ID NO: 265067 - DNA, 30 bp, Artificial Sequence
  Synthetic oligonucleotide
cctatcgctaccatgcaaaaccaaacttca

SEQ ID NO: 265068 - DNA, 30 bp, Artificial Sequence
  Synthetic oligonucleotide
ttaagtggcggagggatggcctcaacttca

SEQ ID NO: 265069 - DNA, 30 bp, Artificial Sequence
  Synthetic oligonucleotide
tggatcgtacgtaccgctagccacacttca

SEQ ID NO: 265070 - DNA, 30 bp, Artificial Sequence
  Synthetic oligonucleotide
cttgtgttaaatttcggtcgaactacttca

SEQ ID NO: 265071 - DNA, 30 bp, Artificial Sequence
  Synthetic oligonucleotide
ctaccacgcagccggagggagtctacttca

SEQ ID NO: 265072 - DNA, 30 bp, Artificial Sequence
  Synthetic oligonucleotide
aataacgtttaacacatggtgattacttca

SEQ ID NO: 265073 - DNA, 30 bp, Artificial Sequence
  Synthetic oligonucleotide
aaaactacgaatacagattgggttacttca

SEQ ID NO: 265074 - DNA, 30 bp, Artificial Sequence
  Synthetic oligonucleotide
gagacttcgcggatcgcatcataaccttca

SEQ ID NO: 265075 - DNA, 30 bp, Artificial Sequence
  Synthetic oligonucleotide
tctccatgagccccacactccccaccttca

SEQ ID NO: 265076 - DNA, 30 bp, Artificial Sequence
  Synthetic oligonucleotide
cttaataatcaagctacgaaattcccttca

SEQ ID NO: 265077 - DNA, 30 bp, Artificial Sequence
  Synthetic oligonucleotide
ttgcaaggggccggtttggagcagccttca

SEQ ID NO: 265078 - DNA, 30 bp, Artificial Sequence
  Synthetic oligonucleotide
actctagtcaccgaagagagagagccttca

SEQ ID NO: 265079 - DNA, 30 bp, Artificial Sequence
  Synthetic oligonucleotide
ctggaaggacgccttgtaacgtatccttca

SEQ ID NO: 265080 - DNA, 30 bp, Artificial Sequence
  Synthetic oligonucleotide
ccgccatgattctgattgacataagcttca

SEQ ID NO: 265081 - DNA, 30 bp, Artificial Sequence
  Synthetic oligonucleotide
ggtctggatctgtgcatgacgtgcgcttca

SEQ ID NO: 265082 - DNA, 30 bp, Artificial Sequence
  Synthetic oligonucleotide
gacctagatctacataaagtagttgcttca

SEQ ID NO: 265083 - DNA, 30 bp, Artificial Sequence
  Synthetic oligonucleotide
acgcctaactatgaaatggcggaatcttca

SEQ ID NO: 265084 - DNA, 30 bp, Artificial Sequence
  Synthetic oligonucleotide
aagagatggcgaggatgctgaacatcttca

SEQ ID NO: 265085 - DNA, 30 bp, Artificial Sequence
  Synthetic oligonucleotide
cggcggtatttcgcctgccctatctcttca

SEQ ID NO: 265086 - DNA, 30 bp, Artificial Sequence
  Synthetic oligonucleotide
tacgggcccagcgaacaaccggtaagttca

SEQ ID NO: 265087 - DNA, 30 bp, Artificial Sequence
  Synthetic oligonucleotide
attccgattcaatagtaaccacccagttca

SEQ ID NO: 265088 - DNA, 30 bp, Artificial Sequence
  Synthetic oligonucleotide
gtctcgatagacttaccatatgtcagttca

SEQ ID NO: 265089 - DNA, 30 bp, Artificial Sequence
  Synthetic oligonucleotide
caagatgatcctgtgacggttctgagttca

SEQ ID NO: 265090 - DNA, 30 bp, Artificial Sequence
  Synthetic oligonucleotide
atgccctccaagcattggattcgtagttca

SEQ ID NO: 265091 - DNA, 30 bp, Artificial Sequence
  Synthetic oligonucleotide
tggcgctgaaatgccacccagcaacgttca

SEQ ID NO: 265092 - DNA, 30 bp, Artificial Sequence
  Synthetic oligonucleotide
cggcgtctgccattcatccagtaacgttca

SEQ ID NO: 265093 - DNA, 30 bp, Artificial Sequence
  Synthetic oligonucleotide
ttgttagaacatttagctaccatacgttca

SEQ ID NO: 265094 - DNA, 30 bp, Artificial Sequence
  Synthetic oligonucleotide
ggtcaagcccgcgcaaccgaaggtcgttca

SEQ ID NO: 265095 - DNA, 30 bp, Artificial Sequence
  Synthetic oligonucleotide
cagaaaatcgcgcacatatacgaaggttca

SEQ ID NO: 265096 - DNA, 30 bp, Artificial Sequence
  Synthetic oligonucleotide
tcagttagcgggttaggctttgaaggttca

SEQ ID NO: 265097 - DNA, 30 bp, Artificial Sequence
  Synthetic oligonucleotide
agtgcatcgtcggtggcataatcaggttca

SEQ ID NO: 265098 - DNA, 30 bp, Artificial Sequence
  Synthetic oligonucleotide
ttcaagtaacacgcggccggcttgggttca

SEQ ID NO: 265099 - DNA, 30 bp, Artificial Sequence
  Synthetic oligonucleotide
gactagcaatgcggttgtgctcatggttca

SEQ ID NO: 265100 - DNA, 30 bp, Artificial Sequence
  Synthetic oligonucleotide
gacagagttcattgtagggttcttggttca

SEQ ID NO: 265101 - DNA, 30 bp, Artificial Sequence
  Synthetic oligonucleotide
ggttaaactatgtgtttctgtgttggttca

SEQ ID NO: 265102 - DNA, 30 bp, Artificial Sequence
  Synthetic oligonucleotide
ctcgctatggcctggcggaacggatgttca

SEQ ID NO: 265103 - DNA, 30 bp, Artificial Sequence
  Synthetic oligonucleotide
aattacaacccaatgagcagttgatgttca

SEQ ID NO: 265104 - DNA, 30 bp, Artificial Sequence
  Synthetic oligonucleotide
agacccctcgcgagccagtgtaactgttca

SEQ ID NO: 265105 - DNA, 30 bp, Artificial Sequence
  Synthetic oligonucleotide
ggagccaaggttacggtttgagcctgttca

SEQ ID NO: 265106 - DNA, 30 bp, Artificial Sequence
  Synthetic oligonucleotide
cggcagttatcctccattacaccgtgttca

SEQ ID NO: 265107 - DNA, 30 bp, Artificial Sequence
  Synthetic oligonucleotide
acggcacatacgttttaagttatgtgttca

SEQ ID NO: 265108 - DNA, 30 bp, Artificial Sequence
  Synthetic oligonucleotide
tatcgagaggcttacctagttagttgttca

SEQ ID NO: 265109 - DNA, 30 bp, Artificial Sequence
  Synthetic oligonucleotide
aacagggataagactacgttggtaatttca

SEQ ID NO: 265110 - DNA, 30 bp, Artificial Sequence
  Synthetic oligonucleotide
gcagtattgccatcagatagccggatttca

SEQ ID NO: 265111 - DNA, 30 bp, Artificial Sequence
  Synthetic oligonucleotide
agtggccagctacacgtgtagatgatttca

SEQ ID NO: 265112 - DNA, 30 bp, Artificial Sequence
  Synthetic oligonucleotide
cagggtaagtacgaccaaaagtcactttca

SEQ ID NO: 265113 - DNA, 30 bp, Artificial Sequence
  Synthetic oligonucleotide
accgatggcgggagtccgcttcagctttca

SEQ ID NO: 265114 - DNA, 30 bp, Artificial Sequence
  Synthetic oligonucleotide
tcttgtcccgtgtatcgctacacgctttca

SEQ ID NO: 265115 - DNA, 30 bp, Artificial Sequence
  Synthetic oligonucleotide
gcggaagctatgctgaaaggtcggctttca

SEQ ID NO: 265116 - DNA, 30 bp, Artificial Sequence
  Synthetic oligonucleotide
gccaacctaccgtacggtgtaatgctttca

SEQ ID NO: 265117 - DNA, 30 bp, Artificial Sequence
  Synthetic oligonucleotide
cctagaaaaacacccgggtgaaatctttca

SEQ ID NO: 265118 - DNA, 30 bp, Artificial Sequence
  Synthetic oligonucleotide
tatcggcagacaaggacactatatctttca

SEQ ID NO: 265119 - DNA, 30 bp, Artificial Sequence
  Synthetic oligonucleotide
ggatgaggcttaaaatgtattcaagtttca

SEQ ID NO: 265120 - DNA, 30 bp, Artificial Sequence
  Synthetic oligonucleotide
ttcagtccatctgactcaccctgagtttca

SEQ ID NO: 265121 - DNA, 30 bp, Artificial Sequence
  Synthetic oligonucleotide
aacgtcatgcttctttcaggattcgtttca

SEQ ID NO: 265122 - DNA, 30 bp, Artificial Sequence
  Synthetic oligonucleotide
tcccttcggaatccgcgctgggaggtttca

SEQ ID NO: 265123 - DNA, 30 bp, Artificial Sequence
  Synthetic oligonucleotide
tcagtgttgcggaggatatagacggtttca

SEQ ID NO: 265124 - DNA, 30 bp, Artificial Sequence
  Synthetic oligonucleotide
acgaacaggccacccgcccacgcattttca

SEQ ID NO: 265125 - DNA, 30 bp, Artificial Sequence
  Synthetic oligonucleotide
ggcattgccagaggggcgaccggattttca

SEQ ID NO: 265126 - DNA, 30 bp, Artificial Sequence
  Synthetic oligonucleotide
acacattaaagtccaaaatacctgttttca

SEQ ID NO: 265127 - DNA, 30 bp, Artificial Sequence
  Synthetic oligonucleotide
gccagggtgtcaacgaagtggtatttttca

SEQ ID NO: 265128 - DNA, 30 bp, Artificial Sequence
  Synthetic oligonucleotide
gattcagatgacggcgggtggctaaaaaga

SEQ ID NO: 265129 - DNA, 30 bp, Artificial Sequence
  Synthetic oligonucleotide
accttaccattactcttcgcggtaaaaaga

SEQ ID NO: 265130 - DNA, 30 bp, Artificial Sequence
  Synthetic oligonucleotide
cgttcgtaaccaataccgagtttaaaaaga

SEQ ID NO: 265131 - DNA, 30 bp, Artificial Sequence
  Synthetic oligonucleotide
tgcttgcgctatgaagtggcgtgcaaaaga

SEQ ID NO: 265132 - DNA, 30 bp, Artificial Sequence
  Synthetic oligonucleotide
gctgttaagtgcaaggtagcgaaacaaaga

SEQ ID NO: 265133 - DNA, 30 bp, Artificial Sequence
  Synthetic oligonucleotide
ctacgcaaatcgtaatgcatttaccaaaga

SEQ ID NO: 265134 - DNA, 30 bp, Artificial Sequence
  Synthetic oligonucleotide
ggagtgcaacgtagcttttctggccaaaga

SEQ ID NO: 265135 - DNA, 30 bp, Artificial Sequence
  Synthetic oligonucleotide
agagccgcgcaccgactttggcggcaaaga

SEQ ID NO: 265136 - DNA, 30 bp, Artificial Sequence
  Synthetic oligonucleotide
agagtcaagggcggggcatggtggcaaaga

SEQ ID NO: 265137 - DNA, 30 bp, Artificial Sequence
  Synthetic oligonucleotide
gaggaagcgcactgtgtcgagcatcaaaga

SEQ ID NO: 265138 - DNA, 30 bp, Artificial Sequence
  Synthetic oligonucleotide
agttcctaaagcatggagtaagctcaaaga

SEQ ID NO: 265139 - DNA, 30 bp, Artificial Sequence
  Synthetic oligonucleotide
tcatcctagtttgcctaacaaggagaaaga

SEQ ID NO: 265140 - DNA, 30 bp, Artificial Sequence
  Synthetic oligonucleotide
tggatcgaatagcttaattactgagaaaga

SEQ ID NO: 265141 - DNA, 30 bp, Artificial Sequence
  Synthetic oligonucleotide
gacacaatgcaataataattttgagaaaga

SEQ ID NO: 265142 - DNA, 30 bp, Artificial Sequence
  Synthetic oligonucleotide
acaagggtagaaaggcgaagcaccgaaaga

SEQ ID NO: 265143 - DNA, 30 bp, Artificial Sequence
  Synthetic oligonucleotide
gtatgccctaagcttcactacagcgaaaga

SEQ ID NO: 265144 - DNA, 30 bp, Artificial Sequence
  Synthetic oligonucleotide
acgtaacttggagggtggctctctgaaaga

SEQ ID NO: 265145 - DNA, 30 bp, Artificial Sequence
  Synthetic oligonucleotide
agagagaccactcaaacggccgttgaaaga

SEQ ID NO: 265146 - DNA, 30 bp, Artificial Sequence
  Synthetic oligonucleotide
ggatgcagctcctccaccataacctaaaga

SEQ ID NO: 265147 - DNA, 30 bp, Artificial Sequence
  Synthetic oligonucleotide
acctgcacatgcgtatttggggcctaaaga

SEQ ID NO: 265148 - DNA, 30 bp, Artificial Sequence
  Synthetic oligonucleotide
tcaacacactcccctagttacggctaaaga

SEQ ID NO: 265149 - DNA, 30 bp, Artificial Sequence
  Synthetic oligonucleotide
tgcctaagtaccggcttgacgatctaaaga

SEQ ID NO: 265150 - DNA, 30 bp, Artificial Sequence
  Synthetic oligonucleotide
aaaaacgagagattccgcgccttctaaaga

SEQ ID NO: 265151 - DNA, 30 bp, Artificial Sequence
  Synthetic oligonucleotide
taattacaacagtctgcgcctcagtaaaga

SEQ ID NO: 265152 - DNA, 30 bp, Artificial Sequence
  Synthetic oligonucleotide
aaagtagacataggacttggtcagtaaaga

SEQ ID NO: 265153 - DNA, 30 bp, Artificial Sequence
  Synthetic oligonucleotide
acagcaaatacctaggtgtatcattaaaga

SEQ ID NO: 265154 - DNA, 30 bp, Artificial Sequence
  Synthetic oligonucleotide
tggcccactgcgctaccaatttgttaaaga

SEQ ID NO: 265155 - DNA, 30 bp, Artificial Sequence
  Synthetic oligonucleotide
atgaaatctgcgtcggcgaaaatttaaaga

SEQ ID NO: 265156 - DNA, 30 bp, Artificial Sequence
  Synthetic oligonucleotide
attaatccactggtacaccagagaacaaga

SEQ ID NO: 265157 - DNA, 30 bp, Artificial Sequence
  Synthetic oligonucleotide
ccgtctgatgacagacaaggttacacaaga

SEQ ID NO: 265158 - DNA, 30 bp, Artificial Sequence
  Synthetic oligonucleotide
ttagtgcttccaagtaaaccagtcacaaga

SEQ ID NO: 265159 - DNA, 30 bp, Artificial Sequence
  Synthetic oligonucleotide
ctgacgcgctcggcattacttttcacaaga

SEQ ID NO: 265160 - DNA, 30 bp, Artificial Sequence
  Synthetic oligonucleotide
ctgactaaccagacggaactctagacaaga

SEQ ID NO: 265161 - DNA, 30 bp, Artificial Sequence
  Synthetic oligonucleotide
ccagcattgtaatacttaaagtgtacaaga

SEQ ID NO: 265162 - DNA, 30 bp, Artificial Sequence
  Synthetic oligonucleotide
ttggctcatttagattgaagcaaaccaaga

SEQ ID NO: 265163 - DNA, 30 bp, Artificial Sequence
  Synthetic oligonucleotide
gtcaggctgctgtatacccaatgaccaaga

SEQ ID NO: 265164 - DNA, 30 bp, Artificial Sequence
  Synthetic oligonucleotide
ttagctgacaccttatatgtcgtgccaaga

SEQ ID NO: 265165 - DNA, 30 bp, Artificial Sequence
  Synthetic oligonucleotide
atcctagaaacgccgcgccgacatccaaga

SEQ ID NO: 265166 - DNA, 29 bp, Artificial Sequence
  Synthetic oligonucleotide
tggtgtcgtcgtggtatgcgactccaaga

SEQ ID NO: 265167 - DNA, 30 bp, Artificial Sequence
  Synthetic oligonucleotide
ttttggcttaagtctagctacattccaaga

SEQ ID NO: 265168 - DNA, 30 bp, Artificial Sequence
  Synthetic oligonucleotide
tgagctaaagtacggtgaatgttagcaaga

SEQ ID NO: 265169 - DNA, 30 bp, Artificial Sequence
  Synthetic oligonucleotide
tcattaaatgcttcgttacgatccgcaaga

SEQ ID NO: 265170 - DNA, 30 bp, Artificial Sequence
  Synthetic oligonucleotide
tcggaattaacgttgttatacagcgcaaga

SEQ ID NO: 265171 - DNA, 30 bp, Artificial Sequence
  Synthetic oligonucleotide
ggtaaccggcatctaatacgatgcgcaaga

SEQ ID NO: 265172 - DNA, 30 bp, Artificial Sequence
  Synthetic oligonucleotide
agatgttatgttgctatagcaatggcaaga

SEQ ID NO: 265173 - DNA, 30 bp, Artificial Sequence
  Synthetic oligonucleotide
gaggatacgggggcgtaatcgaatgcaaga

SEQ ID NO: 265174 - DNA, 30 bp, Artificial Sequence
  Synthetic oligonucleotide
ggtcttgcccccgctatagtaactgcaaga

SEQ ID NO: 265175 - DNA, 30 bp, Artificial Sequence
  Synthetic oligonucleotide
tggagggtctcattcacagcccctgcaaga

SEQ ID NO: 265176 - DNA, 30 bp, Artificial Sequence
  Synthetic oligonucleotide
tcctgtggtaggttcttttttattgcaaga

SEQ ID NO: 265177 - DNA, 30 bp, Artificial Sequence
  Synthetic oligonucleotide
gcccagttgcatcgactccagaaatcaaga

SEQ ID NO: 265178 - DNA, 30 bp, Artificial Sequence
  Synthetic oligonucleotide
ttagtaagctgccgggcgttgcactcaaga

SEQ ID NO: 265179 - DNA, 30 bp, Artificial Sequence
  Synthetic oligonucleotide
ctgcatgcgacggtttccttctgctcaaga

SEQ ID NO: 265180 - DNA, 30 bp, Artificial Sequence
  Synthetic oligonucleotide
gaaaacgttacgcgaattcacaagtcaaga

SEQ ID NO: 265181 - DNA, 30 bp, Artificial Sequence
  Synthetic oligonucleotide
ccatgcgaagctcacccatggtattcaaga

SEQ ID NO: 265182 - DNA, 30 bp, Artificial Sequence
  Synthetic oligonucleotide
gctgcttgatcgtcacgtttgtgttcaaga

SEQ ID NO: 265183 - DNA, 30 bp, Artificial Sequence
  Synthetic oligonucleotide
taacagccgtgacggtagccagtttcaaga

SEQ ID NO: 265184 - DNA, 30 bp, Artificial Sequence
  Synthetic oligonucleotide
cgcaggggggtgtatttatgcaatagaaga

SEQ ID NO: 265185 - DNA, 30 bp, Artificial Sequence
  Synthetic oligonucleotide
agtattgactgtgaagagttccatagaaga

SEQ ID NO: 265186 - DNA, 30 bp, Artificial Sequence
  Synthetic oligonucleotide
aagtcgattagattttaaaggtatagaaga

SEQ ID NO: 265187 - DNA, 29 bp, Artificial Sequence
  Synthetic oligonucleotide
tccgaggaccccgaaagattcgtagaaga

SEQ ID NO: 265188 - DNA, 30 bp, Artificial Sequence
  Synthetic oligonucleotide
ataaaactcgaagctctgattacacgaaga

SEQ ID NO: 265189 - DNA, 30 bp, Artificial Sequence
  Synthetic oligonucleotide
atggatctaggacatgagtagtcccgaaga

SEQ ID NO: 265190 - DNA, 30 bp, Artificial Sequence
  Synthetic oligonucleotide
ccccctgcggccaaaagcttgtgccgaaga

SEQ ID NO: 265191 - DNA, 30 bp, Artificial Sequence
  Synthetic oligonucleotide
ttcgaggattagacaaatagtatccgaaga

SEQ ID NO: 265192 - DNA, 30 bp, Artificial Sequence
  Synthetic oligonucleotide
atacctggcgtgatataatagatgcgaaga

SEQ ID NO: 265193 - DNA, 30 bp, Artificial Sequence
  Synthetic oligonucleotide
cctgagagctataggaccgtatatcgaaga

SEQ ID NO: 265194 - DNA, 30 bp, Artificial Sequence
  Synthetic oligonucleotide
agtcaggataaaagtgggaaggccggaaga

SEQ ID NO: 265195 - DNA, 30 bp, Artificial Sequence
  Synthetic oligonucleotide
acaaactacgttacgggtcgaatcggaaga

SEQ ID NO: 265196 - DNA, 30 bp, Artificial Sequence
  Synthetic oligonucleotide
gagcacgaaccaattccaccctgtggaaga

SEQ ID NO: 265197 - DNA, 30 bp, Artificial Sequence
  Synthetic oligonucleotide
cgactgagctcaagcaactatattggaaga

SEQ ID NO: 265198 - DNA, 30 bp, Artificial Sequence
  Synthetic oligonucleotide
cgtccttagcccttcaaccctgttggaaga

SEQ ID NO: 265199 - DNA, 30 bp, Artificial Sequence
  Synthetic oligonucleotide
actcggtcgcgtatgggcttcttctgaaga

SEQ ID NO: 265200 - DNA, 30 bp, Artificial Sequence
  Synthetic oligonucleotide
tatttaatactcaaagcgatcaggtgaaga

SEQ ID NO: 265201 - DNA, 30 bp, Artificial Sequence
  Synthetic oligonucleotide
gcaacccgagtccctggtgtgatgtgaaga

SEQ ID NO: 265202 - DNA, 30 bp, Artificial Sequence
  Synthetic oligonucleotide
tgtaaaccgagttctgctactctgtgaaga

SEQ ID NO: 265203 - DNA, 30 bp, Artificial Sequence
  Synthetic oligonucleotide
ggcaaggggaattggtttagcgcttgaaga

SEQ ID NO: 265204 - DNA, 30 bp, Artificial Sequence
  Synthetic oligonucleotide
tgaatctgtcataaggttgtccaaataaga

SEQ ID NO: 265205 - DNA, 30 bp, Artificial Sequence
  Synthetic oligonucleotide
acccaaggccaagcatgcatcgaaataaga

SEQ ID NO: 265206 - DNA, 30 bp, Artificial Sequence
  Synthetic oligonucleotide
gcatatcaaaaggctacaattagaataaga

SEQ ID NO: 265207 - DNA, 30 bp, Artificial Sequence
  Synthetic oligonucleotide
ccggccaccgcaggcaccgtatacataaga

SEQ ID NO: 265208 - DNA, 30 bp, Artificial Sequence
  Synthetic oligonucleotide
ttagacggtacatagccgcggctcataaga

SEQ ID NO: 265209 - DNA, 30 bp, Artificial Sequence
  Synthetic oligonucleotide
cacatggtgggagaccggggttgtataaga

SEQ ID NO: 265210 - DNA, 30 bp, Artificial Sequence
  Synthetic oligonucleotide
cggcgggtcggttcgacgtaaaaactaaga

SEQ ID NO: 265211 - DNA, 30 bp, Artificial Sequence
  Synthetic oligonucleotide
aataaaggacaacggtgaaagtaactaaga

SEQ ID NO: 265212 - DNA, 30 bp, Artificial Sequence
  Synthetic oligonucleotide
taagggtatagaaccaaggcaacactaaga

SEQ ID NO: 265213 - DNA, 30 bp, Artificial Sequence
  Synthetic oligonucleotide
gtcgaccacccgctagtgttgaacctaaga

SEQ ID NO: 265214 - DNA, 30 bp, Artificial Sequence
  Synthetic oligonucleotide
ttccaaggtcgtttcagtgggaggctaaga

SEQ ID NO: 265215 - DNA, 30 bp, Artificial Sequence
  Synthetic oligonucleotide
cgctcatagtaggagacaatgagtctaaga

SEQ ID NO: 265216 - DNA, 30 bp, Artificial Sequence
  Synthetic oligonucleotide
tcagcacccgcatcctgacttcaagtaaga

SEQ ID NO: 265217 - DNA, 30 bp, Artificial Sequence
  Synthetic oligonucleotide
gcagtgtaacaagactcggcaagcgtaaga

SEQ ID NO: 265218 - DNA, 30 bp, Artificial Sequence
  Synthetic oligonucleotide
cctaacaccttaaattgatcaagcgtaaga

SEQ ID NO: 265219 - DNA, 30 bp, Artificial Sequence
  Synthetic oligonucleotide
gtgacctaaccgcgcatccgtggcgtaaga

SEQ ID NO: 265220 - DNA, 30 bp, Artificial Sequence
  Synthetic oligonucleotide
ggacagcgacaacgcactccctgcgtaaga

SEQ ID NO: 265221 - DNA, 30 bp, Artificial Sequence
  Synthetic oligonucleotide
gacatttggtggcagactgaattcgtaaga

SEQ ID NO: 265222 - DNA, 30 bp, Artificial Sequence
  Synthetic oligonucleotide
gataaaagtcgggatgttgttttcgtaaga

SEQ ID NO: 265223 - DNA, 30 bp, Artificial Sequence
  Synthetic oligonucleotide
atcgtcgttaataccgacgaaacggtaaga

SEQ ID NO: 265224 - DNA, 30 bp, Artificial Sequence
  Synthetic oligonucleotide
ggacctgtgaccttaacgggttcggtaaga

SEQ ID NO: 265225 - DNA, 31 bp, Artificial Sequence
  Synthetic oligonucleotide
gcaaaggtggcacatcacggcttatgtaaga

SEQ ID NO: 265226 - DNA, 30 bp, Artificial Sequence
  Synthetic oligonucleotide
ttacgtcgtgggtatattctatttgtaaga

SEQ ID NO: 265227 - DNA, 30 bp, Artificial Sequence
  Synthetic oligonucleotide
ggtcacacagacgaggtggggtttgtaaga

SEQ ID NO: 265228 - DNA, 30 bp, Artificial Sequence
  Synthetic oligonucleotide
agtacagcagagcatcgaaccatattaaga

SEQ ID NO: 265229 - DNA, 30 bp, Artificial Sequence
  Synthetic oligonucleotide
tgcaatgcttcagcatgctccgcgttaaga

SEQ ID NO: 265230 - DNA, 30 bp, Artificial Sequence
  Synthetic oligonucleotide
acagtgcggagcattgttataaaaaacaga

SEQ ID NO: 265231 - DNA, 30 bp, Artificial Sequence
  Synthetic oligonucleotide
agaacattttttagttagtttgccaacaga

SEQ ID NO: 265232 - DNA, 30 bp, Artificial Sequence
  Synthetic oligonucleotide
gaaatttggaattccggcaaaagcaacaga

SEQ ID NO: 265233 - DNA, 30 bp, Artificial Sequence
  Synthetic oligonucleotide
cttgaccttcgtgtggagtccaaacacaga

SEQ ID NO: 265234 - DNA, 30 bp, Artificial Sequence
  Synthetic oligonucleotide
ggtcgttctatcgtctgtatgcaacacaga

SEQ ID NO: 265235 - DNA, 30 bp, Artificial Sequence
  Synthetic oligonucleotide
cagcagcatcgggcaaggcagtcacacaga

SEQ ID NO: 265236 - DNA, 30 bp, Artificial Sequence
  Synthetic oligonucleotide
gtcgcgtcaggcactataagggcccacaga

SEQ ID NO: 265237 - DNA, 30 bp, Artificial Sequence
  Synthetic oligonucleotide
ctatcttttacgacgctggcgacgcacaga

SEQ ID NO: 265238 - DNA, 30 bp, Artificial Sequence
  Synthetic oligonucleotide
gagcgcatccgatatattaggtggcacaga

SEQ ID NO: 265239 - DNA, 30 bp, Artificial Sequence
  Synthetic oligonucleotide
ttactaatataaatttgagcggatcacaga

SEQ ID NO: 265240 - DNA, 30 bp, Artificial Sequence
  Synthetic oligonucleotide
tacggaaccatcatggctttgccagacaga

SEQ ID NO: 265241 - DNA, 30 bp, Artificial Sequence
  Synthetic oligonucleotide
gggtaccagtagctccaagacggagacaga

SEQ ID NO: 265242 - DNA, 30 bp, Artificial Sequence
  Synthetic oligonucleotide
agggacgtacgtaagtctacatgcgacaga

SEQ ID NO: 265243 - DNA, 30 bp, Artificial Sequence
  Synthetic oligonucleotide
gcggaatatccctcgcagacaccggacaga

SEQ ID NO: 265244 - DNA, 30 bp, Artificial Sequence
  Synthetic oligonucleotide
ttttcaatgggatggtggtgtaatgacaga

SEQ ID NO: 265245 - DNA, 30 bp, Artificial Sequence
  Synthetic oligonucleotide
tagcgccaacctgaaccttgtcttgacaga

SEQ ID NO: 265246 - DNA, 30 bp, Artificial Sequence
  Synthetic oligonucleotide
catagtaagtttggttgtccataatacaga

SEQ ID NO: 265247 - DNA, 30 bp, Artificial Sequence
  Synthetic oligonucleotide
gcccgtgtaattaaccttcttacatacaga

SEQ ID NO: 265248 - DNA, 30 bp, Artificial Sequence
  Synthetic oligonucleotide
aactcaccggtgggggatgccatatacaga

SEQ ID NO: 265249 - DNA, 30 bp, Artificial Sequence
  Synthetic oligonucleotide
gacattttgtctacctgtttaacctacaga

SEQ ID NO: 265250 - DNA, 30 bp, Artificial Sequence
  Synthetic oligonucleotide
gtcattgtaggcccccgatacttctacaga

SEQ ID NO: 265251 - DNA, 30 bp, Artificial Sequence
  Synthetic oligonucleotide
ccctaaaggggcatgttatacttgtacaga

SEQ ID NO: 265252 - DNA, 30 bp, Artificial Sequence
  Synthetic oligonucleotide
gttttcgtgtggatggtgtagttgtacaga

SEQ ID NO: 265253 - DNA, 30 bp, Artificial Sequence
  Synthetic oligonucleotide
ctttttgggggtggttgtgagaaaaccaga

SEQ ID NO: 265254 - DNA, 30 bp, Artificial Sequence
  Synthetic oligonucleotide
cttgggggaacaagttgggcgggcaccaga

SEQ ID NO: 265255 - DNA, 30 bp, Artificial Sequence
  Synthetic oligonucleotide
tcgttaattactcgccaggtgtagaccaga

SEQ ID NO: 265256 - DNA, 30 bp, Artificial Sequence
  Synthetic oligonucleotide
ttcgggcgtgtgtggatgcttacacccaga

SEQ ID NO: 265257 - DNA, 30 bp, Artificial Sequence
  Synthetic oligonucleotide
atcaaacaaccggctgagccatgccccaga

SEQ ID NO: 265258 - DNA, 30 bp, Artificial Sequence
  Synthetic oligonucleotide
actgaacatcggagatttatagtccccaga

SEQ ID NO: 265259 - DNA, 30 bp, Artificial Sequence
  Synthetic oligonucleotide
ttatgagctacatttttactcgtccccaga

SEQ ID NO: 265260 - DNA, 30 bp, Artificial Sequence
  Synthetic oligonucleotide
ggtatgtcgatggcctgataggagcccaga

SEQ ID NO: 265261 - DNA, 30 bp, Artificial Sequence
  Synthetic oligonucleotide
caccgtggaaacgacagccatgcgcccaga

SEQ ID NO: 265262 - DNA, 30 bp, Artificial Sequence
  Synthetic oligonucleotide
taggtgtctgcgctatcagggtatcccaga

SEQ ID NO: 265263 - DNA, 30 bp, Artificial Sequence
  Synthetic oligonucleotide
aactcctcggctcgggttagacctcccaga

SEQ ID NO: 265264 - DNA, 30 bp, Artificial Sequence
  Synthetic oligonucleotide
aactgagcctctactagatcaggggccaga

SEQ ID NO: 265265 - DNA, 30 bp, Artificial Sequence
  Synthetic oligonucleotide
gcgtgacccatgcacgtaagccatgccaga

SEQ ID NO: 265266 - DNA, 30 bp, Artificial Sequence
  Synthetic oligonucleotide
gtgtgaaggaatatagtccatatatccaga

SEQ ID NO: 265267 - DNA, 30 bp, Artificial Sequence
  Synthetic oligonucleotide
accggtgtagggttctgggactgctccaga

SEQ ID NO: 265268 - DNA, 30 bp, Artificial Sequence
  Synthetic oligonucleotide
attccgccacaatgcggtatcgggtccaga

SEQ ID NO: 265269 - DNA, 30 bp, Artificial Sequence
  Synthetic oligonucleotide
taatgtaagggattatcctgcatttccaga

SEQ ID NO: 265270 - DNA, 30 bp, Artificial Sequence
  Synthetic oligonucleotide
acttcctacagaaacgttaggctttccaga

SEQ ID NO: 265271 - DNA, 30 bp, Artificial Sequence
  Synthetic oligonucleotide
ggaggggcccagtactgagtctgaagcaga

SEQ ID NO: 265272 - DNA, 30 bp, Artificial Sequence
  Synthetic oligonucleotide
ccgagggcagagaccgtcaggtcgagcaga

SEQ ID NO: 265273 - DNA, 30 bp, Artificial Sequence
  Synthetic oligonucleotide
ggtggtatcttgactcggaggctgagcaga

SEQ ID NO: 265274 - DNA, 30 bp, Artificial Sequence
  Synthetic oligonucleotide
gatagacttggaattgcggaatatagcaga

SEQ ID NO: 265275 - DNA, 30 bp, Artificial Sequence
  Synthetic oligonucleotide
caaattaggaaatgctatgcaattagcaga

SEQ ID NO: 265276 - DNA, 30 bp, Artificial Sequence
  Synthetic oligonucleotide
aatcggcccttatatgtaacaacgcgcaga

SEQ ID NO: 265277 - DNA, 30 bp, Artificial Sequence
  Synthetic oligonucleotide
gggggtgatgatacaccatatgctcgcaga

SEQ ID NO: 265278 - DNA, 30 bp, Artificial Sequence
  Synthetic oligonucleotide
aacgagatctaaaatggaggttcaggcaga

SEQ ID NO: 265279 - DNA, 30 bp, Artificial Sequence
  Synthetic oligonucleotide
gtcgcgggggcgggtacgccctgaggcaga

SEQ ID NO: 265280 - DNA, 30 bp, Artificial Sequence
  Synthetic oligonucleotide
atcaaccacttatgccactggcggggcaga

SEQ ID NO: 265281 - DNA, 30 bp, Artificial Sequence
  Synthetic oligonucleotide
accaatcgaagatgagacacgtgtggcaga

SEQ ID NO: 265282 - DNA, 30 bp, Artificial Sequence
  Synthetic oligonucleotide
gggccaggattaagcagaagcgttggcaga

SEQ ID NO: 265283 - DNA, 30 bp, Artificial Sequence
  Synthetic oligonucleotide
gctaccgtgagttatgataagtcatgcaga

SEQ ID NO: 265284 - DNA, 30 bp, Artificial Sequence
  Synthetic oligonucleotide
taaatagcacgactatatgatttatgcaga

SEQ ID NO: 265285 - DNA, 31 bp, Artificial Sequence
  Synthetic oligonucleotide
gtcgctagcaagagaatgtataaactgcaga

SEQ ID NO: 265286 - DNA, 30 bp, Artificial Sequence
  Synthetic oligonucleotide
ctagaggattgttaagcctctccaatcaga

SEQ ID NO: 265287 - DNA, 30 bp, Artificial Sequence
  Synthetic oligonucleotide
taatcgctttagttacccttagtaatcaga

SEQ ID NO: 265288 - DNA, 30 bp, Artificial Sequence
  Synthetic oligonucleotide
tgccaagttgccgcgtgtcggatgatcaga

SEQ ID NO: 265289 - DNA, 30 bp, Artificial Sequence
  Synthetic oligonucleotide
gcttggcatcccgaaaaacaggtgatcaga

SEQ ID NO: 265290 - DNA, 30 bp, Artificial Sequence
  Synthetic oligonucleotide
gcttcactggggctgtttgctcgtatcaga

SEQ ID NO: 265291 - DNA, 30 bp, Artificial Sequence
  Synthetic oligonucleotide
caaaaacgctgcgaaaggttatgtatcaga

SEQ ID NO: 265292 - DNA, 30 bp, Artificial Sequence
  Synthetic oligonucleotide
gtgctgcaccgacatagtcagcgcctcaga

SEQ ID NO: 265293 - DNA, 30 bp, Artificial Sequence
  Synthetic oligonucleotide
agcgaaatttcttctgtgacggtcctcaga

SEQ ID NO: 265294 - DNA, 30 bp, Artificial Sequence
  Synthetic oligonucleotide
ccctgacacggacttgatccacggctcaga

SEQ ID NO: 265295 - DNA, 30 bp, Artificial Sequence
  Synthetic oligonucleotide
tcacggcgtcgagggagcattcgggtcaga

SEQ ID NO: 265296 - DNA, 30 bp, Artificial Sequence
  Synthetic oligonucleotide
ggttatgaaagcccgcagggtcgtgtcaga

SEQ ID NO: 265297 - DNA, 30 bp, Artificial Sequence
  Synthetic oligonucleotide
ttatactatagtgattcctgtgcattcaga

SEQ ID NO: 265298 - DNA, 30 bp, Artificial Sequence
  Synthetic oligonucleotide
ctggatacttctcgaattccggtattcaga

SEQ ID NO: 265299 - DNA, 30 bp, Artificial Sequence
  Synthetic oligonucleotide
agtcaatattcactaccattcgagttcaga

SEQ ID NO: 265300 - DNA, 30 bp, Artificial Sequence
  Synthetic oligonucleotide
gagggtggccaggtctcctgcacgttcaga

SEQ ID NO: 265301 - DNA, 30 bp, Artificial Sequence
  Synthetic oligonucleotide
ggttcctttaccaattaaagctcgttcaga

SEQ ID NO: 265302 - DNA, 30 bp, Artificial Sequence
  Synthetic oligonucleotide
acttatactctgaaggcactgtggttcaga

SEQ ID NO: 265303 - DNA, 30 bp, Artificial Sequence
  Synthetic oligonucleotide
acaatggcgggtgactcatccgatttcaga

SEQ ID NO: 265304 - DNA, 30 bp, Artificial Sequence
  Synthetic oligonucleotide
tgagcagaacaaaacctacatagtttcaga

SEQ ID NO: 265305 - DNA, 30 bp, Artificial Sequence
  Synthetic oligonucleotide
tgtcgagagtgcgaaggtgcccttttcaga

SEQ ID NO: 265306 - DNA, 30 bp, Artificial Sequence
  Synthetic oligonucleotide
caaacggcggtggcgaagcacaaaaagaga

SEQ ID NO: 265307 - DNA, 30 bp, Artificial Sequence
  Synthetic oligonucleotide
cagttaatacaaacacattttgagaagaga

SEQ ID NO: 265308 - DNA, 30 bp, Artificial Sequence
  Synthetic oligonucleotide
tacctatcaggaccggtgtccatgaagaga

SEQ ID NO: 265309 - DNA, 30 bp, Artificial Sequence
  Synthetic oligonucleotide
ttcacaataaacgctaggtacgcacagaga

SEQ ID NO: 265310 - DNA, 30 bp, Artificial Sequence
  Synthetic oligonucleotide
gggccattcaggtcccgacaggcccagaga

SEQ ID NO: 265311 - DNA, 30 bp, Artificial Sequence
  Synthetic oligonucleotide
cacttctagtccattctaagatggcagaga

SEQ ID NO: 265312 - DNA, 30 bp, Artificial Sequence
  Synthetic oligonucleotide
gggagcgtaagtgtgaattcccgtcagaga

SEQ ID NO: 265313 - DNA, 30 bp, Artificial Sequence
  Synthetic oligonucleotide
aggccattgaactttctgactggcgagaga

SEQ ID NO: 265314 - DNA, 30 bp, Artificial Sequence
  Synthetic oligonucleotide
ctagatcagcaaatacgctcgttcgagaga

SEQ ID NO: 265315 - DNA, 30 bp, Artificial Sequence
  Synthetic oligonucleotide
agaatccctgtattcacgactatggagaga

SEQ ID NO: 265316 - DNA, 30 bp, Artificial Sequence
  Synthetic oligonucleotide
aagccggttgggcttgatggggtggagaga

SEQ ID NO: 265317 - DNA, 30 bp, Artificial Sequence
  Synthetic oligonucleotide
gtgtttttcgaggccggcaccggtgagaga

SEQ ID NO: 265318 - DNA, 30 bp, Artificial Sequence
  Synthetic oligonucleotide
tctaatgctttaagccacaccacatagaga

SEQ ID NO: 265319 - DNA, 30 bp, Artificial Sequence
  Synthetic oligonucleotide
ctgttccctgcagcgaagaattggtagaga

SEQ ID NO: 265320 - DNA, 30 bp, Artificial Sequence
  Synthetic oligonucleotide
cttttatcaggctagggctaaaattagaga

SEQ ID NO: 265321 - DNA, 30 bp, Artificial Sequence
  Synthetic oligonucleotide
ctgggtatggcgcttggagactcttagaga

SEQ ID NO: 265322 - DNA, 30 bp, Artificial Sequence
  Synthetic oligonucleotide
taagagtgtcggccttagggcggttagaga

SEQ ID NO: 265323 - DNA, 30 bp, Artificial Sequence
  Synthetic oligonucleotide
atttggaggagagtggctcaagccacgaga

SEQ ID NO: 265324 - DNA, 30 bp, Artificial Sequence
  Synthetic oligonucleotide
tcccagccagagttttgggtaaggacgaga

SEQ ID NO: 265325 - DNA, 30 bp, Artificial Sequence
  Synthetic oligonucleotide
accctgtcaggaaacagttagtggacgaga

SEQ ID NO: 265326 - DNA, 31 bp, Artificial Sequence
  Synthetic oligonucleotide
aaatgcccgttctcttcgttggggaccgaga

SEQ ID NO: 265327 - DNA, 30 bp, Artificial Sequence
  Synthetic oligonucleotide
gagcaccaaattcaaggactggacccgaga

SEQ ID NO: 265328 - DNA, 30 bp, Artificial Sequence
  Synthetic oligonucleotide
gcgcttagagatcagctgctttacccgaga

SEQ ID NO: 265329 - DNA, 30 bp, Artificial Sequence
  Synthetic oligonucleotide
ctatatcgtaagggcacggagatcccgaga

SEQ ID NO: 265330 - DNA, 30 bp, Artificial Sequence
  Synthetic oligonucleotide
ctcgcgaagcgggtaactatgtagccgaga

SEQ ID NO: 265331 - DNA, 30 bp, Artificial Sequence
  Synthetic oligonucleotide
gtcattgctaatatatcagggccgccgaga

SEQ ID NO: 265332 - DNA, 30 bp, Artificial Sequence
  Synthetic oligonucleotide
tgggtaagtgtgtcacattgatcgccgaga

SEQ ID NO: 265333 - DNA, 30 bp, Artificial Sequence
  Synthetic oligonucleotide
tcccgtagagcttttgcaaagtcgccgaga

SEQ ID NO: 265334 - DNA, 30 bp, Artificial Sequence
  Synthetic oligonucleotide
acgcaaatataagatttcacgcggccgaga

SEQ ID NO: 265335 - DNA, 30 bp, Artificial Sequence
  Synthetic oligonucleotide
cgcttgtcgggggtcaactggcggccgaga

SEQ ID NO: 265336 - DNA, 30 bp, Artificial Sequence
  Synthetic oligonucleotide
atgtcctaggctcagaggtttaccgcgaga

SEQ ID NO: 265337 - DNA, 30 bp, Artificial Sequence
  Synthetic oligonucleotide
ataaatgaaaacatcctgcgcgaggcgaga

SEQ ID NO: 265338 - DNA, 30 bp, Artificial Sequence
  Synthetic oligonucleotide
gaagctgataacgttgcagtaagtgcgaga

SEQ ID NO: 265339 - DNA, 30 bp, Artificial Sequence
  Synthetic oligonucleotide
ctacgaatcatttcttagcctagtgcgaga

SEQ ID NO: 265340 - DNA, 30 bp, Artificial Sequence
  Synthetic oligonucleotide
tagcagcgcgacggtaaatcttagtcgaga

SEQ ID NO: 265341 - DNA, 30 bp, Artificial Sequence
  Synthetic oligonucleotide
ttaaacacccttaaacgattggcgtcgaga

SEQ ID NO: 265342 - DNA, 30 bp, Artificial Sequence
  Synthetic oligonucleotide
tggggccttggctctaatcacagttcgaga

SEQ ID NO: 265343 - DNA, 30 bp, Artificial Sequence
  Synthetic oligonucleotide
ggaatccgtaggatgtttgtcagttcgaga

SEQ ID NO: 265344 - DNA, 30 bp, Artificial Sequence
  Synthetic oligonucleotide
ggaactcagtttacaacactgtgttcgaga

SEQ ID NO: 265345 - DNA, 30 bp, Artificial Sequence
  Synthetic oligonucleotide
agttagggtgaggtccgaccatcaaggaga

SEQ ID NO: 265346 - DNA, 30 bp, Artificial Sequence
  Synthetic oligonucleotide
gaggccagttattacaagggtcacaggaga

SEQ ID NO: 265347 - DNA, 30 bp, Artificial Sequence
  Synthetic oligonucleotide
aaaagtcccccacctaagtgctagaggaga

SEQ ID NO: 265348 - DNA, 30 bp, Artificial Sequence
  Synthetic oligonucleotide
ctagaacggggggcataggcgcttaggaga

SEQ ID NO: 265349 - DNA, 30 bp, Artificial Sequence
  Synthetic oligonucleotide
taagaaatcggcccttaaggaaaacggaga

SEQ ID NO: 265350 - DNA, 30 bp, Artificial Sequence
  Synthetic oligonucleotide
gctccgggccaatagatcttttaacggaga

SEQ ID NO: 265351 - DNA, 30 bp, Artificial Sequence
  Synthetic oligonucleotide
gctctacattagttgagaaaactacggaga

SEQ ID NO: 265352 - DNA, 30 bp, Artificial Sequence
  Synthetic oligonucleotide
cggtcgaagctaaagccggtataccggaga

SEQ ID NO: 265353 - DNA, 30 bp, Artificial Sequence
  Synthetic oligonucleotide
taatattcactcgtagttatagagcggaga

SEQ ID NO: 265354 - DNA, 30 bp, Artificial Sequence
  Synthetic oligonucleotide
cgtttagcatatcacgcgcgagcagggaga

SEQ ID NO: 265355 - DNA, 30 bp, Artificial Sequence
  Synthetic oligonucleotide
gtctgaacgttttcgcaagcattagggaga

SEQ ID NO: 265356 - DNA, 30 bp, Artificial Sequence
  Synthetic oligonucleotide
agctggctaataccttggagcatcgggaga

SEQ ID NO: 265357 - DNA, 30 bp, Artificial Sequence
  Synthetic oligonucleotide
agtgacgccggccatgtggcaaaggggaga

SEQ ID NO: 265358 - DNA, 30 bp, Artificial Sequence
  Synthetic oligonucleotide
aagcttttgtaacgagccttggttgggaga

SEQ ID NO: 265359 - DNA, 30 bp, Artificial Sequence
  Synthetic oligonucleotide
ttagaagtacttcaacaatcataatggaga

SEQ ID NO: 265360 - DNA, 30 bp, Artificial Sequence
  Synthetic oligonucleotide
tctgcatggccgattgtctagacatggaga

SEQ ID NO: 265361 - DNA, 30 bp, Artificial Sequence
  Synthetic oligonucleotide
gcgaccggctggctgtagtgctcatggaga

SEQ ID NO: 265362 - DNA, 30 bp, Artificial Sequence
  Synthetic oligonucleotide
gttatgggtccgggttttattcattggaga

SEQ ID NO: 265363 - DNA, 31 bp, Artificial Sequence
  Synthetic oligonucleotide
aatggaccgagcgacgtcatcatgttggaga

SEQ ID NO: 265364 - DNA, 30 bp, Artificial Sequence
  Synthetic oligonucleotide
cggccggtccatggtattgcaatttggaga

SEQ ID NO: 265365 - DNA, 30 bp, Artificial Sequence
  Synthetic oligonucleotide
taatgttgaaagtggtcttagaaaatgaga

SEQ ID NO: 265366 - DNA, 30 bp, Artificial Sequence
  Synthetic oligonucleotide
ttcagggtagaacgttaattgtgcatgaga

SEQ ID NO: 265367 - DNA, 30 bp, Artificial Sequence
  Synthetic oligonucleotide
tgaaattctgggtcccgtatggcgatgaga

SEQ ID NO: 265368 - DNA, 30 bp, Artificial Sequence
  Synthetic oligonucleotide
gtagcttggcaatgttaagctactatgaga

SEQ ID NO: 265369 - DNA, 30 bp, Artificial Sequence
  Synthetic oligonucleotide
cacactaattttttagcaaatcgactgaga

SEQ ID NO: 265370 - DNA, 30 bp, Artificial Sequence
  Synthetic oligonucleotide
tatggatctaagaaatatataggactgaga

SEQ ID NO: 265371 - DNA, 30 bp, Artificial Sequence
  Synthetic oligonucleotide
gcgggcctcaaattacacgcgcacctgaga

SEQ ID NO: 265372 - DNA, 30 bp, Artificial Sequence
  Synthetic oligonucleotide
gctagcaaccagatgttagggtacctgaga

SEQ ID NO: 265373 - DNA, 30 bp, Artificial Sequence
  Synthetic oligonucleotide
ctgttttcaaacgtttccctaaagctgaga

SEQ ID NO: 265374 - DNA, 30 bp, Artificial Sequence
  Synthetic oligonucleotide
tttggattcgttttgaataagaagctgaga

SEQ ID NO: 265375 - DNA, 30 bp, Artificial Sequence
  Synthetic oligonucleotide
ggaacaactctagtgtcggtcattctgaga

SEQ ID NO: 265376 - DNA, 30 bp, Artificial Sequence
  Synthetic oligonucleotide
catattcatgacgaacgtgaggacgtgaga

SEQ ID NO: 265377 - DNA, 30 bp, Artificial Sequence
  Synthetic oligonucleotide
ccgagctacagacagatcgagacggtgaga

SEQ ID NO: 265378 - DNA, 30 bp, Artificial Sequence
  Synthetic oligonucleotide
taatagagcatacggtggtgaccggtgaga

SEQ ID NO: 265379 - DNA, 30 bp, Artificial Sequence
  Synthetic oligonucleotide
tattagctaaataaggccgacagcaataga

SEQ ID NO: 265380 - DNA, 30 bp, Artificial Sequence
  Synthetic oligonucleotide
gatcgcaacagatattcatttcagaataga

SEQ ID NO: 265381 - DNA, 30 bp, Artificial Sequence
  Synthetic oligonucleotide
gtatagtcgtctgccctcgggctgaataga

SEQ ID NO: 265382 - DNA, 30 bp, Artificial Sequence
  Synthetic oligonucleotide
actaaaatcctatttctgtttcaccataga

SEQ ID NO: 265383 - DNA, 30 bp, Artificial Sequence
  Synthetic oligonucleotide
gttgagaaatccccttgcggtggccataga

SEQ ID NO: 265384 - DNA, 30 bp, Artificial Sequence
  Synthetic oligonucleotide
ccgtgtgcttaaacggatgactggcataga

SEQ ID NO: 265385 - DNA, 30 bp, Artificial Sequence
  Synthetic oligonucleotide
gacccgcagacgattctagaactgcataga

SEQ ID NO: 265386 - DNA, 30 bp, Artificial Sequence
  Synthetic oligonucleotide
gggtcgtcatagattggagagtgtcataga

SEQ ID NO: 265387 - DNA, 30 bp, Artificial Sequence
  Synthetic oligonucleotide
gggaccatacgtagtcctatggccgataga

SEQ ID NO: 265388 - DNA, 30 bp, Artificial Sequence
  Synthetic oligonucleotide
ccgagtttaatagcaagatgcggggataga

SEQ ID NO: 265389 - DNA, 30 bp, Artificial Sequence
  Synthetic oligonucleotide
ttcttgggaacgaaacgttgcttggataga

SEQ ID NO: 265390 - DNA, 30 bp, Artificial Sequence
  Synthetic oligonucleotide
atctatgtgacccgaagttcggatgataga

SEQ ID NO: 265391 - DNA, 30 bp, Artificial Sequence
  Synthetic oligonucleotide
atgggttcctgtgtcctacgacgtgataga

SEQ ID NO: 265392 - DNA, 30 bp, Artificial Sequence
  Synthetic oligonucleotide
agattaggcataacctcgagttttgataga

SEQ ID NO: 265393 - DNA, 30 bp, Artificial Sequence
  Synthetic oligonucleotide
acagaattggagcataactccacatataga

SEQ ID NO: 265394 - DNA, 30 bp, Artificial Sequence
  Synthetic oligonucleotide
gtataagatcgtctacatatgggatataga

SEQ ID NO: 265395 - DNA, 30 bp, Artificial Sequence
  Synthetic oligonucleotide
aggcatcttatgactgaccggttatataga

SEQ ID NO: 265396 - DNA, 30 bp, Artificial Sequence
  Synthetic oligonucleotide
gaggcggccatcgctacggagcactataga

SEQ ID NO: 265397 - DNA, 30 bp, Artificial Sequence
  Synthetic oligonucleotide
atcccataatgggtcgcatcctcctataga

SEQ ID NO: 265398 - DNA, 30 bp, Artificial Sequence
  Synthetic oligonucleotide
agcgccctaaacacggtttttctgtataga

SEQ ID NO: 265399 - DNA, 30 bp, Artificial Sequence
  Synthetic oligonucleotide
ctcggaacaccttaggtcaggatttataga

SEQ ID NO: 265400 - DNA, 30 bp, Artificial Sequence
  Synthetic oligonucleotide
accttagggatctagcttaaggtttataga

SEQ ID NO: 265401 - DNA, 30 bp, Artificial Sequence
  Synthetic oligonucleotide
ccacatctgtactcttgtgagtaaactaga

SEQ ID NO: 265402 - DNA, 30 bp, Artificial Sequence
  Synthetic oligonucleotide
cgtcgttcaagggttttaaacgcaactaga

SEQ ID NO: 265403 - DNA, 30 bp, Artificial Sequence
  Synthetic oligonucleotide
gtatcttcatatccatttttctccactaga

SEQ ID NO: 265404 - DNA, 30 bp, Artificial Sequence
  Synthetic oligonucleotide
tgcacatgtgaggagcctgcacagactaga

SEQ ID NO: 265405 - DNA, 30 bp, Artificial Sequence
  Synthetic oligonucleotide
tctcaggaaggttaatatcatgtgactaga

SEQ ID NO: 265406 - DNA, 30 bp, Artificial Sequence
  Synthetic oligonucleotide
tggattcaagtattaatcccctagcctaga

SEQ ID NO: 265407 - DNA, 29 bp, Artificial Sequence
  Synthetic oligonucleotide
aagtccctgagtatagcaagaggcctaga

SEQ ID NO: 265408 - DNA, 30 bp, Artificial Sequence
  Synthetic oligonucleotide
gggccaattacgacctcggtgctgcctaga

SEQ ID NO: 265409 - DNA, 30 bp, Artificial Sequence
  Synthetic oligonucleotide
aacgtagagggctttaatgtgactcctaga

SEQ ID NO: 265410 - DNA, 30 bp, Artificial Sequence
  Synthetic oligonucleotide
atgctattgacgtcttcacctacagctaga

SEQ ID NO: 265411 - DNA, 30 bp, Artificial Sequence
  Synthetic oligonucleotide
cgcgatagtccatcagagtttgacgctaga

SEQ ID NO: 265412 - DNA, 30 bp, Artificial Sequence
  Synthetic oligonucleotide
cggtccttcaagcttcgaaaccccgctaga

SEQ ID NO: 265413 - DNA, 30 bp, Artificial Sequence
  Synthetic oligonucleotide
ggtcttcaccgagatgcatttgtggctaga

SEQ ID NO: 265414 - DNA, 30 bp, Artificial Sequence
  Synthetic oligonucleotide
gatattgcagtattggaagcataatctaga

SEQ ID NO: 265415 - DNA, 30 bp, Artificial Sequence
  Synthetic oligonucleotide
acattggcgccgaacgtacctggatctaga

SEQ ID NO: 265416 - DNA, 30 bp, Artificial Sequence
  Synthetic oligonucleotide
gagtggacgattacggtgttagggtctaga

SEQ ID NO: 265417 - DNA, 30 bp, Artificial Sequence
  Synthetic oligonucleotide
aatccgcgactctcgatggccaattctaga

SEQ ID NO: 265418 - DNA, 30 bp, Artificial Sequence
  Synthetic oligonucleotide
aggtgtgtgcgcgtcacttgccgttctaga

SEQ ID NO: 265419 - DNA, 30 bp, Artificial Sequence
  Synthetic oligonucleotide
tagaagtaagtgcttagttgccgttctaga

SEQ ID NO: 265420 - DNA, 30 bp, Artificial Sequence
  Synthetic oligonucleotide
caccgtgcaggcgattctccccaaagtaga

SEQ ID NO: 265421 - DNA, 30 bp, Artificial Sequence
  Synthetic oligonucleotide
gcatcctagcaaccttacattgtcagtaga

SEQ ID NO: 265422 - DNA, 30 bp, Artificial Sequence
  Synthetic oligonucleotide
gttgtccgttctttcgaatggcagagtaga

SEQ ID NO: 265423 - DNA, 30 bp, Artificial Sequence
  Synthetic oligonucleotide
ggacggatgcagccccgcagtgtgagtaga

SEQ ID NO: 265424 - DNA, 30 bp, Artificial Sequence
  Synthetic oligonucleotide
gcctatgcgaacgtctatcgccatagtaga

SEQ ID NO: 265425 - DNA, 30 bp, Artificial Sequence
  Synthetic oligonucleotide
tcattctgttaaagtcctctaactagtaga

SEQ ID NO: 265426 - DNA, 30 bp, Artificial Sequence
  Synthetic oligonucleotide
actagtcagatagcgctcagatttagtaga

SEQ ID NO: 265427 - DNA, 30 bp, Artificial Sequence
  Synthetic oligonucleotide
ggggggatccttgataagcgaccacgtaga

SEQ ID NO: 265428 - DNA, 30 bp, Artificial Sequence
  Synthetic oligonucleotide
gcagttagttagcaccgtcgcccacgtaga

SEQ ID NO: 265429 - DNA, 30 bp, Artificial Sequence
  Synthetic oligonucleotide
gctggaatccaatcgtatcaattacgtaga

SEQ ID NO: 265430 - DNA, 30 bp, Artificial Sequence
  Synthetic oligonucleotide
ggccagcagaaggacggtggacaccgtaga

SEQ ID NO: 265431 - DNA, 30 bp, Artificial Sequence
  Synthetic oligonucleotide
ggcgttaaatgcaacctctccggtcgtaga

SEQ ID NO: 265432 - DNA, 30 bp, Artificial Sequence
  Synthetic oligonucleotide
atgccaattacttgtctcgctacaggtaga

SEQ ID NO: 265433 - DNA, 30 bp, Artificial Sequence
  Synthetic oligonucleotide
ccctttaataatcctcacgctccaggtaga

SEQ ID NO: 265434 - DNA, 30 bp, Artificial Sequence
  Synthetic oligonucleotide
ttccaggaataacccctcgacataggtaga

SEQ ID NO: 265435 - DNA, 30 bp, Artificial Sequence
  Synthetic oligonucleotide
ggcaccgtaattctgatcggaaagggtaga

SEQ ID NO: 265436 - DNA, 30 bp, Artificial Sequence
  Synthetic oligonucleotide
tggctcttgaacatgttgtatttgggtaga

SEQ ID NO: 265437 - DNA, 30 bp, Artificial Sequence
  Synthetic oligonucleotide
gtcttagtgaatagcatcaacgaatgtaga

SEQ ID NO: 265438 - DNA, 30 bp, Artificial Sequence
  Synthetic oligonucleotide
aggtattggtcacaatgttaccgctgtaga

SEQ ID NO: 265439 - DNA, 30 bp, Artificial Sequence
  Synthetic oligonucleotide
aatgaggcggcgtttgtgatagagtgtaga

SEQ ID NO: 265440 - DNA, 30 bp, Artificial Sequence
  Synthetic oligonucleotide
tagagattgttaaaggagggacggtgtaga

SEQ ID NO: 265441 - DNA, 30 bp, Artificial Sequence
  Synthetic oligonucleotide
agggaacacagtggtgtcagctcttgtaga

SEQ ID NO: 265442 - DNA, 30 bp, Artificial Sequence
  Synthetic oligonucleotide
gcgtcactcgtgtcaagtgaatcaattaga

SEQ ID NO: 265443 - DNA, 30 bp, Artificial Sequence
  Synthetic oligonucleotide
tagagtagaggggtcgatcggaacattaga

SEQ ID NO: 265444 - DNA, 30 bp, Artificial Sequence
  Synthetic oligonucleotide
cgctcaagcttaggtgtttttcacattaga

SEQ ID NO: 265445 - DNA, 30 bp, Artificial Sequence
  Synthetic oligonucleotide
ggcgcctaaacgatgcgcaaacggattaga

SEQ ID NO: 265446 - DNA, 30 bp, Artificial Sequence
  Synthetic oligonucleotide
ggagaagggattgggcaagaatggattaga

SEQ ID NO: 265447 - DNA, 30 bp, Artificial Sequence
  Synthetic oligonucleotide
acagcaagcggtcgatcgcttattattaga

SEQ ID NO: 265448 - DNA, 30 bp, Artificial Sequence
  Synthetic oligonucleotide
ataactcaaagacctcctatggttattaga

SEQ ID NO: 265449 - DNA, 30 bp, Artificial Sequence
  Synthetic oligonucleotide
gctcagcgaattacctccacttaacttaga

SEQ ID NO: 265450 - DNA, 30 bp, Artificial Sequence
  Synthetic oligonucleotide
tagggaaagaccagttatataagacttaga

SEQ ID NO: 265451 - DNA, 30 bp, Artificial Sequence
  Synthetic oligonucleotide
ccccacaggcttgggaaacatggacttaga

SEQ ID NO: 265452 - DNA, 30 bp, Artificial Sequence
  Synthetic oligonucleotide
ccgcagacaaaggggtcccacgggcttaga

SEQ ID NO: 265453 - DNA, 30 bp, Artificial Sequence
  Synthetic oligonucleotide
tgagggtagctcattacatgagaagttaga

SEQ ID NO: 265454 - DNA, 30 bp, Artificial Sequence
  Synthetic oligonucleotide
cttcgatcaagctacgttggcgaagttaga

SEQ ID NO: 265455 - DNA, 30 bp, Artificial Sequence
  Synthetic oligonucleotide
caggccgtctgcccatcattcgtagttaga

SEQ ID NO: 265456 - DNA, 30 bp, Artificial Sequence
  Synthetic oligonucleotide
gagccatagcccgtaagcactgccgttaga

SEQ ID NO: 265457 - DNA, 30 bp, Artificial Sequence
  Synthetic oligonucleotide
ttaggagtgctgtgccggtatatcgttaga

SEQ ID NO: 265458 - DNA, 30 bp, Artificial Sequence
  Synthetic oligonucleotide
gttgcgagtgcagagatacagaaggttaga

SEQ ID NO: 265459 - DNA, 30 bp, Artificial Sequence
  Synthetic oligonucleotide
tcgtaggcgcgttcctattgaccggttaga

SEQ ID NO: 265460 - DNA, 30 bp, Artificial Sequence
  Synthetic oligonucleotide
cggcccgctccgctcattcttccggttaga

SEQ ID NO: 265461 - DNA, 30 bp, Artificial Sequence
  Synthetic oligonucleotide
aggagggtcagatttaaaacggcggttaga

SEQ ID NO: 265462 - DNA, 30 bp, Artificial Sequence
  Synthetic oligonucleotide
ttaatattggaatcaaccttttgggttaga

SEQ ID NO: 265463 - DNA, 30 bp, Artificial Sequence
  Synthetic oligonucleotide
taccgacgagacgaaccagcaatggttaga

SEQ ID NO: 265464 - DNA, 30 bp, Artificial Sequence
  Synthetic oligonucleotide
gatcctgatacgaactccggtgctgttaga

SEQ ID NO: 265465 - DNA, 30 bp, Artificial Sequence
  Synthetic oligonucleotide
caagagcatctgggtgttatcggatttaga

SEQ ID NO: 265466 - DNA, 30 bp, Artificial Sequence
  Synthetic oligonucleotide
gggatctaccaggcttgatttaagtttaga

SEQ ID NO: 265467 - DNA, 30 bp, Artificial Sequence
  Synthetic oligonucleotide
aggtttggaaaaacaattagaacttttaga

SEQ ID NO: 265468 - DNA, 30 bp, Artificial Sequence
  Synthetic oligonucleotide
caagttcaagtcatctggtgaggttttaga

SEQ ID NO: 265469 - DNA, 30 bp, Artificial Sequence
  Synthetic oligonucleotide
ctaataagaccggaatcttccatttttaga

SEQ ID NO: 265470 - DNA, 30 bp, Artificial Sequence
  Synthetic oligonucleotide
ggcagccgggacgtgggcgggagaaaacga

SEQ ID NO: 265471 - DNA, 30 bp, Artificial Sequence
  Synthetic oligonucleotide
atacgtcatttcggcgtgtcaggaaaacga

SEQ ID NO: 265472 - DNA, 30 bp, Artificial Sequence
  Synthetic oligonucleotide
atctaaggtgccgtatcgagggtaaaacga

SEQ ID NO: 265473 - DNA, 30 bp, Artificial Sequence
  Synthetic oligonucleotide
gggttgagcatcggtgagcgctccaaacga

SEQ ID NO: 265474 - DNA, 30 bp, Artificial Sequence
  Synthetic oligonucleotide
agaccgctcgccgtaactttgtccaaacga

SEQ ID NO: 265475 - DNA, 30 bp, Artificial Sequence
  Synthetic oligonucleotide
atgaaagtagcagatttatcactgaaacga

SEQ ID NO: 265476 - DNA, 30 bp, Artificial Sequence
  Synthetic oligonucleotide
caatctctatctttaagaggtctgaaacga

SEQ ID NO: 265477 - DNA, 30 bp, Artificial Sequence
  Synthetic oligonucleotide
tagcaaagtacttatcctatacgtaaacga

SEQ ID NO: 265478 - DNA, 30 bp, Artificial Sequence
  Synthetic oligonucleotide
tgggactttatacttgtgatgcgtaaacga

SEQ ID NO: 265479 - DNA, 30 bp, Artificial Sequence
  Synthetic oligonucleotide
acatagtcgtttccaaaaaatattaaacga

SEQ ID NO: 265480 - DNA, 30 bp, Artificial Sequence
  Synthetic oligonucleotide
attcaaccaggccggtaataagcacaacga

SEQ ID NO: 265481 - DNA, 30 bp, Artificial Sequence
  Synthetic oligonucleotide
actcgtcatataacggaggaaggacaacga

SEQ ID NO: 265482 - DNA, 30 bp, Artificial Sequence
  Synthetic oligonucleotide
gggatgacaaggtgtaagcctctacaacga

SEQ ID NO: 265483 - DNA, 30 bp, Artificial Sequence
  Synthetic oligonucleotide
gcagtaacccgccgaacgcgcagccaacga

SEQ ID NO: 265484 - DNA, 30 bp, Artificial Sequence
  Synthetic oligonucleotide
tatgattgggttggtcactcagcgcaacga

SEQ ID NO: 265485 - DNA, 30 bp, Artificial Sequence
  Synthetic oligonucleotide
gcatgtaccgtgcgtaggtcccctcaacga

SEQ ID NO: 265486 - DNA, 30 bp, Artificial Sequence
  Synthetic oligonucleotide
gtcttgggtggtgacaatatcaaagaacga

SEQ ID NO: 265487 - DNA, 30 bp, Artificial Sequence
  Synthetic oligonucleotide
tccgataaagacttaagtctcgacgaacga

SEQ ID NO: 265488 - DNA, 30 bp, Artificial Sequence
  Synthetic oligonucleotide
acggttgagccacttgtggcagaataacga

SEQ ID NO: 265489 - DNA, 30 bp, Artificial Sequence
  Synthetic oligonucleotide
tgaaacagggttagaacgcatgcctaacga

SEQ ID NO: 265490 - DNA, 30 bp, Artificial Sequence
  Synthetic oligonucleotide
actctcaggggtcagcaatggcagtaacga

SEQ ID NO: 265491 - DNA, 30 bp, Artificial Sequence
  Synthetic oligonucleotide
gttgtccaggttgtagatttatcgtaacga

SEQ ID NO: 265492 - DNA, 30 bp, Artificial Sequence
  Synthetic oligonucleotide
gctatcgcatggtggttagtattttaacga

SEQ ID NO: 265493 - DNA, 30 bp, Artificial Sequence
  Synthetic oligonucleotide
acgagaaacgatcatcatggaacaacacga

SEQ ID NO: 265494 - DNA, 30 bp, Artificial Sequence
  Synthetic oligonucleotide
aaagaccggacctcatttgtgtgaacacga

SEQ ID NO: 265495 - DNA, 30 bp, Artificial Sequence
  Synthetic oligonucleotide
acttatggtctgcaaccgatttagacacga

SEQ ID NO: 265496 - DNA, 30 bp, Artificial Sequence
  Synthetic oligonucleotide
tagaatcgcagaggatttaactttacacga

SEQ ID NO: 265497 - DNA, 30 bp, Artificial Sequence
  Synthetic oligonucleotide
agacccgtagggtagtaaatttttacacga

SEQ ID NO: 265498 - DNA, 30 bp, Artificial Sequence
  Synthetic oligonucleotide
cgcggaaaaggggctgcctgtaccccacga

SEQ ID NO: 265499 - DNA, 30 bp, Artificial Sequence
  Synthetic oligonucleotide
tgaagactgactccacggacggccccacga

SEQ ID NO: 265500 - DNA, 30 bp, Artificial Sequence
  Synthetic oligonucleotide
ggagagttactaacctgtggtagagcacga

SEQ ID NO: 265501 - DNA, 30 bp, Artificial Sequence
  Synthetic oligonucleotide
accacgggttgccaagtttgtggagcacga

SEQ ID NO: 265502 - DNA, 30 bp, Artificial Sequence
  Synthetic oligonucleotide
cctcatataggcttgtgcagtagcgcacga

SEQ ID NO: 265503 - DNA, 30 bp, Artificial Sequence
  Synthetic oligonucleotide
caagtctatcgggtatggggaatcgcacga

SEQ ID NO: 265504 - DNA, 30 bp, Artificial Sequence
  Synthetic oligonucleotide
aagggcaagtcggatgggatcgcggcacga

SEQ ID NO: 265505 - DNA, 30 bp, Artificial Sequence
  Synthetic oligonucleotide
gagagggggtagcaataagtgcctgcacga

SEQ ID NO: 265506 - DNA, 30 bp, Artificial Sequence
  Synthetic oligonucleotide
agcttaatgatgacgaggctcctatcacga

SEQ ID NO: 265507 - DNA, 30 bp, Artificial Sequence
  Synthetic oligonucleotide
catagtgaggttcaacaagggccctcacga

SEQ ID NO: 265508 - DNA, 30 bp, Artificial Sequence
  Synthetic oligonucleotide
tccgtacatcgaagttcaggctcctcacga

SEQ ID NO: 265509 - DNA, 30 bp, Artificial Sequence
  Synthetic oligonucleotide
ttgttagcttggcagttcgcaagctcacga

SEQ ID NO: 265510 - DNA, 30 bp, Artificial Sequence
  Synthetic oligonucleotide
ggagtgctagtcaacgtggaccgttcacga

SEQ ID NO: 265511 - DNA, 30 bp, Artificial Sequence
  Synthetic oligonucleotide
ttaattgtttgggcccagacagtaagacga

SEQ ID NO: 265512 - DNA, 30 bp, Artificial Sequence
  Synthetic oligonucleotide
acacaaaattatgcgtgaagggccagacga

SEQ ID NO: 265513 - DNA, 31 bp, Artificial Sequence
  Synthetic oligonucleotide
aagccggaattgtgacggatctcgcagacga

SEQ ID NO: 265514 - DNA, 30 bp, Artificial Sequence
  Synthetic oligonucleotide
catatttcatgctggatgggggtcagacga

SEQ ID NO: 265515 - DNA, 30 bp, Artificial Sequence
  Synthetic oligonucleotide
gttcaattttacagtacaccaacgagacga

SEQ ID NO: 265516 - DNA, 30 bp, Artificial Sequence
  Synthetic oligonucleotide
taaagataaagtcatattaaaatgagacga

SEQ ID NO: 265517 - DNA, 30 bp, Artificial Sequence
  Synthetic oligonucleotide
tttctcaccgaatgtctggaaactagacga

SEQ ID NO: 265518 - DNA, 30 bp, Artificial Sequence
  Synthetic oligonucleotide
ggacagttcgaccaaatcgtcgaacgacga

SEQ ID NO: 265519 - DNA, 30 bp, Artificial Sequence
  Synthetic oligonucleotide
taacgcttttgtcgagcataaagacgacga

SEQ ID NO: 265520 - DNA, 30 bp, Artificial Sequence
  Synthetic oligonucleotide
tatatccagtcaactgtggcctgccgacga

SEQ ID NO: 265521 - DNA, 30 bp, Artificial Sequence
  Synthetic oligonucleotide
ggcgtgtcattgccgagacgaatccgacga

SEQ ID NO: 265522 - DNA, 30 bp, Artificial Sequence
  Synthetic oligonucleotide
aggaaatctggtttaaaacaatgaggacga

SEQ ID NO: 265523 - DNA, 30 bp, Artificial Sequence
  Synthetic oligonucleotide
acgtttccgacttgaacggattacggacga

SEQ ID NO: 265524 - DNA, 30 bp, Artificial Sequence
  Synthetic oligonucleotide
ggacacctcacttctgcccaaatgggacga

SEQ ID NO: 265525 - DNA, 30 bp, Artificial Sequence
  Synthetic oligonucleotide
gtggttccgagatattacatacatggacga

SEQ ID NO: 265526 - DNA, 30 bp, Artificial Sequence
  Synthetic oligonucleotide
caagagctattctaatgacgcgatggacga

SEQ ID NO: 265527 - DNA, 30 bp, Artificial Sequence
  Synthetic oligonucleotide
aggcaaggcatggtaaatggcacatgacga

SEQ ID NO: 265528 - DNA, 30 bp, Artificial Sequence
  Synthetic oligonucleotide
caattcgttattttatgaatcgtatgacga

SEQ ID NO: 265529 - DNA, 30 bp, Artificial Sequence
  Synthetic oligonucleotide
gttaccatatgtcattcaaaaggctgacga

SEQ ID NO: 265530 - DNA, 30 bp, Artificial Sequence
  Synthetic oligonucleotide
tgtctactgggccttaataaatggtgacga

SEQ ID NO: 265531 - DNA, 30 bp, Artificial Sequence
  Synthetic oligonucleotide
atgtctcaattgtcggttgacaaaatacga

SEQ ID NO: 265532 - DNA, 30 bp, Artificial Sequence
  Synthetic oligonucleotide
aataaggtagcttcaatgctgcggatacga

SEQ ID NO: 265533 - DNA, 30 bp, Artificial Sequence
  Synthetic oligonucleotide
tctcgcttgtatagagtgattttgatacga

SEQ ID NO: 265534 - DNA, 30 bp, Artificial Sequence
  Synthetic oligonucleotide
agatgtatcgtcactccagaaaatatacga

SEQ ID NO: 265535 - DNA, 30 bp, Artificial Sequence
  Synthetic oligonucleotide
gcccgtccccgagagttgacatatatacga

SEQ ID NO: 265536 - DNA, 30 bp, Artificial Sequence
  Synthetic oligonucleotide
tgtattatcgcccctttctggcaactacga

SEQ ID NO: 265537 - DNA, 30 bp, Artificial Sequence
  Synthetic oligonucleotide
tgatcgattaagaattatgtaaggctacga

SEQ ID NO: 265538 - DNA, 30 bp, Artificial Sequence
  Synthetic oligonucleotide
ctgagagggacttagattggggatctacga

SEQ ID NO: 265539 - DNA, 30 bp, Artificial Sequence
  Synthetic oligonucleotide
taggatacggccatgatcgtaattctacga

SEQ ID NO: 265540 - DNA, 30 bp, Artificial Sequence
  Synthetic oligonucleotide
ggtactgggttctgtcctatcattctacga

SEQ ID NO: 265541 - DNA, 30 bp, Artificial Sequence
  Synthetic oligonucleotide
gataagtggtccgattcgtgcatagtacga

SEQ ID NO: 265542 - DNA, 30 bp, Artificial Sequence
  Synthetic oligonucleotide
acccacgagaactccgcttcaggcgtacga

SEQ ID NO: 265543 - DNA, 30 bp, Artificial Sequence
  Synthetic oligonucleotide
tggtcaggccccgctgcacattgcgtacga

SEQ ID NO: 265544 - DNA, 30 bp, Artificial Sequence
  Synthetic oligonucleotide
actcggctgcgttgcctgcgacaggtacga

SEQ ID NO: 265545 - DNA, 30 bp, Artificial Sequence
  Synthetic oligonucleotide
gtctatagttaccagtcgggcccggtacga

SEQ ID NO: 265546 - DNA, 30 bp, Artificial Sequence
  Synthetic oligonucleotide
tgtcgggactccagcgaggacttggtacga

SEQ ID NO: 265547 - DNA, 30 bp, Artificial Sequence
  Synthetic oligonucleotide
taggtgttcgagagtatgtcttgtgtacga

SEQ ID NO: 265548 - DNA, 30 bp, Artificial Sequence
  Synthetic oligonucleotide
ggtccttcgcagcgaagagagcaattacga

SEQ ID NO: 265549 - DNA, 30 bp, Artificial Sequence
  Synthetic oligonucleotide
aagatagccgtgtgatacacggaattacga

SEQ ID NO: 265550 - DNA, 30 bp, Artificial Sequence
  Synthetic oligonucleotide
cactgctttactattgtggcacacttacga

SEQ ID NO: 265551 - DNA, 30 bp, Artificial Sequence
  Synthetic oligonucleotide
ggagagcttaccctggcgggagatttacga

SEQ ID NO: 265552 - DNA, 30 bp, Artificial Sequence
  Synthetic oligonucleotide
tttcaacgctactttaaccaggcaaaccga

SEQ ID NO: 265553 - DNA, 30 bp, Artificial Sequence
  Synthetic oligonucleotide
gtcatgctctgtcaagaattgtgaaaccga

SEQ ID NO: 265554 - DNA, 30 bp, Artificial Sequence
  Synthetic oligonucleotide
tgactcagaggaaatcattgtgataaccga

SEQ ID NO: 265555 - DNA, 30 bp, Artificial Sequence
  Synthetic oligonucleotide
cacggcattggagaacagcgcggtaaccga

SEQ ID NO: 265556 - DNA, 30 bp, Artificial Sequence
  Synthetic oligonucleotide
gttgacgtgtcgtagagtcagtgtaaccga

SEQ ID NO: 265557 - DNA, 30 bp, Artificial Sequence
  Synthetic oligonucleotide
tgccggcgtcagctgagttgatttaaccga

SEQ ID NO: 265558 - DNA, 30 bp, Artificial Sequence
  Synthetic oligonucleotide
agtgttcgccgcccaacgccaaaacaccga

SEQ ID NO: 265559 - DNA, 30 bp, Artificial Sequence
  Synthetic oligonucleotide
gtaagcgtataccaggactcatcacaccga

SEQ ID NO: 265560 - DNA, 30 bp, Artificial Sequence
  Synthetic oligonucleotide
taatgcataggttacctagagtcccaccga

SEQ ID NO: 265561 - DNA, 28 bp, Artificial Sequence
  Synthetic oligonucleotide
ggtggcgctggcttcaaaggtccaccga

SEQ ID NO: 265562 - DNA, 30 bp, Artificial Sequence
  Synthetic oligonucleotide
ccgagtatggcgcgttcgtggacgcaccga

SEQ ID NO: 265563 - DNA, 30 bp, Artificial Sequence
  Synthetic oligonucleotide
tccgagaattcgggcgctggttggcaccga

SEQ ID NO: 265564 - DNA, 30 bp, Artificial Sequence
  Synthetic oligonucleotide
gcgcaccaaatcccttcgttcgtgcaccga

SEQ ID NO: 265565 - DNA, 30 bp, Artificial Sequence
  Synthetic oligonucleotide
atgaattgcgttaatgatggttaagaccga

SEQ ID NO: 265566 - DNA, 30 bp, Artificial Sequence
  Synthetic oligonucleotide
ctagcgcgcgggtcgttaggtatcgaccga

SEQ ID NO: 265567 - DNA, 30 bp, Artificial Sequence
  Synthetic oligonucleotide
tgggctataaccgtgggacaccgtgaccga

SEQ ID NO: 265568 - DNA, 30 bp, Artificial Sequence
  Synthetic oligonucleotide
acgcactcgtcctaccaatacggataccga

SEQ ID NO: 265569 - DNA, 30 bp, Artificial Sequence
  Synthetic oligonucleotide
gttatgaccaaaagcacgactaactaccga

SEQ ID NO: 265570 - DNA, 30 bp, Artificial Sequence
  Synthetic oligonucleotide
atgccaggttgaacagtaccttcgtaccga

SEQ ID NO: 265571 - DNA, 30 bp, Artificial Sequence
  Synthetic oligonucleotide
aacacgtccggcacatggacttcttaccga

SEQ ID NO: 265572 - DNA, 30 bp, Artificial Sequence
  Synthetic oligonucleotide
tttcggatcgtcttcaagcagggaacccga

SEQ ID NO: 265573 - DNA, 30 bp, Artificial Sequence
  Synthetic oligonucleotide
tccgggaaagtgatcgccatattaacccga

SEQ ID NO: 265574 - DNA, 30 bp, Artificial Sequence
  Synthetic oligonucleotide
tgccgctccttagaaatcaaggacacccga

SEQ ID NO: 265575 - DNA, 30 bp, Artificial Sequence
  Synthetic oligonucleotide
atcacttaagtgtggtatcaccgcacccga

SEQ ID NO: 265576 - DNA, 30 bp, Artificial Sequence
  Synthetic oligonucleotide
gtgatggcttatatgcgaaccggcacccga

SEQ ID NO: 265577 - DNA, 30 bp, Artificial Sequence
  Synthetic oligonucleotide
acggacacaggtacgcaacagcttacccga

SEQ ID NO: 265578 - DNA, 30 bp, Artificial Sequence
  Synthetic oligonucleotide
gcgagtacggacgggggaacggcagcccga

SEQ ID NO: 265579 - DNA, 30 bp, Artificial Sequence
  Synthetic oligonucleotide
aaggaagccggcggtgattaacaggcccga

SEQ ID NO: 265580 - DNA, 30 bp, Artificial Sequence
  Synthetic oligonucleotide
cgaactcgtctgcacgtgccaggggcccga

SEQ ID NO: 265581 - DNA, 30 bp, Artificial Sequence
  Synthetic oligonucleotide
ttacacaagtaatatgggagatttgcccga

SEQ ID NO: 265582 - DNA, 30 bp, Artificial Sequence
  Synthetic oligonucleotide
gtttagtgtagatccggacagtttgcccga

SEQ ID NO: 265583 - DNA, 30 bp, Artificial Sequence
  Synthetic oligonucleotide
gttggagccttgaaatgcgggccctcccga

SEQ ID NO: 265584 - DNA, 30 bp, Artificial Sequence
  Synthetic oligonucleotide
tcgtgacgttaaagcgcccgaggctcccga

SEQ ID NO: 265585 - DNA, 30 bp, Artificial Sequence
  Synthetic oligonucleotide
gatcgacttaagatggacgatacaagccga

SEQ ID NO: 265586 - DNA, 30 bp, Artificial Sequence
  Synthetic oligonucleotide
tcgcaaatactgtgtcaataacgacgccga

SEQ ID NO: 265587 - DNA, 30 bp, Artificial Sequence
  Synthetic oligonucleotide
aggttgtccgttttatggtcttagcgccga

SEQ ID NO: 265588 - DNA, 30 bp, Artificial Sequence
  Synthetic oligonucleotide
gcgtatattaaacatctagaaccaggccga

SEQ ID NO: 265589 - DNA, 30 bp, Artificial Sequence
  Synthetic oligonucleotide
ccctgggcacactcgaagttgccaggccga

SEQ ID NO: 265590 - DNA, 30 bp, Artificial Sequence
  Synthetic oligonucleotide
tcggttacctcgtgccgaagtggaggccga

SEQ ID NO: 265591 - DNA, 30 bp, Artificial Sequence
  Synthetic oligonucleotide
tagaaccaaacagggttgattctgggccga

SEQ ID NO: 265592 - DNA, 30 bp, Artificial Sequence
  Synthetic oligonucleotide
catttcgtaaaagcgcattcctgtggccga

SEQ ID NO: 265593 - DNA, 30 bp, Artificial Sequence
  Synthetic oligonucleotide
aagatgactgggtgtctgtaaccctgccga

SEQ ID NO: 265594 - DNA, 30 bp, Artificial Sequence
  Synthetic oligonucleotide
ggataacagtatctgcatgtctgttgccga

SEQ ID NO: 265595 - DNA, 30 bp, Artificial Sequence
  Synthetic oligonucleotide
aaaatgagctacgatgactgtgcaatccga

SEQ ID NO: 265596 - DNA, 30 bp, Artificial Sequence
  Synthetic oligonucleotide
gtcctcacgtcgacttaagcgaagatccga

SEQ ID NO: 265597 - DNA, 30 bp, Artificial Sequence
  Synthetic oligonucleotide
cgatcgttaaattaatccgggcggatccga

SEQ ID NO: 265598 - DNA, 30 bp, Artificial Sequence
  Synthetic oligonucleotide
atatatcagaattggatgatgcggatccga

SEQ ID NO: 265599 - DNA, 30 bp, Artificial Sequence
  Synthetic oligonucleotide
attatcgaatcaatggcacttcttatccga

SEQ ID NO: 265600 - DNA, 30 bp, Artificial Sequence
  Synthetic oligonucleotide
atagcggtcatctgccataaagcgctccga

SEQ ID NO: 265601 - DNA, 30 bp, Artificial Sequence
  Synthetic oligonucleotide
gactcgtaacaagcaggtctatttctccga

SEQ ID NO: 265602 - DNA, 30 bp, Artificial Sequence
  Synthetic oligonucleotide
aaagtgggagctcttcaggcatcagtccga

SEQ ID NO: 265603 - DNA, 30 bp, Artificial Sequence
  Synthetic oligonucleotide
gcatgtacgacgatgctgtatatagtccga

SEQ ID NO: 265604 - DNA, 30 bp, Artificial Sequence
  Synthetic oligonucleotide
gcgaggacctggtaaaagtttaacgtccga

SEQ ID NO: 265605 - DNA, 30 bp, Artificial Sequence
  Synthetic oligonucleotide
aggcccagatcacttggttgccgcgtccga

SEQ ID NO: 265606 - DNA, 30 bp, Artificial Sequence
  Synthetic oligonucleotide
tctatgatgatacgtcatgatcaggtccga

SEQ ID NO: 265607 - DNA, 30 bp, Artificial Sequence
  Synthetic oligonucleotide
gcctgttggcaaccggcgggtactgtccga

SEQ ID NO: 265608 - DNA, 30 bp, Artificial Sequence
  Synthetic oligonucleotide
aatgaatacgctatgttagctttattccga

SEQ ID NO: 265609 - DNA, 30 bp, Artificial Sequence
  Synthetic oligonucleotide
ggagtccagcctgagatggtatacttccga

SEQ ID NO: 265610 - DNA, 30 bp, Artificial Sequence
  Synthetic oligonucleotide
aatctactggacggccagtagtagttccga

SEQ ID NO: 265611 - DNA, 30 bp, Artificial Sequence
  Synthetic oligonucleotide
gctcgatacgaaggtcgaaggactttccga

SEQ ID NO: 265612 - DNA, 30 bp, Artificial Sequence
  Synthetic oligonucleotide
aaccgcactgtcagaaacgcgataaagcga

SEQ ID NO: 265613 - DNA, 30 bp, Artificial Sequence
  Synthetic oligonucleotide
tctttcttgcatccgcacgaccacaagcga

SEQ ID NO: 265614 - DNA, 30 bp, Artificial Sequence
  Synthetic oligonucleotide
taactagtgcagcccagattagacaagcga

SEQ ID NO: 265615 - DNA, 30 bp, Artificial Sequence
  Synthetic oligonucleotide
atatgttaatgtatgcgcctaaggaagcga

SEQ ID NO: 265616 - DNA, 30 bp, Artificial Sequence
  Synthetic oligonucleotide
atccagagtatgggtacacgccataagcga

SEQ ID NO: 265617 - DNA, 30 bp, Artificial Sequence
  Synthetic oligonucleotide
aatgggggtgagaatcaaaccgttaagcga

SEQ ID NO: 265618 - DNA, 30 bp, Artificial Sequence
  Synthetic oligonucleotide
tggtatcccacctgcttttggtgacagcga

SEQ ID NO: 265619 - DNA, 30 bp, Artificial Sequence
  Synthetic oligonucleotide
tccctaaatcgtaggcatttgcgccagcga

SEQ ID NO: 265620 - DNA, 30 bp, Artificial Sequence
  Synthetic oligonucleotide
ggggctaatcaaacgtgccactggcagcga

SEQ ID NO: 265621 - DNA, 30 bp, Artificial Sequence
  Synthetic oligonucleotide
ttggagagactagactcaacacctcagcga

SEQ ID NO: 265622 - DNA, 30 bp, Artificial Sequence
  Synthetic oligonucleotide
gttgcggcaaacacgtgggtaattcagcga

SEQ ID NO: 265623 - DNA, 30 bp, Artificial Sequence
  Synthetic oligonucleotide
ccagtatgatcaagtcaagaacgcgagcga

SEQ ID NO: 265624 - DNA, 30 bp, Artificial Sequence
  Synthetic oligonucleotide
aaaacgttgtccagatataagagggagcga

SEQ ID NO: 265625 - DNA, 30 bp, Artificial Sequence
  Synthetic oligonucleotide
tcattctataaccgtggaaaaaaatagcga

SEQ ID NO: 265626 - DNA, 30 bp, Artificial Sequence
  Synthetic oligonucleotide
tatgatgctcttctttaggtgggatagcga

SEQ ID NO: 265627 - DNA, 30 bp, Artificial Sequence
  Synthetic oligonucleotide
ttcaagcttagagcttttcaactatagcga

SEQ ID NO: 265628 - DNA, 30 bp, Artificial Sequence
  Synthetic oligonucleotide
gaattagtgggcaaaaaaccagtatagcga

SEQ ID NO: 265629 - DNA, 30 bp, Artificial Sequence
  Synthetic oligonucleotide
gaagcgaaattttgaaaaaggttctagcga

SEQ ID NO: 265630 - DNA, 30 bp, Artificial Sequence
  Synthetic oligonucleotide
aattctgcattagagcatcacacgtagcga

SEQ ID NO: 265631 - DNA, 30 bp, Artificial Sequence
  Synthetic oligonucleotide
ttaagtattaatgaaggtaatctttagcga

SEQ ID NO: 265632 - DNA, 30 bp, Artificial Sequence
  Synthetic oligonucleotide
ctttgttggtcagagagctttgacacgcga

SEQ ID NO: 265633 - DNA, 30 bp, Artificial Sequence
  Synthetic oligonucleotide
ggcgtaaggttccggcaggtgaccacgcga

SEQ ID NO: 265634 - DNA, 30 bp, Artificial Sequence
  Synthetic oligonucleotide
gtgagagagttttgaataacggtcacgcga

SEQ ID NO: 265635 - DNA, 30 bp, Artificial Sequence
  Synthetic oligonucleotide
cacctacatgtcgccgatcatttcacgcga

SEQ ID NO: 265636 - DNA, 30 bp, Artificial Sequence
  Synthetic oligonucleotide
cttcatccggtgatgatgtgctggacgcga

SEQ ID NO: 265637 - DNA, 30 bp, Artificial Sequence
  Synthetic oligonucleotide
gttggcgctgtcagacagccacctacgcga

SEQ ID NO: 265638 - DNA, 30 bp, Artificial Sequence
  Synthetic oligonucleotide
gctggcttacgccgaagatccgctacgcga

SEQ ID NO: 265639 - DNA, 30 bp, Artificial Sequence
  Synthetic oligonucleotide
tggcgggattttgaccgtcctgcaccgcga

SEQ ID NO: 265640 - DNA, 30 bp, Artificial Sequence
  Synthetic oligonucleotide
acgggatcatgtaagcttaaaggaccgcga

SEQ ID NO: 265641 - DNA, 30 bp, Artificial Sequence
  Synthetic oligonucleotide
ctcgttcggcggatggacagaagcccgcga

SEQ ID NO: 265642 - DNA, 30 bp, Artificial Sequence
  Synthetic oligonucleotide
gcaaaacagtagtccggggagttcccgcga

SEQ ID NO: 265643 - DNA, 30 bp, Artificial Sequence
  Synthetic oligonucleotide
gctgatcgtacagtgaggtttcgagcgcga

SEQ ID NO: 265644 - DNA, 30 bp, Artificial Sequence
  Synthetic oligonucleotide
tacacgaggagaaaggcatctgtatcgcga

SEQ ID NO: 265645 - DNA, 30 bp, Artificial Sequence
  Synthetic oligonucleotide
gaccaggagagcagtcgttatgtctcgcga

SEQ ID NO: 265646 - DNA, 30 bp, Artificial Sequence
  Synthetic oligonucleotide
gcctgaaactagccccatgagaagtcgcga

SEQ ID NO: 265647 - DNA, 30 bp, Artificial Sequence
  Synthetic oligonucleotide
ggctgtatgtagtccagcgatccgtcgcga

SEQ ID NO: 265648 - DNA, 30 bp, Artificial Sequence
  Synthetic oligonucleotide
tagtgatgtgaaatgagtaaggtaaggcga

SEQ ID NO: 265649 - DNA, 30 bp, Artificial Sequence
  Synthetic oligonucleotide
taggcgtagcctaagtcatagatcaggcga

SEQ ID NO: 265650 - DNA, 30 bp, Artificial Sequence
  Synthetic oligonucleotide
aatcgcgaagctgtgtcattagtcaggcga

SEQ ID NO: 265651 - DNA, 30 bp, Artificial Sequence
  Synthetic oligonucleotide
gaccactattctttatgcatacctaggcga

SEQ ID NO: 265652 - DNA, 30 bp, Artificial Sequence
  Synthetic oligonucleotide
aggctaaatggcgaggggagttttaggcga

SEQ ID NO: 265653 - DNA, 30 bp, Artificial Sequence
  Synthetic oligonucleotide
ttcaactacctgagtcgggggagccggcga

SEQ ID NO: 265654 - DNA, 30 bp, Artificial Sequence
  Synthetic oligonucleotide
taacaaccggcgtgccgcaatgcagggcga

SEQ ID NO: 265655 - DNA, 30 bp, Artificial Sequence
  Synthetic oligonucleotide
cggatatggatcatgtgacggttagggcga

SEQ ID NO: 265656 - DNA, 30 bp, Artificial Sequence
  Synthetic oligonucleotide
gtagtacgcttcacagttagggccgggcga

SEQ ID NO: 265657 - DNA, 30 bp, Artificial Sequence
  Synthetic oligonucleotide
caggggcggagcgtgccaagctccgggcga

SEQ ID NO: 265658 - DNA, 30 bp, Artificial Sequence
  Synthetic oligonucleotide
ggtacttcaattgataataacatcgggcga

SEQ ID NO: 265659 - DNA, 30 bp, Artificial Sequence
  Synthetic oligonucleotide
tgtctgggactggaagggaccgaggggcga

SEQ ID NO: 265660 - DNA, 30 bp, Artificial Sequence
  Synthetic oligonucleotide
ggatcacttcctcgtccgcccaatgggcga

SEQ ID NO: 265661 - DNA, 30 bp, Artificial Sequence
  Synthetic oligonucleotide
tcacctgtacgggtcctgattaatgggcga

SEQ ID NO: 265662 - DNA, 30 bp, Artificial Sequence
  Synthetic oligonucleotide
ggaacatcatatacgcccgtgcttgggcga

SEQ ID NO: 265663 - DNA, 30 bp, Artificial Sequence
  Synthetic oligonucleotide
gaactccattgtgcaacctgatcatggcga

SEQ ID NO: 265664 - DNA, 30 bp, Artificial Sequence
  Synthetic oligonucleotide
tagttgatatgtgtttttcgcatatggcga

SEQ ID NO: 265665 - DNA, 30 bp, Artificial Sequence
  Synthetic oligonucleotide
tttgagaaggttgctgagtaggtatggcga

SEQ ID NO: 265666 - DNA, 27 bp, Artificial Sequence
  Synthetic oligonucleotide
tggtggcaatctggtacggcctggcga

SEQ ID NO: 265667 - DNA, 30 bp, Artificial Sequence
  Synthetic oligonucleotide
cgataggatgttctcgtctagacgtggcga

SEQ ID NO: 265668 - DNA, 30 bp, Artificial Sequence
  Synthetic oligonucleotide
ttaagagagagcaaagtcatcgcgtggcga

SEQ ID NO: 265669 - DNA, 30 bp, Artificial Sequence
  Synthetic oligonucleotide
aagtggtttggtcttaatgtatggtggcga

SEQ ID NO: 265670 - DNA, 28 bp, Artificial Sequence
  Synthetic oligonucleotide
ggaatccgtcgagcactctcattggcga

SEQ ID NO: 265671 - DNA, 29 bp, Artificial Sequence
  Synthetic oligonucleotide
agtgccccgaattccaaatgtgcatgcga

SEQ ID NO: 265672 - DNA, 30 bp, Artificial Sequence
  Synthetic oligonucleotide
atccaataaggactattgaagtggatgcga

SEQ ID NO: 265673 - DNA, 30 bp, Artificial Sequence
  Synthetic oligonucleotide
cttgattgaatttccctatatgctatgcga

SEQ ID NO: 265674 - DNA, 30 bp, Artificial Sequence
  Synthetic oligonucleotide
ggaaagtattgacaatgtgaaaggctgcga

SEQ ID NO: 265675 - DNA, 30 bp, Artificial Sequence
  Synthetic oligonucleotide
tggagtccatgcgacctggagaggctgcga

SEQ ID NO: 265676 - DNA, 30 bp, Artificial Sequence
  Synthetic oligonucleotide
ccccggcattgaccataggcactgctgcga

SEQ ID NO: 265677 - DNA, 30 bp, Artificial Sequence
  Synthetic oligonucleotide
atccgagattcacgcgcaccccaagtgcga

SEQ ID NO: 265678 - DNA, 30 bp, Artificial Sequence
  Synthetic oligonucleotide
aatcgcacttgagctccctatacagtgcga

SEQ ID NO: 265679 - DNA, 30 bp, Artificial Sequence
  Synthetic oligonucleotide
tagagtcaccattttaaaatcacattgcga

SEQ ID NO: 265680 - DNA, 30 bp, Artificial Sequence
  Synthetic oligonucleotide
ccgatttccgggaattcatctacattgcga

SEQ ID NO: 265681 - DNA, 30 bp, Artificial Sequence
  Synthetic oligonucleotide
ctattacaaggtagtgtaataaacttgcga

SEQ ID NO: 265682 - DNA, 30 bp, Artificial Sequence
  Synthetic oligonucleotide
cctccgggtttccaagcacagcacttgcga

SEQ ID NO: 265683 - DNA, 30 bp, Artificial Sequence
  Synthetic oligonucleotide
catctcggtggttaggcgggatggttgcga

SEQ ID NO: 265684 - DNA, 30 bp, Artificial Sequence
  Synthetic oligonucleotide
tcttggatggacttgcaccgtatgttgcga

SEQ ID NO: 265685 - DNA, 30 bp, Artificial Sequence
  Synthetic oligonucleotide
ttagtcttgaggcactgttacactttgcga

SEQ ID NO: 265686 - DNA, 30 bp, Artificial Sequence
  Synthetic oligonucleotide
cgggattgccaacgattaccgcaaaatcga

SEQ ID NO: 265687 - DNA, 30 bp, Artificial Sequence
  Synthetic oligonucleotide
catatttctgcgaagccttctctaaatcga

SEQ ID NO: 265688 - DNA, 30 bp, Artificial Sequence
  Synthetic oligonucleotide
ttgaccaggagagcgagggatgtcaatcga

SEQ ID NO: 265689 - DNA, 30 bp, Artificial Sequence
  Synthetic oligonucleotide
caccttgtccttgagtaggcaacgaatcga

SEQ ID NO: 265690 - DNA, 30 bp, Artificial Sequence
  Synthetic oligonucleotide
tctgataagggtcgtgatttaagtaatcga

SEQ ID NO: 265691 - DNA, 31 bp, Artificial Sequence
  Synthetic oligonucleotide
acagatccaccacaagcctcacgcacatcga

SEQ ID NO: 265692 - DNA, 30 bp, Artificial Sequence
  Synthetic oligonucleotide
ttatccgtgcttgaaaagtatctacatcga

SEQ ID NO: 265693 - DNA, 30 bp, Artificial Sequence
  Synthetic oligonucleotide
agcagtaaacagcacctcatcctccatcga

SEQ ID NO: 265694 - DNA, 30 bp, Artificial Sequence
  Synthetic oligonucleotide
ttcaacaacggcccattatcggtgcatcga

SEQ ID NO: 265695 - DNA, 30 bp, Artificial Sequence
  Synthetic oligonucleotide
catgtgcgcacgcatccaccctatcatcga

SEQ ID NO: 265696 - DNA, 30 bp, Artificial Sequence
  Synthetic oligonucleotide
ggatacaaccgacggcagccagttcatcga

SEQ ID NO: 265697 - DNA, 30 bp, Artificial Sequence
  Synthetic oligonucleotide
tgacttgcgttaggtgtaacacgagatcga

SEQ ID NO: 265698 - DNA, 30 bp, Artificial Sequence
  Synthetic oligonucleotide
gagccctatcaccactattaaaacgatcga

SEQ ID NO: 265699 - DNA, 30 bp, Artificial Sequence
  Synthetic oligonucleotide
tatcattatccgggaaaaaaagtcgatcga

SEQ ID NO: 265700 - DNA, 30 bp, Artificial Sequence
  Synthetic oligonucleotide
tagagaaaatccccattcgcagtatatcga

SEQ ID NO: 265701 - DNA, 30 bp, Artificial Sequence
  Synthetic oligonucleotide
gacacctacttgtgaaagttttcgtatcga

SEQ ID NO: 265702 - DNA, 30 bp, Artificial Sequence
  Synthetic oligonucleotide
ttaacattgtttattgtgatcttaactcga

SEQ ID NO: 265703 - DNA, 29 bp, Artificial Sequence
  Synthetic oligonucleotide
cgtttcactgagagatatgtatcactcga

SEQ ID NO: 265704 - DNA, 30 bp, Artificial Sequence
  Synthetic oligonucleotide
caacctgggtaagctattacaaagactcga

SEQ ID NO: 265705 - DNA, 30 bp, Artificial Sequence
  Synthetic oligonucleotide
accgtctattcgaatcgccgagctactcga

SEQ ID NO: 265706 - DNA, 30 bp, Artificial Sequence
  Synthetic oligonucleotide
atggtgcgtctaggatcaatcgttactcga

SEQ ID NO: 265707 - DNA, 30 bp, Artificial Sequence
  Synthetic oligonucleotide
ttgcagtatttcctacaaacctctcctcga

SEQ ID NO: 265708 - DNA, 30 bp, Artificial Sequence
  Synthetic oligonucleotide
gccaagccgttttcaatagatggtcctcga

SEQ ID NO: 265709 - DNA, 30 bp, Artificial Sequence
  Synthetic oligonucleotide
acatccattcacgtcccatatgacgctcga

SEQ ID NO: 265710 - DNA, 30 bp, Artificial Sequence
  Synthetic oligonucleotide
cggacgatcccagcgctttcatgcgctcga

SEQ ID NO: 265711 - DNA, 30 bp, Artificial Sequence
  Synthetic oligonucleotide
ttagtgatcagctgctggtcaatggctcga

SEQ ID NO: 265712 - DNA, 30 bp, Artificial Sequence
  Synthetic oligonucleotide
cactcactctaggtcagtcgaaatgctcga

SEQ ID NO: 265713 - DNA, 30 bp, Artificial Sequence
  Synthetic oligonucleotide
ggcagtagaacggccatacgttatgctcga

SEQ ID NO: 265714 - DNA, 30 bp, Artificial Sequence
  Synthetic oligonucleotide
caatgctgatggcaccatttgactgctcga

SEQ ID NO: 265715 - DNA, 30 bp, Artificial Sequence
  Synthetic oligonucleotide
gaccccactggtatttcattttgtgctcga

SEQ ID NO: 265716 - DNA, 30 bp, Artificial Sequence
  Synthetic oligonucleotide
cttaaagtgcccatatatttggaatctcga

SEQ ID NO: 265717 - DNA, 30 bp, Artificial Sequence
  Synthetic oligonucleotide
catttgtcacgatctggaaacgtctctcga

SEQ ID NO: 265718 - DNA, 30 bp, Artificial Sequence
  Synthetic oligonucleotide
ttggacatcagtattcgagatggaagtcga

SEQ ID NO: 265719 - DNA, 30 bp, Artificial Sequence
  Synthetic oligonucleotide
ttccgtcacacatgcaagtgtgagagtcga

SEQ ID NO: 265720 - DNA, 30 bp, Artificial Sequence
  Synthetic oligonucleotide
tgttactataactgagtgctaacgagtcga

SEQ ID NO: 265721 - DNA, 30 bp, Artificial Sequence
  Synthetic oligonucleotide
attcaaggggtcagacgaggctgtagtcga

SEQ ID NO: 265722 - DNA, 30 bp, Artificial Sequence
  Synthetic oligonucleotide
gaaatcctgtcaccgagtacataacgtcga

SEQ ID NO: 265723 - DNA, 30 bp, Artificial Sequence
  Synthetic oligonucleotide
tgcgtacccactggttcagcaggccgtcga

SEQ ID NO: 265724 - DNA, 30 bp, Artificial Sequence
  Synthetic oligonucleotide
cgcggctcaagcggaagattcgctcgtcga

SEQ ID NO: 265725 - DNA, 30 bp, Artificial Sequence
  Synthetic oligonucleotide
gttggtcgcacacggggcagggaaggtcga

SEQ ID NO: 265726 - DNA, 30 bp, Artificial Sequence
  Synthetic oligonucleotide
ttacatataggtcttgtcacgtaaggtcga

SEQ ID NO: 265727 - DNA, 30 bp, Artificial Sequence
  Synthetic oligonucleotide
aggagaggatatatgggatacgtgggtcga

SEQ ID NO: 265728 - DNA, 30 bp, Artificial Sequence
  Synthetic oligonucleotide
ttgcctcctatttttcgtcaacgtggtcga

SEQ ID NO: 265729 - DNA, 30 bp, Artificial Sequence
  Synthetic oligonucleotide
caccttcctggaaactgatccacctgtcga

SEQ ID NO: 265730 - DNA, 30 bp, Artificial Sequence
  Synthetic oligonucleotide
aaccgggtctatttaggattgagctgtcga

SEQ ID NO: 265731 - DNA, 30 bp, Artificial Sequence
  Synthetic oligonucleotide
ccgacactttagctctctgtaatgtgtcga

SEQ ID NO: 265732 - DNA, 30 bp, Artificial Sequence
  Synthetic oligonucleotide
aaaccacgctagggcatatttcattgtcga

SEQ ID NO: 265733 - DNA, 30 bp, Artificial Sequence
  Synthetic oligonucleotide
agctaccaccatcacatggcgttttgtcga

SEQ ID NO: 265734 - DNA, 30 bp, Artificial Sequence
  Synthetic oligonucleotide
cgattttataaggccgggtcctcaattcga

SEQ ID NO: 265735 - DNA, 30 bp, Artificial Sequence
  Synthetic oligonucleotide
aaacttggatttaacgctacaggaattcga

SEQ ID NO: 265736 - DNA, 30 bp, Artificial Sequence
  Synthetic oligonucleotide
atttggcgtggaaggcatggaataattcga

SEQ ID NO: 265737 - DNA, 30 bp, Artificial Sequence
  Synthetic oligonucleotide
ttggaggcccgtagagaacttatgattcga

SEQ ID NO: 265738 - DNA, 30 bp, Artificial Sequence
  Synthetic oligonucleotide
tccggcagttggtttgtaacacgtattcga

SEQ ID NO: 265739 - DNA, 30 bp, Artificial Sequence
  Synthetic oligonucleotide
cgaacactaaactcagattccggtattcga

SEQ ID NO: 265740 - DNA, 30 bp, Artificial Sequence
  Synthetic oligonucleotide
ggacccgtagctgtgggactgacccttcga

SEQ ID NO: 265741 - DNA, 30 bp, Artificial Sequence
  Synthetic oligonucleotide
cttgcgctaagcggaggctacagccttcga

SEQ ID NO: 265742 - DNA, 30 bp, Artificial Sequence
  Synthetic oligonucleotide
gggacttgccgatgagttcaatggcttcga

SEQ ID NO: 265743 - DNA, 30 bp, Artificial Sequence
  Synthetic oligonucleotide
agctgctgaatcttcccgaactgtcttcga

SEQ ID NO: 265744 - DNA, 30 bp, Artificial Sequence
  Synthetic oligonucleotide
tgccccatttaataaatccacgttcttcga

SEQ ID NO: 265745 - DNA, 30 bp, Artificial Sequence
  Synthetic oligonucleotide
aggcgttgctgacctcgtgtctccgttcga

SEQ ID NO: 265746 - DNA, 30 bp, Artificial Sequence
  Synthetic oligonucleotide
attgtgagctgtgcgggatataaggttcga

SEQ ID NO: 265747 - DNA, 30 bp, Artificial Sequence
  Synthetic oligonucleotide
tgctcgctattggaaaagtctccggttcga

SEQ ID NO: 265748 - DNA, 30 bp, Artificial Sequence
  Synthetic oligonucleotide
ggccttgcaacgggccacgattgggttcga

SEQ ID NO: 265749 - DNA, 30 bp, Artificial Sequence
  Synthetic oligonucleotide
gccaagcactggtctcaataaaaatttcga

SEQ ID NO: 265750 - DNA, 30 bp, Artificial Sequence
  Synthetic oligonucleotide
agagatcttcggctcgggcgctgatttcga

SEQ ID NO: 265751 - DNA, 30 bp, Artificial Sequence
  Synthetic oligonucleotide
aaccgcgaatgccggtatagacactttcga

SEQ ID NO: 265752 - DNA, 30 bp, Artificial Sequence
  Synthetic oligonucleotide
ttgtaataatggtccgcggtggagtttcga

SEQ ID NO: 265753 - DNA, 30 bp, Artificial Sequence
  Synthetic oligonucleotide
cttgtgccacaaaacattagtaattttcga

SEQ ID NO: 265754 - DNA, 30 bp, Artificial Sequence
  Synthetic oligonucleotide
agggcccaaccaatttttgacttaaaagga

SEQ ID NO: 265755 - DNA, 30 bp, Artificial Sequence
  Synthetic oligonucleotide
agcagattgtggggggccgtaaggaaagga

SEQ ID NO: 265756 - DNA, 30 bp, Artificial Sequence
  Synthetic oligonucleotide
ttttgttcgactcatcgaggggctaaagga

SEQ ID NO: 265757 - DNA, 30 bp, Artificial Sequence
  Synthetic oligonucleotide
gagtcgtaaaggggagagtttacacaagga

SEQ ID NO: 265758 - DNA, 30 bp, Artificial Sequence
  Synthetic oligonucleotide
ccaaatcaccatatcgtggtgggacaagga

SEQ ID NO: 265759 - DNA, 30 bp, Artificial Sequence
  Synthetic oligonucleotide
ccaaattgatgcgaggctctggcccaagga

SEQ ID NO: 265760 - DNA, 30 bp, Artificial Sequence
  Synthetic oligonucleotide
attgcattggataccgtaccgacgcaagga

SEQ ID NO: 265761 - DNA, 30 bp, Artificial Sequence
  Synthetic oligonucleotide
tgccccgagaatttcaaggtggggcaagga

SEQ ID NO: 265762 - DNA, 30 bp, Artificial Sequence
  Synthetic oligonucleotide
tacctgaccatagttgtaggttcagaagga

SEQ ID NO: 265763 - DNA, 30 bp, Artificial Sequence
  Synthetic oligonucleotide
aaccagcatagaccgacttgcaacgaagga

SEQ ID NO: 265764 - DNA, 29 bp, Artificial Sequence
  Synthetic oligonucleotide
ccaagataacacgtttaagggccgaagga

SEQ ID NO: 265765 - DNA, 30 bp, Artificial Sequence
  Synthetic oligonucleotide
gcagaggagcttcgcggtcgtgaggaagga

SEQ ID NO: 265766 - DNA, 30 bp, Artificial Sequence
  Synthetic oligonucleotide
aatgtcccctgcaccgttggacactaagga

SEQ ID NO: 265767 - DNA, 30 bp, Artificial Sequence
  Synthetic oligonucleotide
agcagcaaaacagacatataagactaagga

SEQ ID NO: 265768 - DNA, 30 bp, Artificial Sequence
  Synthetic oligonucleotide
gttcatactccacaccgtaatgactaagga

SEQ ID NO: 265769 - DNA, 30 bp, Artificial Sequence
  Synthetic oligonucleotide
gcaaaaaaccgagacccttcaggctaagga

SEQ ID NO: 265770 - DNA, 30 bp, Artificial Sequence
  Synthetic oligonucleotide
tctctagagggattatgatccacgtaagga

SEQ ID NO: 265771 - DNA, 30 bp, Artificial Sequence
  Synthetic oligonucleotide
agcagcgtttagcccccagtacggtaagga

SEQ ID NO: 265772 - DNA, 30 bp, Artificial Sequence
  Synthetic oligonucleotide
caagtctgaattcagtgtccccaaacagga

SEQ ID NO: 265773 - DNA, 30 bp, Artificial Sequence
  Synthetic oligonucleotide
gaccgggttaatcttacgctcccaacagga

SEQ ID NO: 265774 - DNA, 30 bp, Artificial Sequence
  Synthetic oligonucleotide
tcagacgatgggacaccgtttaccacagga

SEQ ID NO: 265775 - DNA, 30 bp, Artificial Sequence
  Synthetic oligonucleotide
ccggctccaaggaagtttcgtaagacagga

SEQ ID NO: 265776 - DNA, 30 bp, Artificial Sequence
  Synthetic oligonucleotide
cacttcaatgtgtgagtgcgggagacagga

SEQ ID NO: 265777 - DNA, 30 bp, Artificial Sequence
  Synthetic oligonucleotide
gtattggcacaggcagagtgttcgacagga

SEQ ID NO: 265778 - DNA, 30 bp, Artificial Sequence
  Synthetic oligonucleotide
gggattcagcactagcggtgcccaccagga

SEQ ID NO: 265779 - DNA, 30 bp, Artificial Sequence
  Synthetic oligonucleotide
gatgttccaccatcagcaacccacccagga

SEQ ID NO: 265780 - DNA, 30 bp, Artificial Sequence
  Synthetic oligonucleotide
gggctggaatctagggcccagacgccagga

SEQ ID NO: 265781 - DNA, 30 bp, Artificial Sequence
  Synthetic oligonucleotide
actaagaattgtacggtactacggccagga

SEQ ID NO: 265782 - DNA, 30 bp, Artificial Sequence
  Synthetic oligonucleotide
tgggggctacccagcattgcggtgccagga

SEQ ID NO: 265783 - DNA, 30 bp, Artificial Sequence
  Synthetic oligonucleotide
gtcccactagagcgttcacttgatccagga

SEQ ID NO: 265784 - DNA, 30 bp, Artificial Sequence
  Synthetic oligonucleotide
cgtcgttttcggctacgtaatagtccagga

SEQ ID NO: 265785 - DNA, 30 bp, Artificial Sequence
  Synthetic oligonucleotide
agtgccgtttagggtgaaaattcagcagga

SEQ ID NO: 265786 - DNA, 30 bp, Artificial Sequence
  Synthetic oligonucleotide
tgtatagagtcaagacgcccattagcagga

SEQ ID NO: 265787 - DNA, 30 bp, Artificial Sequence
  Synthetic oligonucleotide
tcatgtgtttaaggacatagggtcgcagga

SEQ ID NO: 265788 - DNA, 30 bp, Artificial Sequence
  Synthetic oligonucleotide
agctaatcttggtatctgcaaacggcagga

SEQ ID NO: 265789 - DNA, 30 bp, Artificial Sequence
  Synthetic oligonucleotide
tgtaccgacggcattactattgcggcagga

SEQ ID NO: 265790 - DNA, 30 bp, Artificial Sequence
  Synthetic oligonucleotide
aagaatgtcattacgattcctgttgcagga

SEQ ID NO: 265791 - DNA, 30 bp, Artificial Sequence
  Synthetic oligonucleotide
acatatacagataaggacgtgtcctcagga

SEQ ID NO: 265792 - DNA, 30 bp, Artificial Sequence
  Synthetic oligonucleotide
agttgcctcccatgagggctaagctcagga

SEQ ID NO: 265793 - DNA, 30 bp, Artificial Sequence
  Synthetic oligonucleotide
aacacttaggccactaactgcacttcagga

SEQ ID NO: 265794 - DNA, 30 bp, Artificial Sequence
  Synthetic oligonucleotide
tgacgaaatgctttctgccatatttcagga

SEQ ID NO: 265795 - DNA, 30 bp, Artificial Sequence
  Synthetic oligonucleotide
aattagtgccaaggttattgaataagagga

SEQ ID NO: 265796 - DNA, 30 bp, Artificial Sequence
  Synthetic oligonucleotide
acatttcgtaggcgcctaaaatccagagga

SEQ ID NO: 265797 - DNA, 30 bp, Artificial Sequence
  Synthetic oligonucleotide
ggcggttgccctcctgctcggtgcagagga

SEQ ID NO: 265798 - DNA, 30 bp, Artificial Sequence
  Synthetic oligonucleotide
atctgggccaccccaattagacatagagga

SEQ ID NO: 265799 - DNA, 30 bp, Artificial Sequence
  Synthetic oligonucleotide
tcagctataagtgaatgccgccatagagga

SEQ ID NO: 265800 - DNA, 30 bp, Artificial Sequence
  Synthetic oligonucleotide
tgcattcggagctatattgtcgttagagga

SEQ ID NO: 265801 - DNA, 30 bp, Artificial Sequence
  Synthetic oligonucleotide
tataacttctccgggacttaacgacgagga

SEQ ID NO: 265802 - DNA, 30 bp, Artificial Sequence
  Synthetic oligonucleotide
gacgagtctgaccgtcaatccatacgagga

SEQ ID NO: 265803 - DNA, 30 bp, Artificial Sequence
  Synthetic oligonucleotide
aaaacacaggggaacgttagggtccgagga

SEQ ID NO: 265804 - DNA, 30 bp, Artificial Sequence
  Synthetic oligonucleotide
ggacaatactgtgtcggaggtacaggagga

SEQ ID NO: 265805 - DNA, 30 bp, Artificial Sequence
  Synthetic oligonucleotide
ccagtatggagtttacagttccccggagga

SEQ ID NO: 265806 - DNA, 30 bp, Artificial Sequence
  Synthetic oligonucleotide
ggtcgctggggagggtaggatcccggagga

SEQ ID NO: 265807 - DNA, 30 bp, Artificial Sequence
  Synthetic oligonucleotide
atctgaggtatcttgattcgcgccggagga

SEQ ID NO: 265808 - DNA, 30 bp, Artificial Sequence
  Synthetic oligonucleotide
gataaccatccgttaaaggtaacgggagga

SEQ ID NO: 265809 - DNA, 30 bp, Artificial Sequence
  Synthetic oligonucleotide
gctttggtggggacaaacgtagcgggagga

SEQ ID NO: 265810 - DNA, 30 bp, Artificial Sequence
  Synthetic oligonucleotide
caaatggatagaaattatgcgctgggagga

SEQ ID NO: 265811 - DNA, 30 bp, Artificial Sequence
  Synthetic oligonucleotide
agcatctgactgctcagtaatctgggagga

SEQ ID NO: 265812 - DNA, 30 bp, Artificial Sequence
  Synthetic oligonucleotide
atttagatatcagtaagaggtaaatgagga

SEQ ID NO: 265813 - DNA, 30 bp, Artificial Sequence
  Synthetic oligonucleotide
taattaatatgactataggattgctgagga

SEQ ID NO: 265814 - DNA, 30 bp, Artificial Sequence
  Synthetic oligonucleotide
aaagatggggtcaacagcgcaacgtgagga

SEQ ID NO: 265815 - DNA, 30 bp, Artificial Sequence
  Synthetic oligonucleotide
gttgattaaaggatttacagggtgtgagga

SEQ ID NO: 265816 - DNA, 30 bp, Artificial Sequence
  Synthetic oligonucleotide
gaggaaaactggatgaggttttattgagga

SEQ ID NO: 265817 - DNA, 30 bp, Artificial Sequence
  Synthetic oligonucleotide
ggcattgactgggtgttatgtccttgagga

SEQ ID NO: 265818 - DNA, 30 bp, Artificial Sequence
  Synthetic oligonucleotide
aggagtcagaagaaaaacccggtaatagga

SEQ ID NO: 265819 - DNA, 30 bp, Artificial Sequence
  Synthetic oligonucleotide
ctgggtcttaatgtctacgttaccatagga

SEQ ID NO: 265820 - DNA, 31 bp, Artificial Sequence
  Synthetic oligonucleotide
ctcgcaggcgtgtcctgccgacgcgatagga

SEQ ID NO: 265821 - DNA, 30 bp, Artificial Sequence
  Synthetic oligonucleotide
aagtacttcagctcaaaaagcgctatagga

SEQ ID NO: 265822 - DNA, 30 bp, Artificial Sequence
  Synthetic oligonucleotide
ttttgaaattacaccaaggatcaactagga

SEQ ID NO: 265823 - DNA, 30 bp, Artificial Sequence
  Synthetic oligonucleotide
tggatccgcaaggctccataagacctagga

SEQ ID NO: 265824 - DNA, 30 bp, Artificial Sequence
  Synthetic oligonucleotide
ttgaggaccacgcagtggattaccctagga

SEQ ID NO: 265825 - DNA, 30 bp, Artificial Sequence
  Synthetic oligonucleotide
tcaaggtgctaattatgcgcacccctagga

SEQ ID NO: 265826 - DNA, 30 bp, Artificial Sequence
  Synthetic oligonucleotide
gaaggtgaccctcttgcagctacgctagga

SEQ ID NO: 265827 - DNA, 30 bp, Artificial Sequence
  Synthetic oligonucleotide
ccatagtgagtttcgagcttgccgctagga

SEQ ID NO: 265828 - DNA, 30 bp, Artificial Sequence
  Synthetic oligonucleotide
ctattattagggcaacttacttcagtagga

SEQ ID NO: 265829 - DNA, 30 bp, Artificial Sequence
  Synthetic oligonucleotide
tcgtggcgggttctaacgctcctagtagga

SEQ ID NO: 265830 - DNA, 30 bp, Artificial Sequence
  Synthetic oligonucleotide
agcgacgcccatggtgtactcttagtagga

SEQ ID NO: 265831 - DNA, 30 bp, Artificial Sequence
  Synthetic oligonucleotide
tacacaggtagtcaagttagtagcgtagga

SEQ ID NO: 265832 - DNA, 30 bp, Artificial Sequence
  Synthetic oligonucleotide
atagtgggccattacaatttcgatgtagga

SEQ ID NO: 265833 - DNA, 30 bp, Artificial Sequence
  Synthetic oligonucleotide
gagctaaaactaatgtcatataaattagga

SEQ ID NO: 265834 - DNA, 30 bp, Artificial Sequence
  Synthetic oligonucleotide
gttttaatacaggctggtctgcgattagga

SEQ ID NO: 265835 - DNA, 30 bp, Artificial Sequence
  Synthetic oligonucleotide
ggaaaagtggtaaattatattcgattagga

SEQ ID NO: 265836 - DNA, 30 bp, Artificial Sequence
  Synthetic oligonucleotide
cgaacatattgcgtattaaatttattagga

SEQ ID NO: 265837 - DNA, 30 bp, Artificial Sequence
  Synthetic oligonucleotide
gacatcatgggggttaagataagcttagga

SEQ ID NO: 265838 - DNA, 30 bp, Artificial Sequence
  Synthetic oligonucleotide
tatgatcgttctcggggagtacggttagga

SEQ ID NO: 265839 - DNA, 30 bp, Artificial Sequence
  Synthetic oligonucleotide
caggtcaaaccgctcgttaatttgttagga

SEQ ID NO: 265840 - DNA, 30 bp, Artificial Sequence
  Synthetic oligonucleotide
acctgcattagaggcacgtacactttagga

SEQ ID NO: 265841 - DNA, 30 bp, Artificial Sequence
  Synthetic oligonucleotide
aggccctagtacaaagctactactttagga

SEQ ID NO: 265842 - DNA, 30 bp, Artificial Sequence
  Synthetic oligonucleotide
cctgtgctttgtcggctaatgcttttagga

SEQ ID NO: 265843 - DNA, 30 bp, Artificial Sequence
  Synthetic oligonucleotide
tacgtaggggcgccagagtcataaaacgga

SEQ ID NO: 265844 - DNA, 30 bp, Artificial Sequence
  Synthetic oligonucleotide
tgtcactactgctggagtgcattcaacgga

SEQ ID NO: 265845 - DNA, 30 bp, Artificial Sequence
  Synthetic oligonucleotide
tagagcgaagccttatctatatataacgga

SEQ ID NO: 265846 - DNA, 30 bp, Artificial Sequence
  Synthetic oligonucleotide
ggcctcctgctgttttaccgctctaacgga

SEQ ID NO: 265847 - DNA, 30 bp, Artificial Sequence
  Synthetic oligonucleotide
cgtatcagtctttatgggtcgctacacgga

SEQ ID NO: 265848 - DNA, 30 bp, Artificial Sequence
  Synthetic oligonucleotide
gggaccgtgtttcggcactgtctacacgga

SEQ ID NO: 265849 - DNA, 30 bp, Artificial Sequence
  Synthetic oligonucleotide
gtaatgccggttggatataggttacacgga

SEQ ID NO: 265850 - DNA, 30 bp, Artificial Sequence
  Synthetic oligonucleotide
tatattagaagctgcgtcactacccacgga

SEQ ID NO: 265851 - DNA, 30 bp, Artificial Sequence
  Synthetic oligonucleotide
ttgcgtcacatctatagacacacgcacgga

SEQ ID NO: 265852 - DNA, 30 bp, Artificial Sequence
  Synthetic oligonucleotide
gaatgacacccgtcacgtgaccggcacgga

SEQ ID NO: 265853 - DNA, 30 bp, Artificial Sequence
  Synthetic oligonucleotide
acattgctgcgtctttttagatttcacgga

SEQ ID NO: 265854 - DNA, 30 bp, Artificial Sequence
  Synthetic oligonucleotide
tgagagaccgtacatagaaaaaccgacgga

SEQ ID NO: 265855 - DNA, 30 bp, Artificial Sequence
  Synthetic oligonucleotide
ggccacagataatcagcttgttccgacgga

SEQ ID NO: 265856 - DNA, 30 bp, Artificial Sequence
  Synthetic oligonucleotide
tcactaccactgcttgcgattggcgacgga

SEQ ID NO: 265857 - DNA, 30 bp, Artificial Sequence
  Synthetic oligonucleotide
agacgtgcttcgtttcttgccgtcgacgga

SEQ ID NO: 265858 - DNA, 30 bp, Artificial Sequence
  Synthetic oligonucleotide
ggtaacacattgctgagactgcatgacgga

SEQ ID NO: 265859 - DNA, 30 bp, Artificial Sequence
  Synthetic oligonucleotide
tggttgagctgcctgggcaaatactacgga

SEQ ID NO: 265860 - DNA, 30 bp, Artificial Sequence
  Synthetic oligonucleotide
tacaaccccgtcccctgggggacctacgga

SEQ ID NO: 265861 - DNA, 30 bp, Artificial Sequence
  Synthetic oligonucleotide
aatggcctgcgttcaacatcccagtacgga

SEQ ID NO: 265862 - DNA, 30 bp, Artificial Sequence
  Synthetic oligonucleotide
agcccagctcgcgtcgtacatatttacgga

SEQ ID NO: 265863 - DNA, 30 bp, Artificial Sequence
  Synthetic oligonucleotide
tgatgataatccctcctctccctttacgga

SEQ ID NO: 265864 - DNA, 30 bp, Artificial Sequence
  Synthetic oligonucleotide
aactcggaggctccatccgagcacaccgga

SEQ ID NO: 265865 - DNA, 30 bp, Artificial Sequence
  Synthetic oligonucleotide
tacgaaacatgtcgaatattacgcaccgga

SEQ ID NO: 265866 - DNA, 30 bp, Artificial Sequence
  Synthetic oligonucleotide
acgaaaaaaccccacctaggcggcaccgga

SEQ ID NO: 265867 - DNA, 30 bp, Artificial Sequence
  Synthetic oligonucleotide
acacttacgttggggacgaggattaccgga

SEQ ID NO: 265868 - DNA, 30 bp, Artificial Sequence
  Synthetic oligonucleotide
tgattgaatagtagtatcaacaggcccgga

SEQ ID NO: 265869 - DNA, 30 bp, Artificial Sequence
  Synthetic oligonucleotide
cggatggctcttctgcagtgttttcccgga

SEQ ID NO: 265870 - DNA, 30 bp, Artificial Sequence
  Synthetic oligonucleotide
ggcggttttacgctgggagttcccgccgga

SEQ ID NO: 265871 - DNA, 35 bp, Artificial Sequence
  Synthetic oligonucleotide
gagctgtgggggaacgatattgacggcgggccgga

SEQ ID NO: 265872 - DNA, 30 bp, Artificial Sequence
  Synthetic oligonucleotide
cgtggaagagtaagcttttatttggccgga

SEQ ID NO: 265873 - DNA, 30 bp, Artificial Sequence
  Synthetic oligonucleotide
ggatggacccacgggttttgacaatccgga

SEQ ID NO: 265874 - DNA, 30 bp, Artificial Sequence
  Synthetic oligonucleotide
cgcccctgtgtgtaatgcacggaatccgga

SEQ ID NO: 265875 - DNA, 30 bp, Artificial Sequence
  Synthetic oligonucleotide
ctggttacacgaatatttgcggcatccgga

SEQ ID NO: 265876 - DNA, 30 bp, Artificial Sequence
  Synthetic oligonucleotide
caagtacactattgcgacgggttatccgga

SEQ ID NO: 265877 - DNA, 30 bp, Artificial Sequence
  Synthetic oligonucleotide
agacattttagtatggggcactactccgga

SEQ ID NO: 265878 - DNA, 30 bp, Artificial Sequence
  Synthetic oligonucleotide
accatccttgtgacgcgatgggtctccgga

SEQ ID NO: 265879 - DNA, 30 bp, Artificial Sequence
  Synthetic oligonucleotide
gcttggctgtgcagtgctactcattccgga

SEQ ID NO: 265880 - DNA, 30 bp, Artificial Sequence
  Synthetic oligonucleotide
cgcatccgaagtgcaactaccgaaagcgga

SEQ ID NO: 265881 - DNA, 30 bp, Artificial Sequence
  Synthetic oligonucleotide
cctctgacaggattattattattaagcgga

SEQ ID NO: 265882 - DNA, 30 bp, Artificial Sequence
  Synthetic oligonucleotide
agttggggagaccgttaagacgccagcgga

SEQ ID NO: 265883 - DNA, 30 bp, Artificial Sequence
  Synthetic oligonucleotide
agcgaaattggataggtccggcatagcgga

SEQ ID NO: 265884 - DNA, 30 bp, Artificial Sequence
  Synthetic oligonucleotide
cgaggcggtaaaggccggcttgatagcgga

SEQ ID NO: 265885 - DNA, 30 bp, Artificial Sequence
  Synthetic oligonucleotide
agccgccagcctcaaatcgaacttagcgga

SEQ ID NO: 265886 - DNA, 30 bp, Artificial Sequence
  Synthetic oligonucleotide
cgtggcagcagtgtaaaccgaggacgcgga

SEQ ID NO: 265887 - DNA, 30 bp, Artificial Sequence
  Synthetic oligonucleotide
gcaacttatgggtgctctacacaaggcgga

SEQ ID NO: 265888 - DNA, 30 bp, Artificial Sequence
  Synthetic oligonucleotide
gcaaatgtataacagcgcgtttaaggcgga

SEQ ID NO: 265889 - DNA, 30 bp, Artificial Sequence
  Synthetic oligonucleotide
ttcgttggaactgggtcgcaaagaggcgga

SEQ ID NO: 265890 - DNA, 30 bp, Artificial Sequence
  Synthetic oligonucleotide
atgagcgttcatgactgtacaataggcgga

SEQ ID NO: 265891 - DNA, 30 bp, Artificial Sequence
  Synthetic oligonucleotide
atcgagatagcgacctgtactttaggcgga

SEQ ID NO: 265892 - DNA, 30 bp, Artificial Sequence
  Synthetic oligonucleotide
tgactctgcactgcctgagtactgggcgga

SEQ ID NO: 265893 - DNA, 30 bp, Artificial Sequence
  Synthetic oligonucleotide
tccacacacggttaacaatcgcgatgcgga

SEQ ID NO: 265894 - DNA, 30 bp, Artificial Sequence
  Synthetic oligonucleotide
tatgactggaagatttggatcatatgcgga

SEQ ID NO: 265895 - DNA, 30 bp, Artificial Sequence
  Synthetic oligonucleotide
tggcatcttttaaggtgcttagcctgcgga

SEQ ID NO: 265896 - DNA, 30 bp, Artificial Sequence
  Synthetic oligonucleotide
ggggtaggggagccaatcgattagtgcgga

SEQ ID NO: 265897 - DNA, 30 bp, Artificial Sequence
  Synthetic oligonucleotide
catggtcgagctcttcacgacgtgtgcgga

SEQ ID NO: 265898 - DNA, 30 bp, Artificial Sequence
  Synthetic oligonucleotide
gcaaacgatgatgacgcggtgggaatcgga

SEQ ID NO: 265899 - DNA, 30 bp, Artificial Sequence
  Synthetic oligonucleotide
cagcgacgtaagtccaatcgggccatcgga

SEQ ID NO: 265900 - DNA, 30 bp, Artificial Sequence
  Synthetic oligonucleotide
aatcatcgttcttcacgtggttcgatcgga

SEQ ID NO: 265901 - DNA, 30 bp, Artificial Sequence
  Synthetic oligonucleotide
tgctatgggtcggagttctagtaactcgga

SEQ ID NO: 265902 - DNA, 30 bp, Artificial Sequence
  Synthetic oligonucleotide
cagggagctcttgttcactggtcactcgga

SEQ ID NO: 265903 - DNA, 30 bp, Artificial Sequence
  Synthetic oligonucleotide
cagatgacagtaggattacgactactcgga

SEQ ID NO: 265904 - DNA, 30 bp, Artificial Sequence
  Synthetic oligonucleotide
aattgaagactgatatattaaggcctcgga

SEQ ID NO: 265905 - DNA, 30 bp, Artificial Sequence
  Synthetic oligonucleotide
acttgagacacgcacgagggcattctcgga

SEQ ID NO: 265906 - DNA, 30 bp, Artificial Sequence
  Synthetic oligonucleotide
cggccccggctcgggaccgcctaagtcgga

SEQ ID NO: 265907 - DNA, 30 bp, Artificial Sequence
  Synthetic oligonucleotide
actgatcgagggtgcactagaatagtcgga

SEQ ID NO: 265908 - DNA, 30 bp, Artificial Sequence
  Synthetic oligonucleotide
agatcccgcgcatcagttatccgtgtcgga

SEQ ID NO: 265909 - DNA, 30 bp, Artificial Sequence
  Synthetic oligonucleotide
agatctcaggaacaaaaattctttgtcgga

SEQ ID NO: 265910 - DNA, 30 bp, Artificial Sequence
  Synthetic oligonucleotide
ctcatggatttcgcctaatcaacattcgga

SEQ ID NO: 265911 - DNA, 30 bp, Artificial Sequence
  Synthetic oligonucleotide
gagttgtgatctcaaacattgcccttcgga

SEQ ID NO: 265912 - DNA, 30 bp, Artificial Sequence
  Synthetic oligonucleotide
gactaaggctttggtgacgacgcgttcgga

SEQ ID NO: 265913 - DNA, 30 bp, Artificial Sequence
  Synthetic oligonucleotide
aaacaggtgactaggtgacatctgttcgga

SEQ ID NO: 265914 - DNA, 30 bp, Artificial Sequence
  Synthetic oligonucleotide
aaattcacacccagtaatgcatctttcgga

SEQ ID NO: 265915 - DNA, 30 bp, Artificial Sequence
  Synthetic oligonucleotide
tccgcaccaaaatggtgcactaagaaggga

SEQ ID NO: 265916 - DNA, 30 bp, Artificial Sequence
  Synthetic oligonucleotide
caacctctgagcatcgggtcagttaaggga

SEQ ID NO: 265917 - DNA, 30 bp, Artificial Sequence
  Synthetic oligonucleotide
gtacgactcccagttgatgtgttccaggga

SEQ ID NO: 265918 - DNA, 30 bp, Artificial Sequence
  Synthetic oligonucleotide
agatagtaggtactaggttcgaggcaggga

SEQ ID NO: 265919 - DNA, 30 bp, Artificial Sequence
  Synthetic oligonucleotide
tatgctcttcacgcttaatgtatgcaggga

SEQ ID NO: 265920 - DNA, 30 bp, Artificial Sequence
  Synthetic oligonucleotide
tgagtatcgtgtcctacaacgagagaggga

SEQ ID NO: 265921 - DNA, 30 bp, Artificial Sequence
  Synthetic oligonucleotide
gtcaatgaaagttgtttgttgctagaggga

SEQ ID NO: 265922 - DNA, 30 bp, Artificial Sequence
  Synthetic oligonucleotide
ttacaacccactaatcagtaggccgaggga

SEQ ID NO: 265923 - DNA, 30 bp, Artificial Sequence
  Synthetic oligonucleotide
gttaaaacgaactgaaatacacgcgaggga

SEQ ID NO: 265924 - DNA, 30 bp, Artificial Sequence
  Synthetic oligonucleotide
tagaactcggcaccattggctatcgaggga

SEQ ID NO: 265925 - DNA, 30 bp, Artificial Sequence
  Synthetic oligonucleotide
gattaatgttgtgcgctgtggttcgaggga

SEQ ID NO: 265926 - DNA, 30 bp, Artificial Sequence
  Synthetic oligonucleotide
cacgggtcgcttcggggcggagaggaggga

SEQ ID NO: 265927 - DNA, 30 bp, Artificial Sequence
  Synthetic oligonucleotide
tttcactggaaattatcagcatgggaggga

SEQ ID NO: 265928 - DNA, 30 bp, Artificial Sequence
  Synthetic oligonucleotide
cgattattttttcagccaactaatgaggga

SEQ ID NO: 265929 - DNA, 30 bp, Artificial Sequence
  Synthetic oligonucleotide
acattcgatatgttgatcagagatgaggga

SEQ ID NO: 265930 - DNA, 30 bp, Artificial Sequence
  Synthetic oligonucleotide
tccccagtgagcacccccgcgatataggga

SEQ ID NO: 265931 - DNA, 30 bp, Artificial Sequence
  Synthetic oligonucleotide
tgcttcgttgtgctaatgaaccgctaggga

SEQ ID NO: 265932 - DNA, 30 bp, Artificial Sequence
  Synthetic oligonucleotide
aggttgactagcgtacgaagatgctaggga

SEQ ID NO: 265933 - DNA, 30 bp, Artificial Sequence
  Synthetic oligonucleotide
ggacagggtagttgggtcacccgaacggga

SEQ ID NO: 265934 - DNA, 30 bp, Artificial Sequence
  Synthetic oligonucleotide
gtaatctgaagtgatggccacttaacggga

SEQ ID NO: 265935 - DNA, 30 bp, Artificial Sequence
  Synthetic oligonucleotide
tcagtattgacagatcgcatgagcacggga

SEQ ID NO: 265936 - DNA, 30 bp, Artificial Sequence
  Synthetic oligonucleotide
cggcttgtcagcttatacatcaatacggga

SEQ ID NO: 265937 - DNA, 30 bp, Artificial Sequence
  Synthetic oligonucleotide
cgtttaggccctgccgttccatgaccggga

SEQ ID NO: 265938 - DNA, 30 bp, Artificial Sequence
  Synthetic oligonucleotide
caaagtgccgagacgtaataccgcccggga

SEQ ID NO: 265939 - DNA, 30 bp, Artificial Sequence
  Synthetic oligonucleotide
aagataaacgtctaccttcaagggccggga

SEQ ID NO: 265940 - DNA, 30 bp, Artificial Sequence
  Synthetic oligonucleotide
agttatagtatatctcacgaggatccggga

SEQ ID NO: 265941 - DNA, 30 bp, Artificial Sequence
  Synthetic oligonucleotide
agacatcatacacgtaaacggggtccggga

SEQ ID NO: 265942 - DNA, 30 bp, Artificial Sequence
  Synthetic oligonucleotide
ttccaggaccggcgccgatccgtagcggga

SEQ ID NO: 265943 - DNA, 29 bp, Artificial Sequence
  Synthetic oligonucleotide
cgggtccaagggtaaagtccgacgcggga

SEQ ID NO: 265944 - DNA, 30 bp, Artificial Sequence
  Synthetic oligonucleotide
atatcaatagtcggctttagctacgcggga

SEQ ID NO: 265945 - DNA, 30 bp, Artificial Sequence
  Synthetic oligonucleotide
gctagacgcatttacctgaccggggcggga

SEQ ID NO: 265946 - DNA, 30 bp, Artificial Sequence
  Synthetic oligonucleotide
acttgggcaaatagataaggtggtgcggga

SEQ ID NO: 265947 - DNA, 30 bp, Artificial Sequence
  Synthetic oligonucleotide
cggcggaaagagtcgcctgattaatcggga

SEQ ID NO: 265948 - DNA, 30 bp, Artificial Sequence
  Synthetic oligonucleotide
atcaaaatcctaatgtaatagatatcggga

SEQ ID NO: 265949 - DNA, 30 bp, Artificial Sequence
  Synthetic oligonucleotide
ccgtacaggactatcgtccgcacctcggga

SEQ ID NO: 265950 - DNA, 30 bp, Artificial Sequence
  Synthetic oligonucleotide
gatgatgatccatatccttgcacttcggga

SEQ ID NO: 265951 - DNA, 30 bp, Artificial Sequence
  Synthetic oligonucleotide
catgattacagcctagtataagcttcggga

SEQ ID NO: 265952 - DNA, 30 bp, Artificial Sequence
  Synthetic oligonucleotide
agtagcctattggattctacgggttcggga

SEQ ID NO: 265953 - DNA, 30 bp, Artificial Sequence
  Synthetic oligonucleotide
catatagactgattacattgatgttcggga

SEQ ID NO: 265954 - DNA, 30 bp, Artificial Sequence
  Synthetic oligonucleotide
ggtgcgtatgcatttaacccctgcagggga

SEQ ID NO: 265955 - DNA, 30 bp, Artificial Sequence
  Synthetic oligonucleotide
tgtctcggtgccccattaataacacgggga

SEQ ID NO: 265956 - DNA, 30 bp, Artificial Sequence
  Synthetic oligonucleotide
atcttggctagagtgggtcctcgacgggga

SEQ ID NO: 265957 - DNA, 30 bp, Artificial Sequence
  Synthetic oligonucleotide
ggtgatccttcacgagaaatagtacgggga

SEQ ID NO: 265958 - DNA, 30 bp, Artificial Sequence
  Synthetic oligonucleotide
acatacattcaagcggtggccaaccgggga

SEQ ID NO: 265959 - DNA, 30 bp, Artificial Sequence
  Synthetic oligonucleotide
aggctatggtccgcgtgcacttcgcgggga

SEQ ID NO: 265960 - DNA, 30 bp, Artificial Sequence
  Synthetic oligonucleotide
atagaggaacctaacgttgatcatcgggga

SEQ ID NO: 265961 - DNA, 30 bp, Artificial Sequence
  Synthetic oligonucleotide
gagtacgaggactcttgagcgcgtcgggga

SEQ ID NO: 265962 - DNA, 30 bp, Artificial Sequence
  Synthetic oligonucleotide
cattaggcttcccgtgttctccaaggggga

SEQ ID NO: 265963 - DNA, 30 bp, Artificial Sequence
  Synthetic oligonucleotide
ggggcaaaaaggtatgggggtagaggggga

SEQ ID NO: 265964 - DNA, 31 bp, Artificial Sequence
  Synthetic oligonucleotide
atcctggtcatacacgtctagcataggggga

SEQ ID NO: 265965 - DNA, 30 bp, Artificial Sequence
  Synthetic oligonucleotide
attaactggtcctccagcgctgtaggggga

SEQ ID NO: 265966 - DNA, 30 bp, Artificial Sequence
  Synthetic oligonucleotide
ttagtatatgagactcaagcggccggggga

SEQ ID NO: 265967 - DNA, 30 bp, Artificial Sequence
  Synthetic oligonucleotide
tgttgcatcgacggcgggccgggctgggga

SEQ ID NO: 265968 - DNA, 30 bp, Artificial Sequence
  Synthetic oligonucleotide
gggatcacatctgacttgcgttagtgggga

SEQ ID NO: 265969 - DNA, 30 bp, Artificial Sequence
  Synthetic oligonucleotide
tcaattatgatgctcaggaaaccgtgggga

SEQ ID NO: 265970 - DNA, 30 bp, Artificial Sequence
  Synthetic oligonucleotide
catgcctgaagtagatgtgcgggttgggga

SEQ ID NO: 265971 - DNA, 30 bp, Artificial Sequence
  Synthetic oligonucleotide
gactgctccgctcaattcggaatttgggga

SEQ ID NO: 265972 - DNA, 30 bp, Artificial Sequence
  Synthetic oligonucleotide
ccaggatcacggtcaaccgacatttgggga

SEQ ID NO: 265973 - DNA, 30 bp, Artificial Sequence
  Synthetic oligonucleotide
gctgaccgaggtgagcatcgataaatggga

SEQ ID NO: 265974 - DNA, 30 bp, Artificial Sequence
  Synthetic oligonucleotide
ttatatgagcatcaagggctagccatggga

SEQ ID NO: 265975 - DNA, 30 bp, Artificial Sequence
  Synthetic oligonucleotide
tggattattttgggttttccccagatggga

SEQ ID NO: 265976 - DNA, 30 bp, Artificial Sequence
  Synthetic oligonucleotide
ctcatgttacatctacgaccgatgatggga

SEQ ID NO: 265977 - DNA, 30 bp, Artificial Sequence
  Synthetic oligonucleotide
agcattgcatggttcgcgtagcatatggga

SEQ ID NO: 265978 - DNA, 30 bp, Artificial Sequence
  Synthetic oligonucleotide
caaccgtctctttgcgagcggactatggga

SEQ ID NO: 265979 - DNA, 30 bp, Artificial Sequence
  Synthetic oligonucleotide
ggtgcttaatcttaaaaattttgactggga

SEQ ID NO: 265980 - DNA, 30 bp, Artificial Sequence
  Synthetic oligonucleotide
gaaaaataactcctatgagggtccctggga

SEQ ID NO: 265981 - DNA, 30 bp, Artificial Sequence
  Synthetic oligonucleotide
caagacacggcactggttacgaatctggga

SEQ ID NO: 265982 - DNA, 30 bp, Artificial Sequence
  Synthetic oligonucleotide
ccagcactttacgactgactatcagtggga

SEQ ID NO: 265983 - DNA, 30 bp, Artificial Sequence
  Synthetic oligonucleotide
ctgttcaatcgacgccgtgcatgagtggga

SEQ ID NO: 265984 - DNA, 30 bp, Artificial Sequence
  Synthetic oligonucleotide
acgcgcgggcaaagcatatcaggcgtggga

SEQ ID NO: 265985 - DNA, 30 bp, Artificial Sequence
  Synthetic oligonucleotide
gaatgtgggcatcaatatacggaggtggga

SEQ ID NO: 265986 - DNA, 30 bp, Artificial Sequence
  Synthetic oligonucleotide
tcagttctgttaaatagtacccttgtggga

SEQ ID NO: 265987 - DNA, 30 bp, Artificial Sequence
  Synthetic oligonucleotide
acgggcaatccccgtgcccccgaattggga

SEQ ID NO: 265988 - DNA, 30 bp, Artificial Sequence
  Synthetic oligonucleotide
acctgttacacagggtactattaattggga

SEQ ID NO: 265989 - DNA, 30 bp, Artificial Sequence
  Synthetic oligonucleotide
gtttgccttttgcagtgggctggattggga

SEQ ID NO: 265990 - DNA, 30 bp, Artificial Sequence
  Synthetic oligonucleotide
gaggaggccatatgaaacttgagcttggga

SEQ ID NO: 265991 - DNA, 30 bp, Artificial Sequence
  Synthetic oligonucleotide
gcaaaattgacatacaaaggtaagttggga

SEQ ID NO: 265992 - DNA, 30 bp, Artificial Sequence
  Synthetic oligonucleotide
gtgttatctagtgtcatcgtccagttggga

SEQ ID NO: 265993 - DNA, 30 bp, Artificial Sequence
  Synthetic oligonucleotide
ggattagccagttttaggaagcagttggga

SEQ ID NO: 265994 - DNA, 30 bp, Artificial Sequence
  Synthetic oligonucleotide
catcagtttacctcagatcgtaatttggga

SEQ ID NO: 265995 - DNA, 30 bp, Artificial Sequence
  Synthetic oligonucleotide
gtagcaagtgaataacgtctaactttggga

SEQ ID NO: 265996 - DNA, 30 bp, Artificial Sequence
  Synthetic oligonucleotide
tgcaaactaatctgggccacccaaaatgga

SEQ ID NO: 265997 - DNA, 30 bp, Artificial Sequence
  Synthetic oligonucleotide
tgacagagcccattattcattcaaaatgga

SEQ ID NO: 265998 - DNA, 30 bp, Artificial Sequence
  Synthetic oligonucleotide
caacagtgccgcttctgagattaaaatgga

SEQ ID NO: 265999 - DNA, 30 bp, Artificial Sequence
  Synthetic oligonucleotide
gaactcacactagcggatcgtccaaatgga

SEQ ID NO: 266000 - DNA, 30 bp, Artificial Sequence
  Synthetic oligonucleotide
gtagccgtccgctgcgagatcagaaatgga

SEQ ID NO: 266001 - DNA, 30 bp, Artificial Sequence
  Synthetic oligonucleotide
gcgccgctttggtttggttcgaacaatgga

SEQ ID NO: 266002 - DNA, 30 bp, Artificial Sequence
  Synthetic oligonucleotide
gagaagcattgcatataccttgacaatgga

SEQ ID NO: 266003 - DNA, 30 bp, Artificial Sequence
  Synthetic oligonucleotide
atagtccatcgtagtataattgtcaatgga

SEQ ID NO: 266004 - DNA, 30 bp, Artificial Sequence
  Synthetic oligonucleotide
atgaatgtaaggttgtatggattcaatgga

SEQ ID NO: 266005 - DNA, 30 bp, Artificial Sequence
  Synthetic oligonucleotide
tccctgatgatgcaataggacgtgaatgga

SEQ ID NO: 266006 - DNA, 30 bp, Artificial Sequence
  Synthetic oligonucleotide
actgctatgaaagcgctacgacataatgga

SEQ ID NO: 266007 - DNA, 30 bp, Artificial Sequence
  Synthetic oligonucleotide
aaaaccgagttcggttaaggggataatgga

SEQ ID NO: 266008 - DNA, 30 bp, Artificial Sequence
  Synthetic oligonucleotide
aaagaccctcgcgtctttctagctaatgga

SEQ ID NO: 266009 - DNA, 30 bp, Artificial Sequence
  Synthetic oligonucleotide
actggggaagatgtttttagttaacatgga

SEQ ID NO: 266010 - DNA, 30 bp, Artificial Sequence
  Synthetic oligonucleotide
cagccatgaatgcttactaatacacatgga

SEQ ID NO: 266011 - DNA, 30 bp, Artificial Sequence
  Synthetic oligonucleotide
gctatgcattattgcgatggactacatgga

SEQ ID NO: 266012 - DNA, 30 bp, Artificial Sequence
  Synthetic oligonucleotide
ccctgcgtcatcaccgtctctgtacatgga

SEQ ID NO: 266013 - DNA, 30 bp, Artificial Sequence
  Synthetic oligonucleotide
accgactgaccatatgttacgttacatgga

SEQ ID NO: 266014 - DNA, 30 bp, Artificial Sequence
  Synthetic oligonucleotide
ggattcgactgggtatttatttgccatgga

SEQ ID NO: 266015 - DNA, 30 bp, Artificial Sequence
  Synthetic oligonucleotide
cccaccggtacagcgttaacagagcatgga

SEQ ID NO: 266016 - DNA, 30 bp, Artificial Sequence
  Synthetic oligonucleotide
gacgcaggtatgtcgtgatcgaggcatgga

SEQ ID NO: 266017 - DNA, 30 bp, Artificial Sequence
  Synthetic oligonucleotide
actaaatgctaacaaacagttaggcatgga

SEQ ID NO: 266018 - DNA, 30 bp, Artificial Sequence
  Synthetic oligonucleotide
caaacctagaatccgttggcctgtcatgga

SEQ ID NO: 266019 - DNA, 30 bp, Artificial Sequence
  Synthetic oligonucleotide
attggtgcgtggcgtgcgtgaaaagatgga

SEQ ID NO: 266020 - DNA, 30 bp, Artificial Sequence
  Synthetic oligonucleotide
ggcgctacggcagaaggcttttaagatgga

SEQ ID NO: 266021 - DNA, 30 bp, Artificial Sequence
  Synthetic oligonucleotide
gtgaatgtcccggaagcgctctcagatgga

SEQ ID NO: 266022 - DNA, 30 bp, Artificial Sequence
  Synthetic oligonucleotide
tgtaaatgcggactatcgatgtcagatgga

SEQ ID NO: 266023 - DNA, 30 bp, Artificial Sequence
  Synthetic oligonucleotide
tttaagaaaagcatgttgcatgtggatgga

SEQ ID NO: 266024 - DNA, 30 bp, Artificial Sequence
  Synthetic oligonucleotide
gtagtcatattgaaacctaacttggatgga

SEQ ID NO: 266025 - DNA, 30 bp, Artificial Sequence
  Synthetic oligonucleotide
cgtctcagcaggtccgtaaatgatgatgga

SEQ ID NO: 266026 - DNA, 30 bp, Artificial Sequence
  Synthetic oligonucleotide
ccacactgtccggataaaataaaatatgga

SEQ ID NO: 266027 - DNA, 30 bp, Artificial Sequence
  Synthetic oligonucleotide
ataaggccaatacatggactccgatatgga

SEQ ID NO: 266028 - DNA, 30 bp, Artificial Sequence
  Synthetic oligonucleotide
tggcatacgcgaatgttttttgtatatgga

SEQ ID NO: 266029 - DNA, 30 bp, Artificial Sequence
  Synthetic oligonucleotide
agatcgatccacgagataccattctatgga

SEQ ID NO: 266030 - DNA, 30 bp, Artificial Sequence
  Synthetic oligonucleotide
accggagcgattttctgactgttctatgga

SEQ ID NO: 266031 - DNA, 30 bp, Artificial Sequence
  Synthetic oligonucleotide
gtagtcgttaaatagaccaaggggtatgga

SEQ ID NO: 266032 - DNA, 30 bp, Artificial Sequence
  Synthetic oligonucleotide
gaacatgtctacgagaaacttgtttatgga

SEQ ID NO: 266033 - DNA, 30 bp, Artificial Sequence
  Synthetic oligonucleotide
gctatgcgtgagttttattgcacaactgga

SEQ ID NO: 266034 - DNA, 30 bp, Artificial Sequence
  Synthetic oligonucleotide
tacgcccgtagagagagagcctgaactgga

SEQ ID NO: 266035 - DNA, 30 bp, Artificial Sequence
  Synthetic oligonucleotide
atcaaagaaatctcgaacggaagcactgga

SEQ ID NO: 266036 - DNA, 30 bp, Artificial Sequence
  Synthetic oligonucleotide
taagctatatctctgcgaaccggcactgga

SEQ ID NO: 266037 - DNA, 30 bp, Artificial Sequence
  Synthetic oligonucleotide
ttcggaaagaacactacgctaaagactgga

SEQ ID NO: 266038 - DNA, 30 bp, Artificial Sequence
  Synthetic oligonucleotide
ggaaaagtggagaaaatttatcggactgga

SEQ ID NO: 266039 - DNA, 30 bp, Artificial Sequence
  Synthetic oligonucleotide
gtgtgagtcacgaagtgtctcaaacctgga

SEQ ID NO: 266040 - DNA, 30 bp, Artificial Sequence
  Synthetic oligonucleotide
ttatgaagatctaagatggtccatcctgga

SEQ ID NO: 266041 - DNA, 30 bp, Artificial Sequence
  Synthetic oligonucleotide
ggacttatatcgaaagatgactgtcctgga

SEQ ID NO: 266042 - DNA, 30 bp, Artificial Sequence
  Synthetic oligonucleotide
gattaccgtttaatatcaagggaagctgga

SEQ ID NO: 266043 - DNA, 30 bp, Artificial Sequence
  Synthetic oligonucleotide
atctaacaaggcccttaagcgctagctgga

SEQ ID NO: 266044 - DNA, 30 bp, Artificial Sequence
  Synthetic oligonucleotide
tcgtggagtataaaactcgctcacgctgga

SEQ ID NO: 266045 - DNA, 30 bp, Artificial Sequence
  Synthetic oligonucleotide
tggcttgacagtgtcggatctgacgctgga

SEQ ID NO: 266046 - DNA, 30 bp, Artificial Sequence
  Synthetic oligonucleotide
cccgggacgggttctttgatgtcggctgga

SEQ ID NO: 266047 - DNA, 30 bp, Artificial Sequence
  Synthetic oligonucleotide
ggttcaggagccagcagtgggcatgctgga

SEQ ID NO: 266048 - DNA, 30 bp, Artificial Sequence
  Synthetic oligonucleotide
atattgttgtgcggggtgacgattgctgga

SEQ ID NO: 266049 - DNA, 30 bp, Artificial Sequence
  Synthetic oligonucleotide
tgaagaccggcaacaggggcttaatctgga

SEQ ID NO: 266050 - DNA, 30 bp, Artificial Sequence
  Synthetic oligonucleotide
cctctcgacccccagggaggacgatctgga

SEQ ID NO: 266051 - DNA, 30 bp, Artificial Sequence
  Synthetic oligonucleotide
ttagaatggggtcgaccccaaagctctgga

SEQ ID NO: 266052 - DNA, 30 bp, Artificial Sequence
  Synthetic oligonucleotide
tggagagggcacatccgcggcaagtctgga

SEQ ID NO: 266053 - DNA, 30 bp, Artificial Sequence
  Synthetic oligonucleotide
cgtattaccaagaggggtggactgtctgga

SEQ ID NO: 266054 - DNA, 30 bp, Artificial Sequence
  Synthetic oligonucleotide
gaccgatcgggcgtctaggtaggttctgga

SEQ ID NO: 266055 - DNA, 30 bp, Artificial Sequence
  Synthetic oligonucleotide
ccgattgtatggggatttaattaaagtgga

SEQ ID NO: 266056 - DNA, 30 bp, Artificial Sequence
  Synthetic oligonucleotide
ggctaggtagggcgggtcaagtcaagtgga

SEQ ID NO: 266057 - DNA, 30 bp, Artificial Sequence
  Synthetic oligonucleotide
gagcgcctctaggccctcagtaacagtgga

SEQ ID NO: 266058 - DNA, 30 bp, Artificial Sequence
  Synthetic oligonucleotide
ggatgggtcactcatcggggtcacagtgga

SEQ ID NO: 266059 - DNA, 30 bp, Artificial Sequence
  Synthetic oligonucleotide
tataacgctcgagcccttcaggccagtgga

SEQ ID NO: 266060 - DNA, 30 bp, Artificial Sequence
  Synthetic oligonucleotide
ttacacgggccggtaatccgcgcgagtgga

SEQ ID NO: 266061 - DNA, 30 bp, Artificial Sequence
  Synthetic oligonucleotide
tgttgatgccgtggacggtaatggagtgga

SEQ ID NO: 266062 - DNA, 30 bp, Artificial Sequence
  Synthetic oligonucleotide
aatatgccagacttatgtactctgagtgga

SEQ ID NO: 266063 - DNA, 30 bp, Artificial Sequence
  Synthetic oligonucleotide
agttataagtcttacgaccgtgatagtgga

SEQ ID NO: 266064 - DNA, 30 bp, Artificial Sequence
  Synthetic oligonucleotide
aggatgccagctagcgcgccatctagtgga

SEQ ID NO: 266065 - DNA, 30 bp, Artificial Sequence
  Synthetic oligonucleotide
aggacccaaagacacttggtgtttagtgga

SEQ ID NO: 266066 - DNA, 30 bp, Artificial Sequence
  Synthetic oligonucleotide
tgaactcgccctagatcgccctaacgtgga

SEQ ID NO: 266067 - DNA, 30 bp, Artificial Sequence
  Synthetic oligonucleotide
ggtatggtactggctgtaggcacacgtgga

SEQ ID NO: 266068 - DNA, 30 bp, Artificial Sequence
  Synthetic oligonucleotide
ttgtggggagaattttagcgcataggtgga

SEQ ID NO: 266069 - DNA, 30 bp, Artificial Sequence
  Synthetic oligonucleotide
caacagtaaagatcaggtgatcacggtgga

SEQ ID NO: 266070 - DNA, 30 bp, Artificial Sequence
  Synthetic oligonucleotide
atatagcgagacgttgagagttgcggtgga

SEQ ID NO: 266071 - DNA, 30 bp, Artificial Sequence
  Synthetic oligonucleotide
gcatgctagagcaccacaactattggtgga

SEQ ID NO: 266072 - DNA, 30 bp, Artificial Sequence
  Synthetic oligonucleotide
acaaaaaatagtgaatggatctgatgtgga

SEQ ID NO: 266073 - DNA, 30 bp, Artificial Sequence
  Synthetic oligonucleotide
ggccatcccgtcattcccgaacggtgtgga

SEQ ID NO: 266074 - DNA, 30 bp, Artificial Sequence
  Synthetic oligonucleotide
atgcgtggcgccgaaaagagtttgtgtgga

SEQ ID NO: 266075 - DNA, 30 bp, Artificial Sequence
  Synthetic oligonucleotide
agggtataatcggttgttaaatattgtgga

SEQ ID NO: 266076 - DNA, 30 bp, Artificial Sequence
  Synthetic oligonucleotide
gatctcgtcatgtgcggcaacggttgtgga

SEQ ID NO: 266077 - DNA, 30 bp, Artificial Sequence
  Synthetic oligonucleotide
gccaatttgataacagtttacacaattgga

SEQ ID NO: 266078 - DNA, 30 bp, Artificial Sequence
  Synthetic oligonucleotide
gagtagaagggtcgtttgcaaataattgga

SEQ ID NO: 266079 - DNA, 30 bp, Artificial Sequence
  Synthetic oligonucleotide
ttacttccagatgtgggatatgtaattgga

SEQ ID NO: 266080 - DNA, 30 bp, Artificial Sequence
  Synthetic oligonucleotide
gaggagttgggataaaaattgggcattgga

SEQ ID NO: 266081 - DNA, 30 bp, Artificial Sequence
  Synthetic oligonucleotide
gtatagattatcaaatcggtactcattgga

SEQ ID NO: 266082 - DNA, 30 bp, Artificial Sequence
  Synthetic oligonucleotide
tagttggcttatggggtaaataagattgga

SEQ ID NO: 266083 - DNA, 30 bp, Artificial Sequence
  Synthetic oligonucleotide
ccgatgtaacccggcggattggcgattgga

SEQ ID NO: 266084 - DNA, 30 bp, Artificial Sequence
  Synthetic oligonucleotide
agggcgataacattaacatgttatattgga

SEQ ID NO: 266085 - DNA, 30 bp, Artificial Sequence
  Synthetic oligonucleotide
tgggttgtcagaaagaaatgtgaacttgga

SEQ ID NO: 266086 - DNA, 30 bp, Artificial Sequence
  Synthetic oligonucleotide
ccttttaatataaacgagcgcgcagttgga

SEQ ID NO: 266087 - DNA, 30 bp, Artificial Sequence
  Synthetic oligonucleotide
cggagtttcgacgggattaggctagttgga

SEQ ID NO: 266088 - DNA, 30 bp, Artificial Sequence
  Synthetic oligonucleotide
gcgatgcgccaatggttggccaacgttgga

SEQ ID NO: 266089 - DNA, 30 bp, Artificial Sequence
  Synthetic oligonucleotide
cccgcaagcggcgagttcccagccgttgga

SEQ ID NO: 266090 - DNA, 30 bp, Artificial Sequence
  Synthetic oligonucleotide
gagtggtgtgaccgacaaggaggcgttgga

SEQ ID NO: 266091 - DNA, 30 bp, Artificial Sequence
  Synthetic oligonucleotide
ttgcataagctccgttatggggaggttgga

SEQ ID NO: 266092 - DNA, 31 bp, Artificial Sequence
  Synthetic oligonucleotide
aaaacggtaagccacatgtcgaccggttgga

SEQ ID NO: 266093 - DNA, 30 bp, Artificial Sequence
  Synthetic oligonucleotide
gcacctattcaatgaaggaaccatgttgga

SEQ ID NO: 266094 - DNA, 30 bp, Artificial Sequence
  Synthetic oligonucleotide
acgcaagggagttattggtcacctgttgga

SEQ ID NO: 266095 - DNA, 30 bp, Artificial Sequence
  Synthetic oligonucleotide
agacaggtcccatacgtacttgttgttgga

SEQ ID NO: 266096 - DNA, 30 bp, Artificial Sequence
  Synthetic oligonucleotide
cgtttgcgatcgaactgggatagatttgga

SEQ ID NO: 266097 - DNA, 30 bp, Artificial Sequence
  Synthetic oligonucleotide
tggtgggttagtgtcccctcagactttgga

SEQ ID NO: 266098 - DNA, 30 bp, Artificial Sequence
  Synthetic oligonucleotide
ataagtagtacgcctttaacgaagtttgga

SEQ ID NO: 266099 - DNA, 30 bp, Artificial Sequence
  Synthetic oligonucleotide
atttcgtgtatgttcttgcctgagtttgga

SEQ ID NO: 266100 - DNA, 30 bp, Artificial Sequence
  Synthetic oligonucleotide
gcttatacctgtcagacttgcctgtttgga

SEQ ID NO: 266101 - DNA, 30 bp, Artificial Sequence
  Synthetic oligonucleotide
cgcgacactagcggcaaccgccgttttgga

SEQ ID NO: 266102 - DNA, 30 bp, Artificial Sequence
  Synthetic oligonucleotide
aacaaaggcaatggctcgtatcgttttgga

SEQ ID NO: 266103 - DNA, 30 bp, Artificial Sequence
  Synthetic oligonucleotide
actcagcaaagaaacgattcgggttttgga

SEQ ID NO: 266104 - DNA, 30 bp, Artificial Sequence
  Synthetic oligonucleotide
cgtattaataggattctgatacaaaaatga

SEQ ID NO: 266105 - DNA, 31 bp, Artificial Sequence
  Synthetic oligonucleotide
gcgattattagcagctacaagttcaaaatga

SEQ ID NO: 266106 - DNA, 30 bp, Artificial Sequence
  Synthetic oligonucleotide
agttagcagattgtaattttcgtaaaatga

SEQ ID NO: 266107 - DNA, 30 bp, Artificial Sequence
  Synthetic oligonucleotide
gtttctgagggatagcgagaatccaaatga

SEQ ID NO: 266108 - DNA, 30 bp, Artificial Sequence
  Synthetic oligonucleotide
tcagggtgtaattagtgaacgtccaaatga

SEQ ID NO: 266109 - DNA, 30 bp, Artificial Sequence
  Synthetic oligonucleotide
gaacaatgcggagcctacgatcgcaaatga

SEQ ID NO: 266110 - DNA, 30 bp, Artificial Sequence
  Synthetic oligonucleotide
ccaggttcgtattactgtgcacggaaatga

SEQ ID NO: 266111 - DNA, 30 bp, Artificial Sequence
  Synthetic oligonucleotide
gaactgcctcaggttagccgagataaatga

SEQ ID NO: 266112 - DNA, 30 bp, Artificial Sequence
  Synthetic oligonucleotide
tgcctacatcgcgcatgggtgccacaatga

SEQ ID NO: 266113 - DNA, 30 bp, Artificial Sequence
  Synthetic oligonucleotide
ggggtacgtctgtacctctcgcagcaatga

SEQ ID NO: 266114 - DNA, 30 bp, Artificial Sequence
  Synthetic oligonucleotide
cgaggaccgatctgaattggcaggcaatga

SEQ ID NO: 266115 - DNA, 30 bp, Artificial Sequence
  Synthetic oligonucleotide
aggtgcccgggggtgtcgtttttgcaatga

SEQ ID NO: 266116 - DNA, 30 bp, Artificial Sequence
  Synthetic oligonucleotide
agaccaaggatggaccctcattgtcaatga

SEQ ID NO: 266117 - DNA, 30 bp, Artificial Sequence
  Synthetic oligonucleotide
cttagctatgggccttcgatggcagaatga

SEQ ID NO: 266118 - DNA, 30 bp, Artificial Sequence
  Synthetic oligonucleotide
ctgaccgtgtgtttactctcatcagaatga

SEQ ID NO: 266119 - DNA, 30 bp, Artificial Sequence
  Synthetic oligonucleotide
tcgttacttcatgggctatgcttcgaatga

SEQ ID NO: 266120 - DNA, 30 bp, Artificial Sequence
  Synthetic oligonucleotide
atacaacccaccccgtttcccccggaatga

SEQ ID NO: 266121 - DNA, 30 bp, Artificial Sequence
  Synthetic oligonucleotide
catgcacatacctggtaacaggttgaatga

SEQ ID NO: 266122 - DNA, 30 bp, Artificial Sequence
  Synthetic oligonucleotide
gccggtttttacgaatccgataaataatga

SEQ ID NO: 266123 - DNA, 30 bp, Artificial Sequence
  Synthetic oligonucleotide
gagatcgggtgaaatagcttgagataatga

SEQ ID NO: 266124 - DNA, 30 bp, Artificial Sequence
  Synthetic oligonucleotide
tgcacgcataaataataaacaatataatga

SEQ ID NO: 266125 - DNA, 30 bp, Artificial Sequence
  Synthetic oligonucleotide
ccgcagaaaacgtgtatggatagctaatga

SEQ ID NO: 266126 - DNA, 30 bp, Artificial Sequence
  Synthetic oligonucleotide
cctcatctgaagcctatagcgccgtaatga

SEQ ID NO: 266127 - DNA, 30 bp, Artificial Sequence
  Synthetic oligonucleotide
gcgtgtaatagattttgaagaacttaatga

SEQ ID NO: 266128 - DNA, 30 bp, Artificial Sequence
  Synthetic oligonucleotide
tagaaacacctctatgtaggatgttaatga

SEQ ID NO: 266129 - DNA, 30 bp, Artificial Sequence
  Synthetic oligonucleotide
ttgccagacgtaaaatcgtgaagaacatga

SEQ ID NO: 266130 - DNA, 30 bp, Artificial Sequence
  Synthetic oligonucleotide
atgaggctgctcagatcctttagcacatga

SEQ ID NO: 266131 - DNA, 30 bp, Artificial Sequence
  Synthetic oligonucleotide
acgggtaggatgttcggctgcattacatga

SEQ ID NO: 266132 - DNA, 30 bp, Artificial Sequence
  Synthetic oligonucleotide
gcgtttcttaacgctgtcttccaaccatga

SEQ ID NO: 266133 - DNA, 30 bp, Artificial Sequence
  Synthetic oligonucleotide
aaagccgcgttggagcccctaacaccatga

SEQ ID NO: 266134 - DNA, 30 bp, Artificial Sequence
  Synthetic oligonucleotide
catgctaaatattggtgtgactcaccatga

SEQ ID NO: 266135 - DNA, 30 bp, Artificial Sequence
  Synthetic oligonucleotide
gattggatcggccgtatccacctcccatga

SEQ ID NO: 266136 - DNA, 30 bp, Artificial Sequence
  Synthetic oligonucleotide
ttgtacggaaatacgggcaaatgtccatga

SEQ ID NO: 266137 - DNA, 30 bp, Artificial Sequence
  Synthetic oligonucleotide
tactgcagtagtatagagttctaagcatga

SEQ ID NO: 266138 - DNA, 30 bp, Artificial Sequence
  Synthetic oligonucleotide
gactcgattaaaatgcagtgccccgcatga

SEQ ID NO: 266139 - DNA, 30 bp, Artificial Sequence
  Synthetic oligonucleotide
ttaaggaggacaaaagaccccggcgcatga

SEQ ID NO: 266140 - DNA, 30 bp, Artificial Sequence
  Synthetic oligonucleotide
cctttgggccaatacgtaggcaaggcatga

SEQ ID NO: 266141 - DNA, 30 bp, Artificial Sequence
  Synthetic oligonucleotide
ggtttcgaacagtgaacccaacgggcatga

SEQ ID NO: 266142 - DNA, 30 bp, Artificial Sequence
  Synthetic oligonucleotide
atgtacattgagagatgaatgcgggcatga

SEQ ID NO: 266143 - DNA, 30 bp, Artificial Sequence
  Synthetic oligonucleotide
gagtagctcaaaatgcacagaaatgcatga

SEQ ID NO: 266144 - DNA, 30 bp, Artificial Sequence
  Synthetic oligonucleotide
ccagatgtacccatgtcgtgtcgtgcatga

SEQ ID NO: 266145 - DNA, 30 bp, Artificial Sequence
  Synthetic oligonucleotide
taataaactggcgtggttcagccatcatga

SEQ ID NO: 266146 - DNA, 30 bp, Artificial Sequence
  Synthetic oligonucleotide
actcaaccctcgcacacgcgatactcatga

SEQ ID NO: 266147 - DNA, 30 bp, Artificial Sequence
  Synthetic oligonucleotide
agactctgaagcctcaattaaggctcatga

SEQ ID NO: 266148 - DNA, 30 bp, Artificial Sequence
  Synthetic oligonucleotide
ctcctaataatcagtatttggacttcatga

SEQ ID NO: 266149 - DNA, 30 bp, Artificial Sequence
  Synthetic oligonucleotide
accgcgtaagatcaactacagcgttcatga

SEQ ID NO: 266150 - DNA, 30 bp, Artificial Sequence
  Synthetic oligonucleotide
cgtagtctttaccacgtgcgggaaagatga

SEQ ID NO: 266151 - DNA, 30 bp, Artificial Sequence
  Synthetic oligonucleotide
gcactggagcccatcggaccttaaagatga

SEQ ID NO: 266152 - DNA, 30 bp, Artificial Sequence
  Synthetic oligonucleotide
taagataaaagggcaaaaacctcgagatga

SEQ ID NO: 266153 - DNA, 30 bp, Artificial Sequence
  Synthetic oligonucleotide
cgactgccacgggtataatctgttagatga

SEQ ID NO: 266154 - DNA, 30 bp, Artificial Sequence
  Synthetic oligonucleotide
ccagctaaccccggctctctataacgatga

SEQ ID NO: 266155 - DNA, 30 bp, Artificial Sequence
  Synthetic oligonucleotide
aggttcatacaacacacgttacaccgatga

SEQ ID NO: 266156 - DNA, 30 bp, Artificial Sequence
  Synthetic oligonucleotide
cggttccgatagtagaacacgtcgcgatga

SEQ ID NO: 266157 - DNA, 30 bp, Artificial Sequence
  Synthetic oligonucleotide
ttgattgtgctatgtcaatgttttcgatga

SEQ ID NO: 266158 - DNA, 30 bp, Artificial Sequence
  Synthetic oligonucleotide
aagccagccaacagcgttacgaaaggatga

SEQ ID NO: 266159 - DNA, 30 bp, Artificial Sequence
  Synthetic oligonucleotide
cacaccccttgctcaaggccgttaggatga

SEQ ID NO: 266160 - DNA, 30 bp, Artificial Sequence
  Synthetic oligonucleotide
cagcaattcgttatcataacgtacggatga

SEQ ID NO: 266161 - DNA, 30 bp, Artificial Sequence
  Synthetic oligonucleotide
tgtcatgtctattcgggtcggagcggatga

SEQ ID NO: 266162 - DNA, 30 bp, Artificial Sequence
  Synthetic oligonucleotide
ttgggatcccgcacaagttgaatcggatga

SEQ ID NO: 266163 - DNA, 30 bp, Artificial Sequence
  Synthetic oligonucleotide
cgtagaccgagctatcacgtaatcggatga

SEQ ID NO: 266164 - DNA, 30 bp, Artificial Sequence
  Synthetic oligonucleotide
agtcatcacgaagcagcctgggtcggatga

SEQ ID NO: 266165 - DNA, 30 bp, Artificial Sequence
  Synthetic oligonucleotide
gtcaagaatcaactggtgcgtgtcggatga

SEQ ID NO: 266166 - DNA, 30 bp, Artificial Sequence
  Synthetic oligonucleotide
aaccggcacagagacgttgaaaatggatga

SEQ ID NO: 266167 - DNA, 30 bp, Artificial Sequence
  Synthetic oligonucleotide
gtccaaggtgagttctaggtgtgatgatga

SEQ ID NO: 266168 - DNA, 30 bp, Artificial Sequence
  Synthetic oligonucleotide
gccgacacctgaaccgtgcattcctgatga

SEQ ID NO: 266169 - DNA, 30 bp, Artificial Sequence
  Synthetic oligonucleotide
atgatcgcctaccatgacttagggtgatga

SEQ ID NO: 266170 - DNA, 30 bp, Artificial Sequence
  Synthetic oligonucleotide
gaggatgctttgtatgagctcatgtgatga

SEQ ID NO: 266171 - DNA, 30 bp, Artificial Sequence
  Synthetic oligonucleotide
gagaaacatggacagctaactctttgatga

SEQ ID NO: 266172 - DNA, 30 bp, Artificial Sequence
  Synthetic oligonucleotide
ggttggggctcggggtgtaaagaaatatga

SEQ ID NO: 266173 - DNA, 30 bp, Artificial Sequence
  Synthetic oligonucleotide
ggttatctaaaaaatataagtaagatatga

SEQ ID NO: 266174 - DNA, 30 bp, Artificial Sequence
  Synthetic oligonucleotide
gcatactacgctgggttgtgtgacctatga

SEQ ID NO: 266175 - DNA, 30 bp, Artificial Sequence
  Synthetic oligonucleotide
agtaagccaataactccctgcagcctatga

SEQ ID NO: 266176 - DNA, 30 bp, Artificial Sequence
  Synthetic oligonucleotide
gaggcctctctgggttaaagtctcctatga

SEQ ID NO: 266177 - DNA, 30 bp, Artificial Sequence
  Synthetic oligonucleotide
gggccggtgcatgttggtcttttcctatga

SEQ ID NO: 266178 - DNA, 30 bp, Artificial Sequence
  Synthetic oligonucleotide
ataggggatcggacgccttagcagctatga

SEQ ID NO: 266179 - DNA, 30 bp, Artificial Sequence
  Synthetic oligonucleotide
aaccgttattaatgcatagatgggctatga

SEQ ID NO: 266180 - DNA, 30 bp, Artificial Sequence
  Synthetic oligonucleotide
cgcagtgcatcaagccaacactctctatga

SEQ ID NO: 266181 - DNA, 30 bp, Artificial Sequence
  Synthetic oligonucleotide
cggttgtaacattgtaaacttcaagtatga

SEQ ID NO: 266182 - DNA, 30 bp, Artificial Sequence
  Synthetic oligonucleotide
atttaacgttaaaacctgcggaacgtatga

SEQ ID NO: 266183 - DNA, 30 bp, Artificial Sequence
  Synthetic oligonucleotide
cgtatgaaacatggatctaccattgtatga

SEQ ID NO: 266184 - DNA, 30 bp, Artificial Sequence
  Synthetic oligonucleotide
tggcgcaggtaacaatccacgccattatga

SEQ ID NO: 266185 - DNA, 30 bp, Artificial Sequence
  Synthetic oligonucleotide
taatgaacccaggtttattacggattatga

SEQ ID NO: 266186 - DNA, 30 bp, Artificial Sequence
  Synthetic oligonucleotide
tacagtgcatcttgtggctgctgattatga

SEQ ID NO: 266187 - DNA, 30 bp, Artificial Sequence
  Synthetic oligonucleotide
cgagtgtgcaatagcagagccattttatga

SEQ ID NO: 266188 - DNA, 30 bp, Artificial Sequence
  Synthetic oligonucleotide
tttgaaattagagtgtcatacgttttatga

SEQ ID NO: 266189 - DNA, 30 bp, Artificial Sequence
  Synthetic oligonucleotide
gggcaggagaggattgtgacgcaaaactga

SEQ ID NO: 266190 - DNA, 30 bp, Artificial Sequence
  Synthetic oligonucleotide
cccacgagcacacccggacgggaaaactga

SEQ ID NO: 266191 - DNA, 30 bp, Artificial Sequence
  Synthetic oligonucleotide
gtcggtgtttttcactgtaaactcaactga

SEQ ID NO: 266192 - DNA, 30 bp, Artificial Sequence
  Synthetic oligonucleotide
tgttaacaccgccacggatacttcaactga

SEQ ID NO: 266193 - DNA, 30 bp, Artificial Sequence
  Synthetic oligonucleotide
gaagagagggttttgctcggaaataactga

SEQ ID NO: 266194 - DNA, 30 bp, Artificial Sequence
  Synthetic oligonucleotide
gctttatcattatctgacgagtataactga

SEQ ID NO: 266195 - DNA, 30 bp, Artificial Sequence
  Synthetic oligonucleotide
catggtgactctatcctgcgtgttaactga

SEQ ID NO: 266196 - DNA, 30 bp, Artificial Sequence
  Synthetic oligonucleotide
attacagaataccgaaagcgcaaacactga

SEQ ID NO: 266197 - DNA, 30 bp, Artificial Sequence
  Synthetic oligonucleotide
gcgatgctgcacgctgtaggcgaacactga

SEQ ID NO: 266198 - DNA, 30 bp, Artificial Sequence
  Synthetic oligonucleotide
aaccaaaacggggctcgcgatatacactga

SEQ ID NO: 266199 - DNA, 30 bp, Artificial Sequence
  Synthetic oligonucleotide
acgcaggttttgcaacatcgcacccactga

SEQ ID NO: 266200 - DNA, 30 bp, Artificial Sequence
  Synthetic oligonucleotide
gaagtcattaatcagttattaattcactga

SEQ ID NO: 266201 - DNA, 30 bp, Artificial Sequence
  Synthetic oligonucleotide
acctttcgttgtagtaccacgtcagactga

SEQ ID NO: 266202 - DNA, 30 bp, Artificial Sequence
  Synthetic oligonucleotide
gaccgggaagaagcgtaaatgatagactga

SEQ ID NO: 266203 - DNA, 30 bp, Artificial Sequence
  Synthetic oligonucleotide
ggtgctaatctcccttacagataggactga

SEQ ID NO: 266204 - DNA, 30 bp, Artificial Sequence
  Synthetic oligonucleotide
gttgaatcccactacccttcgagtgactga

SEQ ID NO: 266205 - DNA, 30 bp, Artificial Sequence
  Synthetic oligonucleotide
agttcccacttttgtccggaaggtgactga

SEQ ID NO: 266206 - DNA, 30 bp, Artificial Sequence
  Synthetic oligonucleotide
aaatgccatttaatctataagcttgactga

SEQ ID NO: 266207 - DNA, 30 bp, Artificial Sequence
  Synthetic oligonucleotide
accgtggatgatcgtggcaccgaatactga

SEQ ID NO: 266208 - DNA, 31 bp, Artificial Sequence
  Synthetic oligonucleotide
gcagagaacaatttacatgatgtaatactga

SEQ ID NO: 266209 - DNA, 30 bp, Artificial Sequence
  Synthetic oligonucleotide
ggataccgtgcggccaaaagtatatactga

SEQ ID NO: 266210 - DNA, 30 bp, Artificial Sequence
  Synthetic oligonucleotide
ctctatcaggatctcgcggatacttactga

SEQ ID NO: 266211 - DNA, 30 bp, Artificial Sequence
  Synthetic oligonucleotide
agcacgcttgaagtcttagttctaacctga

SEQ ID NO: 266212 - DNA, 30 bp, Artificial Sequence
  Synthetic oligonucleotide
gctggcataagtggccttggggatacctga

SEQ ID NO: 266213 - DNA, 30 bp, Artificial Sequence
  Synthetic oligonucleotide
cgtttagaacctctctggggttttacctga

SEQ ID NO: 266214 - DNA, 30 bp, Artificial Sequence
  Synthetic oligonucleotide
ttaatacagggctcacttattgcaccctga

SEQ ID NO: 266215 - DNA, 30 bp, Artificial Sequence
  Synthetic oligonucleotide
cgcaactatcggcttaggggtgtcccctga

SEQ ID NO: 266216 - DNA, 30 bp, Artificial Sequence
  Synthetic oligonucleotide
accgcagggggtagtgtaaaacatccctga

SEQ ID NO: 266217 - DNA, 30 bp, Artificial Sequence
  Synthetic oligonucleotide
tactctggggaaaattccggcctcgcctga

SEQ ID NO: 266218 - DNA, 30 bp, Artificial Sequence
  Synthetic oligonucleotide
taagccaggccattaacgtatctatcctga

SEQ ID NO: 266219 - DNA, 30 bp, Artificial Sequence
  Synthetic oligonucleotide
attgggtcattgtaggtaaagttatcctga

SEQ ID NO: 266220 - DNA, 30 bp, Artificial Sequence
  Synthetic oligonucleotide
agggtaacaaaccaggttcatacctcctga

SEQ ID NO: 266221 - DNA, 30 bp, Artificial Sequence
  Synthetic oligonucleotide
tagagccctgttacgagtcctacctcctga

SEQ ID NO: 266222 - DNA, 30 bp, Artificial Sequence
  Synthetic oligonucleotide
ctccgcacgtacattataatcgtctcctga

SEQ ID NO: 266223 - DNA, 30 bp, Artificial Sequence
  Synthetic oligonucleotide
ttttagaaggggatccatgatatgtcctga

SEQ ID NO: 266224 - DNA, 30 bp, Artificial Sequence
  Synthetic oligonucleotide
tgcctaatactagggaaaattatttcctga

SEQ ID NO: 266225 - DNA, 30 bp, Artificial Sequence
  Synthetic oligonucleotide
aatttggacttgaataagtaaccaagctga

SEQ ID NO: 266226 - DNA, 30 bp, Artificial Sequence
  Synthetic oligonucleotide
ttcaccaggtctggatcaccccccagctga

SEQ ID NO: 266227 - DNA, 30 bp, Artificial Sequence
  Synthetic oligonucleotide
tggtcgccgtcagaccatcctgccagctga

SEQ ID NO: 266228 - DNA, 30 bp, Artificial Sequence
  Synthetic oligonucleotide
ttattgattggaagagggggccagagctga

SEQ ID NO: 266229 - DNA, 30 bp, Artificial Sequence
  Synthetic oligonucleotide
gggaagcttcgctaatatgcggagagctga

SEQ ID NO: 266230 - DNA, 30 bp, Artificial Sequence
  Synthetic oligonucleotide
ataagggcactgcgactcgcgttgagctga

SEQ ID NO: 266231 - DNA, 30 bp, Artificial Sequence
  Synthetic oligonucleotide
tcattctgagcagctgggtaacccggctga

SEQ ID NO: 266232 - DNA, 30 bp, Artificial Sequence
  Synthetic oligonucleotide
ggcagccgtgcaaggattgatttgggctga

SEQ ID NO: 266233 - DNA, 30 bp, Artificial Sequence
  Synthetic oligonucleotide
ggtcgcccccaagtaattcgaggtggctga

SEQ ID NO: 266234 - DNA, 30 bp, Artificial Sequence
  Synthetic oligonucleotide
atgaggcgtatcaagacttgtccatgctga

SEQ ID NO: 266235 - DNA, 30 bp, Artificial Sequence
  Synthetic oligonucleotide
caaccgcgggagtcacttcattgctgctga

SEQ ID NO: 266236 - DNA, 30 bp, Artificial Sequence
  Synthetic oligonucleotide
agacacccatcgctgagtctaatctgctga

SEQ ID NO: 266237 - DNA, 30 bp, Artificial Sequence
  Synthetic oligonucleotide
gattgcacgggtgaagttcaacattgctga

SEQ ID NO: 266238 - DNA, 30 bp, Artificial Sequence
  Synthetic oligonucleotide
tgacgtacaattttgagattgagaatctga

SEQ ID NO: 266239 - DNA, 30 bp, Artificial Sequence
  Synthetic oligonucleotide
gatcagcgaataaaacatatgtgaatctga

SEQ ID NO: 266240 - DNA, 30 bp, Artificial Sequence
  Synthetic oligonucleotide
ccttgggacttgtgtgtcgcaataatctga

SEQ ID NO: 266241 - DNA, 30 bp, Artificial Sequence
  Synthetic oligonucleotide
actacttattgctcgcaaaaggccatctga

SEQ ID NO: 266242 - DNA, 30 bp, Artificial Sequence
  Synthetic oligonucleotide
tggatctcgtcacgaaaatcaagcatctga

SEQ ID NO: 266243 - DNA, 30 bp, Artificial Sequence
  Synthetic oligonucleotide
ggacatgcatgacttaaaaaatgcatctga

SEQ ID NO: 266244 - DNA, 30 bp, Artificial Sequence
  Synthetic oligonucleotide
ggtaagcgtcctcaatcaggcagtatctga

SEQ ID NO: 266245 - DNA, 30 bp, Artificial Sequence
  Synthetic oligonucleotide
tgtgcaccgaataaccaacgagttatctga

SEQ ID NO: 266246 - DNA, 30 bp, Artificial Sequence
  Synthetic oligonucleotide
gcgcagcgtagagacgcggcggttatctga

SEQ ID NO: 266247 - DNA, 30 bp, Artificial Sequence
  Synthetic oligonucleotide
ccctactttaacgtatacacgaaactctga

SEQ ID NO: 266248 - DNA, 30 bp, Artificial Sequence
  Synthetic oligonucleotide
gacatgcgcgccctagtaagggagctctga

SEQ ID NO: 266249 - DNA, 30 bp, Artificial Sequence
  Synthetic oligonucleotide
cagaagcctccacgtatacatttgctctga

SEQ ID NO: 266250 - DNA, 30 bp, Artificial Sequence
  Synthetic oligonucleotide
gggcgcctcattcgataataaacagtctga

SEQ ID NO: 266251 - DNA, 30 bp, Artificial Sequence
  Synthetic oligonucleotide
taaaagagtatctcggtgctgacagtctga

SEQ ID NO: 266252 - DNA, 30 bp, Artificial Sequence
  Synthetic oligonucleotide
tagatcactatacggtattgctcagtctga

SEQ ID NO: 266253 - DNA, 30 bp, Artificial Sequence
  Synthetic oligonucleotide
gtctgaatttagtattttatgaacgtctga

SEQ ID NO: 266254 - DNA, 30 bp, Artificial Sequence
  Synthetic oligonucleotide
atgccggcattgcgagccggggccgtctga

SEQ ID NO: 266255 - DNA, 30 bp, Artificial Sequence
  Synthetic oligonucleotide
gggaatgtctctattacagatgcggtctga

SEQ ID NO: 266256 - DNA, 30 bp, Artificial Sequence
  Synthetic oligonucleotide
cagtggacctcaggagtaagtcctgtctga

SEQ ID NO: 266257 - DNA, 31 bp, Artificial Sequence
  Synthetic oligonucleotide
tgcgcaaggctacgtgcctaagagtgtctga

SEQ ID NO: 266258 - DNA, 30 bp, Artificial Sequence
  Synthetic oligonucleotide
aagggagcgtcgcaacaagtcggtgtctga

SEQ ID NO: 266259 - DNA, 30 bp, Artificial Sequence
  Synthetic oligonucleotide
actttctctctaatcggaggggttgtctga

SEQ ID NO: 266260 - DNA, 30 bp, Artificial Sequence
  Synthetic oligonucleotide
ggacatgcaaaagcatttttcgacttctga

SEQ ID NO: 266261 - DNA, 30 bp, Artificial Sequence
  Synthetic oligonucleotide
atcagacatcgcgacaagagtcctttctga

SEQ ID NO: 266262 - DNA, 30 bp, Artificial Sequence
  Synthetic oligonucleotide
cggagaaataggcctcgtgtacttttctga

SEQ ID NO: 266263 - DNA, 30 bp, Artificial Sequence
  Synthetic oligonucleotide
tccggagtgcccgggagggaagaaaagtga

SEQ ID NO: 266264 - DNA, 30 bp, Artificial Sequence
  Synthetic oligonucleotide
aagctctaggtttttgttagcggaaagtga

SEQ ID NO: 266265 - DNA, 30 bp, Artificial Sequence
  Synthetic oligonucleotide
gcctgaatctgcagcaagtcacataagtga

SEQ ID NO: 266266 - DNA, 30 bp, Artificial Sequence
  Synthetic oligonucleotide
gactagtcaacgttaatctaccataagtga

SEQ ID NO: 266267 - DNA, 30 bp, Artificial Sequence
  Synthetic oligonucleotide
acgtagcggcgctcgtgagaatataagtga

SEQ ID NO: 266268 - DNA, 30 bp, Artificial Sequence
  Synthetic oligonucleotide
aaggacttgaaacaaagaagttataagtga

SEQ ID NO: 266269 - DNA, 30 bp, Artificial Sequence
  Synthetic oligonucleotide
gatgcatgttacaatgcacgtcttaagtga

SEQ ID NO: 266270 - DNA, 30 bp, Artificial Sequence
  Synthetic oligonucleotide
atagtttagaggtctgggtagggacagtga

SEQ ID NO: 266271 - DNA, 30 bp, Artificial Sequence
  Synthetic oligonucleotide
ttcatcagggcgctggtccagttacagtga

SEQ ID NO: 266272 - DNA, 30 bp, Artificial Sequence
  Synthetic oligonucleotide
gacatcgttacgtcagggcaatctcagtga

SEQ ID NO: 266273 - DNA, 30 bp, Artificial Sequence
  Synthetic oligonucleotide
tatacaatgacgaatgactatgcagagtga

SEQ ID NO: 266274 - DNA, 30 bp, Artificial Sequence
  Synthetic oligonucleotide
cctcccaggtccatgcatacccgagagtga

SEQ ID NO: 266275 - DNA, 30 bp, Artificial Sequence
  Synthetic oligonucleotide
gcaataagcatgccaagttggttagagtga

SEQ ID NO: 266276 - DNA, 30 bp, Artificial Sequence
  Synthetic oligonucleotide
tcgctggccactattgaattccccgagtga

SEQ ID NO: 266277 - DNA, 30 bp, Artificial Sequence
  Synthetic oligonucleotide
ttacgggtcgcaaatgtacagcccgagtga

SEQ ID NO: 266278 - DNA, 30 bp, Artificial Sequence
  Synthetic oligonucleotide
tgtttgaatcggcattaaatctctgagtga

SEQ ID NO: 266279 - DNA, 30 bp, Artificial Sequence
  Synthetic oligonucleotide
agttaggcgttcctatcagtccaatagtga

SEQ ID NO: 266280 - DNA, 30 bp, Artificial Sequence
  Synthetic oligonucleotide
agatacgcaagcagtagttcgcaatagtga

SEQ ID NO: 266281 - DNA, 30 bp, Artificial Sequence
  Synthetic oligonucleotide
aacgttccccgaatccaatgttgatagtga

SEQ ID NO: 266282 - DNA, 30 bp, Artificial Sequence
  Synthetic oligonucleotide
actggtgatcggcatgtcacacggtagtga

SEQ ID NO: 266283 - DNA, 30 bp, Artificial Sequence
  Synthetic oligonucleotide
tgggctacagacagtcacagcagttagtga

SEQ ID NO: 266284 - DNA, 30 bp, Artificial Sequence
  Synthetic oligonucleotide
gagggtaaggggcactctagtctaacgtga

SEQ ID NO: 266285 - DNA, 30 bp, Artificial Sequence
  Synthetic oligonucleotide
atcaaggctcgcgtgtttaccgggacgtga

SEQ ID NO: 266286 - DNA, 30 bp, Artificial Sequence
  Synthetic oligonucleotide
cgtgaataatgtagtaaacggtgaccgtga

SEQ ID NO: 266287 - DNA, 30 bp, Artificial Sequence
  Synthetic oligonucleotide
atgactatatggaccttttattcgccgtga

SEQ ID NO: 266288 - DNA, 30 bp, Artificial Sequence
  Synthetic oligonucleotide
agtgcgacctagtactcagatgctccgtga

SEQ ID NO: 266289 - DNA, 30 bp, Artificial Sequence
  Synthetic oligonucleotide
gattgacctctgctagtgcaagaagcgtga

SEQ ID NO: 266290 - DNA, 30 bp, Artificial Sequence
  Synthetic oligonucleotide
agctccaagttaagaatccggacagcgtga

SEQ ID NO: 266291 - DNA, 30 bp, Artificial Sequence
  Synthetic oligonucleotide
gaagatagatgcctagagatatacgcgtga

SEQ ID NO: 266292 - DNA, 30 bp, Artificial Sequence
  Synthetic oligonucleotide
taactgagcaggaagtgagctgtcgcgtga

SEQ ID NO: 266293 - DNA, 30 bp, Artificial Sequence
  Synthetic oligonucleotide
tgtacgcgactcctgtgattcacggcgtga

SEQ ID NO: 266294 - DNA, 30 bp, Artificial Sequence
  Synthetic oligonucleotide
taacggatgccgttgcaattgggatcgtga

SEQ ID NO: 266295 - DNA, 30 bp, Artificial Sequence
  Synthetic oligonucleotide
cggagaaagtaatatcggttagtatcgtga

SEQ ID NO: 266296 - DNA, 30 bp, Artificial Sequence
  Synthetic oligonucleotide
taagaggggaaaggtttattatattcgtga

SEQ ID NO: 266297 - DNA, 30 bp, Artificial Sequence
  Synthetic oligonucleotide
atgtgtagtggactgtttacaggttcgtga

SEQ ID NO: 266298 - DNA, 30 bp, Artificial Sequence
  Synthetic oligonucleotide
tagatttaggagtggcgtctcttttcgtga

SEQ ID NO: 266299 - DNA, 30 bp, Artificial Sequence
  Synthetic oligonucleotide
tgttatgcaggtctaatgcatacaaggtga

SEQ ID NO: 266300 - DNA, 30 bp, Artificial Sequence
  Synthetic oligonucleotide
gttcttcgacaatgataccagtcaaggtga

SEQ ID NO: 266301 - DNA, 30 bp, Artificial Sequence
  Synthetic oligonucleotide
ttgggcatagcggcgcgatattccaggtga

SEQ ID NO: 266302 - DNA, 30 bp, Artificial Sequence
  Synthetic oligonucleotide
accaagtcaggaccgttcggaagcaggtga

SEQ ID NO: 266303 - DNA, 30 bp, Artificial Sequence
  Synthetic oligonucleotide
agtttactatcgaattgcgtgaagaggtga

SEQ ID NO: 266304 - DNA, 30 bp, Artificial Sequence
  Synthetic oligonucleotide
gtacgtagccttatattcttagggaggtga

SEQ ID NO: 266305 - DNA, 30 bp, Artificial Sequence
  Synthetic oligonucleotide
taacttatgtccatgttaggttctaggtga

SEQ ID NO: 266306 - DNA, 30 bp, Artificial Sequence
  Synthetic oligonucleotide
agctgatgtttgagaacatgtaaccggtga

SEQ ID NO: 266307 - DNA, 30 bp, Artificial Sequence
  Synthetic oligonucleotide
cgatttactctgacacttatctagcggtga

SEQ ID NO: 266308 - DNA, 30 bp, Artificial Sequence
  Synthetic oligonucleotide
cttggttagcacgtgtagttgggtcggtga

SEQ ID NO: 266309 - DNA, 29 bp, Artificial Sequence
  Synthetic oligonucleotide
tattcccccaattagatatagcggggtga

SEQ ID NO: 266310 - DNA, 30 bp, Artificial Sequence
  Synthetic oligonucleotide
ggatatccgagtattctttgaggtgggtga

SEQ ID NO: 266311 - DNA, 30 bp, Artificial Sequence
  Synthetic oligonucleotide
tttgcacacaaaatggagaggtactggtga

SEQ ID NO: 266312 - DNA, 30 bp, Artificial Sequence
  Synthetic oligonucleotide
gacatactagtcatcgttttccgctggtga

SEQ ID NO: 266313 - DNA, 30 bp, Artificial Sequence
  Synthetic oligonucleotide
aacaggtggacttgcacatgtatgtggtga

SEQ ID NO: 266314 - DNA, 30 bp, Artificial Sequence
  Synthetic oligonucleotide
caacaaatgtctacttcttgtctgtggtga

SEQ ID NO: 266315 - DNA, 30 bp, Artificial Sequence
  Synthetic oligonucleotide
agacaagacacacgctccgttgtgtggtga

SEQ ID NO: 266316 - DNA, 30 bp, Artificial Sequence
  Synthetic oligonucleotide
gcttgctggcaggaacatctgatttggtga

SEQ ID NO: 266317 - DNA, 30 bp, Artificial Sequence
  Synthetic oligonucleotide
ccaatgcgcacctcgtaaacatcaatgtga

SEQ ID NO: 266318 - DNA, 30 bp, Artificial Sequence
  Synthetic oligonucleotide
caaaaaacggcagattagtgtttaatgtga

SEQ ID NO: 266319 - DNA, 30 bp, Artificial Sequence
  Synthetic oligonucleotide
cagtatgcttgcgtccacccatacatgtga

SEQ ID NO: 266320 - DNA, 30 bp, Artificial Sequence
  Synthetic oligonucleotide
cgacgggtcggagaagtaggaaccatgtga

SEQ ID NO: 266321 - DNA, 30 bp, Artificial Sequence
  Synthetic oligonucleotide
agccattgaatagctatacaacgcatgtga

SEQ ID NO: 266322 - DNA, 30 bp, Artificial Sequence
  Synthetic oligonucleotide
tgacagtgctgaggtgcagggtgcatgtga

SEQ ID NO: 266323 - DNA, 30 bp, Artificial Sequence
  Synthetic oligonucleotide
taaacttccctcttcaatcttcggatgtga

SEQ ID NO: 266324 - DNA, 30 bp, Artificial Sequence
  Synthetic oligonucleotide
tacagtacggccattccctgtgctatgtga

SEQ ID NO: 266325 - DNA, 30 bp, Artificial Sequence
  Synthetic oligonucleotide
agtgtgtatatgaaaagaggcccgctgtga

SEQ ID NO: 266326 - DNA, 30 bp, Artificial Sequence
  Synthetic oligonucleotide
aagtggtcgacccaggttctcggtctgtga

SEQ ID NO: 266327 - DNA, 30 bp, Artificial Sequence
  Synthetic oligonucleotide
aatgaggtatctaattcagcacccgtgtga

SEQ ID NO: 266328 - DNA, 30 bp, Artificial Sequence
  Synthetic oligonucleotide
gtgaggttcgttatcttgggatatgtgtga

SEQ ID NO: 266329 - DNA, 30 bp, Artificial Sequence
  Synthetic oligonucleotide
gatcccggcagggaggatctagaattgtga

SEQ ID NO: 266330 - DNA, 30 bp, Artificial Sequence
  Synthetic oligonucleotide
tccctaaagtaagggccaagggcgttgtga

SEQ ID NO: 266331 - DNA, 30 bp, Artificial Sequence
  Synthetic oligonucleotide
cgggcatctgtgattgtcattatgttgtga

SEQ ID NO: 266332 - DNA, 30 bp, Artificial Sequence
  Synthetic oligonucleotide
acaaacgaggagactcgcatgtctttgtga

SEQ ID NO: 266333 - DNA, 30 bp, Artificial Sequence
  Synthetic oligonucleotide
ccacaccggggatgcggtgtaagtttgtga

SEQ ID NO: 266334 - DNA, 30 bp, Artificial Sequence
  Synthetic oligonucleotide
ccgaatatattccgggctcgaataaattga

SEQ ID NO: 266335 - DNA, 30 bp, Artificial Sequence
  Synthetic oligonucleotide
cagtttcggctccactatttacataattga

SEQ ID NO: 266336 - DNA, 30 bp, Artificial Sequence
  Synthetic oligonucleotide
atgtaggaacgaaatatagccgttaattga

SEQ ID NO: 266337 - DNA, 30 bp, Artificial Sequence
  Synthetic oligonucleotide
aatgtaggatggatgtaggcggttaattga

SEQ ID NO: 266338 - DNA, 30 bp, Artificial Sequence
  Synthetic oligonucleotide
atatgcccagctattttcggagaacattga

SEQ ID NO: 266339 - DNA, 30 bp, Artificial Sequence
  Synthetic oligonucleotide
gtccgggaatataccgacttataacattga

SEQ ID NO: 266340 - DNA, 30 bp, Artificial Sequence
  Synthetic oligonucleotide
gtatgatctgacgagacggactcccattga

SEQ ID NO: 266341 - DNA, 30 bp, Artificial Sequence
  Synthetic oligonucleotide
gagtaaggggcagtcaagaatgcagattga

SEQ ID NO: 266342 - DNA, 30 bp, Artificial Sequence
  Synthetic oligonucleotide
aatcaaggaggtagtacccgtcgcgattga

SEQ ID NO: 266343 - DNA, 30 bp, Artificial Sequence
  Synthetic oligonucleotide
gttcgcgtcgttgcaagaggtggcgattga

SEQ ID NO: 266344 - DNA, 30 bp, Artificial Sequence
  Synthetic oligonucleotide
cccctagggtccggaagacgtttcgattga

SEQ ID NO: 266345 - DNA, 30 bp, Artificial Sequence
  Synthetic oligonucleotide
gaatgcaacttcataagagttctggattga

SEQ ID NO: 266346 - DNA, 30 bp, Artificial Sequence
  Synthetic oligonucleotide
tttcataaagagcgggacgtagtggattga

SEQ ID NO: 266347 - DNA, 30 bp, Artificial Sequence
  Synthetic oligonucleotide
ctgagcatcttgctgcgagggtatgattga

SEQ ID NO: 266348 - DNA, 30 bp, Artificial Sequence
  Synthetic oligonucleotide
caataactccatcattacgggtcatattga

SEQ ID NO: 266349 - DNA, 30 bp, Artificial Sequence
  Synthetic oligonucleotide
atacgtaaggcgtgaacgtcaatctattga

SEQ ID NO: 266350 - DNA, 30 bp, Artificial Sequence
  Synthetic oligonucleotide
aagccactgtgatagtggtgatattattga

SEQ ID NO: 266351 - DNA, 30 bp, Artificial Sequence
  Synthetic oligonucleotide
actactggcgcttgggtctattgaacttga

SEQ ID NO: 266352 - DNA, 30 bp, Artificial Sequence
  Synthetic oligonucleotide
tcatagtcatttgccacagtcctaacttga

SEQ ID NO: 266353 - DNA, 30 bp, Artificial Sequence
  Synthetic oligonucleotide
acccaacgtgatcaacttcgcgtaacttga

SEQ ID NO: 266354 - DNA, 30 bp, Artificial Sequence
  Synthetic oligonucleotide
caactatagggcatacgaacatcgacttga

SEQ ID NO: 266355 - DNA, 30 bp, Artificial Sequence
  Synthetic oligonucleotide
ccacaactgatcccatgtggcgctacttga

SEQ ID NO: 266356 - DNA, 30 bp, Artificial Sequence
  Synthetic oligonucleotide
cctttgtcttagtggggcagtcccccttga

SEQ ID NO: 266357 - DNA, 30 bp, Artificial Sequence
  Synthetic oligonucleotide
tagtggcgaaaagctagcggcaaagcttga

SEQ ID NO: 266358 - DNA, 30 bp, Artificial Sequence
  Synthetic oligonucleotide
ggagcttttacatacagtgttcaagcttga

SEQ ID NO: 266359 - DNA, 30 bp, Artificial Sequence
  Synthetic oligonucleotide
ctggtagtgtcagaatcgggtctagcttga

SEQ ID NO: 266360 - DNA, 30 bp, Artificial Sequence
  Synthetic oligonucleotide
cccagcgacattgtcctctaacacgcttga

SEQ ID NO: 266361 - DNA, 30 bp, Artificial Sequence
  Synthetic oligonucleotide
ccggtctcattacatcgttcatgcgcttga

SEQ ID NO: 266362 - DNA, 30 bp, Artificial Sequence
  Synthetic oligonucleotide
tcaactacacgtacgacaaccaatgcttga

SEQ ID NO: 266363 - DNA, 30 bp, Artificial Sequence
  Synthetic oligonucleotide
gtaatcagttagaaactccttgttgcttga

SEQ ID NO: 266364 - DNA, 30 bp, Artificial Sequence
  Synthetic oligonucleotide
cggtaccgatgtatgctccgttggtcttga

SEQ ID NO: 266365 - DNA, 30 bp, Artificial Sequence
  Synthetic oligonucleotide
tgatccagaggactacgaggtttgtcttga

SEQ ID NO: 266366 - DNA, 30 bp, Artificial Sequence
  Synthetic oligonucleotide
ccaccccacgaaaggcctcatacttcttga

SEQ ID NO: 266367 - DNA, 30 bp, Artificial Sequence
  Synthetic oligonucleotide
ggggttgccgcggagtcgagatgttcttga

SEQ ID NO: 266368 - DNA, 30 bp, Artificial Sequence
  Synthetic oligonucleotide
acgactgtatcggcttagccgggaagttga

SEQ ID NO: 266369 - DNA, 31 bp, Artificial Sequence
  Synthetic oligonucleotide
agaagacgcttcatccagcaacatgagttga

SEQ ID NO: 266370 - DNA, 30 bp, Artificial Sequence
  Synthetic oligonucleotide
cgtcgtaggtacatttttgcgatgagttga

SEQ ID NO: 266371 - DNA, 30 bp, Artificial Sequence
  Synthetic oligonucleotide
caaatcccctgttgggtgtacttgagttga

SEQ ID NO: 266372 - DNA, 30 bp, Artificial Sequence
  Synthetic oligonucleotide
aatggcacgggatgggtggtccgtagttga

SEQ ID NO: 266373 - DNA, 30 bp, Artificial Sequence
  Synthetic oligonucleotide
catgggcctctacacattgataaacgttga

SEQ ID NO: 266374 - DNA, 30 bp, Artificial Sequence
  Synthetic oligonucleotide
ccatcgaacagcgcacgaccaacacgttga

SEQ ID NO: 266375 - DNA, 30 bp, Artificial Sequence
  Synthetic oligonucleotide
actcctacctaaggacagacaggacgttga

SEQ ID NO: 266376 - DNA, 31 bp, Artificial Sequence
  Synthetic oligonucleotide
ataacgccccaggctcgggcgagttcgttga

SEQ ID NO: 266377 - DNA, 30 bp, Artificial Sequence
  Synthetic oligonucleotide
atgatcatactcacacgagctgttcgttga

SEQ ID NO: 266378 - DNA, 30 bp, Artificial Sequence
  Synthetic oligonucleotide
gccccgatccctcaaggggaatcaggttga

SEQ ID NO: 266379 - DNA, 30 bp, Artificial Sequence
  Synthetic oligonucleotide
ccgtacagcgattacaaatcctacggttga

SEQ ID NO: 266380 - DNA, 30 bp, Artificial Sequence
  Synthetic oligonucleotide
acggggggtcgttgctgaaattagggttga

SEQ ID NO: 266381 - DNA, 30 bp, Artificial Sequence
  Synthetic oligonucleotide
aaggcagctgaactgctaatcacgggttga

SEQ ID NO: 266382 - DNA, 30 bp, Artificial Sequence
  Synthetic oligonucleotide
tatgggttccttcgatggaagaggggttga

SEQ ID NO: 266383 - DNA, 30 bp, Artificial Sequence
  Synthetic oligonucleotide
ggagaattttggtgagtccattggggttga

SEQ ID NO: 266384 - DNA, 31 bp, Artificial Sequence
  Synthetic oligonucleotide
aattagctaatcatcaggccgaatgggttga

SEQ ID NO: 266385 - DNA, 30 bp, Artificial Sequence
  Synthetic oligonucleotide
gcatatcctgataaaaacgcgttgggttga

SEQ ID NO: 266386 - DNA, 30 bp, Artificial Sequence
  Synthetic oligonucleotide
ccaagtgtggacgtcattaaccatggttga

SEQ ID NO: 266387 - DNA, 30 bp, Artificial Sequence
  Synthetic oligonucleotide
aaacccaattcaaaaaaactcactggttga

SEQ ID NO: 266388 - DNA, 30 bp, Artificial Sequence
  Synthetic oligonucleotide
cgtctgggcgaagtctagtagactggttga

SEQ ID NO: 266389 - DNA, 30 bp, Artificial Sequence
  Synthetic oligonucleotide
gctaacagtatcatccaatcgacatgttga

SEQ ID NO: 266390 - DNA, 30 bp, Artificial Sequence
  Synthetic oligonucleotide
tagtgtcaacggcgcaacaaactgtgttga

SEQ ID NO: 266391 - DNA, 30 bp, Artificial Sequence
  Synthetic oligonucleotide
cacatataagggcgtgaagtatattgttga

SEQ ID NO: 266392 - DNA, 30 bp, Artificial Sequence
  Synthetic oligonucleotide
ggttgctcacttgcacacactccttgttga

SEQ ID NO: 266393 - DNA, 30 bp, Artificial Sequence
  Synthetic oligonucleotide
cattgaactgcccgcttataaggttgttga

SEQ ID NO: 266394 - DNA, 30 bp, Artificial Sequence
  Synthetic oligonucleotide
gagaggtcatgcgctagcagtgcgatttga

SEQ ID NO: 266395 - DNA, 30 bp, Artificial Sequence
  Synthetic oligonucleotide
ctctagtctcttaatgtctgccctatttga

SEQ ID NO: 266396 - DNA, 30 bp, Artificial Sequence
  Synthetic oligonucleotide
tactcctttgacacattcaagccactttga

SEQ ID NO: 266397 - DNA, 30 bp, Artificial Sequence
  Synthetic oligonucleotide
ttaattcgggccttagggatactgctttga

SEQ ID NO: 266398 - DNA, 30 bp, Artificial Sequence
  Synthetic oligonucleotide
acacagcgcgacgatttaggtcaagtttga

SEQ ID NO: 266399 - DNA, 30 bp, Artificial Sequence
  Synthetic oligonucleotide
ggagtttactaaccaggcgtaccagtttga

SEQ ID NO: 266400 - DNA, 30 bp, Artificial Sequence
  Synthetic oligonucleotide
gaagatgatgatgccatcttatcagtttga

SEQ ID NO: 266401 - DNA, 30 bp, Artificial Sequence
  Synthetic oligonucleotide
attcgtaagtattaaggatgtgacgtttga

SEQ ID NO: 266402 - DNA, 30 bp, Artificial Sequence
  Synthetic oligonucleotide
cgagcaaacttgcctcgttgacgggtttga

SEQ ID NO: 266403 - DNA, 30 bp, Artificial Sequence
  Synthetic oligonucleotide
accgtcgaggaactctcgataggggtttga

SEQ ID NO: 266404 - DNA, 30 bp, Artificial Sequence
  Synthetic oligonucleotide
ggcctggttaaggcgaacaccccgttttga

SEQ ID NO: 266405 - DNA, 30 bp, Artificial Sequence
  Synthetic oligonucleotide
tatgttacggttgatgccaagaggttttga

SEQ ID NO: 266406 - DNA, 30 bp, Artificial Sequence
  Synthetic oligonucleotide
actcaacggtgcgcggtacgtctgttttga

SEQ ID NO: 266407 - DNA, 30 bp, Artificial Sequence
  Synthetic oligonucleotide
tctgattaaaatcaaaatgcatctttttga

SEQ ID NO: 266408 - DNA, 30 bp, Artificial Sequence
  Synthetic oligonucleotide
gatgggtaactggggcgggaacgtttttga

SEQ ID NO: 266409 - DNA, 30 bp, Artificial Sequence
  Synthetic oligonucleotide
gtctgcggtcagatccctttgtgtttttga

SEQ ID NO: 266410 - DNA, 30 bp, Artificial Sequence
  Synthetic oligonucleotide
gaacttcatctggtttgccacgagaaaata

SEQ ID NO: 266411 - DNA, 30 bp, Artificial Sequence
  Synthetic oligonucleotide
tcagggtcgacgcaagcaccaccgaaaata

SEQ ID NO: 266412 - DNA, 30 bp, Artificial Sequence
  Synthetic oligonucleotide
tggcccgaatcgtctatcagcatgaaaata

SEQ ID NO: 266413 - DNA, 30 bp, Artificial Sequence
  Synthetic oligonucleotide
cccaaaacgcagttagggttcgtgaaaata

SEQ ID NO: 266414 - DNA, 30 bp, Artificial Sequence
  Synthetic oligonucleotide
caggtgcaaaaatccgtgtaacttaaaata

SEQ ID NO: 266415 - DNA, 30 bp, Artificial Sequence
  Synthetic oligonucleotide
catagtcaacgcaagtgcggggttaaaata

SEQ ID NO: 266416 - DNA, 30 bp, Artificial Sequence
  Synthetic oligonucleotide
gcattagcagaatacatagagctacaaata

SEQ ID NO: 266417 - DNA, 30 bp, Artificial Sequence
  Synthetic oligonucleotide
cagatcaggatgtgggctagtttacaaata

SEQ ID NO: 266418 - DNA, 30 bp, Artificial Sequence
  Synthetic oligonucleotide
gcaagtatgcctggaatgctgcaccaaata

SEQ ID NO: 266419 - DNA, 30 bp, Artificial Sequence
  Synthetic oligonucleotide
ccggaccggtacgaccaggttcaccaaata

SEQ ID NO: 266420 - DNA, 30 bp, Artificial Sequence
  Synthetic oligonucleotide
ctcgcttaagcgaccctgatacggcaaata

SEQ ID NO: 266421 - DNA, 30 bp, Artificial Sequence
  Synthetic oligonucleotide
cgcctccatcgccaaagggctgtgcaaata

SEQ ID NO: 266422 - DNA, 30 bp, Artificial Sequence
  Synthetic oligonucleotide
gggcctgaccgtaagagatggaatcaaata

SEQ ID NO: 266423 - DNA, 30 bp, Artificial Sequence
  Synthetic oligonucleotide
gcaacgtaggcgggccacttgaatcaaata

SEQ ID NO: 266424 - DNA, 30 bp, Artificial Sequence
  Synthetic oligonucleotide
taaaactcagaactccatcatattcaaata

SEQ ID NO: 266425 - DNA, 30 bp, Artificial Sequence
  Synthetic oligonucleotide
ccgaatgtaatggtcttggaataagaaata

SEQ ID NO: 266426 - DNA, 30 bp, Artificial Sequence
  Synthetic oligonucleotide
ggtacaggcccgggatagatataagaaata

SEQ ID NO: 266427 - DNA, 30 bp, Artificial Sequence
  Synthetic oligonucleotide
ccactgggggtagaactgcgtgcagaaata

SEQ ID NO: 266428 - DNA, 30 bp, Artificial Sequence
  Synthetic oligonucleotide
ggcgtacgttaaagagtatgtatagaaata

SEQ ID NO: 266429 - DNA, 30 bp, Artificial Sequence
  Synthetic oligonucleotide
tggcgctatctaaccgatgccttcgaaata

SEQ ID NO: 266430 - DNA, 30 bp, Artificial Sequence
  Synthetic oligonucleotide
atcgcgacaaactttgctgcgaaggaaata

SEQ ID NO: 266431 - DNA, 30 bp, Artificial Sequence
  Synthetic oligonucleotide
gttgattactcaaatgtagtacaggaaata

SEQ ID NO: 266432 - DNA, 30 bp, Artificial Sequence
  Synthetic oligonucleotide
tgcggccgtcagcggctgcccacggaaata

SEQ ID NO: 266433 - DNA, 30 bp, Artificial Sequence
  Synthetic oligonucleotide
tagttagggctcgattcatgagcggaaata

SEQ ID NO: 266434 - DNA, 30 bp, Artificial Sequence
  Synthetic oligonucleotide
tcagatactacggctctcatggcggaaata

SEQ ID NO: 266435 - DNA, 30 bp, Artificial Sequence
  Synthetic oligonucleotide
gaacgatgcaccgaggccgcaagggaaata

SEQ ID NO: 266436 - DNA, 30 bp, Artificial Sequence
  Synthetic oligonucleotide
tttgggcgaaaagaaaaatttttggaaata

SEQ ID NO: 266437 - DNA, 30 bp, Artificial Sequence
  Synthetic oligonucleotide
gcatgtgaatcgaagtgcacgcatgaaata

SEQ ID NO: 266438 - DNA, 30 bp, Artificial Sequence
  Synthetic oligonucleotide
tatctggccataaacgtgcctgattaaata

SEQ ID NO: 266439 - DNA, 30 bp, Artificial Sequence
  Synthetic oligonucleotide
aaagaggcaacgtaatctggaacttaaata

SEQ ID NO: 266440 - DNA, 30 bp, Artificial Sequence
  Synthetic oligonucleotide
taaataaggccaggcaggtcaaaaacaata

SEQ ID NO: 266441 - DNA, 30 bp, Artificial Sequence
  Synthetic oligonucleotide
ccgggtcaatcgaccgaggttaaaacaata

SEQ ID NO: 266442 - DNA, 30 bp, Artificial Sequence
  Synthetic oligonucleotide
cagctcgtttgtaaaacctatgtaacaata

SEQ ID NO: 266443 - DNA, 30 bp, Artificial Sequence
  Synthetic oligonucleotide
tctccttatcgtcgcttgtcaagcacaata

SEQ ID NO: 266444 - DNA, 30 bp, Artificial Sequence
  Synthetic oligonucleotide
actgaaattggggaacgtttaaagacaata

SEQ ID NO: 266445 - DNA, 30 bp, Artificial Sequence
  Synthetic oligonucleotide
tctagatgtcgactcgcgtaccagacaata

SEQ ID NO: 266446 - DNA, 30 bp, Artificial Sequence
  Synthetic oligonucleotide
ctgtatggtagtgacacactagagacaata

SEQ ID NO: 266447 - DNA, 30 bp, Artificial Sequence
  Synthetic oligonucleotide
gccaaacaaatgcattattaaaggacaata

SEQ ID NO: 266448 - DNA, 30 bp, Artificial Sequence
  Synthetic oligonucleotide
tggtccggcacgtggggacgggtgacaata

SEQ ID NO: 266449 - DNA, 30 bp, Artificial Sequence
  Synthetic oligonucleotide
tgcaagaggacagcgtgaacagatacaata

SEQ ID NO: 266450 - DNA, 30 bp, Artificial Sequence
  Synthetic oligonucleotide
gtgtgatcttacgcccttggtgctacaata

SEQ ID NO: 266451 - DNA, 30 bp, Artificial Sequence
  Synthetic oligonucleotide
agagggcatcccaaccgaaagtctacaata

SEQ ID NO: 266452 - DNA, 30 bp, Artificial Sequence
  Synthetic oligonucleotide
ttcctcacgctttgaacaagccgaccaata

SEQ ID NO: 266453 - DNA, 30 bp, Artificial Sequence
  Synthetic oligonucleotide
ggatgagtccggaggcccagccgaccaata

SEQ ID NO: 266454 - DNA, 30 bp, Artificial Sequence
  Synthetic oligonucleotide
ctgtgactatatggagcgttgtacccaata

SEQ ID NO: 266455 - DNA, 30 bp, Artificial Sequence
  Synthetic oligonucleotide
gccgttgtatgaaatattgtcccgccaata

SEQ ID NO: 266456 - DNA, 30 bp, Artificial Sequence
  Synthetic oligonucleotide
gggactcttcggggcaattttccgccaata

SEQ ID NO: 266457 - DNA, 30 bp, Artificial Sequence
  Synthetic oligonucleotide
catccttgcgatggtgaggagaggccaata

SEQ ID NO: 266458 - DNA, 30 bp, Artificial Sequence
  Synthetic oligonucleotide
tagaggggcggtgagctccataatccaata

SEQ ID NO: 266459 - DNA, 30 bp, Artificial Sequence
  Synthetic oligonucleotide
tctgatggaagtagcaacacctctccaata

SEQ ID NO: 266460 - DNA, 30 bp, Artificial Sequence
  Synthetic oligonucleotide
aactagctggcatatcaccagatagcaata

SEQ ID NO: 266461 - DNA, 30 bp, Artificial Sequence
  Synthetic oligonucleotide
ttgctattccaacaggagctgatcgcaata

SEQ ID NO: 266462 - DNA, 30 bp, Artificial Sequence
  Synthetic oligonucleotide
gcggacagcgcggtcacgtatacggcaata

SEQ ID NO: 266463 - DNA, 30 bp, Artificial Sequence
  Synthetic oligonucleotide
tcatacacttatgaagcacgaggggcaata

SEQ ID NO: 266464 - DNA, 30 bp, Artificial Sequence
  Synthetic oligonucleotide
ttgcgaggttaacctacagacggggcaata

SEQ ID NO: 266465 - DNA, 30 bp, Artificial Sequence
  Synthetic oligonucleotide
cgaaagattcatttaactagctatgcaata

SEQ ID NO: 266466 - DNA, 30 bp, Artificial Sequence
  Synthetic oligonucleotide
cggtcctgcgcccctgcagccaaatcaata

SEQ ID NO: 266467 - DNA, 30 bp, Artificial Sequence
  Synthetic oligonucleotide
gcatttgttaacgttgaacaaagttcaata

SEQ ID NO: 266468 - DNA, 30 bp, Artificial Sequence
  Synthetic oligonucleotide
gcttagcgccgtgtttcttggatttcaata

SEQ ID NO: 266469 - DNA, 30 bp, Artificial Sequence
  Synthetic oligonucleotide
gtttgcatagagtagagctacagaagaata

SEQ ID NO: 266470 - DNA, 30 bp, Artificial Sequence
  Synthetic oligonucleotide
ttctcatagttaatagggatagagagaata

SEQ ID NO: 266471 - DNA, 30 bp, Artificial Sequence
  Synthetic oligonucleotide
aagccctgagagttctttggctggagaata

SEQ ID NO: 266472 - DNA, 30 bp, Artificial Sequence
  Synthetic oligonucleotide
gcgtcagaaattcttaagagatctagaata

SEQ ID NO: 266473 - DNA, 30 bp, Artificial Sequence
  Synthetic oligonucleotide
ggtgaaggctccgtacttgtcggtagaata

SEQ ID NO: 266474 - DNA, 30 bp, Artificial Sequence
  Synthetic oligonucleotide
tacggcttttcaaggcgttagggacgaata

SEQ ID NO: 266475 - DNA, 30 bp, Artificial Sequence
  Synthetic oligonucleotide
gtagataatcgtcttacatggaaccgaata

SEQ ID NO: 266476 - DNA, 30 bp, Artificial Sequence
  Synthetic oligonucleotide
tgccgatatgaggctgatgtcatccgaata

SEQ ID NO: 266477 - DNA, 30 bp, Artificial Sequence
  Synthetic oligonucleotide
tggacataaaaaccgtcaatagtgcgaata

SEQ ID NO: 266478 - DNA, 30 bp, Artificial Sequence
  Synthetic oligonucleotide
aaagtgccgtaaatagactacgatcgaata

SEQ ID NO: 266479 - DNA, 30 bp, Artificial Sequence
  Synthetic oligonucleotide
gtaactataagaggggatgaacctcgaata

SEQ ID NO: 266480 - DNA, 30 bp, Artificial Sequence
  Synthetic oligonucleotide
caatgcgagaatggactgctcgctcgaata

SEQ ID NO: 266481 - DNA, 30 bp, Artificial Sequence
  Synthetic oligonucleotide
gatctgtaagcggcataataggctcgaata

SEQ ID NO: 266482 - DNA, 30 bp, Artificial Sequence
  Synthetic oligonucleotide
taaagtttagaccggtagaatgctcgaata

SEQ ID NO: 266483 - DNA, 30 bp, Artificial Sequence
  Synthetic oligonucleotide
aagcctcgacgggcaaatctgcttcgaata

SEQ ID NO: 266484 - DNA, 30 bp, Artificial Sequence
  Synthetic oligonucleotide
cctcggtccttaactatgtgcaaaggaata

SEQ ID NO: 266485 - DNA, 30 bp, Artificial Sequence
  Synthetic oligonucleotide
tgtttagataataatcggacctaaggaata

SEQ ID NO: 266486 - DNA, 30 bp, Artificial Sequence
  Synthetic oligonucleotide
gactccgtagtaacatcgacacacggaata

SEQ ID NO: 266487 - DNA, 30 bp, Artificial Sequence
  Synthetic oligonucleotide
aacttgctgatgcgtgagctccagggaata

SEQ ID NO: 266488 - DNA, 30 bp, Artificial Sequence
  Synthetic oligonucleotide
catgacccgcacaggacatctgagggaata

SEQ ID NO: 266489 - DNA, 30 bp, Artificial Sequence
  Synthetic oligonucleotide
tgtcctacgagggatcaccctccgggaata

SEQ ID NO: 266490 - DNA, 30 bp, Artificial Sequence
  Synthetic oligonucleotide
taggaacccttcactagccctccgggaata

SEQ ID NO: 266491 - DNA, 30 bp, Artificial Sequence
  Synthetic oligonucleotide
tgggtgggaattgatctatcagtgggaata

SEQ ID NO: 266492 - DNA, 30 bp, Artificial Sequence
  Synthetic oligonucleotide
ttctaggcagtttccgcatactctggaata

SEQ ID NO: 266493 - DNA, 30 bp, Artificial Sequence
  Synthetic oligonucleotide
ccatctgcgctgtgcgggacctctggaata

SEQ ID NO: 266494 - DNA, 28 bp, Artificial Sequence
  Synthetic oligonucleotide
acttcaacagggtggagtgggatgaata

SEQ ID NO: 266495 - DNA, 30 bp, Artificial Sequence
  Synthetic oligonucleotide
attaagagtactctacagaagtgatgaata

SEQ ID NO: 266496 - DNA, 30 bp, Artificial Sequence
  Synthetic oligonucleotide
gaatcggcgagggatctgtcgtgatgaata

SEQ ID NO: 266497 - DNA, 30 bp, Artificial Sequence
  Synthetic oligonucleotide
caaactctatcgacagggtggccgtgaata

SEQ ID NO: 266498 - DNA, 30 bp, Artificial Sequence
  Synthetic oligonucleotide
aacaggcgcatgaataatgagctgtgaata

SEQ ID NO: 266499 - DNA, 30 bp, Artificial Sequence
  Synthetic oligonucleotide
ttgacgatacggcctaatcctgattgaata

SEQ ID NO: 266500 - DNA, 30 bp, Artificial Sequence
  Synthetic oligonucleotide
ggaacaaaatccgtgcacagttattgaata

SEQ ID NO: 266501 - DNA, 30 bp, Artificial Sequence
  Synthetic oligonucleotide
cacacgaactgcttgcattatgcaataata

SEQ ID NO: 266502 - DNA, 30 bp, Artificial Sequence
  Synthetic oligonucleotide
atagccgacactaccctaattcacataata

SEQ ID NO: 266503 - DNA, 30 bp, Artificial Sequence
  Synthetic oligonucleotide
aacgtcggttccgcacgccacgtcataata

SEQ ID NO: 266504 - DNA, 30 bp, Artificial Sequence
  Synthetic oligonucleotide
caccctcaccgtccagttacgtcgataata

SEQ ID NO: 266505 - DNA, 30 bp, Artificial Sequence
  Synthetic oligonucleotide
tgatctgaagttataaatccccggataata

SEQ ID NO: 266506 - DNA, 30 bp, Artificial Sequence
  Synthetic oligonucleotide
taacgtaggggagccacagttaatataata

SEQ ID NO: 266507 - DNA, 30 bp, Artificial Sequence
  Synthetic oligonucleotide
gatacctcagtctgggcgcaggctataata

SEQ ID NO: 266508 - DNA, 30 bp, Artificial Sequence
  Synthetic oligonucleotide
aagcaacagcaagtctaacgctctataata

SEQ ID NO: 266509 - DNA, 30 bp, Artificial Sequence
  Synthetic oligonucleotide
ggcgaatgcgctacttgtaagtgtataata

SEQ ID NO: 266510 - DNA, 30 bp, Artificial Sequence
  Synthetic oligonucleotide
aagccaagtggattctagcaggaactaata

SEQ ID NO: 266511 - DNA, 30 bp, Artificial Sequence
  Synthetic oligonucleotide
acagtttgtcgtgtacgtcggatactaata

SEQ ID NO: 266512 - DNA, 30 bp, Artificial Sequence
  Synthetic oligonucleotide
gtagtcacgctcactaccggagacctaata

SEQ ID NO: 266513 - DNA, 30 bp, Artificial Sequence
  Synthetic oligonucleotide
gcaaagcggagttgggcgaattacctaata

SEQ ID NO: 266514 - DNA, 30 bp, Artificial Sequence
  Synthetic oligonucleotide
actatctaatagaggtacattccgctaata

SEQ ID NO: 266515 - DNA, 30 bp, Artificial Sequence
  Synthetic oligonucleotide
agagctgagtttatgattgtgtatctaata

SEQ ID NO: 266516 - DNA, 30 bp, Artificial Sequence
  Synthetic oligonucleotide
tatcgtgtggcgtaacttggtgctctaata

SEQ ID NO: 266517 - DNA, 30 bp, Artificial Sequence
  Synthetic oligonucleotide
gaacagctggagttcctaaaaagagtaata

SEQ ID NO: 266518 - DNA, 30 bp, Artificial Sequence
  Synthetic oligonucleotide
atagtcgttgggtaacaggaaagagtaata

SEQ ID NO: 266519 - DNA, 30 bp, Artificial Sequence
  Synthetic oligonucleotide
gccggcagttgtgttggtgctatagtaata

SEQ ID NO: 266520 - DNA, 30 bp, Artificial Sequence
  Synthetic oligonucleotide
gcgatactcaccttagctgacaccgtaata

SEQ ID NO: 266521 - DNA, 30 bp, Artificial Sequence
  Synthetic oligonucleotide
gattggatagtagctggtgcgtccgtaata

SEQ ID NO: 266522 - DNA, 30 bp, Artificial Sequence
  Synthetic oligonucleotide
gacttcaagccattcacaatctgcgtaata

SEQ ID NO: 266523 - DNA, 30 bp, Artificial Sequence
  Synthetic oligonucleotide
ccattcattgttaggcgaaccatcgtaata

SEQ ID NO: 266524 - DNA, 30 bp, Artificial Sequence
  Synthetic oligonucleotide
tataggaaatccaataagagcctcgtaata

SEQ ID NO: 266525 - DNA, 30 bp, Artificial Sequence
  Synthetic oligonucleotide
tgggtggcacaggtgggtcgtcaggtaata

SEQ ID NO: 266526 - DNA, 30 bp, Artificial Sequence
  Synthetic oligonucleotide
ggtgtcgaattatgagcagatgaggtaata

SEQ ID NO: 266527 - DNA, 30 bp, Artificial Sequence
  Synthetic oligonucleotide
atttgaccacggagagtacctaatgtaata

SEQ ID NO: 266528 - DNA, 30 bp, Artificial Sequence
  Synthetic oligonucleotide
acgcaagcaggagtacctgcctctgtaata

SEQ ID NO: 266529 - DNA, 30 bp, Artificial Sequence
  Synthetic oligonucleotide
ggaaactatgtccacagaatgatattaata

SEQ ID NO: 266530 - DNA, 30 bp, Artificial Sequence
  Synthetic oligonucleotide
tatcattggccactgtgggatatattaata

SEQ ID NO: 266531 - DNA, 30 bp, Artificial Sequence
  Synthetic oligonucleotide
catattgtccaggggacgttagacttaata

SEQ ID NO: 266532 - DNA, 30 bp, Artificial Sequence
  Synthetic oligonucleotide
aaggttggtacctcttaatacatcttaata

SEQ ID NO: 266533 - DNA, 30 bp, Artificial Sequence
  Synthetic oligonucleotide
agtctaacacggtattccagcctcttaata

SEQ ID NO: 266534 - DNA, 30 bp, Artificial Sequence
  Synthetic oligonucleotide
ctggggcctgttcccttttgagcaaacata

SEQ ID NO: 266535 - DNA, 30 bp, Artificial Sequence
  Synthetic oligonucleotide
aacatggcgtcctgcggctgttgaaacata

SEQ ID NO: 266536 - DNA, 30 bp, Artificial Sequence
  Synthetic oligonucleotide
gtgaaagctcgcacttactatttaaacata

SEQ ID NO: 266537 - DNA, 30 bp, Artificial Sequence
  Synthetic oligonucleotide
gcggtcaccgcccagagttctaacaacata

SEQ ID NO: 266538 - DNA, 30 bp, Artificial Sequence
  Synthetic oligonucleotide
gtcacataagaacatggtcatgccaacata

SEQ ID NO: 266539 - DNA, 30 bp, Artificial Sequence
  Synthetic oligonucleotide
aacgttctggccgtcgattgtgtcaacata

SEQ ID NO: 266540 - DNA, 30 bp, Artificial Sequence
  Synthetic oligonucleotide
tataagagtacgtggcgctggattaacata

SEQ ID NO: 266541 - DNA, 30 bp, Artificial Sequence
  Synthetic oligonucleotide
atttaatacatgactggcaggcttaacata

SEQ ID NO: 266542 - DNA, 30 bp, Artificial Sequence
  Synthetic oligonucleotide
ctcactggacgtcaaaaggtccaacacata

SEQ ID NO: 266543 - DNA, 30 bp, Artificial Sequence
  Synthetic oligonucleotide
atattagtaaagtaaagatccacgcacata

SEQ ID NO: 266544 - DNA, 30 bp, Artificial Sequence
  Synthetic oligonucleotide
accagcagcatatacatcaatgttcacata

SEQ ID NO: 266545 - DNA, 30 bp, Artificial Sequence
  Synthetic oligonucleotide
agtgtgctgcagagtaaccacgcagacata

SEQ ID NO: 266546 - DNA, 30 bp, Artificial Sequence
  Synthetic oligonucleotide
ctgcgcactcgaaggtagtctggagacata

SEQ ID NO: 266547 - DNA, 30 bp, Artificial Sequence
  Synthetic oligonucleotide
tagaccgtaggtgtgtgaatttgagacata

SEQ ID NO: 266548 - DNA, 30 bp, Artificial Sequence
  Synthetic oligonucleotide
tcgttacgagacgctctatgcatagacata

SEQ ID NO: 266549 - DNA, 30 bp, Artificial Sequence
  Synthetic oligonucleotide
gcctgtagcatgggtcacccctccgacata

SEQ ID NO: 266550 - DNA, 30 bp, Artificial Sequence
  Synthetic oligonucleotide
tcacaccacgccgtctcatggggcgacata

SEQ ID NO: 266551 - DNA, 30 bp, Artificial Sequence
  Synthetic oligonucleotide
tgcggcctggcgttagggatcaaggacata

SEQ ID NO: 266552 - DNA, 30 bp, Artificial Sequence
  Synthetic oligonucleotide
ggccggtttaggtatcagtgtccggacata

SEQ ID NO: 266553 - DNA, 30 bp, Artificial Sequence
  Synthetic oligonucleotide
caagacatgtatgtcgcgagagcatacata

SEQ ID NO: 266554 - DNA, 30 bp, Artificial Sequence
  Synthetic oligonucleotide
gatcgtaactgcgtacgatgcatatacata

SEQ ID NO: 266555 - DNA, 30 bp, Artificial Sequence
  Synthetic oligonucleotide
tcacggggcgaaaagcactcttggtacata

SEQ ID NO: 266556 - DNA, 30 bp, Artificial Sequence
  Synthetic oligonucleotide
ggcgctaagatccgcacccggcgttacata

SEQ ID NO: 266557 - DNA, 30 bp, Artificial Sequence
  Synthetic oligonucleotide
cgttcgtgatcgcggagagtgtgttacata

SEQ ID NO: 266558 - DNA, 30 bp, Artificial Sequence
  Synthetic oligonucleotide
gctgtagtggtccatttttctctttacata

SEQ ID NO: 266559 - DNA, 30 bp, Artificial Sequence
  Synthetic oligonucleotide
aaactgtggtgtattccagtcataaccata

SEQ ID NO: 266560 - DNA, 30 bp, Artificial Sequence
  Synthetic oligonucleotide
cggctgcccttctgcactactgtaaccata

SEQ ID NO: 266561 - DNA, 30 bp, Artificial Sequence
  Synthetic oligonucleotide
ggggtgaatgcgcgaaggtaaagcaccata

SEQ ID NO: 266562 - DNA, 30 bp, Artificial Sequence
  Synthetic oligonucleotide
agacgtgtcaagagccattgtatcaccata

SEQ ID NO: 266563 - DNA, 30 bp, Artificial Sequence
  Synthetic oligonucleotide
caagggcgtgcggaagaaacgctcaccata

SEQ ID NO: 266564 - DNA, 30 bp, Artificial Sequence
  Synthetic oligonucleotide
tctttatgtacagtctaaaacgggaccata

SEQ ID NO: 266565 - DNA, 30 bp, Artificial Sequence
  Synthetic oligonucleotide
gtgttgaaaatgggccagtatgctaccata

SEQ ID NO: 266566 - DNA, 30 bp, Artificial Sequence
  Synthetic oligonucleotide
gtatctgcatggaaaattgcgaaacccata

SEQ ID NO: 266567 - DNA, 30 bp, Artificial Sequence
  Synthetic oligonucleotide
gatgaatgtgtaagctaccgaggacccata

SEQ ID NO: 266568 - DNA, 30 bp, Artificial Sequence
  Synthetic oligonucleotide
aatcaccctaagcggtggaagctccccata

SEQ ID NO: 266569 - DNA, 30 bp, Artificial Sequence
  Synthetic oligonucleotide
gacatgtcccacattgcatgtaggcccata

SEQ ID NO: 266570 - DNA, 30 bp, Artificial Sequence
  Synthetic oligonucleotide
gagtaccaggttacctgatcaactcccata

SEQ ID NO: 266571 - DNA, 30 bp, Artificial Sequence
  Synthetic oligonucleotide
agaaccaaagatcctcatactattcccata

SEQ ID NO: 266572 - DNA, 30 bp, Artificial Sequence
  Synthetic oligonucleotide
catagctctttggaagagctagttcccata

SEQ ID NO: 266573 - DNA, 30 bp, Artificial Sequence
  Synthetic oligonucleotide
ataactgcatattgataaaactacgccata

SEQ ID NO: 266574 - DNA, 30 bp, Artificial Sequence
  Synthetic oligonucleotide
gggtgcaacctaatggattcaacggccata

SEQ ID NO: 266575 - DNA, 30 bp, Artificial Sequence
  Synthetic oligonucleotide
tttagaaggacgtttgggggtggggccata

SEQ ID NO: 266576 - DNA, 30 bp, Artificial Sequence
  Synthetic oligonucleotide
ttactatcagatgagtttgcaagctccata

SEQ ID NO: 266577 - DNA, 30 bp, Artificial Sequence
  Synthetic oligonucleotide
cagacaatcacaggtaatctgccgtccata

SEQ ID NO: 266578 - DNA, 30 bp, Artificial Sequence
  Synthetic oligonucleotide
tatctggccaagccagattacaggtccata

SEQ ID NO: 266579 - DNA, 30 bp, Artificial Sequence
  Synthetic oligonucleotide
gtttgagaagaataggaatcatctagcata

SEQ ID NO: 266580 - DNA, 30 bp, Artificial Sequence
  Synthetic oligonucleotide
atgacctaattaacgtagtattctagcata

SEQ ID NO: 266581 - DNA, 30 bp, Artificial Sequence
  Synthetic oligonucleotide
agtagcacttagggcgcgtggaaacgcata

SEQ ID NO: 266582 - DNA, 30 bp, Artificial Sequence
  Synthetic oligonucleotide
agggtttcatgaatatgttggatacgcata

SEQ ID NO: 266583 - DNA, 30 bp, Artificial Sequence
  Synthetic oligonucleotide
attacaggggtcagaattgtatcccgcata

SEQ ID NO: 266584 - DNA, 30 bp, Artificial Sequence
  Synthetic oligonucleotide
gtgtagacagcccgtaacttagagcgcata

SEQ ID NO: 266585 - DNA, 30 bp, Artificial Sequence
  Synthetic oligonucleotide
cctagtaattcaggactctcaacgcgcata

SEQ ID NO: 266586 - DNA, 30 bp, Artificial Sequence
  Synthetic oligonucleotide
taatagggtacggattatctctggcgcata

SEQ ID NO: 266587 - DNA, 30 bp, Artificial Sequence
  Synthetic oligonucleotide
agctatgccgtacataaagctatgcgcata

SEQ ID NO: 266588 - DNA, 30 bp, Artificial Sequence
  Synthetic oligonucleotide
taattcaagagggccaccctatacggcata

SEQ ID NO: 266589 - DNA, 30 bp, Artificial Sequence
  Synthetic oligonucleotide
cagcgcagcttgtagttaccttggggcata

SEQ ID NO: 266590 - DNA, 30 bp, Artificial Sequence
  Synthetic oligonucleotide
cttagccacttcaattgagatcttggcata

SEQ ID NO: 266591 - DNA, 30 bp, Artificial Sequence
  Synthetic oligonucleotide
gctacattcaatcgactcgcaaaatgcata

SEQ ID NO: 266592 - DNA, 30 bp, Artificial Sequence
  Synthetic oligonucleotide
cctgcgaacacgccaaacacaggatgcata

SEQ ID NO: 266593 - DNA, 30 bp, Artificial Sequence
  Synthetic oligonucleotide
cgtggatgagtgaacgcagattgatgcata

SEQ ID NO: 266594 - DNA, 30 bp, Artificial Sequence
  Synthetic oligonucleotide
acggtggtttacacgtgtaagcactgcata

SEQ ID NO: 266595 - DNA, 30 bp, Artificial Sequence
  Synthetic oligonucleotide
ggataacttaaaccactatctcactgcata

SEQ ID NO: 266596 - DNA, 30 bp, Artificial Sequence
  Synthetic oligonucleotide
acttgcactaggacctacctctagtgcata

SEQ ID NO: 266597 - DNA, 30 bp, Artificial Sequence
  Synthetic oligonucleotide
tcgacctgacaggagagtttggtttgcata

SEQ ID NO: 266598 - DNA, 30 bp, Artificial Sequence
  Synthetic oligonucleotide
acgatcacggcatgtatgggcacaatcata

SEQ ID NO: 266599 - DNA, 30 bp, Artificial Sequence
  Synthetic oligonucleotide
tttgtcctgatcgtcgggtcgacaatcata

SEQ ID NO: 266600 - DNA, 30 bp, Artificial Sequence
  Synthetic oligonucleotide
tcatatctaaaccatttcgtgccgatcata

SEQ ID NO: 266601 - DNA, 30 bp, Artificial Sequence
  Synthetic oligonucleotide
gcgctattgacttcatgacaattgatcata

SEQ ID NO: 266602 - DNA, 30 bp, Artificial Sequence
  Synthetic oligonucleotide
agccccgaaatatagctgtatgatatcata

SEQ ID NO: 266603 - DNA, 30 bp, Artificial Sequence
  Synthetic oligonucleotide
ggggtttattcaggggcaagcggactcata

SEQ ID NO: 266604 - DNA, 30 bp, Artificial Sequence
  Synthetic oligonucleotide
aaacctcaactatggacccgttgactcata

SEQ ID NO: 266605 - DNA, 30 bp, Artificial Sequence
  Synthetic oligonucleotide
ttcacgacattaccagaacccgccctcata

SEQ ID NO: 266606 - DNA, 30 bp, Artificial Sequence
  Synthetic oligonucleotide
tgtcaagacgcagtcgtaaaaaagctcata

SEQ ID NO: 266607 - DNA, 30 bp, Artificial Sequence
  Synthetic oligonucleotide
atccaatcgaaatgcagttcctctctcata

SEQ ID NO: 266608 - DNA, 30 bp, Artificial Sequence
  Synthetic oligonucleotide
gacccggcccccattcctcaaggtctcata

SEQ ID NO: 266609 - DNA, 30 bp, Artificial Sequence
  Synthetic oligonucleotide
cgccgcgaaaatttaagttaagaagtcata

SEQ ID NO: 266610 - DNA, 30 bp, Artificial Sequence
  Synthetic oligonucleotide
gggcaccctgagagcagcgaggcagtcata

SEQ ID NO: 266611 - DNA, 30 bp, Artificial Sequence
  Synthetic oligonucleotide
atagtgcgtaactatactctgctagtcata

SEQ ID NO: 266612 - DNA, 30 bp, Artificial Sequence
  Synthetic oligonucleotide
cttacgagtaattgttaccaagtagtcata

SEQ ID NO: 266613 - DNA, 30 bp, Artificial Sequence
  Synthetic oligonucleotide
gcatcgtttaaaccgggggtacccgtcata

SEQ ID NO: 266614 - DNA, 30 bp, Artificial Sequence
  Synthetic oligonucleotide
tcatctagtaagtggaccacggcggtcata

SEQ ID NO: 266615 - DNA, 30 bp, Artificial Sequence
  Synthetic oligonucleotide
agggcttaacgcattccgtgtgtggtcata

SEQ ID NO: 266616 - DNA, 30 bp, Artificial Sequence
  Synthetic oligonucleotide
tcagcggtcctcgcgcgccaatatgtcata

SEQ ID NO: 266617 - DNA, 30 bp, Artificial Sequence
  Synthetic oligonucleotide
gggtaaggttaaatactacaagttgtcata

SEQ ID NO: 266618 - DNA, 30 bp, Artificial Sequence
  Synthetic oligonucleotide
tatggctagttcactgtaggtaaattcata

SEQ ID NO: 266619 - DNA, 30 bp, Artificial Sequence
  Synthetic oligonucleotide
taacgtcgtctaagatcacgtacattcata

SEQ ID NO: 266620 - DNA, 30 bp, Artificial Sequence
  Synthetic oligonucleotide
catacgtgggggtcatgatgaagattcata

SEQ ID NO: 266621 - DNA, 30 bp, Artificial Sequence
  Synthetic oligonucleotide
catatcatgtcagtgcgcactatattcata

SEQ ID NO: 266622 - DNA, 30 bp, Artificial Sequence
  Synthetic oligonucleotide
ggaagggcggggtgatgcgccgtattcata

SEQ ID NO: 266623 - DNA, 30 bp, Artificial Sequence
  Synthetic oligonucleotide
cgtcgaaatctttacatttgggtattcata

SEQ ID NO: 266624 - DNA, 30 bp, Artificial Sequence
  Synthetic oligonucleotide
atcgtacctaatgatattccgcggttcata

SEQ ID NO: 266625 - DNA, 30 bp, Artificial Sequence
  Synthetic oligonucleotide
tcacttcttaaggtgaaggaggatttcata

SEQ ID NO: 266626 - DNA, 30 bp, Artificial Sequence
  Synthetic oligonucleotide
acgggctcgtggtctaagcttcgtttcata

SEQ ID NO: 266627 - DNA, 30 bp, Artificial Sequence
  Synthetic oligonucleotide
tgcctagaatgaaagcagctttgtttcata

SEQ ID NO: 266628 - DNA, 30 bp, Artificial Sequence
  Synthetic oligonucleotide
tgtacgactgtgggaactccggaaaagata

SEQ ID NO: 266629 - DNA, 30 bp, Artificial Sequence
  Synthetic oligonucleotide
gattcgtgttacactcggcccaacaagata

SEQ ID NO: 266630 - DNA, 30 bp, Artificial Sequence
  Synthetic oligonucleotide
atttctcggggaatggtttgaatcaagata

SEQ ID NO: 266631 - DNA, 30 bp, Artificial Sequence
  Synthetic oligonucleotide
gcagactatcattgagagggagagaagata

SEQ ID NO: 266632 - DNA, 31 bp, Artificial Sequence
  Synthetic oligonucleotide
agtggttgatacgtgtgcagccgcgaagata

SEQ ID NO: 266633 - DNA, 30 bp, Artificial Sequence
  Synthetic oligonucleotide
agagaagtgatccatagttttgataagata

SEQ ID NO: 266634 - DNA, 30 bp, Artificial Sequence
  Synthetic oligonucleotide
ggtcaagtgtatggtcggagttaacagata

SEQ ID NO: 266635 - DNA, 30 bp, Artificial Sequence
  Synthetic oligonucleotide
gtgcgacgtgacgtacccctcacacagata

SEQ ID NO: 266636 - DNA, 28 bp, Artificial Sequence
  Synthetic oligonucleotide
cactgcgttgtcgagcgggggacagata

SEQ ID NO: 266637 - DNA, 30 bp, Artificial Sequence
  Synthetic oligonucleotide
gtctacggtccatgtgctcaatgacagata

SEQ ID NO: 266638 - DNA, 30 bp, Artificial Sequence
  Synthetic oligonucleotide
agtcaattctaaaagcggactgtacagata

SEQ ID NO: 266639 - DNA, 30 bp, Artificial Sequence
  Synthetic oligonucleotide
acttagtaaataatccgaacgatccagata

SEQ ID NO: 266640 - DNA, 30 bp, Artificial Sequence
  Synthetic oligonucleotide
atggccgtctatggcccggtgttccagata

SEQ ID NO: 266641 - DNA, 30 bp, Artificial Sequence
  Synthetic oligonucleotide
gctacaacgttaccacccttactgcagata

SEQ ID NO: 266642 - DNA, 30 bp, Artificial Sequence
  Synthetic oligonucleotide
aatagtaatgagttgcatatagatcagata

SEQ ID NO: 266643 - DNA, 30 bp, Artificial Sequence
  Synthetic oligonucleotide
caggtcaatactgaaatcatatctcagata

SEQ ID NO: 266644 - DNA, 30 bp, Artificial Sequence
  Synthetic oligonucleotide
ctaacctccagacattttaaccaagagata

SEQ ID NO: 266645 - DNA, 30 bp, Artificial Sequence
  Synthetic oligonucleotide
accaaactctcagtggccacaatagagata

SEQ ID NO: 266646 - DNA, 30 bp, Artificial Sequence
  Synthetic oligonucleotide
agtggggctttgtggctttactccgagata

SEQ ID NO: 266647 - DNA, 30 bp, Artificial Sequence
  Synthetic oligonucleotide
tgacaagcgacgtgtcttaccgtcgagata

SEQ ID NO: 266648 - DNA, 30 bp, Artificial Sequence
  Synthetic oligonucleotide
atattgtaagcgatgctggctgaggagata

SEQ ID NO: 266649 - DNA, 30 bp, Artificial Sequence
  Synthetic oligonucleotide
aatggggttcttcaaagacctcctgagata

SEQ ID NO: 266650 - DNA, 30 bp, Artificial Sequence
  Synthetic oligonucleotide
tatcaacaaatgcctcttcaggctgagata

SEQ ID NO: 266651 - DNA, 30 bp, Artificial Sequence
  Synthetic oligonucleotide
gtcgtgtttgaccgtcaagcggctgagata

SEQ ID NO: 266652 - DNA, 30 bp, Artificial Sequence
  Synthetic oligonucleotide
gtctgaaagcgggtagtccggccatagata

SEQ ID NO: 266653 - DNA, 30 bp, Artificial Sequence
  Synthetic oligonucleotide
attgtcccgatggaccgcaagacctagata

SEQ ID NO: 266654 - DNA, 30 bp, Artificial Sequence
  Synthetic oligonucleotide
gaacaagatggatattttgataagtagata

SEQ ID NO: 266655 - DNA, 30 bp, Artificial Sequence
  Synthetic oligonucleotide
tctccttcgctggtaactcctgagtagata

SEQ ID NO: 266656 - DNA, 30 bp, Artificial Sequence
  Synthetic oligonucleotide
tctcggtctagacatgcagagtggtagata

SEQ ID NO: 266657 - DNA, 30 bp, Artificial Sequence
  Synthetic oligonucleotide
cttagggaggtcagagctgtagtgtagata

SEQ ID NO: 266658 - DNA, 30 bp, Artificial Sequence
  Synthetic oligonucleotide
catctatgagatggtagtattgtgtagata

SEQ ID NO: 266659 - DNA, 30 bp, Artificial Sequence
  Synthetic oligonucleotide
cggtttatggaaaactatgagcgttagata

SEQ ID NO: 266660 - DNA, 30 bp, Artificial Sequence
  Synthetic oligonucleotide
gtgaggcatgccaccttggaattttagata

SEQ ID NO: 266661 - DNA, 30 bp, Artificial Sequence
  Synthetic oligonucleotide
cgctgccaccggggctgcgatgcaacgata

SEQ ID NO: 266662 - DNA, 30 bp, Artificial Sequence
  Synthetic oligonucleotide
gacctgggtagacgagcgcactcaacgata

SEQ ID NO: 266663 - DNA, 30 bp, Artificial Sequence
  Synthetic oligonucleotide
tacctgctcatgtatctgggctgaacgata

SEQ ID NO: 266664 - DNA, 30 bp, Artificial Sequence
  Synthetic oligonucleotide
ccagtggtcgagttttctatccacacgata

SEQ ID NO: 266665 - DNA, 30 bp, Artificial Sequence
  Synthetic oligonucleotide
gttcggaataaagttccgcgtacgacgata

SEQ ID NO: 266666 - DNA, 30 bp, Artificial Sequence
  Synthetic oligonucleotide
acctcgatccacggttagggcccgacgata

SEQ ID NO: 266667 - DNA, 30 bp, Artificial Sequence
  Synthetic oligonucleotide
catcgtagcgtgcaggcatcatggacgata

SEQ ID NO: 266668 - DNA, 30 bp, Artificial Sequence
  Synthetic oligonucleotide
cgggtgttccaatggtgagaaggtacgata

SEQ ID NO: 266669 - DNA, 30 bp, Artificial Sequence
  Synthetic oligonucleotide
gttccctatcaaccgactaagggaccgata

SEQ ID NO: 266670 - DNA, 30 bp, Artificial Sequence
  Synthetic oligonucleotide
tgggacagattccaagcagtggccccgata

SEQ ID NO: 266671 - DNA, 30 bp, Artificial Sequence
  Synthetic oligonucleotide
aacgctgcgggagttgagcgacgcccgata

SEQ ID NO: 266672 - DNA, 30 bp, Artificial Sequence
  Synthetic oligonucleotide
tgcgtatgaagtaaagatgagacgccgata

SEQ ID NO: 266673 - DNA, 30 bp, Artificial Sequence
  Synthetic oligonucleotide
agattcggcagttagttggaacatccgata

SEQ ID NO: 266674 - DNA, 30 bp, Artificial Sequence
  Synthetic oligonucleotide
agcaataaaattacctcgtatcctccgata

SEQ ID NO: 266675 - DNA, 30 bp, Artificial Sequence
  Synthetic oligonucleotide
ccgatagcgtcggacccgacagtagcgata

SEQ ID NO: 266676 - DNA, 30 bp, Artificial Sequence
  Synthetic oligonucleotide
gccgcacggatagcagaagagcgcgcgata

SEQ ID NO: 266677 - DNA, 30 bp, Artificial Sequence
  Synthetic oligonucleotide
tagtggggatcacatttctacgctgcgata

SEQ ID NO: 266678 - DNA, 30 bp, Artificial Sequence
  Synthetic oligonucleotide
tgtatcgctacttcgtagcttcgtgcgata

SEQ ID NO: 266679 - DNA, 30 bp, Artificial Sequence
  Synthetic oligonucleotide
gcaaataaaagaggtatctgagaatcgata

SEQ ID NO: 266680 - DNA, 30 bp, Artificial Sequence
  Synthetic oligonucleotide
ctggatcgcgtggggcgattgtaatcgata

SEQ ID NO: 266681 - DNA, 30 bp, Artificial Sequence
  Synthetic oligonucleotide
gtgtagtatgcgatgggggctagatcgata

SEQ ID NO: 266682 - DNA, 30 bp, Artificial Sequence
  Synthetic oligonucleotide
cgggcatgctcgtttgtacggccctcgata

SEQ ID NO: 266683 - DNA, 30 bp, Artificial Sequence
  Synthetic oligonucleotide
ctcataaatgatcgataacatcagtcgata

SEQ ID NO: 266684 - DNA, 30 bp, Artificial Sequence
  Synthetic oligonucleotide
ataacattcaatcgtgccccagcgtcgata

SEQ ID NO: 266685 - DNA, 30 bp, Artificial Sequence
  Synthetic oligonucleotide
gtcgtcattggggcctaacacatgtcgata

SEQ ID NO: 266686 - DNA, 30 bp, Artificial Sequence
  Synthetic oligonucleotide
tgagggttatcaccttgccaacattcgata

SEQ ID NO: 266687 - DNA, 30 bp, Artificial Sequence
  Synthetic oligonucleotide
gctcccagcccaaagaggctggattcgata

SEQ ID NO: 266688 - DNA, 30 bp, Artificial Sequence
  Synthetic oligonucleotide
agtaacctgacgcttaaaagggcttcgata

SEQ ID NO: 266689 - DNA, 30 bp, Artificial Sequence
  Synthetic oligonucleotide
attgttaagcgaagaactattcgttcgata

SEQ ID NO: 266690 - DNA, 30 bp, Artificial Sequence
  Synthetic oligonucleotide
agaacagggccgcatacactatgttcgata

SEQ ID NO: 266691 - DNA, 30 bp, Artificial Sequence
  Synthetic oligonucleotide
ttttggatgccagaaattaacgcgaggata

SEQ ID NO: 266692 - DNA, 30 bp, Artificial Sequence
  Synthetic oligonucleotide
ttactcccaatctttcatcaggaacggata

SEQ ID NO: 266693 - DNA, 30 bp, Artificial Sequence
  Synthetic oligonucleotide
tctgcggcttacttctatggcacacggata

SEQ ID NO: 266694 - DNA, 30 bp, Artificial Sequence
  Synthetic oligonucleotide
agaagcgggggttctagtgattcacggata

SEQ ID NO: 266695 - DNA, 30 bp, Artificial Sequence
  Synthetic oligonucleotide
tggaacggcgcgtctggccgagaccggata

SEQ ID NO: 266696 - DNA, 30 bp, Artificial Sequence
  Synthetic oligonucleotide
aatcgccctataatgggggtgtaccggata

SEQ ID NO: 266697 - DNA, 30 bp, Artificial Sequence
  Synthetic oligonucleotide
gcggttgtagaacagaaaagtcgccggata

SEQ ID NO: 266698 - DNA, 30 bp, Artificial Sequence
  Synthetic oligonucleotide
agtcgggattcagtactcggggtagggata

SEQ ID NO: 266699 - DNA, 30 bp, Artificial Sequence
  Synthetic oligonucleotide
gcgttcagtatccctaggatcttcgggata

SEQ ID NO: 266700 - DNA, 30 bp, Artificial Sequence
  Synthetic oligonucleotide
gaatagcccgagcggtaggccgaggggata

SEQ ID NO: 266701 - DNA, 30 bp, Artificial Sequence
  Synthetic oligonucleotide
taaccgagcgcacggctcgagactgggata

SEQ ID NO: 266702 - DNA, 30 bp, Artificial Sequence
  Synthetic oligonucleotide
gattggaaaggtgctccgtagtctgggata

SEQ ID NO: 266703 - DNA, 30 bp, Artificial Sequence
  Synthetic oligonucleotide
acctaccttatggtcctgcaacgtgggata

SEQ ID NO: 266704 - DNA, 30 bp, Artificial Sequence
  Synthetic oligonucleotide
caaattatggcatcatgatgtattgggata

SEQ ID NO: 266705 - DNA, 30 bp, Artificial Sequence
  Synthetic oligonucleotide
ttgaccaggaagacgttaaccccatggata

SEQ ID NO: 266706 - DNA, 30 bp, Artificial Sequence
  Synthetic oligonucleotide
gagctaatatcgctgcgcatgccatggata

SEQ ID NO: 266707 - DNA, 30 bp, Artificial Sequence
  Synthetic oligonucleotide
ggtggaagacccccggctcccgcatggata

SEQ ID NO: 266708 - DNA, 30 bp, Artificial Sequence
  Synthetic oligonucleotide
aaagggattgtggcacagcattcatggata

SEQ ID NO: 266709 - DNA, 30 bp, Artificial Sequence
  Synthetic oligonucleotide
caaagcttcgcgcccttggagagatggata

SEQ ID NO: 266710 - DNA, 30 bp, Artificial Sequence
  Synthetic oligonucleotide
aatccaggggcgcgataggacctctggata

SEQ ID NO: 266711 - DNA, 30 bp, Artificial Sequence
  Synthetic oligonucleotide
gggtccataacttcttactcaaagtggata

SEQ ID NO: 266712 - DNA, 30 bp, Artificial Sequence
  Synthetic oligonucleotide
aatgtggaacgcgcgaaaggtcagtggata

SEQ ID NO: 266713 - DNA, 30 bp, Artificial Sequence
  Synthetic oligonucleotide
tggatcacgaggtactggctcgcgtggata

SEQ ID NO: 266714 - DNA, 30 bp, Artificial Sequence
  Synthetic oligonucleotide
gagtcgtcagttactagcgtggtgtggata

SEQ ID NO: 266715 - DNA, 30 bp, Artificial Sequence
  Synthetic oligonucleotide
gtttaccctcgcggtaggatgtattggata

SEQ ID NO: 266716 - DNA, 30 bp, Artificial Sequence
  Synthetic oligonucleotide
tgtggggtcctaattgcaactaaaatgata

SEQ ID NO: 266717 - DNA, 30 bp, Artificial Sequence
  Synthetic oligonucleotide
tctcagtcacagtagcccgaataaatgata

SEQ ID NO: 266718 - DNA, 30 bp, Artificial Sequence
  Synthetic oligonucleotide
atgacttagggccatcgtaggcgaatgata

SEQ ID NO: 266719 - DNA, 30 bp, Artificial Sequence
  Synthetic oligonucleotide
catcatctttttttcgccgactagatgata

SEQ ID NO: 266720 - DNA, 30 bp, Artificial Sequence
  Synthetic oligonucleotide
ttccacgataagagctcaggtgctatgata

SEQ ID NO: 266721 - DNA, 30 bp, Artificial Sequence
  Synthetic oligonucleotide
actggtgctttgaacacggttagtatgata

SEQ ID NO: 266722 - DNA, 30 bp, Artificial Sequence
  Synthetic oligonucleotide
gagtggacatgatataaggctaaactgata

SEQ ID NO: 266723 - DNA, 30 bp, Artificial Sequence
  Synthetic oligonucleotide
catcattgacacacggccaacgcactgata

SEQ ID NO: 266724 - DNA, 30 bp, Artificial Sequence
  Synthetic oligonucleotide
tacataggtgaaatatggacccgcctgata

SEQ ID NO: 266725 - DNA, 30 bp, Artificial Sequence
  Synthetic oligonucleotide
gcgacgtcaagttcctacgtaacgctgata

SEQ ID NO: 266726 - DNA, 30 bp, Artificial Sequence
  Synthetic oligonucleotide
caggtacgctcgccatttgaaaggctgata

SEQ ID NO: 266727 - DNA, 30 bp, Artificial Sequence
  Synthetic oligonucleotide
gtggaatctcgtgaaaatgcagggctgata

SEQ ID NO: 266728 - DNA, 30 bp, Artificial Sequence
  Synthetic oligonucleotide
acaatgctatttggaggcctagctctgata

SEQ ID NO: 266729 - DNA, 29 bp, Artificial Sequence
  Synthetic oligonucleotide
ccttgaatcctaggctttacctagtgata

SEQ ID NO: 266730 - DNA, 30 bp, Artificial Sequence
  Synthetic oligonucleotide
ttatgtgtcacccgacttcgcaacgtgata

SEQ ID NO: 266731 - DNA, 30 bp, Artificial Sequence
  Synthetic oligonucleotide
aacgtctggatttcttgagacagcgtgata

SEQ ID NO: 266732 - DNA, 30 bp, Artificial Sequence
  Synthetic oligonucleotide
ggtgctatgtaaccagaacccagcgtgata

SEQ ID NO: 266733 - DNA, 30 bp, Artificial Sequence
  Synthetic oligonucleotide
ggtaagcgcgtacctggcgtcctcgtgata

SEQ ID NO: 266734 - DNA, 30 bp, Artificial Sequence
  Synthetic oligonucleotide
actgagaatggtccattctgggctgtgata

SEQ ID NO: 266735 - DNA, 30 bp, Artificial Sequence
  Synthetic oligonucleotide
ccacacggtatacccgtgatttgtgtgata

SEQ ID NO: 266736 - DNA, 31 bp, Artificial Sequence
  Synthetic oligonucleotide
gcggaccgttcaagcgcgtacatgattgata

SEQ ID NO: 266737 - DNA, 30 bp, Artificial Sequence
  Synthetic oligonucleotide
gaacactcttggaacgtgtgagacttgata

SEQ ID NO: 266738 - DNA, 30 bp, Artificial Sequence
  Synthetic oligonucleotide
cataatctggcaatgcataggagcttgata

SEQ ID NO: 266739 - DNA, 30 bp, Artificial Sequence
  Synthetic oligonucleotide
gacggttgcgaatcttgcacagcgttgata

SEQ ID NO: 266740 - DNA, 30 bp, Artificial Sequence
  Synthetic oligonucleotide
acggaagggtgtctgcggtctaggttgata

SEQ ID NO: 266741 - DNA, 30 bp, Artificial Sequence
  Synthetic oligonucleotide
agattaagacataatgccgcgatgttgata

SEQ ID NO: 266742 - DNA, 30 bp, Artificial Sequence
  Synthetic oligonucleotide
ctgcaaattttgcggatggccgttttgata

SEQ ID NO: 266743 - DNA, 30 bp, Artificial Sequence
  Synthetic oligonucleotide
cgctgggccagctcattgtgcccaaatata

SEQ ID NO: 266744 - DNA, 30 bp, Artificial Sequence
  Synthetic oligonucleotide
actagacaatgtgtcttaattcacaatata

SEQ ID NO: 266745 - DNA, 30 bp, Artificial Sequence
  Synthetic oligonucleotide
gctaaatatacacacactctgactaatata

SEQ ID NO: 266746 - DNA, 30 bp, Artificial Sequence
  Synthetic oligonucleotide
acagttgatgctcacgaggatggacatata

SEQ ID NO: 266747 - DNA, 30 bp, Artificial Sequence
  Synthetic oligonucleotide
agtgtatttaaactgagacggtgccatata

SEQ ID NO: 266748 - DNA, 30 bp, Artificial Sequence
  Synthetic oligonucleotide
gacagttttcacgataaagggcgtcatata

SEQ ID NO: 266749 - DNA, 30 bp, Artificial Sequence
  Synthetic oligonucleotide
ttaaggagcgcctcacaataggaagatata

SEQ ID NO: 266750 - DNA, 30 bp, Artificial Sequence
  Synthetic oligonucleotide
ttagtatccactatgtctgtcagagatata

SEQ ID NO: 266751 - DNA, 30 bp, Artificial Sequence
  Synthetic oligonucleotide
tatcattcggcaaatgtactcggagatata

SEQ ID NO: 266752 - DNA, 30 bp, Artificial Sequence
  Synthetic oligonucleotide
caaaggaaacgtaccggagatttagatata

SEQ ID NO: 266753 - DNA, 30 bp, Artificial Sequence
  Synthetic oligonucleotide
tgttaaagctacgaagaatctcctgatata

SEQ ID NO: 266754 - DNA, 30 bp, Artificial Sequence
  Synthetic oligonucleotide
ttccgtcatacgttagtgaaatttgatata

SEQ ID NO: 266755 - DNA, 30 bp, Artificial Sequence
  Synthetic oligonucleotide
actggagctaagaggttggggttatatata

SEQ ID NO: 266756 - DNA, 31 bp, Artificial Sequence
  Synthetic oligonucleotide
tccatgtgccatgcttcctaagctctatata

SEQ ID NO: 266757 - DNA, 30 bp, Artificial Sequence
  Synthetic oligonucleotide
ttggttccgtggcagttactgttctatata

SEQ ID NO: 266758 - DNA, 30 bp, Artificial Sequence
  Synthetic oligonucleotide
actggagaaagtgtaaaccgagcgtatata

SEQ ID NO: 266759 - DNA, 30 bp, Artificial Sequence
  Synthetic oligonucleotide
gattcccatcggaacaatttaaggtatata

SEQ ID NO: 266760 - DNA, 30 bp, Artificial Sequence
  Synthetic oligonucleotide
gccctagctgggcgactggttatgtatata

SEQ ID NO: 266761 - DNA, 30 bp, Artificial Sequence
  Synthetic oligonucleotide
gcctatactaattaaatctatcgttatata

SEQ ID NO: 266762 - DNA, 30 bp, Artificial Sequence
  Synthetic oligonucleotide
cactcctggtctacgtagatggcaactata

SEQ ID NO: 266763 - DNA, 30 bp, Artificial Sequence
  Synthetic oligonucleotide
gaagggggtacagtacagctctgaactata

SEQ ID NO: 266764 - DNA, 30 bp, Artificial Sequence
  Synthetic oligonucleotide
tgaagccgggcactggcaattataactata

SEQ ID NO: 266765 - DNA, 30 bp, Artificial Sequence
  Synthetic oligonucleotide
tatacttcgttaattcatgacagcactata

SEQ ID NO: 266766 - DNA, 30 bp, Artificial Sequence
  Synthetic oligonucleotide
tgcggaagcatacgaccggtacgcactata

SEQ ID NO: 266767 - DNA, 30 bp, Artificial Sequence
  Synthetic oligonucleotide
caggtctgaaactcccgggtaaatactata

SEQ ID NO: 266768 - DNA, 30 bp, Artificial Sequence
  Synthetic oligonucleotide
tacggaacgtgtggctgtgtaggtactata

SEQ ID NO: 266769 - DNA, 30 bp, Artificial Sequence
  Synthetic oligonucleotide
caaagtagcaaacggcgagtccaacctata

SEQ ID NO: 266770 - DNA, 31 bp, Artificial Sequence
  Synthetic oligonucleotide
cacacgtcccggcccgcagtagattcctata

SEQ ID NO: 266771 - DNA, 30 bp, Artificial Sequence
  Synthetic oligonucleotide
ggcatatgtgtagggtccgaaaaagctata

SEQ ID NO: 266772 - DNA, 30 bp, Artificial Sequence
  Synthetic oligonucleotide
caaaccaaatgatagtgtaaaacagctata

SEQ ID NO: 266773 - DNA, 30 bp, Artificial Sequence
  Synthetic oligonucleotide
aagtacgggcagcacagtcgtggagctata

SEQ ID NO: 266774 - DNA, 30 bp, Artificial Sequence
  Synthetic oligonucleotide
ccgcctcgtggagttcagcttcacgctata

SEQ ID NO: 266775 - DNA, 30 bp, Artificial Sequence
  Synthetic oligonucleotide
tggatctttttgggtaagcctacggctata

SEQ ID NO: 266776 - DNA, 30 bp, Artificial Sequence
  Synthetic oligonucleotide
gggccacatgtaggctgtaggcctgctata

SEQ ID NO: 266777 - DNA, 30 bp, Artificial Sequence
  Synthetic oligonucleotide
catcgaatagattgttcctgagttgctata

SEQ ID NO: 266778 - DNA, 30 bp, Artificial Sequence
  Synthetic oligonucleotide
aactgccgtacaccggtaactagatctata

SEQ ID NO: 266779 - DNA, 30 bp, Artificial Sequence
  Synthetic oligonucleotide
ataagggtgaatctgtccgtgaactctata

SEQ ID NO: 266780 - DNA, 30 bp, Artificial Sequence
  Synthetic oligonucleotide
atatgggaggggtacaaacggtgctctata

SEQ ID NO: 266781 - DNA, 30 bp, Artificial Sequence
  Synthetic oligonucleotide
ttcaatgcgggaggcgtctcgatgtctata

SEQ ID NO: 266782 - DNA, 30 bp, Artificial Sequence
  Synthetic oligonucleotide
ttagagcaatccgagacacatatgtctata

SEQ ID NO: 266783 - DNA, 30 bp, Artificial Sequence
  Synthetic oligonucleotide
cattatgggccttatcgtttggcttctata

SEQ ID NO: 266784 - DNA, 30 bp, Artificial Sequence
  Synthetic oligonucleotide
acgcatattgtgggagcgaactcttctata

SEQ ID NO: 266785 - DNA, 30 bp, Artificial Sequence
  Synthetic oligonucleotide
agaatcgaggggtcgtccaggtcttctata

SEQ ID NO: 266786 - DNA, 30 bp, Artificial Sequence
  Synthetic oligonucleotide
ttggtgtagtaggatctagtgtaaagtata

SEQ ID NO: 266787 - DNA, 30 bp, Artificial Sequence
  Synthetic oligonucleotide
tgtgtcagttaaagcatcagcctaagtata

SEQ ID NO: 266788 - DNA, 30 bp, Artificial Sequence
  Synthetic oligonucleotide
acgcggatgttgtatacacggttaagtata

SEQ ID NO: 266789 - DNA, 30 bp, Artificial Sequence
  Synthetic oligonucleotide
aggttcatccagatgagatttcccagtata

SEQ ID NO: 266790 - DNA, 30 bp, Artificial Sequence
  Synthetic oligonucleotide
gagaaacatgtagttcagttggccagtata

SEQ ID NO: 266791 - DNA, 30 bp, Artificial Sequence
  Synthetic oligonucleotide
cgaacgttttgaactaggggcgtcagtata

SEQ ID NO: 266792 - DNA, 30 bp, Artificial Sequence
  Synthetic oligonucleotide
aagaccttggccccgtctgattagagtata

SEQ ID NO: 266793 - DNA, 30 bp, Artificial Sequence
  Synthetic oligonucleotide
gaataagcgtatcaaccagaacggagtata

SEQ ID NO: 266794 - DNA, 30 bp, Artificial Sequence
  Synthetic oligonucleotide
actttaacgtacctttgtaagatgagtata

SEQ ID NO: 266795 - DNA, 30 bp, Artificial Sequence
  Synthetic oligonucleotide
aaaacaagttcttttggggaccgtagtata

SEQ ID NO: 266796 - DNA, 30 bp, Artificial Sequence
  Synthetic oligonucleotide
agatctgtcccagttcatcaatcccgtata

SEQ ID NO: 266797 - DNA, 30 bp, Artificial Sequence
  Synthetic oligonucleotide
acatagtcctcacaatgctcagcgcgtata

SEQ ID NO: 266798 - DNA, 30 bp, Artificial Sequence
  Synthetic oligonucleotide
aaggctttcacggattggttacgtcgtata

SEQ ID NO: 266799 - DNA, 30 bp, Artificial Sequence
  Synthetic oligonucleotide
agctgtgtaactctggagttgcccggtata

SEQ ID NO: 266800 - DNA, 30 bp, Artificial Sequence
  Synthetic oligonucleotide
tctcacaaatggttagtcaaaaagggtata

SEQ ID NO: 266801 - DNA, 30 bp, Artificial Sequence
  Synthetic oligonucleotide
catactgatgcaaaagcagcagcgggtata

SEQ ID NO: 266802 - DNA, 30 bp, Artificial Sequence
  Synthetic oligonucleotide
gatccatcagagcaactaagtgcgggtata

SEQ ID NO: 266803 - DNA, 30 bp, Artificial Sequence
  Synthetic oligonucleotide
tcacgaagcttccgcttcacagatggtata

SEQ ID NO: 266804 - DNA, 30 bp, Artificial Sequence
  Synthetic oligonucleotide
cccgacaaaaatccgaaaggcgcatgtata

SEQ ID NO: 266805 - DNA, 30 bp, Artificial Sequence
  Synthetic oligonucleotide
gcgtaatacttcaatgcatttagctgtata

SEQ ID NO: 266806 - DNA, 30 bp, Artificial Sequence
  Synthetic oligonucleotide
cttagtgaggacaatattcatatgtgtata

SEQ ID NO: 266807 - DNA, 30 bp, Artificial Sequence
  Synthetic oligonucleotide
ttccttgctcatgttccgtcactgtgtata

SEQ ID NO: 266808 - DNA, 30 bp, Artificial Sequence
  Synthetic oligonucleotide
cgttcgaactgtgtatacaacgcttgtata

SEQ ID NO: 266809 - DNA, 30 bp, Artificial Sequence
  Synthetic oligonucleotide
ccacatgataagtaaatgtagggttgtata

SEQ ID NO: 266810 - DNA, 30 bp, Artificial Sequence
  Synthetic oligonucleotide
gatggtgatttctgtgctcaaaacattata

SEQ ID NO: 266811 - DNA, 30 bp, Artificial Sequence
  Synthetic oligonucleotide
agatcaggcaactacctcttacccattata

SEQ ID NO: 266812 - DNA, 30 bp, Artificial Sequence
  Synthetic oligonucleotide
ccttgaaagtagcaatcgctacgcattata

SEQ ID NO: 266813 - DNA, 30 bp, Artificial Sequence
  Synthetic oligonucleotide
gaacggttgtaaatcttagtactgattata

SEQ ID NO: 266814 - DNA, 30 bp, Artificial Sequence
  Synthetic oligonucleotide
gtaagagacgctgggatgacatctattata

SEQ ID NO: 266815 - DNA, 30 bp, Artificial Sequence
  Synthetic oligonucleotide
ttgctaaggtagtctccgctacgtattata

SEQ ID NO: 266816 - DNA, 30 bp, Artificial Sequence
  Synthetic oligonucleotide
ctcctaaatcgtcaaatagtgttacttata

SEQ ID NO: 266817 - DNA, 30 bp, Artificial Sequence
  Synthetic oligonucleotide
agttcgagttcctgcgcctgctaccttata

SEQ ID NO: 266818 - DNA, 30 bp, Artificial Sequence
  Synthetic oligonucleotide
ataagaacgtaactgcagaagaaagttata

SEQ ID NO: 266819 - DNA, 30 bp, Artificial Sequence
  Synthetic oligonucleotide
cggggtgactcgctgcgcctttacgttata

SEQ ID NO: 266820 - DNA, 30 bp, Artificial Sequence
  Synthetic oligonucleotide
taacgtctaggtgcgaactacaaggttata

SEQ ID NO: 266821 - DNA, 30 bp, Artificial Sequence
  Synthetic oligonucleotide
ggtaaaattgtcgtatctctaccggttata

SEQ ID NO: 266822 - DNA, 30 bp, Artificial Sequence
  Synthetic oligonucleotide
gaagcaggggtcaaagggcggatggttata

SEQ ID NO: 266823 - DNA, 30 bp, Artificial Sequence
  Synthetic oligonucleotide
gtgaagagaggtttctaattaaatgttata

SEQ ID NO: 266824 - DNA, 30 bp, Artificial Sequence
  Synthetic oligonucleotide
gaggcaaccgtctgtggcgccgaatttata

SEQ ID NO: 266825 - DNA, 30 bp, Artificial Sequence
  Synthetic oligonucleotide
accaaagcgggatacgcgggagtatttata

SEQ ID NO: 266826 - DNA, 30 bp, Artificial Sequence
  Synthetic oligonucleotide
ccggcgggaatccagccataccagtttata

SEQ ID NO: 266827 - DNA, 30 bp, Artificial Sequence
  Synthetic oligonucleotide
gtcggtggaaacaacagtttggggtttata

SEQ ID NO: 266828 - DNA, 30 bp, Artificial Sequence
  Synthetic oligonucleotide
gctgtgggagtgtcgcgattggtttttata

SEQ ID NO: 266829 - DNA, 30 bp, Artificial Sequence
  Synthetic oligonucleotide
ggtgcttagaccacttagggagtaaaacta

SEQ ID NO: 266830 - DNA, 30 bp, Artificial Sequence
  Synthetic oligonucleotide
tgtttcgtacatcttcagcagggcaaacta

SEQ ID NO: 266831 - DNA, 30 bp, Artificial Sequence
  Synthetic oligonucleotide
gatgtgaaacaatacgcatctaagaaacta

SEQ ID NO: 266832 - DNA, 30 bp, Artificial Sequence
  Synthetic oligonucleotide
tctacaatctggttacgcataccgaaacta

SEQ ID NO: 266833 - DNA, 30 bp, Artificial Sequence
  Synthetic oligonucleotide
cagccccaaaagtaacacttggtgaaacta

SEQ ID NO: 266834 - DNA, 30 bp, Artificial Sequence
  Synthetic oligonucleotide
cagttctctttacgactagaagataaacta

SEQ ID NO: 266835 - DNA, 30 bp, Artificial Sequence
  Synthetic oligonucleotide
ggattcagttacttgcggtaaactcaacta

SEQ ID NO: 266836 - DNA, 30 bp, Artificial Sequence
  Synthetic oligonucleotide
gtaatgtccgagttcagcatcggtcaacta

SEQ ID NO: 266837 - DNA, 30 bp, Artificial Sequence
  Synthetic oligonucleotide
ggtcttggaccagagtattcgtcggaacta

SEQ ID NO: 266838 - DNA, 30 bp, Artificial Sequence
  Synthetic oligonucleotide
gacctgggtaggaattagtcaggggaacta

SEQ ID NO: 266839 - DNA, 30 bp, Artificial Sequence
  Synthetic oligonucleotide
ctattatccgtggacgaatgcgtggaacta

SEQ ID NO: 266840 - DNA, 30 bp, Artificial Sequence
  Synthetic oligonucleotide
gatttaacagcctaaatggcgaatgaacta

SEQ ID NO: 266841 - DNA, 30 bp, Artificial Sequence
  Synthetic oligonucleotide
catcccagggatgctgcaaggggtgaacta

SEQ ID NO: 266842 - DNA, 30 bp, Artificial Sequence
  Synthetic oligonucleotide
ggcgcgacaagtaaaattctcattgaacta

SEQ ID NO: 266843 - DNA, 30 bp, Artificial Sequence
  Synthetic oligonucleotide
aaggctctgttgggatgagaggttgaacta

SEQ ID NO: 266844 - DNA, 30 bp, Artificial Sequence
  Synthetic oligonucleotide
gcagaaagtgagtggataagccactaacta

SEQ ID NO: 266845 - DNA, 30 bp, Artificial Sequence
  Synthetic oligonucleotide
tattatggatttgcgagctacgcgtaacta

SEQ ID NO: 266846 - DNA, 30 bp, Artificial Sequence
  Synthetic oligonucleotide
atgctaaatttctcgggcatgggttaacta

SEQ ID NO: 266847 - DNA, 30 bp, Artificial Sequence
  Synthetic oligonucleotide
gagaaccgtccgccgcccaccttaccacta

SEQ ID NO: 266848 - DNA, 29 bp, Artificial Sequence
  Synthetic oligonucleotide
gatgaactcccgtgctaactggcccacta

SEQ ID NO: 266849 - DNA, 30 bp, Artificial Sequence
  Synthetic oligonucleotide
tttgagggacgacatagtataatcccacta

SEQ ID NO: 266850 - DNA, 30 bp, Artificial Sequence
  Synthetic oligonucleotide
agttgattagatacggggccacaagcacta

SEQ ID NO: 266851 - DNA, 30 bp, Artificial Sequence
  Synthetic oligonucleotide
ggtagcactggcgtagaccacgacgcacta

SEQ ID NO: 266852 - DNA, 30 bp, Artificial Sequence
  Synthetic oligonucleotide
cggccagtcgtactggcccctttcgcacta

SEQ ID NO: 266853 - DNA, 30 bp, Artificial Sequence
  Synthetic oligonucleotide
gtcggggccatacgacagccgaaggcacta

SEQ ID NO: 266854 - DNA, 30 bp, Artificial Sequence
  Synthetic oligonucleotide
cccttagagcaacggcttccatatgcacta

SEQ ID NO: 266855 - DNA, 30 bp, Artificial Sequence
  Synthetic oligonucleotide
aactttatatgaatatcgagcagtgcacta

SEQ ID NO: 266856 - DNA, 30 bp, Artificial Sequence
  Synthetic oligonucleotide
cccgcactgcgttcaggccggtcatcacta

SEQ ID NO: 266857 - DNA, 30 bp, Artificial Sequence
  Synthetic oligonucleotide
tagcccatcctgggttatgtgccaagacta

SEQ ID NO: 266858 - DNA, 30 bp, Artificial Sequence
  Synthetic oligonucleotide
ggacgggaattagtgtcttgtataagacta

SEQ ID NO: 266859 - DNA, 30 bp, Artificial Sequence
  Synthetic oligonucleotide
gctggtttgagtagagatggccctagacta

SEQ ID NO: 266860 - DNA, 30 bp, Artificial Sequence
  Synthetic oligonucleotide
gtcaacagatgtccatgttcgggtagacta

SEQ ID NO: 266861 - DNA, 30 bp, Artificial Sequence
  Synthetic oligonucleotide
attgataggcccagccgacccaaacgacta

SEQ ID NO: 266862 - DNA, 30 bp, Artificial Sequence
  Synthetic oligonucleotide
atgaagtgaccgggtgccctttaacgacta

SEQ ID NO: 266863 - DNA, 30 bp, Artificial Sequence
  Synthetic oligonucleotide
gaacggccgtatattggagagctacgacta

SEQ ID NO: 266864 - DNA, 30 bp, Artificial Sequence
  Synthetic oligonucleotide
atactgtggagtggtcataataaccgacta

SEQ ID NO: 266865 - DNA, 30 bp, Artificial Sequence
  Synthetic oligonucleotide
cgactattgttcgggacttacctgcgacta

SEQ ID NO: 266866 - DNA, 30 bp, Artificial Sequence
  Synthetic oligonucleotide
acagtctcagaggccgtatggtgtcgacta

SEQ ID NO: 266867 - DNA, 30 bp, Artificial Sequence
  Synthetic oligonucleotide
agctaaacgggtcagcaattctttcgacta

SEQ ID NO: 266868 - DNA, 30 bp, Artificial Sequence
  Synthetic oligonucleotide
tcacagttgccgaagcgtcaataaggacta

SEQ ID NO: 266869 - DNA, 30 bp, Artificial Sequence
  Synthetic oligonucleotide
taggcgggggatcgtaacagctttggacta

SEQ ID NO: 266870 - DNA, 30 bp, Artificial Sequence
  Synthetic oligonucleotide
agaacttatactaagttcggaggctgacta

SEQ ID NO: 266871 - DNA, 30 bp, Artificial Sequence
  Synthetic oligonucleotide
gcgcctgattcgaatcgcgacccgtgacta

SEQ ID NO: 266872 - DNA, 30 bp, Artificial Sequence
  Synthetic oligonucleotide
gcataggaaatgtcgtccttggattgacta

SEQ ID NO: 266873 - DNA, 30 bp, Artificial Sequence
  Synthetic oligonucleotide
caggcttagtgatcggagaaggtttgacta

SEQ ID NO: 266874 - DNA, 30 bp, Artificial Sequence
  Synthetic oligonucleotide
tacaactaacgcgtcacctctgccatacta

SEQ ID NO: 266875 - DNA, 30 bp, Artificial Sequence
  Synthetic oligonucleotide
ttttctgagccaatgaggcccccgatacta

SEQ ID NO: 266876 - DNA, 30 bp, Artificial Sequence
  Synthetic oligonucleotide
catacttggcgaaggtcgctgtcactacta

SEQ ID NO: 266877 - DNA, 30 bp, Artificial Sequence
  Synthetic oligonucleotide
gttaacagtgcgtactgtgcgtagctacta

SEQ ID NO: 266878 - DNA, 30 bp, Artificial Sequence
  Synthetic oligonucleotide
ggcctgaagataaaaaggcccgaagtacta

SEQ ID NO: 266879 - DNA, 30 bp, Artificial Sequence
  Synthetic oligonucleotide
accaatccttgcagcatgcctcgcgtacta

SEQ ID NO: 266880 - DNA, 30 bp, Artificial Sequence
  Synthetic oligonucleotide
agcatctgaacaccttgatggtcggtacta

SEQ ID NO: 266881 - DNA, 30 bp, Artificial Sequence
  Synthetic oligonucleotide
gcctataaggccaaagtctactatgtacta

SEQ ID NO: 266882 - DNA, 30 bp, Artificial Sequence
  Synthetic oligonucleotide
aacaagaagcttttcgcagcggcattacta

SEQ ID NO: 266883 - DNA, 30 bp, Artificial Sequence
  Synthetic oligonucleotide
tctggggtaatggacccaagtgcattacta

SEQ ID NO: 266884 - DNA, 30 bp, Artificial Sequence
  Synthetic oligonucleotide
tcgggatacacaggtttgcgaagcttacta

SEQ ID NO: 266885 - DNA, 30 bp, Artificial Sequence
  Synthetic oligonucleotide
attagtccagtcagaacttgtatcttacta

SEQ ID NO: 266886 - DNA, 30 bp, Artificial Sequence
  Synthetic oligonucleotide
agacgcgacatgcaagcggacactttacta

SEQ ID NO: 266887 - DNA, 30 bp, Artificial Sequence
  Synthetic oligonucleotide
gaacgagtagcaataggctctgctttacta

SEQ ID NO: 266888 - DNA, 30 bp, Artificial Sequence
  Synthetic oligonucleotide
tttagccacgattaatcaatggttttacta

SEQ ID NO: 266889 - DNA, 30 bp, Artificial Sequence
  Synthetic oligonucleotide
gttacatcctaagagttccgggagaaccta

SEQ ID NO: 266890 - DNA, 30 bp, Artificial Sequence
  Synthetic oligonucleotide
agggatctttaaaaggcgatgaggaaccta

SEQ ID NO: 266891 - DNA, 30 bp, Artificial Sequence
  Synthetic oligonucleotide
ctgtgggacatctcaagtacaggtaaccta

SEQ ID NO: 266892 - DNA, 30 bp, Artificial Sequence
  Synthetic oligonucleotide
ggacgcgttacttggatttgaggtaaccta

SEQ ID NO: 266893 - DNA, 30 bp, Artificial Sequence
  Synthetic oligonucleotide
tggaaagtcatgggagtatatacacaccta

SEQ ID NO: 266894 - DNA, 30 bp, Artificial Sequence
  Synthetic oligonucleotide
ggggtaatatggatcagattaagacaccta

SEQ ID NO: 266895 - DNA, 30 bp, Artificial Sequence
  Synthetic oligonucleotide
agggaatataggtgttatggctaccaccta

SEQ ID NO: 266896 - DNA, 30 bp, Artificial Sequence
  Synthetic oligonucleotide
agggaacattgtgcgccttgtgagcaccta

SEQ ID NO: 266897 - DNA, 30 bp, Artificial Sequence
  Synthetic oligonucleotide
ctgagccagggaggactcagcaatcaccta

SEQ ID NO: 266898 - DNA, 30 bp, Artificial Sequence
  Synthetic oligonucleotide
tcgttaggaacccgctgacttacagaccta

SEQ ID NO: 266899 - DNA, 30 bp, Artificial Sequence
  Synthetic oligonucleotide
agtaaaggtcacgactacaaaagagaccta

SEQ ID NO: 266900 - DNA, 30 bp, Artificial Sequence
  Synthetic oligonucleotide
atcaggtatgtcacctacatttccgaccta

SEQ ID NO: 266901 - DNA, 30 bp, Artificial Sequence
  Synthetic oligonucleotide
ctacacacggactctggaacgcgcgaccta

SEQ ID NO: 266902 - DNA, 30 bp, Artificial Sequence
  Synthetic oligonucleotide
taacgcatggagggagctgcacaggaccta

SEQ ID NO: 266903 - DNA, 30 bp, Artificial Sequence
  Synthetic oligonucleotide
ggaccccaccttatcggggactcggaccta

SEQ ID NO: 266904 - DNA, 30 bp, Artificial Sequence
  Synthetic oligonucleotide
caaacttcttctagcagagtgggataccta

SEQ ID NO: 266905 - DNA, 30 bp, Artificial Sequence
  Synthetic oligonucleotide
cggtagtcgtctatcgccattcagtaccta

SEQ ID NO: 266906 - DNA, 30 bp, Artificial Sequence
  Synthetic oligonucleotide
gttaaaagccaccagggtaacgattaccta

SEQ ID NO: 266907 - DNA, 30 bp, Artificial Sequence
  Synthetic oligonucleotide
agcttgagtgtctacgtccttacttaccta

SEQ ID NO: 266908 - DNA, 30 bp, Artificial Sequence
  Synthetic oligonucleotide
tactcatccggcgccgggaagatttaccta

SEQ ID NO: 266909 - DNA, 30 bp, Artificial Sequence
  Synthetic oligonucleotide
cggtcaccgtatgtcacaacataaacccta

SEQ ID NO: 266910 - DNA, 30 bp, Artificial Sequence
  Synthetic oligonucleotide
tcattaccaagatacatggtaataacccta

SEQ ID NO: 266911 - DNA, 30 bp, Artificial Sequence
  Synthetic oligonucleotide
atgtcctcaaaactaagatttgcaccccta

SEQ ID NO: 266912 - DNA, 30 bp, Artificial Sequence
  Synthetic oligonucleotide
aggggttgaaacgaagcctttacgccccta

SEQ ID NO: 266913 - DNA, 30 bp, Artificial Sequence
  Synthetic oligonucleotide
caccccgaggggccactggataccgcccta

SEQ ID NO: 266914 - DNA, 30 bp, Artificial Sequence
  Synthetic oligonucleotide
ccggaaggtagtctttagtatagggcccta

SEQ ID NO: 266915 - DNA, 30 bp, Artificial Sequence
  Synthetic oligonucleotide
gcctggagttattcaagtcggagatcccta

SEQ ID NO: 266916 - DNA, 30 bp, Artificial Sequence
  Synthetic oligonucleotide
caatgggcgcagaggcatagacgctcccta

SEQ ID NO: 266917 - DNA, 30 bp, Artificial Sequence
  Synthetic oligonucleotide
cgcgaaacccgagggtgacagctctcccta

SEQ ID NO: 266918 - DNA, 30 bp, Artificial Sequence
  Synthetic oligonucleotide
aagtagctgagatgaaaacattggtcccta

SEQ ID NO: 266919 - DNA, 30 bp, Artificial Sequence
  Synthetic oligonucleotide
gtcgcttcccctccacgagcgtaaagccta

SEQ ID NO: 266920 - DNA, 30 bp, Artificial Sequence
  Synthetic oligonucleotide
tcgacggcgggggtggcatgcggaagccta

SEQ ID NO: 266921 - DNA, 29 bp, Artificial Sequence
  Synthetic oligonucleotide
tacctcgcaagcaaggaggttccagccta

SEQ ID NO: 266922 - DNA, 30 bp, Artificial Sequence
  Synthetic oligonucleotide
acgcccactgtgcttgcacggggcagccta

SEQ ID NO: 266923 - DNA, 30 bp, Artificial Sequence
  Synthetic oligonucleotide
aaacgatataacacgcgcaaatgcagccta

SEQ ID NO: 266924 - DNA, 30 bp, Artificial Sequence
  Synthetic oligonucleotide
ctaccgtgaagtttaatctttgcgagccta

SEQ ID NO: 266925 - DNA, 30 bp, Artificial Sequence
  Synthetic oligonucleotide
ctcctaatcggctcggaacctgctagccta

SEQ ID NO: 266926 - DNA, 30 bp, Artificial Sequence
  Synthetic oligonucleotide
catggataaggacagtcgcagagtagccta

SEQ ID NO: 266927 - DNA, 30 bp, Artificial Sequence
  Synthetic oligonucleotide
tataacgccctcggaacttgcggtagccta

SEQ ID NO: 266928 - DNA, 30 bp, Artificial Sequence
  Synthetic oligonucleotide
tagagtcgcacgataaagcggtaacgccta

SEQ ID NO: 266929 - DNA, 30 bp, Artificial Sequence
  Synthetic oligonucleotide
ctgttccccaatcaacacttaattcgccta

SEQ ID NO: 266930 - DNA, 30 bp, Artificial Sequence
  Synthetic oligonucleotide
gcgaagacagggatgtagaattttcgccta

SEQ ID NO: 266931 - DNA, 30 bp, Artificial Sequence
  Synthetic oligonucleotide
ttcattgcgcaaaccttgtatgtcggccta

SEQ ID NO: 266932 - DNA, 30 bp, Artificial Sequence
  Synthetic oligonucleotide
acgatcacagggcgtctacaagagggccta

SEQ ID NO: 266933 - DNA, 30 bp, Artificial Sequence
  Synthetic oligonucleotide
accaggtcatcgggcatgagcgatggccta

SEQ ID NO: 266934 - DNA, 30 bp, Artificial Sequence
  Synthetic oligonucleotide
gtgacaaacaggcggcagtttggatgccta

SEQ ID NO: 266935 - DNA, 30 bp, Artificial Sequence
  Synthetic oligonucleotide
ctaagaggcgcacagtttaaatcctgccta

SEQ ID NO: 266936 - DNA, 30 bp, Artificial Sequence
  Synthetic oligonucleotide
aaacttgtcgggacgaggacagattgccta

SEQ ID NO: 266937 - DNA, 30 bp, Artificial Sequence
  Synthetic oligonucleotide
aatcttctcagttctctaaaggattgccta

SEQ ID NO: 266938 - DNA, 30 bp, Artificial Sequence
  Synthetic oligonucleotide
gcttgactcggttagcagttgatgatccta

SEQ ID NO: 266939 - DNA, 30 bp, Artificial Sequence
  Synthetic oligonucleotide
gttgtgggttccgtcaggcccgtgatccta

SEQ ID NO: 266940 - DNA, 30 bp, Artificial Sequence
  Synthetic oligonucleotide
gcaattactgaagcgatctgggatatccta

SEQ ID NO: 266941 - DNA, 30 bp, Artificial Sequence
  Synthetic oligonucleotide
tccctgtgagtacaaaaagtatatatccta

SEQ ID NO: 266942 - DNA, 30 bp, Artificial Sequence
  Synthetic oligonucleotide
ggagaaaccagcggtacgttcagtatccta

SEQ ID NO: 266943 - DNA, 30 bp, Artificial Sequence
  Synthetic oligonucleotide
gcgtacattcagccaggaaacattatccta

SEQ ID NO: 266944 - DNA, 30 bp, Artificial Sequence
  Synthetic oligonucleotide
aactcgtaagctcgcatgtcattactccta

SEQ ID NO: 266945 - DNA, 30 bp, Artificial Sequence
  Synthetic oligonucleotide
caacgggcgatcgagggacacttgctccta

SEQ ID NO: 266946 - DNA, 30 bp, Artificial Sequence
  Synthetic oligonucleotide
ggtggggcactatgattggctaaattccta

SEQ ID NO: 266947 - DNA, 30 bp, Artificial Sequence
  Synthetic oligonucleotide
tacgctaatttcctgacaggccaattccta

SEQ ID NO: 266948 - DNA, 30 bp, Artificial Sequence
  Synthetic oligonucleotide
ccggtgtccgatagggaaacgaatttccta

SEQ ID NO: 266949 - DNA, 30 bp, Artificial Sequence
  Synthetic oligonucleotide
ccggagtatacgaataaaacggttttccta

SEQ ID NO: 266950 - DNA, 30 bp, Artificial Sequence
  Synthetic oligonucleotide
acggctgctctctctcttaagaaaaagcta

SEQ ID NO: 266951 - DNA, 30 bp, Artificial Sequence
  Synthetic oligonucleotide
actgtgctcacggctcacccaacaaagcta

SEQ ID NO: 266952 - DNA, 30 bp, Artificial Sequence
  Synthetic oligonucleotide
agtaccttcggggatcaaccatgaaagcta

SEQ ID NO: 266953 - DNA, 30 bp, Artificial Sequence
  Synthetic oligonucleotide
caactttgctcggtcctcacttgaaagcta

SEQ ID NO: 266954 - DNA, 30 bp, Artificial Sequence
  Synthetic oligonucleotide
gaaagcctcgtggcaataagagagaagcta

SEQ ID NO: 266955 - DNA, 30 bp, Artificial Sequence
  Synthetic oligonucleotide
agattcaaacggtaataaatgcggaagcta

SEQ ID NO: 266956 - DNA, 30 bp, Artificial Sequence
  Synthetic oligonucleotide
gaacgctagggcgggttgatagtgaagcta

SEQ ID NO: 266957 - DNA, 30 bp, Artificial Sequence
  Synthetic oligonucleotide
tattaaataacctggtgacgtgtgaagcta

SEQ ID NO: 266958 - DNA, 30 bp, Artificial Sequence
  Synthetic oligonucleotide
ttgtctcgtagggtgtggatgaaccagcta

SEQ ID NO: 266959 - DNA, 30 bp, Artificial Sequence
  Synthetic oligonucleotide
ttgctcgagaatgggtgaggttcccagcta

SEQ ID NO: 266960 - DNA, 30 bp, Artificial Sequence
  Synthetic oligonucleotide
gcctatggctcaacgacgagattccagcta

SEQ ID NO: 266961 - DNA, 30 bp, Artificial Sequence
  Synthetic oligonucleotide
caggacaaaatttgtgaggataagcagcta

SEQ ID NO: 266962 - DNA, 30 bp, Artificial Sequence
  Synthetic oligonucleotide
agcaggcaatgtgcagccttccggcagcta

SEQ ID NO: 266963 - DNA, 30 bp, Artificial Sequence
  Synthetic oligonucleotide
cctagctttagataagatggtgggcagcta

SEQ ID NO: 266964 - DNA, 30 bp, Artificial Sequence
  Synthetic oligonucleotide
gcaaaagcagttccgttatattgagagcta

SEQ ID NO: 266965 - DNA, 30 bp, Artificial Sequence
  Synthetic oligonucleotide
agattctcccaaccgacggtcaacgagcta

SEQ ID NO: 266966 - DNA, 30 bp, Artificial Sequence
  Synthetic oligonucleotide
ttcggacctggttccataggaagcgagcta

SEQ ID NO: 266967 - DNA, 30 bp, Artificial Sequence
  Synthetic oligonucleotide
gtaaagcgccgtttacatcgtccggagcta

SEQ ID NO: 266968 - DNA, 31 bp, Artificial Sequence
  Synthetic oligonucleotide
tcggacacctcatgctatactttatgagcta

SEQ ID NO: 266969 - DNA, 30 bp, Artificial Sequence
  Synthetic oligonucleotide
atacaacctgagtcattagtaactgagcta

SEQ ID NO: 266970 - DNA, 30 bp, Artificial Sequence
  Synthetic oligonucleotide
catccgggcacttatgttgcgtaatagcta

SEQ ID NO: 266971 - DNA, 30 bp, Artificial Sequence
  Synthetic oligonucleotide
atatggttcaagcaaaaggactcgtagcta

SEQ ID NO: 266972 - DNA, 30 bp, Artificial Sequence
  Synthetic oligonucleotide
ccgatccatacttatcgactccggtagcta

SEQ ID NO: 266973 - DNA, 30 bp, Artificial Sequence
  Synthetic oligonucleotide
cgcgcacattactggccgacactgtagcta

SEQ ID NO: 266974 - DNA, 30 bp, Artificial Sequence
  Synthetic oligonucleotide
ctgtcaacttcagcttgcagtcgaacgcta

SEQ ID NO: 266975 - DNA, 30 bp, Artificial Sequence
  Synthetic oligonucleotide
cgtttatccgcgtagagtagtccgacgcta

SEQ ID NO: 266976 - DNA, 30 bp, Artificial Sequence
  Synthetic oligonucleotide
acgctggaccgttcccgaaaagcgacgcta

SEQ ID NO: 266977 - DNA, 30 bp, Artificial Sequence
  Synthetic oligonucleotide
gcggcctcgtatttaagaacacatacgcta

SEQ ID NO: 266978 - DNA, 30 bp, Artificial Sequence
  Synthetic oligonucleotide
attagtagactttcaaggagatctacgcta

SEQ ID NO: 266979 - DNA, 30 bp, Artificial Sequence
  Synthetic oligonucleotide
taggttaatacagctcataaatgtacgcta

SEQ ID NO: 266980 - DNA, 30 bp, Artificial Sequence
  Synthetic oligonucleotide
atatccgcgtcgatgggtgggcttacgcta

SEQ ID NO: 266981 - DNA, 30 bp, Artificial Sequence
  Synthetic oligonucleotide
ttgagggtcaaagatccgaaaaaaccgcta

SEQ ID NO: 266982 - DNA, 30 bp, Artificial Sequence
  Synthetic oligonucleotide
acagggtttatgagtccagaagcaccgcta

SEQ ID NO: 266983 - DNA, 30 bp, Artificial Sequence
  Synthetic oligonucleotide
actgtaatgaaatgcacatgtcccccgcta

SEQ ID NO: 266984 - DNA, 30 bp, Artificial Sequence
  Synthetic oligonucleotide
ctcaataggcacggagcgcttggcccgcta

SEQ ID NO: 266985 - DNA, 30 bp, Artificial Sequence
  Synthetic oligonucleotide
tatgctgctaattcaataacactcccgcta

SEQ ID NO: 266986 - DNA, 30 bp, Artificial Sequence
  Synthetic oligonucleotide
gcttcagaccaccgatgcaacgtcccgcta

SEQ ID NO: 266987 - DNA, 30 bp, Artificial Sequence
  Synthetic oligonucleotide
aaagagccgccattatagggggttccgcta

SEQ ID NO: 266988 - DNA, 30 bp, Artificial Sequence
  Synthetic oligonucleotide
catagggcagttacagactattcagcgcta

SEQ ID NO: 266989 - DNA, 30 bp, Artificial Sequence
  Synthetic oligonucleotide
aggtagctgtaggtttagcgagccgcgcta

SEQ ID NO: 266990 - DNA, 30 bp, Artificial Sequence
  Synthetic oligonucleotide
ttataagatctatgtcaacgctaatcgcta

SEQ ID NO: 266991 - DNA, 30 bp, Artificial Sequence
  Synthetic oligonucleotide
gatgtatatgacattggcctgcactcgcta

SEQ ID NO: 266992 - DNA, 30 bp, Artificial Sequence
  Synthetic oligonucleotide
ctcgggctatatggctacgcacgctcgcta

SEQ ID NO: 266993 - DNA, 30 bp, Artificial Sequence
  Synthetic oligonucleotide
tacggtcagcggcacctttgcatctcgcta

SEQ ID NO: 266994 - DNA, 30 bp, Artificial Sequence
  Synthetic oligonucleotide
ccccaacttaatcgggataggtagtcgcta

SEQ ID NO: 266995 - DNA, 30 bp, Artificial Sequence
  Synthetic oligonucleotide
caatctgatacataatactccatgtcgcta

SEQ ID NO: 266996 - DNA, 30 bp, Artificial Sequence
  Synthetic oligonucleotide
tcagttgccgctacttttcttttgtcgcta

SEQ ID NO: 266997 - DNA, 30 bp, Artificial Sequence
  Synthetic oligonucleotide
cagctcaccagactctacattggttcgcta

SEQ ID NO: 266998 - DNA, 30 bp, Artificial Sequence
  Synthetic oligonucleotide
cttcggattatgatggggaagatttcgcta

SEQ ID NO: 266999 - DNA, 30 bp, Artificial Sequence
  Synthetic oligonucleotide
gatcctctgtgccccgacgacggaaggcta

SEQ ID NO: 267000 - DNA, 30 bp, Artificial Sequence
  Synthetic oligonucleotide
agctaatccttccctaaatatgggaggcta

SEQ ID NO: 267001 - DNA, 30 bp, Artificial Sequence
  Synthetic oligonucleotide
actcgatatcagctaaagggccataggcta

SEQ ID NO: 267002 - DNA, 30 bp, Artificial Sequence
  Synthetic oligonucleotide
agaattagggaccttacttaagctaggcta

SEQ ID NO: 267003 - DNA, 30 bp, Artificial Sequence
  Synthetic oligonucleotide
agttcacgtcggggagattgtcagcggcta

SEQ ID NO: 267004 - DNA, 30 bp, Artificial Sequence
  Synthetic oligonucleotide
gtcggagatctgggcgaatttatgcggcta

SEQ ID NO: 267005 - DNA, 30 bp, Artificial Sequence
  Synthetic oligonucleotide
cctggcacttctcagagcgccttgcggcta

SEQ ID NO: 267006 - DNA, 30 bp, Artificial Sequence
  Synthetic oligonucleotide
gacacagaagtacctagccatcatcggcta

SEQ ID NO: 267007 - DNA, 31 bp, Artificial Sequence
  Synthetic oligonucleotide
gacgtactaaaacggctggttctgtcggcta

SEQ ID NO: 267008 - DNA, 30 bp, Artificial Sequence
  Synthetic oligonucleotide
gtttggtcgctatctatataagttcggcta

SEQ ID NO: 267009 - DNA, 30 bp, Artificial Sequence
  Synthetic oligonucleotide
tcttatctcggattccagcagtttcggcta

SEQ ID NO: 267010 - DNA, 30 bp, Artificial Sequence
  Synthetic oligonucleotide
gttgacaatctggtctaataatcagggcta

SEQ ID NO: 267011 - DNA, 30 bp, Artificial Sequence
  Synthetic oligonucleotide
gtcatatattgagatgtggacaacgggcta

SEQ ID NO: 267012 - DNA, 30 bp, Artificial Sequence
  Synthetic oligonucleotide
gcgcagagggcacattaagtagtcgggcta

SEQ ID NO: 267013 - DNA, 30 bp, Artificial Sequence
  Synthetic oligonucleotide
cgtttggggccataacgatacccggggcta

SEQ ID NO: 267014 - DNA, 30 bp, Artificial Sequence
  Synthetic oligonucleotide
ttgttgtcgcccgtcaaggcaagggggcta

SEQ ID NO: 267015 - DNA, 30 bp, Artificial Sequence
  Synthetic oligonucleotide
cattttgtgaccttattaatgggggggcta

SEQ ID NO: 267016 - DNA, 30 bp, Artificial Sequence
  Synthetic oligonucleotide
tatgaaactggtgtggaggcctatgggcta

SEQ ID NO: 267017 - DNA, 30 bp, Artificial Sequence
  Synthetic oligonucleotide
ctcatgattatggatatcgcatttgggcta

SEQ ID NO: 267018 - DNA, 30 bp, Artificial Sequence
  Synthetic oligonucleotide
cctatctgggtgttgttaccaaaatggcta

SEQ ID NO: 267019 - DNA, 30 bp, Artificial Sequence
  Synthetic oligonucleotide
cgcatctcaacttagtcaaataattggcta

SEQ ID NO: 267020 - DNA, 30 bp, Artificial Sequence
  Synthetic oligonucleotide
aagtcctatctcacccaggagacttggcta

SEQ ID NO: 267021 - DNA, 30 bp, Artificial Sequence
  Synthetic oligonucleotide
ccaaagatccatgctgtagtgcgttggcta

SEQ ID NO: 267022 - DNA, 30 bp, Artificial Sequence
  Synthetic oligonucleotide
ggtgacctgagactggccgaaggttggcta

SEQ ID NO: 267023 - DNA, 30 bp, Artificial Sequence
  Synthetic oligonucleotide
gccgcttgacgagatattaccacaatgcta

SEQ ID NO: 267024 - DNA, 30 bp, Artificial Sequence
  Synthetic oligonucleotide
gggtcgctaagtctagaactcccaatgcta

SEQ ID NO: 267025 - DNA, 30 bp, Artificial Sequence
  Synthetic oligonucleotide
cagaagaattcggtacactgcgcaatgcta

SEQ ID NO: 267026 - DNA, 30 bp, Artificial Sequence
  Synthetic oligonucleotide
gtcgggtgatgggatttggtgtacatgcta

SEQ ID NO: 267027 - DNA, 30 bp, Artificial Sequence
  Synthetic oligonucleotide
gctaccggttattgagtctgtaccatgcta

SEQ ID NO: 267028 - DNA, 30 bp, Artificial Sequence
  Synthetic oligonucleotide
gtaaggcccgtttcctatagtcccatgcta

SEQ ID NO: 267029 - DNA, 30 bp, Artificial Sequence
  Synthetic oligonucleotide
acgctataccagtctactaggaagatgcta

SEQ ID NO: 267030 - DNA, 30 bp, Artificial Sequence
  Synthetic oligonucleotide
tgggatggatagtcgatcggtgtgatgcta

SEQ ID NO: 267031 - DNA, 30 bp, Artificial Sequence
  Synthetic oligonucleotide
acaatgtggagcttgtgaagtcctatgcta

SEQ ID NO: 267032 - DNA, 30 bp, Artificial Sequence
  Synthetic oligonucleotide
gagacgatgtctgcccatataatactgcta

SEQ ID NO: 267033 - DNA, 30 bp, Artificial Sequence
  Synthetic oligonucleotide
atggaattacaattcacagcggtactgcta

SEQ ID NO: 267034 - DNA, 30 bp, Artificial Sequence
  Synthetic oligonucleotide
gataatcacccctgaggaagccacctgcta

SEQ ID NO: 267035 - DNA, 30 bp, Artificial Sequence
  Synthetic oligonucleotide
acgataactagatatagagattcgctgcta

SEQ ID NO: 267036 - DNA, 30 bp, Artificial Sequence
  Synthetic oligonucleotide
tatttagatcagcgtaagactgggctgcta

SEQ ID NO: 267037 - DNA, 30 bp, Artificial Sequence
  Synthetic oligonucleotide
gtctcggggtggtgatctaatggtctgcta

SEQ ID NO: 267038 - DNA, 30 bp, Artificial Sequence
  Synthetic oligonucleotide
gggccctttttttagaaccgtaaagtgcta

SEQ ID NO: 267039 - DNA, 30 bp, Artificial Sequence
  Synthetic oligonucleotide
aaggatgacgtgattagcggttacgtgcta

SEQ ID NO: 267040 - DNA, 30 bp, Artificial Sequence
  Synthetic oligonucleotide
cggctgatcgtattcccaccgtgcgtgcta

SEQ ID NO: 267041 - DNA, 30 bp, Artificial Sequence
  Synthetic oligonucleotide
ccgaacttgcgtagtgtggcaacggtgcta

SEQ ID NO: 267042 - DNA, 30 bp, Artificial Sequence
  Synthetic oligonucleotide
aggtaaacgcgctcatcgagtctggtgcta

SEQ ID NO: 267043 - DNA, 30 bp, Artificial Sequence
  Synthetic oligonucleotide
gccggggcttcgttagatgtgggtgtgcta

SEQ ID NO: 267044 - DNA, 30 bp, Artificial Sequence
  Synthetic oligonucleotide
ggggttagactccggtgctcaattgtgcta

SEQ ID NO: 267045 - DNA, 30 bp, Artificial Sequence
  Synthetic oligonucleotide
gcgttgagatcgcaatacacctttgtgcta

SEQ ID NO: 267046 - DNA, 30 bp, Artificial Sequence
  Synthetic oligonucleotide
tccgcttactgagcgtaaaatacattgcta

SEQ ID NO: 267047 - DNA, 30 bp, Artificial Sequence
  Synthetic oligonucleotide
agtcctttcctcaaacatgtatccttgcta

SEQ ID NO: 267048 - DNA, 30 bp, Artificial Sequence
  Synthetic oligonucleotide
taacgcgtccaggagagtgtgatcttgcta

SEQ ID NO: 267049 - DNA, 30 bp, Artificial Sequence
  Synthetic oligonucleotide
ggcgtaagtttctgtattggtttcttgcta

SEQ ID NO: 267050 - DNA, 30 bp, Artificial Sequence
  Synthetic oligonucleotide
caaaaagatagatgctcgtacggtttgcta

SEQ ID NO: 267051 - DNA, 30 bp, Artificial Sequence
  Synthetic oligonucleotide
actaacggtccgccatgtgaatgaaatcta

SEQ ID NO: 267052 - DNA, 29 bp, Artificial Sequence
  Synthetic oligonucleotide
gtttggcacgcaggagcagcctaaatcta

SEQ ID NO: 267053 - DNA, 30 bp, Artificial Sequence
  Synthetic oligonucleotide
agaaagcaaccgtggtgccaggccaatcta

SEQ ID NO: 267054 - DNA, 30 bp, Artificial Sequence
  Synthetic oligonucleotide
tgctacaaaacatgctgctatagcaatcta

SEQ ID NO: 267055 - DNA, 30 bp, Artificial Sequence
  Synthetic oligonucleotide
atatccactatctggtttctatggaatcta

SEQ ID NO: 267056 - DNA, 30 bp, Artificial Sequence
  Synthetic oligonucleotide
gatgtcgtgcgcggttatgaaggtaatcta

SEQ ID NO: 267057 - DNA, 30 bp, Artificial Sequence
  Synthetic oligonucleotide
tttctagggccggatggttttgtacatcta

SEQ ID NO: 267058 - DNA, 30 bp, Artificial Sequence
  Synthetic oligonucleotide
ttgactgtttaacacggtgaacgccatcta

SEQ ID NO: 267059 - DNA, 30 bp, Artificial Sequence
  Synthetic oligonucleotide
cacacgtgttttgattgttgggtccatcta

SEQ ID NO: 267060 - DNA, 30 bp, Artificial Sequence
  Synthetic oligonucleotide
acaagaaatcactaaggttgaaagcatcta

SEQ ID NO: 267061 - DNA, 30 bp, Artificial Sequence
  Synthetic oligonucleotide
cgtcttatgttcctagctaatccgcatcta

SEQ ID NO: 267062 - DNA, 30 bp, Artificial Sequence
  Synthetic oligonucleotide
aacagcggtggggggagattcgggcatcta

SEQ ID NO: 267063 - DNA, 30 bp, Artificial Sequence
  Synthetic oligonucleotide
aacatgattacgactgaatctagtcatcta

SEQ ID NO: 267064 - DNA, 30 bp, Artificial Sequence
  Synthetic oligonucleotide
atagaccaggattttaaattaacagatcta

SEQ ID NO: 267065 - DNA, 30 bp, Artificial Sequence
  Synthetic oligonucleotide
ctccgggcttggtcaactataggagatcta

SEQ ID NO: 267066 - DNA, 29 bp, Artificial Sequence
  Synthetic oligonucleotide
atggactgccgggaaactgtgtagatcta

SEQ ID NO: 267067 - DNA, 30 bp, Artificial Sequence
  Synthetic oligonucleotide
actctagttgtgaatgcaagtccggatcta

SEQ ID NO: 267068 - DNA, 30 bp, Artificial Sequence
  Synthetic oligonucleotide
gccaatagtcatcaacatgatttggatcta

SEQ ID NO: 267069 - DNA, 30 bp, Artificial Sequence
  Synthetic oligonucleotide
ggcacctggcatcatactggaatatatcta

SEQ ID NO: 267070 - DNA, 30 bp, Artificial Sequence
  Synthetic oligonucleotide
tacagtgcgtaggaaacatcccactatcta

SEQ ID NO: 267071 - DNA, 30 bp, Artificial Sequence
  Synthetic oligonucleotide
tgtcagaaatgcactcgaggattctatcta

SEQ ID NO: 267072 - DNA, 30 bp, Artificial Sequence
  Synthetic oligonucleotide
cagacaaactagggtccactttattatcta

SEQ ID NO: 267073 - DNA, 30 bp, Artificial Sequence
  Synthetic oligonucleotide
gcctaggatcatcagcggatgccttatcta

SEQ ID NO: 267074 - DNA, 30 bp, Artificial Sequence
  Synthetic oligonucleotide
tcctaagcatgaattcgacaatgaactcta

SEQ ID NO: 267075 - DNA, 30 bp, Artificial Sequence
  Synthetic oligonucleotide
ttgttctcaattctattatgttacactcta

SEQ ID NO: 267076 - DNA, 30 bp, Artificial Sequence
  Synthetic oligonucleotide
tatatacggctacgggaaacaaatactcta

SEQ ID NO: 267077 - DNA, 30 bp, Artificial Sequence
  Synthetic oligonucleotide
caccgggtcgttaaggatgtaattactcta

SEQ ID NO: 267078 - DNA, 30 bp, Artificial Sequence
  Synthetic oligonucleotide
gggtgcgccaattgacgtatctttactcta

SEQ ID NO: 267079 - DNA, 30 bp, Artificial Sequence
  Synthetic oligonucleotide
tacagttgcatgtaaagaacgcaacctcta

SEQ ID NO: 267080 - DNA, 30 bp, Artificial Sequence
  Synthetic oligonucleotide
ggcgtgttttacgccgggcgtacacctcta

SEQ ID NO: 267081 - DNA, 30 bp, Artificial Sequence
  Synthetic oligonucleotide
gagggaaccgtgaggcttgtgcaccctcta

SEQ ID NO: 267082 - DNA, 30 bp, Artificial Sequence
  Synthetic oligonucleotide
tgttgtgcaaggaaagttgcggtccctcta

SEQ ID NO: 267083 - DNA, 30 bp, Artificial Sequence
  Synthetic oligonucleotide
tgcgatagagaagacgaaaatgggcctcta

SEQ ID NO: 267084 - DNA, 30 bp, Artificial Sequence
  Synthetic oligonucleotide
ggggaacgtcccattatggtgcatcctcta

SEQ ID NO: 267085 - DNA, 30 bp, Artificial Sequence
  Synthetic oligonucleotide
cggccgaaaaaacgtgcagttgatcctcta

SEQ ID NO: 267086 - DNA, 30 bp, Artificial Sequence
  Synthetic oligonucleotide
tagcgtgcgtgcgcaaactggttcgctcta

SEQ ID NO: 267087 - DNA, 31 bp, Artificial Sequence
  Synthetic oligonucleotide
cgagggccggacagggtagcctcaggctcta

SEQ ID NO: 267088 - DNA, 30 bp, Artificial Sequence
  Synthetic oligonucleotide
ccaacagtcttcatatggggctaggctcta

SEQ ID NO: 267089 - DNA, 30 bp, Artificial Sequence
  Synthetic oligonucleotide
caaaaattcttcctgcctatccctgctcta

SEQ ID NO: 267090 - DNA, 30 bp, Artificial Sequence
  Synthetic oligonucleotide
ccaggcgacatcggataccgatgtgctcta

SEQ ID NO: 267091 - DNA, 30 bp, Artificial Sequence
  Synthetic oligonucleotide
ctagatgatacaaagctaatcaaatctcta

SEQ ID NO: 267092 - DNA, 30 bp, Artificial Sequence
  Synthetic oligonucleotide
tacttgaacacatatatggtcaaatctcta

SEQ ID NO: 267093 - DNA, 30 bp, Artificial Sequence
  Synthetic oligonucleotide
gaaagacaaggttttccaaaagaatctcta

SEQ ID NO: 267094 - DNA, 30 bp, Artificial Sequence
  Synthetic oligonucleotide
tgacggtggggtgagttagaattgtctcta

SEQ ID NO: 267095 - DNA, 30 bp, Artificial Sequence
  Synthetic oligonucleotide
tcgcggttacatggataaggacccagtcta

SEQ ID NO: 267096 - DNA, 30 bp, Artificial Sequence
  Synthetic oligonucleotide
tcgtataagtattagtcataatccagtcta

SEQ ID NO: 267097 - DNA, 30 bp, Artificial Sequence
  Synthetic oligonucleotide
gcgtcgcgggaacaatcttgcccgagtcta

SEQ ID NO: 267098 - DNA, 30 bp, Artificial Sequence
  Synthetic oligonucleotide
gagaaatatatagcaatctcggtgagtcta

SEQ ID NO: 267099 - DNA, 30 bp, Artificial Sequence
  Synthetic oligonucleotide
gttagatgtaatagccacctctctagtcta

SEQ ID NO: 267100 - DNA, 30 bp, Artificial Sequence
  Synthetic oligonucleotide
ccgccgatgtttaaaacacattctagtcta

SEQ ID NO: 267101 - DNA, 30 bp, Artificial Sequence
  Synthetic oligonucleotide
aacggggcgagtcactaccatgttagtcta

SEQ ID NO: 267102 - DNA, 30 bp, Artificial Sequence
  Synthetic oligonucleotide
gaaaacatcggagttatgctggcacgtcta

SEQ ID NO: 267103 - DNA, 30 bp, Artificial Sequence
  Synthetic oligonucleotide
cgttgttagcgcatgcagaattcacgtcta

SEQ ID NO: 267104 - DNA, 30 bp, Artificial Sequence
  Synthetic oligonucleotide
atgaggctgcgcgagacagtggtacgtcta

SEQ ID NO: 267105 - DNA, 30 bp, Artificial Sequence
  Synthetic oligonucleotide
ccgaaggtcttgtcgttgcaagggcgtcta

SEQ ID NO: 267106 - DNA, 30 bp, Artificial Sequence
  Synthetic oligonucleotide
aaataccgtcgatatcttatatggcgtcta

SEQ ID NO: 267107 - DNA, 30 bp, Artificial Sequence
  Synthetic oligonucleotide
gctgggctacaggcggaggatactcgtcta

SEQ ID NO: 267108 - DNA, 30 bp, Artificial Sequence
  Synthetic oligonucleotide
gttgtctccatctccaaatctggtcgtcta

SEQ ID NO: 267109 - DNA, 30 bp, Artificial Sequence
  Synthetic oligonucleotide
gaggggagctctcatcaaggagaaggtcta

SEQ ID NO: 267110 - DNA, 30 bp, Artificial Sequence
  Synthetic oligonucleotide
gagacggtacataggcatagtataggtcta

SEQ ID NO: 267111 - DNA, 30 bp, Artificial Sequence
  Synthetic oligonucleotide
gaataataactatcattagaatagggtcta

SEQ ID NO: 267112 - DNA, 30 bp, Artificial Sequence
  Synthetic oligonucleotide
tagctctaaggtttaaccgagtcgggtcta

SEQ ID NO: 267113 - DNA, 30 bp, Artificial Sequence
  Synthetic oligonucleotide
cttactgcaagacggatctaccggggtcta

SEQ ID NO: 267114 - DNA, 30 bp, Artificial Sequence
  Synthetic oligonucleotide
agccctacttcagaaacatctcgtggtcta

SEQ ID NO: 267115 - DNA, 30 bp, Artificial Sequence
  Synthetic oligonucleotide
tcaggtctgaccgactatcaatttggtcta

SEQ ID NO: 267116 - DNA, 30 bp, Artificial Sequence
  Synthetic oligonucleotide
gccaagagtaggagattgactcaatgtcta

SEQ ID NO: 267117 - DNA, 30 bp, Artificial Sequence
  Synthetic oligonucleotide
tattggaaactagaaggggaaaactgtcta

SEQ ID NO: 267118 - DNA, 31 bp, Artificial Sequence
  Synthetic oligonucleotide
ttgaacacaaatccgaactggctcgtgtcta

SEQ ID NO: 267119 - DNA, 30 bp, Artificial Sequence
  Synthetic oligonucleotide
cgaaccgcattatgttgaagtgggtgtcta

SEQ ID NO: 267120 - DNA, 30 bp, Artificial Sequence
  Synthetic oligonucleotide
gactcttatcgtcccgatgaatcaattcta

SEQ ID NO: 267121 - DNA, 30 bp, Artificial Sequence
  Synthetic oligonucleotide
aggagatcatccacggccgtcgtaattcta

SEQ ID NO: 267122 - DNA, 30 bp, Artificial Sequence
  Synthetic oligonucleotide
tcgctaccgacgggcaacttaccgattcta

SEQ ID NO: 267123 - DNA, 30 bp, Artificial Sequence
  Synthetic oligonucleotide
aaatctttaaaaggcctggacccgattcta

SEQ ID NO: 267124 - DNA, 30 bp, Artificial Sequence
  Synthetic oligonucleotide
acctatgtgtaggtgaacgatgcgattcta

SEQ ID NO: 267125 - DNA, 30 bp, Artificial Sequence
  Synthetic oligonucleotide
cccgttaagcactgaggggcacggattcta

SEQ ID NO: 267126 - DNA, 30 bp, Artificial Sequence
  Synthetic oligonucleotide
aaccgcgtcgaccgtaatgatgatattcta

SEQ ID NO: 267127 - DNA, 30 bp, Artificial Sequence
  Synthetic oligonucleotide
tgaaacggggtcaagccggtgcgtattcta

SEQ ID NO: 267128 - DNA, 30 bp, Artificial Sequence
  Synthetic oligonucleotide
ataagtccacgccgataccacgaacttcta

SEQ ID NO: 267129 - DNA, 30 bp, Artificial Sequence
  Synthetic oligonucleotide
gtccagtgtaagggccaacatacccttcta

SEQ ID NO: 267130 - DNA, 30 bp, Artificial Sequence
  Synthetic oligonucleotide
gagagttccaagtacaacttcctgcttcta

SEQ ID NO: 267131 - DNA, 30 bp, Artificial Sequence
  Synthetic oligonucleotide
ctgactgctacatgggctcaccatcttcta

SEQ ID NO: 267132 - DNA, 30 bp, Artificial Sequence
  Synthetic oligonucleotide
gctcacacatccagaggggttagagttcta

SEQ ID NO: 267133 - DNA, 30 bp, Artificial Sequence
  Synthetic oligonucleotide
ctccacataggcttaaccttttgagttcta

SEQ ID NO: 267134 - DNA, 30 bp, Artificial Sequence
  Synthetic oligonucleotide
atcagatccattttaccgaaagtcgttcta

SEQ ID NO: 267135 - DNA, 30 bp, Artificial Sequence
  Synthetic oligonucleotide
ccggcggctgagcctcctacgagggttcta

SEQ ID NO: 267136 - DNA, 30 bp, Artificial Sequence
  Synthetic oligonucleotide
tttagagagtacctttgtcggtgtgttcta

SEQ ID NO: 267137 - DNA, 30 bp, Artificial Sequence
  Synthetic oligonucleotide
gttgacggtcggctaaaggtcatatttcta

SEQ ID NO: 267138 - DNA, 30 bp, Artificial Sequence
  Synthetic oligonucleotide
cagggcgccgtttcctatgggtactttcta

SEQ ID NO: 267139 - DNA, 30 bp, Artificial Sequence
  Synthetic oligonucleotide
acatgccgcccataaattatgctctttcta

SEQ ID NO: 267140 - DNA, 27 bp, Artificial Sequence
  Synthetic oligonucleotide
ataaccaagacatttaaggtctttcta

SEQ ID NO: 267141 - DNA, 30 bp, Artificial Sequence
  Synthetic oligonucleotide
gcgaccgacatcgcagctggggcgtttcta

SEQ ID NO: 267142 - DNA, 30 bp, Artificial Sequence
  Synthetic oligonucleotide
gccctgacagtattcgactcctcgtttcta

SEQ ID NO: 267143 - DNA, 30 bp, Artificial Sequence
  Synthetic oligonucleotide
aattagagatatcgtgagtttacaaaagta

SEQ ID NO: 267144 - DNA, 30 bp, Artificial Sequence
  Synthetic oligonucleotide
cgggttattttagtatcagaaataaaagta

SEQ ID NO: 267145 - DNA, 30 bp, Artificial Sequence
  Synthetic oligonucleotide
ttgggtgatggccaataaggattaaaagta

SEQ ID NO: 267146 - DNA, 30 bp, Artificial Sequence
  Synthetic oligonucleotide
ttctgagtgaactgggacaccaccaaagta

SEQ ID NO: 267147 - DNA, 30 bp, Artificial Sequence
  Synthetic oligonucleotide
aatggtggtggccgctaacaattcaaagta

SEQ ID NO: 267148 - DNA, 30 bp, Artificial Sequence
  Synthetic oligonucleotide
tcggatcaaattccagcacggttgaaagta

SEQ ID NO: 267149 - DNA, 30 bp, Artificial Sequence
  Synthetic oligonucleotide
tagtacaactgcttaggcactgataaagta

SEQ ID NO: 267150 - DNA, 30 bp, Artificial Sequence
  Synthetic oligonucleotide
ggtccgcttaactcctaatagtataaagta

SEQ ID NO: 267151 - DNA, 30 bp, Artificial Sequence
  Synthetic oligonucleotide
aaaagatatggaaggaattacactaaagta

SEQ ID NO: 267152 - DNA, 30 bp, Artificial Sequence
  Synthetic oligonucleotide
taagcccgttaccattggtaacgtaaagta

SEQ ID NO: 267153 - DNA, 30 bp, Artificial Sequence
  Synthetic oligonucleotide
gttaaccaaggatgtgggctttaacaagta

SEQ ID NO: 267154 - DNA, 30 bp, Artificial Sequence
  Synthetic oligonucleotide
tcttgactcgcaaccagatagccacaagta

SEQ ID NO: 267155 - DNA, 30 bp, Artificial Sequence
  Synthetic oligonucleotide
atctaaccgcctggaaaatggctacaagta

SEQ ID NO: 267156 - DNA, 30 bp, Artificial Sequence
  Synthetic oligonucleotide
tcgcggcggatgggaggctgaacccaagta

SEQ ID NO: 267157 - DNA, 30 bp, Artificial Sequence
  Synthetic oligonucleotide
taaaaattcgtcgggtgtcatagccaagta

SEQ ID NO: 267158 - DNA, 30 bp, Artificial Sequence
  Synthetic oligonucleotide
tgctaactgccaagtaaatgctggcaagta

SEQ ID NO: 267159 - DNA, 30 bp, Artificial Sequence
  Synthetic oligonucleotide
tttcagctcagtttcacctattggcaagta

SEQ ID NO: 267160 - DNA, 30 bp, Artificial Sequence
  Synthetic oligonucleotide
gtccggcgtttgcttcacactcctcaagta

SEQ ID NO: 267161 - DNA, 30 bp, Artificial Sequence
  Synthetic oligonucleotide
tcgccggtactacgtcctcaacgtcaagta

SEQ ID NO: 267162 - DNA, 30 bp, Artificial Sequence
  Synthetic oligonucleotide
ggataaaaatcaagagttggtatagaagta

SEQ ID NO: 267163 - DNA, 30 bp, Artificial Sequence
  Synthetic oligonucleotide
aagcagcgtcccggtgtgtacaacgaagta

SEQ ID NO: 267164 - DNA, 30 bp, Artificial Sequence
  Synthetic oligonucleotide
ctcttacgatgtgtgagaatgcccgaagta

SEQ ID NO: 267165 - DNA, 30 bp, Artificial Sequence
  Synthetic oligonucleotide
tcaatgcaaaggcctgatggcttcgaagta

SEQ ID NO: 267166 - DNA, 30 bp, Artificial Sequence
  Synthetic oligonucleotide
ctcttcggctttgctcaggctcaggaagta

SEQ ID NO: 267167 - DNA, 30 bp, Artificial Sequence
  Synthetic oligonucleotide
gaatttgacgcacgtaggagtggggaagta

SEQ ID NO: 267168 - DNA, 30 bp, Artificial Sequence
  Synthetic oligonucleotide
aacattcggagaaggacaccgttggaagta

SEQ ID NO: 267169 - DNA, 30 bp, Artificial Sequence
  Synthetic oligonucleotide
tcatagatttagtcacgattagttgaagta

SEQ ID NO: 267170 - DNA, 30 bp, Artificial Sequence
  Synthetic oligonucleotide
tagataggtttttgagacgtcgttgaagta

SEQ ID NO: 267171 - DNA, 30 bp, Artificial Sequence
  Synthetic oligonucleotide
gtttcggaacattggcggtctgttgaagta

SEQ ID NO: 267172 - DNA, 30 bp, Artificial Sequence
  Synthetic oligonucleotide
acgttggatgcacggaatgcaacataagta

SEQ ID NO: 267173 - DNA, 30 bp, Artificial Sequence
  Synthetic oligonucleotide
acagagtgagcaagatggctcctataagta

SEQ ID NO: 267174 - DNA, 30 bp, Artificial Sequence
  Synthetic oligonucleotide
gaaattgtacgagtggtcgtgcactaagta

SEQ ID NO: 267175 - DNA, 30 bp, Artificial Sequence
  Synthetic oligonucleotide
tgacagtcgaaagccgagcccacctaagta

SEQ ID NO: 267176 - DNA, 30 bp, Artificial Sequence
  Synthetic oligonucleotide
gaaaagcttctagcgccagtcacctaagta

SEQ ID NO: 267177 - DNA, 30 bp, Artificial Sequence
  Synthetic oligonucleotide
gcgtcttcataacatgcaaggggctaagta

SEQ ID NO: 267178 - DNA, 30 bp, Artificial Sequence
  Synthetic oligonucleotide
gagcgtagagggggcatccatatctaagta

SEQ ID NO: 267179 - DNA, 30 bp, Artificial Sequence
  Synthetic oligonucleotide
cccgtctcaaagccccactcgccgtaagta

SEQ ID NO: 267180 - DNA, 30 bp, Artificial Sequence
  Synthetic oligonucleotide
ccttgaatgcggaatatgtgcttgtaagta

SEQ ID NO: 267181 - DNA, 30 bp, Artificial Sequence
  Synthetic oligonucleotide
gtaaagtcgtgtgtacctctacgttaagta

SEQ ID NO: 267182 - DNA, 30 bp, Artificial Sequence
  Synthetic oligonucleotide
cgcttcgtatcacgagtactaccaacagta

SEQ ID NO: 267183 - DNA, 30 bp, Artificial Sequence
  Synthetic oligonucleotide
cacgccatagtagtagtacgccggacagta

SEQ ID NO: 267184 - DNA, 30 bp, Artificial Sequence
  Synthetic oligonucleotide
agaaagtattgctagtcgagtctgacagta

SEQ ID NO: 267185 - DNA, 30 bp, Artificial Sequence
  Synthetic oligonucleotide
atatcctgcttgtgggattggatcccagta

SEQ ID NO: 267186 - DNA, 30 bp, Artificial Sequence
  Synthetic oligonucleotide
cccatcgcttcatagtattgctcgccagta

SEQ ID NO: 267187 - DNA, 30 bp, Artificial Sequence
  Synthetic oligonucleotide
gggtcaggttactatttaggcgggccagta

SEQ ID NO: 267188 - DNA, 30 bp, Artificial Sequence
  Synthetic oligonucleotide
cgcggcaggaatacatgtaacggtccagta

SEQ ID NO: 267189 - DNA, 29 bp, Artificial Sequence
  Synthetic oligonucleotide
gaggtgtaatacaggcttgaagcgcagta

SEQ ID NO: 267190 - DNA, 30 bp, Artificial Sequence
  Synthetic oligonucleotide
ccacggttgacaacaactcggggcgcagta

SEQ ID NO: 267191 - DNA, 30 bp, Artificial Sequence
  Synthetic oligonucleotide
aaaactggaatctatcttgtccaggcagta

SEQ ID NO: 267192 - DNA, 30 bp, Artificial Sequence
  Synthetic oligonucleotide
caataaatgcaccgggcttcagaggcagta

SEQ ID NO: 267193 - DNA, 30 bp, Artificial Sequence
  Synthetic oligonucleotide
actcactgggttggcggttattgggcagta

SEQ ID NO: 267194 - DNA, 30 bp, Artificial Sequence
  Synthetic oligonucleotide
ttgaaggcaagacggtggtcgatggcagta

SEQ ID NO: 267195 - DNA, 30 bp, Artificial Sequence
  Synthetic oligonucleotide
agttaaggtgcatgcttacgcgcatcagta

SEQ ID NO: 267196 - DNA, 30 bp, Artificial Sequence
  Synthetic oligonucleotide
ttgtcgccactgtaaggggataactcagta

SEQ ID NO: 267197 - DNA, 30 bp, Artificial Sequence
  Synthetic oligonucleotide
aatccctgggacgataagctgcagtcagta

SEQ ID NO: 267198 - DNA, 30 bp, Artificial Sequence
  Synthetic oligonucleotide
cacattagaggaatgtacagatagtcagta

SEQ ID NO: 267199 - DNA, 30 bp, Artificial Sequence
  Synthetic oligonucleotide
ctggtagagcagtctcagcctccgtcagta

SEQ ID NO: 267200 - DNA, 30 bp, Artificial Sequence
  Synthetic oligonucleotide
ccaggttgtgttctgcgattagtgtcagta

SEQ ID NO: 267201 - DNA, 30 bp, Artificial Sequence
  Synthetic oligonucleotide
ggccccgttaatgcacgaaccgtgtcagta

SEQ ID NO: 267202 - DNA, 30 bp, Artificial Sequence
  Synthetic oligonucleotide
ataacgtcccgcggactttcaaattcagta

SEQ ID NO: 267203 - DNA, 30 bp, Artificial Sequence
  Synthetic oligonucleotide
gacatctaagggctggacggacattcagta

SEQ ID NO: 267204 - DNA, 30 bp, Artificial Sequence
  Synthetic oligonucleotide
ttgctcccagacgacgagctacattcagta

SEQ ID NO: 267205 - DNA, 30 bp, Artificial Sequence
  Synthetic oligonucleotide
ttaatggttcgcacacattattaaagagta

SEQ ID NO: 267206 - DNA, 30 bp, Artificial Sequence
  Synthetic oligonucleotide
cgtggttgctttgattagaccaagagagta

SEQ ID NO: 267207 - DNA, 30 bp, Artificial Sequence
  Synthetic oligonucleotide
tgggaatcgttcgtatgagagtatagagta

SEQ ID NO: 267208 - DNA, 30 bp, Artificial Sequence
  Synthetic oligonucleotide
gggtccaaccactcctttagggctagagta

SEQ ID NO: 267209 - DNA, 30 bp, Artificial Sequence
  Synthetic oligonucleotide
gccatattggggcggtactccaaacgagta

SEQ ID NO: 267210 - DNA, 30 bp, Artificial Sequence
  Synthetic oligonucleotide
atttccgaagcgaccatctcacaacgagta

SEQ ID NO: 267211 - DNA, 30 bp, Artificial Sequence
  Synthetic oligonucleotide
attggtgccccggtaagcaattaacgagta

SEQ ID NO: 267212 - DNA, 30 bp, Artificial Sequence
  Synthetic oligonucleotide
attggattggtagttggtctacaccgagta

SEQ ID NO: 267213 - DNA, 30 bp, Artificial Sequence
  Synthetic oligonucleotide
taatgatgaacagtaccgacttaccgagta

SEQ ID NO: 267214 - DNA, 30 bp, Artificial Sequence
  Synthetic oligonucleotide
attaacagcatccagaagggattccgagta

SEQ ID NO: 267215 - DNA, 30 bp, Artificial Sequence
  Synthetic oligonucleotide
ggttattggtgttaatgatgcaaaggagta

SEQ ID NO: 267216 - DNA, 30 bp, Artificial Sequence
  Synthetic oligonucleotide
ccaacccgttaccgtgaaaactccggagta

SEQ ID NO: 267217 - DNA, 30 bp, Artificial Sequence
  Synthetic oligonucleotide
gttactccaaaggccagataaaggggagta

SEQ ID NO: 267218 - DNA, 30 bp, Artificial Sequence
  Synthetic oligonucleotide
tccaggagccccgataaataagcatgagta

SEQ ID NO: 267219 - DNA, 29 bp, Artificial Sequence
  Synthetic oligonucleotide
taaactccaaagcaccgttgatatgagta

SEQ ID NO: 267220 - DNA, 30 bp, Artificial Sequence
  Synthetic oligonucleotide
ttcagactcatcgagtaagttgcctgagta

SEQ ID NO: 267221 - DNA, 30 bp, Artificial Sequence
  Synthetic oligonucleotide
catacttagctttagtacaaaatctgagta

SEQ ID NO: 267222 - DNA, 30 bp, Artificial Sequence
  Synthetic oligonucleotide
gaaaacgagtcacattacccggtctgagta

SEQ ID NO: 267223 - DNA, 30 bp, Artificial Sequence
  Synthetic oligonucleotide
aactggatcgccaaaaactgtaggtgagta

SEQ ID NO: 267224 - DNA, 30 bp, Artificial Sequence
  Synthetic oligonucleotide
cactatgtacacatatgggaaatttgagta

SEQ ID NO: 267225 - DNA, 30 bp, Artificial Sequence
  Synthetic oligonucleotide
acatcgcggtcgatagaagtataaatagta

SEQ ID NO: 267226 - DNA, 30 bp, Artificial Sequence
  Synthetic oligonucleotide
catgtcgtctactatagtcagcgaatagta

SEQ ID NO: 267227 - DNA, 30 bp, Artificial Sequence
  Synthetic oligonucleotide
agaccaggtacaatactatacgtaatagta

SEQ ID NO: 267228 - DNA, 30 bp, Artificial Sequence
  Synthetic oligonucleotide
tcctcacgtattcaccagatcaacatagta

SEQ ID NO: 267229 - DNA, 30 bp, Artificial Sequence
  Synthetic oligonucleotide
ccggccaccggtgtaaggtaaatcatagta

SEQ ID NO: 267230 - DNA, 30 bp, Artificial Sequence
  Synthetic oligonucleotide
gtgatgcacaggtgcggcagattcatagta

SEQ ID NO: 267231 - DNA, 30 bp, Artificial Sequence
  Synthetic oligonucleotide
gcgtctgtcgtgacgccactcgtgatagta

SEQ ID NO: 267232 - DNA, 30 bp, Artificial Sequence
  Synthetic oligonucleotide
tcgctgtagagtgttgtattgcgtatagta

SEQ ID NO: 267233 - DNA, 30 bp, Artificial Sequence
  Synthetic oligonucleotide
aaggaccgtaggcgggcgaaggcactagta

SEQ ID NO: 267234 - DNA, 30 bp, Artificial Sequence
  Synthetic oligonucleotide
gccggggttggtaaagatctaaacctagta

SEQ ID NO: 267235 - DNA, 30 bp, Artificial Sequence
  Synthetic oligonucleotide
aactatcggttagaaatgcctaggctagta

SEQ ID NO: 267236 - DNA, 30 bp, Artificial Sequence
  Synthetic oligonucleotide
cgccattttaagaaggtagttttgctagta

SEQ ID NO: 267237 - DNA, 30 bp, Artificial Sequence
  Synthetic oligonucleotide
cggttaattggaaccagatttaatctagta

SEQ ID NO: 267238 - DNA, 30 bp, Artificial Sequence
  Synthetic oligonucleotide
gccgagcaggcgatatttagaggtctagta

SEQ ID NO: 267239 - DNA, 30 bp, Artificial Sequence
  Synthetic oligonucleotide
tgatgtttctaaattggcacacaagtagta

SEQ ID NO: 267240 - DNA, 30 bp, Artificial Sequence
  Synthetic oligonucleotide
ttattttcaataagcgtcagtggcgtagta

SEQ ID NO: 267241 - DNA, 30 bp, Artificial Sequence
  Synthetic oligonucleotide
agaccgcgaactcgtaggttctaggtagta

SEQ ID NO: 267242 - DNA, 30 bp, Artificial Sequence
  Synthetic oligonucleotide
taagatagccgtgttcttgggtaggtagta

SEQ ID NO: 267243 - DNA, 30 bp, Artificial Sequence
  Synthetic oligonucleotide
ggctaatcgggcatcggtgagatggtagta

SEQ ID NO: 267244 - DNA, 30 bp, Artificial Sequence
  Synthetic oligonucleotide
ggcagagtccattaccccagtaatgtagta

SEQ ID NO: 267245 - DNA, 30 bp, Artificial Sequence
  Synthetic oligonucleotide
ggcagaccaccacaaatcggttctgtagta

SEQ ID NO: 267246 - DNA, 30 bp, Artificial Sequence
  Synthetic oligonucleotide
aaggtccgtgggtttggaatgacgttagta

SEQ ID NO: 267247 - DNA, 30 bp, Artificial Sequence
  Synthetic oligonucleotide
agtatagcgattcgtggtttgactttagta

SEQ ID NO: 267248 - DNA, 30 bp, Artificial Sequence
  Synthetic oligonucleotide
tggggggtactacaattgctcagaaacgta

SEQ ID NO: 267249 - DNA, 30 bp, Artificial Sequence
  Synthetic oligonucleotide
ggtttaagtactccctttctactaaacgta

SEQ ID NO: 267250 - DNA, 30 bp, Artificial Sequence
  Synthetic oligonucleotide
aatgcggtacacctcgctcgtttaaacgta

SEQ ID NO: 267251 - DNA, 30 bp, Artificial Sequence
  Synthetic oligonucleotide
atagtacttgagttatggacgggcaacgta

SEQ ID NO: 267252 - DNA, 30 bp, Artificial Sequence
  Synthetic oligonucleotide
agcctaaggctagtaaataattataacgta

SEQ ID NO: 267253 - DNA, 30 bp, Artificial Sequence
  Synthetic oligonucleotide
tgaattgcttcccggaatcggtaacacgta

SEQ ID NO: 267254 - DNA, 30 bp, Artificial Sequence
  Synthetic oligonucleotide
tggtcgtcagagcctaagatgggacacgta

SEQ ID NO: 267255 - DNA, 30 bp, Artificial Sequence
  Synthetic oligonucleotide
aagatgctaaaagcgcgggcgctacacgta

SEQ ID NO: 267256 - DNA, 30 bp, Artificial Sequence
  Synthetic oligonucleotide
tagttcgatcgtcaccggggcgaccacgta

SEQ ID NO: 267257 - DNA, 30 bp, Artificial Sequence
  Synthetic oligonucleotide
ttatagttccctaagcattacctccacgta

SEQ ID NO: 267258 - DNA, 30 bp, Artificial Sequence
  Synthetic oligonucleotide
attctatttagacggtacctttagcacgta

SEQ ID NO: 267259 - DNA, 30 bp, Artificial Sequence
  Synthetic oligonucleotide
gggacagatccaagtttattcccgcacgta

SEQ ID NO: 267260 - DNA, 30 bp, Artificial Sequence
  Synthetic oligonucleotide
caagtctcaattctactaaggtctcacgta

SEQ ID NO: 267261 - DNA, 30 bp, Artificial Sequence
  Synthetic oligonucleotide
aaatgtgtccgtatgtagtgctacgacgta

SEQ ID NO: 267262 - DNA, 30 bp, Artificial Sequence
  Synthetic oligonucleotide
gtagaccgtatttgcgcacattatgacgta

SEQ ID NO: 267263 - DNA, 30 bp, Artificial Sequence
  Synthetic oligonucleotide
gaactgggttagaaagtacatcgtgacgta

SEQ ID NO: 267264 - DNA, 30 bp, Artificial Sequence
  Synthetic oligonucleotide
aacgccaaagttgatataaacgttgacgta

SEQ ID NO: 267265 - DNA, 30 bp, Artificial Sequence
  Synthetic oligonucleotide
tcacaaaagtgcgacgcaccgtttgacgta

SEQ ID NO: 267266 - DNA, 30 bp, Artificial Sequence
  Synthetic oligonucleotide
gaagtgggctctcacctgctaaaatacgta

SEQ ID NO: 267267 - DNA, 30 bp, Artificial Sequence
  Synthetic oligonucleotide
cagtagtcgttccacggtaacagctacgta

SEQ ID NO: 267268 - DNA, 30 bp, Artificial Sequence
  Synthetic oligonucleotide
actcgcacgtgtgataactttttctacgta

SEQ ID NO: 267269 - DNA, 30 bp, Artificial Sequence
  Synthetic oligonucleotide
tgagatgcgcatcaagcgaaaacgtacgta

SEQ ID NO: 267270 - DNA, 30 bp, Artificial Sequence
  Synthetic oligonucleotide
cacaaagcgaaaaggtatgcgtggtacgta

SEQ ID NO: 267271 - DNA, 30 bp, Artificial Sequence
  Synthetic oligonucleotide
gagggtagagcataggcagtactttacgta

SEQ ID NO: 267272 - DNA, 30 bp, Artificial Sequence
  Synthetic oligonucleotide
gccaatgttcaagtgccgtgtgcaaccgta

SEQ ID NO: 267273 - DNA, 30 bp, Artificial Sequence
  Synthetic oligonucleotide
cagttctgcattaaggggaactggaccgta

SEQ ID NO: 267274 - DNA, 30 bp, Artificial Sequence
  Synthetic oligonucleotide
gaatagctcgaaacaggtacgctgaccgta

SEQ ID NO: 267275 - DNA, 30 bp, Artificial Sequence
  Synthetic oligonucleotide
aaagatattgattataaggttgtgaccgta

SEQ ID NO: 267276 - DNA, 30 bp, Artificial Sequence
  Synthetic oligonucleotide
gcacggttatgtcgtgctcggggtaccgta

SEQ ID NO: 267277 - DNA, 30 bp, Artificial Sequence
  Synthetic oligonucleotide
gtggagacttagctggaaattcgccccgta

SEQ ID NO: 267278 - DNA, 30 bp, Artificial Sequence
  Synthetic oligonucleotide
aaatggaggctgcaacctgaagggcccgta

SEQ ID NO: 267279 - DNA, 30 bp, Artificial Sequence
  Synthetic oligonucleotide
gtggttttcaatccagaccgattgcccgta

SEQ ID NO: 267280 - DNA, 30 bp, Artificial Sequence
  Synthetic oligonucleotide
gtgccgtaagcagcacgatacactcccgta

SEQ ID NO: 267281 - DNA, 30 bp, Artificial Sequence
  Synthetic oligonucleotide
atggtttatgtgcgagtggattttcccgta

SEQ ID NO: 267282 - DNA, 30 bp, Artificial Sequence
  Synthetic oligonucleotide
aaagcggcgaccgttttcagaaaagccgta

SEQ ID NO: 267283 - DNA, 30 bp, Artificial Sequence
  Synthetic oligonucleotide
tgttactattcgtgcttcgggtaagccgta

SEQ ID NO: 267284 - DNA, 30 bp, Artificial Sequence
  Synthetic oligonucleotide
tctttatcggaggtcgtaaggggagccgta

SEQ ID NO: 267285 - DNA, 30 bp, Artificial Sequence
  Synthetic oligonucleotide
ttagctcagtcgaactcagttttcgccgta

SEQ ID NO: 267286 - DNA, 30 bp, Artificial Sequence
  Synthetic oligonucleotide
gtgactaatctgctgaatcctaaggccgta

SEQ ID NO: 267287 - DNA, 30 bp, Artificial Sequence
  Synthetic oligonucleotide
agtaggctcacgccttaacttgaggccgta

SEQ ID NO: 267288 - DNA, 30 bp, Artificial Sequence
  Synthetic oligonucleotide
ttaaaccagaagacaccacaagttgccgta

SEQ ID NO: 267289 - DNA, 30 bp, Artificial Sequence
  Synthetic oligonucleotide
cgctgtgcctgtctttaaagaacctccgta

SEQ ID NO: 267290 - DNA, 30 bp, Artificial Sequence
  Synthetic oligonucleotide
cctcgcaggaatcttaaataacgctccgta

SEQ ID NO: 267291 - DNA, 30 bp, Artificial Sequence
  Synthetic oligonucleotide
gttcgggattactttatccaagggtccgta

SEQ ID NO: 267292 - DNA, 30 bp, Artificial Sequence
  Synthetic oligonucleotide
gtctccacaatggtggatttggggtccgta

SEQ ID NO: 267293 - DNA, 30 bp, Artificial Sequence
  Synthetic oligonucleotide
gatctgctggacgcgatccgtaaaagcgta

SEQ ID NO: 267294 - DNA, 30 bp, Artificial Sequence
  Synthetic oligonucleotide
tggcagaattatggagaacacggaagcgta

SEQ ID NO: 267295 - DNA, 30 bp, Artificial Sequence
  Synthetic oligonucleotide
cccgggtgcagtgacaccgcgataagcgta

SEQ ID NO: 267296 - DNA, 30 bp, Artificial Sequence
  Synthetic oligonucleotide
cgggagtccgcgagacgtcctcacagcgta

SEQ ID NO: 267297 - DNA, 30 bp, Artificial Sequence
  Synthetic oligonucleotide
tactggcagcatcaacgaccctagagcgta

SEQ ID NO: 267298 - DNA, 30 bp, Artificial Sequence
  Synthetic oligonucleotide
agtgggaaacgacttgtgacttctagcgta

SEQ ID NO: 267299 - DNA, 30 bp, Artificial Sequence
  Synthetic oligonucleotide
caataacctatcgcgtaacatagtagcgta

SEQ ID NO: 267300 - DNA, 30 bp, Artificial Sequence
  Synthetic oligonucleotide
agagctgtcactagcgctggccaacgcgta

SEQ ID NO: 267301 - DNA, 30 bp, Artificial Sequence
  Synthetic oligonucleotide
tgagggaattcagagggggagatacgcgta

SEQ ID NO: 267302 - DNA, 30 bp, Artificial Sequence
  Synthetic oligonucleotide
cagcgagcccgagccggaggctaccgcgta

SEQ ID NO: 267303 - DNA, 30 bp, Artificial Sequence
  Synthetic oligonucleotide
aagactctgggttcccgatttaggcgcgta

SEQ ID NO: 267304 - DNA, 30 bp, Artificial Sequence
  Synthetic oligonucleotide
gggtcctggctttctaagagtcacggcgta

SEQ ID NO: 267305 - DNA, 30 bp, Artificial Sequence
  Synthetic oligonucleotide
acactaatagatgttgtcccatagggcgta

SEQ ID NO: 267306 - DNA, 30 bp, Artificial Sequence
  Synthetic oligonucleotide
gccctggactcaaccagactgagtggcgta

SEQ ID NO: 267307 - DNA, 30 bp, Artificial Sequence
  Synthetic oligonucleotide
gcataacgttatcccagtacgatatgcgta

SEQ ID NO: 267308 - DNA, 30 bp, Artificial Sequence
  Synthetic oligonucleotide
gttaatacgggatgaaaaagcgcgatcgta

SEQ ID NO: 267309 - DNA, 30 bp, Artificial Sequence
  Synthetic oligonucleotide
gttgggataaggtcactgatatttatcgta

SEQ ID NO: 267310 - DNA, 30 bp, Artificial Sequence
  Synthetic oligonucleotide
atcacggttctctggcaatgggacctcgta

SEQ ID NO: 267311 - DNA, 30 bp, Artificial Sequence
  Synthetic oligonucleotide
tgtctggggactctctgacgccccctcgta

SEQ ID NO: 267312 - DNA, 30 bp, Artificial Sequence
  Synthetic oligonucleotide
tagtttgtgtcatctacgtatctcctcgta

SEQ ID NO: 267313 - DNA, 30 bp, Artificial Sequence
  Synthetic oligonucleotide
aaactaccacaaaaacaggccaatctcgta

SEQ ID NO: 267314 - DNA, 30 bp, Artificial Sequence
  Synthetic oligonucleotide
ggccttgtttaggaaatctatagtctcgta

SEQ ID NO: 267315 - DNA, 31 bp, Artificial Sequence
  Synthetic oligonucleotide
actgctatagtcttcggacctagttctcgta

SEQ ID NO: 267316 - DNA, 30 bp, Artificial Sequence
  Synthetic oligonucleotide
acccgctaagggattttattacaagtcgta

SEQ ID NO: 267317 - DNA, 30 bp, Artificial Sequence
  Synthetic oligonucleotide
gctaatttcctttatagcgagcacgtcgta

SEQ ID NO: 267318 - DNA, 30 bp, Artificial Sequence
  Synthetic oligonucleotide
atcctaacccagcatgtatggcccgtcgta

SEQ ID NO: 267319 - DNA, 30 bp, Artificial Sequence
  Synthetic oligonucleotide
tgaccggtgttccttgaaattaaggtcgta

SEQ ID NO: 267320 - DNA, 30 bp, Artificial Sequence
  Synthetic oligonucleotide
aagcgagacaagaggacccgaattgtcgta

SEQ ID NO: 267321 - DNA, 30 bp, Artificial Sequence
  Synthetic oligonucleotide
agacagccagaattctgtgtccaattcgta

SEQ ID NO: 267322 - DNA, 30 bp, Artificial Sequence
  Synthetic oligonucleotide
taacaatagtattggagtatatgattcgta

SEQ ID NO: 267323 - DNA, 30 bp, Artificial Sequence
  Synthetic oligonucleotide
gggaagccttttcactaacttaagttcgta

SEQ ID NO: 267324 - DNA, 30 bp, Artificial Sequence
  Synthetic oligonucleotide
atgtttctggagtttagcctgatgttcgta

SEQ ID NO: 267325 - DNA, 30 bp, Artificial Sequence
  Synthetic oligonucleotide
tgcccctctatcctgcaaggaaaaaaggta

SEQ ID NO: 267326 - DNA, 30 bp, Artificial Sequence
  Synthetic oligonucleotide
ctaataaagctacactggtttacaaaggta

SEQ ID NO: 267327 - DNA, 30 bp, Artificial Sequence
  Synthetic oligonucleotide
tcctcctgctgagaaccagatagaaaggta

SEQ ID NO: 267328 - DNA, 30 bp, Artificial Sequence
  Synthetic oligonucleotide
tcttgggacatgacatgatcgtgaaaggta

SEQ ID NO: 267329 - DNA, 30 bp, Artificial Sequence
  Synthetic oligonucleotide
gagggcttctaggtatctcgggtaaaggta

SEQ ID NO: 267330 - DNA, 30 bp, Artificial Sequence
  Synthetic oligonucleotide
aagcccatcgttcttgtcgttagcaaggta

SEQ ID NO: 267331 - DNA, 30 bp, Artificial Sequence
  Synthetic oligonucleotide
gtctgatacgtacgtaacgctggcaaggta

SEQ ID NO: 267332 - DNA, 30 bp, Artificial Sequence
  Synthetic oligonucleotide
gtggatataaacagtggcttctagaaggta

SEQ ID NO: 267333 - DNA, 30 bp, Artificial Sequence
  Synthetic oligonucleotide
caggataactcatggccggtacttaaggta

SEQ ID NO: 267334 - DNA, 30 bp, Artificial Sequence
  Synthetic oligonucleotide
tggtcgaagccaggcacaacatttaaggta

SEQ ID NO: 267335 - DNA, 30 bp, Artificial Sequence
  Synthetic oligonucleotide
gcccgccacctggagttgccatttaaggta

SEQ ID NO: 267336 - DNA, 30 bp, Artificial Sequence
  Synthetic oligonucleotide
actcaagctcaagttactacgacacaggta

SEQ ID NO: 267337 - DNA, 30 bp, Artificial Sequence
  Synthetic oligonucleotide
ggtcgactagactaggggcatatacaggta

SEQ ID NO: 267338 - DNA, 30 bp, Artificial Sequence
  Synthetic oligonucleotide
acgaaactaccgaacactaatgaccaggta

SEQ ID NO: 267339 - DNA, 30 bp, Artificial Sequence
  Synthetic oligonucleotide
atgccgacaagcataattaaatcccaggta

SEQ ID NO: 267340 - DNA, 30 bp, Artificial Sequence
  Synthetic oligonucleotide
tggattgaacggttaccttgccagcaggta

SEQ ID NO: 267341 - DNA, 30 bp, Artificial Sequence
  Synthetic oligonucleotide
caatccttcaatggttttactccgcaggta

SEQ ID NO: 267342 - DNA, 30 bp, Artificial Sequence
  Synthetic oligonucleotide
gatgttcttgtccaatagttggggcaggta

SEQ ID NO: 267343 - DNA, 30 bp, Artificial Sequence
  Synthetic oligonucleotide
cccgcacgaacccccttagagtcagaggta

SEQ ID NO: 267344 - DNA, 30 bp, Artificial Sequence
  Synthetic oligonucleotide
aagattggactgagccttgcgattgaggta

SEQ ID NO: 267345 - DNA, 30 bp, Artificial Sequence
  Synthetic oligonucleotide
tccagcgtaaggtctaagtagcaataggta

SEQ ID NO: 267346 - DNA, 30 bp, Artificial Sequence
  Synthetic oligonucleotide
tagcaagtgtaagtatgcggggtataggta

SEQ ID NO: 267347 - DNA, 30 bp, Artificial Sequence
  Synthetic oligonucleotide
aatcgaacaatcatataagttggctaggta

SEQ ID NO: 267348 - DNA, 30 bp, Artificial Sequence
  Synthetic oligonucleotide
gaacgctgggaagtcctaatgatctaggta

SEQ ID NO: 267349 - DNA, 30 bp, Artificial Sequence
  Synthetic oligonucleotide
agggtcaggggtaatgggattgggtaggta

SEQ ID NO: 267350 - DNA, 30 bp, Artificial Sequence
  Synthetic oligonucleotide
tagcggtacgtccggttccaagtgtaggta

SEQ ID NO: 267351 - DNA, 30 bp, Artificial Sequence
  Synthetic oligonucleotide
catgactttaataatacacaattgtaggta

SEQ ID NO: 267352 - DNA, 30 bp, Artificial Sequence
  Synthetic oligonucleotide
agtgggtctagctgggggtgaacttaggta

SEQ ID NO: 267353 - DNA, 30 bp, Artificial Sequence
  Synthetic oligonucleotide
caattatcctggctgtgcattagttaggta

SEQ ID NO: 267354 - DNA, 30 bp, Artificial Sequence
  Synthetic oligonucleotide
cgtacattccctaacggactgggttaggta

SEQ ID NO: 267355 - DNA, 30 bp, Artificial Sequence
  Synthetic oligonucleotide
gaatactatgtaaatagtacagtttaggta

SEQ ID NO: 267356 - DNA, 30 bp, Artificial Sequence
  Synthetic oligonucleotide
atctcaaacgtcgggaagtgagtttaggta

SEQ ID NO: 267357 - DNA, 30 bp, Artificial Sequence
  Synthetic oligonucleotide
gttcccgggtaagcgaactcaatcacggta

SEQ ID NO: 267358 - DNA, 30 bp, Artificial Sequence
  Synthetic oligonucleotide
gtcgaacgtgtattccctatctatacggta

SEQ ID NO: 267359 - DNA, 30 bp, Artificial Sequence
  Synthetic oligonucleotide
ctgggtctcacaatgctggtttctacggta

SEQ ID NO: 267360 - DNA, 30 bp, Artificial Sequence
  Synthetic oligonucleotide
ggcttgagttctcctcgtaaatttacggta

SEQ ID NO: 267361 - DNA, 30 bp, Artificial Sequence
  Synthetic oligonucleotide
ctccgccataatccaattaattacccggta

SEQ ID NO: 267362 - DNA, 30 bp, Artificial Sequence
  Synthetic oligonucleotide
aagacggtaagttatctttacgccccggta

SEQ ID NO: 267363 - DNA, 30 bp, Artificial Sequence
  Synthetic oligonucleotide
aggaacgtacactgcaattgcagcccggta

SEQ ID NO: 267364 - DNA, 30 bp, Artificial Sequence
  Synthetic oligonucleotide
ttaaatgattggtaggctggtaagccggta

SEQ ID NO: 267365 - DNA, 30 bp, Artificial Sequence
  Synthetic oligonucleotide
acattagaatgccgttgctgagttccggta

SEQ ID NO: 267366 - DNA, 30 bp, Artificial Sequence
  Synthetic oligonucleotide
agggtatgacaaaatcggtattcagcggta

SEQ ID NO: 267367 - DNA, 30 bp, Artificial Sequence
  Synthetic oligonucleotide
ccgggaaagagtccgtgaactcgagcggta

SEQ ID NO: 267368 - DNA, 30 bp, Artificial Sequence
  Synthetic oligonucleotide
ggtagtaccacaactagcgttcccgcggta

SEQ ID NO: 267369 - DNA, 30 bp, Artificial Sequence
  Synthetic oligonucleotide
cacgccatagagtattgaggctccgcggta

SEQ ID NO: 267370 - DNA, 30 bp, Artificial Sequence
  Synthetic oligonucleotide
ctaaggtggtcgcttgggacagtggcggta

SEQ ID NO: 267371 - DNA, 30 bp, Artificial Sequence
  Synthetic oligonucleotide
gatgtggggtcgaatgcttgtcatgcggta

SEQ ID NO: 267372 - DNA, 30 bp, Artificial Sequence
  Synthetic oligonucleotide
ctagatctatgagagctaggagatgcggta

SEQ ID NO: 267373 - DNA, 30 bp, Artificial Sequence
  Synthetic oligonucleotide
gcggcggcagaaagtgatcggcttgcggta

SEQ ID NO: 267374 - DNA, 30 bp, Artificial Sequence
  Synthetic oligonucleotide
caccacacatgtgtgtgccaaacatcggta

SEQ ID NO: 267375 - DNA, 30 bp, Artificial Sequence
  Synthetic oligonucleotide
gaggtctattgatttcgccgtgtatcggta

SEQ ID NO: 267376 - DNA, 30 bp, Artificial Sequence
  Synthetic oligonucleotide
aggccagatctagcgaacttctcctcggta

SEQ ID NO: 267377 - DNA, 30 bp, Artificial Sequence
  Synthetic oligonucleotide
ctgtagattcgaagcgtaggactctcggta

SEQ ID NO: 267378 - DNA, 30 bp, Artificial Sequence
  Synthetic oligonucleotide
tacgagaggatttttatcctttcgtcggta

SEQ ID NO: 267379 - DNA, 31 bp, Artificial Sequence
  Synthetic oligonucleotide
ttccccccgcgacacacggcaaataagggta

SEQ ID NO: 267380 - DNA, 30 bp, Artificial Sequence
  Synthetic oligonucleotide
ggagtctggcagtggattgtggtaagggta

SEQ ID NO: 267381 - DNA, 30 bp, Artificial Sequence
  Synthetic oligonucleotide
ggggctcaatgagatcattatttaagggta

SEQ ID NO: 267382 - DNA, 30 bp, Artificial Sequence
  Synthetic oligonucleotide
gccacctgtgggtagttatgctacagggta

SEQ ID NO: 267383 - DNA, 30 bp, Artificial Sequence
  Synthetic oligonucleotide
cgactagcgcttgggcaggagacgagggta

SEQ ID NO: 267384 - DNA, 30 bp, Artificial Sequence
  Synthetic oligonucleotide
aaaggatttgatacgtttcgtacgagggta

SEQ ID NO: 267385 - DNA, 30 bp, Artificial Sequence
  Synthetic oligonucleotide
gaacagtcttggccactgttctatagggta

SEQ ID NO: 267386 - DNA, 30 bp, Artificial Sequence
  Synthetic oligonucleotide
gtatctctagtcgagtggtcctctagggta

SEQ ID NO: 267387 - DNA, 30 bp, Artificial Sequence
  Synthetic oligonucleotide
catacatgtgagtacgatcgcgaacgggta

SEQ ID NO: 267388 - DNA, 30 bp, Artificial Sequence
  Synthetic oligonucleotide
cttatgccccgcaataaatccacccgggta

SEQ ID NO: 267389 - DNA, 30 bp, Artificial Sequence
  Synthetic oligonucleotide
agttggagtcatcctatgggggtgcgggta

SEQ ID NO: 267390 - DNA, 30 bp, Artificial Sequence
  Synthetic oligonucleotide
aaaaaagttgtacgggcttctacaggggta

SEQ ID NO: 267391 - DNA, 30 bp, Artificial Sequence
  Synthetic oligonucleotide
atctgaaggattttacgaagaggaggggta

SEQ ID NO: 267392 - DNA, 30 bp, Artificial Sequence
  Synthetic oligonucleotide
gttatcaagaaagtgtgtagcgacggggta

SEQ ID NO: 267393 - DNA, 30 bp, Artificial Sequence
  Synthetic oligonucleotide
cgggcaaagtctaccccgcaagccggggta

SEQ ID NO: 267394 - DNA, 30 bp, Artificial Sequence
  Synthetic oligonucleotide
gtcgcctggggaattactaaaatcggggta

SEQ ID NO: 267395 - DNA, 30 bp, Artificial Sequence
  Synthetic oligonucleotide
acttgctgcttccatgcatgtttcggggta

SEQ ID NO: 267396 - DNA, 30 bp, Artificial Sequence
  Synthetic oligonucleotide
gtggtttagcccaatctggttccgggggta

SEQ ID NO: 267397 - DNA, 30 bp, Artificial Sequence
  Synthetic oligonucleotide
cctcgcaaggatttgttgaatcatggggta

SEQ ID NO: 267398 - DNA, 30 bp, Artificial Sequence
  Synthetic oligonucleotide
aatgtcgatgagtacagtccttctggggta

SEQ ID NO: 267399 - DNA, 30 bp, Artificial Sequence
  Synthetic oligonucleotide
agcggtaagggttggataagtacatgggta

SEQ ID NO: 267400 - DNA, 30 bp, Artificial Sequence
  Synthetic oligonucleotide
tgactgtactggcggatcgccgactgggta

SEQ ID NO: 267401 - DNA, 30 bp, Artificial Sequence
  Synthetic oligonucleotide
ggccagggaaccgtagaattacgctgggta

SEQ ID NO: 267402 - DNA, 30 bp, Artificial Sequence
  Synthetic oligonucleotide
gcaggccaggtaagtgattgcatctgggta

SEQ ID NO: 267403 - DNA, 30 bp, Artificial Sequence
  Synthetic oligonucleotide
acagagctaaccaggtcaaaactctgggta

SEQ ID NO: 267404 - DNA, 30 bp, Artificial Sequence
  Synthetic oligonucleotide
agcctgatgaaggattagtatgaaatggta

SEQ ID NO: 267405 - DNA, 30 bp, Artificial Sequence
  Synthetic oligonucleotide
tggggtcaaggactacaagggtaaatggta

SEQ ID NO: 267406 - DNA, 30 bp, Artificial Sequence
  Synthetic oligonucleotide
tcgtagttatagtggtttctatcaatggta

SEQ ID NO: 267407 - DNA, 30 bp, Artificial Sequence
  Synthetic oligonucleotide
aactgcatcgtacacgcgtagagaatggta

SEQ ID NO: 267408 - DNA, 30 bp, Artificial Sequence
  Synthetic oligonucleotide
gtctgcgtactgtactactcatgaatggta

SEQ ID NO: 267409 - DNA, 30 bp, Artificial Sequence
  Synthetic oligonucleotide
gcgagccgtaccggagactacaggatggta

SEQ ID NO: 267410 - DNA, 30 bp, Artificial Sequence
  Synthetic oligonucleotide
gtgtcaggcgttcagcttgttaggatggta

SEQ ID NO: 267411 - DNA, 30 bp, Artificial Sequence
  Synthetic oligonucleotide
ggaagcgacaatacaaaccattggatggta

SEQ ID NO: 267412 - DNA, 30 bp, Artificial Sequence
  Synthetic oligonucleotide
cgcttacgaccagcctgtaaaactatggta

SEQ ID NO: 267413 - DNA, 30 bp, Artificial Sequence
  Synthetic oligonucleotide
gttccaggacattcatgcaatgaactggta

SEQ ID NO: 267414 - DNA, 30 bp, Artificial Sequence
  Synthetic oligonucleotide
ttggaacagacataataacccgcactggta

SEQ ID NO: 267415 - DNA, 30 bp, Artificial Sequence
  Synthetic oligonucleotide
catagcagcccagcgactgaaggactggta

SEQ ID NO: 267416 - DNA, 30 bp, Artificial Sequence
  Synthetic oligonucleotide
gggacccccagtagatataggctactggta

SEQ ID NO: 267417 - DNA, 30 bp, Artificial Sequence
  Synthetic oligonucleotide
tatgtcaagaaccgtatgtgtaatctggta

SEQ ID NO: 267418 - DNA, 30 bp, Artificial Sequence
  Synthetic oligonucleotide
caaagacagcaaacatgcctgcatctggta

SEQ ID NO: 267419 - DNA, 30 bp, Artificial Sequence
  Synthetic oligonucleotide
gggcctattaaaacggcaaggggtctggta

SEQ ID NO: 267420 - DNA, 30 bp, Artificial Sequence
  Synthetic oligonucleotide
tagtgccttgtttctttacaagaagtggta

SEQ ID NO: 267421 - DNA, 30 bp, Artificial Sequence
  Synthetic oligonucleotide
cggaggcctgttaaattgatcgtagtggta

SEQ ID NO: 267422 - DNA, 31 bp, Artificial Sequence
  Synthetic oligonucleotide
atagatgagggtgcaattcaacttagtggta

SEQ ID NO: 267423 - DNA, 30 bp, Artificial Sequence
  Synthetic oligonucleotide
cgagtgatacgaagggtcccccccgtggta

SEQ ID NO: 267424 - DNA, 30 bp, Artificial Sequence
  Synthetic oligonucleotide
gttcacagaacatgacgggacttcgtggta

SEQ ID NO: 267425 - DNA, 30 bp, Artificial Sequence
  Synthetic oligonucleotide
ggggagggcgacggtacgtcgttggtggta

SEQ ID NO: 267426 - DNA, 30 bp, Artificial Sequence
  Synthetic oligonucleotide
gaatccggcgaatatgactttaggttggta

SEQ ID NO: 267427 - DNA, 30 bp, Artificial Sequence
  Synthetic oligonucleotide
ggtagatgctaacgtcaaccggggttggta

SEQ ID NO: 267428 - DNA, 30 bp, Artificial Sequence
  Synthetic oligonucleotide
agaacggggcgatcccccagtatgttggta

SEQ ID NO: 267429 - DNA, 30 bp, Artificial Sequence
  Synthetic oligonucleotide
ggtctactagtccaaccgaacgatttggta

SEQ ID NO: 267430 - DNA, 30 bp, Artificial Sequence
  Synthetic oligonucleotide
agaggctcaggggcttacacaggtttggta

SEQ ID NO: 267431 - DNA, 30 bp, Artificial Sequence
  Synthetic oligonucleotide
cgtgcagccaaattagcattccaaaatgta

SEQ ID NO: 267432 - DNA, 30 bp, Artificial Sequence
  Synthetic oligonucleotide
gcgaatccgagatggggtccggaaaatgta

SEQ ID NO: 267433 - DNA, 30 bp, Artificial Sequence
  Synthetic oligonucleotide
atgcaaaggcgcatgtatgatgcaaatgta

SEQ ID NO: 267434 - DNA, 30 bp, Artificial Sequence
  Synthetic oligonucleotide
aagtggttaagtagcagtagaagaaatgta

SEQ ID NO: 267435 - DNA, 30 bp, Artificial Sequence
  Synthetic oligonucleotide
agtaatcaagcacctacggatgtaaatgta

SEQ ID NO: 267436 - DNA, 30 bp, Artificial Sequence
  Synthetic oligonucleotide
ccgataccctagttgggatccgagaatgta

SEQ ID NO: 267437 - DNA, 30 bp, Artificial Sequence
  Synthetic oligonucleotide
tagtgggcatatcgaactactgcgaatgta

SEQ ID NO: 267438 - DNA, 30 bp, Artificial Sequence
  Synthetic oligonucleotide
gagcgaaatttcgtagactgctcgaatgta

SEQ ID NO: 267439 - DNA, 30 bp, Artificial Sequence
  Synthetic oligonucleotide
acccatatagctgtgcattttcggaatgta

SEQ ID NO: 267440 - DNA, 30 bp, Artificial Sequence
  Synthetic oligonucleotide
ctatcggccgactcaggttctgggaatgta

SEQ ID NO: 267441 - DNA, 30 bp, Artificial Sequence
  Synthetic oligonucleotide
ttcgacgtgaaatgcgatggcctgaatgta

SEQ ID NO: 267442 - DNA, 30 bp, Artificial Sequence
  Synthetic oligonucleotide
cgccgggcctagaataatggtgtgaatgta

SEQ ID NO: 267443 - DNA, 30 bp, Artificial Sequence
  Synthetic oligonucleotide
gatcactggttcaagtgaggctataatgta

SEQ ID NO: 267444 - DNA, 30 bp, Artificial Sequence
  Synthetic oligonucleotide
ggcactggcccatgaacctgtattaatgta

SEQ ID NO: 267445 - DNA, 30 bp, Artificial Sequence
  Synthetic oligonucleotide
agagggagggtcaatctctctcaacatgta

SEQ ID NO: 267446 - DNA, 30 bp, Artificial Sequence
  Synthetic oligonucleotide
ccagattcgaattgacggatttcacatgta

SEQ ID NO: 267447 - DNA, 30 bp, Artificial Sequence
  Synthetic oligonucleotide
cctgccacgaatagtcagttcatacatgta

SEQ ID NO: 267448 - DNA, 30 bp, Artificial Sequence
  Synthetic oligonucleotide
ctggctcgtgcagctcggctcccgcatgta

SEQ ID NO: 267449 - DNA, 30 bp, Artificial Sequence
  Synthetic oligonucleotide
atttctaagggtaagccattacttcatgta

SEQ ID NO: 267450 - DNA, 30 bp, Artificial Sequence
  Synthetic oligonucleotide
atttagcatcaaggaaagacctcagatgta

SEQ ID NO: 267451 - DNA, 30 bp, Artificial Sequence
  Synthetic oligonucleotide
acgtacgtgatggctagacgtcaggatgta

SEQ ID NO: 267452 - DNA, 30 bp, Artificial Sequence
  Synthetic oligonucleotide
gtgagtcacggattcggagtggtggatgta

SEQ ID NO: 267453 - DNA, 30 bp, Artificial Sequence
  Synthetic oligonucleotide
atgttattcgcaggcgggtggaaatatgta

SEQ ID NO: 267454 - DNA, 30 bp, Artificial Sequence
  Synthetic oligonucleotide
gaatacgaatgagagctattatgatatgta

SEQ ID NO: 267455 - DNA, 30 bp, Artificial Sequence
  Synthetic oligonucleotide
tgagtgcttccatcgagccatcactatgta

SEQ ID NO: 267456 - DNA, 30 bp, Artificial Sequence
  Synthetic oligonucleotide
ggtagtatggggtattagagaatctatgta

SEQ ID NO: 267457 - DNA, 30 bp, Artificial Sequence
  Synthetic oligonucleotide
tgggaactatctagaatcgtgctgtatgta

SEQ ID NO: 267458 - DNA, 30 bp, Artificial Sequence
  Synthetic oligonucleotide
tgcctggcgcgacaaacttgcgtgtatgta

SEQ ID NO: 267459 - DNA, 30 bp, Artificial Sequence
  Synthetic oligonucleotide
gctgaccacgagagccaattctgttatgta

SEQ ID NO: 267460 - DNA, 30 bp, Artificial Sequence
  Synthetic oligonucleotide
agttggagacaatgactttagtgttatgta

SEQ ID NO: 267461 - DNA, 30 bp, Artificial Sequence
  Synthetic oligonucleotide
tcggtctcgaaaaatagtactataactgta

SEQ ID NO: 267462 - DNA, 30 bp, Artificial Sequence
  Synthetic oligonucleotide
cagcttaagggcgggtcccgaggcactgta

SEQ ID NO: 267463 - DNA, 30 bp, Artificial Sequence
  Synthetic oligonucleotide
cacacaatgggagttcgcgtcacgactgta

SEQ ID NO: 267464 - DNA, 30 bp, Artificial Sequence
  Synthetic oligonucleotide
gagccacgataaatcggttcacggactgta

SEQ ID NO: 267465 - DNA, 30 bp, Artificial Sequence
  Synthetic oligonucleotide
aaataatgatatgagatgccaaaacctgta

SEQ ID NO: 267466 - DNA, 30 bp, Artificial Sequence
  Synthetic oligonucleotide
tgatttgacgttagaatacgaggacctgta

SEQ ID NO: 267467 - DNA, 30 bp, Artificial Sequence
  Synthetic oligonucleotide
ggagctacgtagcgggttgagttacctgta

SEQ ID NO: 267468 - DNA, 30 bp, Artificial Sequence
  Synthetic oligonucleotide
agtaggaactatgctttcgacgggcctgta

SEQ ID NO: 267469 - DNA, 30 bp, Artificial Sequence
  Synthetic oligonucleotide
tatccggagtcaatatctggcaatcctgta

SEQ ID NO: 267470 - DNA, 30 bp, Artificial Sequence
  Synthetic oligonucleotide
ctggcggctgtcgcaccgtaccttcctgta

SEQ ID NO: 267471 - DNA, 30 bp, Artificial Sequence
  Synthetic oligonucleotide
gtattgaactcttacgaggaggttcctgta

SEQ ID NO: 267472 - DNA, 31 bp, Artificial Sequence
  Synthetic oligonucleotide
aacagggtgcattggaaaggggcacgctgta

SEQ ID NO: 267473 - DNA, 30 bp, Artificial Sequence
  Synthetic oligonucleotide
acacaccgcgcacagaatacgcccgctgta

SEQ ID NO: 267474 - DNA, 30 bp, Artificial Sequence
  Synthetic oligonucleotide
cggaaagcggggcaaacgagccaggctgta

SEQ ID NO: 267475 - DNA, 30 bp, Artificial Sequence
  Synthetic oligonucleotide
actctacgttgaagcgatcgtacggctgta

SEQ ID NO: 267476 - DNA, 30 bp, Artificial Sequence
  Synthetic oligonucleotide
cctactagtttcggcgacttagtggctgta

SEQ ID NO: 267477 - DNA, 30 bp, Artificial Sequence
  Synthetic oligonucleotide
gcggcacgtgtgcctcgtcagcgtgctgta

SEQ ID NO: 267478 - DNA, 30 bp, Artificial Sequence
  Synthetic oligonucleotide
cgaattcgtgggtcacttcggctatctgta

SEQ ID NO: 267479 - DNA, 30 bp, Artificial Sequence
  Synthetic oligonucleotide
ctgcgggtctttcaagattggctatctgta

SEQ ID NO: 267480 - DNA, 30 bp, Artificial Sequence
  Synthetic oligonucleotide
tggggacgatacgactaatcgcactctgta

SEQ ID NO: 267481 - DNA, 30 bp, Artificial Sequence
  Synthetic oligonucleotide
cagttcattgagagcatgacgtcctctgta

SEQ ID NO: 267482 - DNA, 30 bp, Artificial Sequence
  Synthetic oligonucleotide
aaatgctatgccaagcttcataaaagtgta

SEQ ID NO: 267483 - DNA, 30 bp, Artificial Sequence
  Synthetic oligonucleotide
agcacgttatagatacgagtcgacagtgta

SEQ ID NO: 267484 - DNA, 30 bp, Artificial Sequence
  Synthetic oligonucleotide
ttagtatggtgaccagtaacactcagtgta

SEQ ID NO: 267485 - DNA, 30 bp, Artificial Sequence
  Synthetic oligonucleotide
ttgccataaacagccatgtggttcagtgta

SEQ ID NO: 267486 - DNA, 30 bp, Artificial Sequence
  Synthetic oligonucleotide
aaatccgcagcagctgggaatgcgagtgta

SEQ ID NO: 267487 - DNA, 30 bp, Artificial Sequence
  Synthetic oligonucleotide
aacagtgggctccggattaagtatagtgta

SEQ ID NO: 267488 - DNA, 30 bp, Artificial Sequence
  Synthetic oligonucleotide
gcgactggtatgtagcatgatgctagtgta

SEQ ID NO: 267489 - DNA, 30 bp, Artificial Sequence
  Synthetic oligonucleotide
atagctagccatgaaacgcaagtacgtgta

SEQ ID NO: 267490 - DNA, 30 bp, Artificial Sequence
  Synthetic oligonucleotide
ggtgggcccgccggtgccccacagcgtgta

SEQ ID NO: 267491 - DNA, 30 bp, Artificial Sequence
  Synthetic oligonucleotide
acttaagtacccacttagagaccgcgtgta

SEQ ID NO: 267492 - DNA, 30 bp, Artificial Sequence
  Synthetic oligonucleotide
ggtatgataggaccaacggcatggcgtgta

SEQ ID NO: 267493 - DNA, 30 bp, Artificial Sequence
  Synthetic oligonucleotide
gctgggctcattgccagtatagatcgtgta

SEQ ID NO: 267494 - DNA, 30 bp, Artificial Sequence
  Synthetic oligonucleotide
tgaggacctttgatcggtaacgttcgtgta

SEQ ID NO: 267495 - DNA, 30 bp, Artificial Sequence
  Synthetic oligonucleotide
tcacggtaggggcagctgaaacaaggtgta

SEQ ID NO: 267496 - DNA, 30 bp, Artificial Sequence
  Synthetic oligonucleotide
ttacaccagaccgtttaacgagaaggtgta

SEQ ID NO: 267497 - DNA, 30 bp, Artificial Sequence
  Synthetic oligonucleotide
cctgaacaggcggtcagtgtcaacggtgta

SEQ ID NO: 267498 - DNA, 30 bp, Artificial Sequence
  Synthetic oligonucleotide
aaaatcagcgagcatctgatccccggtgta

SEQ ID NO: 267499 - DNA, 30 bp, Artificial Sequence
  Synthetic oligonucleotide
cgcgcggagcgcaatctttgtggcggtgta

SEQ ID NO: 267500 - DNA, 30 bp, Artificial Sequence
  Synthetic oligonucleotide
gtgaacgctacaggatggccggggggtgta

SEQ ID NO: 267501 - DNA, 30 bp, Artificial Sequence
  Synthetic oligonucleotide
atgttagtgcatctggagggactgggtgta

SEQ ID NO: 267502 - DNA, 30 bp, Artificial Sequence
  Synthetic oligonucleotide
ccagttgcccacagcaagcctactggtgta

SEQ ID NO: 267503 - DNA, 30 bp, Artificial Sequence
  Synthetic oligonucleotide
attgctcagcaaccaggtaagtaatgtgta

SEQ ID NO: 267504 - DNA, 30 bp, Artificial Sequence
  Synthetic oligonucleotide
ccagcggatttgcgtaaatgcctatgtgta

SEQ ID NO: 267505 - DNA, 30 bp, Artificial Sequence
  Synthetic oligonucleotide
ctatgggaagctaatcgattcggctgtgta

SEQ ID NO: 267506 - DNA, 30 bp, Artificial Sequence
  Synthetic oligonucleotide
tgctagatattccatttacggaattgtgta

SEQ ID NO: 267507 - DNA, 30 bp, Artificial Sequence
  Synthetic oligonucleotide
cttgggtttactgcacatgatcgttgtgta

SEQ ID NO: 267508 - DNA, 30 bp, Artificial Sequence
  Synthetic oligonucleotide
caaaagagcacgggtttgttaggttgtgta

SEQ ID NO: 267509 - DNA, 30 bp, Artificial Sequence
  Synthetic oligonucleotide
atgtcggtcggtgcgacgactttaattgta

SEQ ID NO: 267510 - DNA, 30 bp, Artificial Sequence
  Synthetic oligonucleotide
ctgctagaggtaaagacagggcagattgta

SEQ ID NO: 267511 - DNA, 30 bp, Artificial Sequence
  Synthetic oligonucleotide
taaaattttgagtgtgagccacatattgta

SEQ ID NO: 267512 - DNA, 30 bp, Artificial Sequence
  Synthetic oligonucleotide
tgtctaaattgaagtgcggaaagtattgta

SEQ ID NO: 267513 - DNA, 30 bp, Artificial Sequence
  Synthetic oligonucleotide
taggggtttataactcagcccattattgta

SEQ ID NO: 267514 - DNA, 30 bp, Artificial Sequence
  Synthetic oligonucleotide
atacgtcagatgctgtgtagcccacttgta

SEQ ID NO: 267515 - DNA, 30 bp, Artificial Sequence
  Synthetic oligonucleotide
atgggagttaaagcatccgaaatccttgta

SEQ ID NO: 267516 - DNA, 30 bp, Artificial Sequence
  Synthetic oligonucleotide
gaacagcgcggttgaagcattttgcttgta

SEQ ID NO: 267517 - DNA, 30 bp, Artificial Sequence
  Synthetic oligonucleotide
caaacagtaacggaacgtaatactcttgta

SEQ ID NO: 267518 - DNA, 30 bp, Artificial Sequence
  Synthetic oligonucleotide
aagattccccagacggagtcacgtcttgta

SEQ ID NO: 267519 - DNA, 30 bp, Artificial Sequence
  Synthetic oligonucleotide
gttgaagatacggcggcatggcacgttgta

SEQ ID NO: 267520 - DNA, 30 bp, Artificial Sequence
  Synthetic oligonucleotide
agaatcatgggcaagttatgtgatgttgta

SEQ ID NO: 267521 - DNA, 30 bp, Artificial Sequence
  Synthetic oligonucleotide
ggatcggaagagcttactcgaactgttgta

SEQ ID NO: 267522 - DNA, 30 bp, Artificial Sequence
  Synthetic oligonucleotide
gaagcaaagtgccgcaacaaaacatttgta

SEQ ID NO: 267523 - DNA, 30 bp, Artificial Sequence
  Synthetic oligonucleotide
ggcgaatccgaatccgacacaggatttgta

SEQ ID NO: 267524 - DNA, 30 bp, Artificial Sequence
  Synthetic oligonucleotide
aaccgagcctggggatcaatacagtttgta

SEQ ID NO: 267525 - DNA, 30 bp, Artificial Sequence
  Synthetic oligonucleotide
cttggtgcataggcattcactcagtttgta

SEQ ID NO: 267526 - DNA, 30 bp, Artificial Sequence
  Synthetic oligonucleotide
aggactgaacattaatgtcccccaaaatta

SEQ ID NO: 267527 - DNA, 30 bp, Artificial Sequence
  Synthetic oligonucleotide
agtctccggttacaccgcctgtagaaatta

SEQ ID NO: 267528 - DNA, 30 bp, Artificial Sequence
  Synthetic oligonucleotide
cccctaagtgcagtacccgacacgaaatta

SEQ ID NO: 267529 - DNA, 30 bp, Artificial Sequence
  Synthetic oligonucleotide
gcgtgtctctaatgtccccttggacaatta

SEQ ID NO: 267530 - DNA, 30 bp, Artificial Sequence
  Synthetic oligonucleotide
agaggctcgcctgattgaagtatacaatta

SEQ ID NO: 267531 - DNA, 30 bp, Artificial Sequence
  Synthetic oligonucleotide
cacctgaagcttaggtcggtcttacaatta

SEQ ID NO: 267532 - DNA, 30 bp, Artificial Sequence
  Synthetic oligonucleotide
cgtgttcagaaaggtgaataaaatcaatta

SEQ ID NO: 267533 - DNA, 30 bp, Artificial Sequence
  Synthetic oligonucleotide
atcccctcatcaccaggagaatatcaatta

SEQ ID NO: 267534 - DNA, 30 bp, Artificial Sequence
  Synthetic oligonucleotide
ctatatggtaatgcgaaaaatcttcaatta

SEQ ID NO: 267535 - DNA, 30 bp, Artificial Sequence
  Synthetic oligonucleotide
atgataatcgatgggtgagcccaagaatta

SEQ ID NO: 267536 - DNA, 30 bp, Artificial Sequence
  Synthetic oligonucleotide
cgagtaatcttgcctcgatccgaagaatta

SEQ ID NO: 267537 - DNA, 30 bp, Artificial Sequence
  Synthetic oligonucleotide
tgtcctcgcgcacaaaccaatacagaatta

SEQ ID NO: 267538 - DNA, 30 bp, Artificial Sequence
  Synthetic oligonucleotide
aggcacagggccctacgaggtgtagaatta

SEQ ID NO: 267539 - DNA, 30 bp, Artificial Sequence
  Synthetic oligonucleotide
ttccatatttgcgcgcacgggtgcgaatta

SEQ ID NO: 267540 - DNA, 30 bp, Artificial Sequence
  Synthetic oligonucleotide
cggcaggaggtattgtctatactcgaatta

SEQ ID NO: 267541 - DNA, 30 bp, Artificial Sequence
  Synthetic oligonucleotide
gaaacaaaacataaccatgggcaggaatta

SEQ ID NO: 267542 - DNA, 30 bp, Artificial Sequence
  Synthetic oligonucleotide
cctatgtagcgtaaccgtgtgtgctaatta

SEQ ID NO: 267543 - DNA, 30 bp, Artificial Sequence
  Synthetic oligonucleotide
taccaagctaggcctatcataggttaatta

SEQ ID NO: 267544 - DNA, 30 bp, Artificial Sequence
  Synthetic oligonucleotide
ccgggtttatagctgccttgcaacacatta

SEQ ID NO: 267545 - DNA, 30 bp, Artificial Sequence
  Synthetic oligonucleotide
agatgaggccacttcggatagtgcacatta

SEQ ID NO: 267546 - DNA, 30 bp, Artificial Sequence
  Synthetic oligonucleotide
aaatggggccaaagacaactgttcacatta

SEQ ID NO: 267547 - DNA, 30 bp, Artificial Sequence
  Synthetic oligonucleotide
cggacgtgtggctcctgtagatcgacatta

SEQ ID NO: 267548 - DNA, 30 bp, Artificial Sequence
  Synthetic oligonucleotide
caaccgttggctactgacgacgggacatta

SEQ ID NO: 267549 - DNA, 30 bp, Artificial Sequence
  Synthetic oligonucleotide
tgaaaacacgtgggtacctagcatacatta

SEQ ID NO: 267550 - DNA, 30 bp, Artificial Sequence
  Synthetic oligonucleotide
acgcgcgaaaaatcctcggttactacatta

SEQ ID NO: 267551 - DNA, 28 bp, Artificial Sequence
  Synthetic oligonucleotide
agatcgcgggcacaattcgcctacatta

SEQ ID NO: 267552 - DNA, 30 bp, Artificial Sequence
  Synthetic oligonucleotide
acggacggctgctggagaggagttacatta

SEQ ID NO: 267553 - DNA, 30 bp, Artificial Sequence
  Synthetic oligonucleotide
tcggtggttgtgggtatgagtgtcccatta

SEQ ID NO: 267554 - DNA, 30 bp, Artificial Sequence
  Synthetic oligonucleotide
cttggagagagattaattgtccagccatta

SEQ ID NO: 267555 - DNA, 30 bp, Artificial Sequence
  Synthetic oligonucleotide
gatcgggatgcaggttagatgttgccatta

SEQ ID NO: 267556 - DNA, 30 bp, Artificial Sequence
  Synthetic oligonucleotide
cagccaccactccccgcctgtagcgcatta

SEQ ID NO: 267557 - DNA, 30 bp, Artificial Sequence
  Synthetic oligonucleotide
ggctcctgatgaccccggaaattggcatta

SEQ ID NO: 267558 - DNA, 30 bp, Artificial Sequence
  Synthetic oligonucleotide
gttcctgcgttttatttagagttggcatta

SEQ ID NO: 267559 - DNA, 30 bp, Artificial Sequence
  Synthetic oligonucleotide
gtgtgcatcttcggacatatatatgcatta

SEQ ID NO: 267560 - DNA, 30 bp, Artificial Sequence
  Synthetic oligonucleotide
gtaagtcctggaagatctatgtgtgcatta

SEQ ID NO: 267561 - DNA, 30 bp, Artificial Sequence
  Synthetic oligonucleotide
taaggattacagtgggtgtttagatcatta

SEQ ID NO: 267562 - DNA, 30 bp, Artificial Sequence
  Synthetic oligonucleotide
aaggtttatggcatataggtgacgtcatta

SEQ ID NO: 267563 - DNA, 30 bp, Artificial Sequence
  Synthetic oligonucleotide
tgattagtccaagcacgatttgcgtcatta

SEQ ID NO: 267564 - DNA, 30 bp, Artificial Sequence
  Synthetic oligonucleotide
gcactgaacttgtaccgaatgatcagatta

SEQ ID NO: 267565 - DNA, 30 bp, Artificial Sequence
  Synthetic oligonucleotide
tagctgtcgactcaatttctctggagatta

SEQ ID NO: 267566 - DNA, 30 bp, Artificial Sequence
  Synthetic oligonucleotide
tcttttcgcctagggtcactaactagatta

SEQ ID NO: 267567 - DNA, 30 bp, Artificial Sequence
  Synthetic oligonucleotide
aacacaacgtgtggtctcactactagatta

SEQ ID NO: 267568 - DNA, 30 bp, Artificial Sequence
  Synthetic oligonucleotide
aaggcgtgggaatttcattcatttagatta

SEQ ID NO: 267569 - DNA, 30 bp, Artificial Sequence
  Synthetic oligonucleotide
gagggaaggcgaagggttacgatacgatta

SEQ ID NO: 267570 - DNA, 30 bp, Artificial Sequence
  Synthetic oligonucleotide
tatcacctaagcattacaccccaccgatta

SEQ ID NO: 267571 - DNA, 30 bp, Artificial Sequence
  Synthetic oligonucleotide
attttgcgggacaccgggggatagcgatta

SEQ ID NO: 267572 - DNA, 30 bp, Artificial Sequence
  Synthetic oligonucleotide
ttgggtttagcctgcggcaaagtgcgatta

SEQ ID NO: 267573 - DNA, 30 bp, Artificial Sequence
  Synthetic oligonucleotide
cgggacgatgccgtttggaccagtcgatta

SEQ ID NO: 267574 - DNA, 30 bp, Artificial Sequence
  Synthetic oligonucleotide
gtgttgcgctttcaaggtctgattcgatta

SEQ ID NO: 267575 - DNA, 30 bp, Artificial Sequence
  Synthetic oligonucleotide
ggtccggcgtcagaagaactcgtcggatta

SEQ ID NO: 267576 - DNA, 30 bp, Artificial Sequence
  Synthetic oligonucleotide
ctgtatatggacaaaaactgtcatggatta

SEQ ID NO: 267577 - DNA, 30 bp, Artificial Sequence
  Synthetic oligonucleotide
aagaccgtacacacggacatctaatgatta

SEQ ID NO: 267578 - DNA, 30 bp, Artificial Sequence
  Synthetic oligonucleotide
cgtgcttaagacttgttttgaggctgatta

SEQ ID NO: 267579 - DNA, 30 bp, Artificial Sequence
  Synthetic oligonucleotide
ggaaacctcgcgtttctgagacagtgatta

SEQ ID NO: 267580 - DNA, 30 bp, Artificial Sequence
  Synthetic oligonucleotide
aggagagatagtccagctggattgtgatta

SEQ ID NO: 267581 - DNA, 30 bp, Artificial Sequence
  Synthetic oligonucleotide
gccaaaccgccagggcgtgggccttgatta

SEQ ID NO: 267582 - DNA, 30 bp, Artificial Sequence
  Synthetic oligonucleotide
agtccgcaggagttcactgcgtcttgatta

SEQ ID NO: 267583 - DNA, 30 bp, Artificial Sequence
  Synthetic oligonucleotide
tgctcgtcatcatgatgacttagttgatta

SEQ ID NO: 267584 - DNA, 30 bp, Artificial Sequence
  Synthetic oligonucleotide
ctgaacggatcccaagaagtccgttgatta

SEQ ID NO: 267585 - DNA, 30 bp, Artificial Sequence
  Synthetic oligonucleotide
tatgatcttcggtgctcaagtggttgatta

SEQ ID NO: 267586 - DNA, 30 bp, Artificial Sequence
  Synthetic oligonucleotide
gtagagttgcgagttaacgtcccaatatta

SEQ ID NO: 267587 - DNA, 30 bp, Artificial Sequence
  Synthetic oligonucleotide
aggtgcgctgggggtaggtctccaatatta

SEQ ID NO: 267588 - DNA, 30 bp, Artificial Sequence
  Synthetic oligonucleotide
cagcgatgacccaccggagttctaatatta

SEQ ID NO: 267589 - DNA, 31 bp, Artificial Sequence
  Synthetic oligonucleotide
catatagcctaatctcggcgaatcgatatta

SEQ ID NO: 267590 - DNA, 30 bp, Artificial Sequence
  Synthetic oligonucleotide
taagtgtctgtattaaatgggtcgatatta

SEQ ID NO: 267591 - DNA, 30 bp, Artificial Sequence
  Synthetic oligonucleotide
tgactaagtggttaattgaagcggatatta

SEQ ID NO: 267592 - DNA, 30 bp, Artificial Sequence
  Synthetic oligonucleotide
ctcaagtcgggtttggaagaaatgatatta

SEQ ID NO: 267593 - DNA, 30 bp, Artificial Sequence
  Synthetic oligonucleotide
acacgggcaggactgtcgtcaaatatatta

SEQ ID NO: 267594 - DNA, 30 bp, Artificial Sequence
  Synthetic oligonucleotide
cagaggagcgcaccagccacacatatatta

SEQ ID NO: 267595 - DNA, 30 bp, Artificial Sequence
  Synthetic oligonucleotide
cttgccgcttaagaccaccgggaactatta

SEQ ID NO: 267596 - DNA, 30 bp, Artificial Sequence
  Synthetic oligonucleotide
gcaggctgtacatgtcccagtgaactatta

SEQ ID NO: 267597 - DNA, 30 bp, Artificial Sequence
  Synthetic oligonucleotide
tagtagctaacccatcaacagggactatta

SEQ ID NO: 267598 - DNA, 30 bp, Artificial Sequence
  Synthetic oligonucleotide
ggccgacaggtgagctagtaactactatta

SEQ ID NO: 267599 - DNA, 30 bp, Artificial Sequence
  Synthetic oligonucleotide
aaatgatacgaagaaaagtataccctatta

SEQ ID NO: 267600 - DNA, 30 bp, Artificial Sequence
  Synthetic oligonucleotide
ggttacttatagatggtgggacggctatta

SEQ ID NO: 267601 - DNA, 30 bp, Artificial Sequence
  Synthetic oligonucleotide
tggttgaatctgaggtacagagggctatta

SEQ ID NO: 267602 - DNA, 30 bp, Artificial Sequence
  Synthetic oligonucleotide
cttgtttccagtaacatgccgttgctatta

SEQ ID NO: 267603 - DNA, 30 bp, Artificial Sequence
  Synthetic oligonucleotide
cttagaaatagactaatgttacatctatta

SEQ ID NO: 267604 - DNA, 30 bp, Artificial Sequence
  Synthetic oligonucleotide
agcaagctgggatcttgatactatctatta

SEQ ID NO: 267605 - DNA, 30 bp, Artificial Sequence
  Synthetic oligonucleotide
gggtcagtgccggagttgactaccgtatta

SEQ ID NO: 267606 - DNA, 30 bp, Artificial Sequence
  Synthetic oligonucleotide
tatcgattgaggagcgatctttgcgtatta

SEQ ID NO: 267607 - DNA, 30 bp, Artificial Sequence
  Synthetic oligonucleotide
ggaatcgtcatcagcggccttctcgtatta

SEQ ID NO: 267608 - DNA, 30 bp, Artificial Sequence
  Synthetic oligonucleotide
tacagacgtatgaagcatgtcttcgtatta

SEQ ID NO: 267609 - DNA, 30 bp, Artificial Sequence
  Synthetic oligonucleotide
gtaaaaggggttagacatcgttcggtatta

SEQ ID NO: 267610 - DNA, 30 bp, Artificial Sequence
  Synthetic oligonucleotide
acactccagaagtgaatgagggctgtatta

SEQ ID NO: 267611 - DNA, 30 bp, Artificial Sequence
  Synthetic oligonucleotide
ccataaggataactaaggtgtggattatta

SEQ ID NO: 267612 - DNA, 30 bp, Artificial Sequence
  Synthetic oligonucleotide
taagacgacggcactagcgctgccttatta

SEQ ID NO: 267613 - DNA, 30 bp, Artificial Sequence
  Synthetic oligonucleotide
ggaagctgctaggaagagtacggcttatta

SEQ ID NO: 267614 - DNA, 30 bp, Artificial Sequence
  Synthetic oligonucleotide
agaatcctcgtggactggatcaatttatta

SEQ ID NO: 267615 - DNA, 30 bp, Artificial Sequence
  Synthetic oligonucleotide
tcattagtaactaccttgctaattttatta

SEQ ID NO: 267616 - DNA, 30 bp, Artificial Sequence
  Synthetic oligonucleotide
attatagtcttcggtggacacaccaactta

SEQ ID NO: 267617 - DNA, 30 bp, Artificial Sequence
  Synthetic oligonucleotide
aagacttacatcatatatgtgaccaactta

SEQ ID NO: 267618 - DNA, 30 bp, Artificial Sequence
  Synthetic oligonucleotide
tgatgtttatccgtatcagcagtcaactta

SEQ ID NO: 267619 - DNA, 30 bp, Artificial Sequence
  Synthetic oligonucleotide
ataatgcaataagaaaaactgaggaactta

SEQ ID NO: 267620 - DNA, 30 bp, Artificial Sequence
  Synthetic oligonucleotide
acaaggatgctgcgcaaaactgggaactta

SEQ ID NO: 267621 - DNA, 30 bp, Artificial Sequence
  Synthetic oligonucleotide
agagccgcggactaccgaataaataactta

SEQ ID NO: 267622 - DNA, 30 bp, Artificial Sequence
  Synthetic oligonucleotide
tctttgtggtccggaggtgtttgccactta

SEQ ID NO: 267623 - DNA, 30 bp, Artificial Sequence
  Synthetic oligonucleotide
gagaaggcgattcccgctagacatcactta

SEQ ID NO: 267624 - DNA, 30 bp, Artificial Sequence
  Synthetic oligonucleotide
cccagaaacatgagcgtgtttcctcactta

SEQ ID NO: 267625 - DNA, 30 bp, Artificial Sequence
  Synthetic oligonucleotide
ccgccctagaagtaagtccggtctcactta

SEQ ID NO: 267626 - DNA, 30 bp, Artificial Sequence
  Synthetic oligonucleotide
ggcatgattgccaatccccgttctcactta

SEQ ID NO: 267627 - DNA, 29 bp, Artificial Sequence
  Synthetic oligonucleotide
agggcaatttcgccaatttaattcactta

SEQ ID NO: 267628 - DNA, 30 bp, Artificial Sequence
  Synthetic oligonucleotide
gagccaatgcgtaaggaggggaacgactta

SEQ ID NO: 267629 - DNA, 30 bp, Artificial Sequence
  Synthetic oligonucleotide
aataaaccgggcgaacggttacatgactta

SEQ ID NO: 267630 - DNA, 30 bp, Artificial Sequence
  Synthetic oligonucleotide
ttagtaccggatcatggagcctatgactta

SEQ ID NO: 267631 - DNA, 30 bp, Artificial Sequence
  Synthetic oligonucleotide
catgcacgttgtgtaacaacttttgactta

SEQ ID NO: 267632 - DNA, 30 bp, Artificial Sequence
  Synthetic oligonucleotide
aaagtactcaataaagttggaagatactta

SEQ ID NO: 267633 - DNA, 30 bp, Artificial Sequence
  Synthetic oligonucleotide
tcataaggcatcgtgtccctacgatactta

SEQ ID NO: 267634 - DNA, 30 bp, Artificial Sequence
  Synthetic oligonucleotide
gtgagcacaagttcgatgatcaactactta

SEQ ID NO: 267635 - DNA, 30 bp, Artificial Sequence
  Synthetic oligonucleotide
ttcatcacgttctatcgcagtgtctactta

SEQ ID NO: 267636 - DNA, 30 bp, Artificial Sequence
  Synthetic oligonucleotide
ccaccccccgtatagaggcgtgtctactta

SEQ ID NO: 267637 - DNA, 30 bp, Artificial Sequence
  Synthetic oligonucleotide
caaactctggggaccgtgtgactttactta

SEQ ID NO: 267638 - DNA, 29 bp, Artificial Sequence
  Synthetic oligonucleotide
cttatttgggaaaataagtcgtttactta

SEQ ID NO: 267639 - DNA, 30 bp, Artificial Sequence
  Synthetic oligonucleotide
gatcccaagttacggggacgctaaacctta

SEQ ID NO: 267640 - DNA, 30 bp, Artificial Sequence
  Synthetic oligonucleotide
tcaatataacgcaatactaacgcaacctta

SEQ ID NO: 267641 - DNA, 30 bp, Artificial Sequence
  Synthetic oligonucleotide
tctgatttggcacacggcttcctcacctta

SEQ ID NO: 267642 - DNA, 30 bp, Artificial Sequence
  Synthetic oligonucleotide
tagtattacgaccggacacctcctacctta

SEQ ID NO: 267643 - DNA, 30 bp, Artificial Sequence
  Synthetic oligonucleotide
ggcgcatcccagtagcgatagattacctta

SEQ ID NO: 267644 - DNA, 30 bp, Artificial Sequence
  Synthetic oligonucleotide
aatcggagcgtacgcttggattgaccctta

SEQ ID NO: 267645 - DNA, 30 bp, Artificial Sequence
  Synthetic oligonucleotide
gcatctcattttagtatctcaggcccctta

SEQ ID NO: 267646 - DNA, 30 bp, Artificial Sequence
  Synthetic oligonucleotide
cgcgccaaccacagaccgggaacgccctta

SEQ ID NO: 267647 - DNA, 30 bp, Artificial Sequence
  Synthetic oligonucleotide
tgaagagcaatgaagttgactaggccctta

SEQ ID NO: 267648 - DNA, 30 bp, Artificial Sequence
  Synthetic oligonucleotide
atactaatggtcgttaaatgatgtccctta

SEQ ID NO: 267649 - DNA, 30 bp, Artificial Sequence
  Synthetic oligonucleotide
ggggcgcagtggtgtacgccaagagcctta

SEQ ID NO: 267650 - DNA, 30 bp, Artificial Sequence
  Synthetic oligonucleotide
cagaaacgagatccactgctattggcctta

SEQ ID NO: 267651 - DNA, 30 bp, Artificial Sequence
  Synthetic oligonucleotide
tcagccgtcgggtgcgtattttatgcctta

SEQ ID NO: 267652 - DNA, 30 bp, Artificial Sequence
  Synthetic oligonucleotide
ccctttaacggggaacgagatagtgcctta

SEQ ID NO: 267653 - DNA, 30 bp, Artificial Sequence
  Synthetic oligonucleotide
gacttagactgtcaataagtcatatcctta

SEQ ID NO: 267654 - DNA, 30 bp, Artificial Sequence
  Synthetic oligonucleotide
gcgaaagaatcatttttgagagtatcctta

SEQ ID NO: 267655 - DNA, 30 bp, Artificial Sequence
  Synthetic oligonucleotide
atgtccttagtcgccgcgcgattatcctta

SEQ ID NO: 267656 - DNA, 30 bp, Artificial Sequence
  Synthetic oligonucleotide
acaactccggaatattgggctagctcctta

SEQ ID NO: 267657 - DNA, 30 bp, Artificial Sequence
  Synthetic oligonucleotide
aggtaatatagttccctggggacgtcctta

SEQ ID NO: 267658 - DNA, 30 bp, Artificial Sequence
  Synthetic oligonucleotide
gagccactgttacatcttcgagattcctta

SEQ ID NO: 267659 - DNA, 30 bp, Artificial Sequence
  Synthetic oligonucleotide
agccatcgcaggccgctctaactttcctta

SEQ ID NO: 267660 - DNA, 30 bp, Artificial Sequence
  Synthetic oligonucleotide
taaagagcgcttctgtaggggcacagctta

SEQ ID NO: 267661 - DNA, 30 bp, Artificial Sequence
  Synthetic oligonucleotide
gatgtttgggcttcgtaagacaagagctta

SEQ ID NO: 267662 - DNA, 30 bp, Artificial Sequence
  Synthetic oligonucleotide
ctcccgtgagttccgtcgctggagagctta

SEQ ID NO: 267663 - DNA, 30 bp, Artificial Sequence
  Synthetic oligonucleotide
gcagaataactttcgtatacgaggagctta

SEQ ID NO: 267664 - DNA, 30 bp, Artificial Sequence
  Synthetic oligonucleotide
gcgcagagacgtcaactgggatatagctta

SEQ ID NO: 267665 - DNA, 30 bp, Artificial Sequence
  Synthetic oligonucleotide
tgcagaatggagtagaaatgatcccgctta

SEQ ID NO: 267666 - DNA, 30 bp, Artificial Sequence
  Synthetic oligonucleotide
cactgacccgctagagttacatgccgctta

SEQ ID NO: 267667 - DNA, 30 bp, Artificial Sequence
  Synthetic oligonucleotide
accggtcccgacccgcctcgggtccgctta

SEQ ID NO: 267668 - DNA, 30 bp, Artificial Sequence
  Synthetic oligonucleotide
tccaacgcaaagtttatctgtcagcgctta

SEQ ID NO: 267669 - DNA, 30 bp, Artificial Sequence
  Synthetic oligonucleotide
tctagactaccggactagcgaaggcgctta

SEQ ID NO: 267670 - DNA, 30 bp, Artificial Sequence
  Synthetic oligonucleotide
tctgtcaaaagtccgtattgagctcgctta

SEQ ID NO: 267671 - DNA, 30 bp, Artificial Sequence
  Synthetic oligonucleotide
actttggaacatgcggtgcgccgtcgctta

SEQ ID NO: 267672 - DNA, 30 bp, Artificial Sequence
  Synthetic oligonucleotide
tggtgcttcagcagatgccgtcatggctta

SEQ ID NO: 267673 - DNA, 30 bp, Artificial Sequence
  Synthetic oligonucleotide
ctacaagggcaagttttctcaggtggctta

SEQ ID NO: 267674 - DNA, 30 bp, Artificial Sequence
  Synthetic oligonucleotide
tacgcttacagtgctgaaatctgtggctta

SEQ ID NO: 267675 - DNA, 30 bp, Artificial Sequence
  Synthetic oligonucleotide
aggcccccttgcacggggatggaatgctta

SEQ ID NO: 267676 - DNA, 30 bp, Artificial Sequence
  Synthetic oligonucleotide
atcgtctaaggctgctgggttctatgctta

SEQ ID NO: 267677 - DNA, 30 bp, Artificial Sequence
  Synthetic oligonucleotide
gctcgccaactctgtgggatgagctgctta

SEQ ID NO: 267678 - DNA, 30 bp, Artificial Sequence
  Synthetic oligonucleotide
tcggtaactaccacggactcggagtgctta

SEQ ID NO: 267679 - DNA, 30 bp, Artificial Sequence
  Synthetic oligonucleotide
agtagaggacacttagtagtccattgctta

SEQ ID NO: 267680 - DNA, 30 bp, Artificial Sequence
  Synthetic oligonucleotide
ggcacaggtagataggagaggttttgctta

SEQ ID NO: 267681 - DNA, 30 bp, Artificial Sequence
  Synthetic oligonucleotide
cacccgaataagcacctgtcccaaatctta

SEQ ID NO: 267682 - DNA, 30 bp, Artificial Sequence
  Synthetic oligonucleotide
gtagtctgtaaagttcttacttaaatctta

SEQ ID NO: 267683 - DNA, 30 bp, Artificial Sequence
  Synthetic oligonucleotide
ccgctttatcaccccgtcagaccgatctta

SEQ ID NO: 267684 - DNA, 30 bp, Artificial Sequence
  Synthetic oligonucleotide
tatgaatgtttttgtgttaccccgatctta

SEQ ID NO: 267685 - DNA, 30 bp, Artificial Sequence
  Synthetic oligonucleotide
ataatagcccaaatatgggtgccgatctta

SEQ ID NO: 267686 - DNA, 30 bp, Artificial Sequence
  Synthetic oligonucleotide
gcagctggttacctccgcgccatgatctta

SEQ ID NO: 267687 - DNA, 30 bp, Artificial Sequence
  Synthetic oligonucleotide
tcggcatataagcatcaggggactatctta

SEQ ID NO: 267688 - DNA, 30 bp, Artificial Sequence
  Synthetic oligonucleotide
tggaatccgagggctggggaccaactctta

SEQ ID NO: 267689 - DNA, 30 bp, Artificial Sequence
  Synthetic oligonucleotide
gtcattcgctatcctcataacgaactctta

SEQ ID NO: 267690 - DNA, 30 bp, Artificial Sequence
  Synthetic oligonucleotide
tgccgccatgtggcattgtggccgctctta

SEQ ID NO: 267691 - DNA, 30 bp, Artificial Sequence
  Synthetic oligonucleotide
agaagtcgccgaaacgaggtttctctctta

SEQ ID NO: 267692 - DNA, 30 bp, Artificial Sequence
  Synthetic oligonucleotide
tcgggtgggaactgggaccatagtctctta

SEQ ID NO: 267693 - DNA, 30 bp, Artificial Sequence
  Synthetic oligonucleotide
tctcttaccaatcttagtctccgtctctta

SEQ ID NO: 267694 - DNA, 30 bp, Artificial Sequence
  Synthetic oligonucleotide
aacaactgtagcaaggtgctttccgtctta

SEQ ID NO: 267695 - DNA, 30 bp, Artificial Sequence
  Synthetic oligonucleotide
gtgctttcgcgacttcagaattgggtctta

SEQ ID NO: 267696 - DNA, 30 bp, Artificial Sequence
  Synthetic oligonucleotide
ctcacgaacagactgacgacaaggttctta

SEQ ID NO: 267697 - DNA, 30 bp, Artificial Sequence
  Synthetic oligonucleotide
acccaggcgagggctacctgcgggttctta

SEQ ID NO: 267698 - DNA, 30 bp, Artificial Sequence
  Synthetic oligonucleotide
catcccgtattcgtaggcccttggttctta

SEQ ID NO: 267699 - DNA, 30 bp, Artificial Sequence
  Synthetic oligonucleotide
gcacacgcttcccttccattacaaaagtta

SEQ ID NO: 267700 - DNA, 30 bp, Artificial Sequence
  Synthetic oligonucleotide
cgggtggggggatataggtcccaaaagtta

SEQ ID NO: 267701 - DNA, 30 bp, Artificial Sequence
  Synthetic oligonucleotide
ggcagtttgacagatgacgatgacaagtta

SEQ ID NO: 267702 - DNA, 30 bp, Artificial Sequence
  Synthetic oligonucleotide
ctataacgtgtctcgtgcgattacaagtta

SEQ ID NO: 267703 - DNA, 30 bp, Artificial Sequence
  Synthetic oligonucleotide
cgcgcctcatgcgagcttgccacgaagtta

SEQ ID NO: 267704 - DNA, 30 bp, Artificial Sequence
  Synthetic oligonucleotide
gatatagtaaacgctgtgctgaggaagtta

SEQ ID NO: 267705 - DNA, 30 bp, Artificial Sequence
  Synthetic oligonucleotide
cacccaattataaagaaaccattgaagtta

SEQ ID NO: 267706 - DNA, 30 bp, Artificial Sequence
  Synthetic oligonucleotide
gcatagggcattgataaaaattctaagtta

SEQ ID NO: 267707 - DNA, 30 bp, Artificial Sequence
  Synthetic oligonucleotide
attggcgaatacgaaggcgtgggtaagtta

SEQ ID NO: 267708 - DNA, 30 bp, Artificial Sequence
  Synthetic oligonucleotide
gcatggatgtaaagtggttttgttaagtta

SEQ ID NO: 267709 - DNA, 30 bp, Artificial Sequence
  Synthetic oligonucleotide
ggaatcgactaccacgtgggcgcacagtta

SEQ ID NO: 267710 - DNA, 30 bp, Artificial Sequence
  Synthetic oligonucleotide
gagtcactagagtatatgcgactacagtta

SEQ ID NO: 267711 - DNA, 30 bp, Artificial Sequence
  Synthetic oligonucleotide
taatcccgaggctaatacagaaaccagtta

SEQ ID NO: 267712 - DNA, 30 bp, Artificial Sequence
  Synthetic oligonucleotide
ccttattccgggttgtaatccgcccagtta

SEQ ID NO: 267713 - DNA, 30 bp, Artificial Sequence
  Synthetic oligonucleotide
aggttatcagggttcttggactcccagtta

SEQ ID NO: 267714 - DNA, 30 bp, Artificial Sequence
  Synthetic oligonucleotide
tttagaacataagcagggtaacgccagtta

SEQ ID NO: 267715 - DNA, 30 bp, Artificial Sequence
  Synthetic oligonucleotide
gtcgaggatgctctaggcgggcgccagtta

SEQ ID NO: 267716 - DNA, 30 bp, Artificial Sequence
  Synthetic oligonucleotide
gacccagcggagtaaactccgaggcagtta

SEQ ID NO: 267717 - DNA, 30 bp, Artificial Sequence
  Synthetic oligonucleotide
ttcaaattctcgcgaacgcgaaaggagtta

SEQ ID NO: 267718 - DNA, 30 bp, Artificial Sequence
  Synthetic oligonucleotide
gtattagaccactgagcagtgcgtgagtta

SEQ ID NO: 267719 - DNA, 30 bp, Artificial Sequence
  Synthetic oligonucleotide
tatcgacatggtgtaagagcgattgagtta

SEQ ID NO: 267720 - DNA, 30 bp, Artificial Sequence
  Synthetic oligonucleotide
ggccaaagagtggtgtaaatcccctagtta

SEQ ID NO: 267721 - DNA, 30 bp, Artificial Sequence
  Synthetic oligonucleotide
gtagaaagggcgtacacacgttagtagtta

SEQ ID NO: 267722 - DNA, 30 bp, Artificial Sequence
  Synthetic oligonucleotide
cacgtcacagaatattggcacccgtagtta

SEQ ID NO: 267723 - DNA, 30 bp, Artificial Sequence
  Synthetic oligonucleotide
atgagcacgcgattcggtatatcgtagtta

SEQ ID NO: 267724 - DNA, 30 bp, Artificial Sequence
  Synthetic oligonucleotide
ctgagccttgtccggaacaaccattagtta

SEQ ID NO: 267725 - DNA, 30 bp, Artificial Sequence
  Synthetic oligonucleotide
accatgcgtacgtatcttttgctttagtta

SEQ ID NO: 267726 - DNA, 30 bp, Artificial Sequence
  Synthetic oligonucleotide
ccagatgatctccaaagccgtcaaacgtta

SEQ ID NO: 267727 - DNA, 30 bp, Artificial Sequence
  Synthetic oligonucleotide
cgcaattgccaaccgcctagacacacgtta

SEQ ID NO: 267728 - DNA, 30 bp, Artificial Sequence
  Synthetic oligonucleotide
taaatagaatgtctggtgaacaagacgtta

SEQ ID NO: 267729 - DNA, 30 bp, Artificial Sequence
  Synthetic oligonucleotide
tatcacaacatgttaggtcgtaacccgtta

SEQ ID NO: 267730 - DNA, 30 bp, Artificial Sequence
  Synthetic oligonucleotide
gaacaaccggatgtgccaatttacccgtta

SEQ ID NO: 267731 - DNA, 30 bp, Artificial Sequence
  Synthetic oligonucleotide
aatcataaggaagtctgctgggccccgtta

SEQ ID NO: 267732 - DNA, 30 bp, Artificial Sequence
  Synthetic oligonucleotide
tcattacgtctgaattgaagttagccgtta

SEQ ID NO: 267733 - DNA, 30 bp, Artificial Sequence
  Synthetic oligonucleotide
cgccgttatttatcggcctatccggcgtta

SEQ ID NO: 267734 - DNA, 30 bp, Artificial Sequence
  Synthetic oligonucleotide
cacagagatgtctgtccatacggggcgtta

SEQ ID NO: 267735 - DNA, 30 bp, Artificial Sequence
  Synthetic oligonucleotide
ttgaagactcaaatacagaatgtggcgtta

SEQ ID NO: 267736 - DNA, 30 bp, Artificial Sequence
  Synthetic oligonucleotide
tctcactgcatcttgagctaatgatcgtta

SEQ ID NO: 267737 - DNA, 30 bp, Artificial Sequence
  Synthetic oligonucleotide
cccgttaccgaatatacacggagctcgtta

SEQ ID NO: 267738 - DNA, 30 bp, Artificial Sequence
  Synthetic oligonucleotide
gctatctcggatcatatattggggtcgtta

SEQ ID NO: 267739 - DNA, 30 bp, Artificial Sequence
  Synthetic oligonucleotide
actgaaggctgacattgtccaatgtcgtta

SEQ ID NO: 267740 - DNA, 30 bp, Artificial Sequence
  Synthetic oligonucleotide
gcggaagaagcctagtaggctttgtcgtta

SEQ ID NO: 267741 - DNA, 30 bp, Artificial Sequence
  Synthetic oligonucleotide
cgatcatcgcggcaatgtatgaaaaggtta

SEQ ID NO: 267742 - DNA, 30 bp, Artificial Sequence
  Synthetic oligonucleotide
gacagtctccagggtgccccacataggtta

SEQ ID NO: 267743 - DNA, 30 bp, Artificial Sequence
  Synthetic oligonucleotide
ctggcaaccggtcagattgtacttaggtta

SEQ ID NO: 267744 - DNA, 30 bp, Artificial Sequence
  Synthetic oligonucleotide
gttgcgcactttgcacaaaggatacggtta

SEQ ID NO: 267745 - DNA, 30 bp, Artificial Sequence
  Synthetic oligonucleotide
tccgggctgaaacatacagatatacggtta

SEQ ID NO: 267746 - DNA, 30 bp, Artificial Sequence
  Synthetic oligonucleotide
tcagcccagcaacggctagacccccggtta

SEQ ID NO: 267747 - DNA, 30 bp, Artificial Sequence
  Synthetic oligonucleotide
tcggttgcacttttttagcatacagggtta

SEQ ID NO: 267748 - DNA, 30 bp, Artificial Sequence
  Synthetic oligonucleotide
gtctggaaaacgaaacgtgtggcagggtta

SEQ ID NO: 267749 - DNA, 30 bp, Artificial Sequence
  Synthetic oligonucleotide
gaaacgtggaggaggtggaacggcgggtta

SEQ ID NO: 267750 - DNA, 34 bp, Artificial Sequence
  Synthetic oligonucleotide
tatagtagcaggcagtgagggtggttgcgggtta

SEQ ID NO: 267751 - DNA, 30 bp, Artificial Sequence
  Synthetic oligonucleotide
tctgcaaacagtagctacaataatgggtta

SEQ ID NO: 267752 - DNA, 30 bp, Artificial Sequence
  Synthetic oligonucleotide
gtgagaccgtcacgcttgacctgtgggtta

SEQ ID NO: 267753 - DNA, 30 bp, Artificial Sequence
  Synthetic oligonucleotide
ttgaggtgggccttgggctatccatggtta

SEQ ID NO: 267754 - DNA, 30 bp, Artificial Sequence
  Synthetic oligonucleotide
agtttctattcaaaagtacaacgatggtta

SEQ ID NO: 267755 - DNA, 30 bp, Artificial Sequence
  Synthetic oligonucleotide
catggatggactgctatcccgtagtggtta

SEQ ID NO: 267756 - DNA, 30 bp, Artificial Sequence
  Synthetic oligonucleotide
tcgagccaccaggtaccatctgcgtggtta

SEQ ID NO: 267757 - DNA, 30 bp, Artificial Sequence
  Synthetic oligonucleotide
tgtcaagcactgagatgaaggtattggtta

SEQ ID NO: 267758 - DNA, 25 bp, Artificial Sequence
  Synthetic oligonucleotide
aagcgatagtgtgaacaaaatgtta

SEQ ID NO: 267759 - DNA, 30 bp, Artificial Sequence
  Synthetic oligonucleotide
acatggaagaacggggtagacaaaatgtta

SEQ ID NO: 267760 - DNA, 30 bp, Artificial Sequence
  Synthetic oligonucleotide
acgaagtccgcgttcggggacacaatgtta

SEQ ID NO: 267761 - DNA, 30 bp, Artificial Sequence
  Synthetic oligonucleotide
cgacatgttttttctcatagcggaatgtta

SEQ ID NO: 267762 - DNA, 30 bp, Artificial Sequence
  Synthetic oligonucleotide
tcgttaaccaagcctatccgtcacatgtta

SEQ ID NO: 267763 - DNA, 30 bp, Artificial Sequence
  Synthetic oligonucleotide
gcaggtatccacgagcgagtactcatgtta

SEQ ID NO: 267764 - DNA, 30 bp, Artificial Sequence
  Synthetic oligonucleotide
tggtacacttcaagaggctgtgggatgtta

SEQ ID NO: 267765 - DNA, 30 bp, Artificial Sequence
  Synthetic oligonucleotide
ccttgggtgtatgtcgagtacctgatgtta

SEQ ID NO: 267766 - DNA, 30 bp, Artificial Sequence
  Synthetic oligonucleotide
aaactccgagaactgtggtaggatatgtta

SEQ ID NO: 267767 - DNA, 31 bp, Artificial Sequence
  Synthetic oligonucleotide
ttgtatcgcttcgacagggctagttatgtta

SEQ ID NO: 267768 - DNA, 30 bp, Artificial Sequence
  Synthetic oligonucleotide
tcggtgctgaaaggttgactgacactgtta

SEQ ID NO: 267769 - DNA, 30 bp, Artificial Sequence
  Synthetic oligonucleotide
ctgattagggtggccggtcgtggactgtta

SEQ ID NO: 267770 - DNA, 30 bp, Artificial Sequence
  Synthetic oligonucleotide
gcggggagtgatgaactcattatactgtta

SEQ ID NO: 267771 - DNA, 30 bp, Artificial Sequence
  Synthetic oligonucleotide
ggtgtgaatcacatttgcgatcccctgtta

SEQ ID NO: 267772 - DNA, 30 bp, Artificial Sequence
  Synthetic oligonucleotide
gcctggactatttgaagaggactgctgtta

SEQ ID NO: 267773 - DNA, 30 bp, Artificial Sequence
  Synthetic oligonucleotide
ctctataatgcttacggtagatatctgtta

SEQ ID NO: 267774 - DNA, 30 bp, Artificial Sequence
  Synthetic oligonucleotide
tgagcccgaaatgatttcgatcgtctgtta

SEQ ID NO: 267775 - DNA, 30 bp, Artificial Sequence
  Synthetic oligonucleotide
tcgggttgtgcgcgctagatgattctgtta

SEQ ID NO: 267776 - DNA, 30 bp, Artificial Sequence
  Synthetic oligonucleotide
aaatcgcagccagtctgatgcacagtgtta

SEQ ID NO: 267777 - DNA, 30 bp, Artificial Sequence
  Synthetic oligonucleotide
gtctcgaagttatggtccgtcctagtgtta

SEQ ID NO: 267778 - DNA, 30 bp, Artificial Sequence
  Synthetic oligonucleotide
tgtccatctaaagtcgcgagaccattgtta

SEQ ID NO: 267779 - DNA, 30 bp, Artificial Sequence
  Synthetic oligonucleotide
ggttatcgtagggatcgagtgagattgtta

SEQ ID NO: 267780 - DNA, 30 bp, Artificial Sequence
  Synthetic oligonucleotide
tgtacaggccgtactggttaactattgtta

SEQ ID NO: 267781 - DNA, 30 bp, Artificial Sequence
  Synthetic oligonucleotide
tctgccttaccctgttttaactcgttgtta

SEQ ID NO: 267782 - DNA, 30 bp, Artificial Sequence
  Synthetic oligonucleotide
gggaattacggttctttaagatggttgtta

SEQ ID NO: 267783 - DNA, 30 bp, Artificial Sequence
  Synthetic oligonucleotide
tagattaggaaaatgcatgcccctttgtta

SEQ ID NO: 267784 - DNA, 30 bp, Artificial Sequence
  Synthetic oligonucleotide
gcataatgtgggtgcatccatggcaattta

SEQ ID NO: 267785 - DNA, 30 bp, Artificial Sequence
  Synthetic oligonucleotide
ctcactgatgaggcagtggctcagaattta

SEQ ID NO: 267786 - DNA, 30 bp, Artificial Sequence
  Synthetic oligonucleotide
cattacctaaacatgaaatgtatgcattta

SEQ ID NO: 267787 - DNA, 30 bp, Artificial Sequence
  Synthetic oligonucleotide
aacacgaattatgcaagaaactgagattta

SEQ ID NO: 267788 - DNA, 30 bp, Artificial Sequence
  Synthetic oligonucleotide
cgcaaggcatcatcaccatgagacgattta

SEQ ID NO: 267789 - DNA, 30 bp, Artificial Sequence
  Synthetic oligonucleotide
aagtcactgaacgcgggtgttcccgattta

SEQ ID NO: 267790 - DNA, 30 bp, Artificial Sequence
  Synthetic oligonucleotide
accgcgaggctgtaacaatctggcgattta

SEQ ID NO: 267791 - DNA, 30 bp, Artificial Sequence
  Synthetic oligonucleotide
ttcgaatgtctcaatgggctagtcgattta

SEQ ID NO: 267792 - DNA, 30 bp, Artificial Sequence
  Synthetic oligonucleotide
cgtaaaactgagattgtctagcaggattta

SEQ ID NO: 267793 - DNA, 30 bp, Artificial Sequence
  Synthetic oligonucleotide
acccctccaaaggcgtatgtgacggattta

SEQ ID NO: 267794 - DNA, 30 bp, Artificial Sequence
  Synthetic oligonucleotide
cttccggggctcgagcaatcacgggattta

SEQ ID NO: 267795 - DNA, 30 bp, Artificial Sequence
  Synthetic oligonucleotide
acgccaaagtgcagcgatgacggggattta

SEQ ID NO: 267796 - DNA, 30 bp, Artificial Sequence
  Synthetic oligonucleotide
agttgggtcggcacgaaatgcgtatattta

SEQ ID NO: 267797 - DNA, 30 bp, Artificial Sequence
  Synthetic oligonucleotide
cttgaatccaacctgtggtgctggtattta

SEQ ID NO: 267798 - DNA, 30 bp, Artificial Sequence
  Synthetic oligonucleotide
gcgttcataccctcaatttgaaattattta

SEQ ID NO: 267799 - DNA, 30 bp, Artificial Sequence
  Synthetic oligonucleotide
gggtatgtctgagggttagctgcttattta

SEQ ID NO: 267800 - DNA, 30 bp, Artificial Sequence
  Synthetic oligonucleotide
gctccacgatagtagcacatagaaacttta

SEQ ID NO: 267801 - DNA, 30 bp, Artificial Sequence
  Synthetic oligonucleotide
ccacgtgctgtcttgacaacgtgaacttta

SEQ ID NO: 267802 - DNA, 30 bp, Artificial Sequence
  Synthetic oligonucleotide
gaaaagacctccaaaaatattgtgacttta

SEQ ID NO: 267803 - DNA, 30 bp, Artificial Sequence
  Synthetic oligonucleotide
cagtaggcgaagagtgaacgtcgcccttta

SEQ ID NO: 267804 - DNA, 30 bp, Artificial Sequence
  Synthetic oligonucleotide
gtgaagtatccagcgaatgcgagagcttta

SEQ ID NO: 267805 - DNA, 30 bp, Artificial Sequence
  Synthetic oligonucleotide
gtcctaacatagtacaatgagtccgcttta

SEQ ID NO: 267806 - DNA, 30 bp, Artificial Sequence
  Synthetic oligonucleotide
ttctgagtaccagcgagctactaggcttta

SEQ ID NO: 267807 - DNA, 30 bp, Artificial Sequence
  Synthetic oligonucleotide
tgcactacccaatcatccgatacggcttta

SEQ ID NO: 267808 - DNA, 30 bp, Artificial Sequence
  Synthetic oligonucleotide
cgggtcaaatggtgagatcgaagggcttta

SEQ ID NO: 267809 - DNA, 30 bp, Artificial Sequence
  Synthetic oligonucleotide
ataggccaatgacgaaattggaaatcttta

SEQ ID NO: 267810 - DNA, 30 bp, Artificial Sequence
  Synthetic oligonucleotide
aggacgctagtctggtgctgtatgtcttta

SEQ ID NO: 267811 - DNA, 30 bp, Artificial Sequence
  Synthetic oligonucleotide
gatggaatagtatcttagacatgttcttta

SEQ ID NO: 267812 - DNA, 30 bp, Artificial Sequence
  Synthetic oligonucleotide
gcttccggacgtcactgagctacaagttta

SEQ ID NO: 267813 - DNA, 30 bp, Artificial Sequence
  Synthetic oligonucleotide
cactcggtagtcgggaagcggctaagttta

SEQ ID NO: 267814 - DNA, 30 bp, Artificial Sequence
  Synthetic oligonucleotide
tctcacactgccatataattagtaagttta

SEQ ID NO: 267815 - DNA, 30 bp, Artificial Sequence
  Synthetic oligonucleotide
tgatcggcaggctttttagtttacagttta

SEQ ID NO: 267816 - DNA, 30 bp, Artificial Sequence
  Synthetic oligonucleotide
cacgtgaaagtagcgggtttcgccagttta

SEQ ID NO: 267817 - DNA, 30 bp, Artificial Sequence
  Synthetic oligonucleotide
atccgggaccagctctgaggaggtagttta

SEQ ID NO: 267818 - DNA, 30 bp, Artificial Sequence
  Synthetic oligonucleotide
gtggtcatgcaacagtctgcgagacgttta

SEQ ID NO: 267819 - DNA, 30 bp, Artificial Sequence
  Synthetic oligonucleotide
gtgtgccgtaaaattaatgcaggacgttta

SEQ ID NO: 267820 - DNA, 30 bp, Artificial Sequence
  Synthetic oligonucleotide
gcaaatcgaactccgatcccaaagcgttta

SEQ ID NO: 267821 - DNA, 30 bp, Artificial Sequence
  Synthetic oligonucleotide
caagataggtcgaggttcaggccgcgttta

SEQ ID NO: 267822 - DNA, 30 bp, Artificial Sequence
  Synthetic oligonucleotide
cctttggtatggaatctatctaggcgttta

SEQ ID NO: 267823 - DNA, 28 bp, Artificial Sequence
  Synthetic oligonucleotide
acagtagaaggagtgatgtcctcgttta

SEQ ID NO: 267824 - DNA, 30 bp, Artificial Sequence
  Synthetic oligonucleotide
cctcgtaattagagccggtcttctcgttta

SEQ ID NO: 267825 - DNA, 30 bp, Artificial Sequence
  Synthetic oligonucleotide
aaccacggataggataagaatcgtcgttta

SEQ ID NO: 267826 - DNA, 30 bp, Artificial Sequence
  Synthetic oligonucleotide
ggggttaagggcctcctaagaagaggttta

SEQ ID NO: 267827 - DNA, 30 bp, Artificial Sequence
  Synthetic oligonucleotide
tgagtacgtagattagaaggtataggttta

SEQ ID NO: 267828 - DNA, 30 bp, Artificial Sequence
  Synthetic oligonucleotide
gctgcggaggtgaagaccgcacgcggttta

SEQ ID NO: 267829 - DNA, 30 bp, Artificial Sequence
  Synthetic oligonucleotide
tgttcggggcatttcaacgagggcggttta

SEQ ID NO: 267830 - DNA, 30 bp, Artificial Sequence
  Synthetic oligonucleotide
gattccgacatatcaggctacttcggttta

SEQ ID NO: 267831 - DNA, 30 bp, Artificial Sequence
  Synthetic oligonucleotide
gcgccgaagggtaaaaaacacaggggttta

SEQ ID NO: 267832 - DNA, 30 bp, Artificial Sequence
  Synthetic oligonucleotide
gacatacgtagacgggggtttgtgggttta

SEQ ID NO: 267833 - DNA, 30 bp, Artificial Sequence
  Synthetic oligonucleotide
gtggagcgtcattatggatcctatggttta

SEQ ID NO: 267834 - DNA, 30 bp, Artificial Sequence
  Synthetic oligonucleotide
ctgacaattgaccgtggaagagtatgttta

SEQ ID NO: 267835 - DNA, 30 bp, Artificial Sequence
  Synthetic oligonucleotide
cggcctaggatggagagctttacctgttta

SEQ ID NO: 267836 - DNA, 30 bp, Artificial Sequence
  Synthetic oligonucleotide
cttctcggataacggtaaacaagctgttta

SEQ ID NO: 267837 - DNA, 30 bp, Artificial Sequence
  Synthetic oligonucleotide
cttgtgatctcatgctcatttcattgttta

SEQ ID NO: 267838 - DNA, 30 bp, Artificial Sequence
  Synthetic oligonucleotide
tacaatcgaatatagagctatacttgttta

SEQ ID NO: 267839 - DNA, 30 bp, Artificial Sequence
  Synthetic oligonucleotide
gggaggcttctcacctataaagcaatttta

SEQ ID NO: 267840 - DNA, 30 bp, Artificial Sequence
  Synthetic oligonucleotide
acctttggtcaatacaaagcgcacatttta

SEQ ID NO: 267841 - DNA, 30 bp, Artificial Sequence
  Synthetic oligonucleotide
ttgcgtcggatacgattgctttgcatttta

SEQ ID NO: 267842 - DNA, 30 bp, Artificial Sequence
  Synthetic oligonucleotide
agaataggagtcagtctaccgtggatttta

SEQ ID NO: 267843 - DNA, 30 bp, Artificial Sequence
  Synthetic oligonucleotide
ggagaggcgcgagcatacagtcatatttta

SEQ ID NO: 267844 - DNA, 30 bp, Artificial Sequence
  Synthetic oligonucleotide
cagttacaattaatcactccttaactttta

SEQ ID NO: 267845 - DNA, 30 bp, Artificial Sequence
  Synthetic oligonucleotide
ctgttcgtctgttgttgtgtgcgactttta

SEQ ID NO: 267846 - DNA, 30 bp, Artificial Sequence
  Synthetic oligonucleotide
gtgtagatcgtcaaatcaatggagctttta

SEQ ID NO: 267847 - DNA, 30 bp, Artificial Sequence
  Synthetic oligonucleotide
caatgacatgaggtaaaatgggcgctttta

SEQ ID NO: 267848 - DNA, 30 bp, Artificial Sequence
  Synthetic oligonucleotide
cgatgaatgagagctatcggactgctttta

SEQ ID NO: 267849 - DNA, 30 bp, Artificial Sequence
  Synthetic oligonucleotide
atagaccggggagtctaaagcaaagtttta

SEQ ID NO: 267850 - DNA, 30 bp, Artificial Sequence
  Synthetic oligonucleotide
taggttgtgactatgtgataggtagtttta

SEQ ID NO: 267851 - DNA, 30 bp, Artificial Sequence
  Synthetic oligonucleotide
aattgggggtgattaaatttacacgtttta

SEQ ID NO: 267852 - DNA, 30 bp, Artificial Sequence
  Synthetic oligonucleotide
cctagttagttaatccaagagatcgtttta

SEQ ID NO: 267853 - DNA, 30 bp, Artificial Sequence
  Synthetic oligonucleotide
ttcgtctgatgaagccgtgtttatgtttta

SEQ ID NO: 267854 - DNA, 30 bp, Artificial Sequence
  Synthetic oligonucleotide
cggagtgactgcgcaaaagaacgtgtttta

SEQ ID NO: 267855 - DNA, 30 bp, Artificial Sequence
  Synthetic oligonucleotide
tctgcgagtcgggaggccagtcgtgtttta

SEQ ID NO: 267856 - DNA, 30 bp, Artificial Sequence
  Synthetic oligonucleotide
gggggatcatgactcttatagtttgtttta

SEQ ID NO: 267857 - DNA, 30 bp, Artificial Sequence
  Synthetic oligonucleotide
tgtggaggttcatcctagatcatcttttta

SEQ ID NO: 267858 - DNA, 30 bp, Artificial Sequence
  Synthetic oligonucleotide
ccgcattacttttgggtaacgatcttttta

SEQ ID NO: 267859 - DNA, 30 bp, Artificial Sequence
  Synthetic oligonucleotide
atggcactagtccccagagtgtggttttta

SEQ ID NO: 267860 - DNA, 30 bp, Artificial Sequence
  Synthetic oligonucleotide
ctacaggcaggacggctgaacggaaaaaac

SEQ ID NO: 267861 - DNA, 30 bp, Artificial Sequence
  Synthetic oligonucleotide
aggtaagccgggagtggagtggtaaaaaac

SEQ ID NO: 267862 - DNA, 30 bp, Artificial Sequence
  Synthetic oligonucleotide
gggcagataggtaacatacttaagaaaaac

SEQ ID NO: 267863 - DNA, 30 bp, Artificial Sequence
  Synthetic oligonucleotide
tacgatgggttcagtttcggtgcgaaaaac

SEQ ID NO: 267864 - DNA, 30 bp, Artificial Sequence
  Synthetic oligonucleotide
ataatcccggctgaattaccctcgaaaaac

SEQ ID NO: 267865 - DNA, 30 bp, Artificial Sequence
  Synthetic oligonucleotide
gagatgggatgggtattataagaacaaaac

SEQ ID NO: 267866 - DNA, 30 bp, Artificial Sequence
  Synthetic oligonucleotide
gcgttcgaataggtccttaccgaacaaaac

SEQ ID NO: 267867 - DNA, 30 bp, Artificial Sequence
  Synthetic oligonucleotide
tgcatgaaaacggtggtgtgacgccaaaac

SEQ ID NO: 267868 - DNA, 29 bp, Artificial Sequence
  Synthetic oligonucleotide
cccgcgcgagcttaactctggggcaaaac

SEQ ID NO: 267869 - DNA, 30 bp, Artificial Sequence
  Synthetic oligonucleotide
attcgatcggccataacggaaaaagaaaac

SEQ ID NO: 267870 - DNA, 30 bp, Artificial Sequence
  Synthetic oligonucleotide
ttacggagccacggtgtggaaaaagaaaac

SEQ ID NO: 267871 - DNA, 30 bp, Artificial Sequence
  Synthetic oligonucleotide
ctccagtagtatgggctctttcgcgaaaac

SEQ ID NO: 267872 - DNA, 30 bp, Artificial Sequence
  Synthetic oligonucleotide
gaccttaaatattcggtacggatcgaaaac

SEQ ID NO: 267873 - DNA, 30 bp, Artificial Sequence
  Synthetic oligonucleotide
ttaatagggttggagtttcattaggaaaac

SEQ ID NO: 267874 - DNA, 30 bp, Artificial Sequence
  Synthetic oligonucleotide
ggctatcaccgcacggatcccgcggaaaac

SEQ ID NO: 267875 - DNA, 30 bp, Artificial Sequence
  Synthetic oligonucleotide
agtgcaatgccatcagccgctagggaaaac

SEQ ID NO: 267876 - DNA, 30 bp, Artificial Sequence
  Synthetic oligonucleotide
acgacagcctgacgtatgattattgaaaac

SEQ ID NO: 267877 - DNA, 30 bp, Artificial Sequence
  Synthetic oligonucleotide
gcttaacccttgtggaagctccgataaaac

SEQ ID NO: 267878 - DNA, 30 bp, Artificial Sequence
  Synthetic oligonucleotide
aaggaaagtcatcactcctttatataaaac

SEQ ID NO: 267879 - DNA, 30 bp, Artificial Sequence
  Synthetic oligonucleotide
gttatgggtggcgtaattgtgtactaaaac

SEQ ID NO: 267880 - DNA, 30 bp, Artificial Sequence
  Synthetic oligonucleotide
tacggtaggataaggtgtcatgtttaaaac

SEQ ID NO: 267881 - DNA, 30 bp, Artificial Sequence
  Synthetic oligonucleotide
aaggtcgaggccatggcacggagaacaaac

SEQ ID NO: 267882 - DNA, 30 bp, Artificial Sequence
  Synthetic oligonucleotide
ttacgtaacgtaataaattactccacaaac

SEQ ID NO: 267883 - DNA, 30 bp, Artificial Sequence
  Synthetic oligonucleotide
atactgtgcaggtacaactagcgcacaaac

SEQ ID NO: 267884 - DNA, 30 bp, Artificial Sequence
  Synthetic oligonucleotide
caaccgcgacgttcttggtcctgcacaaac

SEQ ID NO: 267885 - DNA, 30 bp, Artificial Sequence
  Synthetic oligonucleotide
ttattgtcagtcccctgacatgtcacaaac

SEQ ID NO: 267886 - DNA, 30 bp, Artificial Sequence
  Synthetic oligonucleotide
aaacaattcttggaatcgtggacgacaaac

SEQ ID NO: 267887 - DNA, 30 bp, Artificial Sequence
  Synthetic oligonucleotide
gcgtactccgtctgcgtcaccaggacaaac

SEQ ID NO: 267888 - DNA, 30 bp, Artificial Sequence
  Synthetic oligonucleotide
tctgactctcattctccgccggttacaaac

SEQ ID NO: 267889 - DNA, 30 bp, Artificial Sequence
  Synthetic oligonucleotide
ccggttaacgtttggggcatcaaaccaaac

SEQ ID NO: 267890 - DNA, 30 bp, Artificial Sequence
  Synthetic oligonucleotide
tgtggcgctctactcggttaaaacccaaac

SEQ ID NO: 267891 - DNA, 30 bp, Artificial Sequence
  Synthetic oligonucleotide
aataacccaatctaggtttttgatccaaac

SEQ ID NO: 267892 - DNA, 30 bp, Artificial Sequence
  Synthetic oligonucleotide
ttatttgattgttggacaccatctccaaac

SEQ ID NO: 267893 - DNA, 30 bp, Artificial Sequence
  Synthetic oligonucleotide
gatgtcggtcgcaaagagcttaacgcaaac

SEQ ID NO: 267894 - DNA, 31 bp, Artificial Sequence
  Synthetic oligonucleotide
tatcattcatgtcacctatgttaaggcaaac

SEQ ID NO: 267895 - DNA, 30 bp, Artificial Sequence
  Synthetic oligonucleotide
gggtctgcgtactggtaaattgtggcaaac

SEQ ID NO: 267896 - DNA, 30 bp, Artificial Sequence
  Synthetic oligonucleotide
ctataggtgtaggagacggattctgcaaac

SEQ ID NO: 267897 - DNA, 30 bp, Artificial Sequence
  Synthetic oligonucleotide
accccctcagggttactagcaggtgcaaac

SEQ ID NO: 267898 - DNA, 30 bp, Artificial Sequence
  Synthetic oligonucleotide
gtccaccacatagatcctgtttgtgcaaac

SEQ ID NO: 267899 - DNA, 30 bp, Artificial Sequence
  Synthetic oligonucleotide
gtgccatgctagagctcgctcaaatcaaac

SEQ ID NO: 267900 - DNA, 30 bp, Artificial Sequence
  Synthetic oligonucleotide
tgcacttgggcagcgaggccagcatcaaac

SEQ ID NO: 267901 - DNA, 30 bp, Artificial Sequence
  Synthetic oligonucleotide
tgcacttgggatttgtatatcggctcaaac

SEQ ID NO: 267902 - DNA, 30 bp, Artificial Sequence
  Synthetic oligonucleotide
ggagacgatgtcctagaatgattctcaaac

SEQ ID NO: 267903 - DNA, 30 bp, Artificial Sequence
  Synthetic oligonucleotide
actaatggtgagcggcggtgatagtcaaac

SEQ ID NO: 267904 - DNA, 30 bp, Artificial Sequence
  Synthetic oligonucleotide
ataagaggcaacgtaacgggtgcgtcaaac

SEQ ID NO: 267905 - DNA, 30 bp, Artificial Sequence
  Synthetic oligonucleotide
aacgttttgcaaggaacatcatattcaaac

SEQ ID NO: 267906 - DNA, 30 bp, Artificial Sequence
  Synthetic oligonucleotide
aactgctgcacacagaagcggggttcaaac

SEQ ID NO: 267907 - DNA, 30 bp, Artificial Sequence
  Synthetic oligonucleotide
cgttctgctggtgggtcattacaaagaaac

SEQ ID NO: 267908 - DNA, 30 bp, Artificial Sequence
  Synthetic oligonucleotide
ttcgcgtgcttactcaccaacggaagaaac

SEQ ID NO: 267909 - DNA, 30 bp, Artificial Sequence
  Synthetic oligonucleotide
acgctcggccctataatcaatcgcagaaac

SEQ ID NO: 267910 - DNA, 30 bp, Artificial Sequence
  Synthetic oligonucleotide
gtcagggttagtttccatgtaggcagaaac

SEQ ID NO: 267911 - DNA, 30 bp, Artificial Sequence
  Synthetic oligonucleotide
aatgggttaccggaaagggataagagaaac

SEQ ID NO: 267912 - DNA, 30 bp, Artificial Sequence
  Synthetic oligonucleotide
ctggcaggacaaattcatcattcgagaaac

SEQ ID NO: 267913 - DNA, 30 bp, Artificial Sequence
  Synthetic oligonucleotide
atgccagtctaccgggagctttcgagaaac

SEQ ID NO: 267914 - DNA, 30 bp, Artificial Sequence
  Synthetic oligonucleotide
gactgcgagtaacaagataaaggtagaaac

SEQ ID NO: 267915 - DNA, 30 bp, Artificial Sequence
  Synthetic oligonucleotide
aagcgtaatgatattaccggtattagaaac

SEQ ID NO: 267916 - DNA, 30 bp, Artificial Sequence
  Synthetic oligonucleotide
gaagggccgtcactacccgtcggacgaaac

SEQ ID NO: 267917 - DNA, 30 bp, Artificial Sequence
  Synthetic oligonucleotide
cggttatgcccttaatgacccgcccgaaac

SEQ ID NO: 267918 - DNA, 30 bp, Artificial Sequence
  Synthetic oligonucleotide
attagcttaaactaatatgtgctcggaaac

SEQ ID NO: 267919 - DNA, 30 bp, Artificial Sequence
  Synthetic oligonucleotide
catcgctcttagagcttcatgcggggaaac

SEQ ID NO: 267920 - DNA, 30 bp, Artificial Sequence
  Synthetic oligonucleotide
ggttcgcggagaagcctgtcagatggaaac

SEQ ID NO: 267921 - DNA, 30 bp, Artificial Sequence
  Synthetic oligonucleotide
cgagcttatagtccgcgggctagtggaaac

SEQ ID NO: 267922 - DNA, 30 bp, Artificial Sequence
  Synthetic oligonucleotide
catcgggatttcaattgtagcattggaaac

SEQ ID NO: 267923 - DNA, 30 bp, Artificial Sequence
  Synthetic oligonucleotide
cggcgggagcgtatgtttggagaatgaaac

SEQ ID NO: 267924 - DNA, 30 bp, Artificial Sequence
  Synthetic oligonucleotide
acactttagcaactcaccgcggcatgaaac

SEQ ID NO: 267925 - DNA, 30 bp, Artificial Sequence
  Synthetic oligonucleotide
agtaggaccattaaggtaatacactgaaac

SEQ ID NO: 267926 - DNA, 30 bp, Artificial Sequence
  Synthetic oligonucleotide
tatcttaattccgagggatctgagtgaaac

SEQ ID NO: 267927 - DNA, 30 bp, Artificial Sequence
  Synthetic oligonucleotide
cgattcgttacaactcgcatccggtgaaac

SEQ ID NO: 267928 - DNA, 30 bp, Artificial Sequence
  Synthetic oligonucleotide
tccggttgcgcctctaaatcgcattgaaac

SEQ ID NO: 267929 - DNA, 30 bp, Artificial Sequence
  Synthetic oligonucleotide
tctaagcaattttctggcgagaaaataaac

SEQ ID NO: 267930 - DNA, 30 bp, Artificial Sequence
  Synthetic oligonucleotide
aagaccataatacatggataataaataaac

SEQ ID NO: 267931 - DNA, 30 bp, Artificial Sequence
  Synthetic oligonucleotide
cgcttcggacctaagtattaggcaataaac

SEQ ID NO: 267932 - DNA, 30 bp, Artificial Sequence
  Synthetic oligonucleotide
gacatatggtagactgtattggtaataaac

SEQ ID NO: 267933 - DNA, 30 bp, Artificial Sequence
  Synthetic oligonucleotide
cgtatatggactcgcccgtaaccgataaac

SEQ ID NO: 267934 - DNA, 30 bp, Artificial Sequence
  Synthetic oligonucleotide
cgtggcgtgcgggacgggtggaatataaac

SEQ ID NO: 267935 - DNA, 30 bp, Artificial Sequence
  Synthetic oligonucleotide
gcatacaggagtcacgggtcttatataaac

SEQ ID NO: 267936 - DNA, 30 bp, Artificial Sequence
  Synthetic oligonucleotide
tgtctatgggagatctgatggagtctaaac

SEQ ID NO: 267937 - DNA, 30 bp, Artificial Sequence
  Synthetic oligonucleotide
cgttaaactgtgcgattctccggagtaaac

SEQ ID NO: 267938 - DNA, 30 bp, Artificial Sequence
  Synthetic oligonucleotide
atggggatagggttcagttttaacgtaaac

SEQ ID NO: 267939 - DNA, 30 bp, Artificial Sequence
  Synthetic oligonucleotide
gcgtagcagcccttgttgcactccgtaaac

SEQ ID NO: 267940 - DNA, 30 bp, Artificial Sequence
  Synthetic oligonucleotide
atacgggctgtacactcgacggtcgtaaac

SEQ ID NO: 267941 - DNA, 30 bp, Artificial Sequence
  Synthetic oligonucleotide
ttccacgtctggtagttaaaaccggtaaac

SEQ ID NO: 267942 - DNA, 30 bp, Artificial Sequence
  Synthetic oligonucleotide
acgccaatttatgtccatacgaatgtaaac

SEQ ID NO: 267943 - DNA, 30 bp, Artificial Sequence
  Synthetic oligonucleotide
tgtacaggggaataggaggagaggttaaac

SEQ ID NO: 267944 - DNA, 30 bp, Artificial Sequence
  Synthetic oligonucleotide
gaatgggcaagctctaatattataaacaac

SEQ ID NO: 267945 - DNA, 30 bp, Artificial Sequence
  Synthetic oligonucleotide
gtcgagtgcttgcgagttgcggtaaacaac

SEQ ID NO: 267946 - DNA, 30 bp, Artificial Sequence
  Synthetic oligonucleotide
gctgggctgttacccaatttagggaacaac

SEQ ID NO: 267947 - DNA, 30 bp, Artificial Sequence
  Synthetic oligonucleotide
attgtaggcgcgcaggggaggcctaacaac

SEQ ID NO: 267948 - DNA, 30 bp, Artificial Sequence
  Synthetic oligonucleotide
cccaaattggacgggacatcctttaacaac

SEQ ID NO: 267949 - DNA, 30 bp, Artificial Sequence
  Synthetic oligonucleotide
ctaaataaggttcggggtgacacacacaac

SEQ ID NO: 267950 - DNA, 30 bp, Artificial Sequence
  Synthetic oligonucleotide
attacaggtaatgctcgtgctgtccacaac

SEQ ID NO: 267951 - DNA, 30 bp, Artificial Sequence
  Synthetic oligonucleotide
acactacgccgttaaaaggcgcggcacaac

SEQ ID NO: 267952 - DNA, 30 bp, Artificial Sequence
  Synthetic oligonucleotide
agtaataaaggcgcgcatgaatggcacaac

SEQ ID NO: 267953 - DNA, 30 bp, Artificial Sequence
  Synthetic oligonucleotide
agtgtatctgcccgtaacggacctcacaac

SEQ ID NO: 267954 - DNA, 30 bp, Artificial Sequence
  Synthetic oligonucleotide
aggtcctgcaccgtggtaccatctcacaac

SEQ ID NO: 267955 - DNA, 30 bp, Artificial Sequence
  Synthetic oligonucleotide
aggctacagggacgcgcgcccctcgacaac

SEQ ID NO: 267956 - DNA, 30 bp, Artificial Sequence
  Synthetic oligonucleotide
ataataccttccgtgttgtggcaggacaac

SEQ ID NO: 267957 - DNA, 30 bp, Artificial Sequence
  Synthetic oligonucleotide
tccagaatgactgcttcggcctcctacaac

SEQ ID NO: 267958 - DNA, 30 bp, Artificial Sequence
  Synthetic oligonucleotide
tgagcccaaagctgcggtcccgggtacaac

SEQ ID NO: 267959 - DNA, 30 bp, Artificial Sequence
  Synthetic oligonucleotide
gtcgacccacgagtgtttatggattacaac

SEQ ID NO: 267960 - DNA, 30 bp, Artificial Sequence
  Synthetic oligonucleotide
ggaaacaacatccagaacttctattacaac

SEQ ID NO: 267961 - DNA, 30 bp, Artificial Sequence
  Synthetic oligonucleotide
gcgtcgggtttacatatatggcgaaccaac

SEQ ID NO: 267962 - DNA, 30 bp, Artificial Sequence
  Synthetic oligonucleotide
ccatggggctgtttaagcggcgtaaccaac

SEQ ID NO: 267963 - DNA, 30 bp, Artificial Sequence
  Synthetic oligonucleotide
cctcccagaaataagggaaccagcaccaac

SEQ ID NO: 267964 - DNA, 30 bp, Artificial Sequence
  Synthetic oligonucleotide
cttcagtcggcggggacagaccataccaac

SEQ ID NO: 267965 - DNA, 30 bp, Artificial Sequence
  Synthetic oligonucleotide
gctaccgttgatagcattacacctaccaac

SEQ ID NO: 267966 - DNA, 30 bp, Artificial Sequence
  Synthetic oligonucleotide
gttctggcgcaataacccaatcaacccaac

SEQ ID NO: 267967 - DNA, 30 bp, Artificial Sequence
  Synthetic oligonucleotide
ggcagggctctggatctcggtctacccaac

SEQ ID NO: 267968 - DNA, 30 bp, Artificial Sequence
  Synthetic oligonucleotide
gcgtatgagtgccgctagtggctgcccaac

SEQ ID NO: 267969 - DNA, 30 bp, Artificial Sequence
  Synthetic oligonucleotide
tggctcggatggtaagccagaattcccaac

SEQ ID NO: 267970 - DNA, 30 bp, Artificial Sequence
  Synthetic oligonucleotide
ggaaatcggcatgctctgcttatagccaac

SEQ ID NO: 267971 - DNA, 30 bp, Artificial Sequence
  Synthetic oligonucleotide
tagatgtcgttggagatcctcttagccaac

SEQ ID NO: 267972 - DNA, 30 bp, Artificial Sequence
  Synthetic oligonucleotide
acgagcgcccgcggggattacagcgccaac

SEQ ID NO: 267973 - DNA, 30 bp, Artificial Sequence
  Synthetic oligonucleotide
tttacggggcgcggaggatggtgcgccaac

SEQ ID NO: 267974 - DNA, 30 bp, Artificial Sequence
  Synthetic oligonucleotide
acacacttccttatgcagtacaaggccaac

SEQ ID NO: 267975 - DNA, 30 bp, Artificial Sequence
  Synthetic oligonucleotide
ggatctggggctcacgctaggtgggccaac

SEQ ID NO: 267976 - DNA, 30 bp, Artificial Sequence
  Synthetic oligonucleotide
gctgtcatacagctcaccaagtctgccaac

SEQ ID NO: 267977 - DNA, 30 bp, Artificial Sequence
  Synthetic oligonucleotide
aggattcagagtaggtagtctgaatccaac

SEQ ID NO: 267978 - DNA, 30 bp, Artificial Sequence
  Synthetic oligonucleotide
tgctgcacttctgcccgtaccatatccaac

SEQ ID NO: 267979 - DNA, 30 bp, Artificial Sequence
  Synthetic oligonucleotide
gtgaatatgcagttcgagaggcattccaac

SEQ ID NO: 267980 - DNA, 30 bp, Artificial Sequence
  Synthetic oligonucleotide
agagcagtaagctcactgacgtattccaac

SEQ ID NO: 267981 - DNA, 30 bp, Artificial Sequence
  Synthetic oligonucleotide
aatccggtgtaggtgctcccgacaagcaac

SEQ ID NO: 267982 - DNA, 30 bp, Artificial Sequence
  Synthetic oligonucleotide
ggaaaggaacgttctcgcggctgcagcaac

SEQ ID NO: 267983 - DNA, 30 bp, Artificial Sequence
  Synthetic oligonucleotide
catatccagcttagctagcaaaagagcaac

SEQ ID NO: 267984 - DNA, 30 bp, Artificial Sequence
  Synthetic oligonucleotide
attggatcagaaaacgttgagaaacgcaac

SEQ ID NO: 267985 - DNA, 30 bp, Artificial Sequence
  Synthetic oligonucleotide
cgtgctcgcgctgtcatgtcgccccgcaac

SEQ ID NO: 267986 - DNA, 30 bp, Artificial Sequence
  Synthetic oligonucleotide
gctggcgcagggcttccaatatcgcgcaac

SEQ ID NO: 267987 - DNA, 30 bp, Artificial Sequence
  Synthetic oligonucleotide
ggtataaaactatgaggtgacaggcgcaac

SEQ ID NO: 267988 - DNA, 30 bp, Artificial Sequence
  Synthetic oligonucleotide
acacggttcgtacgcttacgtagaggcaac

SEQ ID NO: 267989 - DNA, 30 bp, Artificial Sequence
  Synthetic oligonucleotide
ctatctatgagtacatccggccgaggcaac

SEQ ID NO: 267990 - DNA, 30 bp, Artificial Sequence
  Synthetic oligonucleotide
gggcatgtcggagtgactagggtaggcaac

SEQ ID NO: 267991 - DNA, 30 bp, Artificial Sequence
  Synthetic oligonucleotide
tgctcgtcatacgcggcaacttacggcaac

SEQ ID NO: 267992 - DNA, 30 bp, Artificial Sequence
  Synthetic oligonucleotide
aataggagtgcttatgttcgcaccggcaac

SEQ ID NO: 267993 - DNA, 30 bp, Artificial Sequence
  Synthetic oligonucleotide
ttatgttggggttttaaaggggccggcaac

SEQ ID NO: 267994 - DNA, 30 bp, Artificial Sequence
  Synthetic oligonucleotide
agggaggtgatagggacccagggcggcaac

SEQ ID NO: 267995 - DNA, 30 bp, Artificial Sequence
  Synthetic oligonucleotide
agcccctgaggaacataacactctggcaac

SEQ ID NO: 267996 - DNA, 30 bp, Artificial Sequence
  Synthetic oligonucleotide
ggacagtcatatagaagatttacatgcaac

SEQ ID NO: 267997 - DNA, 30 bp, Artificial Sequence
  Synthetic oligonucleotide
aattgcattactgttccgagtccctgcaac

SEQ ID NO: 267998 - DNA, 30 bp, Artificial Sequence
  Synthetic oligonucleotide
cgtgaggactgtcatgtgttttgttgcaac

SEQ ID NO: 267999 - DNA, 30 bp, Artificial Sequence
  Synthetic oligonucleotide
caggccgctcaaagggtctctaaaatcaac

SEQ ID NO: 268000 - DNA, 30 bp, Artificial Sequence
  Synthetic oligonucleotide
ggcaggttgctggcagggcatgcaatcaac

SEQ ID NO: 268001 - DNA, 30 bp, Artificial Sequence
  Synthetic oligonucleotide
aaaaccgagaagcatatatttgtcatcaac

SEQ ID NO: 268002 - DNA, 30 bp, Artificial Sequence
  Synthetic oligonucleotide
catgtgactgcgaattccagcgatatcaac

SEQ ID NO: 268003 - DNA, 30 bp, Artificial Sequence
  Synthetic oligonucleotide
gcatgattcggtccgattgcaagactcaac

SEQ ID NO: 268004 - DNA, 30 bp, Artificial Sequence
  Synthetic oligonucleotide
aaggaacttcctctaagttgatgactcaac

SEQ ID NO: 268005 - DNA, 30 bp, Artificial Sequence
  Synthetic oligonucleotide
atattgagggcacgttcaacgaccgtcaac

SEQ ID NO: 268006 - DNA, 30 bp, Artificial Sequence
  Synthetic oligonucleotide
gccaggcgagagagtttcccctaggtcaac

SEQ ID NO: 268007 - DNA, 30 bp, Artificial Sequence
  Synthetic oligonucleotide
ctatatctacgcttcctggccccggtcaac

SEQ ID NO: 268008 - DNA, 30 bp, Artificial Sequence
  Synthetic oligonucleotide
tgggcgatggttgtcagtcccagggtcaac

SEQ ID NO: 268009 - DNA, 30 bp, Artificial Sequence
  Synthetic oligonucleotide
ttggacaacggatgttgcccgatggtcaac

SEQ ID NO: 268010 - DNA, 30 bp, Artificial Sequence
  Synthetic oligonucleotide
gaggagacggcttataactggaatgtcaac

SEQ ID NO: 268011 - DNA, 31 bp, Artificial Sequence
  Synthetic oligonucleotide
gaaagacccattcatccatgagcatgtcaac

SEQ ID NO: 268012 - DNA, 30 bp, Artificial Sequence
  Synthetic oligonucleotide
caaggatacaaatacgtcatcatattcaac

SEQ ID NO: 268013 - DNA, 30 bp, Artificial Sequence
  Synthetic oligonucleotide
gccatctacaacgttactagactattcaac

SEQ ID NO: 268014 - DNA, 30 bp, Artificial Sequence
  Synthetic oligonucleotide
agctcgacccaaccaggtagacacttcaac

SEQ ID NO: 268015 - DNA, 30 bp, Artificial Sequence
  Synthetic oligonucleotide
acgagtgtttattgtcttctcatcttcaac

SEQ ID NO: 268016 - DNA, 30 bp, Artificial Sequence
  Synthetic oligonucleotide
cgtgggaaatacaatcccggactcttcaac

SEQ ID NO: 268017 - DNA, 30 bp, Artificial Sequence
  Synthetic oligonucleotide
agctacatactttccccgggttcaaagaac

SEQ ID NO: 268018 - DNA, 30 bp, Artificial Sequence
  Synthetic oligonucleotide
gtccccgattgtaaccttttcgacaagaac

SEQ ID NO: 268019 - DNA, 30 bp, Artificial Sequence
  Synthetic oligonucleotide
gaggtagatgaaagtgttacttccaagaac

SEQ ID NO: 268020 - DNA, 30 bp, Artificial Sequence
  Synthetic oligonucleotide
actggtgcagggcggtatcgcgataagaac

SEQ ID NO: 268021 - DNA, 30 bp, Artificial Sequence
  Synthetic oligonucleotide
taagtccagagcgaaatttccgatcagaac

SEQ ID NO: 268022 - DNA, 30 bp, Artificial Sequence
  Synthetic oligonucleotide
gactagctaggttcgaacattgatcagaac

SEQ ID NO: 268023 - DNA, 30 bp, Artificial Sequence
  Synthetic oligonucleotide
ccttacgttccaaatttatctggagagaac

SEQ ID NO: 268024 - DNA, 30 bp, Artificial Sequence
  Synthetic oligonucleotide
aattgcatagctgtggtagacaacgagaac

SEQ ID NO: 268025 - DNA, 30 bp, Artificial Sequence
  Synthetic oligonucleotide
tgtctcggccctctgtgcagtcgcgagaac

SEQ ID NO: 268026 - DNA, 30 bp, Artificial Sequence
  Synthetic oligonucleotide
ggtatgactctccgtgctgaacttgagaac

SEQ ID NO: 268027 - DNA, 30 bp, Artificial Sequence
  Synthetic oligonucleotide
catctaaatgctaatacgtcatgatagaac

SEQ ID NO: 268028 - DNA, 30 bp, Artificial Sequence
  Synthetic oligonucleotide
acattcggtgcccttaacacactatagaac

SEQ ID NO: 268029 - DNA, 30 bp, Artificial Sequence
  Synthetic oligonucleotide
accacgtacggaatctcgaccctatagaac

SEQ ID NO: 268030 - DNA, 30 bp, Artificial Sequence
  Synthetic oligonucleotide
actttaccgggttagagacataagtagaac

SEQ ID NO: 268031 - DNA, 29 bp, Artificial Sequence
  Synthetic oligonucleotide
ccttatgccttgcctaagggtaaacgaac

SEQ ID NO: 268032 - DNA, 30 bp, Artificial Sequence
  Synthetic oligonucleotide
cgcacccggagcattaccattgcaacgaac

SEQ ID NO: 268033 - DNA, 30 bp, Artificial Sequence
  Synthetic oligonucleotide
tagttacgaaagattggctacaccacgaac

SEQ ID NO: 268034 - DNA, 30 bp, Artificial Sequence
  Synthetic oligonucleotide
ggtaggatttttgaaaggctggtcacgaac

SEQ ID NO: 268035 - DNA, 30 bp, Artificial Sequence
  Synthetic oligonucleotide
tagacccactttgaccatgcaaaaccgaac

SEQ ID NO: 268036 - DNA, 30 bp, Artificial Sequence
  Synthetic oligonucleotide
cggtgaaccctcgggagagtatgaccgaac

SEQ ID NO: 268037 - DNA, 30 bp, Artificial Sequence
  Synthetic oligonucleotide
cactcccacctataggaggttttaccgaac

SEQ ID NO: 268038 - DNA, 30 bp, Artificial Sequence
  Synthetic oligonucleotide
aagccctaatgtagaaatggtgtcccgaac

SEQ ID NO: 268039 - DNA, 30 bp, Artificial Sequence
  Synthetic oligonucleotide
gtgtttcataacctcgaggcccggccgaac

SEQ ID NO: 268040 - DNA, 30 bp, Artificial Sequence
  Synthetic oligonucleotide
ggttagtgcatttattgggtatggccgaac

SEQ ID NO: 268041 - DNA, 30 bp, Artificial Sequence
  Synthetic oligonucleotide
aaagaaaagacccttgtgatgtctccgaac

SEQ ID NO: 268042 - DNA, 30 bp, Artificial Sequence
  Synthetic oligonucleotide
ctaggaacttaacggggatttattccgaac

SEQ ID NO: 268043 - DNA, 30 bp, Artificial Sequence
  Synthetic oligonucleotide
ttgatcacgaggattgttctagtagcgaac

SEQ ID NO: 268044 - DNA, 30 bp, Artificial Sequence
  Synthetic oligonucleotide
tacaaacgtgtatcgccatactacgcgaac

SEQ ID NO: 268045 - DNA, 30 bp, Artificial Sequence
  Synthetic oligonucleotide
tccatcagacgtttagcttctgtcgcgaac

SEQ ID NO: 268046 - DNA, 30 bp, Artificial Sequence
  Synthetic oligonucleotide
agaaatgtcatggtctgtactagggcgaac

SEQ ID NO: 268047 - DNA, 30 bp, Artificial Sequence
  Synthetic oligonucleotide
aacctacagattctagatcagggggcgaac

SEQ ID NO: 268048 - DNA, 30 bp, Artificial Sequence
  Synthetic oligonucleotide
catgagcagaggatagtttcacgatcgaac

SEQ ID NO: 268049 - DNA, 30 bp, Artificial Sequence
  Synthetic oligonucleotide
aaaagacactttattgcggtcgggtcgaac

SEQ ID NO: 268050 - DNA, 30 bp, Artificial Sequence
  Synthetic oligonucleotide
taatatgtgacacgcccactaatgtcgaac

SEQ ID NO: 268051 - DNA, 30 bp, Artificial Sequence
  Synthetic oligonucleotide
cgttacatagcggttttccaggattcgaac

SEQ ID NO: 268052 - DNA, 30 bp, Artificial Sequence
  Synthetic oligonucleotide
tgataattggcttttcagttcggttcgaac

SEQ ID NO: 268053 - DNA, 30 bp, Artificial Sequence
  Synthetic oligonucleotide
tgaggttgaccgaccccggggatttcgaac

SEQ ID NO: 268054 - DNA, 30 bp, Artificial Sequence
  Synthetic oligonucleotide
ctcatcagtacgttacactcaaacaggaac

SEQ ID NO: 268055 - DNA, 30 bp, Artificial Sequence
  Synthetic oligonucleotide
actgggtgacctagataatccaggaggaac

SEQ ID NO: 268056 - DNA, 30 bp, Artificial Sequence
  Synthetic oligonucleotide
tcctcggcagccgacctattatggaggaac

SEQ ID NO: 268057 - DNA, 30 bp, Artificial Sequence
  Synthetic oligonucleotide
ggtccgcgctattggatcttagctaggaac

SEQ ID NO: 268058 - DNA, 30 bp, Artificial Sequence
  Synthetic oligonucleotide
gtgtacattctccggccggcctgtaggaac

SEQ ID NO: 268059 - DNA, 30 bp, Artificial Sequence
  Synthetic oligonucleotide
tacggcggccagccccggaactcacggaac

SEQ ID NO: 268060 - DNA, 30 bp, Artificial Sequence
  Synthetic oligonucleotide
gtgtgtgatgggtctagtttgatacggaac

SEQ ID NO: 268061 - DNA, 30 bp, Artificial Sequence
  Synthetic oligonucleotide
cgtcaaggaccggcttttaatgaccggaac

SEQ ID NO: 268062 - DNA, 30 bp, Artificial Sequence
  Synthetic oligonucleotide
gaaacacttgtataagcctaagtgcggaac

SEQ ID NO: 268063 - DNA, 30 bp, Artificial Sequence
  Synthetic oligonucleotide
acttgagagagcagttaatcacatcggaac

SEQ ID NO: 268064 - DNA, 30 bp, Artificial Sequence
  Synthetic oligonucleotide
gaggtaacagaagcacgcaacacagggaac

SEQ ID NO: 268065 - DNA, 30 bp, Artificial Sequence
  Synthetic oligonucleotide
tcagaccctaactagagaattggagggaac

SEQ ID NO: 268066 - DNA, 30 bp, Artificial Sequence
  Synthetic oligonucleotide
cctttattcagctatagaccctctgggaac

SEQ ID NO: 268067 - DNA, 30 bp, Artificial Sequence
  Synthetic oligonucleotide
tagcacagatgactattacgaaaatggaac

SEQ ID NO: 268068 - DNA, 30 bp, Artificial Sequence
  Synthetic oligonucleotide
ttaacgggtggctagtgagccccctggaac

SEQ ID NO: 268069 - DNA, 30 bp, Artificial Sequence
  Synthetic oligonucleotide
ctcatactgaaggaccacagtagctggaac

SEQ ID NO: 268070 - DNA, 30 bp, Artificial Sequence
  Synthetic oligonucleotide
cagagtgtgccctctgtgatgctctggaac

SEQ ID NO: 268071 - DNA, 30 bp, Artificial Sequence
  Synthetic oligonucleotide
tgctaaaggtcatattgttcgccgtggaac

SEQ ID NO: 268072 - DNA, 30 bp, Artificial Sequence
  Synthetic oligonucleotide
caccccgaataccagacgggtgcgtggaac

SEQ ID NO: 268073 - DNA, 30 bp, Artificial Sequence
  Synthetic oligonucleotide
cgcgatgagagtgtggatctcttgtggaac

SEQ ID NO: 268074 - DNA, 30 bp, Artificial Sequence
  Synthetic oligonucleotide
cgcaatcgggctttatcaaatcattggaac

SEQ ID NO: 268075 - DNA, 30 bp, Artificial Sequence
  Synthetic oligonucleotide
gtgacgcccgacaggtactattattggaac

SEQ ID NO: 268076 - DNA, 30 bp, Artificial Sequence
  Synthetic oligonucleotide
acggttgagggggtgacatgcatttggaac

SEQ ID NO: 268077 - DNA, 31 bp, Artificial Sequence
  Synthetic oligonucleotide
actgacttaagcgtgaaatcttaccatgaac

SEQ ID NO: 268078 - DNA, 30 bp, Artificial Sequence
  Synthetic oligonucleotide
gatagttataagaaaggtggccccatgaac

SEQ ID NO: 268079 - DNA, 30 bp, Artificial Sequence
  Synthetic oligonucleotide
atatgcaccatgtataacacaacgatgaac

SEQ ID NO: 268080 - DNA, 28 bp, Artificial Sequence
  Synthetic oligonucleotide
tattcatgcatgggtagagttgatgaac

SEQ ID NO: 268081 - DNA, 30 bp, Artificial Sequence
  Synthetic oligonucleotide
agtctattacttagtcgcgaggatatgaac

SEQ ID NO: 268082 - DNA, 30 bp, Artificial Sequence
  Synthetic oligonucleotide
cgtataggcgaagtatacttcagactgaac

SEQ ID NO: 268083 - DNA, 30 bp, Artificial Sequence
  Synthetic oligonucleotide
ctgcaggggctgaacctaacctcgctgaac

SEQ ID NO: 268084 - DNA, 30 bp, Artificial Sequence
  Synthetic oligonucleotide
taagaggaagtgccgcgtgtagttctgaac

SEQ ID NO: 268085 - DNA, 30 bp, Artificial Sequence
  Synthetic oligonucleotide
gtcggggaagacctgtgccctagagtgaac

SEQ ID NO: 268086 - DNA, 30 bp, Artificial Sequence
  Synthetic oligonucleotide
gcttggactccccattcttggtaggtgaac

SEQ ID NO: 268087 - DNA, 30 bp, Artificial Sequence
  Synthetic oligonucleotide
gtagaatttggtggcgtaagtatggtgaac

SEQ ID NO: 268088 - DNA, 30 bp, Artificial Sequence
  Synthetic oligonucleotide
cgaccataggctacccagattattgtgaac

SEQ ID NO: 268089 - DNA, 30 bp, Artificial Sequence
  Synthetic oligonucleotide
gggcgagtccacacggaccggtaattgaac

SEQ ID NO: 268090 - DNA, 30 bp, Artificial Sequence
  Synthetic oligonucleotide
cgtgttcaatcgggaattgggacattgaac

SEQ ID NO: 268091 - DNA, 30 bp, Artificial Sequence
  Synthetic oligonucleotide
ttggacaaacggaaaccggctcgattgaac

SEQ ID NO: 268092 - DNA, 30 bp, Artificial Sequence
  Synthetic oligonucleotide
ttccccgcaaatgacaatgactgattgaac

SEQ ID NO: 268093 - DNA, 30 bp, Artificial Sequence
  Synthetic oligonucleotide
actaggtaagacaataagacatagttgaac

SEQ ID NO: 268094 - DNA, 30 bp, Artificial Sequence
  Synthetic oligonucleotide
ggacttggcatatgaaactctggtttgaac

SEQ ID NO: 268095 - DNA, 30 bp, Artificial Sequence
  Synthetic oligonucleotide
ttcagaactttttgccacaagtgtttgaac

SEQ ID NO: 268096 - DNA, 30 bp, Artificial Sequence
  Synthetic oligonucleotide
atcccacacaaattaatgccgaacaataac

SEQ ID NO: 268097 - DNA, 30 bp, Artificial Sequence
  Synthetic oligonucleotide
gaccagtactcgaaaatagacttgaataac

SEQ ID NO: 268098 - DNA, 30 bp, Artificial Sequence
  Synthetic oligonucleotide
cgtctgtaccccaggtctcgggcacataac

SEQ ID NO: 268099 - DNA, 30 bp, Artificial Sequence
  Synthetic oligonucleotide
ccggtgctataatattaacaaacccataac

SEQ ID NO: 268100 - DNA, 30 bp, Artificial Sequence
  Synthetic oligonucleotide
cggtaatatctgtcagttattgtccataac

SEQ ID NO: 268101 - DNA, 31 bp, Artificial Sequence
  Synthetic oligonucleotide
tccacgattgagcaggatcggctctcataac

SEQ ID NO: 268102 - DNA, 30 bp, Artificial Sequence
  Synthetic oligonucleotide
tgatagcgtttgcaattcatgtctcataac

SEQ ID NO: 268103 - DNA, 30 bp, Artificial Sequence
  Synthetic oligonucleotide
catgaaaaatgcgtttacgataaagataac

SEQ ID NO: 268104 - DNA, 30 bp, Artificial Sequence
  Synthetic oligonucleotide
cagaacctaccacggtccgaatcagataac

SEQ ID NO: 268105 - DNA, 30 bp, Artificial Sequence
  Synthetic oligonucleotide
catgacaaaaatcggacctcttacgataac

SEQ ID NO: 268106 - DNA, 30 bp, Artificial Sequence
  Synthetic oligonucleotide
agtcaaccggacatatagtgaaaggataac

SEQ ID NO: 268107 - DNA, 30 bp, Artificial Sequence
  Synthetic oligonucleotide
gttactcgggagtactgtctagatgataac

SEQ ID NO: 268108 - DNA, 30 bp, Artificial Sequence
  Synthetic oligonucleotide
ccgggatgttcggagggtggggaatataac

SEQ ID NO: 268109 - DNA, 30 bp, Artificial Sequence
  Synthetic oligonucleotide
attcaggaaagctagctgaacaactataac

SEQ ID NO: 268110 - DNA, 30 bp, Artificial Sequence
  Synthetic oligonucleotide
attatcactaaactcacaagtgactataac

SEQ ID NO: 268111 - DNA, 29 bp, Artificial Sequence
  Synthetic oligonucleotide
ggcctgcttgatggctatggacgtataac

SEQ ID NO: 268112 - DNA, 30 bp, Artificial Sequence
  Synthetic oligonucleotide
tattggtctgccggtggagggccgtataac

SEQ ID NO: 268113 - DNA, 30 bp, Artificial Sequence
  Synthetic oligonucleotide
tacttaatttctcaggcgtgtccaactaac

SEQ ID NO: 268114 - DNA, 30 bp, Artificial Sequence
  Synthetic oligonucleotide
tgaatgtgaacccctggcataggaactaac

SEQ ID NO: 268115 - DNA, 30 bp, Artificial Sequence
  Synthetic oligonucleotide
aatgacggattaatatggagaagcactaac

SEQ ID NO: 268116 - DNA, 30 bp, Artificial Sequence
  Synthetic oligonucleotide
gggtaatctgccgatcaccggttcactaac

SEQ ID NO: 268117 - DNA, 30 bp, Artificial Sequence
  Synthetic oligonucleotide
atccgcttaaaggtcatggcgaggactaac

SEQ ID NO: 268118 - DNA, 30 bp, Artificial Sequence
  Synthetic oligonucleotide
aatccgagctggttgtcggagatgactaac

SEQ ID NO: 268119 - DNA, 30 bp, Artificial Sequence
  Synthetic oligonucleotide
actagtccgcgcgaaacgttgatgactaac

SEQ ID NO: 268120 - DNA, 30 bp, Artificial Sequence
  Synthetic oligonucleotide
tacctccacaagtagttataatatactaac

SEQ ID NO: 268121 - DNA, 30 bp, Artificial Sequence
  Synthetic oligonucleotide
catgaggctaaatcttatagtgtccctaac

SEQ ID NO: 268122 - DNA, 30 bp, Artificial Sequence
  Synthetic oligonucleotide
gcaatccccctaaatcgggaccagcctaac

SEQ ID NO: 268123 - DNA, 30 bp, Artificial Sequence
  Synthetic oligonucleotide
tctcacgtcaccttcatttcactgcctaac

SEQ ID NO: 268124 - DNA, 30 bp, Artificial Sequence
  Synthetic oligonucleotide
ctgcacaacaaacatagtagcgacgctaac

SEQ ID NO: 268125 - DNA, 30 bp, Artificial Sequence
  Synthetic oligonucleotide
ggatctcagacgcttggcctcagggctaac

SEQ ID NO: 268126 - DNA, 30 bp, Artificial Sequence
  Synthetic oligonucleotide
acaacggttttggtcttgggctgggctaac

SEQ ID NO: 268127 - DNA, 30 bp, Artificial Sequence
  Synthetic oligonucleotide
aacaaatgcgggtatgaatgggaatctaac

SEQ ID NO: 268128 - DNA, 30 bp, Artificial Sequence
  Synthetic oligonucleotide
accattcctactcccccgatcttatctaac

SEQ ID NO: 268129 - DNA, 30 bp, Artificial Sequence
  Synthetic oligonucleotide
cgcaaggttctctgcacatcagactctaac

SEQ ID NO: 268130 - DNA, 30 bp, Artificial Sequence
  Synthetic oligonucleotide
gtcaacggccggtgtcgattagcctctaac

SEQ ID NO: 268131 - DNA, 30 bp, Artificial Sequence
  Synthetic oligonucleotide
attgacgcttaaggtggatgtggctctaac

SEQ ID NO: 268132 - DNA, 30 bp, Artificial Sequence
  Synthetic oligonucleotide
gagattcacagggggggcgctgtctctaac

SEQ ID NO: 268133 - DNA, 30 bp, Artificial Sequence
  Synthetic oligonucleotide
caaaccatatcttagacgtgaaattctaac

SEQ ID NO: 268134 - DNA, 30 bp, Artificial Sequence
  Synthetic oligonucleotide
ttcgaatataagtagtgtagacattctaac

SEQ ID NO: 268135 - DNA, 30 bp, Artificial Sequence
  Synthetic oligonucleotide
tccaggatggtggccagcagtcattctaac

SEQ ID NO: 268136 - DNA, 30 bp, Artificial Sequence
  Synthetic oligonucleotide
caagtccaacacaattttataatttctaac

SEQ ID NO: 268137 - DNA, 30 bp, Artificial Sequence
  Synthetic oligonucleotide
tgcaattggtgtatcatctaacaaagtaac

SEQ ID NO: 268138 - DNA, 30 bp, Artificial Sequence
  Synthetic oligonucleotide
ggtataccaatgcctcttaaacgaagtaac

SEQ ID NO: 268139 - DNA, 30 bp, Artificial Sequence
  Synthetic oligonucleotide
cttaaatatgaagctgaggcacccagtaac

SEQ ID NO: 268140 - DNA, 30 bp, Artificial Sequence
  Synthetic oligonucleotide
ttgcaacctttatgatagtctgccagtaac

SEQ ID NO: 268141 - DNA, 30 bp, Artificial Sequence
  Synthetic oligonucleotide
actggtcaatctaatgaacggatcagtaac

SEQ ID NO: 268142 - DNA, 30 bp, Artificial Sequence
  Synthetic oligonucleotide
gcttcgtgcatagaaactaaagcacgtaac

SEQ ID NO: 268143 - DNA, 30 bp, Artificial Sequence
  Synthetic oligonucleotide
tatacgtctcgaaggccgacgaagcgtaac

SEQ ID NO: 268144 - DNA, 30 bp, Artificial Sequence
  Synthetic oligonucleotide
acactgttccgtgctgttggctcgcgtaac

SEQ ID NO: 268145 - DNA, 30 bp, Artificial Sequence
  Synthetic oligonucleotide
taattccgggtcaacaatatttcgcgtaac

SEQ ID NO: 268146 - DNA, 30 bp, Artificial Sequence
  Synthetic oligonucleotide
ttatgtaataaagagtaccatactcgtaac

SEQ ID NO: 268147 - DNA, 30 bp, Artificial Sequence
  Synthetic oligonucleotide
ataaacagcaaaaatgttgacgctcgtaac

SEQ ID NO: 268148 - DNA, 30 bp, Artificial Sequence
  Synthetic oligonucleotide
tgctcagtaagggagccctagattcgtaac

SEQ ID NO: 268149 - DNA, 30 bp, Artificial Sequence
  Synthetic oligonucleotide
gacacgattatcataggaagcacaggtaac

SEQ ID NO: 268150 - DNA, 30 bp, Artificial Sequence
  Synthetic oligonucleotide
gctgaaagtagttatcgtttatcaggtaac

SEQ ID NO: 268151 - DNA, 30 bp, Artificial Sequence
  Synthetic oligonucleotide
tacccaaacacggtgattcgccgaggtaac

SEQ ID NO: 268152 - DNA, 30 bp, Artificial Sequence
  Synthetic oligonucleotide
ttatatgaaggtaccgatgactacggtaac

SEQ ID NO: 268153 - DNA, 30 bp, Artificial Sequence
  Synthetic oligonucleotide
tccaattagatgtgtccggaccagggtaac

SEQ ID NO: 268154 - DNA, 30 bp, Artificial Sequence
  Synthetic oligonucleotide
ccgttggtcgttgcgggctggctgggtaac

SEQ ID NO: 268155 - DNA, 30 bp, Artificial Sequence
  Synthetic oligonucleotide
acctgttatgtaataacgttagttggtaac

SEQ ID NO: 268156 - DNA, 30 bp, Artificial Sequence
  Synthetic oligonucleotide
ccgggagggatgcgtctacgttttggtaac

SEQ ID NO: 268157 - DNA, 30 bp, Artificial Sequence
  Synthetic oligonucleotide
agtgaaacgaaggtgttgtttaaatgtaac

SEQ ID NO: 268158 - DNA, 30 bp, Artificial Sequence
  Synthetic oligonucleotide
aatggtccattactattagttccatgtaac

SEQ ID NO: 268159 - DNA, 30 bp, Artificial Sequence
  Synthetic oligonucleotide
ctgggctcaagtttttagaagatatgtaac

SEQ ID NO: 268160 - DNA, 30 bp, Artificial Sequence
  Synthetic oligonucleotide
cggtatactacgcaatctgaaaactgtaac

SEQ ID NO: 268161 - DNA, 30 bp, Artificial Sequence
  Synthetic oligonucleotide
tcgacggtcccagtgatcgttgcctgtaac

SEQ ID NO: 268162 - DNA, 30 bp, Artificial Sequence
  Synthetic oligonucleotide
gctggagtgatatcaccgcataagtgtaac

SEQ ID NO: 268163 - DNA, 30 bp, Artificial Sequence
  Synthetic oligonucleotide
tccattccccatccctgtgagcagtgtaac

SEQ ID NO: 268164 - DNA, 30 bp, Artificial Sequence
  Synthetic oligonucleotide
gagatcagtgacctccgctaaagaattaac

SEQ ID NO: 268165 - DNA, 30 bp, Artificial Sequence
  Synthetic oligonucleotide
gctcgaagtgattgtactttgatcattaac

SEQ ID NO: 268166 - DNA, 30 bp, Artificial Sequence
  Synthetic oligonucleotide
aaaggaagacactggagatataagattaac

SEQ ID NO: 268167 - DNA, 30 bp, Artificial Sequence
  Synthetic oligonucleotide
agtggggatttatgagcgggatcgattaac

SEQ ID NO: 268168 - DNA, 30 bp, Artificial Sequence
  Synthetic oligonucleotide
cagcctcagacgcacctgtgacgccttaac

SEQ ID NO: 268169 - DNA, 30 bp, Artificial Sequence
  Synthetic oligonucleotide
acccacgagtacacacaatttgtccttaac

SEQ ID NO: 268170 - DNA, 30 bp, Artificial Sequence
  Synthetic oligonucleotide
attgacaggagtattgttggagagcttaac

SEQ ID NO: 268171 - DNA, 30 bp, Artificial Sequence
  Synthetic oligonucleotide
ggcaattctatgtcacatgggaaagttaac

SEQ ID NO: 268172 - DNA, 30 bp, Artificial Sequence
  Synthetic oligonucleotide
gagaccctgggataagtgggacaagttaac

SEQ ID NO: 268173 - DNA, 30 bp, Artificial Sequence
  Synthetic oligonucleotide
aaagaatcgacgtataatcgatccgttaac

SEQ ID NO: 268174 - DNA, 30 bp, Artificial Sequence
  Synthetic oligonucleotide
ttgggtgtagagagttcacataatgttaac

SEQ ID NO: 268175 - DNA, 30 bp, Artificial Sequence
  Synthetic oligonucleotide
gacagtatctaaatgactacatttgttaac

SEQ ID NO: 268176 - DNA, 30 bp, Artificial Sequence
  Synthetic oligonucleotide
ttggtgagtaagcccgttactgtatttaac

SEQ ID NO: 268177 - DNA, 30 bp, Artificial Sequence
  Synthetic oligonucleotide
aagaaaaagcgccatagtatgtgctttaac

SEQ ID NO: 268178 - DNA, 30 bp, Artificial Sequence
  Synthetic oligonucleotide
gcagccccagatcattgtgtaccgtttaac

SEQ ID NO: 268179 - DNA, 30 bp, Artificial Sequence
  Synthetic oligonucleotide
caattgtgaatggaacaataaaggtttaac

SEQ ID NO: 268180 - DNA, 30 bp, Artificial Sequence
  Synthetic oligonucleotide
cgccggggattttgggatcggaattttaac

SEQ ID NO: 268181 - DNA, 30 bp, Artificial Sequence
  Synthetic oligonucleotide
ctcggagggagactcctcatagattttaac

SEQ ID NO: 268182 - DNA, 30 bp, Artificial Sequence
  Synthetic oligonucleotide
cagaccgacgatatgcaaagatattttaac

SEQ ID NO: 268183 - DNA, 30 bp, Artificial Sequence
  Synthetic oligonucleotide
cgcaaaaagaaacgagaatattcttttaac

SEQ ID NO: 268184 - DNA, 30 bp, Artificial Sequence
  Synthetic oligonucleotide
ctagagccttacgatcgacccgtttttaac

SEQ ID NO: 268185 - DNA, 30 bp, Artificial Sequence
  Synthetic oligonucleotide
cggctatctagatatctgactggcaaacac

SEQ ID NO: 268186 - DNA, 30 bp, Artificial Sequence
  Synthetic oligonucleotide
gtatagcagaaaaacgtgggcatcaaacac

SEQ ID NO: 268187 - DNA, 30 bp, Artificial Sequence
  Synthetic oligonucleotide
tatactacaaaaatggggttgtctaaacac

SEQ ID NO: 268188 - DNA, 30 bp, Artificial Sequence
  Synthetic oligonucleotide
tgttggagctatggtaatggttctaaacac

SEQ ID NO: 268189 - DNA, 30 bp, Artificial Sequence
  Synthetic oligonucleotide
cgggatttttgggtgtatgaagcccaacac

SEQ ID NO: 268190 - DNA, 30 bp, Artificial Sequence
  Synthetic oligonucleotide
atttagctacacataaatgtaagccaacac

SEQ ID NO: 268191 - DNA, 30 bp, Artificial Sequence
  Synthetic oligonucleotide
gataccgggacgtataaagtcagccaacac

SEQ ID NO: 268192 - DNA, 30 bp, Artificial Sequence
  Synthetic oligonucleotide
acactgatgtttggctagatagcgcaacac

SEQ ID NO: 268193 - DNA, 30 bp, Artificial Sequence
  Synthetic oligonucleotide
ccatagtacgtaagataggatatgcaacac

SEQ ID NO: 268194 - DNA, 30 bp, Artificial Sequence
  Synthetic oligonucleotide
gggagcatgaagaggataagtactcaacac

SEQ ID NO: 268195 - DNA, 30 bp, Artificial Sequence
  Synthetic oligonucleotide
ttgaggaatgggtagctcttagaagaacac

SEQ ID NO: 268196 - DNA, 30 bp, Artificial Sequence
  Synthetic oligonucleotide
gctcattaataatcacttaaggcagaacac

SEQ ID NO: 268197 - DNA, 30 bp, Artificial Sequence
  Synthetic oligonucleotide
ttgaaaacataaaatcagatacacgaacac

SEQ ID NO: 268198 - DNA, 30 bp, Artificial Sequence
  Synthetic oligonucleotide
gggaacgtagtttcaggcagtgtggaacac

SEQ ID NO: 268199 - DNA, 30 bp, Artificial Sequence
  Synthetic oligonucleotide
gtggagagggttcaacaatttggtgaacac

SEQ ID NO: 268200 - DNA, 30 bp, Artificial Sequence
  Synthetic oligonucleotide
acctgccggattcattgataagcataacac

SEQ ID NO: 268201 - DNA, 30 bp, Artificial Sequence
  Synthetic oligonucleotide
ggcggtgctcgtgggcaggatacgtaacac

SEQ ID NO: 268202 - DNA, 30 bp, Artificial Sequence
  Synthetic oligonucleotide
tggatatctacgcctacagctatttaacac

SEQ ID NO: 268203 - DNA, 30 bp, Artificial Sequence
  Synthetic oligonucleotide
gtgaaaactttcatgttagcattttaacac

SEQ ID NO: 268204 - DNA, 30 bp, Artificial Sequence
  Synthetic oligonucleotide
cccgatgggatgtgacttgagaaaacacac

SEQ ID NO: 268205 - DNA, 30 bp, Artificial Sequence
  Synthetic oligonucleotide
tgcgtcatcacgaatgctaccggaacacac

SEQ ID NO: 268206 - DNA, 30 bp, Artificial Sequence
  Synthetic oligonucleotide
gtaaccgtggatactaggaagttaacacac

SEQ ID NO: 268207 - DNA, 30 bp, Artificial Sequence
  Synthetic oligonucleotide
ctgatcaagttgccaatctatttaacacac

SEQ ID NO: 268208 - DNA, 30 bp, Artificial Sequence
  Synthetic oligonucleotide
cgcctttgcattgtttcggcaagcacacac

SEQ ID NO: 268209 - DNA, 30 bp, Artificial Sequence
  Synthetic oligonucleotide
tatccgggtgtgtagagcgggcgcacacac

SEQ ID NO: 268210 - DNA, 30 bp, Artificial Sequence
  Synthetic oligonucleotide
agccaacgtgcgtgagagtagcatacacac

SEQ ID NO: 268211 - DNA, 30 bp, Artificial Sequence
  Synthetic oligonucleotide
cgggcgtttactacataatatggaccacac

SEQ ID NO: 268212 - DNA, 30 bp, Artificial Sequence
  Synthetic oligonucleotide
gtcataagttagtgtggagagctaccacac

SEQ ID NO: 268213 - DNA, 30 bp, Artificial Sequence
  Synthetic oligonucleotide
agtcaacagacgagcgataatgacccacac

SEQ ID NO: 268214 - DNA, 30 bp, Artificial Sequence
  Synthetic oligonucleotide
agagtctccgtcacgaagaccgggccacac

SEQ ID NO: 268215 - DNA, 30 bp, Artificial Sequence
  Synthetic oligonucleotide
ttcagagaatggtacgtttcgcatccacac

SEQ ID NO: 268216 - DNA, 30 bp, Artificial Sequence
  Synthetic oligonucleotide
atgcccaaagaatgaaatcaatctccacac

SEQ ID NO: 268217 - DNA, 30 bp, Artificial Sequence
  Synthetic oligonucleotide
cgcatcccaagcccgtctgcacttccacac

SEQ ID NO: 268218 - DNA, 30 bp, Artificial Sequence
  Synthetic oligonucleotide
ccgtcttggatgcccaaaaacgttccacac

SEQ ID NO: 268219 - DNA, 30 bp, Artificial Sequence
  Synthetic oligonucleotide
tatatttgattgcgagtgcatacagcacac

SEQ ID NO: 268220 - DNA, 30 bp, Artificial Sequence
  Synthetic oligonucleotide
tagaataggcgatctttctccggggcacac

SEQ ID NO: 268221 - DNA, 30 bp, Artificial Sequence
  Synthetic oligonucleotide
gattaggagttgggccaaatcattgcacac

SEQ ID NO: 268222 - DNA, 30 bp, Artificial Sequence
  Synthetic oligonucleotide
gtgctgacagaataggtcataagatcacac

SEQ ID NO: 268223 - DNA, 30 bp, Artificial Sequence
  Synthetic oligonucleotide
attatcagcggccccaaatggagatcacac

SEQ ID NO: 268224 - DNA, 30 bp, Artificial Sequence
  Synthetic oligonucleotide
taagcgtgtgttactttcaaggcctcacac

SEQ ID NO: 268225 - DNA, 30 bp, Artificial Sequence
  Synthetic oligonucleotide
tggggagcgtctcccccggacagctcacac

SEQ ID NO: 268226 - DNA, 30 bp, Artificial Sequence
  Synthetic oligonucleotide
accccctggagtccaaacttggagtcacac

SEQ ID NO: 268227 - DNA, 30 bp, Artificial Sequence
  Synthetic oligonucleotide
tcgtgatcgatctacgagtaagtgtcacac

SEQ ID NO: 268228 - DNA, 30 bp, Artificial Sequence
  Synthetic oligonucleotide
ggccgcgatatagaccgggtcctttcacac

SEQ ID NO: 268229 - DNA, 30 bp, Artificial Sequence
  Synthetic oligonucleotide
tgatgtgtctatactagcaccggaagacac

SEQ ID NO: 268230 - DNA, 30 bp, Artificial Sequence
  Synthetic oligonucleotide
gtgtatacctcgataattcaaatgagacac

SEQ ID NO: 268231 - DNA, 30 bp, Artificial Sequence
  Synthetic oligonucleotide
gtttcctgaaatgtcatgtagaatagacac

SEQ ID NO: 268232 - DNA, 30 bp, Artificial Sequence
  Synthetic oligonucleotide
ccttgatatggggtccaggagggtagacac

SEQ ID NO: 268233 - DNA, 30 bp, Artificial Sequence
  Synthetic oligonucleotide
aaagccggcgaaccggcgagagttagacac

SEQ ID NO: 268234 - DNA, 30 bp, Artificial Sequence
  Synthetic oligonucleotide
gatgagggctgatgcaggggagttagacac

SEQ ID NO: 268235 - DNA, 30 bp, Artificial Sequence
  Synthetic oligonucleotide
cttgtgactttggaacgtcacttccgacac

SEQ ID NO: 268236 - DNA, 30 bp, Artificial Sequence
  Synthetic oligonucleotide
agcttgagtatgatgcccggccggcgacac

SEQ ID NO: 268237 - DNA, 30 bp, Artificial Sequence
  Synthetic oligonucleotide
ggaagtcaccggctcggatctgttcgacac

SEQ ID NO: 268238 - DNA, 30 bp, Artificial Sequence
  Synthetic oligonucleotide
cagggaaacagttctggttaacgcggacac

SEQ ID NO: 268239 - DNA, 30 bp, Artificial Sequence
  Synthetic oligonucleotide
gcctcatcctccagtgtaatccgcggacac

SEQ ID NO: 268240 - DNA, 30 bp, Artificial Sequence
  Synthetic oligonucleotide
gcggtcagcgatgaggtaagcggtggacac

SEQ ID NO: 268241 - DNA, 30 bp, Artificial Sequence
  Synthetic oligonucleotide
gaagcggacggcgctccacgggcatgacac

SEQ ID NO: 268242 - DNA, 30 bp, Artificial Sequence
  Synthetic oligonucleotide
gaggcgacggactaggggtgccgatgacac

SEQ ID NO: 268243 - DNA, 30 bp, Artificial Sequence
  Synthetic oligonucleotide
gtgaggtcaacggattctgggtactgacac

SEQ ID NO: 268244 - DNA, 30 bp, Artificial Sequence
  Synthetic oligonucleotide
cgtggtagacagcttgagtgttcttgacac

SEQ ID NO: 268245 - DNA, 30 bp, Artificial Sequence
  Synthetic oligonucleotide
gcgatggctggcataaataggtgttgacac

SEQ ID NO: 268246 - DNA, 30 bp, Artificial Sequence
  Synthetic oligonucleotide
gcaaccagtaagcagaactggttaatacac

SEQ ID NO: 268247 - DNA, 30 bp, Artificial Sequence
  Synthetic oligonucleotide
catggcatgcggggagttacgtacatacac

SEQ ID NO: 268248 - DNA, 30 bp, Artificial Sequence
  Synthetic oligonucleotide
tagcattgcttcggcatagatgagatacac

SEQ ID NO: 268249 - DNA, 30 bp, Artificial Sequence
  Synthetic oligonucleotide
cagtagcggtgtctcgcggtcacgatacac

SEQ ID NO: 268250 - DNA, 30 bp, Artificial Sequence
  Synthetic oligonucleotide
ttcgaattttcaaaccttagagagctacac

SEQ ID NO: 268251 - DNA, 30 bp, Artificial Sequence
  Synthetic oligonucleotide
agtaataaggatggtcttctcacgctacac

SEQ ID NO: 268252 - DNA, 30 bp, Artificial Sequence
  Synthetic oligonucleotide
ctggttaggcccccgacaacaaggctacac

SEQ ID NO: 268253 - DNA, 30 bp, Artificial Sequence
  Synthetic oligonucleotide
gggtgccccttacatgaagctagagtacac

SEQ ID NO: 268254 - DNA, 30 bp, Artificial Sequence
  Synthetic oligonucleotide
caaggaaccattttgtttgagtgagtacac

SEQ ID NO: 268255 - DNA, 30 bp, Artificial Sequence
  Synthetic oligonucleotide
cggttggagccagacaccgcttacgtacac

SEQ ID NO: 268256 - DNA, 30 bp, Artificial Sequence
  Synthetic oligonucleotide
ggtacatgctacgacaagtggcaggtacac

SEQ ID NO: 268257 - DNA, 30 bp, Artificial Sequence
  Synthetic oligonucleotide
cctcacgtcaattagggccaaatggtacac

SEQ ID NO: 268258 - DNA, 30 bp, Artificial Sequence
  Synthetic oligonucleotide
acccataatgcggtgtttgctatggtacac

SEQ ID NO: 268259 - DNA, 30 bp, Artificial Sequence
  Synthetic oligonucleotide
agttcctgtttacaaagtcacactgtacac

SEQ ID NO: 268260 - DNA, 30 bp, Artificial Sequence
  Synthetic oligonucleotide
atttggacgaggtacgagcgttttgtacac

SEQ ID NO: 268261 - DNA, 30 bp, Artificial Sequence
  Synthetic oligonucleotide
agctatttgtagcatcaatgtcaattacac

SEQ ID NO: 268262 - DNA, 30 bp, Artificial Sequence
  Synthetic oligonucleotide
catgctgccggtcacttattcggattacac

SEQ ID NO: 268263 - DNA, 30 bp, Artificial Sequence
  Synthetic oligonucleotide
gaataggcgaaaagcaatgatggattacac

SEQ ID NO: 268264 - DNA, 30 bp, Artificial Sequence
  Synthetic oligonucleotide
ggagtccattggtgcctacgtcacttacac

SEQ ID NO: 268265 - DNA, 30 bp, Artificial Sequence
  Synthetic oligonucleotide
gaccgacctggaatcaagagactgttacac

SEQ ID NO: 268266 - DNA, 30 bp, Artificial Sequence
  Synthetic oligonucleotide
catcttccgcatccctatgtaaatttacac

SEQ ID NO: 268267 - DNA, 30 bp, Artificial Sequence
  Synthetic oligonucleotide
aacactagcacctatactcgcgctttacac

SEQ ID NO: 268268 - DNA, 30 bp, Artificial Sequence
  Synthetic oligonucleotide
tctgtgggcggcagctccgaaattttacac

SEQ ID NO: 268269 - DNA, 30 bp, Artificial Sequence
  Synthetic oligonucleotide
aagctgcggcttctcaccgtggttttacac

SEQ ID NO: 268270 - DNA, 30 bp, Artificial Sequence
  Synthetic oligonucleotide
cacgcaggggaacaacgtgattaaaaccac

SEQ ID NO: 268271 - DNA, 30 bp, Artificial Sequence
  Synthetic oligonucleotide
catttattgatagcgagtagaacaaaccac

SEQ ID NO: 268272 - DNA, 30 bp, Artificial Sequence
  Synthetic oligonucleotide
cgttaagttccaatataagtagagaaccac

SEQ ID NO: 268273 - DNA, 30 bp, Artificial Sequence
  Synthetic oligonucleotide
catgaaggacaagtaaatggtcataaccac

SEQ ID NO: 268274 - DNA, 30 bp, Artificial Sequence
  Synthetic oligonucleotide
ttggcggcctttaagaatggtccacaccac

SEQ ID NO: 268275 - DNA, 30 bp, Artificial Sequence
  Synthetic oligonucleotide
gcaatatgttgaggtgccccagtccaccac

SEQ ID NO: 268276 - DNA, 30 bp, Artificial Sequence
  Synthetic oligonucleotide
acgcgtcagagaaatgcacgcaccgaccac

SEQ ID NO: 268277 - DNA, 30 bp, Artificial Sequence
  Synthetic oligonucleotide
tttgggaaggggtatgaacaaccataccac

SEQ ID NO: 268278 - DNA, 30 bp, Artificial Sequence
  Synthetic oligonucleotide
actcaagcaatcccattcgcaggataccac

SEQ ID NO: 268279 - DNA, 30 bp, Artificial Sequence
  Synthetic oligonucleotide
tctcgcgttccaggaatggccccaacccac

SEQ ID NO: 268280 - DNA, 30 bp, Artificial Sequence
  Synthetic oligonucleotide
ctcactctagattatgcccaatacacccac

SEQ ID NO: 268281 - DNA, 30 bp, Artificial Sequence
  Synthetic oligonucleotide
gtgaaatcaagaactttatgcaagacccac

SEQ ID NO: 268282 - DNA, 30 bp, Artificial Sequence
  Synthetic oligonucleotide
caccacaatctatgagtcagtccgacccac

SEQ ID NO: 268283 - DNA, 30 bp, Artificial Sequence
  Synthetic oligonucleotide
tttatcttgctctggatacgcgtgacccac

SEQ ID NO: 268284 - DNA, 30 bp, Artificial Sequence
  Synthetic oligonucleotide
aaagccaggcacgcccaggcgcgcccccac

SEQ ID NO: 268285 - DNA, 30 bp, Artificial Sequence
  Synthetic oligonucleotide
cgagacgcgcaaactctgtacacgccccac

SEQ ID NO: 268286 - DNA, 30 bp, Artificial Sequence
  Synthetic oligonucleotide
ttatgaaaagacgcgcaaaaatggccccac

SEQ ID NO: 268287 - DNA, 30 bp, Artificial Sequence
  Synthetic oligonucleotide
gaaagggtcctattctaaaacgaagcccac

SEQ ID NO: 268288 - DNA, 30 bp, Artificial Sequence
  Synthetic oligonucleotide
agccggaaataaatgacggtccccgcccac

SEQ ID NO: 268289 - DNA, 30 bp, Artificial Sequence
  Synthetic oligonucleotide
ggattcctcctgacgtctattaatgcccac

SEQ ID NO: 268290 - DNA, 30 bp, Artificial Sequence
  Synthetic oligonucleotide
gcaggacgctacgcagacccgtatgcccac

SEQ ID NO: 268291 - DNA, 30 bp, Artificial Sequence
  Synthetic oligonucleotide
ccacttggtctgcaagagcatgttgcccac

SEQ ID NO: 268292 - DNA, 30 bp, Artificial Sequence
  Synthetic oligonucleotide
tggaccagccttcaaagtataaactcccac

SEQ ID NO: 268293 - DNA, 30 bp, Artificial Sequence
  Synthetic oligonucleotide
taacaggaccaagtaatggggaactcccac

SEQ ID NO: 268294 - DNA, 30 bp, Artificial Sequence
  Synthetic oligonucleotide
agtctctaagcacattgagaaccgtcccac

SEQ ID NO: 268295 - DNA, 30 bp, Artificial Sequence
  Synthetic oligonucleotide
tgccttgggccgggtaatagagtgtcccac

SEQ ID NO: 268296 - DNA, 30 bp, Artificial Sequence
  Synthetic oligonucleotide
gtgtaccatttgtggtatcacagttcccac

SEQ ID NO: 268297 - DNA, 30 bp, Artificial Sequence
  Synthetic oligonucleotide
gccaaatttgacgacgaaagatgttcccac

SEQ ID NO: 268298 - DNA, 30 bp, Artificial Sequence
  Synthetic oligonucleotide
acgtgttgcgcggccagttttgctagccac

SEQ ID NO: 268299 - DNA, 30 bp, Artificial Sequence
  Synthetic oligonucleotide
ggcagggtttacataaacggggttagccac

SEQ ID NO: 268300 - DNA, 30 bp, Artificial Sequence
  Synthetic oligonucleotide
atcgaatgcagctgctcgaagacccgccac

SEQ ID NO: 268301 - DNA, 30 bp, Artificial Sequence
  Synthetic oligonucleotide
acaagcacattagaggttaatgagcgccac

SEQ ID NO: 268302 - DNA, 30 bp, Artificial Sequence
  Synthetic oligonucleotide
gggctcgccggaacctcatcccaaggccac

SEQ ID NO: 268303 - DNA, 30 bp, Artificial Sequence
  Synthetic oligonucleotide
ctgagttgggcccttaatgatcgaggccac

SEQ ID NO: 268304 - DNA, 30 bp, Artificial Sequence
  Synthetic oligonucleotide
cggaccttaccagcctcagaatacggccac

SEQ ID NO: 268305 - DNA, 30 bp, Artificial Sequence
  Synthetic oligonucleotide
cgggacttctcaaatacagaaagcggccac

SEQ ID NO: 268306 - DNA, 30 bp, Artificial Sequence
  Synthetic oligonucleotide
ggcctgataagggcatgcagtagcggccac

SEQ ID NO: 268307 - DNA, 30 bp, Artificial Sequence
  Synthetic oligonucleotide
ctaaactagtttggcaaccgggggggccac

SEQ ID NO: 268308 - DNA, 30 bp, Artificial Sequence
  Synthetic oligonucleotide
tggtcgcaataccaccgtggtatgggccac

SEQ ID NO: 268309 - DNA, 30 bp, Artificial Sequence
  Synthetic oligonucleotide
tcgaagacgttgccataaccgcagtgccac

SEQ ID NO: 268310 - DNA, 30 bp, Artificial Sequence
  Synthetic oligonucleotide
ggtgtgatgacctacgtggctatttgccac

SEQ ID NO: 268311 - DNA, 30 bp, Artificial Sequence
  Synthetic oligonucleotide
cacctttaactagaaacagcggacatccac

SEQ ID NO: 268312 - DNA, 30 bp, Artificial Sequence
  Synthetic oligonucleotide
atattgggtgattctagccacttcatccac

SEQ ID NO: 268313 - DNA, 30 bp, Artificial Sequence
  Synthetic oligonucleotide
ggtaacataattgggtttacatgtatccac

SEQ ID NO: 268314 - DNA, 30 bp, Artificial Sequence
  Synthetic oligonucleotide
atgcgcaaggtgatatacgtctgtatccac

SEQ ID NO: 268315 - DNA, 30 bp, Artificial Sequence
  Synthetic oligonucleotide
ggcagggagtttgttcgttattttatccac

SEQ ID NO: 268316 - DNA, 30 bp, Artificial Sequence
  Synthetic oligonucleotide
ataaaaaataagcactcccttcaactccac

SEQ ID NO: 268317 - DNA, 30 bp, Artificial Sequence
  Synthetic oligonucleotide
gcaaaccccagagcttttcgatagctccac

SEQ ID NO: 268318 - DNA, 30 bp, Artificial Sequence
  Synthetic oligonucleotide
agcgagcgcgtacccgcgaagcctctccac

SEQ ID NO: 268319 - DNA, 30 bp, Artificial Sequence
  Synthetic oligonucleotide
gcagcaggccgtgggtacgggcgtctccac

SEQ ID NO: 268320 - DNA, 30 bp, Artificial Sequence
  Synthetic oligonucleotide
ctagttaattgttgtgtgttccaagtccac

SEQ ID NO: 268321 - DNA, 30 bp, Artificial Sequence
  Synthetic oligonucleotide
ttattactatcgtcatttgaataagtccac

SEQ ID NO: 268322 - DNA, 30 bp, Artificial Sequence
  Synthetic oligonucleotide
tcggcttggctgtcttcgcccatcgtccac

SEQ ID NO: 268323 - DNA, 30 bp, Artificial Sequence
  Synthetic oligonucleotide
gatgtgtgcgaattattggcgcgggtccac

SEQ ID NO: 268324 - DNA, 30 bp, Artificial Sequence
  Synthetic oligonucleotide
ctcttagttccccacttgagccttgtccac

SEQ ID NO: 268325 - DNA, 30 bp, Artificial Sequence
  Synthetic oligonucleotide
gatcttaccgttatgtataaatcattccac

SEQ ID NO: 268326 - DNA, 30 bp, Artificial Sequence
  Synthetic oligonucleotide
tgttggggaacttaggtagaaagattccac

SEQ ID NO: 268327 - DNA, 30 bp, Artificial Sequence
  Synthetic oligonucleotide
ttcaatttcggcgcggatctcccgttccac

SEQ ID NO: 268328 - DNA, 30 bp, Artificial Sequence
  Synthetic oligonucleotide
tctcaaatcgaggcgcaatactcgttccac

SEQ ID NO: 268329 - DNA, 30 bp, Artificial Sequence
  Synthetic oligonucleotide
gcaaggaatctcgtcgtggccgctttccac

SEQ ID NO: 268330 - DNA, 30 bp, Artificial Sequence
  Synthetic oligonucleotide
ctaatgaagccgtgaagaacggcaaagcac

SEQ ID NO: 268331 - DNA, 30 bp, Artificial Sequence
  Synthetic oligonucleotide
atatccccctacacgtgttacctaaagcac

SEQ ID NO: 268332 - DNA, 30 bp, Artificial Sequence
  Synthetic oligonucleotide
tgttagtagctctcatagatccgcaagcac

SEQ ID NO: 268333 - DNA, 30 bp, Artificial Sequence
  Synthetic oligonucleotide
gatcaattaaaacaccacgctggcaagcac

SEQ ID NO: 268334 - DNA, 30 bp, Artificial Sequence
  Synthetic oligonucleotide
gattaaccacgggatatatccctcaagcac

SEQ ID NO: 268335 - DNA, 30 bp, Artificial Sequence
  Synthetic oligonucleotide
caacggatgcccacgatgggaatgaagcac

SEQ ID NO: 268336 - DNA, 30 bp, Artificial Sequence
  Synthetic oligonucleotide
ggcttcgggttcacgttaactttgaagcac

SEQ ID NO: 268337 - DNA, 30 bp, Artificial Sequence
  Synthetic oligonucleotide
gtagtagtaggaggctgggctttgaagcac

SEQ ID NO: 268338 - DNA, 30 bp, Artificial Sequence
  Synthetic oligonucleotide
gggcctgaatacgcggggatggctaagcac

SEQ ID NO: 268339 - DNA, 30 bp, Artificial Sequence
  Synthetic oligonucleotide
acaaaaatcatttacctttcttgccagcac

SEQ ID NO: 268340 - DNA, 30 bp, Artificial Sequence
  Synthetic oligonucleotide
cgacaaacggggggttcgattgcgcagcac

SEQ ID NO: 268341 - DNA, 30 bp, Artificial Sequence
  Synthetic oligonucleotide
taagtatcattcttattcggtaatcagcac

SEQ ID NO: 268342 - DNA, 30 bp, Artificial Sequence
  Synthetic oligonucleotide
agtctaaaagggataacctgggctcagcac

SEQ ID NO: 268343 - DNA, 30 bp, Artificial Sequence
  Synthetic oligonucleotide
tgtatgatcctcctaaatcgtgtggagcac

SEQ ID NO: 268344 - DNA, 30 bp, Artificial Sequence
  Synthetic oligonucleotide
cgagtcgattgtgtttttgcaattgagcac

SEQ ID NO: 268345 - DNA, 30 bp, Artificial Sequence
  Synthetic oligonucleotide
ttttcagcgcatgaattgattcttgagcac

SEQ ID NO: 268346 - DNA, 30 bp, Artificial Sequence
  Synthetic oligonucleotide
gtctactaccaacgttggagcgaatagcac

SEQ ID NO: 268347 - DNA, 30 bp, Artificial Sequence
  Synthetic oligonucleotide
tgtctgttaatccgtgtcatggcatagcac

SEQ ID NO: 268348 - DNA, 30 bp, Artificial Sequence
  Synthetic oligonucleotide
gcaaggatcacaatgaacctggcctagcac

SEQ ID NO: 268349 - DNA, 30 bp, Artificial Sequence
  Synthetic oligonucleotide
taacaaggtcgttcagcgagcacgtagcac

SEQ ID NO: 268350 - DNA, 30 bp, Artificial Sequence
  Synthetic oligonucleotide
ttgagaccatgaacacccgcgccgtagcac

SEQ ID NO: 268351 - DNA, 30 bp, Artificial Sequence
  Synthetic oligonucleotide
ctcctataatcgagtaggtccgtgtagcac

SEQ ID NO: 268352 - DNA, 30 bp, Artificial Sequence
  Synthetic oligonucleotide
gaagcttggtctgatcagagacattagcac

SEQ ID NO: 268353 - DNA, 30 bp, Artificial Sequence
  Synthetic oligonucleotide
ctcaacaacagagcgccagaaacttagcac

SEQ ID NO: 268354 - DNA, 30 bp, Artificial Sequence
  Synthetic oligonucleotide
gtgtacacagcggtctgcccggcaacgcac

SEQ ID NO: 268355 - DNA, 30 bp, Artificial Sequence
  Synthetic oligonucleotide
tacatcgtaacatctgtctgcaagacgcac

SEQ ID NO: 268356 - DNA, 30 bp, Artificial Sequence
  Synthetic oligonucleotide
attactagtctgttcaaccgacctacgcac

SEQ ID NO: 268357 - DNA, 30 bp, Artificial Sequence
  Synthetic oligonucleotide
cgctacatcacagaacagattataccgcac

SEQ ID NO: 268358 - DNA, 30 bp, Artificial Sequence
  Synthetic oligonucleotide
gctccgctgtccgatggacctaccccgcac

SEQ ID NO: 268359 - DNA, 30 bp, Artificial Sequence
  Synthetic oligonucleotide
aggtttggcctcactctgttcgccccgcac

SEQ ID NO: 268360 - DNA, 30 bp, Artificial Sequence
  Synthetic oligonucleotide
taagaaagagtattgtatcgtccagcgcac

SEQ ID NO: 268361 - DNA, 30 bp, Artificial Sequence
  Synthetic oligonucleotide
ataaccagctgtagacatggtgtagcgcac

SEQ ID NO: 268362 - DNA, 31 bp, Artificial Sequence
  Synthetic oligonucleotide
aaccataatgcgatggggtcagtgggcgcac

SEQ ID NO: 268363 - DNA, 30 bp, Artificial Sequence
  Synthetic oligonucleotide
agccgacacttacttcccacagctgcgcac

SEQ ID NO: 268364 - DNA, 30 bp, Artificial Sequence
  Synthetic oligonucleotide
gagaattacacaaacagacacgctgcgcac

SEQ ID NO: 268365 - DNA, 30 bp, Artificial Sequence
  Synthetic oligonucleotide
tttaattcgcaagcggtagttcgtgcgcac

SEQ ID NO: 268366 - DNA, 30 bp, Artificial Sequence
  Synthetic oligonucleotide
tagactatataagaactcccactatcgcac

SEQ ID NO: 268367 - DNA, 30 bp, Artificial Sequence
  Synthetic oligonucleotide
tacaccactccaatagcccgcttatcgcac

SEQ ID NO: 268368 - DNA, 30 bp, Artificial Sequence
  Synthetic oligonucleotide
ccctatcataccatggatccgaactcgcac

SEQ ID NO: 268369 - DNA, 30 bp, Artificial Sequence
  Synthetic oligonucleotide
aaagctatcatgtcggagggcaagtcgcac

SEQ ID NO: 268370 - DNA, 30 bp, Artificial Sequence
  Synthetic oligonucleotide
gggaagaaatcgggtttccgtctttcgcac

SEQ ID NO: 268371 - DNA, 30 bp, Artificial Sequence
  Synthetic oligonucleotide
agttacctgtccggagtaagatgaaggcac

SEQ ID NO: 268372 - DNA, 30 bp, Artificial Sequence
  Synthetic oligonucleotide
ggtcaaatacaactagaccccgagaggcac

SEQ ID NO: 268373 - DNA, 30 bp, Artificial Sequence
  Synthetic oligonucleotide
ttcctccaagtcgcggtgtatacgaggcac

SEQ ID NO: 268374 - DNA, 30 bp, Artificial Sequence
  Synthetic oligonucleotide
cagacgagtctgcacgcgagggcgaggcac

SEQ ID NO: 268375 - DNA, 30 bp, Artificial Sequence
  Synthetic oligonucleotide
ggatcggttaggggctcgtctcggaggcac

SEQ ID NO: 268376 - DNA, 30 bp, Artificial Sequence
  Synthetic oligonucleotide
ggaccattccgtaggcagacagtgaggcac

SEQ ID NO: 268377 - DNA, 30 bp, Artificial Sequence
  Synthetic oligonucleotide
gacatcaagtcaaaattcttagtgaggcac

SEQ ID NO: 268378 - DNA, 30 bp, Artificial Sequence
  Synthetic oligonucleotide
aagactgctgcgccacatcaccataggcac

SEQ ID NO: 268379 - DNA, 30 bp, Artificial Sequence
  Synthetic oligonucleotide
tcccaaaaaaccgatacagcgagccggcac

SEQ ID NO: 268380 - DNA, 30 bp, Artificial Sequence
  Synthetic oligonucleotide
tggtgtaagacgttgtggaaagtccggcac

SEQ ID NO: 268381 - DNA, 30 bp, Artificial Sequence
  Synthetic oligonucleotide
agtaactagggataatctcttttccggcac

SEQ ID NO: 268382 - DNA, 30 bp, Artificial Sequence
  Synthetic oligonucleotide
catcgcgaacaggacccgggaattcggcac

SEQ ID NO: 268383 - DNA, 30 bp, Artificial Sequence
  Synthetic oligonucleotide
tgtaactttaaacaaatatagccagggcac

SEQ ID NO: 268384 - DNA, 30 bp, Artificial Sequence
  Synthetic oligonucleotide
ccggagaatggcttaccgacatgagggcac

SEQ ID NO: 268385 - DNA, 30 bp, Artificial Sequence
  Synthetic oligonucleotide
ctgtacggacggcgagcataagctgggcac

SEQ ID NO: 268386 - DNA, 30 bp, Artificial Sequence
  Synthetic oligonucleotide
agtatctacggcttaagtacgcgatggcac

SEQ ID NO: 268387 - DNA, 30 bp, Artificial Sequence
  Synthetic oligonucleotide
gagtgagtaaaatccatagcgggatggcac

SEQ ID NO: 268388 - DNA, 30 bp, Artificial Sequence
  Synthetic oligonucleotide
aatgaccaattgagtacgaataggtggcac

SEQ ID NO: 268389 - DNA, 30 bp, Artificial Sequence
  Synthetic oligonucleotide
ctcaagtcgttgactcgatgactgtggcac

SEQ ID NO: 268390 - DNA, 30 bp, Artificial Sequence
  Synthetic oligonucleotide
gtactgcacgggagaaggcacttttggcac

SEQ ID NO: 268391 - DNA, 30 bp, Artificial Sequence
  Synthetic oligonucleotide
gagcacactgagcgtgtagttggaatgcac

SEQ ID NO: 268392 - DNA, 30 bp, Artificial Sequence
  Synthetic oligonucleotide
tcatcgcaactctctccgacaccgatgcac

SEQ ID NO: 268393 - DNA, 30 bp, Artificial Sequence
  Synthetic oligonucleotide
cgagttatatgcgaacgcgtattactgcac

SEQ ID NO: 268394 - DNA, 30 bp, Artificial Sequence
  Synthetic oligonucleotide
ctgcactttgctcacctagatagcctgcac

SEQ ID NO: 268395 - DNA, 30 bp, Artificial Sequence
  Synthetic oligonucleotide
ttccatggggtcagctttacgtagctgcac

SEQ ID NO: 268396 - DNA, 30 bp, Artificial Sequence
  Synthetic oligonucleotide
tgtatctcgaattgcgagttctatgtgcac

SEQ ID NO: 268397 - DNA, 30 bp, Artificial Sequence
  Synthetic oligonucleotide
gctcacgtggttcacgtagtctcattgcac

SEQ ID NO: 268398 - DNA, 30 bp, Artificial Sequence
  Synthetic oligonucleotide
ttattggcagtggggtaaacgggattgcac

SEQ ID NO: 268399 - DNA, 30 bp, Artificial Sequence
  Synthetic oligonucleotide
agctgtggctgcgtaactttgcgcaatcac

SEQ ID NO: 268400 - DNA, 30 bp, Artificial Sequence
  Synthetic oligonucleotide
ggtaattgctcgtttcatttctggaatcac

SEQ ID NO: 268401 - DNA, 30 bp, Artificial Sequence
  Synthetic oligonucleotide
gaggtcatggtattttcagcgttgaatcac

SEQ ID NO: 268402 - DNA, 30 bp, Artificial Sequence
  Synthetic oligonucleotide
gatttatcgcacaccccgacgccccatcac

SEQ ID NO: 268403 - DNA, 30 bp, Artificial Sequence
  Synthetic oligonucleotide
gggataaagctgtatgggatagggcatcac

SEQ ID NO: 268404 - DNA, 30 bp, Artificial Sequence
  Synthetic oligonucleotide
aaagcaaagagcggtccgtagactcatcac

SEQ ID NO: 268405 - DNA, 30 bp, Artificial Sequence
  Synthetic oligonucleotide
cgaggcctttaaaaacacgggagtcatcac

SEQ ID NO: 268406 - DNA, 30 bp, Artificial Sequence
  Synthetic oligonucleotide
tacatgataagagacacagaagaagatcac

SEQ ID NO: 268407 - DNA, 30 bp, Artificial Sequence
  Synthetic oligonucleotide
cgcacgggacacgtgaactggggagatcac

SEQ ID NO: 268408 - DNA, 30 bp, Artificial Sequence
  Synthetic oligonucleotide
tatatacggatctccaaccgtttagatcac

SEQ ID NO: 268409 - DNA, 30 bp, Artificial Sequence
  Synthetic oligonucleotide
cgactcgccagagctctgatccacgatcac

SEQ ID NO: 268410 - DNA, 30 bp, Artificial Sequence
  Synthetic oligonucleotide
tttgtcatcatcgtactgggggccgatcac

SEQ ID NO: 268411 - DNA, 30 bp, Artificial Sequence
  Synthetic oligonucleotide
atcaaagttattagccgtgaattggatcac

SEQ ID NO: 268412 - DNA, 30 bp, Artificial Sequence
  Synthetic oligonucleotide
gaagatgagaccttaatcttggatgatcac

SEQ ID NO: 268413 - DNA, 30 bp, Artificial Sequence
  Synthetic oligonucleotide
aagttgaccctgtcacattaagctgatcac

SEQ ID NO: 268414 - DNA, 30 bp, Artificial Sequence
  Synthetic oligonucleotide
tggcgcctgttaccgtttacctgatatcac

SEQ ID NO: 268415 - DNA, 30 bp, Artificial Sequence
  Synthetic oligonucleotide
acaagatcggccctctgtgacgcttatcac

SEQ ID NO: 268416 - DNA, 30 bp, Artificial Sequence
  Synthetic oligonucleotide
tagtggacacaagcggtatcaacaactcac

SEQ ID NO: 268417 - DNA, 30 bp, Artificial Sequence
  Synthetic oligonucleotide
gctaataaagactaccgtcgcgacactcac

SEQ ID NO: 268418 - DNA, 30 bp, Artificial Sequence
  Synthetic oligonucleotide
agttcgagcccaaccacgtatagcactcac

SEQ ID NO: 268419 - DNA, 30 bp, Artificial Sequence
  Synthetic oligonucleotide
gccaatacgagtcttgagcccaagactcac

SEQ ID NO: 268420 - DNA, 30 bp, Artificial Sequence
  Synthetic oligonucleotide
ccggacactcttgatgataatgatactcac

SEQ ID NO: 268421 - DNA, 30 bp, Artificial Sequence
  Synthetic oligonucleotide
ttgtctggaagagcgaaattatcgcctcac

SEQ ID NO: 268422 - DNA, 30 bp, Artificial Sequence
  Synthetic oligonucleotide
atgatagtatccatggtacactggcctcac

SEQ ID NO: 268423 - DNA, 30 bp, Artificial Sequence
  Synthetic oligonucleotide
agtagacgccacgtctggcgcagtcctcac

SEQ ID NO: 268424 - DNA, 30 bp, Artificial Sequence
  Synthetic oligonucleotide
aaaagccattgaacgctagtacaagctcac

SEQ ID NO: 268425 - DNA, 30 bp, Artificial Sequence
  Synthetic oligonucleotide
aggttcgaattgtgtttcatctaagctcac

SEQ ID NO: 268426 - DNA, 30 bp, Artificial Sequence
  Synthetic oligonucleotide
cttctacaacaatcgaggcggtgggctcac

SEQ ID NO: 268427 - DNA, 30 bp, Artificial Sequence
  Synthetic oligonucleotide
gctctcgggcacccgttctgtagttctcac

SEQ ID NO: 268428 - DNA, 30 bp, Artificial Sequence
  Synthetic oligonucleotide
caccggctcaagattaatgcttaaagtcac

SEQ ID NO: 268429 - DNA, 30 bp, Artificial Sequence
  Synthetic oligonucleotide
cacggtaaattccgaactatgtcaagtcac

SEQ ID NO: 268430 - DNA, 30 bp, Artificial Sequence
  Synthetic oligonucleotide
tatataatttggcagataaggcgaagtcac

SEQ ID NO: 268431 - DNA, 30 bp, Artificial Sequence
  Synthetic oligonucleotide
ccggaggctatatttcgcagaaggagtcac

SEQ ID NO: 268432 - DNA, 30 bp, Artificial Sequence
  Synthetic oligonucleotide
ccagatcacgagaagactccactgagtcac

SEQ ID NO: 268433 - DNA, 30 bp, Artificial Sequence
  Synthetic oligonucleotide
ggacgagcgcggtattacttggtgagtcac

SEQ ID NO: 268434 - DNA, 30 bp, Artificial Sequence
  Synthetic oligonucleotide
gggccgccggttcaaatctaccctagtcac

SEQ ID NO: 268435 - DNA, 30 bp, Artificial Sequence
  Synthetic oligonucleotide
tcattagctcgacacgtgaattctagtcac

SEQ ID NO: 268436 - DNA, 30 bp, Artificial Sequence
  Synthetic oligonucleotide
cagtgcgatcccggacctgtagttagtcac

SEQ ID NO: 268437 - DNA, 30 bp, Artificial Sequence
  Synthetic oligonucleotide
aacgatgagtgcagaaaatctatacgtcac

SEQ ID NO: 268438 - DNA, 30 bp, Artificial Sequence
  Synthetic oligonucleotide
cagttttgaacgacccgaattcagcgtcac

SEQ ID NO: 268439 - DNA, 30 bp, Artificial Sequence
  Synthetic oligonucleotide
ctcgctcgaagactccactcaacgcgtcac

SEQ ID NO: 268440 - DNA, 30 bp, Artificial Sequence
  Synthetic oligonucleotide
acacagcccgcgccggatgcgtttcgtcac

SEQ ID NO: 268441 - DNA, 30 bp, Artificial Sequence
  Synthetic oligonucleotide
aaagagggtcgcttaaaatggccaggtcac

SEQ ID NO: 268442 - DNA, 30 bp, Artificial Sequence
  Synthetic oligonucleotide
acgataaccttgacgacaaccaacggtcac

SEQ ID NO: 268443 - DNA, 30 bp, Artificial Sequence
  Synthetic oligonucleotide
cgattaagtacagtaccactgtgcggtcac

SEQ ID NO: 268444 - DNA, 30 bp, Artificial Sequence
  Synthetic oligonucleotide
gaccaacggtgtggtcgatcgtcgggtcac

SEQ ID NO: 268445 - DNA, 30 bp, Artificial Sequence
  Synthetic oligonucleotide
gggaagggaatgcgctaaaggctgggtcac

SEQ ID NO: 268446 - DNA, 30 bp, Artificial Sequence
  Synthetic oligonucleotide
gtccaaacgcaaaagtcacgtcatggtcac

SEQ ID NO: 268447 - DNA, 30 bp, Artificial Sequence
  Synthetic oligonucleotide
caatttggtggatgacgaccgtttggtcac

SEQ ID NO: 268448 - DNA, 30 bp, Artificial Sequence
  Synthetic oligonucleotide
tttgcctttgtagtgggagccgcatgtcac

SEQ ID NO: 268449 - DNA, 30 bp, Artificial Sequence
  Synthetic oligonucleotide
gacaaaggttttcttgtactatactgtcac

SEQ ID NO: 268450 - DNA, 30 bp, Artificial Sequence
  Synthetic oligonucleotide
tccggttcgttcgtgcaaaacgattgtcac

SEQ ID NO: 268451 - DNA, 30 bp, Artificial Sequence
  Synthetic oligonucleotide
ggtagttccacggaggtgtgtagttgtcac

SEQ ID NO: 268452 - DNA, 30 bp, Artificial Sequence
  Synthetic oligonucleotide
acagtacagtcaatcaaggagatttgtcac

SEQ ID NO: 268453 - DNA, 30 bp, Artificial Sequence
  Synthetic oligonucleotide
gggatccccaagagtacgaacggaattcac

SEQ ID NO: 268454 - DNA, 30 bp, Artificial Sequence
  Synthetic oligonucleotide
ggacaccgtatcaaacacccgggaattcac

SEQ ID NO: 268455 - DNA, 30 bp, Artificial Sequence
  Synthetic oligonucleotide
gccatgcggacctgtgccttaaccattcac

SEQ ID NO: 268456 - DNA, 30 bp, Artificial Sequence
  Synthetic oligonucleotide
atgaaaaatatgacagcaatgtccattcac

SEQ ID NO: 268457 - DNA, 30 bp, Artificial Sequence
  Synthetic oligonucleotide
aggaatacatggggaattgaattcattcac

SEQ ID NO: 268458 - DNA, 29 bp, Artificial Sequence
  Synthetic oligonucleotide
agttaattcgagaacttctgacgattcac

SEQ ID NO: 268459 - DNA, 30 bp, Artificial Sequence
  Synthetic oligonucleotide
gggagcccatcttacaagtaaccgattcac

SEQ ID NO: 268460 - DNA, 30 bp, Artificial Sequence
  Synthetic oligonucleotide
gtctaatgcgttaccggagggtgtattcac

SEQ ID NO: 268461 - DNA, 30 bp, Artificial Sequence
  Synthetic oligonucleotide
ttgtagatagggggaatgctgtgccttcac

SEQ ID NO: 268462 - DNA, 30 bp, Artificial Sequence
  Synthetic oligonucleotide
gactatggaagccaccggtaatcgcttcac

SEQ ID NO: 268463 - DNA, 30 bp, Artificial Sequence
  Synthetic oligonucleotide
cggcacctacggggttaagaaatgcttcac

SEQ ID NO: 268464 - DNA, 30 bp, Artificial Sequence
  Synthetic oligonucleotide
ggcacccgcgaaatctcaattatgcttcac

SEQ ID NO: 268465 - DNA, 38 bp, Artificial Sequence
  Synthetic oligonucleotide
ctgcgtttcttgagactatgtttgactgggccgttcac

SEQ ID NO: 268466 - DNA, 30 bp, Artificial Sequence
  Synthetic oligonucleotide
aatgggtacataccgctgagaagcgttcac

SEQ ID NO: 268467 - DNA, 30 bp, Artificial Sequence
  Synthetic oligonucleotide
tagggtggttattaatgggtgaactttcac

SEQ ID NO: 268468 - DNA, 30 bp, Artificial Sequence
  Synthetic oligonucleotide
tttcgccgttatgagttccgctcttttcac

SEQ ID NO: 268469 - DNA, 30 bp, Artificial Sequence
  Synthetic oligonucleotide
cgttcgagctgggactcattggaaaaagac

SEQ ID NO: 268470 - DNA, 30 bp, Artificial Sequence
  Synthetic oligonucleotide
ttttggggacgtgggtaggactaaaaagac

SEQ ID NO: 268471 - DNA, 34 bp, Artificial Sequence
  Synthetic oligonucleotide
gataatagaccaccacgtggccatcccaaaagac

SEQ ID NO: 268472 - DNA, 34 bp, Artificial Sequence
  Synthetic oligonucleotide
gatactagaccaccacgggtccatcccaaaagac

SEQ ID NO: 268473 - DNA, 30 bp, Artificial Sequence
  Synthetic oligonucleotide
aaggtttagccgtggatggtctcaaaagac

SEQ ID NO: 268474 - DNA, 30 bp, Artificial Sequence
  Synthetic oligonucleotide
aaatggagaacgtataaagttcgaaaagac

SEQ ID NO: 268475 - DNA, 30 bp, Artificial Sequence
  Synthetic oligonucleotide
ggaaggtgacggtgtgagatctgaaaagac

SEQ ID NO: 268476 - DNA, 30 bp, Artificial Sequence
  Synthetic oligonucleotide
gtaaggactcggctgtcgatagtaaaagac

SEQ ID NO: 268477 - DNA, 30 bp, Artificial Sequence
  Synthetic oligonucleotide
acatgttattcctaatccaccgtaaaagac

SEQ ID NO: 268478 - DNA, 30 bp, Artificial Sequence
  Synthetic oligonucleotide
ggatttgacttagcactcggtcgtaaagac

SEQ ID NO: 268479 - DNA, 30 bp, Artificial Sequence
  Synthetic oligonucleotide
gggggggctttagccgagagtgaacaagac

SEQ ID NO: 268480 - DNA, 30 bp, Artificial Sequence
  Synthetic oligonucleotide
tatagtggagccgtgtagtaggcacaagac

SEQ ID NO: 268481 - DNA, 30 bp, Artificial Sequence
  Synthetic oligonucleotide
atacagtatgtctactagttcgtacaagac

SEQ ID NO: 268482 - DNA, 30 bp, Artificial Sequence
  Synthetic oligonucleotide
agttcacgtagaacttaccttcaccaagac

SEQ ID NO: 268483 - DNA, 30 bp, Artificial Sequence
  Synthetic oligonucleotide
gaatactccaagagtggggctagccaagac

SEQ ID NO: 268484 - DNA, 30 bp, Artificial Sequence
  Synthetic oligonucleotide
agtatctgactgtgcacgttattgcaagac

SEQ ID NO: 268485 - DNA, 30 bp, Artificial Sequence
  Synthetic oligonucleotide
ggtatcggtagaggccacaagtatcaagac

SEQ ID NO: 268486 - DNA, 30 bp, Artificial Sequence
  Synthetic oligonucleotide
tctttgcagcagtgcattatggctcaagac

SEQ ID NO: 268487 - DNA, 30 bp, Artificial Sequence
  Synthetic oligonucleotide
gtcctcaggaacgagccgcacattcaagac

SEQ ID NO: 268488 - DNA, 30 bp, Artificial Sequence
  Synthetic oligonucleotide
agggcgagatctcgacagcggcttcaagac

SEQ ID NO: 268489 - DNA, 30 bp, Artificial Sequence
  Synthetic oligonucleotide
gtaaggtttgtattcgagagtcaagaagac

SEQ ID NO: 268490 - DNA, 30 bp, Artificial Sequence
  Synthetic oligonucleotide
tgtgattcgcagggttcgcgctaagaagac

SEQ ID NO: 268491 - DNA, 30 bp, Artificial Sequence
  Synthetic oligonucleotide
ggtacttagtagaaatacagtctagaagac

SEQ ID NO: 268492 - DNA, 30 bp, Artificial Sequence
  Synthetic oligonucleotide
cctaggtaacggttttggaccttagaagac

SEQ ID NO: 268493 - DNA, 30 bp, Artificial Sequence
  Synthetic oligonucleotide
caatacatttttcagacgatttacgaagac

SEQ ID NO: 268494 - DNA, 30 bp, Artificial Sequence
  Synthetic oligonucleotide
gagggctaggtagagtaattctaggaagac

SEQ ID NO: 268495 - DNA, 30 bp, Artificial Sequence
  Synthetic oligonucleotide
ctgagcatgcgagggatcgatgatgaagac

SEQ ID NO: 268496 - DNA, 30 bp, Artificial Sequence
  Synthetic oligonucleotide
ggacggctccgaggcggatgtcgtgaagac

SEQ ID NO: 268497 - DNA, 30 bp, Artificial Sequence
  Synthetic oligonucleotide
gtactctataagaaaaaatcacttgaagac

SEQ ID NO: 268498 - DNA, 30 bp, Artificial Sequence
  Synthetic oligonucleotide
aacgagcaagttgtttaccaaagctaagac

SEQ ID NO: 268499 - DNA, 30 bp, Artificial Sequence
  Synthetic oligonucleotide
tagtactcaaatcgcccgaggcgctaagac

SEQ ID NO: 268500 - DNA, 30 bp, Artificial Sequence
  Synthetic oligonucleotide
attgtggtccactcgccttaccagtaagac

SEQ ID NO: 268501 - DNA, 30 bp, Artificial Sequence
  Synthetic oligonucleotide
acaggtatattaagcgggcatcagtaagac

SEQ ID NO: 268502 - DNA, 30 bp, Artificial Sequence
  Synthetic oligonucleotide
tcataggcgttacgtattctggtgtaagac

SEQ ID NO: 268503 - DNA, 30 bp, Artificial Sequence
  Synthetic oligonucleotide
ttgactgagtcgtatagcaagtattaagac

SEQ ID NO: 268504 - DNA, 30 bp, Artificial Sequence
  Synthetic oligonucleotide
agacttgctgctgcaaaccaagcttaagac

SEQ ID NO: 268505 - DNA, 30 bp, Artificial Sequence
  Synthetic oligonucleotide
aagtcctgctaggagtaattcgcttaagac

SEQ ID NO: 268506 - DNA, 30 bp, Artificial Sequence
  Synthetic oligonucleotide
acatgtttgctcgaacttacaggttaagac

SEQ ID NO: 268507 - DNA, 30 bp, Artificial Sequence
  Synthetic oligonucleotide
ccggcaaaatagcatggggatatttaagac

SEQ ID NO: 268508 - DNA, 30 bp, Artificial Sequence
  Synthetic oligonucleotide
tgaaagtcatggagatgtcagaaaacagac

SEQ ID NO: 268509 - DNA, 30 bp, Artificial Sequence
  Synthetic oligonucleotide
gggcccgtaatagtggttccgcgaacagac

SEQ ID NO: 268510 - DNA, 30 bp, Artificial Sequence
  Synthetic oligonucleotide
actaagaagtagggtaggaaattaacagac

SEQ ID NO: 268511 - DNA, 30 bp, Artificial Sequence
  Synthetic oligonucleotide
aacaagaggaattgtgtcagggtcacagac

SEQ ID NO: 268512 - DNA, 30 bp, Artificial Sequence
  Synthetic oligonucleotide
catagcaatacgctacgcgtatatacagac

SEQ ID NO: 268513 - DNA, 30 bp, Artificial Sequence
  Synthetic oligonucleotide
aggggtttacggctttgaaggaaaccagac

SEQ ID NO: 268514 - DNA, 30 bp, Artificial Sequence
  Synthetic oligonucleotide
ggcatgatgaaatttctccttgcaccagac

SEQ ID NO: 268515 - DNA, 30 bp, Artificial Sequence
  Synthetic oligonucleotide
gaagagttgagtaatggcgaagcgccagac

SEQ ID NO: 268516 - DNA, 30 bp, Artificial Sequence
  Synthetic oligonucleotide
taatttgggcaaacacacgaagtgccagac

SEQ ID NO: 268517 - DNA, 30 bp, Artificial Sequence
  Synthetic oligonucleotide
gagcaaccacaaagacgcaaaagtccagac

SEQ ID NO: 268518 - DNA, 30 bp, Artificial Sequence
  Synthetic oligonucleotide
cagatcagtcatcgatttgtcggtccagac

SEQ ID NO: 268519 - DNA, 30 bp, Artificial Sequence
  Synthetic oligonucleotide
cgggggtttgacctatggacaaaggcagac

SEQ ID NO: 268520 - DNA, 30 bp, Artificial Sequence
  Synthetic oligonucleotide
ggccagtcccatagacagttggcggcagac

SEQ ID NO: 268521 - DNA, 30 bp, Artificial Sequence
  Synthetic oligonucleotide
gctggcgtgtcaatatgagcctgggcagac

SEQ ID NO: 268522 - DNA, 30 bp, Artificial Sequence
  Synthetic oligonucleotide
ttccgaccggtttgtagtttactggcagac

SEQ ID NO: 268523 - DNA, 30 bp, Artificial Sequence
  Synthetic oligonucleotide
accagtaaggagaacaacaggaatgcagac

SEQ ID NO: 268524 - DNA, 30 bp, Artificial Sequence
  Synthetic oligonucleotide
gaaggacttactggatcggcagcatcagac

SEQ ID NO: 268525 - DNA, 30 bp, Artificial Sequence
  Synthetic oligonucleotide
tatgctggtcatattgatggcgtgtcagac

SEQ ID NO: 268526 - DNA, 30 bp, Artificial Sequence
  Synthetic oligonucleotide
ctttgtaagccgtggaatatgcgttcagac

SEQ ID NO: 268527 - DNA, 30 bp, Artificial Sequence
  Synthetic oligonucleotide
ctaatgggtgacgcaaaccaattttcagac

SEQ ID NO: 268528 - DNA, 30 bp, Artificial Sequence
  Synthetic oligonucleotide
ccggatctcgtagctgaggttagcagagac

SEQ ID NO: 268529 - DNA, 30 bp, Artificial Sequence
  Synthetic oligonucleotide
aggtttccacagatgccaggtgggagagac

SEQ ID NO: 268530 - DNA, 30 bp, Artificial Sequence
  Synthetic oligonucleotide
agaggcgttaatatatagtgcacacgagac

SEQ ID NO: 268531 - DNA, 30 bp, Artificial Sequence
  Synthetic oligonucleotide
gccttaaagcgtatccgaagcttacgagac

SEQ ID NO: 268532 - DNA, 30 bp, Artificial Sequence
  Synthetic oligonucleotide
aagtaaactcctccactacaaccccgagac

SEQ ID NO: 268533 - DNA, 30 bp, Artificial Sequence
  Synthetic oligonucleotide
ctggacacttgtagcactcggcgccgagac

SEQ ID NO: 268534 - DNA, 30 bp, Artificial Sequence
  Synthetic oligonucleotide
aatagttcgtcagccgacaaatttcgagac

SEQ ID NO: 268535 - DNA, 30 bp, Artificial Sequence
  Synthetic oligonucleotide
cctacccaggtttagcaatactttcgagac

SEQ ID NO: 268536 - DNA, 30 bp, Artificial Sequence
  Synthetic oligonucleotide
gatgagagagggcaactctagtttcgagac

SEQ ID NO: 268537 - DNA, 30 bp, Artificial Sequence
  Synthetic oligonucleotide
tcatcctctcggtagtgtaccgaaggagac

SEQ ID NO: 268538 - DNA, 30 bp, Artificial Sequence
  Synthetic oligonucleotide
gacgtaggcacagtcatggctacaggagac

SEQ ID NO: 268539 - DNA, 30 bp, Artificial Sequence
  Synthetic oligonucleotide
taatggcgcagggttacaccctgaggagac

SEQ ID NO: 268540 - DNA, 29 bp, Artificial Sequence
  Synthetic oligonucleotide
aaaagtacagcccgtgttgtaacggagac

SEQ ID NO: 268541 - DNA, 30 bp, Artificial Sequence
  Synthetic oligonucleotide
tgtacgcacaccaacgtcagtatcggagac

SEQ ID NO: 268542 - DNA, 30 bp, Artificial Sequence
  Synthetic oligonucleotide
atgacctgtacaagaatgttgttcggagac

SEQ ID NO: 268543 - DNA, 30 bp, Artificial Sequence
  Synthetic oligonucleotide
taaaacccgtggcatatagaaccgggagac

SEQ ID NO: 268544 - DNA, 30 bp, Artificial Sequence
  Synthetic oligonucleotide
catcgaagcggcagggcagggaggggagac

SEQ ID NO: 268545 - DNA, 30 bp, Artificial Sequence
  Synthetic oligonucleotide
agtgccagaatcttgccattatggggagac

SEQ ID NO: 268546 - DNA, 30 bp, Artificial Sequence
  Synthetic oligonucleotide
atggggatacgaaactgtgtttatggagac

SEQ ID NO: 268547 - DNA, 30 bp, Artificial Sequence
  Synthetic oligonucleotide
gggtcctaggggtatggtgaatctggagac

SEQ ID NO: 268548 - DNA, 30 bp, Artificial Sequence
  Synthetic oligonucleotide
ttcatgcaaaggtgctctctgtactgagac

SEQ ID NO: 268549 - DNA, 30 bp, Artificial Sequence
  Synthetic oligonucleotide
ttcattaggtaagcatggatcagctgagac

SEQ ID NO: 268550 - DNA, 30 bp, Artificial Sequence
  Synthetic oligonucleotide
tctatagaggtggtgggatattggtgagac

SEQ ID NO: 268551 - DNA, 30 bp, Artificial Sequence
  Synthetic oligonucleotide
ttgagaaggcatactgaaagcccttgagac

SEQ ID NO: 268552 - DNA, 30 bp, Artificial Sequence
  Synthetic oligonucleotide
gggaaaatcgcccctctcggagcttgagac

SEQ ID NO: 268553 - DNA, 30 bp, Artificial Sequence
  Synthetic oligonucleotide
aacattactgacgtatgaaggccaatagac

SEQ ID NO: 268554 - DNA, 30 bp, Artificial Sequence
  Synthetic oligonucleotide
ccaaaggggtgtacaaacaaatccatagac

SEQ ID NO: 268555 - DNA, 30 bp, Artificial Sequence
  Synthetic oligonucleotide
cgaggagatcaaaaaatttttgtcatagac

SEQ ID NO: 268556 - DNA, 30 bp, Artificial Sequence
  Synthetic oligonucleotide
aaaagggccttgttgtagttattcatagac

SEQ ID NO: 268557 - DNA, 30 bp, Artificial Sequence
  Synthetic oligonucleotide
gatcgtatgccgaattacggctcgatagac

SEQ ID NO: 268558 - DNA, 30 bp, Artificial Sequence
  Synthetic oligonucleotide
cattccagtccacggaatagcgctatagac

SEQ ID NO: 268559 - DNA, 30 bp, Artificial Sequence
  Synthetic oligonucleotide
ccatgagggtagacagacagttcactagac

SEQ ID NO: 268560 - DNA, 31 bp, Artificial Sequence
  Synthetic oligonucleotide
gtcaacccaaacctttaataggagactagac

SEQ ID NO: 268561 - DNA, 30 bp, Artificial Sequence
  Synthetic oligonucleotide
aactctaggaacccttatccatccctagac

SEQ ID NO: 268562 - DNA, 30 bp, Artificial Sequence
  Synthetic oligonucleotide
cagccgcaggtacgaccgtggtccctagac

SEQ ID NO: 268563 - DNA, 30 bp, Artificial Sequence
  Synthetic oligonucleotide
ataccaggtagacaagttccgtttctagac

SEQ ID NO: 268564 - DNA, 30 bp, Artificial Sequence
  Synthetic oligonucleotide
gtgacgggcgtacctaacggtcgagtagac

SEQ ID NO: 268565 - DNA, 29 bp, Artificial Sequence
  Synthetic oligonucleotide
ggccacgcgcagacataccctccgtagac

SEQ ID NO: 268566 - DNA, 30 bp, Artificial Sequence
  Synthetic oligonucleotide
gaattggaacgatttgtagtacaattagac

SEQ ID NO: 268567 - DNA, 30 bp, Artificial Sequence
  Synthetic oligonucleotide
gagttggtgacctttgcgtacagattagac

SEQ ID NO: 268568 - DNA, 30 bp, Artificial Sequence
  Synthetic oligonucleotide
gcagtggttgcgtaacatctcggcttagac

SEQ ID NO: 268569 - DNA, 30 bp, Artificial Sequence
  Synthetic oligonucleotide
gtccttggaggccaagatacacagttagac

SEQ ID NO: 268570 - DNA, 30 bp, Artificial Sequence
  Synthetic oligonucleotide
aggtccccgtaagtgagttgtagtttagac

SEQ ID NO: 268571 - DNA, 30 bp, Artificial Sequence
  Synthetic oligonucleotide
cgaagtcgtagatcagtgtagaaaaacgac

SEQ ID NO: 268572 - DNA, 30 bp, Artificial Sequence
  Synthetic oligonucleotide
catcttagaccgtcctctagacaaaacgac

SEQ ID NO: 268573 - DNA, 30 bp, Artificial Sequence
  Synthetic oligonucleotide
gcaaaggcggttgagtccgccgtcaacgac

SEQ ID NO: 268574 - DNA, 30 bp, Artificial Sequence
  Synthetic oligonucleotide
ccggcacgtgaggacgaaatctgacacgac

SEQ ID NO: 268575 - DNA, 30 bp, Artificial Sequence
  Synthetic oligonucleotide
caattggcccttaaatgaggctttcacgac

SEQ ID NO: 268576 - DNA, 30 bp, Artificial Sequence
  Synthetic oligonucleotide
gattgatccgtgaccggtggtgcagacgac

SEQ ID NO: 268577 - DNA, 30 bp, Artificial Sequence
  Synthetic oligonucleotide
attcaggtcacttcttccagattagacgac

SEQ ID NO: 268578 - DNA, 30 bp, Artificial Sequence
  Synthetic oligonucleotide
tccggtgtgaagatcggcgggggcgacgac

SEQ ID NO: 268579 - DNA, 30 bp, Artificial Sequence
  Synthetic oligonucleotide
aatcctttgagggatcgcccgctcgacgac

SEQ ID NO: 268580 - DNA, 30 bp, Artificial Sequence
  Synthetic oligonucleotide
atagtccatcctaccgagtattaggacgac

SEQ ID NO: 268581 - DNA, 30 bp, Artificial Sequence
  Synthetic oligonucleotide
ggctatgagattgataacgtatctgacgac

SEQ ID NO: 268582 - DNA, 30 bp, Artificial Sequence
  Synthetic oligonucleotide
aaacctagactagctcttatataatacgac

SEQ ID NO: 268583 - DNA, 30 bp, Artificial Sequence
  Synthetic oligonucleotide
ggaggcaaccattgccggaatggatacgac

SEQ ID NO: 268584 - DNA, 30 bp, Artificial Sequence
  Synthetic oligonucleotide
agcgctactatttcttcggtgtgatacgac

SEQ ID NO: 268585 - DNA, 30 bp, Artificial Sequence
  Synthetic oligonucleotide
ctcttggaagaatgaatcaccgattacgac

SEQ ID NO: 268586 - DNA, 30 bp, Artificial Sequence
  Synthetic oligonucleotide
cggcttttattcccggtcctatgaaccgac

SEQ ID NO: 268587 - DNA, 30 bp, Artificial Sequence
  Synthetic oligonucleotide
tacacacgggttatgtgttccccgaccgac

SEQ ID NO: 268588 - DNA, 30 bp, Artificial Sequence
  Synthetic oligonucleotide
tagaatacctaggaaactgcataccccgac

SEQ ID NO: 268589 - DNA, 30 bp, Artificial Sequence
  Synthetic oligonucleotide
atagacgacggcagtgcaggcaatcccgac

SEQ ID NO: 268590 - DNA, 30 bp, Artificial Sequence
  Synthetic oligonucleotide
tctaagtgcgggtccatgagaactcccgac

SEQ ID NO: 268591 - DNA, 30 bp, Artificial Sequence
  Synthetic oligonucleotide
ataaacatggcgacgtgatcaattcccgac

SEQ ID NO: 268592 - DNA, 30 bp, Artificial Sequence
  Synthetic oligonucleotide
gctcggttatgtttctacaaggaagccgac

SEQ ID NO: 268593 - DNA, 30 bp, Artificial Sequence
  Synthetic oligonucleotide
tgttgttcgcaattggtatgagcagccgac

SEQ ID NO: 268594 - DNA, 30 bp, Artificial Sequence
  Synthetic oligonucleotide
tgaggttgtcacaaacatgccagcgccgac

SEQ ID NO: 268595 - DNA, 30 bp, Artificial Sequence
  Synthetic oligonucleotide
gcctcatgctacgttagtcgtcaggccgac

SEQ ID NO: 268596 - DNA, 30 bp, Artificial Sequence
  Synthetic oligonucleotide
tgttcatctcggaggtggctcagctccgac

SEQ ID NO: 268597 - DNA, 30 bp, Artificial Sequence
  Synthetic oligonucleotide
aatagtaatcaggatggcaaaacgtccgac

SEQ ID NO: 268598 - DNA, 30 bp, Artificial Sequence
  Synthetic oligonucleotide
caacggagatatgtcagcacgatgtccgac

SEQ ID NO: 268599 - DNA, 31 bp, Artificial Sequence
  Synthetic oligonucleotide
gtacaccgttacagcgatggaagattccgac

SEQ ID NO: 268600 - DNA, 30 bp, Artificial Sequence
  Synthetic oligonucleotide
catgaaggatcaggcgcgggctcttccgac

SEQ ID NO: 268601 - DNA, 30 bp, Artificial Sequence
  Synthetic oligonucleotide
cagatacgcaccgcaaacttcaaaagcgac

SEQ ID NO: 268602 - DNA, 30 bp, Artificial Sequence
  Synthetic oligonucleotide
gctacgaaattattttgcaggagaagcgac

SEQ ID NO: 268603 - DNA, 30 bp, Artificial Sequence
  Synthetic oligonucleotide
gtccagtatctgcaatgggagctaagcgac

SEQ ID NO: 268604 - DNA, 30 bp, Artificial Sequence
  Synthetic oligonucleotide
gttgagaatattcggaagacgtccagcgac

SEQ ID NO: 268605 - DNA, 30 bp, Artificial Sequence
  Synthetic oligonucleotide
tccccgaagcaaaggcggctggtgagcgac

SEQ ID NO: 268606 - DNA, 30 bp, Artificial Sequence
  Synthetic oligonucleotide
tagcggatatgtctgcgtcacgaccgcgac

SEQ ID NO: 268607 - DNA, 30 bp, Artificial Sequence
  Synthetic oligonucleotide
agcagggctgttacaccctttaggcgcgac

SEQ ID NO: 268608 - DNA, 30 bp, Artificial Sequence
  Synthetic oligonucleotide
gctaagggcaaatgagccgggcttcgcgac

SEQ ID NO: 268609 - DNA, 30 bp, Artificial Sequence
  Synthetic oligonucleotide
tctcggtgcttacgaggcccgtccggcgac

SEQ ID NO: 268610 - DNA, 30 bp, Artificial Sequence
  Synthetic oligonucleotide
tagcaattgtaaccggaaaaagtcggcgac

SEQ ID NO: 268611 - DNA, 30 bp, Artificial Sequence
  Synthetic oligonucleotide
aagacggcgaccatatctccctagggcgac

SEQ ID NO: 268612 - DNA, 30 bp, Artificial Sequence
  Synthetic oligonucleotide
aacggtccacgatatcctggaacgggcgac

SEQ ID NO: 268613 - DNA, 30 bp, Artificial Sequence
  Synthetic oligonucleotide
tttgcgctattgcgatcaatcgggggcgac

SEQ ID NO: 268614 - DNA, 30 bp, Artificial Sequence
  Synthetic oligonucleotide
gctccccagggggagccaggcatgggcgac

SEQ ID NO: 268615 - DNA, 30 bp, Artificial Sequence
  Synthetic oligonucleotide
tcggtacgccgacgtggcatgtcctgcgac

SEQ ID NO: 268616 - DNA, 30 bp, Artificial Sequence
  Synthetic oligonucleotide
gctgcgctttagctggggactcagtgcgac

SEQ ID NO: 268617 - DNA, 30 bp, Artificial Sequence
  Synthetic oligonucleotide
ctctcattcttaccagagcagtcttgcgac

SEQ ID NO: 268618 - DNA, 31 bp, Artificial Sequence
  Synthetic oligonucleotide
ctcactgtttgtgtcggaattctcaatcgac

SEQ ID NO: 268619 - DNA, 30 bp, Artificial Sequence
  Synthetic oligonucleotide
tggaatgcccggtaaagatcctgaatcgac

SEQ ID NO: 268620 - DNA, 30 bp, Artificial Sequence
  Synthetic oligonucleotide
agaagtctggggtcacagttgaccatcgac

SEQ ID NO: 268621 - DNA, 30 bp, Artificial Sequence
  Synthetic oligonucleotide
tgatgccacgctgcgcggataggcatcgac

SEQ ID NO: 268622 - DNA, 30 bp, Artificial Sequence
  Synthetic oligonucleotide
gaagcgtcaggcgggccttctgtcatcgac

SEQ ID NO: 268623 - DNA, 30 bp, Artificial Sequence
  Synthetic oligonucleotide
aaaggcatcagaatggttaccgtgatcgac

SEQ ID NO: 268624 - DNA, 30 bp, Artificial Sequence
  Synthetic oligonucleotide
ccactcaagcaagatactaaaagactcgac

SEQ ID NO: 268625 - DNA, 30 bp, Artificial Sequence
  Synthetic oligonucleotide
gggcccagagtcaatgtctgggacctcgac

SEQ ID NO: 268626 - DNA, 30 bp, Artificial Sequence
  Synthetic oligonucleotide
agaccggcaaatttcaggacacgcctcgac

SEQ ID NO: 268627 - DNA, 30 bp, Artificial Sequence
  Synthetic oligonucleotide
actcagggcaattgtgaaattgcgctcgac

SEQ ID NO: 268628 - DNA, 30 bp, Artificial Sequence
  Synthetic oligonucleotide
gacacgtctagccgatacgggcggctcgac

SEQ ID NO: 268629 - DNA, 30 bp, Artificial Sequence
  Synthetic oligonucleotide
caatcatcagaagcctcgcccgctctcgac

SEQ ID NO: 268630 - DNA, 30 bp, Artificial Sequence
  Synthetic oligonucleotide
tgcagttcccctaggttacaggaagtcgac

SEQ ID NO: 268631 - DNA, 30 bp, Artificial Sequence
  Synthetic oligonucleotide
gtttcgaatcaccagcgcacggtagtcgac

SEQ ID NO: 268632 - DNA, 30 bp, Artificial Sequence
  Synthetic oligonucleotide
gccaagtgacttaagcatagccttgtcgac

SEQ ID NO: 268633 - DNA, 30 bp, Artificial Sequence
  Synthetic oligonucleotide
actcctccaagtaagggtgggcttgtcgac

SEQ ID NO: 268634 - DNA, 30 bp, Artificial Sequence
  Synthetic oligonucleotide
attgctgtggctggcctgaaggagttcgac

SEQ ID NO: 268635 - DNA, 31 bp, Artificial Sequence
  Synthetic oligonucleotide
catctactgtgcgacaccgggtttgttcgac

SEQ ID NO: 268636 - DNA, 30 bp, Artificial Sequence
  Synthetic oligonucleotide
aatatgagcaaatagtggcgggttttcgac

SEQ ID NO: 268637 - DNA, 30 bp, Artificial Sequence
  Synthetic oligonucleotide
aagtgggcaatgatagggatgccaaaggac

SEQ ID NO: 268638 - DNA, 30 bp, Artificial Sequence
  Synthetic oligonucleotide
gatgaagacaaaataaaaattatcaaggac

SEQ ID NO: 268639 - DNA, 30 bp, Artificial Sequence
  Synthetic oligonucleotide
cttacatgacgtgcctcgatcaggaaggac

SEQ ID NO: 268640 - DNA, 30 bp, Artificial Sequence
  Synthetic oligonucleotide
gcgattacggaaacctggttcactaaggac

SEQ ID NO: 268641 - DNA, 30 bp, Artificial Sequence
  Synthetic oligonucleotide
tgtcacttacgagaactctcagttaaggac

SEQ ID NO: 268642 - DNA, 30 bp, Artificial Sequence
  Synthetic oligonucleotide
gccctataaatcgtaacgatgaaccaggac

SEQ ID NO: 268643 - DNA, 30 bp, Artificial Sequence
  Synthetic oligonucleotide
atctgtcggcattaaggatagcaccaggac

SEQ ID NO: 268644 - DNA, 30 bp, Artificial Sequence
  Synthetic oligonucleotide
ggtctctgatgcgagaaccttaagcaggac

SEQ ID NO: 268645 - DNA, 30 bp, Artificial Sequence
  Synthetic oligonucleotide
tgatgcgattgcatacaaggggcgcaggac

SEQ ID NO: 268646 - DNA, 30 bp, Artificial Sequence
  Synthetic oligonucleotide
gtggtgggttatcatgcaaggcggcaggac

SEQ ID NO: 268647 - DNA, 30 bp, Artificial Sequence
  Synthetic oligonucleotide
tgcgttgattgcagcgtggaaagtcaggac

SEQ ID NO: 268648 - DNA, 30 bp, Artificial Sequence
  Synthetic oligonucleotide
ggaatggaggtcctaaggttactggaggac

SEQ ID NO: 268649 - DNA, 30 bp, Artificial Sequence
  Synthetic oligonucleotide
tgctcggagttcaaatagtcccctgaggac

SEQ ID NO: 268650 - DNA, 31 bp, Artificial Sequence
  Synthetic oligonucleotide
ctgcgccgattacgctcatgcgcaataggac

SEQ ID NO: 268651 - DNA, 30 bp, Artificial Sequence
  Synthetic oligonucleotide
agctagctataccagcaatcggaataggac

SEQ ID NO: 268652 - DNA, 30 bp, Artificial Sequence
  Synthetic oligonucleotide
ccacgggacattgggctgatactctaggac

SEQ ID NO: 268653 - DNA, 30 bp, Artificial Sequence
  Synthetic oligonucleotide
cggtgtaaagttccggggagcaagtaggac

SEQ ID NO: 268654 - DNA, 30 bp, Artificial Sequence
  Synthetic oligonucleotide
gcgaagtacgagctgcaataaccgtaggac

SEQ ID NO: 268655 - DNA, 30 bp, Artificial Sequence
  Synthetic oligonucleotide
ccgcttgcgttactaaaaccgctgtaggac

SEQ ID NO: 268656 - DNA, 30 bp, Artificial Sequence
  Synthetic oligonucleotide
cgcaggctcgtcagatctggaacttaggac

SEQ ID NO: 268657 - DNA, 30 bp, Artificial Sequence
  Synthetic oligonucleotide
atttccatcgatggatcaaaggcttaggac

SEQ ID NO: 268658 - DNA, 30 bp, Artificial Sequence
  Synthetic oligonucleotide
gattcacaatagtagggggttagttaggac

SEQ ID NO: 268659 - DNA, 30 bp, Artificial Sequence
  Synthetic oligonucleotide
ggaatagtttaaatagcataaaaaacggac

SEQ ID NO: 268660 - DNA, 30 bp, Artificial Sequence
  Synthetic oligonucleotide
cgattagacgtctttcagaggttaacggac

SEQ ID NO: 268661 - DNA, 30 bp, Artificial Sequence
  Synthetic oligonucleotide
tcagcggagctggcatctcaaaggacggac

SEQ ID NO: 268662 - DNA, 30 bp, Artificial Sequence
  Synthetic oligonucleotide
aatactggccacagtcagttgtggacggac

SEQ ID NO: 268663 - DNA, 30 bp, Artificial Sequence
  Synthetic oligonucleotide
gcaattgggccaggcctagcagtgacggac

SEQ ID NO: 268664 - DNA, 30 bp, Artificial Sequence
  Synthetic oligonucleotide
gtaagacgttaggattatgggaatacggac

SEQ ID NO: 268665 - DNA, 30 bp, Artificial Sequence
  Synthetic oligonucleotide
gccaaaacacaggcggattgcgaaccggac

SEQ ID NO: 268666 - DNA, 30 bp, Artificial Sequence
  Synthetic oligonucleotide
tgcctggcgggatcacggcacctaccggac

SEQ ID NO: 268667 - DNA, 30 bp, Artificial Sequence
  Synthetic oligonucleotide
agccttagggggcgataggttccgccggac

SEQ ID NO: 268668 - DNA, 30 bp, Artificial Sequence
  Synthetic oligonucleotide
attgaacgctaataaacaagctctccggac

SEQ ID NO: 268669 - DNA, 30 bp, Artificial Sequence
  Synthetic oligonucleotide
caagacggaggaaggatccggcgtccggac

SEQ ID NO: 268670 - DNA, 30 bp, Artificial Sequence
  Synthetic oligonucleotide
gcggcgtatgcacctcggcgcgttccggac

SEQ ID NO: 268671 - DNA, 30 bp, Artificial Sequence
  Synthetic oligonucleotide
gattgacagtacgttttagccaacgcggac

SEQ ID NO: 268672 - DNA, 30 bp, Artificial Sequence
  Synthetic oligonucleotide
aagctagtgctcatagtctcgtacgcggac

SEQ ID NO: 268673 - DNA, 30 bp, Artificial Sequence
  Synthetic oligonucleotide
gaggggaagtttgtttcgcgggaggcggac

SEQ ID NO: 268674 - DNA, 30 bp, Artificial Sequence
  Synthetic oligonucleotide
tataggctccaacctcgatctgtggcggac

SEQ ID NO: 268675 - DNA, 30 bp, Artificial Sequence
  Synthetic oligonucleotide
gtagatggctcggggtcacccaatgcggac

SEQ ID NO: 268676 - DNA, 30 bp, Artificial Sequence
  Synthetic oligonucleotide
ccctcaacctctaaaagacgatatgcggac

SEQ ID NO: 268677 - DNA, 30 bp, Artificial Sequence
  Synthetic oligonucleotide
cccgaattttcgaaaatgtatactgcggac

SEQ ID NO: 268678 - DNA, 30 bp, Artificial Sequence
  Synthetic oligonucleotide
ccgtttgcgaacgagcgcctccgtgcggac

SEQ ID NO: 268679 - DNA, 30 bp, Artificial Sequence
  Synthetic oligonucleotide
ataagcggtcgcattgagatctgctcggac

SEQ ID NO: 268680 - DNA, 30 bp, Artificial Sequence
  Synthetic oligonucleotide
gcaaaaagtattggccccgttgagtcggac

SEQ ID NO: 268681 - DNA, 30 bp, Artificial Sequence
  Synthetic oligonucleotide
aatgagcgtctcgagatatgagggtcggac

SEQ ID NO: 268682 - DNA, 30 bp, Artificial Sequence
  Synthetic oligonucleotide
cgaaggggatcgcgccaccagcattcggac

SEQ ID NO: 268683 - DNA, 30 bp, Artificial Sequence
  Synthetic oligonucleotide
acgtatacaaaaagagtatcggcttcggac

SEQ ID NO: 268684 - DNA, 30 bp, Artificial Sequence
  Synthetic oligonucleotide
aacctccgcgctaagacaccggtttcggac

SEQ ID NO: 268685 - DNA, 30 bp, Artificial Sequence
  Synthetic oligonucleotide
ataccggccattgcggacaggaaaagggac

SEQ ID NO: 268686 - DNA, 30 bp, Artificial Sequence
  Synthetic oligonucleotide
tccagactacgctccctggtcgaaagggac

SEQ ID NO: 268687 - DNA, 30 bp, Artificial Sequence
  Synthetic oligonucleotide
gtgacacgctcacgggatacatgaagggac

SEQ ID NO: 268688 - DNA, 30 bp, Artificial Sequence
  Synthetic oligonucleotide
taatgagttagttcggaggaggacagggac

SEQ ID NO: 268689 - DNA, 30 bp, Artificial Sequence
  Synthetic oligonucleotide
agttaacataagggtattaattgcagggac

SEQ ID NO: 268690 - DNA, 30 bp, Artificial Sequence
  Synthetic oligonucleotide
tatagggcatccacggggtgtatgagggac

SEQ ID NO: 268691 - DNA, 31 bp, Artificial Sequence
  Synthetic oligonucleotide
atactgatgcatatacacgcttcatagggac

SEQ ID NO: 268692 - DNA, 30 bp, Artificial Sequence
  Synthetic oligonucleotide
caggacatgatgcgttgggcggcacgggac

SEQ ID NO: 268693 - DNA, 30 bp, Artificial Sequence
  Synthetic oligonucleotide
ggatgtccctctacatcgctctcacgggac

SEQ ID NO: 268694 - DNA, 30 bp, Artificial Sequence
  Synthetic oligonucleotide
gtgttgagtcaataagtatcatctcgggac

SEQ ID NO: 268695 - DNA, 30 bp, Artificial Sequence
  Synthetic oligonucleotide
aagcgattaagtttcagacaccgtcgggac

SEQ ID NO: 268696 - DNA, 30 bp, Artificial Sequence
  Synthetic oligonucleotide
gtcgatgaagagggccgaatttgtcgggac

SEQ ID NO: 268697 - DNA, 30 bp, Artificial Sequence
  Synthetic oligonucleotide
gggccaaaggtccgcgtgggttaaggggac

SEQ ID NO: 268698 - DNA, 30 bp, Artificial Sequence
  Synthetic oligonucleotide
gtaaaaacgacacccggatagtcaggggac

SEQ ID NO: 268699 - DNA, 30 bp, Artificial Sequence
  Synthetic oligonucleotide
gcgactaacgctttgacgtacgcgggggac

SEQ ID NO: 268700 - DNA, 30 bp, Artificial Sequence
  Synthetic oligonucleotide
ctatgtatctaccacaaggtttgctgggac

SEQ ID NO: 268701 - DNA, 30 bp, Artificial Sequence
  Synthetic oligonucleotide
aagtctttatcaagaatgttcacgtgggac

SEQ ID NO: 268702 - DNA, 30 bp, Artificial Sequence
  Synthetic oligonucleotide
gtaactgaaaatcataaggatacttgggac

SEQ ID NO: 268703 - DNA, 30 bp, Artificial Sequence
  Synthetic oligonucleotide
tcaattatcggtgtgagatgggggatggac

SEQ ID NO: 268704 - DNA, 30 bp, Artificial Sequence
  Synthetic oligonucleotide
ctgaaattagtgcagccgaaaatgatggac

SEQ ID NO: 268705 - DNA, 30 bp, Artificial Sequence
  Synthetic oligonucleotide
gaaaaaagtcgcactcgttctttgatggac

SEQ ID NO: 268706 - DNA, 30 bp, Artificial Sequence
  Synthetic oligonucleotide
gacggtaaagtgtgcctatcgtttatggac

SEQ ID NO: 268707 - DNA, 30 bp, Artificial Sequence
  Synthetic oligonucleotide
aacgttctcagacagctgaaccaactggac

SEQ ID NO: 268708 - DNA, 30 bp, Artificial Sequence
  Synthetic oligonucleotide
tacgtctaaatcaaagtgtatccactggac

SEQ ID NO: 268709 - DNA, 30 bp, Artificial Sequence
  Synthetic oligonucleotide
tagttcggctttgcgatttcagcactggac

SEQ ID NO: 268710 - DNA, 29 bp, Artificial Sequence
  Synthetic oligonucleotide
cgcggtaattatacaaggtggacctggac

SEQ ID NO: 268711 - DNA, 30 bp, Artificial Sequence
  Synthetic oligonucleotide
tcccagtgagcaagctagtgcccgctggac

SEQ ID NO: 268712 - DNA, 30 bp, Artificial Sequence
  Synthetic oligonucleotide
atcctatccatcccatatcggccagtggac

SEQ ID NO: 268713 - DNA, 30 bp, Artificial Sequence
  Synthetic oligonucleotide
caacccaccaacactgggcggacggtggac

SEQ ID NO: 268714 - DNA, 30 bp, Artificial Sequence
  Synthetic oligonucleotide
tccccgagggtagagttctagccggtggac

SEQ ID NO: 268715 - DNA, 30 bp, Artificial Sequence
  Synthetic oligonucleotide
atctaaacgggctttacgtacggggtggac

SEQ ID NO: 268716 - DNA, 30 bp, Artificial Sequence
  Synthetic oligonucleotide
gccacactaaaggagaagctgtgggtggac

SEQ ID NO: 268717 - DNA, 30 bp, Artificial Sequence
  Synthetic oligonucleotide
taattgagaataaacccatatactgtggac

SEQ ID NO: 268718 - DNA, 30 bp, Artificial Sequence
  Synthetic oligonucleotide
gaagctagtgagcgttcgtacgctgtggac

SEQ ID NO: 268719 - DNA, 30 bp, Artificial Sequence
  Synthetic oligonucleotide
cacgacggtctaccagtcaatattgtggac

SEQ ID NO: 268720 - DNA, 30 bp, Artificial Sequence
  Synthetic oligonucleotide
tccaggttcccggagtaatcgcaattggac

SEQ ID NO: 268721 - DNA, 30 bp, Artificial Sequence
  Synthetic oligonucleotide
aagaggccacgacatcatattgtattggac

SEQ ID NO: 268722 - DNA, 30 bp, Artificial Sequence
  Synthetic oligonucleotide
gaaacactaggggtgaccatagttttggac

SEQ ID NO: 268723 - DNA, 30 bp, Artificial Sequence
  Synthetic oligonucleotide
acacccaccttagttagtcaggaaaatgac

SEQ ID NO: 268724 - DNA, 30 bp, Artificial Sequence
  Synthetic oligonucleotide
aatcgctggaaagaagtgacacgaaatgac

SEQ ID NO: 268725 - DNA, 30 bp, Artificial Sequence
  Synthetic oligonucleotide
taaacgagccccttagccacgggcaatgac

SEQ ID NO: 268726 - DNA, 30 bp, Artificial Sequence
  Synthetic oligonucleotide
ccagttggaccccggcgcatgggcaatgac

SEQ ID NO: 268727 - DNA, 30 bp, Artificial Sequence
  Synthetic oligonucleotide
ccatctgtattaaattgcaccagtaatgac

SEQ ID NO: 268728 - DNA, 30 bp, Artificial Sequence
  Synthetic oligonucleotide
tcatctcggcggtattacatctaacatgac

SEQ ID NO: 268729 - DNA, 30 bp, Artificial Sequence
  Synthetic oligonucleotide
acactgtctaaaacgtctaggtaacatgac

SEQ ID NO: 268730 - DNA, 30 bp, Artificial Sequence
  Synthetic oligonucleotide
ccaggttactgcgttactcattcacatgac

SEQ ID NO: 268731 - DNA, 30 bp, Artificial Sequence
  Synthetic oligonucleotide
taatggggtcaagggttcggctcccatgac

SEQ ID NO: 268732 - DNA, 30 bp, Artificial Sequence
  Synthetic oligonucleotide
atatatgatggtccgagctatctccatgac

SEQ ID NO: 268733 - DNA, 30 bp, Artificial Sequence
  Synthetic oligonucleotide
aggatacccaccaaatccatgctagatgac

SEQ ID NO: 268734 - DNA, 30 bp, Artificial Sequence
  Synthetic oligonucleotide
gttgccgtcattcctagtatctacgatgac

SEQ ID NO: 268735 - DNA, 30 bp, Artificial Sequence
  Synthetic oligonucleotide
gcatcttgtcgggtcaagagtggggatgac

SEQ ID NO: 268736 - DNA, 30 bp, Artificial Sequence
  Synthetic oligonucleotide
taaagttaagcaagcttgtgaaatgatgac

SEQ ID NO: 268737 - DNA, 30 bp, Artificial Sequence
  Synthetic oligonucleotide
actataaataaaatccgaccatctgatgac

SEQ ID NO: 268738 - DNA, 30 bp, Artificial Sequence
  Synthetic oligonucleotide
gggcataagaaggtacgcactattgatgac

SEQ ID NO: 268739 - DNA, 30 bp, Artificial Sequence
  Synthetic oligonucleotide
ttgccgccggctaaagagtgggttgatgac

SEQ ID NO: 268740 - DNA, 30 bp, Artificial Sequence
  Synthetic oligonucleotide
caagcaccatacgactcgtgagcatatgac

SEQ ID NO: 268741 - DNA, 30 bp, Artificial Sequence
  Synthetic oligonucleotide
aggaccatatgggccgttatgagatatgac

SEQ ID NO: 268742 - DNA, 30 bp, Artificial Sequence
  Synthetic oligonucleotide
tggacacagcttataagttaaggatatgac

SEQ ID NO: 268743 - DNA, 30 bp, Artificial Sequence
  Synthetic oligonucleotide
agatccacgccccggacggatctatatgac

SEQ ID NO: 268744 - DNA, 30 bp, Artificial Sequence
  Synthetic oligonucleotide
agtatatagccttctccttaagcctatgac

SEQ ID NO: 268745 - DNA, 30 bp, Artificial Sequence
  Synthetic oligonucleotide
gtagacggatccctacggcgttgttatgac

SEQ ID NO: 268746 - DNA, 30 bp, Artificial Sequence
  Synthetic oligonucleotide
cctgacccaaatattctgtataaaactgac

SEQ ID NO: 268747 - DNA, 30 bp, Artificial Sequence
  Synthetic oligonucleotide
gtacacagtggcgttgtgtccaccactgac

SEQ ID NO: 268748 - DNA, 30 bp, Artificial Sequence
  Synthetic oligonucleotide
taatatctatgcttagttgcaaggactgac

SEQ ID NO: 268749 - DNA, 30 bp, Artificial Sequence
  Synthetic oligonucleotide
caaacaggcgggtagtgaccatgtactgac

SEQ ID NO: 268750 - DNA, 31 bp, Artificial Sequence
  Synthetic oligonucleotide
cgtgcagtaagacgcggaactcgcacctgac

SEQ ID NO: 268751 - DNA, 30 bp, Artificial Sequence
  Synthetic oligonucleotide
cagcatgggtgatcgcggggtgagcctgac

SEQ ID NO: 268752 - DNA, 30 bp, Artificial Sequence
  Synthetic oligonucleotide
gtgctatccgagtcacctgagcacgctgac

SEQ ID NO: 268753 - DNA, 30 bp, Artificial Sequence
  Synthetic oligonucleotide
tttcatggaaatcgggcaggtccggctgac

SEQ ID NO: 268754 - DNA, 30 bp, Artificial Sequence
  Synthetic oligonucleotide
tctccaaaagacaactaaccagtatctgac

SEQ ID NO: 268755 - DNA, 30 bp, Artificial Sequence
  Synthetic oligonucleotide
aaactagtgatcgatatcaaagcctctgac

SEQ ID NO: 268756 - DNA, 30 bp, Artificial Sequence
  Synthetic oligonucleotide
aaaagcaattaggcctcaagttcctctgac

SEQ ID NO: 268757 - DNA, 30 bp, Artificial Sequence
  Synthetic oligonucleotide
atcgatggactacccgatgtagggtctgac

SEQ ID NO: 268758 - DNA, 30 bp, Artificial Sequence
  Synthetic oligonucleotide
caaacatgcggtcagggggggatttctgac

SEQ ID NO: 268759 - DNA, 31 bp, Artificial Sequence
  Synthetic oligonucleotide
actggagcggctggtgccctcattaagtgac

SEQ ID NO: 268760 - DNA, 30 bp, Artificial Sequence
  Synthetic oligonucleotide
ggtgtaagtcttggtccccaggccagtgac

SEQ ID NO: 268761 - DNA, 30 bp, Artificial Sequence
  Synthetic oligonucleotide
gtaaaggtctaacgaagtatttagagtgac

SEQ ID NO: 268762 - DNA, 30 bp, Artificial Sequence
  Synthetic oligonucleotide
ctagcactttaggttgaactatcgagtgac

SEQ ID NO: 268763 - DNA, 30 bp, Artificial Sequence
  Synthetic oligonucleotide
tcgaagatttgagttttgaacgggagtgac

SEQ ID NO: 268764 - DNA, 30 bp, Artificial Sequence
  Synthetic oligonucleotide
gcaaatctagagacgtacgtgtatagtgac

SEQ ID NO: 268765 - DNA, 30 bp, Artificial Sequence
  Synthetic oligonucleotide
ttgtgaagattgcaggagagacgtagtgac

SEQ ID NO: 268766 - DNA, 30 bp, Artificial Sequence
  Synthetic oligonucleotide
agtgaccccctttaccgggagtaacgtgac

SEQ ID NO: 268767 - DNA, 30 bp, Artificial Sequence
  Synthetic oligonucleotide
cagatacggtgtacacgggtctgccgtgac

SEQ ID NO: 268768 - DNA, 30 bp, Artificial Sequence
  Synthetic oligonucleotide
agttatcacaggctaggtacgtgtcgtgac

SEQ ID NO: 268769 - DNA, 30 bp, Artificial Sequence
  Synthetic oligonucleotide
ataatcactgcgcgtgattgtagaggtgac

SEQ ID NO: 268770 - DNA, 30 bp, Artificial Sequence
  Synthetic oligonucleotide
agaccactacaatgcggagcaggcggtgac

SEQ ID NO: 268771 - DNA, 30 bp, Artificial Sequence
  Synthetic oligonucleotide
tgaacaacgtgcttgatcgtctctggtgac

SEQ ID NO: 268772 - DNA, 30 bp, Artificial Sequence
  Synthetic oligonucleotide
aagaaattaaattcccaggtacgtggtgac

SEQ ID NO: 268773 - DNA, 30 bp, Artificial Sequence
  Synthetic oligonucleotide
taacggtaacctgtcatcatgccctgtgac

SEQ ID NO: 268774 - DNA, 30 bp, Artificial Sequence
  Synthetic oligonucleotide
acatggtcgggcgcagagcataagtgtgac

SEQ ID NO: 268775 - DNA, 30 bp, Artificial Sequence
  Synthetic oligonucleotide
taaacgatggtgtgtggttcagagtgtgac

SEQ ID NO: 268776 - DNA, 30 bp, Artificial Sequence
  Synthetic oligonucleotide
ttatcgtaaacgcggtcatgatagtgtgac

SEQ ID NO: 268777 - DNA, 30 bp, Artificial Sequence
  Synthetic oligonucleotide
ttacttagatagagagagctttattgtgac

SEQ ID NO: 268778 - DNA, 30 bp, Artificial Sequence
  Synthetic oligonucleotide
gtgacttcacaggttcggttaaccattgac

SEQ ID NO: 268779 - DNA, 30 bp, Artificial Sequence
  Synthetic oligonucleotide
gccggaagcgactggtgctcacccattgac

SEQ ID NO: 268780 - DNA, 28 bp, Artificial Sequence
  Synthetic oligonucleotide
ccaacttttgcttgctacttagattgac

SEQ ID NO: 268781 - DNA, 30 bp, Artificial Sequence
  Synthetic oligonucleotide
tgtattggcgctacgtggcctccgattgac

SEQ ID NO: 268782 - DNA, 30 bp, Artificial Sequence
  Synthetic oligonucleotide
gttcacatgttgcattattcccggattgac

SEQ ID NO: 268783 - DNA, 30 bp, Artificial Sequence
  Synthetic oligonucleotide
tgtgttaagcaaccctacaaggggattgac

SEQ ID NO: 268784 - DNA, 30 bp, Artificial Sequence
  Synthetic oligonucleotide
cggtaaacatttcgtacttgatggattgac

SEQ ID NO: 268785 - DNA, 30 bp, Artificial Sequence
  Synthetic oligonucleotide
tgttgcggtgctcgccgtcacgagcttgac

SEQ ID NO: 268786 - DNA, 30 bp, Artificial Sequence
  Synthetic oligonucleotide
gatcacttatgcgtccaggttggtcttgac

SEQ ID NO: 268787 - DNA, 30 bp, Artificial Sequence
  Synthetic oligonucleotide
caatgtctgaccaaagtatcgatcgttgac

SEQ ID NO: 268788 - DNA, 30 bp, Artificial Sequence
  Synthetic oligonucleotide
ggtctatggcaagggttagcaccggttgac

SEQ ID NO: 268789 - DNA, 30 bp, Artificial Sequence
  Synthetic oligonucleotide
ggttgagattggtataagatttgtgttgac

SEQ ID NO: 268790 - DNA, 30 bp, Artificial Sequence
  Synthetic oligonucleotide
atggcaagatgggcggtaagcaaatttgac

SEQ ID NO: 268791 - DNA, 30 bp, Artificial Sequence
  Synthetic oligonucleotide
cttaaggaacgtttttggtctcaatttgac

SEQ ID NO: 268792 - DNA, 30 bp, Artificial Sequence
  Synthetic oligonucleotide
tagccgccgttgcaggcttgtcgatttgac

SEQ ID NO: 268793 - DNA, 30 bp, Artificial Sequence
  Synthetic oligonucleotide
ggcaactgactcttgacgggtacctttgac

SEQ ID NO: 268794 - DNA, 30 bp, Artificial Sequence
  Synthetic oligonucleotide
ttaataaaggtatcaggtaagggctttgac

SEQ ID NO: 268795 - DNA, 30 bp, Artificial Sequence
  Synthetic oligonucleotide
gtaatcgtcattgcgttgagatagtttgac

SEQ ID NO: 268796 - DNA, 30 bp, Artificial Sequence
  Synthetic oligonucleotide
aagacccaatctaggctgtatatgtttgac

SEQ ID NO: 268797 - DNA, 30 bp, Artificial Sequence
  Synthetic oligonucleotide
actatcggcgatcctacctcaccttttgac

SEQ ID NO: 268798 - DNA, 30 bp, Artificial Sequence
  Synthetic oligonucleotide
ggccatgtgatatgacagatgagaaaatac

SEQ ID NO: 268799 - DNA, 31 bp, Artificial Sequence
  Synthetic oligonucleotide
tcgtcattgcgatggtagtgggttaaaatac

SEQ ID NO: 268800 - DNA, 30 bp, Artificial Sequence
  Synthetic oligonucleotide
tagtagtgtgtagctccataggcgaaatac

SEQ ID NO: 268801 - DNA, 30 bp, Artificial Sequence
  Synthetic oligonucleotide
catgttaccgtaaggggggcaccacaatac

SEQ ID NO: 268802 - DNA, 30 bp, Artificial Sequence
  Synthetic oligonucleotide
actcggaatggcaaaggaccacaccaatac

SEQ ID NO: 268803 - DNA, 30 bp, Artificial Sequence
  Synthetic oligonucleotide
aaatgcgcgatccaatacctgtcccaatac

SEQ ID NO: 268804 - DNA, 30 bp, Artificial Sequence
  Synthetic oligonucleotide
cgttttcttcattgcttgaacatccaatac

SEQ ID NO: 268805 - DNA, 30 bp, Artificial Sequence
  Synthetic oligonucleotide
aatcgaggtatgtggtcacgaaagcaatac

SEQ ID NO: 268806 - DNA, 30 bp, Artificial Sequence
  Synthetic oligonucleotide
gtggcagatcgacagtatattttgcaatac

SEQ ID NO: 268807 - DNA, 30 bp, Artificial Sequence
  Synthetic oligonucleotide
cctaggcgagttatctcgctccgtcaatac

SEQ ID NO: 268808 - DNA, 30 bp, Artificial Sequence
  Synthetic oligonucleotide
tcatggctcgccgtatcgacacttcaatac

SEQ ID NO: 268809 - DNA, 30 bp, Artificial Sequence
  Synthetic oligonucleotide
ctatgtacccgatatgcgggcgaagaatac

SEQ ID NO: 268810 - DNA, 30 bp, Artificial Sequence
  Synthetic oligonucleotide
actgatagagtaaccctccagtacgaatac

SEQ ID NO: 268811 - DNA, 30 bp, Artificial Sequence
  Synthetic oligonucleotide
aacacggcgaagtccagtccccccgaatac

SEQ ID NO: 268812 - DNA, 30 bp, Artificial Sequence
  Synthetic oligonucleotide
gtcacggaatgatgcgcataagccgaatac

SEQ ID NO: 268813 - DNA, 30 bp, Artificial Sequence
  Synthetic oligonucleotide
aacaattcagtaaacacaagcgccgaatac

SEQ ID NO: 268814 - DNA, 30 bp, Artificial Sequence
  Synthetic oligonucleotide
tctctaatttttcgaccctatcgcgaatac

SEQ ID NO: 268815 - DNA, 30 bp, Artificial Sequence
  Synthetic oligonucleotide
atcgacctagcgaatgaataccgggaatac

SEQ ID NO: 268816 - DNA, 30 bp, Artificial Sequence
  Synthetic oligonucleotide
aacaaatgttgtttcgggtaccgtgaatac

SEQ ID NO: 268817 - DNA, 30 bp, Artificial Sequence
  Synthetic oligonucleotide
gtgtgctcggaacgcatctcagttgaatac

SEQ ID NO: 268818 - DNA, 30 bp, Artificial Sequence
  Synthetic oligonucleotide
caactaaacaaggaacggtagaaataatac

SEQ ID NO: 268819 - DNA, 30 bp, Artificial Sequence
  Synthetic oligonucleotide
cggacaatgatatggaacttatggtaatac

SEQ ID NO: 268820 - DNA, 30 bp, Artificial Sequence
  Synthetic oligonucleotide
gcgatcagctgtaaccagcacacaacatac

SEQ ID NO: 268821 - DNA, 30 bp, Artificial Sequence
  Synthetic oligonucleotide
ggtggagtctgaaccaggatcgcaacatac

SEQ ID NO: 268822 - DNA, 30 bp, Artificial Sequence
  Synthetic oligonucleotide
gagagatgggtcaactctcactccacatac

SEQ ID NO: 268823 - DNA, 30 bp, Artificial Sequence
  Synthetic oligonucleotide
aggcaaatgttttgctttgagactacatac

SEQ ID NO: 268824 - DNA, 30 bp, Artificial Sequence
  Synthetic oligonucleotide
cgttagggtggaggtaattggcctacatac

SEQ ID NO: 268825 - DNA, 30 bp, Artificial Sequence
  Synthetic oligonucleotide
aagcgcaacgatgacacgtatatcccatac

SEQ ID NO: 268826 - DNA, 30 bp, Artificial Sequence
  Synthetic oligonucleotide
tgatatcagtatgaatagcgatcgccatac

SEQ ID NO: 268827 - DNA, 30 bp, Artificial Sequence
  Synthetic oligonucleotide
aactaactcggaaaggtctcagggccatac

SEQ ID NO: 268828 - DNA, 30 bp, Artificial Sequence
  Synthetic oligonucleotide
acctgaccgtatcaagcagcactgccatac

SEQ ID NO: 268829 - DNA, 30 bp, Artificial Sequence
  Synthetic oligonucleotide
ctctggatcgatggcaagcccaatccatac

SEQ ID NO: 268830 - DNA, 30 bp, Artificial Sequence
  Synthetic oligonucleotide
ttatagcgaatacggacaaacacagcatac

SEQ ID NO: 268831 - DNA, 30 bp, Artificial Sequence
  Synthetic oligonucleotide
tgtcattaatcactcctaaactcagcatac

SEQ ID NO: 268832 - DNA, 30 bp, Artificial Sequence
  Synthetic oligonucleotide
gtaccaatagtcttccattatggggcatac

SEQ ID NO: 268833 - DNA, 30 bp, Artificial Sequence
  Synthetic oligonucleotide
taactggcctgaaactcttgtagttcatac

SEQ ID NO: 268834 - DNA, 30 bp, Artificial Sequence
  Synthetic oligonucleotide
ggcaaaagttgagaacttcaaggaagatac

SEQ ID NO: 268835 - DNA, 30 bp, Artificial Sequence
  Synthetic oligonucleotide
ttacagcgatccacactgacagttagatac

SEQ ID NO: 268836 - DNA, 30 bp, Artificial Sequence
  Synthetic oligonucleotide
ctcctatatatgcccaaggcagaacgatac

SEQ ID NO: 268837 - DNA, 30 bp, Artificial Sequence
  Synthetic oligonucleotide
tggcgcacgatgttggcgcgactacgatac

SEQ ID NO: 268838 - DNA, 30 bp, Artificial Sequence
  Synthetic oligonucleotide
tagtagcgctaaaaagaaggtaatcgatac

SEQ ID NO: 268839 - DNA, 30 bp, Artificial Sequence
  Synthetic oligonucleotide
ccactcaaaacggccatgagggggggatac

SEQ ID NO: 268840 - DNA, 30 bp, Artificial Sequence
  Synthetic oligonucleotide
gcggcttgcgtccgaaagcgagctggatac

SEQ ID NO: 268841 - DNA, 30 bp, Artificial Sequence
  Synthetic oligonucleotide
ctatactatcccatagacccaattggatac

SEQ ID NO: 268842 - DNA, 30 bp, Artificial Sequence
  Synthetic oligonucleotide
gttcgtggcgacttgttgaatattggatac

SEQ ID NO: 268843 - DNA, 30 bp, Artificial Sequence
  Synthetic oligonucleotide
gggctaggacgataaagtaaataatgatac

SEQ ID NO: 268844 - DNA, 30 bp, Artificial Sequence
  Synthetic oligonucleotide
ctatacttgaaaaggcaataactctgatac

SEQ ID NO: 268845 - DNA, 30 bp, Artificial Sequence
  Synthetic oligonucleotide
tgaatagggtcagttcaaggtcagtgatac

SEQ ID NO: 268846 - DNA, 30 bp, Artificial Sequence
  Synthetic oligonucleotide
tggtctagtgaggcggggatgcacatatac

SEQ ID NO: 268847 - DNA, 30 bp, Artificial Sequence
  Synthetic oligonucleotide
gttcaaagcgacatggtttgtgacatatac

SEQ ID NO: 268848 - DNA, 30 bp, Artificial Sequence
  Synthetic oligonucleotide
gggacgagaacttttatcggtagcatatac

SEQ ID NO: 268849 - DNA, 30 bp, Artificial Sequence
  Synthetic oligonucleotide
ctgtgtgtcgcgatgttgtctccgatatac

SEQ ID NO: 268850 - DNA, 30 bp, Artificial Sequence
  Synthetic oligonucleotide
cactaacgggtttcaagaaacgtgatatac

SEQ ID NO: 268851 - DNA, 30 bp, Artificial Sequence
  Synthetic oligonucleotide
ccatgaaatcaaaagttgttcccactatac

SEQ ID NO: 268852 - DNA, 30 bp, Artificial Sequence
  Synthetic oligonucleotide
atacagagacgtggcccaggttcactatac

SEQ ID NO: 268853 - DNA, 30 bp, Artificial Sequence
  Synthetic oligonucleotide
aggtttaaagagtttcttcgacgactatac

SEQ ID NO: 268854 - DNA, 30 bp, Artificial Sequence
  Synthetic oligonucleotide
ctcggcacaataaatccatcatccctatac

SEQ ID NO: 268855 - DNA, 30 bp, Artificial Sequence
  Synthetic oligonucleotide
ctgacgtaggcctagtgggtaacagtatac

SEQ ID NO: 268856 - DNA, 30 bp, Artificial Sequence
  Synthetic oligonucleotide
gcgacattgttaaacgtgctttgagtatac

SEQ ID NO: 268857 - DNA, 30 bp, Artificial Sequence
  Synthetic oligonucleotide
gacgtgcattctgtatgtgcgctagtatac

SEQ ID NO: 268858 - DNA, 30 bp, Artificial Sequence
  Synthetic oligonucleotide
cgaagccggcaattcccaagtccggtatac

SEQ ID NO: 268859 - DNA, 30 bp, Artificial Sequence
  Synthetic oligonucleotide
cccgtatgggacgggcagagtactgtatac

SEQ ID NO: 268860 - DNA, 30 bp, Artificial Sequence
  Synthetic oligonucleotide
gtacggcagaccgggtcgggtcctgtatac

SEQ ID NO: 268861 - DNA, 30 bp, Artificial Sequence
  Synthetic oligonucleotide
aaaggtttaagataaagtccgtgtgtatac

SEQ ID NO: 268862 - DNA, 30 bp, Artificial Sequence
  Synthetic oligonucleotide
agggcggacaggaccgtcgagatattatac

SEQ ID NO: 268863 - DNA, 30 bp, Artificial Sequence
  Synthetic oligonucleotide
tacgtaaccgggtgtgcgcccagcttatac

SEQ ID NO: 268864 - DNA, 30 bp, Artificial Sequence
  Synthetic oligonucleotide
gcgaagtcatccagggccatggaaaactac

SEQ ID NO: 268865 - DNA, 30 bp, Artificial Sequence
  Synthetic oligonucleotide
agcgcgcaaacatctgcaaccgacaactac

SEQ ID NO: 268866 - DNA, 30 bp, Artificial Sequence
  Synthetic oligonucleotide
tcatgcgtaatgaacgagacgatcaactac

SEQ ID NO: 268867 - DNA, 30 bp, Artificial Sequence
  Synthetic oligonucleotide
ttaaagtacaacaacttccacaggaactac

SEQ ID NO: 268868 - DNA, 30 bp, Artificial Sequence
  Synthetic oligonucleotide
ataattccgtcagcaggattggggaactac

SEQ ID NO: 268869 - DNA, 30 bp, Artificial Sequence
  Synthetic oligonucleotide
gcctggattctcgagtcccgttataactac

SEQ ID NO: 268870 - DNA, 30 bp, Artificial Sequence
  Synthetic oligonucleotide
atatgggtcaggaatgtagagatccactac

SEQ ID NO: 268871 - DNA, 30 bp, Artificial Sequence
  Synthetic oligonucleotide
agctacgtgcacagacctcaggtccactac

SEQ ID NO: 268872 - DNA, 30 bp, Artificial Sequence
  Synthetic oligonucleotide
taatagaggactgctaaagattcgcactac

SEQ ID NO: 268873 - DNA, 30 bp, Artificial Sequence
  Synthetic oligonucleotide
agttaactgagtcttattaaattgcactac

SEQ ID NO: 268874 - DNA, 30 bp, Artificial Sequence
  Synthetic oligonucleotide
tcgtatgcctgagtgaacgaatatcactac

SEQ ID NO: 268875 - DNA, 30 bp, Artificial Sequence
  Synthetic oligonucleotide
gtgcgcctagggccgtgtgtttgtcactac

SEQ ID NO: 268876 - DNA, 30 bp, Artificial Sequence
  Synthetic oligonucleotide
gaacaaaggccatacccgaattaagactac

SEQ ID NO: 268877 - DNA, 30 bp, Artificial Sequence
  Synthetic oligonucleotide
cttcaaaagtacaagtcccccccagactac

SEQ ID NO: 268878 - DNA, 30 bp, Artificial Sequence
  Synthetic oligonucleotide
cttacacgagggcatcatagcccagactac

SEQ ID NO: 268879 - DNA, 30 bp, Artificial Sequence
  Synthetic oligonucleotide
cgcctgtcggacctggtggagccagactac

SEQ ID NO: 268880 - DNA, 30 bp, Artificial Sequence
  Synthetic oligonucleotide
ctaattcttggaactgtaggaggagactac

SEQ ID NO: 268881 - DNA, 30 bp, Artificial Sequence
  Synthetic oligonucleotide
gattcctcatggggcaactaaatagactac

SEQ ID NO: 268882 - DNA, 30 bp, Artificial Sequence
  Synthetic oligonucleotide
ttattcggtcaatagctacctgccgactac

SEQ ID NO: 268883 - DNA, 30 bp, Artificial Sequence
  Synthetic oligonucleotide
acgacgcctattaaagtcacattcgactac

SEQ ID NO: 268884 - DNA, 30 bp, Artificial Sequence
  Synthetic oligonucleotide
ataaaagagataaccttcggtcaggactac

SEQ ID NO: 268885 - DNA, 30 bp, Artificial Sequence
  Synthetic oligonucleotide
tagttggtctaggaaccgtcagaggactac

SEQ ID NO: 268886 - DNA, 30 bp, Artificial Sequence
  Synthetic oligonucleotide
gatcaccaaggctataacgggtaggactac

SEQ ID NO: 268887 - DNA, 27 bp, Artificial Sequence
  Synthetic oligonucleotide
atagcctctcggtccacatcggactac

SEQ ID NO: 268888 - DNA, 30 bp, Artificial Sequence
  Synthetic oligonucleotide
cggccacctccaatcagctgattggactac

SEQ ID NO: 268889 - DNA, 30 bp, Artificial Sequence
  Synthetic oligonucleotide
ggatcgattttgcgtgtgtgtgaatactac

SEQ ID NO: 268890 - DNA, 30 bp, Artificial Sequence
  Synthetic oligonucleotide
acaatcagttcccggccggaaccatactac

SEQ ID NO: 268891 - DNA, 30 bp, Artificial Sequence
  Synthetic oligonucleotide
agagatgtactgagcgcaactatctactac

SEQ ID NO: 268892 - DNA, 30 bp, Artificial Sequence
  Synthetic oligonucleotide
attaccgtgattggtactgaactctactac

SEQ ID NO: 268893 - DNA, 30 bp, Artificial Sequence
  Synthetic oligonucleotide
agggtttgatttgtgcaaagttggtactac

SEQ ID NO: 268894 - DNA, 30 bp, Artificial Sequence
  Synthetic oligonucleotide
gtgctgtgtcgttgattgcaaccttactac

SEQ ID NO: 268895 - DNA, 30 bp, Artificial Sequence
  Synthetic oligonucleotide
tacggaagatgataccgcagtcacacctac

SEQ ID NO: 268896 - DNA, 30 bp, Artificial Sequence
  Synthetic oligonucleotide
gcggcgtggtaataattctacagcacctac

SEQ ID NO: 268897 - DNA, 30 bp, Artificial Sequence
  Synthetic oligonucleotide
acctatgcgaactctgcctgtatcacctac

SEQ ID NO: 268898 - DNA, 30 bp, Artificial Sequence
  Synthetic oligonucleotide
cgtgacggggcatcaaaagtgtggacctac

SEQ ID NO: 268899 - DNA, 30 bp, Artificial Sequence
  Synthetic oligonucleotide
ttggggatcacgactggtctagatacctac

SEQ ID NO: 268900 - DNA, 30 bp, Artificial Sequence
  Synthetic oligonucleotide
actcgatagtcccactcaaccactacctac

SEQ ID NO: 268901 - DNA, 30 bp, Artificial Sequence
  Synthetic oligonucleotide
tgcaccttaagtaatgtcaaatccccctac

SEQ ID NO: 268902 - DNA, 30 bp, Artificial Sequence
  Synthetic oligonucleotide
acggaataacattgatggattttgccctac

SEQ ID NO: 268903 - DNA, 30 bp, Artificial Sequence
  Synthetic oligonucleotide
ccttagcgtcgggatcagtcttttccctac

SEQ ID NO: 268904 - DNA, 30 bp, Artificial Sequence
  Synthetic oligonucleotide
ggtgggaccttcatcgcgactcatgcctac

SEQ ID NO: 268905 - DNA, 30 bp, Artificial Sequence
  Synthetic oligonucleotide
tctagctcgttgatataaagtcctgcctac

SEQ ID NO: 268906 - DNA, 30 bp, Artificial Sequence
  Synthetic oligonucleotide
tgttgtagggcccgataagtgtttgcctac

SEQ ID NO: 268907 - DNA, 30 bp, Artificial Sequence
  Synthetic oligonucleotide
caacctttaagactaactcgtacatcctac

SEQ ID NO: 268908 - DNA, 30 bp, Artificial Sequence
  Synthetic oligonucleotide
aacccaacaccgcccgtgtggtaaagctac

SEQ ID NO: 268909 - DNA, 30 bp, Artificial Sequence
  Synthetic oligonucleotide
ctccttacctaggactaaggcttaagctac

SEQ ID NO: 268910 - DNA, 30 bp, Artificial Sequence
  Synthetic oligonucleotide
gacagctcacaatgagacagtatcagctac

SEQ ID NO: 268911 - DNA, 30 bp, Artificial Sequence
  Synthetic oligonucleotide
gtattacctacctagaaccttaggagctac

SEQ ID NO: 268912 - DNA, 30 bp, Artificial Sequence
  Synthetic oligonucleotide
acgacactagtgctattagtccgtagctac

SEQ ID NO: 268913 - DNA, 30 bp, Artificial Sequence
  Synthetic oligonucleotide
aggaccaccggtccatccatagtacgctac

SEQ ID NO: 268914 - DNA, 30 bp, Artificial Sequence
  Synthetic oligonucleotide
cgcgttgtcatttgtatacacagccgctac

SEQ ID NO: 268915 - DNA, 30 bp, Artificial Sequence
  Synthetic oligonucleotide
ttcgaatcccctagcggtttggagcgctac

SEQ ID NO: 268916 - DNA, 30 bp, Artificial Sequence
  Synthetic oligonucleotide
atcagcttagcaatatatccatcgcgctac

SEQ ID NO: 268917 - DNA, 30 bp, Artificial Sequence
  Synthetic oligonucleotide
tacctcgtccccttaatccagttaggctac

SEQ ID NO: 268918 - DNA, 30 bp, Artificial Sequence
  Synthetic oligonucleotide
ggaagggtgaagttgaaggtatgcggctac

SEQ ID NO: 268919 - DNA, 30 bp, Artificial Sequence
  Synthetic oligonucleotide
caggtatatttggccataagcctatgctac

SEQ ID NO: 268920 - DNA, 30 bp, Artificial Sequence
  Synthetic oligonucleotide
gaagtggtgtagcgtatacgcgcctgctac

SEQ ID NO: 268921 - DNA, 30 bp, Artificial Sequence
  Synthetic oligonucleotide
ttgtcatgcatccgggaggtttcgtgctac

SEQ ID NO: 268922 - DNA, 30 bp, Artificial Sequence
  Synthetic oligonucleotide
taagaaacgaaatatagttggttttgctac

SEQ ID NO: 268923 - DNA, 30 bp, Artificial Sequence
  Synthetic oligonucleotide
cgtcgcgattttaccgggggttagatctac

SEQ ID NO: 268924 - DNA, 30 bp, Artificial Sequence
  Synthetic oligonucleotide
cctctctggcataattgggaggggatctac

SEQ ID NO: 268925 - DNA, 30 bp, Artificial Sequence
  Synthetic oligonucleotide
tagaaggggggagcgcacccaaaactctac

SEQ ID NO: 268926 - DNA, 30 bp, Artificial Sequence
  Synthetic oligonucleotide
gggagcgcttcttcaacattcgtcctctac

SEQ ID NO: 268927 - DNA, 30 bp, Artificial Sequence
  Synthetic oligonucleotide
aatgtaccgggtgggatgaggactctctac

SEQ ID NO: 268928 - DNA, 30 bp, Artificial Sequence
  Synthetic oligonucleotide
cacgcccacgttctatctacttttctctac

SEQ ID NO: 268929 - DNA, 30 bp, Artificial Sequence
  Synthetic oligonucleotide
cgcgcaatctgaggcctggcaaaagtctac

SEQ ID NO: 268930 - DNA, 30 bp, Artificial Sequence
  Synthetic oligonucleotide
ttaaggcgagtccatatcgtgatagtctac

SEQ ID NO: 268931 - DNA, 30 bp, Artificial Sequence
  Synthetic oligonucleotide
cagaactgatggtagccagcgagcgtctac

SEQ ID NO: 268932 - DNA, 30 bp, Artificial Sequence
  Synthetic oligonucleotide
tttcacgcggagaagcgtataccggtctac

SEQ ID NO: 268933 - DNA, 30 bp, Artificial Sequence
  Synthetic oligonucleotide
gacgctattggttataggaatcatgtctac

SEQ ID NO: 268934 - DNA, 30 bp, Artificial Sequence
  Synthetic oligonucleotide
tgaacatctggttactgcagaactgtctac

SEQ ID NO: 268935 - DNA, 30 bp, Artificial Sequence
  Synthetic oligonucleotide
gagggggacgcccctttccctggtgtctac

SEQ ID NO: 268936 - DNA, 30 bp, Artificial Sequence
  Synthetic oligonucleotide
ggtgtcaagtataaacgccctattgtctac

SEQ ID NO: 268937 - DNA, 28 bp, Artificial Sequence
  Synthetic oligonucleotide
gaaccatgcctcggtactagtattctac

SEQ ID NO: 268938 - DNA, 30 bp, Artificial Sequence
  Synthetic oligonucleotide
cagttagaaaaggagatcgtatcgttctac

SEQ ID NO: 268939 - DNA, 30 bp, Artificial Sequence
  Synthetic oligonucleotide
gcttgcagaatccactactaaaggttctac

SEQ ID NO: 268940 - DNA, 30 bp, Artificial Sequence
  Synthetic oligonucleotide
gcttatgcctctatgcaccagagaaagtac

SEQ ID NO: 268941 - DNA, 30 bp, Artificial Sequence
  Synthetic oligonucleotide
cctcacccctgtgaacgcgaaataaagtac

SEQ ID NO: 268942 - DNA, 30 bp, Artificial Sequence
  Synthetic oligonucleotide
gtagttgttgcgccgacaatcttaaagtac

SEQ ID NO: 268943 - DNA, 30 bp, Artificial Sequence
  Synthetic oligonucleotide
aacaggtcgagtggatgttgggacaagtac

SEQ ID NO: 268944 - DNA, 30 bp, Artificial Sequence
  Synthetic oligonucleotide
tgggttatggatattctaaagatcaagtac

SEQ ID NO: 268945 - DNA, 30 bp, Artificial Sequence
  Synthetic oligonucleotide
ggtatgcaacgccttttgttatagaagtac

SEQ ID NO: 268946 - DNA, 30 bp, Artificial Sequence
  Synthetic oligonucleotide
caatattcgcgactagtgtacaataagtac

SEQ ID NO: 268947 - DNA, 30 bp, Artificial Sequence
  Synthetic oligonucleotide
acgcataatacttgagtacgtacacagtac

SEQ ID NO: 268948 - DNA, 30 bp, Artificial Sequence
  Synthetic oligonucleotide
ccgttcgacaacgctaaaacgatacagtac

SEQ ID NO: 268949 - DNA, 30 bp, Artificial Sequence
  Synthetic oligonucleotide
cctttgaaggtgtgttatgaacgccagtac

SEQ ID NO: 268950 - DNA, 30 bp, Artificial Sequence
  Synthetic oligonucleotide
ttggagctaagcgctggccgaggccagtac

SEQ ID NO: 268951 - DNA, 30 bp, Artificial Sequence
  Synthetic oligonucleotide
ggtctcgctacctccggacatggccagtac

SEQ ID NO: 268952 - DNA, 30 bp, Artificial Sequence
  Synthetic oligonucleotide
acaataggcgcggagtagcaacggcagtac

SEQ ID NO: 268953 - DNA, 30 bp, Artificial Sequence
  Synthetic oligonucleotide
cgcattacgcgaatctgtaggtgtcagtac

SEQ ID NO: 268954 - DNA, 30 bp, Artificial Sequence
  Synthetic oligonucleotide
ttgcgcccttcgctagacaagccagagtac

SEQ ID NO: 268955 - DNA, 30 bp, Artificial Sequence
  Synthetic oligonucleotide
ttcaggaatccggatgcttgtgcagagtac

SEQ ID NO: 268956 - DNA, 30 bp, Artificial Sequence
  Synthetic oligonucleotide
caacgcattggaaatgtagtactagagtac

SEQ ID NO: 268957 - DNA, 30 bp, Artificial Sequence
  Synthetic oligonucleotide
tctgtacgacaagggttgagagtagagtac

SEQ ID NO: 268958 - DNA, 30 bp, Artificial Sequence
  Synthetic oligonucleotide
gtgtcagatactaaggataagttagagtac

SEQ ID NO: 268959 - DNA, 30 bp, Artificial Sequence
  Synthetic oligonucleotide
cgtgacgtgcagctttgagtggacgagtac

SEQ ID NO: 268960 - DNA, 30 bp, Artificial Sequence
  Synthetic oligonucleotide
gaaggcaaggtggctatatggtgggagtac

SEQ ID NO: 268961 - DNA, 30 bp, Artificial Sequence
  Synthetic oligonucleotide
tacacttatttaacggaataagttgagtac

SEQ ID NO: 268962 - DNA, 30 bp, Artificial Sequence
  Synthetic oligonucleotide
aatcaagacgtatcaagttgcgcatagtac

SEQ ID NO: 268963 - DNA, 30 bp, Artificial Sequence
  Synthetic oligonucleotide
gtgataagggtagcgtgtcagagatagtac

SEQ ID NO: 268964 - DNA, 30 bp, Artificial Sequence
  Synthetic oligonucleotide
tcacgtcacctgagtaacacggcctagtac

SEQ ID NO: 268965 - DNA, 30 bp, Artificial Sequence
  Synthetic oligonucleotide
gcccgtgaataatataagggatattagtac

SEQ ID NO: 268966 - DNA, 30 bp, Artificial Sequence
  Synthetic oligonucleotide
tcgaacgcaatgcttccctcaatttagtac

SEQ ID NO: 268967 - DNA, 30 bp, Artificial Sequence
  Synthetic oligonucleotide
aacgtatcagaatgacgacctcaaacgtac

SEQ ID NO: 268968 - DNA, 30 bp, Artificial Sequence
  Synthetic oligonucleotide
ggcgaactaccgcagatggtgttcacgtac

SEQ ID NO: 268969 - DNA, 30 bp, Artificial Sequence
  Synthetic oligonucleotide
tgatgatgaaaccatgtcgagaggacgtac

SEQ ID NO: 268970 - DNA, 30 bp, Artificial Sequence
  Synthetic oligonucleotide
taaaagtattatgtgtagagatggacgtac

SEQ ID NO: 268971 - DNA, 30 bp, Artificial Sequence
  Synthetic oligonucleotide
tatgcggctaataggcacgcacgtacgtac

SEQ ID NO: 268972 - DNA, 30 bp, Artificial Sequence
  Synthetic oligonucleotide
ccaccgaggcttgattggaatgaagcgtac

SEQ ID NO: 268973 - DNA, 30 bp, Artificial Sequence
  Synthetic oligonucleotide
gagtatatttgagggagaaagttagcgtac

SEQ ID NO: 268974 - DNA, 30 bp, Artificial Sequence
  Synthetic oligonucleotide
tatggacggtaagtccaataaaccgcgtac

SEQ ID NO: 268975 - DNA, 30 bp, Artificial Sequence
  Synthetic oligonucleotide
cccggctgggataattatcaaatggcgtac

SEQ ID NO: 268976 - DNA, 30 bp, Artificial Sequence
  Synthetic oligonucleotide
attggtatactgatgtgatatctggcgtac

SEQ ID NO: 268977 - DNA, 30 bp, Artificial Sequence
  Synthetic oligonucleotide
ccgccaccagtaaggttgtgaccatcgtac

SEQ ID NO: 268978 - DNA, 30 bp, Artificial Sequence
  Synthetic oligonucleotide
cagggtgataaaaaccgatttccatcgtac

SEQ ID NO: 268979 - DNA, 30 bp, Artificial Sequence
  Synthetic oligonucleotide
gtaacatatgtatagacattcccttcgtac

SEQ ID NO: 268980 - DNA, 30 bp, Artificial Sequence
  Synthetic oligonucleotide
gtaggagcggcaggtcatataatttcgtac

SEQ ID NO: 268981 - DNA, 30 bp, Artificial Sequence
  Synthetic oligonucleotide
caaagcgtaagcgttgcggctaaaaggtac

SEQ ID NO: 268982 - DNA, 30 bp, Artificial Sequence
  Synthetic oligonucleotide
tagcactcgtggagcgcggtctcaaggtac

SEQ ID NO: 268983 - DNA, 30 bp, Artificial Sequence
  Synthetic oligonucleotide
ataggcggatgacctagctgagtaaggtac

SEQ ID NO: 268984 - DNA, 30 bp, Artificial Sequence
  Synthetic oligonucleotide
attcttctaaaaccattattcatcaggtac

SEQ ID NO: 268985 - DNA, 30 bp, Artificial Sequence
  Synthetic oligonucleotide
gtccgcttatagtctggtacagcgaggtac

SEQ ID NO: 268986 - DNA, 30 bp, Artificial Sequence
  Synthetic oligonucleotide
ggcaacgccatccccgctgatatgaggtac

SEQ ID NO: 268987 - DNA, 30 bp, Artificial Sequence
  Synthetic oligonucleotide
aaccaacacctgaggaaagttgagcggtac

SEQ ID NO: 268988 - DNA, 30 bp, Artificial Sequence
  Synthetic oligonucleotide
ccacggaagtattatggtgaaacgcggtac

SEQ ID NO: 268989 - DNA, 30 bp, Artificial Sequence
  Synthetic oligonucleotide
accgatatgggcattgaacggccgcggtac

SEQ ID NO: 268990 - DNA, 30 bp, Artificial Sequence
  Synthetic oligonucleotide
caagacagttcacgtacggtagcgcggtac

SEQ ID NO: 268991 - DNA, 30 bp, Artificial Sequence
  Synthetic oligonucleotide
tgattgttattaataagtccggatcggtac

SEQ ID NO: 268992 - DNA, 30 bp, Artificial Sequence
  Synthetic oligonucleotide
tccttaaggccggtgtggcttgaagggtac

SEQ ID NO: 268993 - DNA, 30 bp, Artificial Sequence
  Synthetic oligonucleotide
ctacggtgcagccagagccgcctagggtac

SEQ ID NO: 268994 - DNA, 30 bp, Artificial Sequence
  Synthetic oligonucleotide
cggttgatgtcatcagtaacccacgggtac

SEQ ID NO: 268995 - DNA, 30 bp, Artificial Sequence
  Synthetic oligonucleotide
tgggacacagaaaacggtttaaccgggtac

SEQ ID NO: 268996 - DNA, 30 bp, Artificial Sequence
  Synthetic oligonucleotide
aatagccacaaacaaccgtatagcgggtac

SEQ ID NO: 268997 - DNA, 30 bp, Artificial Sequence
  Synthetic oligonucleotide
aaaatgatcgcgggatctatcgaggggtac

SEQ ID NO: 268998 - DNA, 30 bp, Artificial Sequence
  Synthetic oligonucleotide
aaggggactatccacgccgatagggggtac

SEQ ID NO: 268999 - DNA, 30 bp, Artificial Sequence
  Synthetic oligonucleotide
taaggtcgagacttcacccgattggggtac

SEQ ID NO: 269000 - DNA, 30 bp, Artificial Sequence
  Synthetic oligonucleotide
caggcggtagcagaactatcgttggggtac

SEQ ID NO: 269001 - DNA, 30 bp, Artificial Sequence
  Synthetic oligonucleotide
gagtggacgagaggatatgagaaatggtac

SEQ ID NO: 269002 - DNA, 30 bp, Artificial Sequence
  Synthetic oligonucleotide
ggtaggatccgtgctgatacgacctggtac

SEQ ID NO: 269003 - DNA, 30 bp, Artificial Sequence
  Synthetic oligonucleotide
aaacggagagttagtaaattgatctggtac

SEQ ID NO: 269004 - DNA, 30 bp, Artificial Sequence
  Synthetic oligonucleotide
gcagctgcgggagggggacaggtctggtac

SEQ ID NO: 269005 - DNA, 30 bp, Artificial Sequence
  Synthetic oligonucleotide
ctggctcaagcttagcgggacgcgtggtac

SEQ ID NO: 269006 - DNA, 30 bp, Artificial Sequence
  Synthetic oligonucleotide
aggcgccacatgcattaaagtctgtggtac

SEQ ID NO: 269007 - DNA, 30 bp, Artificial Sequence
  Synthetic oligonucleotide
ggacgaacacatcctttgtaaacaatgtac

SEQ ID NO: 269008 - DNA, 30 bp, Artificial Sequence
  Synthetic oligonucleotide
atgttagtgccgacacctcgacgcatgtac

SEQ ID NO: 269009 - DNA, 30 bp, Artificial Sequence
  Synthetic oligonucleotide
aagtgttgagtagcggaatcgtgcatgtac

SEQ ID NO: 269010 - DNA, 30 bp, Artificial Sequence
  Synthetic oligonucleotide
atcctcgtccgcatgtcagaggggatgtac

SEQ ID NO: 269011 - DNA, 30 bp, Artificial Sequence
  Synthetic oligonucleotide
gcagagcatgccgagtggagcgctatgtac

SEQ ID NO: 269012 - DNA, 30 bp, Artificial Sequence
  Synthetic oligonucleotide
ttggggaggtatcttagaatgtgactgtac

SEQ ID NO: 269013 - DNA, 30 bp, Artificial Sequence
  Synthetic oligonucleotide
ggcgcagattatatcaccagttcagtgtac

SEQ ID NO: 269014 - DNA, 30 bp, Artificial Sequence
  Synthetic oligonucleotide
ggggggtgcttcaatgtgtaacgagtgtac

SEQ ID NO: 269015 - DNA, 30 bp, Artificial Sequence
  Synthetic oligonucleotide
tttgcggagtgcctagagccgtccgtgtac

SEQ ID NO: 269016 - DNA, 30 bp, Artificial Sequence
  Synthetic oligonucleotide
cgacaaataaaatttactaatgtcgtgtac

SEQ ID NO: 269017 - DNA, 30 bp, Artificial Sequence
  Synthetic oligonucleotide
atacgtctctggtcaattggttcggtgtac

SEQ ID NO: 269018 - DNA, 30 bp, Artificial Sequence
  Synthetic oligonucleotide
tgagggccaacgcttctattatctgtgtac

SEQ ID NO: 269019 - DNA, 30 bp, Artificial Sequence
  Synthetic oligonucleotide
ggaaagcacctgcatcaggtggcattgtac

SEQ ID NO: 269020 - DNA, 30 bp, Artificial Sequence
  Synthetic oligonucleotide
ggccattttggatgtgtcgccatattgtac

SEQ ID NO: 269021 - DNA, 30 bp, Artificial Sequence
  Synthetic oligonucleotide
acggcattttacggaaagtccaacttgtac

SEQ ID NO: 269022 - DNA, 30 bp, Artificial Sequence
  Synthetic oligonucleotide
ccgttgacgaaactctcgacccacttgtac

SEQ ID NO: 269023 - DNA, 30 bp, Artificial Sequence
  Synthetic oligonucleotide
gtgtcacttgatactatggtcaggttgtac

SEQ ID NO: 269024 - DNA, 30 bp, Artificial Sequence
  Synthetic oligonucleotide
atgctcacactctataagaataggttgtac

SEQ ID NO: 269025 - DNA, 30 bp, Artificial Sequence
  Synthetic oligonucleotide
tgaaacaactttctcaaatgtaggttgtac

SEQ ID NO: 269026 - DNA, 30 bp, Artificial Sequence
  Synthetic oligonucleotide
ggacaatgatattgggactttgggttgtac

SEQ ID NO: 269027 - DNA, 30 bp, Artificial Sequence
  Synthetic oligonucleotide
ggtagcagtctcagctgcaaacaaaattac

SEQ ID NO: 269028 - DNA, 29 bp, Artificial Sequence
  Synthetic oligonucleotide
gaaagccacgcggattctgctcaaattac

SEQ ID NO: 269029 - DNA, 30 bp, Artificial Sequence
  Synthetic oligonucleotide
agtgcaagtgtgggtggtatcgacaattac

SEQ ID NO: 269030 - DNA, 30 bp, Artificial Sequence
  Synthetic oligonucleotide
atgaaaaggaggccaattcccgccaattac

SEQ ID NO: 269031 - DNA, 30 bp, Artificial Sequence
  Synthetic oligonucleotide
caaagcgttattaagtgccgcccgaattac

SEQ ID NO: 269032 - DNA, 30 bp, Artificial Sequence
  Synthetic oligonucleotide
taggacaaacgggctctggttctgaattac

SEQ ID NO: 269033 - DNA, 30 bp, Artificial Sequence
  Synthetic oligonucleotide
aagcgcttgcggccggcaagtgtacattac

SEQ ID NO: 269034 - DNA, 30 bp, Artificial Sequence
  Synthetic oligonucleotide
taagaacaaaggtatgcaatcgtagattac

SEQ ID NO: 269035 - DNA, 30 bp, Artificial Sequence
  Synthetic oligonucleotide
atcacatatcgcagtatagctagcgattac

SEQ ID NO: 269036 - DNA, 30 bp, Artificial Sequence
  Synthetic oligonucleotide
ctcttatgtggtaccacttgaggcgattac

SEQ ID NO: 269037 - DNA, 30 bp, Artificial Sequence
  Synthetic oligonucleotide
caaaacgtacagttacggctgaaggattac

SEQ ID NO: 269038 - DNA, 30 bp, Artificial Sequence
  Synthetic oligonucleotide
agcgcactgaataagtcatccgctgattac

SEQ ID NO: 269039 - DNA, 30 bp, Artificial Sequence
  Synthetic oligonucleotide
tgcacgaaatgcaccgccacgcgtgattac

SEQ ID NO: 269040 - DNA, 30 bp, Artificial Sequence
  Synthetic oligonucleotide
catacctccaggtgccgcggtttatattac

SEQ ID NO: 269041 - DNA, 30 bp, Artificial Sequence
  Synthetic oligonucleotide
ctccacagcgcagtggctcgaaattattac

SEQ ID NO: 269042 - DNA, 30 bp, Artificial Sequence
  Synthetic oligonucleotide
taaatcgtgtgatcagacattagttattac

SEQ ID NO: 269043 - DNA, 30 bp, Artificial Sequence
  Synthetic oligonucleotide
ttccggagacatacacgaagaagaacttac

SEQ ID NO: 269044 - DNA, 30 bp, Artificial Sequence
  Synthetic oligonucleotide
ggtcgtacaagcattgtattcataacttac

SEQ ID NO: 269045 - DNA, 30 bp, Artificial Sequence
  Synthetic oligonucleotide
cattgatggcatcgtccgcgtggtacttac

SEQ ID NO: 269046 - DNA, 30 bp, Artificial Sequence
  Synthetic oligonucleotide
tccataatgggatgcgctgcgcatccttac

SEQ ID NO: 269047 - DNA, 30 bp, Artificial Sequence
  Synthetic oligonucleotide
cgctaggttccatatgtaagggctccttac

SEQ ID NO: 269048 - DNA, 30 bp, Artificial Sequence
  Synthetic oligonucleotide
aagaccgagtagcacgtgcctagcgcttac

SEQ ID NO: 269049 - DNA, 30 bp, Artificial Sequence
  Synthetic oligonucleotide
tggacaagtgcggttgcgttaacggcttac

SEQ ID NO: 269050 - DNA, 30 bp, Artificial Sequence
  Synthetic oligonucleotide
cgacagagggttcttaaccaagatgcttac

SEQ ID NO: 269051 - DNA, 30 bp, Artificial Sequence
  Synthetic oligonucleotide
acactgagttggtttttcgcaactgcttac

SEQ ID NO: 269052 - DNA, 30 bp, Artificial Sequence
  Synthetic oligonucleotide
ttaaagcttcattgttcattaattgcttac

SEQ ID NO: 269053 - DNA, 30 bp, Artificial Sequence
  Synthetic oligonucleotide
gtcagtgtcgcagataacttaattgcttac

SEQ ID NO: 269054 - DNA, 30 bp, Artificial Sequence
  Synthetic oligonucleotide
gctaatacagtgcgtggtaaacaatcttac

SEQ ID NO: 269055 - DNA, 30 bp, Artificial Sequence
  Synthetic oligonucleotide
gagacgagcttacatgatctcgaatcttac

SEQ ID NO: 269056 - DNA, 30 bp, Artificial Sequence
  Synthetic oligonucleotide
aggtacacgttgagcagagttttatcttac

SEQ ID NO: 269057 - DNA, 30 bp, Artificial Sequence
  Synthetic oligonucleotide
gcacttgcagcttgaggctcatcctcttac

SEQ ID NO: 269058 - DNA, 31 bp, Artificial Sequence
  Synthetic oligonucleotide
ccgtctgcgcctaacgaatgtcgtctcttac

SEQ ID NO: 269059 - DNA, 30 bp, Artificial Sequence
  Synthetic oligonucleotide
ggaagtcaaagtcagaggtgtgagtcttac

SEQ ID NO: 269060 - DNA, 30 bp, Artificial Sequence
  Synthetic oligonucleotide
tacatggatggtatagtgggttaaagttac

SEQ ID NO: 269061 - DNA, 30 bp, Artificial Sequence
  Synthetic oligonucleotide
cgtatgaccctacaaataaacacaagttac

SEQ ID NO: 269062 - DNA, 30 bp, Artificial Sequence
  Synthetic oligonucleotide
gagatcgcgattcgtcttgagataagttac

SEQ ID NO: 269063 - DNA, 30 bp, Artificial Sequence
  Synthetic oligonucleotide
tctgaatgcacggatagtcaatgcagttac

SEQ ID NO: 269064 - DNA, 30 bp, Artificial Sequence
  Synthetic oligonucleotide
ggtaggagccccgttcacccccctagttac

SEQ ID NO: 269065 - DNA, 30 bp, Artificial Sequence
  Synthetic oligonucleotide
ggccatctgtttgggaggtggagacgttac

SEQ ID NO: 269066 - DNA, 30 bp, Artificial Sequence
  Synthetic oligonucleotide
ctagtacgggaccgttgaatagtacgttac

SEQ ID NO: 269067 - DNA, 30 bp, Artificial Sequence
  Synthetic oligonucleotide
tccaaccaactgatactcagtgcgcgttac

SEQ ID NO: 269068 - DNA, 30 bp, Artificial Sequence
  Synthetic oligonucleotide
tatctcaagcgccactggaaaatgcgttac

SEQ ID NO: 269069 - DNA, 30 bp, Artificial Sequence
  Synthetic oligonucleotide
ataaggatagccatgtctgcgaaaggttac

SEQ ID NO: 269070 - DNA, 30 bp, Artificial Sequence
  Synthetic oligonucleotide
tggtgttagtggaaatgcacacgaggttac

SEQ ID NO: 269071 - DNA, 30 bp, Artificial Sequence
  Synthetic oligonucleotide
aggcccagtgcgcgcaataaatacggttac

SEQ ID NO: 269072 - DNA, 30 bp, Artificial Sequence
  Synthetic oligonucleotide
atgacaccaattatcaacgcgacgggttac

SEQ ID NO: 269073 - DNA, 30 bp, Artificial Sequence
  Synthetic oligonucleotide
gcgcctacacttgtaaggcatcatggttac

SEQ ID NO: 269074 - DNA, 30 bp, Artificial Sequence
  Synthetic oligonucleotide
tcccgggactccggatcgttccaatgttac

SEQ ID NO: 269075 - DNA, 30 bp, Artificial Sequence
  Synthetic oligonucleotide
ttcgcgcgttgctccttatcgagatgttac

SEQ ID NO: 269076 - DNA, 30 bp, Artificial Sequence
  Synthetic oligonucleotide
cgtttgccctcgacgccggtgggatgttac

SEQ ID NO: 269077 - DNA, 30 bp, Artificial Sequence
  Synthetic oligonucleotide
agggcctattccatgtgcgtatcctgttac

SEQ ID NO: 269078 - DNA, 30 bp, Artificial Sequence
  Synthetic oligonucleotide
cgttaccacagatatcacgatccgtgttac

SEQ ID NO: 269079 - DNA, 30 bp, Artificial Sequence
  Synthetic oligonucleotide
tcctcatcccataaattactcacgatttac

SEQ ID NO: 269080 - DNA, 30 bp, Artificial Sequence
  Synthetic oligonucleotide
tcggaatcattcaggcagacaatgatttac

SEQ ID NO: 269081 - DNA, 30 bp, Artificial Sequence
  Synthetic oligonucleotide
aaaacggtcatgccaacttagcctatttac

SEQ ID NO: 269082 - DNA, 30 bp, Artificial Sequence
  Synthetic oligonucleotide
atgtacaatttatgaggaaacgctatttac

SEQ ID NO: 269083 - DNA, 30 bp, Artificial Sequence
  Synthetic oligonucleotide
agaacgcgggaattggacgattttatttac

SEQ ID NO: 269084 - DNA, 30 bp, Artificial Sequence
  Synthetic oligonucleotide
tttagagaatggggcaatgatcgactttac

SEQ ID NO: 269085 - DNA, 30 bp, Artificial Sequence
  Synthetic oligonucleotide
gcacactgtccaaatttgtacaacctttac

SEQ ID NO: 269086 - DNA, 30 bp, Artificial Sequence
  Synthetic oligonucleotide
actcgtcgtagaaatagcgctaagctttac

SEQ ID NO: 269087 - DNA, 30 bp, Artificial Sequence
  Synthetic oligonucleotide
cctggccttgtaacccgaccaactctttac

SEQ ID NO: 269088 - DNA, 30 bp, Artificial Sequence
  Synthetic oligonucleotide
agacaacgcgaatcctgtgcgcttctttac

SEQ ID NO: 269089 - DNA, 30 bp, Artificial Sequence
  Synthetic oligonucleotide
ttatctcgggtgccaacattttttctttac

SEQ ID NO: 269090 - DNA, 30 bp, Artificial Sequence
  Synthetic oligonucleotide
ccaagcgggacgccctggggcaacgtttac

SEQ ID NO: 269091 - DNA, 30 bp, Artificial Sequence
  Synthetic oligonucleotide
aatgggaacggacagttcagtcacgtttac

SEQ ID NO: 269092 - DNA, 30 bp, Artificial Sequence
  Synthetic oligonucleotide
gggtatgcgtgactggaaagtacggtttac

SEQ ID NO: 269093 - DNA, 30 bp, Artificial Sequence
  Synthetic oligonucleotide
actagccgtggggaaatctatagggtttac

SEQ ID NO: 269094 - DNA, 29 bp, Artificial Sequence
  Synthetic oligonucleotide
cgtaggaagccttatccgatggggtttac

SEQ ID NO: 269095 - DNA, 30 bp, Artificial Sequence
  Synthetic oligonucleotide
tgctgtgcagacatgcatatgtgtgtttac

SEQ ID NO: 269096 - DNA, 30 bp, Artificial Sequence
  Synthetic oligonucleotide
atgatggatcacatgggttactacttttac

SEQ ID NO: 269097 - DNA, 30 bp, Artificial Sequence
  Synthetic oligonucleotide
tcggcaagtacgacttgggttccgttttac

SEQ ID NO: 269098 - DNA, 30 bp, Artificial Sequence
  Synthetic oligonucleotide
ccacgataccgttcaacaggggcgttttac

SEQ ID NO: 269099 - DNA, 30 bp, Artificial Sequence
  Synthetic oligonucleotide
tacagggaacgattccattaaagtttttac

SEQ ID NO: 269100 - DNA, 30 bp, Artificial Sequence
  Synthetic oligonucleotide
aggtagtggcgggattagtcgggtttttac

SEQ ID NO: 269101 - DNA, 30 bp, Artificial Sequence
  Synthetic oligonucleotide
gaccgtggtgaatggctcggtgttttttac

SEQ ID NO: 269102 - DNA, 30 bp, Artificial Sequence
  Synthetic oligonucleotide
gggaagctgcacaagcgataaacaaaaacc

SEQ ID NO: 269103 - DNA, 30 bp, Artificial Sequence
  Synthetic oligonucleotide
ttacgtgggctatcggagctgctaaaaacc

SEQ ID NO: 269104 - DNA, 30 bp, Artificial Sequence
  Synthetic oligonucleotide
tgagaacataactttataatgttaaaaacc

SEQ ID NO: 269105 - DNA, 30 bp, Artificial Sequence
  Synthetic oligonucleotide
cactggggaatacgcagagagcggaaaacc

SEQ ID NO: 269106 - DNA, 30 bp, Artificial Sequence
  Synthetic oligonucleotide
ccaacaatctgattagaaggcatgaaaacc

SEQ ID NO: 269107 - DNA, 30 bp, Artificial Sequence
  Synthetic oligonucleotide
aaaccagggaagctttaacccttgaaaacc

SEQ ID NO: 269108 - DNA, 30 bp, Artificial Sequence
  Synthetic oligonucleotide
acgcaatgttaactacgcggatgtaaaacc

SEQ ID NO: 269109 - DNA, 30 bp, Artificial Sequence
  Synthetic oligonucleotide
taggcaaaatcgccgtgggaaattaaaacc

SEQ ID NO: 269110 - DNA, 30 bp, Artificial Sequence
  Synthetic oligonucleotide
gcaggtgtagcaatgtatgaacttaaaacc

SEQ ID NO: 269111 - DNA, 30 bp, Artificial Sequence
  Synthetic oligonucleotide
acaacgcctatgagatagctcgaacaaacc

SEQ ID NO: 269112 - DNA, 30 bp, Artificial Sequence
  Synthetic oligonucleotide
gtgtaagcatttgcaaggctttaacaaacc

SEQ ID NO: 269113 - DNA, 30 bp, Artificial Sequence
  Synthetic oligonucleotide
gggcaactactgaatagtagcgcacaaacc

SEQ ID NO: 269114 - DNA, 30 bp, Artificial Sequence
  Synthetic oligonucleotide
ccggaagcagtacgtaggactggacaaacc

SEQ ID NO: 269115 - DNA, 30 bp, Artificial Sequence
  Synthetic oligonucleotide
cgccacggagaacgtaagatttcccaaacc

SEQ ID NO: 269116 - DNA, 30 bp, Artificial Sequence
  Synthetic oligonucleotide
aactgccgaggggagaggatgattcaaacc

SEQ ID NO: 269117 - DNA, 30 bp, Artificial Sequence
  Synthetic oligonucleotide
agcgttggtctacgagactaaaaagaaacc

SEQ ID NO: 269118 - DNA, 30 bp, Artificial Sequence
  Synthetic oligonucleotide
ccacccgggtctttgtccagctgagaaacc

SEQ ID NO: 269119 - DNA, 30 bp, Artificial Sequence
  Synthetic oligonucleotide
gctatctaatcgggtagataaactgaaacc

SEQ ID NO: 269120 - DNA, 30 bp, Artificial Sequence
  Synthetic oligonucleotide
ccccccctaacttcgaaactctgataaacc

SEQ ID NO: 269121 - DNA, 30 bp, Artificial Sequence
  Synthetic oligonucleotide
ccaattccaccggtcctcaatccctaaacc

SEQ ID NO: 269122 - DNA, 30 bp, Artificial Sequence
  Synthetic oligonucleotide
ctgcggcacataccacctgtagcgtaaacc

SEQ ID NO: 269123 - DNA, 30 bp, Artificial Sequence
  Synthetic oligonucleotide
aatagagagaccctcccccccgggtaaacc

SEQ ID NO: 269124 - DNA, 30 bp, Artificial Sequence
  Synthetic oligonucleotide
tctataattacccaccgaacgtcttaaacc

SEQ ID NO: 269125 - DNA, 30 bp, Artificial Sequence
  Synthetic oligonucleotide
cagcgtgcgaccattgctcatagttaaacc

SEQ ID NO: 269126 - DNA, 30 bp, Artificial Sequence
  Synthetic oligonucleotide
gtgagcaggtatgagtcgccgtaaacaacc

SEQ ID NO: 269127 - DNA, 30 bp, Artificial Sequence
  Synthetic oligonucleotide
ccaggtagtgtcagaaaccggacaccaacc

SEQ ID NO: 269128 - DNA, 30 bp, Artificial Sequence
  Synthetic oligonucleotide
tactcgcacaattactccggaataccaacc

SEQ ID NO: 269129 - DNA, 30 bp, Artificial Sequence
  Synthetic oligonucleotide
acaatgtacacgtcattggatctaccaacc

SEQ ID NO: 269130 - DNA, 30 bp, Artificial Sequence
  Synthetic oligonucleotide
cgtagcagtaatataaacctacatccaacc

SEQ ID NO: 269131 - DNA, 30 bp, Artificial Sequence
  Synthetic oligonucleotide
tggggtttcggtcgggtatagggggcaacc

SEQ ID NO: 269132 - DNA, 30 bp, Artificial Sequence
  Synthetic oligonucleotide
gcatatagtgtgctcttatgaactgcaacc

SEQ ID NO: 269133 - DNA, 30 bp, Artificial Sequence
  Synthetic oligonucleotide
gtctaggcccaatatacagcggaatcaacc

SEQ ID NO: 269134 - DNA, 30 bp, Artificial Sequence
  Synthetic oligonucleotide
gaaagggtgtcttgtggaagaggatcaacc

SEQ ID NO: 269135 - DNA, 30 bp, Artificial Sequence
  Synthetic oligonucleotide
tcaggctcccagtccgcggaaggctcaacc

SEQ ID NO: 269136 - DNA, 30 bp, Artificial Sequence
  Synthetic oligonucleotide
gattgcaccgaggatgaaggatgctcaacc

SEQ ID NO: 269137 - DNA, 30 bp, Artificial Sequence
  Synthetic oligonucleotide
atcgtccgaactaaagcacgactctcaacc

SEQ ID NO: 269138 - DNA, 30 bp, Artificial Sequence
  Synthetic oligonucleotide
tagagcgcagttcgctgccgagtctcaacc

SEQ ID NO: 269139 - DNA, 30 bp, Artificial Sequence
  Synthetic oligonucleotide
ggagaggaggtctcatttatacagtcaacc

SEQ ID NO: 269140 - DNA, 30 bp, Artificial Sequence
  Synthetic oligonucleotide
cagtagttagcttcggaacactagtcaacc

SEQ ID NO: 269141 - DNA, 30 bp, Artificial Sequence
  Synthetic oligonucleotide
gagccgagctcggttacattttcttcaacc

SEQ ID NO: 269142 - DNA, 30 bp, Artificial Sequence
  Synthetic oligonucleotide
ggattcctttcgtaatcctaatgttcaacc

SEQ ID NO: 269143 - DNA, 30 bp, Artificial Sequence
  Synthetic oligonucleotide
cctagaccgaattttgcctccttttcaacc

SEQ ID NO: 269144 - DNA, 30 bp, Artificial Sequence
  Synthetic oligonucleotide
ctcgtcgaatccatagaaaacatcagaacc

SEQ ID NO: 269145 - DNA, 30 bp, Artificial Sequence
  Synthetic oligonucleotide
aagagccacagagattctggtaatagaacc

SEQ ID NO: 269146 - DNA, 30 bp, Artificial Sequence
  Synthetic oligonucleotide
atgttaaattgaaacgcataaattagaacc

SEQ ID NO: 269147 - DNA, 30 bp, Artificial Sequence
  Synthetic oligonucleotide
gggccgtgttggtgcgctttgcttagaacc

SEQ ID NO: 269148 - DNA, 31 bp, Artificial Sequence
  Synthetic oligonucleotide
tggggcagctattttcatcatttcacgaacc

SEQ ID NO: 269149 - DNA, 30 bp, Artificial Sequence
  Synthetic oligonucleotide
caccatataccgcttcacatgttacgaacc

SEQ ID NO: 269150 - DNA, 30 bp, Artificial Sequence
  Synthetic oligonucleotide
tttaatgacaagtatacagccgggcgaacc

SEQ ID NO: 269151 - DNA, 30 bp, Artificial Sequence
  Synthetic oligonucleotide
caattcgatatggtccgcctgcatcgaacc

SEQ ID NO: 269152 - DNA, 30 bp, Artificial Sequence
  Synthetic oligonucleotide
gatgcgctggagtggcgtaatagtcgaacc

SEQ ID NO: 269153 - DNA, 30 bp, Artificial Sequence
  Synthetic oligonucleotide
aagtaccgcaccgaaaccctactaggaacc

SEQ ID NO: 269154 - DNA, 30 bp, Artificial Sequence
  Synthetic oligonucleotide
atagcgaggggaagcatcactttaggaacc

SEQ ID NO: 269155 - DNA, 30 bp, Artificial Sequence
  Synthetic oligonucleotide
agctttgggggtctcgctaggtccggaacc

SEQ ID NO: 269156 - DNA, 30 bp, Artificial Sequence
  Synthetic oligonucleotide
tagacggagctcactttagattcgggaacc

SEQ ID NO: 269157 - DNA, 30 bp, Artificial Sequence
  Synthetic oligonucleotide
gcccgagagcatatcctaagcaggggaacc

SEQ ID NO: 269158 - DNA, 30 bp, Artificial Sequence
  Synthetic oligonucleotide
tccgacagtgggacatctgagatgggaacc

SEQ ID NO: 269159 - DNA, 30 bp, Artificial Sequence
  Synthetic oligonucleotide
tcgtttcgtcggtcgtgcaagtatggaacc

SEQ ID NO: 269160 - DNA, 30 bp, Artificial Sequence
  Synthetic oligonucleotide
cctgcggctataaattacatgactggaacc

SEQ ID NO: 269161 - DNA, 30 bp, Artificial Sequence
  Synthetic oligonucleotide
ctagaaatatggcacataattacatgaacc

SEQ ID NO: 269162 - DNA, 30 bp, Artificial Sequence
  Synthetic oligonucleotide
cagaacaaaagccgtggatgtctatgaacc

SEQ ID NO: 269163 - DNA, 30 bp, Artificial Sequence
  Synthetic oligonucleotide
agcgactgtctgcaggctaactcgtgaacc

SEQ ID NO: 269164 - DNA, 30 bp, Artificial Sequence
  Synthetic oligonucleotide
agtaggggttaccgacatatcaggtgaacc

SEQ ID NO: 269165 - DNA, 29 bp, Artificial Sequence
  Synthetic oligonucleotide
actcgtttcacattagacataggtgaacc

SEQ ID NO: 269166 - DNA, 30 bp, Artificial Sequence
  Synthetic oligonucleotide
atcaactgtacggttgataggtgaataacc

SEQ ID NO: 269167 - DNA, 30 bp, Artificial Sequence
  Synthetic oligonucleotide
cgcggaagctgcagcccgaaggtaataacc

SEQ ID NO: 269168 - DNA, 30 bp, Artificial Sequence
  Synthetic oligonucleotide
ttggggaccaaggcttcacattagataacc

SEQ ID NO: 269169 - DNA, 30 bp, Artificial Sequence
  Synthetic oligonucleotide
gggaaccgtcatgggatcaaatgtataacc

SEQ ID NO: 269170 - DNA, 30 bp, Artificial Sequence
  Synthetic oligonucleotide
tcgaaatcgatatagaagcttgttataacc

SEQ ID NO: 269171 - DNA, 30 bp, Artificial Sequence
  Synthetic oligonucleotide
tcttcccgttttaaggccgggagcctaacc

SEQ ID NO: 269172 - DNA, 30 bp, Artificial Sequence
  Synthetic oligonucleotide
tagcaagcgcagaaagacgagagtctaacc

SEQ ID NO: 269173 - DNA, 30 bp, Artificial Sequence
  Synthetic oligonucleotide
taaggtgctacacattggttaccagtaacc

SEQ ID NO: 269174 - DNA, 30 bp, Artificial Sequence
  Synthetic oligonucleotide
gaacaaacggtgcaattctattgagtaacc

SEQ ID NO: 269175 - DNA, 30 bp, Artificial Sequence
  Synthetic oligonucleotide
aaattaaagtggatacatcacctagtaacc

SEQ ID NO: 269176 - DNA, 30 bp, Artificial Sequence
  Synthetic oligonucleotide
agaacatcttcggcgtgctgtatcgtaacc

SEQ ID NO: 269177 - DNA, 30 bp, Artificial Sequence
  Synthetic oligonucleotide
atcccgcggcaccccaggctaaaggtaacc

SEQ ID NO: 269178 - DNA, 30 bp, Artificial Sequence
  Synthetic oligonucleotide
ctctaagttaagatctccccggaggtaacc

SEQ ID NO: 269179 - DNA, 30 bp, Artificial Sequence
  Synthetic oligonucleotide
gtccatgacaatacggatctcgctgtaacc

SEQ ID NO: 269180 - DNA, 30 bp, Artificial Sequence
  Synthetic oligonucleotide
ttggcaagaaaggacggtccacttgtaacc

SEQ ID NO: 269181 - DNA, 30 bp, Artificial Sequence
  Synthetic oligonucleotide
gcgtttcaggggtagacagccagattaacc

SEQ ID NO: 269182 - DNA, 30 bp, Artificial Sequence
  Synthetic oligonucleotide
ccatctccgggatcttggcaagccttaacc

SEQ ID NO: 269183 - DNA, 30 bp, Artificial Sequence
  Synthetic oligonucleotide
ggccccacatacagatccgatttgttaacc

SEQ ID NO: 269184 - DNA, 30 bp, Artificial Sequence
  Synthetic oligonucleotide
cagggaagagaggtcggtacatatttaacc

SEQ ID NO: 269185 - DNA, 30 bp, Artificial Sequence
  Synthetic oligonucleotide
tcgggactcagttgctctcagggtttaacc

SEQ ID NO: 269186 - DNA, 30 bp, Artificial Sequence
  Synthetic oligonucleotide
cccacgatcacgacagtgcgcgttttaacc

SEQ ID NO: 269187 - DNA, 30 bp, Artificial Sequence
  Synthetic oligonucleotide
gtccgaatgatctggaaggattaaaacacc

SEQ ID NO: 269188 - DNA, 30 bp, Artificial Sequence
  Synthetic oligonucleotide
ctagcgcaactcgtaggggatgtaaacacc

SEQ ID NO: 269189 - DNA, 30 bp, Artificial Sequence
  Synthetic oligonucleotide
gcctatacgcctgcttaccaagacaacacc

SEQ ID NO: 269190 - DNA, 30 bp, Artificial Sequence
  Synthetic oligonucleotide
tatatcgagaaggcctacgaggagaacacc

SEQ ID NO: 269191 - DNA, 30 bp, Artificial Sequence
  Synthetic oligonucleotide
acgtacccgaatcatagggggtggaacacc

SEQ ID NO: 269192 - DNA, 30 bp, Artificial Sequence
  Synthetic oligonucleotide
aatggataagaagtacggcccctgaacacc

SEQ ID NO: 269193 - DNA, 30 bp, Artificial Sequence
  Synthetic oligonucleotide
aatggtgaatgcgagaggttaattaacacc

SEQ ID NO: 269194 - DNA, 30 bp, Artificial Sequence
  Synthetic oligonucleotide
aacgaaaccgtttaatgacccagacacacc

SEQ ID NO: 269195 - DNA, 30 bp, Artificial Sequence
  Synthetic oligonucleotide
ggcatattcttattaatcactggacacacc

SEQ ID NO: 269196 - DNA, 30 bp, Artificial Sequence
  Synthetic oligonucleotide
ataggagcgggtcggcaattcgggcacacc

SEQ ID NO: 269197 - DNA, 30 bp, Artificial Sequence
  Synthetic oligonucleotide
tagcaccacccctctgatcaggatcacacc

SEQ ID NO: 269198 - DNA, 30 bp, Artificial Sequence
  Synthetic oligonucleotide
gaggtttcctggatgcgctgagcagacacc

SEQ ID NO: 269199 - DNA, 30 bp, Artificial Sequence
  Synthetic oligonucleotide
tacttggacagtgccagcggactagacacc

SEQ ID NO: 269200 - DNA, 30 bp, Artificial Sequence
  Synthetic oligonucleotide
aaccgaaatctcccgatcgggctagacacc

SEQ ID NO: 269201 - DNA, 30 bp, Artificial Sequence
  Synthetic oligonucleotide
ctgagggtagaacgtattacacaggacacc

SEQ ID NO: 269202 - DNA, 30 bp, Artificial Sequence
  Synthetic oligonucleotide
gattaaaggtgggaagtatggcgggacacc

SEQ ID NO: 269203 - DNA, 30 bp, Artificial Sequence
  Synthetic oligonucleotide
cactgaacacgtgtatttgatggggacacc

SEQ ID NO: 269204 - DNA, 31 bp, Artificial Sequence
  Synthetic oligonucleotide
agcacacttcaaaggttgtgcccgctacacc

SEQ ID NO: 269205 - DNA, 30 bp, Artificial Sequence
  Synthetic oligonucleotide
tggtggagccgaatatgcttgttctacacc

SEQ ID NO: 269206 - DNA, 30 bp, Artificial Sequence
  Synthetic oligonucleotide
taatcgcccgtgtagttaaggtagtacacc

SEQ ID NO: 269207 - DNA, 30 bp, Artificial Sequence
  Synthetic oligonucleotide
gtgggcgatctaacaatccggatgtacacc

SEQ ID NO: 269208 - DNA, 30 bp, Artificial Sequence
  Synthetic oligonucleotide
gagggggactctgatatttgtcagaccacc

SEQ ID NO: 269209 - DNA, 30 bp, Artificial Sequence
  Synthetic oligonucleotide
actaatgctcccacagtcgaccgacccacc

SEQ ID NO: 269210 - DNA, 30 bp, Artificial Sequence
  Synthetic oligonucleotide
cagttacaaacgtgcgagcagtgccccacc

SEQ ID NO: 269211 - DNA, 30 bp, Artificial Sequence
  Synthetic oligonucleotide
ataatatgatgtcacagatttgcgcccacc

SEQ ID NO: 269212 - DNA, 30 bp, Artificial Sequence
  Synthetic oligonucleotide
gtcgaggacagttagtgcctagttcccacc

SEQ ID NO: 269213 - DNA, 30 bp, Artificial Sequence
  Synthetic oligonucleotide
tcttcattgcgtagttctcaatcagccacc

SEQ ID NO: 269214 - DNA, 30 bp, Artificial Sequence
  Synthetic oligonucleotide
acttggaattctatcataggcgtagccacc

SEQ ID NO: 269215 - DNA, 30 bp, Artificial Sequence
  Synthetic oligonucleotide
tgcgcgatgtgccaacgccccgccgccacc

SEQ ID NO: 269216 - DNA, 30 bp, Artificial Sequence
  Synthetic oligonucleotide
tattgtggcgaacttagatcccgggccacc

SEQ ID NO: 269217 - DNA, 30 bp, Artificial Sequence
  Synthetic oligonucleotide
tgaggacacaagcaggcattggatgccacc

SEQ ID NO: 269218 - DNA, 30 bp, Artificial Sequence
  Synthetic oligonucleotide
aactaaggaaatctgggcataagatccacc

SEQ ID NO: 269219 - DNA, 31 bp, Artificial Sequence
  Synthetic oligonucleotide
cacgtggtcaatttaagccaattggtccacc

SEQ ID NO: 269220 - DNA, 30 bp, Artificial Sequence
  Synthetic oligonucleotide
gcatcccgtaaataggacggagtgtccacc

SEQ ID NO: 269221 - DNA, 30 bp, Artificial Sequence
  Synthetic oligonucleotide
tgcgagggtggtttatggtgcgattccacc

SEQ ID NO: 269222 - DNA, 30 bp, Artificial Sequence
  Synthetic oligonucleotide
aaggttgtattgcgtaggatgaaaagcacc

SEQ ID NO: 269223 - DNA, 30 bp, Artificial Sequence
  Synthetic oligonucleotide
cagctgcatgggcagagttccgaaagcacc

SEQ ID NO: 269224 - DNA, 30 bp, Artificial Sequence
  Synthetic oligonucleotide
ggcgatacgttaggtcctgtaggaagcacc

SEQ ID NO: 269225 - DNA, 30 bp, Artificial Sequence
  Synthetic oligonucleotide
gattcgacatctgacttcgtaatcagcacc

SEQ ID NO: 269226 - DNA, 30 bp, Artificial Sequence
  Synthetic oligonucleotide
cagctagttggctgttcgctgtcacgcacc

SEQ ID NO: 269227 - DNA, 30 bp, Artificial Sequence
  Synthetic oligonucleotide
accagtcagctctttgaatacccccgcacc

SEQ ID NO: 269228 - DNA, 30 bp, Artificial Sequence
  Synthetic oligonucleotide
ggcaccttggtatatacccatgcgcgcacc

SEQ ID NO: 269229 - DNA, 30 bp, Artificial Sequence
  Synthetic oligonucleotide
acaggaagtgttctactctcaactcgcacc

SEQ ID NO: 269230 - DNA, 30 bp, Artificial Sequence
  Synthetic oligonucleotide
gtactcttgtagtgttggctgccaggcacc

SEQ ID NO: 269231 - DNA, 30 bp, Artificial Sequence
  Synthetic oligonucleotide
cacaatatgtctaggtccctcgtgggcacc

SEQ ID NO: 269232 - DNA, 30 bp, Artificial Sequence
  Synthetic oligonucleotide
tgatggacgctctggcctagttttggcacc

SEQ ID NO: 269233 - DNA, 30 bp, Artificial Sequence
  Synthetic oligonucleotide
tctacctaaatgggtgcgacggcatgcacc

SEQ ID NO: 269234 - DNA, 29 bp, Artificial Sequence
  Synthetic oligonucleotide
gccagtgcgagaatacgttcatatgcacc

SEQ ID NO: 269235 - DNA, 30 bp, Artificial Sequence
  Synthetic oligonucleotide
acctaggttgcaaccacgatagactgcacc

SEQ ID NO: 269236 - DNA, 30 bp, Artificial Sequence
  Synthetic oligonucleotide
cgcattcatctacatactgaaatctgcacc

SEQ ID NO: 269237 - DNA, 30 bp, Artificial Sequence
  Synthetic oligonucleotide
cgaagagagacgtctgtaatactttgcacc

SEQ ID NO: 269238 - DNA, 30 bp, Artificial Sequence
  Synthetic oligonucleotide
atcagtaagtcgttacacaccggaatcacc

SEQ ID NO: 269239 - DNA, 30 bp, Artificial Sequence
  Synthetic oligonucleotide
gctttagtgaatatcataataatcatcacc

SEQ ID NO: 269240 - DNA, 30 bp, Artificial Sequence
  Synthetic oligonucleotide
agaacaaaccgatactcatgaaagatcacc

SEQ ID NO: 269241 - DNA, 30 bp, Artificial Sequence
  Synthetic oligonucleotide
ctgttgcagtaactcacgttagatatcacc

SEQ ID NO: 269242 - DNA, 30 bp, Artificial Sequence
  Synthetic oligonucleotide
ggtcgggtccatgaatgtaagtatatcacc

SEQ ID NO: 269243 - DNA, 30 bp, Artificial Sequence
  Synthetic oligonucleotide
ggggatgttggggtatggacgggtatcacc

SEQ ID NO: 269244 - DNA, 30 bp, Artificial Sequence
  Synthetic oligonucleotide
aagagccatagattcgtaaatattatcacc

SEQ ID NO: 269245 - DNA, 30 bp, Artificial Sequence
  Synthetic oligonucleotide
ttcaccttctctcgggagagtccgctcacc

SEQ ID NO: 269246 - DNA, 30 bp, Artificial Sequence
  Synthetic oligonucleotide
caacgaaaccaagcagcgtttccgctcacc

SEQ ID NO: 269247 - DNA, 30 bp, Artificial Sequence
  Synthetic oligonucleotide
gatcgcgcacaatggtctactgctctcacc

SEQ ID NO: 269248 - DNA, 30 bp, Artificial Sequence
  Synthetic oligonucleotide
tttctagtacaaacctcgacgcatgtcacc

SEQ ID NO: 269249 - DNA, 30 bp, Artificial Sequence
  Synthetic oligonucleotide
tgccgtcacgggccctaatcctatgtcacc

SEQ ID NO: 269250 - DNA, 30 bp, Artificial Sequence
  Synthetic oligonucleotide
aactcgtcgtcgcgatacccgtgtgtcacc

SEQ ID NO: 269251 - DNA, 30 bp, Artificial Sequence
  Synthetic oligonucleotide
cggattacaacacggcacgcttgtgtcacc

SEQ ID NO: 269252 - DNA, 30 bp, Artificial Sequence
  Synthetic oligonucleotide
agtgctagcctatagtcatccgtattcacc

SEQ ID NO: 269253 - DNA, 30 bp, Artificial Sequence
  Synthetic oligonucleotide
tcccagtatgacaccggctccgccttcacc

SEQ ID NO: 269254 - DNA, 30 bp, Artificial Sequence
  Synthetic oligonucleotide
gatgaggtcagggccgtttcgcaaaagacc

SEQ ID NO: 269255 - DNA, 30 bp, Artificial Sequence
  Synthetic oligonucleotide
gaatgaactcgataacgtcaggtcaagacc

SEQ ID NO: 269256 - DNA, 30 bp, Artificial Sequence
  Synthetic oligonucleotide
atgactgggcaggcaaatataccgaagacc

SEQ ID NO: 269257 - DNA, 30 bp, Artificial Sequence
  Synthetic oligonucleotide
tcgaagtataacgatctttaatgtaagacc

SEQ ID NO: 269258 - DNA, 30 bp, Artificial Sequence
  Synthetic oligonucleotide
cgagattggcgtcacaagtgtattaagacc

SEQ ID NO: 269259 - DNA, 30 bp, Artificial Sequence
  Synthetic oligonucleotide
tagcccacgtggtgtcaacgctttaagacc

SEQ ID NO: 269260 - DNA, 30 bp, Artificial Sequence
  Synthetic oligonucleotide
ttggtagggctaatgcagccgggacagacc

SEQ ID NO: 269261 - DNA, 30 bp, Artificial Sequence
  Synthetic oligonucleotide
gccagacactggcacaaggagtcgcagacc

SEQ ID NO: 269262 - DNA, 30 bp, Artificial Sequence
  Synthetic oligonucleotide
gtcgcggtgagggttgtgagctttcagacc

SEQ ID NO: 269263 - DNA, 30 bp, Artificial Sequence
  Synthetic oligonucleotide
gtgcatatcgcgtactgaacattagagacc

SEQ ID NO: 269264 - DNA, 30 bp, Artificial Sequence
  Synthetic oligonucleotide
aaaaacaagtgcatttagtttcacgagacc

SEQ ID NO: 269265 - DNA, 30 bp, Artificial Sequence
  Synthetic oligonucleotide
gcattctaaacctgaggcctccccgagacc

SEQ ID NO: 269266 - DNA, 30 bp, Artificial Sequence
  Synthetic oligonucleotide
ctgtcgggtggaatagtttgagatgagacc

SEQ ID NO: 269267 - DNA, 30 bp, Artificial Sequence
  Synthetic oligonucleotide
cacgcgaacggggcctggtatggatagacc

SEQ ID NO: 269268 - DNA, 30 bp, Artificial Sequence
  Synthetic oligonucleotide
caacctggtataagctggcaaagctagacc

SEQ ID NO: 269269 - DNA, 30 bp, Artificial Sequence
  Synthetic oligonucleotide
ggcgagcaggaggtgatcggagtctagacc

SEQ ID NO: 269270 - DNA, 30 bp, Artificial Sequence
  Synthetic oligonucleotide
ggctcgaccaaaaaaaaccgcgtctagacc

SEQ ID NO: 269271 - DNA, 30 bp, Artificial Sequence
  Synthetic oligonucleotide
agtgcaagcagatccctgtgaaagtagacc

SEQ ID NO: 269272 - DNA, 30 bp, Artificial Sequence
  Synthetic oligonucleotide
ctggtagcatgagaatcttagaagtagacc

SEQ ID NO: 269273 - DNA, 30 bp, Artificial Sequence
  Synthetic oligonucleotide
gtggcgcaacccaagcgtagggattagacc

SEQ ID NO: 269274 - DNA, 30 bp, Artificial Sequence
  Synthetic oligonucleotide
aagtagaccatcgcgctgcgtcaaacgacc

SEQ ID NO: 269275 - DNA, 30 bp, Artificial Sequence
  Synthetic oligonucleotide
taattttgtaagatgaggcgcggaccgacc

SEQ ID NO: 269276 - DNA, 30 bp, Artificial Sequence
  Synthetic oligonucleotide
aggtccacttacaaccggaatctagcgacc

SEQ ID NO: 269277 - DNA, 30 bp, Artificial Sequence
  Synthetic oligonucleotide
gctaatccacggataaaagattacgcgacc

SEQ ID NO: 269278 - DNA, 30 bp, Artificial Sequence
  Synthetic oligonucleotide
tgaggttccccgctgtttagtagtgcgacc

SEQ ID NO: 269279 - DNA, 40 bp, Artificial Sequence
  Synthetic oligonucleotide
ataaaaaggcggggggaatactggcctattggaatcgacc

SEQ ID NO: 269280 - DNA, 30 bp, Artificial Sequence
  Synthetic oligonucleotide
gaatattggcaccgtatagcaccctcgacc

SEQ ID NO: 269281 - DNA, 30 bp, Artificial Sequence
  Synthetic oligonucleotide
ttctctaactgcgtggttatctcctcgacc

SEQ ID NO: 269282 - DNA, 30 bp, Artificial Sequence
  Synthetic oligonucleotide
gaatgtaatatgagtcttcgttagtcgacc

SEQ ID NO: 269283 - DNA, 30 bp, Artificial Sequence
  Synthetic oligonucleotide
ggtgagacttcaggggcgggctattcgacc

SEQ ID NO: 269284 - DNA, 30 bp, Artificial Sequence
  Synthetic oligonucleotide
aaagtgttccaataagatatcgcttcgacc

SEQ ID NO: 269285 - DNA, 30 bp, Artificial Sequence
  Synthetic oligonucleotide
aggggcggctccgttacaccacgaaggacc

SEQ ID NO: 269286 - DNA, 30 bp, Artificial Sequence
  Synthetic oligonucleotide
gcattcgccctaggaggaccgagcaggacc

SEQ ID NO: 269287 - DNA, 30 bp, Artificial Sequence
  Synthetic oligonucleotide
tggttttttcgcgtgggcggcgagaggacc

SEQ ID NO: 269288 - DNA, 30 bp, Artificial Sequence
  Synthetic oligonucleotide
gggcaatgcacgactagcctcgggaggacc

SEQ ID NO: 269289 - DNA, 30 bp, Artificial Sequence
  Synthetic oligonucleotide
tactgcttattgattcatccctcgcggacc

SEQ ID NO: 269290 - DNA, 30 bp, Artificial Sequence
  Synthetic oligonucleotide
agagaccattagttcaatgtttctcggacc

SEQ ID NO: 269291 - DNA, 30 bp, Artificial Sequence
  Synthetic oligonucleotide
tggcagcaagcccggtgtgccgtagggacc

SEQ ID NO: 269292 - DNA, 30 bp, Artificial Sequence
  Synthetic oligonucleotide
ttgtaatacaggacttcgaataccgggacc

SEQ ID NO: 269293 - DNA, 30 bp, Artificial Sequence
  Synthetic oligonucleotide
tgacccaagctcgcccatcaccgcgggacc

SEQ ID NO: 269294 - DNA, 30 bp, Artificial Sequence
  Synthetic oligonucleotide
ccctgtggtcggaggcgagcgctcgggacc

SEQ ID NO: 269295 - DNA, 30 bp, Artificial Sequence
  Synthetic oligonucleotide
gtagaagattgccagcgagcggtatggacc

SEQ ID NO: 269296 - DNA, 30 bp, Artificial Sequence
  Synthetic oligonucleotide
cactcagtataaacatccgcgggctggacc

SEQ ID NO: 269297 - DNA, 30 bp, Artificial Sequence
  Synthetic oligonucleotide
ggccagtagtgtagcaaacgtggttggacc

SEQ ID NO: 269298 - DNA, 30 bp, Artificial Sequence
  Synthetic oligonucleotide
atatcgtgcttttcacgtgcggggatgacc

SEQ ID NO: 269299 - DNA, 30 bp, Artificial Sequence
  Synthetic oligonucleotide
ggcagggcatccgcatcattcttgatgacc

SEQ ID NO: 269300 - DNA, 30 bp, Artificial Sequence
  Synthetic oligonucleotide
ttgtggggtatgattccatgccgactgacc

SEQ ID NO: 269301 - DNA, 31 bp, Artificial Sequence
  Synthetic oligonucleotide
taccgcccctcccttacagcacatgctgacc

SEQ ID NO: 269302 - DNA, 30 bp, Artificial Sequence
  Synthetic oligonucleotide
tctcgtacgtggtccggcgcaacagtgacc

SEQ ID NO: 269303 - DNA, 30 bp, Artificial Sequence
  Synthetic oligonucleotide
gactcgacccatggagcctgggccgtgacc

SEQ ID NO: 269304 - DNA, 30 bp, Artificial Sequence
  Synthetic oligonucleotide
tttggggacttgtaaggttgaggcgtgacc

SEQ ID NO: 269305 - DNA, 30 bp, Artificial Sequence
  Synthetic oligonucleotide
acgggtggagagcagggataacaggtgacc

SEQ ID NO: 269306 - DNA, 30 bp, Artificial Sequence
  Synthetic oligonucleotide
accaggaacagccagcggtgcagggtgacc

SEQ ID NO: 269307 - DNA, 30 bp, Artificial Sequence
  Synthetic oligonucleotide
aataatccgcatcacttgggtaatgtgacc

SEQ ID NO: 269308 - DNA, 30 bp, Artificial Sequence
  Synthetic oligonucleotide
tggtaaaaaattaaactcctggatgtgacc

SEQ ID NO: 269309 - DNA, 30 bp, Artificial Sequence
  Synthetic oligonucleotide
ggttcacatgattcacggataccattgacc

SEQ ID NO: 269310 - DNA, 30 bp, Artificial Sequence
  Synthetic oligonucleotide
ccgagacgacgtagcgtaagatcattgacc

SEQ ID NO: 269311 - DNA, 30 bp, Artificial Sequence
  Synthetic oligonucleotide
atagtcgtctttgtgactagtgagttgacc

SEQ ID NO: 269312 - DNA, 30 bp, Artificial Sequence
  Synthetic oligonucleotide
cgttcgtcattgaacccgcgattgttgacc

SEQ ID NO: 269313 - DNA, 30 bp, Artificial Sequence
  Synthetic oligonucleotide
gacctcagatattagcgtagcgctttgacc

SEQ ID NO: 269314 - DNA, 30 bp, Artificial Sequence
  Synthetic oligonucleotide
aaagagggatgtatgctgtctcgaaatacc

SEQ ID NO: 269315 - DNA, 30 bp, Artificial Sequence
  Synthetic oligonucleotide
tgggagtgattactagccacacagaatacc

SEQ ID NO: 269316 - DNA, 30 bp, Artificial Sequence
  Synthetic oligonucleotide
attaggttaaaccttaagtgtgggaatacc

SEQ ID NO: 269317 - DNA, 30 bp, Artificial Sequence
  Synthetic oligonucleotide
gcaagcttcggctcacgacgagctaatacc

SEQ ID NO: 269318 - DNA, 30 bp, Artificial Sequence
  Synthetic oligonucleotide
ttgtgaggtgctacgcatcggacacatacc

SEQ ID NO: 269319 - DNA, 30 bp, Artificial Sequence
  Synthetic oligonucleotide
ttggagagtgttttttacaattagcatacc

SEQ ID NO: 269320 - DNA, 30 bp, Artificial Sequence
  Synthetic oligonucleotide
ctaaccgttacggatctattatatcatacc

SEQ ID NO: 269321 - DNA, 30 bp, Artificial Sequence
  Synthetic oligonucleotide
ccgttcaggtatgcaagtattaaggatacc

SEQ ID NO: 269322 - DNA, 30 bp, Artificial Sequence
  Synthetic oligonucleotide
ttagtctctgaaggtgcagacatggatacc

SEQ ID NO: 269323 - DNA, 30 bp, Artificial Sequence
  Synthetic oligonucleotide
tcatagtatccattacagtggcctgatacc

SEQ ID NO: 269324 - DNA, 30 bp, Artificial Sequence
  Synthetic oligonucleotide
cagcttgctcgaatgttgcgtcttgatacc

SEQ ID NO: 269325 - DNA, 30 bp, Artificial Sequence
  Synthetic oligonucleotide
actacagggggacacagcggaaaatatacc

SEQ ID NO: 269326 - DNA, 30 bp, Artificial Sequence
  Synthetic oligonucleotide
cagccgaggacccttgtccatacatatacc

SEQ ID NO: 269327 - DNA, 30 bp, Artificial Sequence
  Synthetic oligonucleotide
gcacagcccagcactgcttcgtgatatacc

SEQ ID NO: 269328 - DNA, 30 bp, Artificial Sequence
  Synthetic oligonucleotide
gcgtgaacgagtgggagcagttagtatacc

SEQ ID NO: 269329 - DNA, 30 bp, Artificial Sequence
  Synthetic oligonucleotide
gcgcgtgcgaggtgccaggattgaactacc

SEQ ID NO: 269330 - DNA, 30 bp, Artificial Sequence
  Synthetic oligonucleotide
aagatgcttttaagtccaagaatgactacc

SEQ ID NO: 269331 - DNA, 30 bp, Artificial Sequence
  Synthetic oligonucleotide
gacgtaatcgggaagaggtcctatactacc

SEQ ID NO: 269332 - DNA, 30 bp, Artificial Sequence
  Synthetic oligonucleotide
gataaccacgccaattggatcagacctacc

SEQ ID NO: 269333 - DNA, 30 bp, Artificial Sequence
  Synthetic oligonucleotide
atctccgaaccagtggtgcgataccctacc

SEQ ID NO: 269334 - DNA, 30 bp, Artificial Sequence
  Synthetic oligonucleotide
ctccaactcaaacctcacgataaagctacc

SEQ ID NO: 269335 - DNA, 30 bp, Artificial Sequence
  Synthetic oligonucleotide
ataagtggcttgggaccgtggaacgctacc

SEQ ID NO: 269336 - DNA, 30 bp, Artificial Sequence
  Synthetic oligonucleotide
caaatgctaaggcgttataaagccgctacc

SEQ ID NO: 269337 - DNA, 30 bp, Artificial Sequence
  Synthetic oligonucleotide
aaagtgtgacgatatcaggaaatcgctacc

SEQ ID NO: 269338 - DNA, 30 bp, Artificial Sequence
  Synthetic oligonucleotide
gaagcgtcgcttgacattacagtggctacc

SEQ ID NO: 269339 - DNA, 30 bp, Artificial Sequence
  Synthetic oligonucleotide
tcaagtcaaaggggcgcgctgttggctacc

SEQ ID NO: 269340 - DNA, 30 bp, Artificial Sequence
  Synthetic oligonucleotide
accatgaaaagtgtttagagacctgctacc

SEQ ID NO: 269341 - DNA, 30 bp, Artificial Sequence
  Synthetic oligonucleotide
ggggcggtatcgaagtgaattagatctacc

SEQ ID NO: 269342 - DNA, 30 bp, Artificial Sequence
  Synthetic oligonucleotide
cgagaaatccatcgtggttgtgcctctacc

SEQ ID NO: 269343 - DNA, 30 bp, Artificial Sequence
  Synthetic oligonucleotide
agaatggaaatgatatgggcgagctctacc

SEQ ID NO: 269344 - DNA, 30 bp, Artificial Sequence
  Synthetic oligonucleotide
gggcgggtattagcaactaatcagtctacc

SEQ ID NO: 269345 - DNA, 30 bp, Artificial Sequence
  Synthetic oligonucleotide
agtaccaatgtgctactctgcgcttctacc

SEQ ID NO: 269346 - DNA, 30 bp, Artificial Sequence
  Synthetic oligonucleotide
cggatccgagtggggaactcaaccagtacc

SEQ ID NO: 269347 - DNA, 30 bp, Artificial Sequence
  Synthetic oligonucleotide
agacgcaagtaatgatgcctttgcagtacc

SEQ ID NO: 269348 - DNA, 30 bp, Artificial Sequence
  Synthetic oligonucleotide
tgggactaccaagagtagggtctgagtacc

SEQ ID NO: 269349 - DNA, 30 bp, Artificial Sequence
  Synthetic oligonucleotide
agggttccggacacccgcgtggctagtacc

SEQ ID NO: 269350 - DNA, 30 bp, Artificial Sequence
  Synthetic oligonucleotide
gctatgcgagccttagaatcttgacgtacc

SEQ ID NO: 269351 - DNA, 30 bp, Artificial Sequence
  Synthetic oligonucleotide
gggggaacttagctcaaagttcaccgtacc

SEQ ID NO: 269352 - DNA, 30 bp, Artificial Sequence
  Synthetic oligonucleotide
accctcgtcgaccgcgcgttagggcgtacc

SEQ ID NO: 269353 - DNA, 30 bp, Artificial Sequence
  Synthetic oligonucleotide
taggtgccgtgttgcccggccatgcgtacc

SEQ ID NO: 269354 - DNA, 30 bp, Artificial Sequence
  Synthetic oligonucleotide
tgtctggtcgtatagtcacttcaaggtacc

SEQ ID NO: 269355 - DNA, 30 bp, Artificial Sequence
  Synthetic oligonucleotide
ggtatgttcatggcgatcccacgaggtacc

SEQ ID NO: 269356 - DNA, 30 bp, Artificial Sequence
  Synthetic oligonucleotide
taatgtgaagcctaaatacgttatggtacc

SEQ ID NO: 269357 - DNA, 30 bp, Artificial Sequence
  Synthetic oligonucleotide
cttaattccaatgagcccttcggtggtacc

SEQ ID NO: 269358 - DNA, 30 bp, Artificial Sequence
  Synthetic oligonucleotide
ttataacggaatcctgccgaccttggtacc

SEQ ID NO: 269359 - DNA, 30 bp, Artificial Sequence
  Synthetic oligonucleotide
ccaagcacccggattctaccaatatgtacc

SEQ ID NO: 269360 - DNA, 30 bp, Artificial Sequence
  Synthetic oligonucleotide
tcttcgttttacaagtgagaggtctgtacc

SEQ ID NO: 269361 - DNA, 30 bp, Artificial Sequence
  Synthetic oligonucleotide
gcaaacataccgacgagaataacgtgtacc

SEQ ID NO: 269362 - DNA, 30 bp, Artificial Sequence
  Synthetic oligonucleotide
ccaaggaaagtaccgtgctaaatttgtacc

SEQ ID NO: 269363 - DNA, 30 bp, Artificial Sequence
  Synthetic oligonucleotide
gacatcatcatctgtcaatctcgaattacc

SEQ ID NO: 269364 - DNA, 30 bp, Artificial Sequence
  Synthetic oligonucleotide
gtccaggcggcgatggatctttcgcttacc

SEQ ID NO: 269365 - DNA, 30 bp, Artificial Sequence
  Synthetic oligonucleotide
actcaaaccgttcaggtagccagtcttacc

SEQ ID NO: 269366 - DNA, 30 bp, Artificial Sequence
  Synthetic oligonucleotide
cagagtaagagccgtagaggcaacgttacc

SEQ ID NO: 269367 - DNA, 30 bp, Artificial Sequence
  Synthetic oligonucleotide
ctgaagaacgccagtcaagcagtcgttacc

SEQ ID NO: 269368 - DNA, 30 bp, Artificial Sequence
  Synthetic oligonucleotide
tgagtttaacgagcattgtgcgttgttacc

SEQ ID NO: 269369 - DNA, 30 bp, Artificial Sequence
  Synthetic oligonucleotide
aggagccgagcccctagtttaagatttacc

SEQ ID NO: 269370 - DNA, 30 bp, Artificial Sequence
  Synthetic oligonucleotide
gggaaacaacggattcatcacggatttacc

SEQ ID NO: 269371 - DNA, 30 bp, Artificial Sequence
  Synthetic oligonucleotide
cgatacagcattcagccaattgactttacc

SEQ ID NO: 269372 - DNA, 30 bp, Artificial Sequence
  Synthetic oligonucleotide
ggggggaaaactattccgacaatctttacc

SEQ ID NO: 269373 - DNA, 30 bp, Artificial Sequence
  Synthetic oligonucleotide
gtccataagatgaacgttggttgaaaaccc

SEQ ID NO: 269374 - DNA, 30 bp, Artificial Sequence
  Synthetic oligonucleotide
aacgcatagaagcggtaccatctaaaaccc

SEQ ID NO: 269375 - DNA, 30 bp, Artificial Sequence
  Synthetic oligonucleotide
aactgttgtgaaagagctgcgaggaaaccc

SEQ ID NO: 269376 - DNA, 30 bp, Artificial Sequence
  Synthetic oligonucleotide
taatctgcaactctctagcaatggaaaccc

SEQ ID NO: 269377 - DNA, 30 bp, Artificial Sequence
  Synthetic oligonucleotide
tgtctgtttgcagacccaatagataaaccc

SEQ ID NO: 269378 - DNA, 30 bp, Artificial Sequence
  Synthetic oligonucleotide
atttggcagataggggaatagtttaaaccc

SEQ ID NO: 269379 - DNA, 30 bp, Artificial Sequence
  Synthetic oligonucleotide
ctgcaaagcgaactggacaacgcacaaccc

SEQ ID NO: 269380 - DNA, 30 bp, Artificial Sequence
  Synthetic oligonucleotide
tcgatctcgagggtgtaggcaagacaaccc

SEQ ID NO: 269381 - DNA, 30 bp, Artificial Sequence
  Synthetic oligonucleotide
tgggattttgccttgtcatttttacaaccc

SEQ ID NO: 269382 - DNA, 30 bp, Artificial Sequence
  Synthetic oligonucleotide
cggccaatgaaatattccgggtctcaaccc

SEQ ID NO: 269383 - DNA, 30 bp, Artificial Sequence
  Synthetic oligonucleotide
accttggtacggtcacatggccaagaaccc

SEQ ID NO: 269384 - DNA, 30 bp, Artificial Sequence
  Synthetic oligonucleotide
cggccctgatcactgtgataagaagaaccc

SEQ ID NO: 269385 - DNA, 30 bp, Artificial Sequence
  Synthetic oligonucleotide
ttaatgcggtctaaacgttcggcagaaccc

SEQ ID NO: 269386 - DNA, 30 bp, Artificial Sequence
  Synthetic oligonucleotide
ccggcaagaggggaacccgcatgagaaccc

SEQ ID NO: 269387 - DNA, 30 bp, Artificial Sequence
  Synthetic oligonucleotide
cagagggggctctacccctgtaaggaaccc

SEQ ID NO: 269388 - DNA, 30 bp, Artificial Sequence
  Synthetic oligonucleotide
agatttgcaattgaacgttactgctaaccc

SEQ ID NO: 269389 - DNA, 30 bp, Artificial Sequence
  Synthetic oligonucleotide
taaattcctgacttgtacaaagtctaaccc

SEQ ID NO: 269390 - DNA, 30 bp, Artificial Sequence
  Synthetic oligonucleotide
ggaaattaccaagattaatattcttaaccc

SEQ ID NO: 269391 - DNA, 30 bp, Artificial Sequence
  Synthetic oligonucleotide
gtgacttgcccgttctttgtgcgcacaccc

SEQ ID NO: 269392 - DNA, 30 bp, Artificial Sequence
  Synthetic oligonucleotide
ttgtgacgcaatgtgcctcttattacaccc

SEQ ID NO: 269393 - DNA, 30 bp, Artificial Sequence
  Synthetic oligonucleotide
actgaattccagtcacaggcgttaccaccc

SEQ ID NO: 269394 - DNA, 30 bp, Artificial Sequence
  Synthetic oligonucleotide
tcaacattatttacagtccgaattccaccc

SEQ ID NO: 269395 - DNA, 30 bp, Artificial Sequence
  Synthetic oligonucleotide
gcaccttgtgaatagtgtatgtgggcaccc

SEQ ID NO: 269396 - DNA, 30 bp, Artificial Sequence
  Synthetic oligonucleotide
acaactcttgatacgcttcggctggcaccc

SEQ ID NO: 269397 - DNA, 30 bp, Artificial Sequence
  Synthetic oligonucleotide
tggtatagttctcatctatcctcatcaccc

SEQ ID NO: 269398 - DNA, 30 bp, Artificial Sequence
  Synthetic oligonucleotide
agatagtgtcacgactccttgagatcaccc

SEQ ID NO: 269399 - DNA, 30 bp, Artificial Sequence
  Synthetic oligonucleotide
gtggtgcagaggcatatcgcgggatcaccc

SEQ ID NO: 269400 - DNA, 30 bp, Artificial Sequence
  Synthetic oligonucleotide
cacgtatcgaaggtttcggtcgtatcaccc

SEQ ID NO: 269401 - DNA, 30 bp, Artificial Sequence
  Synthetic oligonucleotide
cccgttaaagtacagacaacctattcaccc

SEQ ID NO: 269402 - DNA, 30 bp, Artificial Sequence
  Synthetic oligonucleotide
gcggaaatgaacaggctgggtttttcaccc

SEQ ID NO: 269403 - DNA, 29 bp, Artificial Sequence
  Synthetic oligonucleotide
acggggcaacgttgacacaatgaagaccc

SEQ ID NO: 269404 - DNA, 30 bp, Artificial Sequence
  Synthetic oligonucleotide
aatccacgacacacactgccgggcagaccc

SEQ ID NO: 269405 - DNA, 30 bp, Artificial Sequence
  Synthetic oligonucleotide
ctcataaggcgtttaacggtgacgagaccc

SEQ ID NO: 269406 - DNA, 30 bp, Artificial Sequence
  Synthetic oligonucleotide
tgtccaggtctggacacttcgcgtagaccc

SEQ ID NO: 269407 - DNA, 30 bp, Artificial Sequence
  Synthetic oligonucleotide
ccacggtacgattgtatttaaacacgaccc

SEQ ID NO: 269408 - DNA, 30 bp, Artificial Sequence
  Synthetic oligonucleotide
atataaacttttgagatatcgagccgaccc

SEQ ID NO: 269409 - DNA, 30 bp, Artificial Sequence
  Synthetic oligonucleotide
cattttgcgccacgcgcgaagcacggaccc

SEQ ID NO: 269410 - DNA, 30 bp, Artificial Sequence
  Synthetic oligonucleotide
tgtaatccggacctctgaatgagcggaccc

SEQ ID NO: 269411 - DNA, 30 bp, Artificial Sequence
  Synthetic oligonucleotide
atgacgctaccttaaagctcgaagggaccc

SEQ ID NO: 269412 - DNA, 30 bp, Artificial Sequence
  Synthetic oligonucleotide
ccagccgacacctgtcttcgattgggaccc

SEQ ID NO: 269413 - DNA, 30 bp, Artificial Sequence
  Synthetic oligonucleotide
ggagggcgttagcatgcgcatccatgaccc

SEQ ID NO: 269414 - DNA, 30 bp, Artificial Sequence
  Synthetic oligonucleotide
gaaaaacggaatgtaagtaaccactgaccc

SEQ ID NO: 269415 - DNA, 30 bp, Artificial Sequence
  Synthetic oligonucleotide
agcagctcagccactgcgaagggtataccc

SEQ ID NO: 269416 - DNA, 30 bp, Artificial Sequence
  Synthetic oligonucleotide
taatttccgcttgagaccttatggctaccc

SEQ ID NO: 269417 - DNA, 30 bp, Artificial Sequence
  Synthetic oligonucleotide
ttgacggttgatgactgctgcaaagtaccc

SEQ ID NO: 269418 - DNA, 30 bp, Artificial Sequence
  Synthetic oligonucleotide
cacaccccattcttagatctatcattaccc

SEQ ID NO: 269419 - DNA, 30 bp, Artificial Sequence
  Synthetic oligonucleotide
gctaagtatacagtttttagacttttaccc

SEQ ID NO: 269420 - DNA, 30 bp, Artificial Sequence
  Synthetic oligonucleotide
ccgttctttaaggtattcaaaaaaaacccc

SEQ ID NO: 269421 - DNA, 30 bp, Artificial Sequence
  Synthetic oligonucleotide
atatggagcgaatttgacgtgacaaacccc

SEQ ID NO: 269422 - DNA, 30 bp, Artificial Sequence
  Synthetic oligonucleotide
tagatccctgcggacggtagaatgaacccc

SEQ ID NO: 269423 - DNA, 30 bp, Artificial Sequence
  Synthetic oligonucleotide
ggacagaacgagaaggcctggtataacccc

SEQ ID NO: 269424 - DNA, 30 bp, Artificial Sequence
  Synthetic oligonucleotide
tagggagttagcgggctctaggaacacccc

SEQ ID NO: 269425 - DNA, 30 bp, Artificial Sequence
  Synthetic oligonucleotide
gtagtaacttatctaacaggcagacacccc

SEQ ID NO: 269426 - DNA, 30 bp, Artificial Sequence
  Synthetic oligonucleotide
cactggtgagtgtagacgcggacccacccc

SEQ ID NO: 269427 - DNA, 30 bp, Artificial Sequence
  Synthetic oligonucleotide
ctacgtggagtccccattgattatcacccc

SEQ ID NO: 269428 - DNA, 30 bp, Artificial Sequence
  Synthetic oligonucleotide
aacagatacatattcaaacggcttcacccc

SEQ ID NO: 269429 - DNA, 30 bp, Artificial Sequence
  Synthetic oligonucleotide
agctagcgatcgtctcattattttcacccc

SEQ ID NO: 269430 - DNA, 30 bp, Artificial Sequence
  Synthetic oligonucleotide
tagaggcggagcacccaaatatttgacccc

SEQ ID NO: 269431 - DNA, 30 bp, Artificial Sequence
  Synthetic oligonucleotide
atcaagaattaacgccttcaaatctacccc

SEQ ID NO: 269432 - DNA, 30 bp, Artificial Sequence
  Synthetic oligonucleotide
tctactctcgcgcgaagccggcattacccc

SEQ ID NO: 269433 - DNA, 30 bp, Artificial Sequence
  Synthetic oligonucleotide
gagctataccgacacgccttacataccccc

SEQ ID NO: 269434 - DNA, 30 bp, Artificial Sequence
  Synthetic oligonucleotide
aactattgatcgtttctatctgctaccccc

SEQ ID NO: 269435 - DNA, 30 bp, Artificial Sequence
  Synthetic oligonucleotide
gagacttttaggaaacttatacaccccccc

SEQ ID NO: 269436 - DNA, 30 bp, Artificial Sequence
  Synthetic oligonucleotide
gatcagtgaagtgctacagcctcccccccc

SEQ ID NO: 269437 - DNA, 30 bp, Artificial Sequence
  Synthetic oligonucleotide
gggtaaatattcaacctaatactcgccccc

SEQ ID NO: 269438 - DNA, 30 bp, Artificial Sequence
  Synthetic oligonucleotide
gtccgttatcggagcctttgctgggccccc

SEQ ID NO: 269439 - DNA, 30 bp, Artificial Sequence
  Synthetic oligonucleotide
gttaacagagcatgaacgctcccgtccccc

SEQ ID NO: 269440 - DNA, 30 bp, Artificial Sequence
  Synthetic oligonucleotide
aggtaggcggggttcgaggtgaaacgcccc

SEQ ID NO: 269441 - DNA, 30 bp, Artificial Sequence
  Synthetic oligonucleotide
attactgggggggccgagagctgacgcccc

SEQ ID NO: 269442 - DNA, 30 bp, Artificial Sequence
  Synthetic oligonucleotide
tatgggataacctaagaagaaccgcgcccc

SEQ ID NO: 269443 - DNA, 30 bp, Artificial Sequence
  Synthetic oligonucleotide
cagattcagcgactttcaagtccgcgcccc

SEQ ID NO: 269444 - DNA, 30 bp, Artificial Sequence
  Synthetic oligonucleotide
atgagcttaaacagttgattccatcgcccc

SEQ ID NO: 269445 - DNA, 30 bp, Artificial Sequence
  Synthetic oligonucleotide
tagcaaggagactaaattattagtcgcccc

SEQ ID NO: 269446 - DNA, 30 bp, Artificial Sequence
  Synthetic oligonucleotide
cgattacggcccaggatatacgtaggcccc

SEQ ID NO: 269447 - DNA, 30 bp, Artificial Sequence
  Synthetic oligonucleotide
ctcaggagtaaactatttgttcagggcccc

SEQ ID NO: 269448 - DNA, 30 bp, Artificial Sequence
  Synthetic oligonucleotide
caggttctttcaaatttacccgttggcccc

SEQ ID NO: 269449 - DNA, 30 bp, Artificial Sequence
  Synthetic oligonucleotide
ggcaacaggccccgtcgtcatggatgcccc

SEQ ID NO: 269450 - DNA, 30 bp, Artificial Sequence
  Synthetic oligonucleotide
gaagaggtcaaagaggccatcatatgcccc

SEQ ID NO: 269451 - DNA, 30 bp, Artificial Sequence
  Synthetic oligonucleotide
aaagacagtgtaatagcgcatacaatcccc

SEQ ID NO: 269452 - DNA, 30 bp, Artificial Sequence
  Synthetic oligonucleotide
cgaaccccaggatgaacggcttacatcccc

SEQ ID NO: 269453 - DNA, 30 bp, Artificial Sequence
  Synthetic oligonucleotide
ttacaccgttaacctagcaagcgtatcccc

SEQ ID NO: 269454 - DNA, 30 bp, Artificial Sequence
  Synthetic oligonucleotide
tgtataggggtgacatactatcgtatcccc

SEQ ID NO: 269455 - DNA, 30 bp, Artificial Sequence
  Synthetic oligonucleotide
ctatgtcgtactctgcctagtcgactcccc

SEQ ID NO: 269456 - DNA, 30 bp, Artificial Sequence
  Synthetic oligonucleotide
ccactagcagagtaagatactcacctcccc

SEQ ID NO: 269457 - DNA, 30 bp, Artificial Sequence
  Synthetic oligonucleotide
caaacctatgagacctctctcactctcccc

SEQ ID NO: 269458 - DNA, 30 bp, Artificial Sequence
  Synthetic oligonucleotide
tgcctggcgggaatgtaacttgtagtcccc

SEQ ID NO: 269459 - DNA, 30 bp, Artificial Sequence
  Synthetic oligonucleotide
ccgtgtgatccaacaaggagccgcgtcccc

SEQ ID NO: 269460 - DNA, 30 bp, Artificial Sequence
  Synthetic oligonucleotide
acgctcacttgcataatcacattcgtcccc

SEQ ID NO: 269461 - DNA, 30 bp, Artificial Sequence
  Synthetic oligonucleotide
aatgacagtctcattaacgggttcgtcccc

SEQ ID NO: 269462 - DNA, 30 bp, Artificial Sequence
  Synthetic oligonucleotide
atgggtagatggtcggttcgggttgtcccc

SEQ ID NO: 269463 - DNA, 30 bp, Artificial Sequence
  Synthetic oligonucleotide
ttgctggctatttaatgcatctttgtcccc

SEQ ID NO: 269464 - DNA, 30 bp, Artificial Sequence
  Synthetic oligonucleotide
tagattataccgacccaattgcccttcccc

SEQ ID NO: 269465 - DNA, 30 bp, Artificial Sequence
  Synthetic oligonucleotide
gctggaggtaaaagcgcataatgcttcccc

SEQ ID NO: 269466 - DNA, 30 bp, Artificial Sequence
  Synthetic oligonucleotide
atttaccgcaaacaatcccaccgaaagccc

SEQ ID NO: 269467 - DNA, 30 bp, Artificial Sequence
  Synthetic oligonucleotide
ttggtcatgatataatgcgggaacaagccc

SEQ ID NO: 269468 - DNA, 30 bp, Artificial Sequence
  Synthetic oligonucleotide
tccgtcaaacattgccggcatgcgaagccc

SEQ ID NO: 269469 - DNA, 29 bp, Artificial Sequence
  Synthetic oligonucleotide
ttggtaccgcgacgaaggaacagcagccc

SEQ ID NO: 269470 - DNA, 29 bp, Artificial Sequence
  Synthetic oligonucleotide
aacgtgagtaagcaacaggagtgcagccc

SEQ ID NO: 269471 - DNA, 30 bp, Artificial Sequence
  Synthetic oligonucleotide
caacatattgactgaggccctcatcagccc

SEQ ID NO: 269472 - DNA, 30 bp, Artificial Sequence
  Synthetic oligonucleotide
cagtacttttcgggtagcaatggtcagccc

SEQ ID NO: 269473 - DNA, 30 bp, Artificial Sequence
  Synthetic oligonucleotide
acccattaggtgaaaggacagtaagagccc

SEQ ID NO: 269474 - DNA, 30 bp, Artificial Sequence
  Synthetic oligonucleotide
ggcagattttcgggcatgacgctagagccc

SEQ ID NO: 269475 - DNA, 30 bp, Artificial Sequence
  Synthetic oligonucleotide
ttcagaacccctccccgtcctcccgagccc

SEQ ID NO: 269476 - DNA, 30 bp, Artificial Sequence
  Synthetic oligonucleotide
tttcgaggtagccgtgaagttgactagccc

SEQ ID NO: 269477 - DNA, 30 bp, Artificial Sequence
  Synthetic oligonucleotide
accgtcaaagtaataggtaaaacctagccc

SEQ ID NO: 269478 - DNA, 30 bp, Artificial Sequence
  Synthetic oligonucleotide
taaaatcacgcaaagggacaggagtagccc

SEQ ID NO: 269479 - DNA, 30 bp, Artificial Sequence
  Synthetic oligonucleotide
gatgggcagcatcttccgggtttgtagccc

SEQ ID NO: 269480 - DNA, 30 bp, Artificial Sequence
  Synthetic oligonucleotide
tgggagtgcaggagtatgtgtacttagccc

SEQ ID NO: 269481 - DNA, 30 bp, Artificial Sequence
  Synthetic oligonucleotide
ccttccggcactctctatgtaaaaacgccc

SEQ ID NO: 269482 - DNA, 30 bp, Artificial Sequence
  Synthetic oligonucleotide
agcgagtggtaacagtccgcggagacgccc

SEQ ID NO: 269483 - DNA, 30 bp, Artificial Sequence
  Synthetic oligonucleotide
taggccgtaacaattcgccgtaggacgccc

SEQ ID NO: 269484 - DNA, 30 bp, Artificial Sequence
  Synthetic oligonucleotide
tctgacacgcatgacctggaccgtacgccc

SEQ ID NO: 269485 - DNA, 30 bp, Artificial Sequence
  Synthetic oligonucleotide
atttacctgcctgacctgtcgaccccgccc

SEQ ID NO: 269486 - DNA, 30 bp, Artificial Sequence
  Synthetic oligonucleotide
catgtcgcaaattaggccaaaatgccgccc

SEQ ID NO: 269487 - DNA, 30 bp, Artificial Sequence
  Synthetic oligonucleotide
acttgtctttcctagagccgtgtgccgccc

SEQ ID NO: 269488 - DNA, 30 bp, Artificial Sequence
  Synthetic oligonucleotide
agccgtcactttatgatttaacgtccgccc

SEQ ID NO: 269489 - DNA, 30 bp, Artificial Sequence
  Synthetic oligonucleotide
atacgtaaatctatgggatctcgtccgccc

SEQ ID NO: 269490 - DNA, 30 bp, Artificial Sequence
  Synthetic oligonucleotide
catacgatcaataacgcgggaagggcgccc

SEQ ID NO: 269491 - DNA, 30 bp, Artificial Sequence
  Synthetic oligonucleotide
tggataaagtgataaatctcgcgatcgccc

SEQ ID NO: 269492 - DNA, 30 bp, Artificial Sequence
  Synthetic oligonucleotide
taggaactccagttggtccagaactcgccc

SEQ ID NO: 269493 - DNA, 30 bp, Artificial Sequence
  Synthetic oligonucleotide
aaacgggccaattactggttagcctcgccc

SEQ ID NO: 269494 - DNA, 30 bp, Artificial Sequence
  Synthetic oligonucleotide
tatatcgtgcctacattggtgcgctcgccc

SEQ ID NO: 269495 - DNA, 30 bp, Artificial Sequence
  Synthetic oligonucleotide
agatgctgctcgcatgttacgcattcgccc

SEQ ID NO: 269496 - DNA, 30 bp, Artificial Sequence
  Synthetic oligonucleotide
tgaaacgcctctacgtaatcatattcgccc

SEQ ID NO: 269497 - DNA, 30 bp, Artificial Sequence
  Synthetic oligonucleotide
gggggcgtctggcttaaagttctaaggccc

SEQ ID NO: 269498 - DNA, 30 bp, Artificial Sequence
  Synthetic oligonucleotide
tctagtcttacctaggttttagcgaggccc

SEQ ID NO: 269499 - DNA, 30 bp, Artificial Sequence
  Synthetic oligonucleotide
aagacggaactggttcagaatactaggccc

SEQ ID NO: 269500 - DNA, 30 bp, Artificial Sequence
  Synthetic oligonucleotide
ctctagtagggtgaccaagggaaacggccc

SEQ ID NO: 269501 - DNA, 30 bp, Artificial Sequence
  Synthetic oligonucleotide
ttgccgtgtcctaaagcaacgatccggccc

SEQ ID NO: 269502 - DNA, 30 bp, Artificial Sequence
  Synthetic oligonucleotide
aaggacatttaccactggaagtcgcggccc

SEQ ID NO: 269503 - DNA, 30 bp, Artificial Sequence
  Synthetic oligonucleotide
ttcatatggctgaaaagttatttgcggccc

SEQ ID NO: 269504 - DNA, 30 bp, Artificial Sequence
  Synthetic oligonucleotide
tcttgtcacgaaggagatgggcgtcggccc

SEQ ID NO: 269505 - DNA, 30 bp, Artificial Sequence
  Synthetic oligonucleotide
tatggcttcctcaagctaatataagggccc

SEQ ID NO: 269506 - DNA, 30 bp, Artificial Sequence
  Synthetic oligonucleotide
ttgccagcttctattacgttttgagggccc

SEQ ID NO: 269507 - DNA, 30 bp, Artificial Sequence
  Synthetic oligonucleotide
tttagcattcggtagtgccagatggggccc

SEQ ID NO: 269508 - DNA, 30 bp, Artificial Sequence
  Synthetic oligonucleotide
aacgctgtcacgctatgtcgacatgggccc

SEQ ID NO: 269509 - DNA, 30 bp, Artificial Sequence
  Synthetic oligonucleotide
ttactgttcacacggggaccggttgggccc

SEQ ID NO: 269510 - DNA, 29 bp, Artificial Sequence
  Synthetic oligonucleotide
ttgtaggattgtttgagtgatactggccc

SEQ ID NO: 269511 - DNA, 30 bp, Artificial Sequence
  Synthetic oligonucleotide
cgaaatctggagcggtaaacttgctggccc

SEQ ID NO: 269512 - DNA, 30 bp, Artificial Sequence
  Synthetic oligonucleotide
tacatgaataacagctattttgccatgccc

SEQ ID NO: 269513 - DNA, 30 bp, Artificial Sequence
  Synthetic oligonucleotide
aatagaaggaataggtcaccccgcatgccc

SEQ ID NO: 269514 - DNA, 30 bp, Artificial Sequence
  Synthetic oligonucleotide
ataatacattgttcaaaaggacctatgccc

SEQ ID NO: 269515 - DNA, 30 bp, Artificial Sequence
  Synthetic oligonucleotide
tggaggatcagagcggtccgatgcctgccc

SEQ ID NO: 269516 - DNA, 30 bp, Artificial Sequence
  Synthetic oligonucleotide
gatcctaatagatcggtaaacgacgtgccc

SEQ ID NO: 269517 - DNA, 30 bp, Artificial Sequence
  Synthetic oligonucleotide
gtgtcctactaggatgtcgagcaggtgccc

SEQ ID NO: 269518 - DNA, 30 bp, Artificial Sequence
  Synthetic oligonucleotide
gatgaaagaaagtgtaacggagtggtgccc

SEQ ID NO: 269519 - DNA, 30 bp, Artificial Sequence
  Synthetic oligonucleotide
agttaccgaattggggtatgagtggtgccc

SEQ ID NO: 269520 - DNA, 30 bp, Artificial Sequence
  Synthetic oligonucleotide
ccaaggttgtaagacacccgatctgtgccc

SEQ ID NO: 269521 - DNA, 30 bp, Artificial Sequence
  Synthetic oligonucleotide
ccgaaccttcggatacagtggtacaatccc

SEQ ID NO: 269522 - DNA, 30 bp, Artificial Sequence
  Synthetic oligonucleotide
caaatcgacagagataaagaaatcaatccc

SEQ ID NO: 269523 - DNA, 30 bp, Artificial Sequence
  Synthetic oligonucleotide
cgggtgaacaccccgacgagtgaacatccc

SEQ ID NO: 269524 - DNA, 30 bp, Artificial Sequence
  Synthetic oligonucleotide
ataatatcatctgcttattccatacatccc

SEQ ID NO: 269525 - DNA, 30 bp, Artificial Sequence
  Synthetic oligonucleotide
gctcaggacggaatcaatcaatcccatccc

SEQ ID NO: 269526 - DNA, 29 bp, Artificial Sequence
  Synthetic oligonucleotide
taggtacatttatgcgaaagatgcatccc

SEQ ID NO: 269527 - DNA, 30 bp, Artificial Sequence
  Synthetic oligonucleotide
tacggtagaggcccgcttattattcatccc

SEQ ID NO: 269528 - DNA, 30 bp, Artificial Sequence
  Synthetic oligonucleotide
cccttctggacgattattcgccacgatccc

SEQ ID NO: 269529 - DNA, 30 bp, Artificial Sequence
  Synthetic oligonucleotide
atgtgcttaagcgtagaacaagcctatccc

SEQ ID NO: 269530 - DNA, 30 bp, Artificial Sequence
  Synthetic oligonucleotide
agaaagcgttcggttccatgatggtatccc

SEQ ID NO: 269531 - DNA, 30 bp, Artificial Sequence
  Synthetic oligonucleotide
agcaagaggtaatcaactctaatgtatccc

SEQ ID NO: 269532 - DNA, 30 bp, Artificial Sequence
  Synthetic oligonucleotide
acgattcttcccaagcacggaaaaactccc

SEQ ID NO: 269533 - DNA, 30 bp, Artificial Sequence
  Synthetic oligonucleotide
aaccggattagtgtgatcgctgcaactccc

SEQ ID NO: 269534 - DNA, 30 bp, Artificial Sequence
  Synthetic oligonucleotide
tgcagaacttttcacggttaggtaactccc

SEQ ID NO: 269535 - DNA, 30 bp, Artificial Sequence
  Synthetic oligonucleotide
gcgtatcagaagcgataggtctccactccc

SEQ ID NO: 269536 - DNA, 30 bp, Artificial Sequence
  Synthetic oligonucleotide
tggacattaggtgaatggtctagcactccc

SEQ ID NO: 269537 - DNA, 30 bp, Artificial Sequence
  Synthetic oligonucleotide
gaacttagcgcccgcgcgtgtaagactccc

SEQ ID NO: 269538 - DNA, 30 bp, Artificial Sequence
  Synthetic oligonucleotide
cagccgttgagggtccaattgaatactccc

SEQ ID NO: 269539 - DNA, 30 bp, Artificial Sequence
  Synthetic oligonucleotide
agagagatccattatcaccgtaatactccc

SEQ ID NO: 269540 - DNA, 30 bp, Artificial Sequence
  Synthetic oligonucleotide
gaccgtaaggctggttaagtaaaagctccc

SEQ ID NO: 269541 - DNA, 30 bp, Artificial Sequence
  Synthetic oligonucleotide
aggaatggcatactaggtacggtagctccc

SEQ ID NO: 269542 - DNA, 30 bp, Artificial Sequence
  Synthetic oligonucleotide
acattgctttaccgtatccattgcgctccc

SEQ ID NO: 269543 - DNA, 30 bp, Artificial Sequence
  Synthetic oligonucleotide
tcgagataggcagaatctatgccggctccc

SEQ ID NO: 269544 - DNA, 30 bp, Artificial Sequence
  Synthetic oligonucleotide
tttgccaagacggatcgggaggcggctccc

SEQ ID NO: 269545 - DNA, 30 bp, Artificial Sequence
  Synthetic oligonucleotide
caaaacacgaggtatatgagtgcggctccc

SEQ ID NO: 269546 - DNA, 30 bp, Artificial Sequence
  Synthetic oligonucleotide
gtctggcggtaggtagggtgtagatctccc

SEQ ID NO: 269547 - DNA, 30 bp, Artificial Sequence
  Synthetic oligonucleotide
tagcagagcttgcgacatacgatctctccc

SEQ ID NO: 269548 - DNA, 30 bp, Artificial Sequence
  Synthetic oligonucleotide
ctgccatgggcatggataagttatagtccc

SEQ ID NO: 269549 - DNA, 30 bp, Artificial Sequence
  Synthetic oligonucleotide
agtgttgggagacaaccggaagctagtccc

SEQ ID NO: 269550 - DNA, 30 bp, Artificial Sequence
  Synthetic oligonucleotide
gatcgcatggacgagtaataagagcgtccc

SEQ ID NO: 269551 - DNA, 30 bp, Artificial Sequence
  Synthetic oligonucleotide
gatacgatggtttacaccgctgagcgtccc

SEQ ID NO: 269552 - DNA, 30 bp, Artificial Sequence
  Synthetic oligonucleotide
ttgcgtaataattattggtgaggaggtccc

SEQ ID NO: 269553 - DNA, 30 bp, Artificial Sequence
  Synthetic oligonucleotide
cagcgtagctggtgagagttaaacggtccc

SEQ ID NO: 269554 - DNA, 30 bp, Artificial Sequence
  Synthetic oligonucleotide
gtcttatctcctaaggacggttcgggtccc

SEQ ID NO: 269555 - DNA, 30 bp, Artificial Sequence
  Synthetic oligonucleotide
taggtagcatattagaaaaccttatgtccc

SEQ ID NO: 269556 - DNA, 30 bp, Artificial Sequence
  Synthetic oligonucleotide
accttgcactgcgtcctaatcgcctgtccc

SEQ ID NO: 269557 - DNA, 30 bp, Artificial Sequence
  Synthetic oligonucleotide
gggaaaacgcgccaagcttcacgaattccc

SEQ ID NO: 269558 - DNA, 31 bp, Artificial Sequence
  Synthetic oligonucleotide
tggtcgacccgtaggttagtttataattccc

SEQ ID NO: 269559 - DNA, 30 bp, Artificial Sequence
  Synthetic oligonucleotide
agcatcgctctaagggtagacgcgattccc

SEQ ID NO: 269560 - DNA, 30 bp, Artificial Sequence
  Synthetic oligonucleotide
ggagcgaccagtatacctgcagctattccc

SEQ ID NO: 269561 - DNA, 30 bp, Artificial Sequence
  Synthetic oligonucleotide
tccgacgcgttgctattgggaccacttccc

SEQ ID NO: 269562 - DNA, 30 bp, Artificial Sequence
  Synthetic oligonucleotide
tgcacaagaaccctcaaaggaaatcttccc

SEQ ID NO: 269563 - DNA, 30 bp, Artificial Sequence
  Synthetic oligonucleotide
ataaccccttacaaatcagtgccagttccc

SEQ ID NO: 269564 - DNA, 30 bp, Artificial Sequence
  Synthetic oligonucleotide
tacgccccgacataggcttgcacggttccc

SEQ ID NO: 269565 - DNA, 30 bp, Artificial Sequence
  Synthetic oligonucleotide
ctcagcaactgactgctgatcagggttccc

SEQ ID NO: 269566 - DNA, 30 bp, Artificial Sequence
  Synthetic oligonucleotide
tttcatgggggccctatatgccttgttccc

SEQ ID NO: 269567 - DNA, 30 bp, Artificial Sequence
  Synthetic oligonucleotide
cagcgccagttagttatcgattaatttccc

SEQ ID NO: 269568 - DNA, 30 bp, Artificial Sequence
  Synthetic oligonucleotide
aaccaagcacgcgtaccgggcggctttccc

SEQ ID NO: 269569 - DNA, 30 bp, Artificial Sequence
  Synthetic oligonucleotide
tgcctgtcggtcatggcgcgctattttccc

SEQ ID NO: 269570 - DNA, 30 bp, Artificial Sequence
  Synthetic oligonucleotide
gtgtttccatgaaatgtatccagaaaagcc

SEQ ID NO: 269571 - DNA, 30 bp, Artificial Sequence
  Synthetic oligonucleotide
ttaatatttcctcagatagaaggaaaagcc

SEQ ID NO: 269572 - DNA, 30 bp, Artificial Sequence
  Synthetic oligonucleotide
tgattctcgtcaacacgaggttagaaagcc

SEQ ID NO: 269573 - DNA, 30 bp, Artificial Sequence
  Synthetic oligonucleotide
tttcccggattggaccgaacttcgaaagcc

SEQ ID NO: 269574 - DNA, 30 bp, Artificial Sequence
  Synthetic oligonucleotide
cctttcgagtggagtgcgtgggataaagcc

SEQ ID NO: 269575 - DNA, 30 bp, Artificial Sequence
  Synthetic oligonucleotide
gcgactaatattagtcatggcattaaagcc

SEQ ID NO: 269576 - DNA, 30 bp, Artificial Sequence
  Synthetic oligonucleotide
agaaggtgttgtcgacaagcaatagaagcc

SEQ ID NO: 269577 - DNA, 30 bp, Artificial Sequence
  Synthetic oligonucleotide
acgccacagtccagccatacagccgaagcc

SEQ ID NO: 269578 - DNA, 30 bp, Artificial Sequence
  Synthetic oligonucleotide
ttggttcaggtagtgcaagtaagcgaagcc

SEQ ID NO: 269579 - DNA, 30 bp, Artificial Sequence
  Synthetic oligonucleotide
tctatttggagcccacaatccacggaagcc

SEQ ID NO: 269580 - DNA, 30 bp, Artificial Sequence
  Synthetic oligonucleotide
tagcactgttgtcattctcctacggaagcc

SEQ ID NO: 269581 - DNA, 30 bp, Artificial Sequence
  Synthetic oligonucleotide
tgggaaagtttatattcagtaatggaagcc

SEQ ID NO: 269582 - DNA, 30 bp, Artificial Sequence
  Synthetic oligonucleotide
aagaacacgcgggcaagttgtgatgaagcc

SEQ ID NO: 269583 - DNA, 30 bp, Artificial Sequence
  Synthetic oligonucleotide
tggtcggtcgattatgcgtgtcttgaagcc

SEQ ID NO: 269584 - DNA, 30 bp, Artificial Sequence
  Synthetic oligonucleotide
cccgcatatatggaatagtactgataagcc

SEQ ID NO: 269585 - DNA, 30 bp, Artificial Sequence
  Synthetic oligonucleotide
ggggtaggtcattagacggcatgctaagcc

SEQ ID NO: 269586 - DNA, 30 bp, Artificial Sequence
  Synthetic oligonucleotide
gtgtaacggaaacagtattttgattaagcc

SEQ ID NO: 269587 - DNA, 30 bp, Artificial Sequence
  Synthetic oligonucleotide
gcggccgcaaagagccacccccgttaagcc

SEQ ID NO: 269588 - DNA, 30 bp, Artificial Sequence
  Synthetic oligonucleotide
ggaagaggagcaccggaacctggaacagcc

SEQ ID NO: 269589 - DNA, 30 bp, Artificial Sequence
  Synthetic oligonucleotide
ttagagagttttaataaaaaacggacagcc

SEQ ID NO: 269590 - DNA, 30 bp, Artificial Sequence
  Synthetic oligonucleotide
cagatccatagcgatatgacaggaccagcc

SEQ ID NO: 269591 - DNA, 30 bp, Artificial Sequence
  Synthetic oligonucleotide
ctgtaggattgtctatatcttggcccagcc

SEQ ID NO: 269592 - DNA, 30 bp, Artificial Sequence
  Synthetic oligonucleotide
cggctggagacccaccgacctggtccagcc

SEQ ID NO: 269593 - DNA, 30 bp, Artificial Sequence
  Synthetic oligonucleotide
catagtatggagaacagagtcagagcagcc

SEQ ID NO: 269594 - DNA, 30 bp, Artificial Sequence
  Synthetic oligonucleotide
cgctgatccctcctagcgcgcttcgcagcc

SEQ ID NO: 269595 - DNA, 30 bp, Artificial Sequence
  Synthetic oligonucleotide
aactatggcgcgatcacaagaatggcagcc

SEQ ID NO: 269596 - DNA, 30 bp, Artificial Sequence
  Synthetic oligonucleotide
atagttacgtgtggaacacactaatcagcc

SEQ ID NO: 269597 - DNA, 30 bp, Artificial Sequence
  Synthetic oligonucleotide
aaacagttgagcggtgggagtccatcagcc

SEQ ID NO: 269598 - DNA, 30 bp, Artificial Sequence
  Synthetic oligonucleotide
cacgttatttgggtctgggaaggctcagcc

SEQ ID NO: 269599 - DNA, 30 bp, Artificial Sequence
  Synthetic oligonucleotide
tacggatagcgggttgttgtaggctcagcc

SEQ ID NO: 269600 - DNA, 30 bp, Artificial Sequence
  Synthetic oligonucleotide
agcataaccgtagttagggcccgttcagcc

SEQ ID NO: 269601 - DNA, 30 bp, Artificial Sequence
  Synthetic oligonucleotide
acccttttcaacctcattaagggttcagcc

SEQ ID NO: 269602 - DNA, 30 bp, Artificial Sequence
  Synthetic oligonucleotide
ctacgtagaatctcacatcgtgtcagagcc

SEQ ID NO: 269603 - DNA, 30 bp, Artificial Sequence
  Synthetic oligonucleotide
agttctgatagaggtgtgatgtagagagcc

SEQ ID NO: 269604 - DNA, 30 bp, Artificial Sequence
  Synthetic oligonucleotide
cggctgactcgagtgagtatatggagagcc

SEQ ID NO: 269605 - DNA, 30 bp, Artificial Sequence
  Synthetic oligonucleotide
acgttgaatacttcgtaatctatgagagcc

SEQ ID NO: 269606 - DNA, 30 bp, Artificial Sequence
  Synthetic oligonucleotide
ttgaaatcaaggcacagattcagtagagcc

SEQ ID NO: 269607 - DNA, 30 bp, Artificial Sequence
  Synthetic oligonucleotide
tacgtaaactgatggttttcaaaacgagcc

SEQ ID NO: 269608 - DNA, 30 bp, Artificial Sequence
  Synthetic oligonucleotide
agtgattaggagtgccttggctgacgagcc

SEQ ID NO: 269609 - DNA, 30 bp, Artificial Sequence
  Synthetic oligonucleotide
ctcaccaccgggacggagtattcccgagcc

SEQ ID NO: 269610 - DNA, 30 bp, Artificial Sequence
  Synthetic oligonucleotide
tacacagtcatcgaagtgagccgccgagcc

SEQ ID NO: 269611 - DNA, 30 bp, Artificial Sequence
  Synthetic oligonucleotide
ttacccggaccgtcatgcggtgagcgagcc

SEQ ID NO: 269612 - DNA, 30 bp, Artificial Sequence
  Synthetic oligonucleotide
ctggtttcaaggcacaccgaggatcgagcc

SEQ ID NO: 269613 - DNA, 30 bp, Artificial Sequence
  Synthetic oligonucleotide
ttgcgcaagctgtgagcgacgcaaggagcc

SEQ ID NO: 269614 - DNA, 30 bp, Artificial Sequence
  Synthetic oligonucleotide
tgttacatcttaaggtgtaagacaggagcc

SEQ ID NO: 269615 - DNA, 30 bp, Artificial Sequence
  Synthetic oligonucleotide
gctaggcaggaagtctaacgaaacggagcc

SEQ ID NO: 269616 - DNA, 30 bp, Artificial Sequence
  Synthetic oligonucleotide
atcaacacccactccgttgcctagggagcc

SEQ ID NO: 269617 - DNA, 30 bp, Artificial Sequence
  Synthetic oligonucleotide
gagaacgaccggtcatactcgagtggagcc

SEQ ID NO: 269618 - DNA, 30 bp, Artificial Sequence
  Synthetic oligonucleotide
ggaaacatccgcagcgaggatccatgagcc

SEQ ID NO: 269619 - DNA, 30 bp, Artificial Sequence
  Synthetic oligonucleotide
agggacttgtaggccggggagcactgagcc

SEQ ID NO: 269620 - DNA, 30 bp, Artificial Sequence
  Synthetic oligonucleotide
gctggtgttcgaatgtgcattcgctgagcc

SEQ ID NO: 269621 - DNA, 30 bp, Artificial Sequence
  Synthetic oligonucleotide
atagttgttgccttcggcaccttgtgagcc

SEQ ID NO: 269622 - DNA, 30 bp, Artificial Sequence
  Synthetic oligonucleotide
aatcgccttcaccggatttcgcattgagcc

SEQ ID NO: 269623 - DNA, 30 bp, Artificial Sequence
  Synthetic oligonucleotide
tcatagtgggccgagatctagtattgagcc

SEQ ID NO: 269624 - DNA, 30 bp, Artificial Sequence
  Synthetic oligonucleotide
atatgaaagtaactaaacgtggcaatagcc

SEQ ID NO: 269625 - DNA, 30 bp, Artificial Sequence
  Synthetic oligonucleotide
tgatggacacacactgttctaataatagcc

SEQ ID NO: 269626 - DNA, 30 bp, Artificial Sequence
  Synthetic oligonucleotide
tccgcgatgctgacagtcgcccgcatagcc

SEQ ID NO: 269627 - DNA, 30 bp, Artificial Sequence
  Synthetic oligonucleotide
cagtcgatcgtcgcggtacatggcatagcc

SEQ ID NO: 269628 - DNA, 30 bp, Artificial Sequence
  Synthetic oligonucleotide
gaggagaatggacgtggcaaaaggatagcc

SEQ ID NO: 269629 - DNA, 30 bp, Artificial Sequence
  Synthetic oligonucleotide
ccgaaatttacctatctcgtggatatagcc

SEQ ID NO: 269630 - DNA, 30 bp, Artificial Sequence
  Synthetic oligonucleotide
gcatgaagagtgctataaggcacactagcc

SEQ ID NO: 269631 - DNA, 30 bp, Artificial Sequence
  Synthetic oligonucleotide
gttaccaatagaaaaattgtagagctagcc

SEQ ID NO: 269632 - DNA, 30 bp, Artificial Sequence
  Synthetic oligonucleotide
aggggaccgtgcgatagccaatagctagcc

SEQ ID NO: 269633 - DNA, 30 bp, Artificial Sequence
  Synthetic oligonucleotide
gtattgcgttgagtcggccgtcggctagcc

SEQ ID NO: 269634 - DNA, 30 bp, Artificial Sequence
  Synthetic oligonucleotide
acacggctaacactgaataaatcagtagcc

SEQ ID NO: 269635 - DNA, 30 bp, Artificial Sequence
  Synthetic oligonucleotide
gggcggggtgttggaactgcctaggtagcc

SEQ ID NO: 269636 - DNA, 30 bp, Artificial Sequence
  Synthetic oligonucleotide
aggccaataacaatccgtttgggggtagcc

SEQ ID NO: 269637 - DNA, 30 bp, Artificial Sequence
  Synthetic oligonucleotide
cgcacagatactcatgggtggtccttagcc

SEQ ID NO: 269638 - DNA, 30 bp, Artificial Sequence
  Synthetic oligonucleotide
tatagggagccaggtatggtgtagttagcc

SEQ ID NO: 269639 - DNA, 30 bp, Artificial Sequence
  Synthetic oligonucleotide
gtgctggactaggttttgcactcaaacgcc

SEQ ID NO: 269640 - DNA, 30 bp, Artificial Sequence
  Synthetic oligonucleotide
gaaggtagttacgtaacgaacgagaacgcc

SEQ ID NO: 269641 - DNA, 30 bp, Artificial Sequence
  Synthetic oligonucleotide
gtcgcaggtggggcaaccttatataacgcc

SEQ ID NO: 269642 - DNA, 30 bp, Artificial Sequence
  Synthetic oligonucleotide
tatccggaatttaaaaatggacttaacgcc

SEQ ID NO: 269643 - DNA, 30 bp, Artificial Sequence
  Synthetic oligonucleotide
aggcacgggtttgggtcgaactagcacgcc

SEQ ID NO: 269644 - DNA, 30 bp, Artificial Sequence
  Synthetic oligonucleotide
ggccaagcaaccttgaattgctagcacgcc

SEQ ID NO: 269645 - DNA, 30 bp, Artificial Sequence
  Synthetic oligonucleotide
caggttctggccggacgatactggcacgcc

SEQ ID NO: 269646 - DNA, 30 bp, Artificial Sequence
  Synthetic oligonucleotide
cgtagaactcatagcactgttggggacgcc

SEQ ID NO: 269647 - DNA, 30 bp, Artificial Sequence
  Synthetic oligonucleotide
agacggaaatagaatactacatatgacgcc

SEQ ID NO: 269648 - DNA, 30 bp, Artificial Sequence
  Synthetic oligonucleotide
tcgggtggagggacaagcttatctgacgcc

SEQ ID NO: 269649 - DNA, 30 bp, Artificial Sequence
  Synthetic oligonucleotide
tgaaggaggaggatgtttccttttgacgcc

SEQ ID NO: 269650 - DNA, 30 bp, Artificial Sequence
  Synthetic oligonucleotide
agtttggtctgttatatatagccatacgcc

SEQ ID NO: 269651 - DNA, 30 bp, Artificial Sequence
  Synthetic oligonucleotide
cgtggtgcccgtttgaaaaggccatacgcc

SEQ ID NO: 269652 - DNA, 30 bp, Artificial Sequence
  Synthetic oligonucleotide
gcagagtgtagcataaccgttgattacgcc

SEQ ID NO: 269653 - DNA, 30 bp, Artificial Sequence
  Synthetic oligonucleotide
aatgtaccaattaagtaggtaagttacgcc

SEQ ID NO: 269654 - DNA, 30 bp, Artificial Sequence
  Synthetic oligonucleotide
gcctctaagctttcaacagacgtaaccgcc

SEQ ID NO: 269655 - DNA, 30 bp, Artificial Sequence
  Synthetic oligonucleotide
cgtcgcgaagggatcacacagcgcaccgcc

SEQ ID NO: 269656 - DNA, 30 bp, Artificial Sequence
  Synthetic oligonucleotide
ctgggtcccaagagagcggagcataccgcc

SEQ ID NO: 269657 - DNA, 30 bp, Artificial Sequence
  Synthetic oligonucleotide
tggatatatgaacacggcaaagcacccgcc

SEQ ID NO: 269658 - DNA, 30 bp, Artificial Sequence
  Synthetic oligonucleotide
cctccatcgctaaaatcatggtagcccgcc

SEQ ID NO: 269659 - DNA, 30 bp, Artificial Sequence
  Synthetic oligonucleotide
tggtacccaatgacgggataccgtcccgcc

SEQ ID NO: 269660 - DNA, 30 bp, Artificial Sequence
  Synthetic oligonucleotide
aacatgtagcaatagtacccacaagccgcc

SEQ ID NO: 269661 - DNA, 30 bp, Artificial Sequence
  Synthetic oligonucleotide
tcgttcatttcaacgcgcaagaacgccgcc

SEQ ID NO: 269662 - DNA, 30 bp, Artificial Sequence
  Synthetic oligonucleotide
aggaggggagcatcgcattcagcggccgcc

SEQ ID NO: 269663 - DNA, 30 bp, Artificial Sequence
  Synthetic oligonucleotide
gacctagcagcaccacattcttgggccgcc

SEQ ID NO: 269664 - DNA, 30 bp, Artificial Sequence
  Synthetic oligonucleotide
aaggcgagcgcatctctttttcattccgcc

SEQ ID NO: 269665 - DNA, 30 bp, Artificial Sequence
  Synthetic oligonucleotide
ggcagaatcattttacggaacagttccgcc

SEQ ID NO: 269666 - DNA, 30 bp, Artificial Sequence
  Synthetic oligonucleotide
ataatggtggtataagaggagtaaagcgcc

SEQ ID NO: 269667 - DNA, 30 bp, Artificial Sequence
  Synthetic oligonucleotide
tgctaataatttcagcgttggtcgagcgcc

SEQ ID NO: 269668 - DNA, 30 bp, Artificial Sequence
  Synthetic oligonucleotide
gacagatgtgcaggtctgcgggtgagcgcc

SEQ ID NO: 269669 - DNA, 30 bp, Artificial Sequence
  Synthetic oligonucleotide
cgagtgtactttttagggcgacatagcgcc

SEQ ID NO: 269670 - DNA, 30 bp, Artificial Sequence
  Synthetic oligonucleotide
acgggggcttttgggctgaaatttagcgcc

SEQ ID NO: 269671 - DNA, 30 bp, Artificial Sequence
  Synthetic oligonucleotide
cacacgttttcgtgcatcctggctcgcgcc

SEQ ID NO: 269672 - DNA, 30 bp, Artificial Sequence
  Synthetic oligonucleotide
tatgagtccgcactaacagtcagtcgcgcc

SEQ ID NO: 269673 - DNA, 30 bp, Artificial Sequence
  Synthetic oligonucleotide
gagttggatgtatgtcatcacctaggcgcc

SEQ ID NO: 269674 - DNA, 30 bp, Artificial Sequence
  Synthetic oligonucleotide
aattggtctgattcgagtagaaatggcgcc

SEQ ID NO: 269675 - DNA, 30 bp, Artificial Sequence
  Synthetic oligonucleotide
gggtccacttatagaaccatcttatgcgcc

SEQ ID NO: 269676 - DNA, 30 bp, Artificial Sequence
  Synthetic oligonucleotide
gtatcgatcaaacctacaagcatctgcgcc

SEQ ID NO: 269677 - DNA, 30 bp, Artificial Sequence
  Synthetic oligonucleotide
ggaatttaaattttctaattggagtgcgcc

SEQ ID NO: 269678 - DNA, 30 bp, Artificial Sequence
  Synthetic oligonucleotide
aagccggtgctgtcagacaaagtgtgcgcc

SEQ ID NO: 269679 - DNA, 30 bp, Artificial Sequence
  Synthetic oligonucleotide
taacacctgaccctcggttagataatcgcc

SEQ ID NO: 269680 - DNA, 30 bp, Artificial Sequence
  Synthetic oligonucleotide
tgcagtaccaacttggggatagccatcgcc

SEQ ID NO: 269681 - DNA, 30 bp, Artificial Sequence
  Synthetic oligonucleotide
accactctgttagaatctgggcctatcgcc

SEQ ID NO: 269682 - DNA, 30 bp, Artificial Sequence
  Synthetic oligonucleotide
gcgaattaaaatcgtgccagtattatcgcc

SEQ ID NO: 269683 - DNA, 30 bp, Artificial Sequence
  Synthetic oligonucleotide
gttccatggctacgacgagttattatcgcc

SEQ ID NO: 269684 - DNA, 30 bp, Artificial Sequence
  Synthetic oligonucleotide
gacccgccttttttgagggtcgaactcgcc

SEQ ID NO: 269685 - DNA, 30 bp, Artificial Sequence
  Synthetic oligonucleotide
gtattgggcccaagtatgaaacgcctcgcc

SEQ ID NO: 269686 - DNA, 30 bp, Artificial Sequence
  Synthetic oligonucleotide
gccgcaatcttgggctgaacaaagctcgcc

SEQ ID NO: 269687 - DNA, 30 bp, Artificial Sequence
  Synthetic oligonucleotide
acctccgtagcatttcggaaaccgctcgcc

SEQ ID NO: 269688 - DNA, 30 bp, Artificial Sequence
  Synthetic oligonucleotide
cagtcgaagggctagtattgtattctcgcc

SEQ ID NO: 269689 - DNA, 30 bp, Artificial Sequence
  Synthetic oligonucleotide
accgcgtgatccattcatcagaaagtcgcc

SEQ ID NO: 269690 - DNA, 30 bp, Artificial Sequence
  Synthetic oligonucleotide
tacctaacgtcgatgtggggcagggtcgcc

SEQ ID NO: 269691 - DNA, 30 bp, Artificial Sequence
  Synthetic oligonucleotide
ggaccgcccacccgggatatcatggtcgcc

SEQ ID NO: 269692 - DNA, 30 bp, Artificial Sequence
  Synthetic oligonucleotide
ctgtgggttgcgctcgggtaagtggtcgcc

SEQ ID NO: 269693 - DNA, 30 bp, Artificial Sequence
  Synthetic oligonucleotide
cgtctcaactagaacccagcatcattcgcc

SEQ ID NO: 269694 - DNA, 30 bp, Artificial Sequence
  Synthetic oligonucleotide
cgcgtaaggtttcgtcactattcattcgcc

SEQ ID NO: 269695 - DNA, 30 bp, Artificial Sequence
  Synthetic oligonucleotide
tctgaagcccccgtaagcatgtacttcgcc

SEQ ID NO: 269696 - DNA, 30 bp, Artificial Sequence
  Synthetic oligonucleotide
gaaattaggtgcgaagcgtgtaggttcgcc

SEQ ID NO: 269697 - DNA, 30 bp, Artificial Sequence
  Synthetic oligonucleotide
tccccgcggaaatatgcgttttggttcgcc

SEQ ID NO: 269698 - DNA, 30 bp, Artificial Sequence
  Synthetic oligonucleotide
gattgtcggagagggatgtcatctttcgcc

SEQ ID NO: 269699 - DNA, 30 bp, Artificial Sequence
  Synthetic oligonucleotide
aagagaagtgataaggtgggatttttcgcc

SEQ ID NO: 269700 - DNA, 30 bp, Artificial Sequence
  Synthetic oligonucleotide
gttaagatcgacgggcctgtctgaaaggcc

SEQ ID NO: 269701 - DNA, 30 bp, Artificial Sequence
  Synthetic oligonucleotide
aaattcgaactatgcgcctccaggaaggcc

SEQ ID NO: 269702 - DNA, 30 bp, Artificial Sequence
  Synthetic oligonucleotide
cctgaaacgaccatttctgcggtacaggcc

SEQ ID NO: 269703 - DNA, 30 bp, Artificial Sequence
  Synthetic oligonucleotide
ttatgttagacctgggtaagaggccaggcc

SEQ ID NO: 269704 - DNA, 30 bp, Artificial Sequence
  Synthetic oligonucleotide
actccccatgagcagccgtttggccaggcc

SEQ ID NO: 269705 - DNA, 30 bp, Artificial Sequence
  Synthetic oligonucleotide
gctctaataaaatacttgggaaagcaggcc

SEQ ID NO: 269706 - DNA, 30 bp, Artificial Sequence
  Synthetic oligonucleotide
actcaatgaatcttccgtgagtttcaggcc

SEQ ID NO: 269707 - DNA, 30 bp, Artificial Sequence
  Synthetic oligonucleotide
ccatttctgtcaaaccggtaggccgaggcc

SEQ ID NO: 269708 - DNA, 30 bp, Artificial Sequence
  Synthetic oligonucleotide
aaggaagtggaataatagtgcggcgaggcc

SEQ ID NO: 269709 - DNA, 30 bp, Artificial Sequence
  Synthetic oligonucleotide
acaatggctataccgaatgaaatcgaggcc

SEQ ID NO: 269710 - DNA, 30 bp, Artificial Sequence
  Synthetic oligonucleotide
cagagtagacctcagagggaagcggaggcc

SEQ ID NO: 269711 - DNA, 30 bp, Artificial Sequence
  Synthetic oligonucleotide
gcgctggaaaaacgggggccacctgaggcc

SEQ ID NO: 269712 - DNA, 30 bp, Artificial Sequence
  Synthetic oligonucleotide
cagcgaggccggcggctgcacggtgaggcc

SEQ ID NO: 269713 - DNA, 30 bp, Artificial Sequence
  Synthetic oligonucleotide
gtgaaatacctgaaccaaaaaattgaggcc

SEQ ID NO: 269714 - DNA, 30 bp, Artificial Sequence
  Synthetic oligonucleotide
cttgcaggataatacgggaagattgaggcc

SEQ ID NO: 269715 - DNA, 30 bp, Artificial Sequence
  Synthetic oligonucleotide
gcatacggcgtggctagatccgcctaggcc

SEQ ID NO: 269716 - DNA, 30 bp, Artificial Sequence
  Synthetic oligonucleotide
ctctcgacgattgtaacatcttggtaggcc

SEQ ID NO: 269717 - DNA, 30 bp, Artificial Sequence
  Synthetic oligonucleotide
ctcgtgggctacacgagatctttgtaggcc

SEQ ID NO: 269718 - DNA, 30 bp, Artificial Sequence
  Synthetic oligonucleotide
gggtccacggctaacaaatggccttaggcc

SEQ ID NO: 269719 - DNA, 30 bp, Artificial Sequence
  Synthetic oligonucleotide
atgtcgccgttagtgcattggtcttaggcc

SEQ ID NO: 269720 - DNA, 30 bp, Artificial Sequence
  Synthetic oligonucleotide
caggtatcacggtgttgcagatgttaggcc

SEQ ID NO: 269721 - DNA, 30 bp, Artificial Sequence
  Synthetic oligonucleotide
cctaatccatctgtaggtccctgtacggcc

SEQ ID NO: 269722 - DNA, 30 bp, Artificial Sequence
  Synthetic oligonucleotide
gagacgagaagcttcccggccaccccggcc

SEQ ID NO: 269723 - DNA, 30 bp, Artificial Sequence
  Synthetic oligonucleotide
atgttggaagggaaccttcaattcccggcc

SEQ ID NO: 269724 - DNA, 30 bp, Artificial Sequence
  Synthetic oligonucleotide
gtaagtgcgatgcgcacttgcacagcggcc

SEQ ID NO: 269725 - DNA, 30 bp, Artificial Sequence
  Synthetic oligonucleotide
ccgcggaggtatcctccgagaggcgcggcc

SEQ ID NO: 269726 - DNA, 30 bp, Artificial Sequence
  Synthetic oligonucleotide
tcacgacgtactatcgtaggcatcgcggcc

SEQ ID NO: 269727 - DNA, 30 bp, Artificial Sequence
  Synthetic oligonucleotide
gtaatccgtttacggtagcgccaggcggcc

SEQ ID NO: 269728 - DNA, 30 bp, Artificial Sequence
  Synthetic oligonucleotide
gaaaggaatgttgtagcatgtacggcggcc

SEQ ID NO: 269729 - DNA, 30 bp, Artificial Sequence
  Synthetic oligonucleotide
tcgtttgaagaaactgttttcgctgcggcc

SEQ ID NO: 269730 - DNA, 30 bp, Artificial Sequence
  Synthetic oligonucleotide
gctgggcgagcgaacagtcccagttcggcc

SEQ ID NO: 269731 - DNA, 30 bp, Artificial Sequence
  Synthetic oligonucleotide
cttatatgtcagtcattattcgtaagggcc

SEQ ID NO: 269732 - DNA, 30 bp, Artificial Sequence
  Synthetic oligonucleotide
atggggggcagtaaaggaattcagagggcc

SEQ ID NO: 269733 - DNA, 30 bp, Artificial Sequence
  Synthetic oligonucleotide
gggatatggcgcttagtattatagagggcc

SEQ ID NO: 269734 - DNA, 30 bp, Artificial Sequence
  Synthetic oligonucleotide
tgtccaacgctcactgggaggcggagggcc

SEQ ID NO: 269735 - DNA, 30 bp, Artificial Sequence
  Synthetic oligonucleotide
gagtaaggcttgggtttaggtgaacgggcc

SEQ ID NO: 269736 - DNA, 29 bp, Artificial Sequence
  Synthetic oligonucleotide
agcgtctacatgcaggggtcgaccgggcc

SEQ ID NO: 269737 - DNA, 30 bp, Artificial Sequence
  Synthetic oligonucleotide
cagaccgtatcatgcgttgattgccgggcc

SEQ ID NO: 269738 - DNA, 30 bp, Artificial Sequence
  Synthetic oligonucleotide
tacggcctattgtctatacaatatcgggcc

SEQ ID NO: 269739 - DNA, 30 bp, Artificial Sequence
  Synthetic oligonucleotide
aaatgtatctcggtatgttgccctcgggcc

SEQ ID NO: 269740 - DNA, 30 bp, Artificial Sequence
  Synthetic oligonucleotide
tttcacgaatcacgtcatacgacaggggcc

SEQ ID NO: 269741 - DNA, 30 bp, Artificial Sequence
  Synthetic oligonucleotide
gggtcgtacaggatcgtaactacaggggcc

SEQ ID NO: 269742 - DNA, 30 bp, Artificial Sequence
  Synthetic oligonucleotide
tcactaatgtttatggtataactgggggcc

SEQ ID NO: 269743 - DNA, 30 bp, Artificial Sequence
  Synthetic oligonucleotide
cgtttataccacttcggcttcgcatgggcc

SEQ ID NO: 269744 - DNA, 30 bp, Artificial Sequence
  Synthetic oligonucleotide
aggcgaacatgaaccagcgccgactgggcc

SEQ ID NO: 269745 - DNA, 30 bp, Artificial Sequence
  Synthetic oligonucleotide
atggcttgacttcatgagttcggctgggcc

SEQ ID NO: 269746 - DNA, 30 bp, Artificial Sequence
  Synthetic oligonucleotide
gaagccaggtcatagtttgcacgttgggcc

SEQ ID NO: 269747 - DNA, 30 bp, Artificial Sequence
  Synthetic oligonucleotide
tagtatcgggtttatgaagagtgcatggcc

SEQ ID NO: 269748 - DNA, 30 bp, Artificial Sequence
  Synthetic oligonucleotide
agaataggggtacggtaagtaggtatggcc

SEQ ID NO: 269749 - DNA, 30 bp, Artificial Sequence
  Synthetic oligonucleotide
ggtgtttagcgtaaggggctttgtatggcc

SEQ ID NO: 269750 - DNA, 30 bp, Artificial Sequence
  Synthetic oligonucleotide
gcaggtttcttgaatgtgtcattgctggcc

SEQ ID NO: 269751 - DNA, 30 bp, Artificial Sequence
  Synthetic oligonucleotide
ggacatactggtggtatccttgtattggcc

SEQ ID NO: 269752 - DNA, 30 bp, Artificial Sequence
  Synthetic oligonucleotide
cgagggaatgaccgtatgacgacgttggcc

SEQ ID NO: 269753 - DNA, 30 bp, Artificial Sequence
  Synthetic oligonucleotide
actatggttaacatggtccgctctttggcc

SEQ ID NO: 269754 - DNA, 30 bp, Artificial Sequence
  Synthetic oligonucleotide
ggagagctaaaatggctgtggtgtttggcc

SEQ ID NO: 269755 - DNA, 30 bp, Artificial Sequence
  Synthetic oligonucleotide
tacatgctaggttatgcgctggtcaatgcc

SEQ ID NO: 269756 - DNA, 30 bp, Artificial Sequence
  Synthetic oligonucleotide
atgcaagccgcgtaacggtataggaatgcc

SEQ ID NO: 269757 - DNA, 30 bp, Artificial Sequence
  Synthetic oligonucleotide
gaacggatgcattatgattaagtgaatgcc

SEQ ID NO: 269758 - DNA, 30 bp, Artificial Sequence
  Synthetic oligonucleotide
atcagactacaggtgacatggagtaatgcc

SEQ ID NO: 269759 - DNA, 30 bp, Artificial Sequence
  Synthetic oligonucleotide
gtccgatcgggttggagtgctagacatgcc

SEQ ID NO: 269760 - DNA, 30 bp, Artificial Sequence
  Synthetic oligonucleotide
ccataggggctagacgtgagcgaccatgcc

SEQ ID NO: 269761 - DNA, 30 bp, Artificial Sequence
  Synthetic oligonucleotide
tggtctccttaaatatgcgataagcatgcc

SEQ ID NO: 269762 - DNA, 30 bp, Artificial Sequence
  Synthetic oligonucleotide
atggatcaggctgggcccgcgacgcatgcc

SEQ ID NO: 269763 - DNA, 30 bp, Artificial Sequence
  Synthetic oligonucleotide
aaaaacgaagacgatcggggcatgcatgcc

SEQ ID NO: 269764 - DNA, 30 bp, Artificial Sequence
  Synthetic oligonucleotide
cgagtgattgttttggggttcgttcatgcc

SEQ ID NO: 269765 - DNA, 30 bp, Artificial Sequence
  Synthetic oligonucleotide
caaagcaatagaatgtgcgttaacgatgcc

SEQ ID NO: 269766 - DNA, 30 bp, Artificial Sequence
  Synthetic oligonucleotide
attgtgctgtaccagggcataaccgatgcc

SEQ ID NO: 269767 - DNA, 30 bp, Artificial Sequence
  Synthetic oligonucleotide
tctcttcgtccacccaggtccgccgatgcc

SEQ ID NO: 269768 - DNA, 30 bp, Artificial Sequence
  Synthetic oligonucleotide
ccttgaggctagcagcctcatgaggatgcc

SEQ ID NO: 269769 - DNA, 30 bp, Artificial Sequence
  Synthetic oligonucleotide
tataagagtgattgtatgcttgtggatgcc

SEQ ID NO: 269770 - DNA, 30 bp, Artificial Sequence
  Synthetic oligonucleotide
gtgtgagtccattgcaaggaatgtgatgcc

SEQ ID NO: 269771 - DNA, 30 bp, Artificial Sequence
  Synthetic oligonucleotide
ccggtatgctactgagagtacggctatgcc

SEQ ID NO: 269772 - DNA, 30 bp, Artificial Sequence
  Synthetic oligonucleotide
cacgagttgctctccgtgactatgtatgcc

SEQ ID NO: 269773 - DNA, 30 bp, Artificial Sequence
  Synthetic oligonucleotide
tcggtcagctacttcgcgtcggcttatgcc

SEQ ID NO: 269774 - DNA, 30 bp, Artificial Sequence
  Synthetic oligonucleotide
acgctgttggaaactcctagatgcactgcc

SEQ ID NO: 269775 - DNA, 30 bp, Artificial Sequence
  Synthetic oligonucleotide
tctctacggcacggcgacttcttgactgcc

SEQ ID NO: 269776 - DNA, 30 bp, Artificial Sequence
  Synthetic oligonucleotide
gagagaataggttcgctgcgacatactgcc

SEQ ID NO: 269777 - DNA, 30 bp, Artificial Sequence
  Synthetic oligonucleotide
cgaggaatgttacctgtgtaaagtactgcc

SEQ ID NO: 269778 - DNA, 30 bp, Artificial Sequence
  Synthetic oligonucleotide
tgcgcagtggcaccactcgatcgacctgcc

SEQ ID NO: 269779 - DNA, 30 bp, Artificial Sequence
  Synthetic oligonucleotide
tgtgttggctgtttaattcctgtccctgcc

SEQ ID NO: 269780 - DNA, 28 bp, Artificial Sequence
  Synthetic oligonucleotide
ccgtaagtattcggatagccttcctgcc

SEQ ID NO: 269781 - DNA, 30 bp, Artificial Sequence
  Synthetic oligonucleotide
ggacggctcggccgtgaatctcgagctgcc

SEQ ID NO: 269782 - DNA, 30 bp, Artificial Sequence
  Synthetic oligonucleotide
gtcctctgatcagacctagcctgctctgcc

SEQ ID NO: 269783 - DNA, 30 bp, Artificial Sequence
  Synthetic oligonucleotide
tacatatgggggaatgcggccttttctgcc

SEQ ID NO: 269784 - DNA, 30 bp, Artificial Sequence
  Synthetic oligonucleotide
atggctggtatgattgtactggtaagtgcc

SEQ ID NO: 269785 - DNA, 30 bp, Artificial Sequence
  Synthetic oligonucleotide
gcaaccagttgtgatgcgttccccagtgcc

SEQ ID NO: 269786 - DNA, 30 bp, Artificial Sequence
  Synthetic oligonucleotide
tgactaatattcccaaggaagtatagtgcc

SEQ ID NO: 269787 - DNA, 30 bp, Artificial Sequence
  Synthetic oligonucleotide
tgggagaggcaaccccgttagcccggtgcc

SEQ ID NO: 269788 - DNA, 30 bp, Artificial Sequence
  Synthetic oligonucleotide
tgggagactcgaagggactttggcggtgcc

SEQ ID NO: 269789 - DNA, 30 bp, Artificial Sequence
  Synthetic oligonucleotide
ggcctatttataccagtgagctgtggtgcc

SEQ ID NO: 269790 - DNA, 30 bp, Artificial Sequence
  Synthetic oligonucleotide
gctacagcatttcagcgttgggcgtgtgcc

SEQ ID NO: 269791 - DNA, 30 bp, Artificial Sequence
  Synthetic oligonucleotide
tacttgtacacggaaatatgatattgtgcc

SEQ ID NO: 269792 - DNA, 30 bp, Artificial Sequence
  Synthetic oligonucleotide
gctcacatagaatctagtgagctttgtgcc

SEQ ID NO: 269793 - DNA, 30 bp, Artificial Sequence
  Synthetic oligonucleotide
tagtggagcgtgaactagaggcagattgcc

SEQ ID NO: 269794 - DNA, 30 bp, Artificial Sequence
  Synthetic oligonucleotide
gcttattacgataagggacagcggattgcc

SEQ ID NO: 269795 - DNA, 30 bp, Artificial Sequence
  Synthetic oligonucleotide
ttaaatatggtagcacgcgggtggattgcc

SEQ ID NO: 269796 - DNA, 30 bp, Artificial Sequence
  Synthetic oligonucleotide
tcagaactttaagttggcctactccttgcc

SEQ ID NO: 269797 - DNA, 30 bp, Artificial Sequence
  Synthetic oligonucleotide
gtgacgatatataaatcactgttccttgcc

SEQ ID NO: 269798 - DNA, 30 bp, Artificial Sequence
  Synthetic oligonucleotide
gaagtgaggaaaccgggtatacaagttgcc

SEQ ID NO: 269799 - DNA, 30 bp, Artificial Sequence
  Synthetic oligonucleotide
agcactgaacgtatcgccgagtcagttgcc

SEQ ID NO: 269800 - DNA, 30 bp, Artificial Sequence
  Synthetic oligonucleotide
tcgtcggagagtgaatcttaattggttgcc

SEQ ID NO: 269801 - DNA, 30 bp, Artificial Sequence
  Synthetic oligonucleotide
gggaggtgacctctgggtttgtgtgttgcc

SEQ ID NO: 269802 - DNA, 30 bp, Artificial Sequence
  Synthetic oligonucleotide
aatggcgatcggcgtctcactatgtttgcc

SEQ ID NO: 269803 - DNA, 30 bp, Artificial Sequence
  Synthetic oligonucleotide
gggacatatatttatgctaacgattttgcc

SEQ ID NO: 269804 - DNA, 30 bp, Artificial Sequence
  Synthetic oligonucleotide
cagtatatggaaaaatagttcgaaaaatcc

SEQ ID NO: 269805 - DNA, 30 bp, Artificial Sequence
  Synthetic oligonucleotide
gtaagaagatttcacaatgcgtacaaatcc

SEQ ID NO: 269806 - DNA, 30 bp, Artificial Sequence
  Synthetic oligonucleotide
tactgtcccggatgagtaagtttcaaatcc

SEQ ID NO: 269807 - DNA, 30 bp, Artificial Sequence
  Synthetic oligonucleotide
tgtccaggatcccgtgctttggcgaaatcc

SEQ ID NO: 269808 - DNA, 30 bp, Artificial Sequence
  Synthetic oligonucleotide
ccgcgtagagtggttcgtagcaataaatcc

SEQ ID NO: 269809 - DNA, 30 bp, Artificial Sequence
  Synthetic oligonucleotide
tatgtgtgcaatgtacgaccagataaatcc

SEQ ID NO: 269810 - DNA, 30 bp, Artificial Sequence
  Synthetic oligonucleotide
taaagcaacaagaagacggcacgtaaatcc

SEQ ID NO: 269811 - DNA, 30 bp, Artificial Sequence
  Synthetic oligonucleotide
gggagagtacgaagcgcggggcttaaatcc

SEQ ID NO: 269812 - DNA, 30 bp, Artificial Sequence
  Synthetic oligonucleotide
tacgcgcggagagagagtaaactacaatcc

SEQ ID NO: 269813 - DNA, 30 bp, Artificial Sequence
  Synthetic oligonucleotide
atctgaaattaggagcagcgacaccaatcc

SEQ ID NO: 269814 - DNA, 30 bp, Artificial Sequence
  Synthetic oligonucleotide
gtcacagttaggctcgaccaaacgcaatcc

SEQ ID NO: 269815 - DNA, 30 bp, Artificial Sequence
  Synthetic oligonucleotide
ccgggcgatcagtgaggatgggctcaatcc

SEQ ID NO: 269816 - DNA, 30 bp, Artificial Sequence
  Synthetic oligonucleotide
acgttaggtgtagctctcggtagtcaatcc

SEQ ID NO: 269817 - DNA, 30 bp, Artificial Sequence
  Synthetic oligonucleotide
tggtatgggcgaacaattaatggtcaatcc

SEQ ID NO: 269818 - DNA, 30 bp, Artificial Sequence
  Synthetic oligonucleotide
ttcaaggcacgatcaaatcaataagaatcc

SEQ ID NO: 269819 - DNA, 30 bp, Artificial Sequence
  Synthetic oligonucleotide
ggaatctgaccaatagttatatgcgaatcc

SEQ ID NO: 269820 - DNA, 30 bp, Artificial Sequence
  Synthetic oligonucleotide
aattcgggggccactaagcacctcgaatcc

SEQ ID NO: 269821 - DNA, 30 bp, Artificial Sequence
  Synthetic oligonucleotide
ctaggaaccggactgtcttctttcgaatcc

SEQ ID NO: 269822 - DNA, 30 bp, Artificial Sequence
  Synthetic oligonucleotide
acccaccatgccggtagtataggtgaatcc

SEQ ID NO: 269823 - DNA, 30 bp, Artificial Sequence
  Synthetic oligonucleotide
atccgcttcgtcgatcacggtcttgaatcc

SEQ ID NO: 269824 - DNA, 30 bp, Artificial Sequence
  Synthetic oligonucleotide
tccgtctccggcacggtgtaacggtaatcc

SEQ ID NO: 269825 - DNA, 30 bp, Artificial Sequence
  Synthetic oligonucleotide
gcagttaaataaacattagccaattaatcc

SEQ ID NO: 269826 - DNA, 30 bp, Artificial Sequence
  Synthetic oligonucleotide
ctaccggtatatgattgattcccttaatcc

SEQ ID NO: 269827 - DNA, 30 bp, Artificial Sequence
  Synthetic oligonucleotide
ttccactagagcatctcgagtggaacatcc

SEQ ID NO: 269828 - DNA, 30 bp, Artificial Sequence
  Synthetic oligonucleotide
aaggcgcaacatgcggttcgtgccacatcc

SEQ ID NO: 269829 - DNA, 30 bp, Artificial Sequence
  Synthetic oligonucleotide
tagaacgagaaaggatttgagtagacatcc

SEQ ID NO: 269830 - DNA, 30 bp, Artificial Sequence
  Synthetic oligonucleotide
aggatgcaggtacggttcagctcgacatcc

SEQ ID NO: 269831 - DNA, 30 bp, Artificial Sequence
  Synthetic oligonucleotide
aaatgcttctccagggtggtgcggacatcc

SEQ ID NO: 269832 - DNA, 30 bp, Artificial Sequence
  Synthetic oligonucleotide
gtcttcggaagattacgggtgactccatcc

SEQ ID NO: 269833 - DNA, 30 bp, Artificial Sequence
  Synthetic oligonucleotide
gaagtctagttgagacaaaataacgcatcc

SEQ ID NO: 269834 - DNA, 30 bp, Artificial Sequence
  Synthetic oligonucleotide
acgataggctctgccattgggagcgcatcc

SEQ ID NO: 269835 - DNA, 30 bp, Artificial Sequence
  Synthetic oligonucleotide
ggaactatcgagaaggatggtggggcatcc

SEQ ID NO: 269836 - DNA, 30 bp, Artificial Sequence
  Synthetic oligonucleotide
gtgagcactgctaggtcaaatatggcatcc

SEQ ID NO: 269837 - DNA, 30 bp, Artificial Sequence
  Synthetic oligonucleotide
tttcggagggacatatattttgctgcatcc

SEQ ID NO: 269838 - DNA, 30 bp, Artificial Sequence
  Synthetic oligonucleotide
cttaatcggaagtagacgcgcgtatcatcc

SEQ ID NO: 269839 - DNA, 30 bp, Artificial Sequence
  Synthetic oligonucleotide
tgcagtatctcgactcggcgaacctcatcc

SEQ ID NO: 269840 - DNA, 30 bp, Artificial Sequence
  Synthetic oligonucleotide
cgtatcacttttatgcggaccaattcatcc

SEQ ID NO: 269841 - DNA, 30 bp, Artificial Sequence
  Synthetic oligonucleotide
cacaatgtgccttttgggaaaagttcatcc

SEQ ID NO: 269842 - DNA, 30 bp, Artificial Sequence
  Synthetic oligonucleotide
tccatagattggaacggatttaaaagatcc

SEQ ID NO: 269843 - DNA, 30 bp, Artificial Sequence
  Synthetic oligonucleotide
cgaggggatccccgcgcatactaaagatcc

SEQ ID NO: 269844 - DNA, 30 bp, Artificial Sequence
  Synthetic oligonucleotide
gagcatttgagcattctactaaacagatcc

SEQ ID NO: 269845 - DNA, 30 bp, Artificial Sequence
  Synthetic oligonucleotide
ggggggcaggcgtggagtattacgagatcc

SEQ ID NO: 269846 - DNA, 30 bp, Artificial Sequence
  Synthetic oligonucleotide
gatgaggagacgtgctgcagacttagatcc

SEQ ID NO: 269847 - DNA, 30 bp, Artificial Sequence
  Synthetic oligonucleotide
cgtggttcggagtgaatctaacaccgatcc

SEQ ID NO: 269848 - DNA, 30 bp, Artificial Sequence
  Synthetic oligonucleotide
gttaaacagaacacatcaggcaagggatcc

SEQ ID NO: 269849 - DNA, 30 bp, Artificial Sequence
  Synthetic oligonucleotide
atcgagtaacgcagattcttcactggatcc

SEQ ID NO: 269850 - DNA, 30 bp, Artificial Sequence
  Synthetic oligonucleotide
gtagcgaagtacatgcaaatgcaatgatcc

SEQ ID NO: 269851 - DNA, 30 bp, Artificial Sequence
  Synthetic oligonucleotide
tcgatcgacgcattcctggaccggtgatcc

SEQ ID NO: 269852 - DNA, 30 bp, Artificial Sequence
  Synthetic oligonucleotide
taaatgcgattaaacgtatgcgggtgatcc

SEQ ID NO: 269853 - DNA, 30 bp, Artificial Sequence
  Synthetic oligonucleotide
tccatgataagcgagagaatagattgatcc

SEQ ID NO: 269854 - DNA, 30 bp, Artificial Sequence
  Synthetic oligonucleotide
aggataggcacttgatatacgtaaatatcc

SEQ ID NO: 269855 - DNA, 30 bp, Artificial Sequence
  Synthetic oligonucleotide
acaccacctacgactaaaaatacaatatcc

SEQ ID NO: 269856 - DNA, 30 bp, Artificial Sequence
  Synthetic oligonucleotide
agtagcagagcagagcgttattcaatatcc

SEQ ID NO: 269857 - DNA, 30 bp, Artificial Sequence
  Synthetic oligonucleotide
cacgtatgaggaggcggtgaactaatatcc

SEQ ID NO: 269858 - DNA, 30 bp, Artificial Sequence
  Synthetic oligonucleotide
gagtatccgtaatgggtaggatccatatcc

SEQ ID NO: 269859 - DNA, 30 bp, Artificial Sequence
  Synthetic oligonucleotide
ggcaccgaaccgcccttgtgagtcatatcc

SEQ ID NO: 269860 - DNA, 30 bp, Artificial Sequence
  Synthetic oligonucleotide
ctacacttgtaaaaacgttataatatatcc

SEQ ID NO: 269861 - DNA, 30 bp, Artificial Sequence
  Synthetic oligonucleotide
caaagtaataccaggtactaggttatatcc

SEQ ID NO: 269862 - DNA, 30 bp, Artificial Sequence
  Synthetic oligonucleotide
cagtgttagattggggacactacagtatcc

SEQ ID NO: 269863 - DNA, 30 bp, Artificial Sequence
  Synthetic oligonucleotide
aggtcgtcactacgttacacgcgagtatcc

SEQ ID NO: 269864 - DNA, 30 bp, Artificial Sequence
  Synthetic oligonucleotide
taggcgggatcaaaggtgcaaagggtatcc

SEQ ID NO: 269865 - DNA, 30 bp, Artificial Sequence
  Synthetic oligonucleotide
acggctaatgattgacgttactacttatcc

SEQ ID NO: 269866 - DNA, 30 bp, Artificial Sequence
  Synthetic oligonucleotide
ttagacgtactcattaagggatccttatcc

SEQ ID NO: 269867 - DNA, 30 bp, Artificial Sequence
  Synthetic oligonucleotide
atactccagggaccatatcgtcggttatcc

SEQ ID NO: 269868 - DNA, 30 bp, Artificial Sequence
  Synthetic oligonucleotide
ttctcaacatcggccgttccggggttatcc

SEQ ID NO: 269869 - DNA, 30 bp, Artificial Sequence
  Synthetic oligonucleotide
aacggctctaatggctggaatggaaactcc

SEQ ID NO: 269870 - DNA, 30 bp, Artificial Sequence
  Synthetic oligonucleotide
tataacaccatcaaggttaggataaactcc

SEQ ID NO: 269871 - DNA, 30 bp, Artificial Sequence
  Synthetic oligonucleotide
cacatgccggaccgttagtgagccaactcc

SEQ ID NO: 269872 - DNA, 30 bp, Artificial Sequence
  Synthetic oligonucleotide
aattcaaggttaaccggaagcaataactcc

SEQ ID NO: 269873 - DNA, 30 bp, Artificial Sequence
  Synthetic oligonucleotide
cccacccccactaggtggaatgctaactcc

SEQ ID NO: 269874 - DNA, 30 bp, Artificial Sequence
  Synthetic oligonucleotide
agagcgggaagcagaaccctttaacactcc

SEQ ID NO: 269875 - DNA, 30 bp, Artificial Sequence
  Synthetic oligonucleotide
acgtccacgggcacgtcacctgcacactcc

SEQ ID NO: 269876 - DNA, 30 bp, Artificial Sequence
  Synthetic oligonucleotide
ctatggaacgatacgcagtcagctcactcc

SEQ ID NO: 269877 - DNA, 30 bp, Artificial Sequence
  Synthetic oligonucleotide
gatggcaactgcgactaacaataagactcc

SEQ ID NO: 269878 - DNA, 30 bp, Artificial Sequence
  Synthetic oligonucleotide
attcggggcagcgcatgctagacagactcc

SEQ ID NO: 269879 - DNA, 30 bp, Artificial Sequence
  Synthetic oligonucleotide
acgtactctaatacgcagacctccgactcc

SEQ ID NO: 269880 - DNA, 30 bp, Artificial Sequence
  Synthetic oligonucleotide
ggcgatacggcacccagggaaggcgactcc

SEQ ID NO: 269881 - DNA, 30 bp, Artificial Sequence
  Synthetic oligonucleotide
ggtcggtatgtgggcgggaggagtgactcc

SEQ ID NO: 269882 - DNA, 30 bp, Artificial Sequence
  Synthetic oligonucleotide
ttagagcgatccgcgttaattaaatactcc

SEQ ID NO: 269883 - DNA, 30 bp, Artificial Sequence
  Synthetic oligonucleotide
ccataggtttgtcgagcgtagtaatactcc

SEQ ID NO: 269884 - DNA, 30 bp, Artificial Sequence
  Synthetic oligonucleotide
gtcaagctctcaagttatgggaacacctcc

SEQ ID NO: 269885 - DNA, 30 bp, Artificial Sequence
  Synthetic oligonucleotide
ggccgaccaggagtcaatctggagacctcc

SEQ ID NO: 269886 - DNA, 29 bp, Artificial Sequence
  Synthetic oligonucleotide
ttgtgcacgggacaaatgtgcttacctcc

SEQ ID NO: 269887 - DNA, 30 bp, Artificial Sequence
  Synthetic oligonucleotide
ccataaacatagaagtctgcccgaccctcc

SEQ ID NO: 269888 - DNA, 30 bp, Artificial Sequence
  Synthetic oligonucleotide
ctccatctagaataaatgagtgtaccctcc

SEQ ID NO: 269889 - DNA, 30 bp, Artificial Sequence
  Synthetic oligonucleotide
tcgggggccgttacataacaatgcccctcc

SEQ ID NO: 269890 - DNA, 30 bp, Artificial Sequence
  Synthetic oligonucleotide
caaggcgctactggcatctcagtgccctcc

SEQ ID NO: 269891 - DNA, 30 bp, Artificial Sequence
  Synthetic oligonucleotide
taatgggttaaagcctgaacattgccctcc

SEQ ID NO: 269892 - DNA, 30 bp, Artificial Sequence
  Synthetic oligonucleotide
gagcggcttaactatcctaatattccctcc

SEQ ID NO: 269893 - DNA, 30 bp, Artificial Sequence
  Synthetic oligonucleotide
tcatagctcgatggcctaatattcgcctcc

SEQ ID NO: 269894 - DNA, 30 bp, Artificial Sequence
  Synthetic oligonucleotide
agaaagcatggcggattcacaaactcctcc

SEQ ID NO: 269895 - DNA, 30 bp, Artificial Sequence
  Synthetic oligonucleotide
caggaacattctggtgcggtataaagctcc

SEQ ID NO: 269896 - DNA, 30 bp, Artificial Sequence
  Synthetic oligonucleotide
gtacggatcagggtggatgcactaagctcc

SEQ ID NO: 269897 - DNA, 30 bp, Artificial Sequence
  Synthetic oligonucleotide
aggacgtgagaatgttgcaatgggagctcc

SEQ ID NO: 269898 - DNA, 30 bp, Artificial Sequence
  Synthetic oligonucleotide
ggtactatccgtattggggaattccgctcc

SEQ ID NO: 269899 - DNA, 30 bp, Artificial Sequence
  Synthetic oligonucleotide
atgaggaggagggcagtggttcagcgctcc

SEQ ID NO: 269900 - DNA, 30 bp, Artificial Sequence
  Synthetic oligonucleotide
gaaaaggttgttgtcggatcggctcgctcc

SEQ ID NO: 269901 - DNA, 30 bp, Artificial Sequence
  Synthetic oligonucleotide
tgagggttctcgatgggaatgggtcgctcc

SEQ ID NO: 269902 - DNA, 30 bp, Artificial Sequence
  Synthetic oligonucleotide
atacagatgattgcgttctacaaaggctcc

SEQ ID NO: 269903 - DNA, 30 bp, Artificial Sequence
  Synthetic oligonucleotide
ttgctcctaacgagactctctacgggctcc

SEQ ID NO: 269904 - DNA, 30 bp, Artificial Sequence
  Synthetic oligonucleotide
ctcgtgtgaagcatcagctggcatggctcc

SEQ ID NO: 269905 - DNA, 30 bp, Artificial Sequence
  Synthetic oligonucleotide
gtggcgttggcaggtatgcgggttggctcc

SEQ ID NO: 269906 - DNA, 30 bp, Artificial Sequence
  Synthetic oligonucleotide
cgacttttcgtggccgaacgcccctgctcc

SEQ ID NO: 269907 - DNA, 30 bp, Artificial Sequence
  Synthetic oligonucleotide
tagataataggcttcaccctggattgctcc

SEQ ID NO: 269908 - DNA, 30 bp, Artificial Sequence
  Synthetic oligonucleotide
gtaaccgctcccttgacgcgcccttgctcc

SEQ ID NO: 269909 - DNA, 30 bp, Artificial Sequence
  Synthetic oligonucleotide
ccgcgaaggtgtgtgtccaagtaaatctcc

SEQ ID NO: 269910 - DNA, 30 bp, Artificial Sequence
  Synthetic oligonucleotide
ggggccgccttggctggaacacgcatctcc

SEQ ID NO: 269911 - DNA, 30 bp, Artificial Sequence
  Synthetic oligonucleotide
cgttaccgggacatgcattagaagatctcc

SEQ ID NO: 269912 - DNA, 30 bp, Artificial Sequence
  Synthetic oligonucleotide
aatgaaatgagtaacgtttgagcgatctcc

SEQ ID NO: 269913 - DNA, 30 bp, Artificial Sequence
  Synthetic oligonucleotide
gtgggcgcagtcagacagcatgggatctcc

SEQ ID NO: 269914 - DNA, 30 bp, Artificial Sequence
  Synthetic oligonucleotide
ataattgaacaaagatgcaggcttctctcc

SEQ ID NO: 269915 - DNA, 30 bp, Artificial Sequence
  Synthetic oligonucleotide
agtcctgaatctatcccaggtaacgtctcc

SEQ ID NO: 269916 - DNA, 30 bp, Artificial Sequence
  Synthetic oligonucleotide
ttagagtgtagaccgtaaaaggaggtctcc

SEQ ID NO: 269917 - DNA, 30 bp, Artificial Sequence
  Synthetic oligonucleotide
ccatgtaaaatgggtagatcttaggtctcc

SEQ ID NO: 269918 - DNA, 30 bp, Artificial Sequence
  Synthetic oligonucleotide
agaaatagacacccagggccgtatgtctcc

SEQ ID NO: 269919 - DNA, 30 bp, Artificial Sequence
  Synthetic oligonucleotide
aaggcactttgtgcaattaggcgtgtctcc

SEQ ID NO: 269920 - DNA, 30 bp, Artificial Sequence
  Synthetic oligonucleotide
aatagtacttatacgaaagcgattgtctcc

SEQ ID NO: 269921 - DNA, 30 bp, Artificial Sequence
  Synthetic oligonucleotide
aacaacatagcacagtatcgctagttctcc

SEQ ID NO: 269922 - DNA, 30 bp, Artificial Sequence
  Synthetic oligonucleotide
gtcttgcatatgcggtgatttccgttctcc

SEQ ID NO: 269923 - DNA, 30 bp, Artificial Sequence
  Synthetic oligonucleotide
ggtggcgcttagagcgaaaatcaaaagtcc

SEQ ID NO: 269924 - DNA, 30 bp, Artificial Sequence
  Synthetic oligonucleotide
ttggtgatcgtatagagtgacataaagtcc

SEQ ID NO: 269925 - DNA, 30 bp, Artificial Sequence
  Synthetic oligonucleotide
tcgactccatgccgataaactgacaagtcc

SEQ ID NO: 269926 - DNA, 30 bp, Artificial Sequence
  Synthetic oligonucleotide
ccgccgccatccaggcaaaggagcaagtcc

SEQ ID NO: 269927 - DNA, 30 bp, Artificial Sequence
  Synthetic oligonucleotide
cactctcgcctcatatgaagagggaagtcc

SEQ ID NO: 269928 - DNA, 30 bp, Artificial Sequence
  Synthetic oligonucleotide
acatttgtggaaggtagagcggataagtcc

SEQ ID NO: 269929 - DNA, 30 bp, Artificial Sequence
  Synthetic oligonucleotide
gagaatgatctaccataatcctataagtcc

SEQ ID NO: 269930 - DNA, 30 bp, Artificial Sequence
  Synthetic oligonucleotide
gaaaccactataaccactacacgtaagtcc

SEQ ID NO: 269931 - DNA, 30 bp, Artificial Sequence
  Synthetic oligonucleotide
gactgcctgtctaacaataatctacagtcc

SEQ ID NO: 269932 - DNA, 30 bp, Artificial Sequence
  Synthetic oligonucleotide
ctatttgcgctcgcctgtcagaagcagtcc

SEQ ID NO: 269933 - DNA, 30 bp, Artificial Sequence
  Synthetic oligonucleotide
cccgtttccgcaagccccttagcgcagtcc

SEQ ID NO: 269934 - DNA, 30 bp, Artificial Sequence
  Synthetic oligonucleotide
actaaagtaattgacatgcttaggcagtcc

SEQ ID NO: 269935 - DNA, 30 bp, Artificial Sequence
  Synthetic oligonucleotide
gcgggtggctccggtagtcggcggcagtcc

SEQ ID NO: 269936 - DNA, 30 bp, Artificial Sequence
  Synthetic oligonucleotide
gcggcataaggttcttctggtaaagagtcc

SEQ ID NO: 269937 - DNA, 30 bp, Artificial Sequence
  Synthetic oligonucleotide
ccgcgtcaagctgaattccagaaggagtcc

SEQ ID NO: 269938 - DNA, 30 bp, Artificial Sequence
  Synthetic oligonucleotide
ctaggtctctatacatggactgtggagtcc

SEQ ID NO: 269939 - DNA, 30 bp, Artificial Sequence
  Synthetic oligonucleotide
tttacgtgtcgtcctgacgtcaatgagtcc

SEQ ID NO: 269940 - DNA, 30 bp, Artificial Sequence
  Synthetic oligonucleotide
ccttaaagatcgtgtgcgccacctgagtcc

SEQ ID NO: 269941 - DNA, 30 bp, Artificial Sequence
  Synthetic oligonucleotide
tactggagttgggactatccaaaatagtcc

SEQ ID NO: 269942 - DNA, 30 bp, Artificial Sequence
  Synthetic oligonucleotide
tactagatggggatggtgtcgttatagtcc

SEQ ID NO: 269943 - DNA, 30 bp, Artificial Sequence
  Synthetic oligonucleotide
aaagagcgacggttaaaattccattagtcc

SEQ ID NO: 269944 - DNA, 30 bp, Artificial Sequence
  Synthetic oligonucleotide
tcaacctagtgatttgtgatgtcttagtcc

SEQ ID NO: 269945 - DNA, 30 bp, Artificial Sequence
  Synthetic oligonucleotide
accctcagagttccatgaagtagaacgtcc

SEQ ID NO: 269946 - DNA, 30 bp, Artificial Sequence
  Synthetic oligonucleotide
aggcggtggccagagcatgccctcacgtcc

SEQ ID NO: 269947 - DNA, 30 bp, Artificial Sequence
  Synthetic oligonucleotide
cggtgcgtaagccgagacagcgtcacgtcc

SEQ ID NO: 269948 - DNA, 30 bp, Artificial Sequence
  Synthetic oligonucleotide
tgtggcacgccccgctgctagctgacgtcc

SEQ ID NO: 269949 - DNA, 30 bp, Artificial Sequence
  Synthetic oligonucleotide
aaggttcatctcaaggcattagcaccgtcc

SEQ ID NO: 269950 - DNA, 30 bp, Artificial Sequence
  Synthetic oligonucleotide
ggcttgcctgctgccgcgctagtaccgtcc

SEQ ID NO: 269951 - DNA, 30 bp, Artificial Sequence
  Synthetic oligonucleotide
ttcgggaagaaagtttattgctacccgtcc

SEQ ID NO: 269952 - DNA, 30 bp, Artificial Sequence
  Synthetic oligonucleotide
cagcgatcgcattgacgtgaatagccgtcc

SEQ ID NO: 269953 - DNA, 30 bp, Artificial Sequence
  Synthetic oligonucleotide
ctcattcgtctcatttgactcgaagcgtcc

SEQ ID NO: 269954 - DNA, 30 bp, Artificial Sequence
  Synthetic oligonucleotide
agttccgtaacttcattccatggagcgtcc

SEQ ID NO: 269955 - DNA, 30 bp, Artificial Sequence
  Synthetic oligonucleotide
cctatatcatggggcaagtacctagcgtcc

SEQ ID NO: 269956 - DNA, 30 bp, Artificial Sequence
  Synthetic oligonucleotide
gaccaggcaccaagacctatgcacgcgtcc

SEQ ID NO: 269957 - DNA, 30 bp, Artificial Sequence
  Synthetic oligonucleotide
acgggaatcctacatcctctctgcgcgtcc

SEQ ID NO: 269958 - DNA, 30 bp, Artificial Sequence
  Synthetic oligonucleotide
acagtggcatgcctcagctgacgggcgtcc

SEQ ID NO: 269959 - DNA, 30 bp, Artificial Sequence
  Synthetic oligonucleotide
gcgcgttctattcggttggtccgggcgtcc

SEQ ID NO: 269960 - DNA, 30 bp, Artificial Sequence
  Synthetic oligonucleotide
accacttggaatgcaattgtagatgcgtcc

SEQ ID NO: 269961 - DNA, 30 bp, Artificial Sequence
  Synthetic oligonucleotide
acccgcatggacctgccaagctcgtcgtcc

SEQ ID NO: 269962 - DNA, 30 bp, Artificial Sequence
  Synthetic oligonucleotide
tgtatcataaactctcttaacttttcgtcc

SEQ ID NO: 269963 - DNA, 30 bp, Artificial Sequence
  Synthetic oligonucleotide
ttggcatctgcaatcggcgtaccaaggtcc

SEQ ID NO: 269964 - DNA, 30 bp, Artificial Sequence
  Synthetic oligonucleotide
acccctcctcaaaaacttcgtctaaggtcc

SEQ ID NO: 269965 - DNA, 30 bp, Artificial Sequence
  Synthetic oligonucleotide
acgtaaggaaacgcatatgcggtaaggtcc

SEQ ID NO: 269966 - DNA, 30 bp, Artificial Sequence
  Synthetic oligonucleotide
cgcggattagggggtagttgcgagaggtcc

SEQ ID NO: 269967 - DNA, 30 bp, Artificial Sequence
  Synthetic oligonucleotide
ttagcgttcaaacctgagatggagaggtcc

SEQ ID NO: 269968 - DNA, 30 bp, Artificial Sequence
  Synthetic oligonucleotide
gttgctgaaagcgagggctattcgaggtcc

SEQ ID NO: 269969 - DNA, 30 bp, Artificial Sequence
  Synthetic oligonucleotide
accaggaacatctccctgcgcaataggtcc

SEQ ID NO: 269970 - DNA, 30 bp, Artificial Sequence
  Synthetic oligonucleotide
ggttgatcaggggaataggacttacggtcc

SEQ ID NO: 269971 - DNA, 30 bp, Artificial Sequence
  Synthetic oligonucleotide
ccgactgcgaacggggttgttgggcggtcc

SEQ ID NO: 269972 - DNA, 30 bp, Artificial Sequence
  Synthetic oligonucleotide
acactaaaaagagcgtaaatccatcggtcc

SEQ ID NO: 269973 - DNA, 30 bp, Artificial Sequence
  Synthetic oligonucleotide
acggcatggactcgggcctcagttcggtcc

SEQ ID NO: 269974 - DNA, 30 bp, Artificial Sequence
  Synthetic oligonucleotide
gtaaatgccgtcgccagtgcgtttcggtcc

SEQ ID NO: 269975 - DNA, 30 bp, Artificial Sequence
  Synthetic oligonucleotide
cgctgccaattactgagcgtctacgggtcc

SEQ ID NO: 269976 - DNA, 30 bp, Artificial Sequence
  Synthetic oligonucleotide
ggcgaccaccgataattcggttacgggtcc

SEQ ID NO: 269977 - DNA, 30 bp, Artificial Sequence
  Synthetic oligonucleotide
tatctgcgaaaatggggggacaaggggtcc

SEQ ID NO: 269978 - DNA, 30 bp, Artificial Sequence
  Synthetic oligonucleotide
gggtatttgtttcctcgcggcccggggtcc

SEQ ID NO: 269979 - DNA, 30 bp, Artificial Sequence
  Synthetic oligonucleotide
cgctagatttgtcgcaattctatggggtcc

SEQ ID NO: 269980 - DNA, 30 bp, Artificial Sequence
  Synthetic oligonucleotide
ggtaagtgttccaaacttggcccctggtcc

SEQ ID NO: 269981 - DNA, 30 bp, Artificial Sequence
  Synthetic oligonucleotide
ggccggggcatctactaggctatctggtcc

SEQ ID NO: 269982 - DNA, 30 bp, Artificial Sequence
  Synthetic oligonucleotide
gcacgggtgaactcgtgaagcgattggtcc

SEQ ID NO: 269983 - DNA, 30 bp, Artificial Sequence
  Synthetic oligonucleotide
agaccataggctcgatggggcgattggtcc

SEQ ID NO: 269984 - DNA, 30 bp, Artificial Sequence
  Synthetic oligonucleotide
cagcttaagcaagtcctagtcgattggtcc

SEQ ID NO: 269985 - DNA, 30 bp, Artificial Sequence
  Synthetic oligonucleotide
cagagtattaaaggatcggaaaaaatgtcc

SEQ ID NO: 269986 - DNA, 30 bp, Artificial Sequence
  Synthetic oligonucleotide
ctgttataaacgtcttgcaaaagcatgtcc

SEQ ID NO: 269987 - DNA, 30 bp, Artificial Sequence
  Synthetic oligonucleotide
aacccaactgccggttccataagcatgtcc

SEQ ID NO: 269988 - DNA, 30 bp, Artificial Sequence
  Synthetic oligonucleotide
acgtattacctgtcttcacgtaagatgtcc

SEQ ID NO: 269989 - DNA, 30 bp, Artificial Sequence
  Synthetic oligonucleotide
tcattaccagtgtgtggagttcgactgtcc

SEQ ID NO: 269990 - DNA, 30 bp, Artificial Sequence
  Synthetic oligonucleotide
ctcgggcaaagtgggtgaagctgactgtcc

SEQ ID NO: 269991 - DNA, 30 bp, Artificial Sequence
  Synthetic oligonucleotide
gagcgctcttgggcacttgagatactgtcc

SEQ ID NO: 269992 - DNA, 30 bp, Artificial Sequence
  Synthetic oligonucleotide
tatggggcggttaggatcagagtactgtcc

SEQ ID NO: 269993 - DNA, 30 bp, Artificial Sequence
  Synthetic oligonucleotide
agtataacgtcgcaacacgcgcttctgtcc

SEQ ID NO: 269994 - DNA, 31 bp, Artificial Sequence
  Synthetic oligonucleotide
cggggattggggccgaaggaaggaagtgtcc

SEQ ID NO: 269995 - DNA, 30 bp, Artificial Sequence
  Synthetic oligonucleotide
acacagggaaggtcctggttgaaggtgtcc

SEQ ID NO: 269996 - DNA, 30 bp, Artificial Sequence
  Synthetic oligonucleotide
caggatgggtgcaaagaggggcgggtgtcc

SEQ ID NO: 269997 - DNA, 30 bp, Artificial Sequence
  Synthetic oligonucleotide
aacacagatatctatctagggttggtgtcc

SEQ ID NO: 269998 - DNA, 30 bp, Artificial Sequence
  Synthetic oligonucleotide
gctgtacgtacgggcataggtaatgtgtcc

SEQ ID NO: 269999 - DNA, 30 bp, Artificial Sequence
  Synthetic oligonucleotide
aaaccgcactccagagcatttgatgtgtcc

SEQ ID NO: 270000 - DNA, 30 bp, Artificial Sequence
  Synthetic oligonucleotide
aggttcctgtggccatcttacagtgtgtcc

SEQ ID NO: 270001 - DNA, 30 bp, Artificial Sequence
  Synthetic oligonucleotide
tacacaggcagcccgttccacggattgtcc

SEQ ID NO: 270002 - DNA, 30 bp, Artificial Sequence
  Synthetic oligonucleotide
agagtcggagacaccaaaatctacttgtcc

SEQ ID NO: 270003 - DNA, 30 bp, Artificial Sequence
  Synthetic oligonucleotide
gtttgccttaatggcaggtgaacgttgtcc

SEQ ID NO: 270004 - DNA, 30 bp, Artificial Sequence
  Synthetic oligonucleotide
cccagacattctgtattaggtaggttgtcc

SEQ ID NO: 270005 - DNA, 30 bp, Artificial Sequence
  Synthetic oligonucleotide
gcacaccaaagccatgttagcaataattcc

SEQ ID NO: 270006 - DNA, 30 bp, Artificial Sequence
  Synthetic oligonucleotide
aacgttgattcgctgctacgccataattcc

SEQ ID NO: 270007 - DNA, 30 bp, Artificial Sequence
  Synthetic oligonucleotide
catctgaagatgtttaaaggatataattcc

SEQ ID NO: 270008 - DNA, 30 bp, Artificial Sequence
  Synthetic oligonucleotide
agatcggttctgcagatggtacgtaattcc

SEQ ID NO: 270009 - DNA, 30 bp, Artificial Sequence
  Synthetic oligonucleotide
tggcgtcatccaggttgtttaattaattcc

SEQ ID NO: 270010 - DNA, 30 bp, Artificial Sequence
  Synthetic oligonucleotide
tactaatgaaaggtcgtggtgggccattcc

SEQ ID NO: 270011 - DNA, 30 bp, Artificial Sequence
  Synthetic oligonucleotide
gagtccgatattgggtcgggggagcattcc

SEQ ID NO: 270012 - DNA, 30 bp, Artificial Sequence
  Synthetic oligonucleotide
gtcaggtagtctatgttgtgaaaagattcc

SEQ ID NO: 270013 - DNA, 30 bp, Artificial Sequence
  Synthetic oligonucleotide
gaacgtgccatccgttaaataccagattcc

SEQ ID NO: 270014 - DNA, 30 bp, Artificial Sequence
  Synthetic oligonucleotide
ccatctgggtgcacggtcctcttcgattcc

SEQ ID NO: 270015 - DNA, 30 bp, Artificial Sequence
  Synthetic oligonucleotide
ggggaacaccgcacgcaacaaacggattcc

SEQ ID NO: 270016 - DNA, 30 bp, Artificial Sequence
  Synthetic oligonucleotide
ccctgcattacaataaacgtcccggattcc

SEQ ID NO: 270017 - DNA, 30 bp, Artificial Sequence
  Synthetic oligonucleotide
cccgggaaaaccaagggattgtcggattcc

SEQ ID NO: 270018 - DNA, 30 bp, Artificial Sequence
  Synthetic oligonucleotide
gcaaacgaggcgcacggcaattgggattcc

SEQ ID NO: 270019 - DNA, 30 bp, Artificial Sequence
  Synthetic oligonucleotide
ccagacgacaagaagacaatcgatgattcc

SEQ ID NO: 270020 - DNA, 30 bp, Artificial Sequence
  Synthetic oligonucleotide
gcgccagggttacgctataggaaatattcc

SEQ ID NO: 270021 - DNA, 30 bp, Artificial Sequence
  Synthetic oligonucleotide
gctaagatcttcgtaggtcgcggatattcc

SEQ ID NO: 270022 - DNA, 30 bp, Artificial Sequence
  Synthetic oligonucleotide
acggcatcagaaataatagatccctattcc

SEQ ID NO: 270023 - DNA, 30 bp, Artificial Sequence
  Synthetic oligonucleotide
acgaactctactacatatactccctattcc

SEQ ID NO: 270024 - DNA, 30 bp, Artificial Sequence
  Synthetic oligonucleotide
cactaaacagttattgcgtaaggctattcc

SEQ ID NO: 270025 - DNA, 30 bp, Artificial Sequence
  Synthetic oligonucleotide
actgaataactgtcgtgaaaacattattcc

SEQ ID NO: 270026 - DNA, 30 bp, Artificial Sequence
  Synthetic oligonucleotide
tcaattaggctggaatataagggcacttcc

SEQ ID NO: 270027 - DNA, 30 bp, Artificial Sequence
  Synthetic oligonucleotide
cgaatagggtcggtcgctaggatcacttcc

SEQ ID NO: 270028 - DNA, 30 bp, Artificial Sequence
  Synthetic oligonucleotide
tcgaaccgcgcgggtaatagttggacttcc

SEQ ID NO: 270029 - DNA, 30 bp, Artificial Sequence
  Synthetic oligonucleotide
aaacatcacacaacaataggaagtacttcc

SEQ ID NO: 270030 - DNA, 30 bp, Artificial Sequence
  Synthetic oligonucleotide
ggaagcacggctaggtgtaattgtacttcc

SEQ ID NO: 270031 - DNA, 30 bp, Artificial Sequence
  Synthetic oligonucleotide
aaaaggcgcttagctatgtatgacccttcc

SEQ ID NO: 270032 - DNA, 30 bp, Artificial Sequence
  Synthetic oligonucleotide
tcgggcctgcgacctggtcctgtgccttcc

SEQ ID NO: 270033 - DNA, 30 bp, Artificial Sequence
  Synthetic oligonucleotide
cggatggacatatgatactaccttccttcc

SEQ ID NO: 270034 - DNA, 30 bp, Artificial Sequence
  Synthetic oligonucleotide
cgacggtgcatttacaaatgggcagcttcc

SEQ ID NO: 270035 - DNA, 30 bp, Artificial Sequence
  Synthetic oligonucleotide
tacagtgttgcacagcaagtgagagcttcc

SEQ ID NO: 270036 - DNA, 30 bp, Artificial Sequence
  Synthetic oligonucleotide
gcttaatacaacaaccggcgtggtgcttcc

SEQ ID NO: 270037 - DNA, 30 bp, Artificial Sequence
  Synthetic oligonucleotide
ctccacacaaaacattaacagtgtgcttcc

SEQ ID NO: 270038 - DNA, 30 bp, Artificial Sequence
  Synthetic oligonucleotide
tttgggccgttggtgggggttattgcttcc

SEQ ID NO: 270039 - DNA, 30 bp, Artificial Sequence
  Synthetic oligonucleotide
taggcgagactcttggtgtggcaatcttcc

SEQ ID NO: 270040 - DNA, 30 bp, Artificial Sequence
  Synthetic oligonucleotide
aaccttcaataatagcgcatagcgtcttcc

SEQ ID NO: 270041 - DNA, 30 bp, Artificial Sequence
  Synthetic oligonucleotide
atagaccgaggaggcaaatgtagttcttcc

SEQ ID NO: 270042 - DNA, 30 bp, Artificial Sequence
  Synthetic oligonucleotide
ccctcgtgtcgctgagttggactttcttcc

SEQ ID NO: 270043 - DNA, 29 bp, Artificial Sequence
  Synthetic oligonucleotide
aacctaatgtacaccacacctccagttcc

SEQ ID NO: 270044 - DNA, 30 bp, Artificial Sequence
  Synthetic oligonucleotide
tagcgattttggggctaagggtagagttcc

SEQ ID NO: 270045 - DNA, 30 bp, Artificial Sequence
  Synthetic oligonucleotide
tgccctcatgctgccgaaaagccgagttcc

SEQ ID NO: 270046 - DNA, 30 bp, Artificial Sequence
  Synthetic oligonucleotide
gagtggactagtaaatccaacaaccgttcc

SEQ ID NO: 270047 - DNA, 30 bp, Artificial Sequence
  Synthetic oligonucleotide
gccgtttaggctttcctccccgcccgttcc

SEQ ID NO: 270048 - DNA, 30 bp, Artificial Sequence
  Synthetic oligonucleotide
ctaatgccagatgatgggttgggtcgttcc

SEQ ID NO: 270049 - DNA, 30 bp, Artificial Sequence
  Synthetic oligonucleotide
ggcttatttaacccatcatcccgtggttcc

SEQ ID NO: 270050 - DNA, 31 bp, Artificial Sequence
  Synthetic oligonucleotide
tgacagtaggcgtgcctgcaagtttggttcc

SEQ ID NO: 270051 - DNA, 30 bp, Artificial Sequence
  Synthetic oligonucleotide
ctcataaaaaagcttaaatcactctgttcc

SEQ ID NO: 270052 - DNA, 30 bp, Artificial Sequence
  Synthetic oligonucleotide
tgtgtcagagtggtacggggtatgtgttcc

SEQ ID NO: 270053 - DNA, 30 bp, Artificial Sequence
  Synthetic oligonucleotide
tcgagggatgccattcatatatagatttcc

SEQ ID NO: 270054 - DNA, 30 bp, Artificial Sequence
  Synthetic oligonucleotide
accaattaccctgggactgggtccctttcc

SEQ ID NO: 270055 - DNA, 30 bp, Artificial Sequence
  Synthetic oligonucleotide
gtgaagctcatttcatgaataacagtttcc

SEQ ID NO: 270056 - DNA, 30 bp, Artificial Sequence
  Synthetic oligonucleotide
ccgtgtgtcggtatggaagactacgtttcc

SEQ ID NO: 270057 - DNA, 30 bp, Artificial Sequence
  Synthetic oligonucleotide
cacgagtccaggacgggtaatcaggtttcc

SEQ ID NO: 270058 - DNA, 30 bp, Artificial Sequence
  Synthetic oligonucleotide
tggtcatgccacggactatgaggtgtttcc

SEQ ID NO: 270059 - DNA, 30 bp, Artificial Sequence
  Synthetic oligonucleotide
cctcaacaggatgctaccgggtagttttcc

SEQ ID NO: 270060 - DNA, 30 bp, Artificial Sequence
  Synthetic oligonucleotide
tcacgtgacatccgctcaggccaaaaaagc

SEQ ID NO: 270061 - DNA, 30 bp, Artificial Sequence
  Synthetic oligonucleotide
caacaaaggggtgatgatcatccaaaaagc

SEQ ID NO: 270062 - DNA, 30 bp, Artificial Sequence
  Synthetic oligonucleotide
tcggggcatacccattgattcctaaaaagc

SEQ ID NO: 270063 - DNA, 30 bp, Artificial Sequence
  Synthetic oligonucleotide
catgagagctgtacccgtccctacaaaagc

SEQ ID NO: 270064 - DNA, 30 bp, Artificial Sequence
  Synthetic oligonucleotide
tctggcaaaaatttccgttatgccaaaagc

SEQ ID NO: 270065 - DNA, 30 bp, Artificial Sequence
  Synthetic oligonucleotide
ccttaactgaacgaggtgcccggcaaaagc

SEQ ID NO: 270066 - DNA, 30 bp, Artificial Sequence
  Synthetic oligonucleotide
ggggaaatcaagggggaatcacctaaaagc

SEQ ID NO: 270067 - DNA, 30 bp, Artificial Sequence
  Synthetic oligonucleotide
ggccaccggaccacagccaagcaacaaagc

SEQ ID NO: 270068 - DNA, 30 bp, Artificial Sequence
  Synthetic oligonucleotide
gctcaaaggtgactaaggacgccacaaagc

SEQ ID NO: 270069 - DNA, 30 bp, Artificial Sequence
  Synthetic oligonucleotide
gtgtgaaatcgtagagattgagcacaaagc

SEQ ID NO: 270070 - DNA, 30 bp, Artificial Sequence
  Synthetic oligonucleotide
aaacttaacacacgcaagtgaatacaaagc

SEQ ID NO: 270071 - DNA, 30 bp, Artificial Sequence
  Synthetic oligonucleotide
tgtctcgtgcaagaggcatgtacccaaagc

SEQ ID NO: 270072 - DNA, 30 bp, Artificial Sequence
  Synthetic oligonucleotide
cgggccacctcaaactgtaggccccaaagc

SEQ ID NO: 270073 - DNA, 30 bp, Artificial Sequence
  Synthetic oligonucleotide
ttcaacaggaagttcaaaacgggccaaagc

SEQ ID NO: 270074 - DNA, 30 bp, Artificial Sequence
  Synthetic oligonucleotide
agtttacggtgtaaccgctatttccaaagc

SEQ ID NO: 270075 - DNA, 30 bp, Artificial Sequence
  Synthetic oligonucleotide
actaactcccacgccggtcgagcgcaaagc

SEQ ID NO: 270076 - DNA, 30 bp, Artificial Sequence
  Synthetic oligonucleotide
tgtttgttggagtccctaaaggcgcaaagc

SEQ ID NO: 270077 - DNA, 30 bp, Artificial Sequence
  Synthetic oligonucleotide
aggtatgcgtccaagttcatgtcgcaaagc

SEQ ID NO: 270078 - DNA, 31 bp, Artificial Sequence
  Synthetic oligonucleotide
gtggtttctggggaggaagttagtgcaaagc

SEQ ID NO: 270079 - DNA, 30 bp, Artificial Sequence
  Synthetic oligonucleotide
ttaacgacacgtctcaggcgattgcaaagc

SEQ ID NO: 270080 - DNA, 30 bp, Artificial Sequence
  Synthetic oligonucleotide
aatgcgccttcaaatatggtcctagaaagc

SEQ ID NO: 270081 - DNA, 30 bp, Artificial Sequence
  Synthetic oligonucleotide
ccgtaataactgatcagattgctagaaagc

SEQ ID NO: 270082 - DNA, 30 bp, Artificial Sequence
  Synthetic oligonucleotide
taggtccaatacactatgaaccacgaaagc

SEQ ID NO: 270083 - DNA, 30 bp, Artificial Sequence
  Synthetic oligonucleotide
acatggcgacctggcacttttgaggaaagc

SEQ ID NO: 270084 - DNA, 30 bp, Artificial Sequence
  Synthetic oligonucleotide
agctaagaacccctgtccatttcggaaagc

SEQ ID NO: 270085 - DNA, 30 bp, Artificial Sequence
  Synthetic oligonucleotide
aagtggtagcgagctttaagagatgaaagc

SEQ ID NO: 270086 - DNA, 30 bp, Artificial Sequence
  Synthetic oligonucleotide
gttattcgtaccgacgaaggatttgaaagc

SEQ ID NO: 270087 - DNA, 30 bp, Artificial Sequence
  Synthetic oligonucleotide
tagctatgaaaacatatcgcagtataaagc

SEQ ID NO: 270088 - DNA, 30 bp, Artificial Sequence
  Synthetic oligonucleotide
aacggcaggttttcgaggtgggactaaagc

SEQ ID NO: 270089 - DNA, 30 bp, Artificial Sequence
  Synthetic oligonucleotide
taggatcaatcacttgatgaatcctaaagc

SEQ ID NO: 270090 - DNA, 30 bp, Artificial Sequence
  Synthetic oligonucleotide
cgtggcattcaagctatcaaaaggtaaagc

SEQ ID NO: 270091 - DNA, 30 bp, Artificial Sequence
  Synthetic oligonucleotide
accgggtgggaccctgccgtaatgtaaagc

SEQ ID NO: 270092 - DNA, 30 bp, Artificial Sequence
  Synthetic oligonucleotide
cctccgtgaaaaccgttggtcgattaaagc

SEQ ID NO: 270093 - DNA, 30 bp, Artificial Sequence
  Synthetic oligonucleotide
aatccgagtcatacgatcgactaaacaagc

SEQ ID NO: 270094 - DNA, 30 bp, Artificial Sequence
  Synthetic oligonucleotide
gcaggcctaacatcttctggttaaacaagc

SEQ ID NO: 270095 - DNA, 30 bp, Artificial Sequence
  Synthetic oligonucleotide
aaatcggctggcatctgaggcataacaagc

SEQ ID NO: 270096 - DNA, 30 bp, Artificial Sequence
  Synthetic oligonucleotide
tacggtgttagtatgttggtattaacaagc

SEQ ID NO: 270097 - DNA, 30 bp, Artificial Sequence
  Synthetic oligonucleotide
atcgtggcctataggttatggttaacaagc

SEQ ID NO: 270098 - DNA, 30 bp, Artificial Sequence
  Synthetic oligonucleotide
agagtgcaacgctggatggtagggacaagc

SEQ ID NO: 270099 - DNA, 30 bp, Artificial Sequence
  Synthetic oligonucleotide
gtaggaaatcctgcgagcctgcctacaagc

SEQ ID NO: 270100 - DNA, 30 bp, Artificial Sequence
  Synthetic oligonucleotide
agttgcgacttcgggttcaacgctacaagc

SEQ ID NO: 270101 - DNA, 30 bp, Artificial Sequence
  Synthetic oligonucleotide
aaggccgatctcggtgctacgcgtacaagc

SEQ ID NO: 270102 - DNA, 30 bp, Artificial Sequence
  Synthetic oligonucleotide
agaacccgaaagactggctatcaaccaagc

SEQ ID NO: 270103 - DNA, 30 bp, Artificial Sequence
  Synthetic oligonucleotide
ctttgtggataacaaagtttcggaccaagc

SEQ ID NO: 270104 - DNA, 30 bp, Artificial Sequence
  Synthetic oligonucleotide
tgcctttagcgatacctctttaatccaagc

SEQ ID NO: 270105 - DNA, 30 bp, Artificial Sequence
  Synthetic oligonucleotide
ctgcgatcctagaggtttactgaagcaagc

SEQ ID NO: 270106 - DNA, 30 bp, Artificial Sequence
  Synthetic oligonucleotide
ctgctatgatggcattaccaggcagcaagc

SEQ ID NO: 270107 - DNA, 30 bp, Artificial Sequence
  Synthetic oligonucleotide
gcgtgtaatctgaccaataggtatgcaagc

SEQ ID NO: 270108 - DNA, 30 bp, Artificial Sequence
  Synthetic oligonucleotide
tactcgggacgcaaaccaccaagatcaagc

SEQ ID NO: 270109 - DNA, 30 bp, Artificial Sequence
  Synthetic oligonucleotide
cataatcaccagactgacagtacaagaagc

SEQ ID NO: 270110 - DNA, 30 bp, Artificial Sequence
  Synthetic oligonucleotide
cggattgtactagttattgtaggaagaagc

SEQ ID NO: 270111 - DNA, 30 bp, Artificial Sequence
  Synthetic oligonucleotide
cgccctattgtcggaatcgccggaagaagc

SEQ ID NO: 270112 - DNA, 30 bp, Artificial Sequence
  Synthetic oligonucleotide
atgtgcgctcctgggtaaatcataagaagc

SEQ ID NO: 270113 - DNA, 30 bp, Artificial Sequence
  Synthetic oligonucleotide
tccatgatatattctgggtcgcggagaagc

SEQ ID NO: 270114 - DNA, 30 bp, Artificial Sequence
  Synthetic oligonucleotide
atcatggcgagtcaggtcactacaggaagc

SEQ ID NO: 270115 - DNA, 30 bp, Artificial Sequence
  Synthetic oligonucleotide
ggtggacgaacccagttaaacgtaggaagc

SEQ ID NO: 270116 - DNA, 30 bp, Artificial Sequence
  Synthetic oligonucleotide
ctactgaagaggcaccaacgacccggaagc

SEQ ID NO: 270117 - DNA, 30 bp, Artificial Sequence
  Synthetic oligonucleotide
tgcaaatcgggctaattgggggccggaagc

SEQ ID NO: 270118 - DNA, 30 bp, Artificial Sequence
  Synthetic oligonucleotide
taagcgcgcaggtccgaaaggcagggaagc

SEQ ID NO: 270119 - DNA, 30 bp, Artificial Sequence
  Synthetic oligonucleotide
aatatgggcctcgaacctggtatgggaagc

SEQ ID NO: 270120 - DNA, 31 bp, Artificial Sequence
  Synthetic oligonucleotide
gcgggatcgttaaataaggcgtgctggaagc

SEQ ID NO: 270121 - DNA, 30 bp, Artificial Sequence
  Synthetic oligonucleotide
ctgacgacgtgtgcttctgagagctgaagc

SEQ ID NO: 270122 - DNA, 30 bp, Artificial Sequence
  Synthetic oligonucleotide
acccaacagcctagaccaacacgctgaagc

SEQ ID NO: 270123 - DNA, 30 bp, Artificial Sequence
  Synthetic oligonucleotide
atgggaaaagcgcgtgcatcgggttgaagc

SEQ ID NO: 270124 - DNA, 30 bp, Artificial Sequence
  Synthetic oligonucleotide
gggcgggaacactatgctgtgggttgaagc

SEQ ID NO: 270125 - DNA, 30 bp, Artificial Sequence
  Synthetic oligonucleotide
cagtaccggtttagagcccacgcaataagc

SEQ ID NO: 270126 - DNA, 30 bp, Artificial Sequence
  Synthetic oligonucleotide
tgttaacacgtcatacgtcagggaataagc

SEQ ID NO: 270127 - DNA, 30 bp, Artificial Sequence
  Synthetic oligonucleotide
attagtttgcgaggaactacgtccataagc

SEQ ID NO: 270128 - DNA, 30 bp, Artificial Sequence
  Synthetic oligonucleotide
gggtatttctagtaattatgtggcataagc

SEQ ID NO: 270129 - DNA, 30 bp, Artificial Sequence
  Synthetic oligonucleotide
gagactaccgtgttagaagcctggataagc

SEQ ID NO: 270130 - DNA, 30 bp, Artificial Sequence
  Synthetic oligonucleotide
agccagaattagtcgggtctcgtcctaagc

SEQ ID NO: 270131 - DNA, 30 bp, Artificial Sequence
  Synthetic oligonucleotide
cgagtatagattcaggagtttttcctaagc

SEQ ID NO: 270132 - DNA, 30 bp, Artificial Sequence
  Synthetic oligonucleotide
gcctaatgtatttgacataaaacgctaagc

SEQ ID NO: 270133 - DNA, 30 bp, Artificial Sequence
  Synthetic oligonucleotide
taagtatcggcagccgtacccgatctaagc

SEQ ID NO: 270134 - DNA, 30 bp, Artificial Sequence
  Synthetic oligonucleotide
ccaaagaaaatgtggtggcactatctaagc

SEQ ID NO: 270135 - DNA, 30 bp, Artificial Sequence
  Synthetic oligonucleotide
cgcattgaaaggacaccggcttgagtaagc

SEQ ID NO: 270136 - DNA, 30 bp, Artificial Sequence
  Synthetic oligonucleotide
ctgaagtcgtcagggaacggatcggtaagc

SEQ ID NO: 270137 - DNA, 30 bp, Artificial Sequence
  Synthetic oligonucleotide
cataagaactcacacggctactcggtaagc

SEQ ID NO: 270138 - DNA, 30 bp, Artificial Sequence
  Synthetic oligonucleotide
gagggcctggatagctaatcacttgtaagc

SEQ ID NO: 270139 - DNA, 30 bp, Artificial Sequence
  Synthetic oligonucleotide
cgtgtgtttactttctggccgaaattaagc

SEQ ID NO: 270140 - DNA, 30 bp, Artificial Sequence
  Synthetic oligonucleotide
ccggacccgaacttgtgattttgattaagc

SEQ ID NO: 270141 - DNA, 30 bp, Artificial Sequence
  Synthetic oligonucleotide
gcggtaatgggccaccgcaaattattaagc

SEQ ID NO: 270142 - DNA, 30 bp, Artificial Sequence
  Synthetic oligonucleotide
cggggtctgaggcttgggcccaacttaagc

SEQ ID NO: 270143 - DNA, 30 bp, Artificial Sequence
  Synthetic oligonucleotide
tgagatggtccagttggacgtaggttaagc

SEQ ID NO: 270144 - DNA, 30 bp, Artificial Sequence
  Synthetic oligonucleotide
tttgcgccatagcttccgatgaatttaagc

SEQ ID NO: 270145 - DNA, 30 bp, Artificial Sequence
  Synthetic oligonucleotide
gtgataggaacgtctggtctatatttaagc

SEQ ID NO: 270146 - DNA, 30 bp, Artificial Sequence
  Synthetic oligonucleotide
gactatctataggtatgaaaggttttaagc

SEQ ID NO: 270147 - DNA, 30 bp, Artificial Sequence
  Synthetic oligonucleotide
gtgtcgagtatgcataagtaatttttaagc

SEQ ID NO: 270148 - DNA, 30 bp, Artificial Sequence
  Synthetic oligonucleotide
ggagagacctctgagtgttccttaaacagc

SEQ ID NO: 270149 - DNA, 30 bp, Artificial Sequence
  Synthetic oligonucleotide
gcagaccggtccggagcgtggtcgaacagc

SEQ ID NO: 270150 - DNA, 30 bp, Artificial Sequence
  Synthetic oligonucleotide
aagttcggggcgtaccctaataataacagc

SEQ ID NO: 270151 - DNA, 30 bp, Artificial Sequence
  Synthetic oligonucleotide
cccatgatgtatgatattatttctaacagc

SEQ ID NO: 270152 - DNA, 30 bp, Artificial Sequence
  Synthetic oligonucleotide
acggaacttcttccttactccgcacacagc

SEQ ID NO: 270153 - DNA, 30 bp, Artificial Sequence
  Synthetic oligonucleotide
gtcttctcttggttggttaatatacacagc

SEQ ID NO: 270154 - DNA, 30 bp, Artificial Sequence
  Synthetic oligonucleotide
caggaaccgtgtaccccaagcccgcacagc

SEQ ID NO: 270155 - DNA, 30 bp, Artificial Sequence
  Synthetic oligonucleotide
agtaagttcagcgagtcgtgcattcacagc

SEQ ID NO: 270156 - DNA, 30 bp, Artificial Sequence
  Synthetic oligonucleotide
gcacttgaggataccctccatattcacagc

SEQ ID NO: 270157 - DNA, 30 bp, Artificial Sequence
  Synthetic oligonucleotide
gagaattagctgggaggggacgttcacagc

SEQ ID NO: 270158 - DNA, 30 bp, Artificial Sequence
  Synthetic oligonucleotide
aacgccacaggaagggttgcataagacagc

SEQ ID NO: 270159 - DNA, 30 bp, Artificial Sequence
  Synthetic oligonucleotide
gattcggtatagatttaccgttaagacagc

SEQ ID NO: 270160 - DNA, 30 bp, Artificial Sequence
  Synthetic oligonucleotide
gatacagttgcgtggccagatgtcgacagc

SEQ ID NO: 270161 - DNA, 30 bp, Artificial Sequence
  Synthetic oligonucleotide
atgatccgcgaagtacgttctgctgacagc

SEQ ID NO: 270162 - DNA, 30 bp, Artificial Sequence
  Synthetic oligonucleotide
gtacatcatagttctatacaccactacagc

SEQ ID NO: 270163 - DNA, 30 bp, Artificial Sequence
  Synthetic oligonucleotide
tggagactcgaattaggtccttactacagc

SEQ ID NO: 270164 - DNA, 30 bp, Artificial Sequence
  Synthetic oligonucleotide
caatattggaactgcctgaagcgctacagc

SEQ ID NO: 270165 - DNA, 30 bp, Artificial Sequence
  Synthetic oligonucleotide
actaatgagggtcttgctaggacgtacagc

SEQ ID NO: 270166 - DNA, 30 bp, Artificial Sequence
  Synthetic oligonucleotide
ttcagcctttggcgggccgaggtgtacagc

SEQ ID NO: 270167 - DNA, 30 bp, Artificial Sequence
  Synthetic oligonucleotide
aagagaatgacttaaccgtgggtgtacagc

SEQ ID NO: 270168 - DNA, 30 bp, Artificial Sequence
  Synthetic oligonucleotide
gcctctagtaacagttacagcgtttacagc

SEQ ID NO: 270169 - DNA, 30 bp, Artificial Sequence
  Synthetic oligonucleotide
agttgaagagagcaggtaccccaaaccagc

SEQ ID NO: 270170 - DNA, 30 bp, Artificial Sequence
  Synthetic oligonucleotide
agctaggtagtttatagtgtataaaccagc

SEQ ID NO: 270171 - DNA, 30 bp, Artificial Sequence
  Synthetic oligonucleotide
cagtgttaaacaggtctggggcctaccagc

SEQ ID NO: 270172 - DNA, 30 bp, Artificial Sequence
  Synthetic oligonucleotide
agacaattcttgcgactatagtggcccagc

SEQ ID NO: 270173 - DNA, 30 bp, Artificial Sequence
  Synthetic oligonucleotide
gcggattagcccctctcacatggcgccagc

SEQ ID NO: 270174 - DNA, 30 bp, Artificial Sequence
  Synthetic oligonucleotide
cacatagtgcgtttgcccgaatgcgccagc

SEQ ID NO: 270175 - DNA, 30 bp, Artificial Sequence
  Synthetic oligonucleotide
aaaaaagccttgaggaccaggacggccagc

SEQ ID NO: 270176 - DNA, 30 bp, Artificial Sequence
  Synthetic oligonucleotide
agaaacaggcagtaggcgccatatgccagc

SEQ ID NO: 270177 - DNA, 30 bp, Artificial Sequence
  Synthetic oligonucleotide
attgagtccagatggttcaagggctccagc

SEQ ID NO: 270178 - DNA, 30 bp, Artificial Sequence
  Synthetic oligonucleotide
agagtaaaatttagtcggacacattccagc

SEQ ID NO: 270179 - DNA, 30 bp, Artificial Sequence
  Synthetic oligonucleotide
ccctatggaataaacttctctacgagcagc

SEQ ID NO: 270180 - DNA, 30 bp, Artificial Sequence
  Synthetic oligonucleotide
gcactaacagagctttcccaatggagcagc

SEQ ID NO: 270181 - DNA, 30 bp, Artificial Sequence
  Synthetic oligonucleotide
gtatgcaccgacagagcgtactgtcgcagc

SEQ ID NO: 270182 - DNA, 30 bp, Artificial Sequence
  Synthetic oligonucleotide
aagagtaaggtatgtcgtcgtgacggcagc

SEQ ID NO: 270183 - DNA, 30 bp, Artificial Sequence
  Synthetic oligonucleotide
cgccatctattcgttacactggccggcagc

SEQ ID NO: 270184 - DNA, 30 bp, Artificial Sequence
  Synthetic oligonucleotide
aaaaaatcttgaaccctaaggacgggcagc

SEQ ID NO: 270185 - DNA, 30 bp, Artificial Sequence
  Synthetic oligonucleotide
tgtgagtgtataaaggaggtcccgggcagc

SEQ ID NO: 270186 - DNA, 30 bp, Artificial Sequence
  Synthetic oligonucleotide
agtattagtgggggtatcacgaatggcagc

SEQ ID NO: 270187 - DNA, 30 bp, Artificial Sequence
  Synthetic oligonucleotide
atgctgtcaaggtggaagttccgtggcagc

SEQ ID NO: 270188 - DNA, 30 bp, Artificial Sequence
  Synthetic oligonucleotide
taattaatgtcagtcggggcaacctgcagc

SEQ ID NO: 270189 - DNA, 30 bp, Artificial Sequence
  Synthetic oligonucleotide
gtagttgtcagtaaattgcggtggtgcagc

SEQ ID NO: 270190 - DNA, 30 bp, Artificial Sequence
  Synthetic oligonucleotide
cctttacagacaaagacgaatgtttgcagc

SEQ ID NO: 270191 - DNA, 30 bp, Artificial Sequence
  Synthetic oligonucleotide
tgttaccaactacgatgtagacaaatcagc

SEQ ID NO: 270192 - DNA, 30 bp, Artificial Sequence
  Synthetic oligonucleotide
aaagagtttggtagaaacgtcagaatcagc

SEQ ID NO: 270193 - DNA, 30 bp, Artificial Sequence
  Synthetic oligonucleotide
ggtacaacgtatcatgccatgcacatcagc

SEQ ID NO: 270194 - DNA, 30 bp, Artificial Sequence
  Synthetic oligonucleotide
cggtcagttgtggttatggctactatcagc

SEQ ID NO: 270195 - DNA, 30 bp, Artificial Sequence
  Synthetic oligonucleotide
ccacttggacttatccttgcgtctatcagc

SEQ ID NO: 270196 - DNA, 30 bp, Artificial Sequence
  Synthetic oligonucleotide
ggttgaagtggaagcctcctctttatcagc

SEQ ID NO: 270197 - DNA, 30 bp, Artificial Sequence
  Synthetic oligonucleotide
gcctagtccggaaggagtgaattactcagc

SEQ ID NO: 270198 - DNA, 30 bp, Artificial Sequence
  Synthetic oligonucleotide
ctatcacggggccaactagagcagctcagc

SEQ ID NO: 270199 - DNA, 30 bp, Artificial Sequence
  Synthetic oligonucleotide
agtaaacaagcggcacgagtaggtctcagc

SEQ ID NO: 270200 - DNA, 30 bp, Artificial Sequence
  Synthetic oligonucleotide
cgagtttcataatttgtcatgggtctcagc

SEQ ID NO: 270201 - DNA, 30 bp, Artificial Sequence
  Synthetic oligonucleotide
gggtgaagcgtggaaacagcttgtctcagc

SEQ ID NO: 270202 - DNA, 30 bp, Artificial Sequence
  Synthetic oligonucleotide
aaataactccatacgtcgttacttctcagc

SEQ ID NO: 270203 - DNA, 30 bp, Artificial Sequence
  Synthetic oligonucleotide
caaccaggtgcgacaggacgcatagtcagc

SEQ ID NO: 270204 - DNA, 30 bp, Artificial Sequence
  Synthetic oligonucleotide
ataagcttgtgtgatcgtcggtcggtcagc

SEQ ID NO: 270205 - DNA, 30 bp, Artificial Sequence
  Synthetic oligonucleotide
ctaaccggtacatatgctattagtgtcagc

SEQ ID NO: 270206 - DNA, 30 bp, Artificial Sequence
  Synthetic oligonucleotide
ttaagggaagtaacgtgcatcttgttcagc

SEQ ID NO: 270207 - DNA, 30 bp, Artificial Sequence
  Synthetic oligonucleotide
ttagctcagtctcataattaagatttcagc

SEQ ID NO: 270208 - DNA, 30 bp, Artificial Sequence
  Synthetic oligonucleotide
ttaaaataagcggtatacggcgcaaagagc

SEQ ID NO: 270209 - DNA, 30 bp, Artificial Sequence
  Synthetic oligonucleotide
aggatgtcctcatcggcggtcgtaaagagc

SEQ ID NO: 270210 - DNA, 30 bp, Artificial Sequence
  Synthetic oligonucleotide
gcatgggtgacaacgtttagcgccaagagc

SEQ ID NO: 270211 - DNA, 30 bp, Artificial Sequence
  Synthetic oligonucleotide
ctgtaagtacttcttatatgctgcaagagc

SEQ ID NO: 270212 - DNA, 30 bp, Artificial Sequence
  Synthetic oligonucleotide
cgtttgataagctcttaataaacgaagagc

SEQ ID NO: 270213 - DNA, 30 bp, Artificial Sequence
  Synthetic oligonucleotide
gaatgctagggccaatccatgacacagagc

SEQ ID NO: 270214 - DNA, 30 bp, Artificial Sequence
  Synthetic oligonucleotide
atgggtacacagtgaagtgttcgacagagc

SEQ ID NO: 270215 - DNA, 30 bp, Artificial Sequence
  Synthetic oligonucleotide
gaagtaaatggcggtggggtctgacagagc

SEQ ID NO: 270216 - DNA, 30 bp, Artificial Sequence
  Synthetic oligonucleotide
cgcggtataggttccattgaagatgagagc

SEQ ID NO: 270217 - DNA, 30 bp, Artificial Sequence
  Synthetic oligonucleotide
atggtttgcgtagtattttaacttgagagc

SEQ ID NO: 270218 - DNA, 30 bp, Artificial Sequence
  Synthetic oligonucleotide
aaggatcgtgtacccgatacctcatagagc

SEQ ID NO: 270219 - DNA, 30 bp, Artificial Sequence
  Synthetic oligonucleotide
ggggaataaatccagcaccggtggtagagc

SEQ ID NO: 270220 - DNA, 30 bp, Artificial Sequence
  Synthetic oligonucleotide
tgaagtcccaattataccggccattagagc

SEQ ID NO: 270221 - DNA, 30 bp, Artificial Sequence
  Synthetic oligonucleotide
cgacgttttatacgatttgtcaccacgagc

SEQ ID NO: 270222 - DNA, 30 bp, Artificial Sequence
  Synthetic oligonucleotide
gtagtactcacatctagctaaggcacgagc

SEQ ID NO: 270223 - DNA, 30 bp, Artificial Sequence
  Synthetic oligonucleotide
cctatcatattcgtgttagtgtgcacgagc

SEQ ID NO: 270224 - DNA, 30 bp, Artificial Sequence
  Synthetic oligonucleotide
atgccggttcgtatgccacggtctacgagc

SEQ ID NO: 270225 - DNA, 30 bp, Artificial Sequence
  Synthetic oligonucleotide
attcgtagagcatgccaagcctgtacgagc

SEQ ID NO: 270226 - DNA, 30 bp, Artificial Sequence
  Synthetic oligonucleotide
tcgtagggtggtctgatactgtcaccgagc

SEQ ID NO: 270227 - DNA, 30 bp, Artificial Sequence
  Synthetic oligonucleotide
gccgcccagttcgtggaagggttaccgagc

SEQ ID NO: 270228 - DNA, 30 bp, Artificial Sequence
  Synthetic oligonucleotide
acagcctgaaacgcgaataggccgccgagc

SEQ ID NO: 270229 - DNA, 30 bp, Artificial Sequence
  Synthetic oligonucleotide
atgagttagatcttctatggcgtgccgagc

SEQ ID NO: 270230 - DNA, 30 bp, Artificial Sequence
  Synthetic oligonucleotide
tgctggggcttgtttcctttgccagcgagc

SEQ ID NO: 270231 - DNA, 30 bp, Artificial Sequence
  Synthetic oligonucleotide
cccgaatcaatggttgcgttgttagcgagc

SEQ ID NO: 270232 - DNA, 30 bp, Artificial Sequence
  Synthetic oligonucleotide
tatagcttggggacgtgtcacaacgcgagc

SEQ ID NO: 270233 - DNA, 30 bp, Artificial Sequence
  Synthetic oligonucleotide
gaacgtagatgaagccaccgtaacgcgagc

SEQ ID NO: 270234 - DNA, 30 bp, Artificial Sequence
  Synthetic oligonucleotide
atttcgggcctcagatcgctcaatgcgagc

SEQ ID NO: 270235 - DNA, 30 bp, Artificial Sequence
  Synthetic oligonucleotide
gaaactaaggtgccggcttccatatcgagc

SEQ ID NO: 270236 - DNA, 30 bp, Artificial Sequence
  Synthetic oligonucleotide
gccacgcgactctcgcgacgtatctcgagc

SEQ ID NO: 270237 - DNA, 30 bp, Artificial Sequence
  Synthetic oligonucleotide
ggaaatgtagtcgcccctaccatgtcgagc

SEQ ID NO: 270238 - DNA, 30 bp, Artificial Sequence
  Synthetic oligonucleotide
gtgcacagaagaggtactccaaattcgagc

SEQ ID NO: 270239 - DNA, 30 bp, Artificial Sequence
  Synthetic oligonucleotide
gggagtgcctgttgcaaacgggtttcgagc

SEQ ID NO: 270240 - DNA, 30 bp, Artificial Sequence
  Synthetic oligonucleotide
accgcggatcaggccaagggacaaaggagc

SEQ ID NO: 270241 - DNA, 30 bp, Artificial Sequence
  Synthetic oligonucleotide
acgccttcgggacagatcagatacaggagc

SEQ ID NO: 270242 - DNA, 30 bp, Artificial Sequence
  Synthetic oligonucleotide
acaacgcaagtctatagcagcttcaggagc

SEQ ID NO: 270243 - DNA, 30 bp, Artificial Sequence
  Synthetic oligonucleotide
tagtagaaaagttagatatagggacggagc

SEQ ID NO: 270244 - DNA, 30 bp, Artificial Sequence
  Synthetic oligonucleotide
tagcactaaatttaacaagatgggcggagc

SEQ ID NO: 270245 - DNA, 30 bp, Artificial Sequence
  Synthetic oligonucleotide
gcctttcaagcctcgtgcttagttcggagc

SEQ ID NO: 270246 - DNA, 30 bp, Artificial Sequence
  Synthetic oligonucleotide
caggtcttcagacccgaattcaaagggagc

SEQ ID NO: 270247 - DNA, 30 bp, Artificial Sequence
  Synthetic oligonucleotide
agaattatcggagcgtcgtacttagggagc

SEQ ID NO: 270248 - DNA, 30 bp, Artificial Sequence
  Synthetic oligonucleotide
gcggatatggaccctgtccacctcgggagc

SEQ ID NO: 270249 - DNA, 30 bp, Artificial Sequence
  Synthetic oligonucleotide
agtttaaggggacttactatgactgggagc

SEQ ID NO: 270250 - DNA, 30 bp, Artificial Sequence
  Synthetic oligonucleotide
tccataagctgggattacgttgcctggagc

SEQ ID NO: 270251 - DNA, 30 bp, Artificial Sequence
  Synthetic oligonucleotide
agtcctcgagatagagcaaaccggtggagc

SEQ ID NO: 270252 - DNA, 30 bp, Artificial Sequence
  Synthetic oligonucleotide
tgcggggggagattactcttggtgtggagc

SEQ ID NO: 270253 - DNA, 30 bp, Artificial Sequence
  Synthetic oligonucleotide
gcagatctgtattttgcacgacgttggagc

SEQ ID NO: 270254 - DNA, 30 bp, Artificial Sequence
  Synthetic oligonucleotide
gttcgttaaaaagtttgacagctttggagc

SEQ ID NO: 270255 - DNA, 30 bp, Artificial Sequence
  Synthetic oligonucleotide
gaccagagctaatcgcttagtagaatgagc

SEQ ID NO: 270256 - DNA, 30 bp, Artificial Sequence
  Synthetic oligonucleotide
tccgcgagacgggggggttggggaatgagc

SEQ ID NO: 270257 - DNA, 30 bp, Artificial Sequence
  Synthetic oligonucleotide
aaagctctataagagttaggagacatgagc

SEQ ID NO: 270258 - DNA, 30 bp, Artificial Sequence
  Synthetic oligonucleotide
aatgccctctcttcagaaataatcatgagc

SEQ ID NO: 270259 - DNA, 30 bp, Artificial Sequence
  Synthetic oligonucleotide
aaacagggcccagacgattatccgatgagc

SEQ ID NO: 270260 - DNA, 30 bp, Artificial Sequence
  Synthetic oligonucleotide
tgattcccggtgcgttcgagtaggatgagc

SEQ ID NO: 270261 - DNA, 30 bp, Artificial Sequence
  Synthetic oligonucleotide
gtaagaaggtatttaatcattgggatgagc

SEQ ID NO: 270262 - DNA, 30 bp, Artificial Sequence
  Synthetic oligonucleotide
cgcaatccctaacagccaattaaactgagc

SEQ ID NO: 270263 - DNA, 30 bp, Artificial Sequence
  Synthetic oligonucleotide
taaggatcgtagatgcaactacgactgagc

SEQ ID NO: 270264 - DNA, 30 bp, Artificial Sequence
  Synthetic oligonucleotide
gtgattagaggtgtggtccggaccctgagc

SEQ ID NO: 270265 - DNA, 30 bp, Artificial Sequence
  Synthetic oligonucleotide
tgacacctccggccgcggccgtccctgagc

SEQ ID NO: 270266 - DNA, 30 bp, Artificial Sequence
  Synthetic oligonucleotide
aagtaagagaccctatcgtctgtcctgagc

SEQ ID NO: 270267 - DNA, 30 bp, Artificial Sequence
  Synthetic oligonucleotide
ccttcagcactaggcgcctcaccgctgagc

SEQ ID NO: 270268 - DNA, 30 bp, Artificial Sequence
  Synthetic oligonucleotide
ggattccggtcaggtatcgctccgctgagc

SEQ ID NO: 270269 - DNA, 30 bp, Artificial Sequence
  Synthetic oligonucleotide
ccagagcgttagtcgctgttctcgctgagc

SEQ ID NO: 270270 - DNA, 30 bp, Artificial Sequence
  Synthetic oligonucleotide
gctgaaagcagatgccttaggatgctgagc

SEQ ID NO: 270271 - DNA, 30 bp, Artificial Sequence
  Synthetic oligonucleotide
atctaggctaagaagtggttgaatctgagc

SEQ ID NO: 270272 - DNA, 30 bp, Artificial Sequence
  Synthetic oligonucleotide
gggtaggcgattcagggacaatctctgagc

SEQ ID NO: 270273 - DNA, 30 bp, Artificial Sequence
  Synthetic oligonucleotide
gaatcgggcatggttagatagttagtgagc

SEQ ID NO: 270274 - DNA, 30 bp, Artificial Sequence
  Synthetic oligonucleotide
cgtatcgacctaggtaaaatctaggtgagc

SEQ ID NO: 270275 - DNA, 30 bp, Artificial Sequence
  Synthetic oligonucleotide
cggcttatctgcagcgtgtggatggtgagc

SEQ ID NO: 270276 - DNA, 30 bp, Artificial Sequence
  Synthetic oligonucleotide
ggttctgagggtgtgggtcgggaattgagc

SEQ ID NO: 270277 - DNA, 30 bp, Artificial Sequence
  Synthetic oligonucleotide
ctcgaggtagattgattatttgacttgagc

SEQ ID NO: 270278 - DNA, 30 bp, Artificial Sequence
  Synthetic oligonucleotide
gaattgggggtgctgtgtggcgggttgagc

SEQ ID NO: 270279 - DNA, 30 bp, Artificial Sequence
  Synthetic oligonucleotide
cgctgtgtatctaacccaaaaagaaatagc

SEQ ID NO: 270280 - DNA, 30 bp, Artificial Sequence
  Synthetic oligonucleotide
cattaccgcatattaccccgaaacaatagc

SEQ ID NO: 270281 - DNA, 30 bp, Artificial Sequence
  Synthetic oligonucleotide
gcttggagttgaatcgcaagctccaatagc

SEQ ID NO: 270282 - DNA, 30 bp, Artificial Sequence
  Synthetic oligonucleotide
atgtctgtaagcgcgtggagaaagaatagc

SEQ ID NO: 270283 - DNA, 30 bp, Artificial Sequence
  Synthetic oligonucleotide
tggtaaaccaaagacgggctagctaatagc

SEQ ID NO: 270284 - DNA, 30 bp, Artificial Sequence
  Synthetic oligonucleotide
gaggctatgaaagaggtatggggtaatagc

SEQ ID NO: 270285 - DNA, 30 bp, Artificial Sequence
  Synthetic oligonucleotide
cagaacgagggtcaactcacttgacatagc

SEQ ID NO: 270286 - DNA, 30 bp, Artificial Sequence
  Synthetic oligonucleotide
gacagcacctccatttatcagctccatagc

SEQ ID NO: 270287 - DNA, 30 bp, Artificial Sequence
  Synthetic oligonucleotide
gcgatattttcagtgcaagtggagcatagc

SEQ ID NO: 270288 - DNA, 30 bp, Artificial Sequence
  Synthetic oligonucleotide
tagcgaaagctttgaactgaggtgcatagc

SEQ ID NO: 270289 - DNA, 30 bp, Artificial Sequence
  Synthetic oligonucleotide
ttgaccgctagatcctgcgttgtgcatagc

SEQ ID NO: 270290 - DNA, 30 bp, Artificial Sequence
  Synthetic oligonucleotide
ctctccctgtgcttaattcatgctcatagc

SEQ ID NO: 270291 - DNA, 30 bp, Artificial Sequence
  Synthetic oligonucleotide
tcaacagaagtctgcgcaagtgctcatagc

SEQ ID NO: 270292 - DNA, 30 bp, Artificial Sequence
  Synthetic oligonucleotide
gagtcaagatgccaacaaggcctagatagc

SEQ ID NO: 270293 - DNA, 30 bp, Artificial Sequence
  Synthetic oligonucleotide
cgacgcaatgggcggtggtggaacgatagc

SEQ ID NO: 270294 - DNA, 30 bp, Artificial Sequence
  Synthetic oligonucleotide
ttcacacccctaaagaccccgacggatagc

SEQ ID NO: 270295 - DNA, 30 bp, Artificial Sequence
  Synthetic oligonucleotide
tgacataggatccatattgtaaatgatagc

SEQ ID NO: 270296 - DNA, 30 bp, Artificial Sequence
  Synthetic oligonucleotide
tagcgcagcctaggccctacgcatgatagc

SEQ ID NO: 270297 - DNA, 30 bp, Artificial Sequence
  Synthetic oligonucleotide
gaaaagccttagtgtgatgtggcatatagc

SEQ ID NO: 270298 - DNA, 30 bp, Artificial Sequence
  Synthetic oligonucleotide
gtctgtgtccccaagattactagatatagc

SEQ ID NO: 270299 - DNA, 30 bp, Artificial Sequence
  Synthetic oligonucleotide
ataggactgtgcaggggctcatgatatagc

SEQ ID NO: 270300 - DNA, 30 bp, Artificial Sequence
  Synthetic oligonucleotide
acgggctccacggtgtgttgtaagtatagc

SEQ ID NO: 270301 - DNA, 30 bp, Artificial Sequence
  Synthetic oligonucleotide
gaagcggaacttcccggatcagggtatagc

SEQ ID NO: 270302 - DNA, 30 bp, Artificial Sequence
  Synthetic oligonucleotide
aaggctgatgtatcgtagccaatgtatagc

SEQ ID NO: 270303 - DNA, 30 bp, Artificial Sequence
  Synthetic oligonucleotide
cgagtcacttgctagatccacgaaactagc

SEQ ID NO: 270304 - DNA, 30 bp, Artificial Sequence
  Synthetic oligonucleotide
tctttaagtcatcgacggggcgaaactagc

SEQ ID NO: 270305 - DNA, 30 bp, Artificial Sequence
  Synthetic oligonucleotide
atctttcctaacaggattaagtcaactagc

SEQ ID NO: 270306 - DNA, 30 bp, Artificial Sequence
  Synthetic oligonucleotide
gccaaaatcagtgtgtatccgataactagc

SEQ ID NO: 270307 - DNA, 30 bp, Artificial Sequence
  Synthetic oligonucleotide
caaagttaagcggcttcaccacgcactagc

SEQ ID NO: 270308 - DNA, 30 bp, Artificial Sequence
  Synthetic oligonucleotide
acagattgtagcgttctatatgagactagc

SEQ ID NO: 270309 - DNA, 30 bp, Artificial Sequence
  Synthetic oligonucleotide
ggcacaatccaacatcgggtcaatactagc

SEQ ID NO: 270310 - DNA, 30 bp, Artificial Sequence
  Synthetic oligonucleotide
attcggggggcaggaggtgctagacctagc

SEQ ID NO: 270311 - DNA, 30 bp, Artificial Sequence
  Synthetic oligonucleotide
tatggtttcgatcggttagcccaccctagc

SEQ ID NO: 270312 - DNA, 30 bp, Artificial Sequence
  Synthetic oligonucleotide
aggcacgccggcgtgcggaaagaccctagc

SEQ ID NO: 270313 - DNA, 30 bp, Artificial Sequence
  Synthetic oligonucleotide
tacgaaccagccatctatgtaaggcctagc

SEQ ID NO: 270314 - DNA, 30 bp, Artificial Sequence
  Synthetic oligonucleotide
aagggggtcgtttccttcttgaaagctagc

SEQ ID NO: 270315 - DNA, 30 bp, Artificial Sequence
  Synthetic oligonucleotide
gtatcaaccgattgtccataacgcgctagc

SEQ ID NO: 270316 - DNA, 30 bp, Artificial Sequence
  Synthetic oligonucleotide
agctacaggtacgtttgtcaagaggctagc

SEQ ID NO: 270317 - DNA, 30 bp, Artificial Sequence
  Synthetic oligonucleotide
acacggcggagaatttttataagggctagc

SEQ ID NO: 270318 - DNA, 30 bp, Artificial Sequence
  Synthetic oligonucleotide
tatcagttagctcggaagtcggactctagc

SEQ ID NO: 270319 - DNA, 30 bp, Artificial Sequence
  Synthetic oligonucleotide
cccatgtcacggaggtaattcccgtctagc

SEQ ID NO: 270320 - DNA, 30 bp, Artificial Sequence
  Synthetic oligonucleotide
aatttgctcatgtcggtaatgccgtctagc

SEQ ID NO: 270321 - DNA, 30 bp, Artificial Sequence
  Synthetic oligonucleotide
tgtggctgtaagaaggaaagcaattctagc

SEQ ID NO: 270322 - DNA, 30 bp, Artificial Sequence
  Synthetic oligonucleotide
tgttagatgaagaccgggaggacttctagc

SEQ ID NO: 270323 - DNA, 30 bp, Artificial Sequence
  Synthetic oligonucleotide
cttataaaatctcaaattctggaaagtagc

SEQ ID NO: 270324 - DNA, 30 bp, Artificial Sequence
  Synthetic oligonucleotide
tacttccgataccattgcaagaatagtagc

SEQ ID NO: 270325 - DNA, 30 bp, Artificial Sequence
  Synthetic oligonucleotide
aaattacagtggatctggtcacatagtagc

SEQ ID NO: 270326 - DNA, 30 bp, Artificial Sequence
  Synthetic oligonucleotide
ttatagggtagtatccggatagatagtagc

SEQ ID NO: 270327 - DNA, 30 bp, Artificial Sequence
  Synthetic oligonucleotide
gaaacataagagatatgacaagcacgtagc

SEQ ID NO: 270328 - DNA, 30 bp, Artificial Sequence
  Synthetic oligonucleotide
aggaagctcgtgccggccttgttccgtagc

SEQ ID NO: 270329 - DNA, 30 bp, Artificial Sequence
  Synthetic oligonucleotide
acgcctaggttacggcggggagttcgtagc

SEQ ID NO: 270330 - DNA, 30 bp, Artificial Sequence
  Synthetic oligonucleotide
tacgcggttgtatctatccctacaggtagc

SEQ ID NO: 270331 - DNA, 30 bp, Artificial Sequence
  Synthetic oligonucleotide
gtacgcattcaggcacatttggacggtagc

SEQ ID NO: 270332 - DNA, 30 bp, Artificial Sequence
  Synthetic oligonucleotide
actgactcgggttgaatggtcctcggtagc

SEQ ID NO: 270333 - DNA, 30 bp, Artificial Sequence
  Synthetic oligonucleotide
gcctggtaagactcgcgcgcccatggtagc

SEQ ID NO: 270334 - DNA, 30 bp, Artificial Sequence
  Synthetic oligonucleotide
atctgatcaacctggtaacgacgatgtagc

SEQ ID NO: 270335 - DNA, 30 bp, Artificial Sequence
  Synthetic oligonucleotide
tccaagaatgccttttatggcctatgtagc

SEQ ID NO: 270336 - DNA, 30 bp, Artificial Sequence
  Synthetic oligonucleotide
atgcggttgtgccattcgctcaggtgtagc

SEQ ID NO: 270337 - DNA, 30 bp, Artificial Sequence
  Synthetic oligonucleotide
ataacaggcgggagtgcttgcgattgtagc

SEQ ID NO: 270338 - DNA, 30 bp, Artificial Sequence
  Synthetic oligonucleotide
cctgctaggtagcactggttgacaattagc

SEQ ID NO: 270339 - DNA, 30 bp, Artificial Sequence
  Synthetic oligonucleotide
ccacggccgaagattctaggggcaattagc

SEQ ID NO: 270340 - DNA, 30 bp, Artificial Sequence
  Synthetic oligonucleotide
gcgccttagggcggccaacgtggaattagc

SEQ ID NO: 270341 - DNA, 30 bp, Artificial Sequence
  Synthetic oligonucleotide
agacttgtaagtgttcgggcatatattagc

SEQ ID NO: 270342 - DNA, 30 bp, Artificial Sequence
  Synthetic oligonucleotide
tccgaacatgaccctgcccgtctacttagc

SEQ ID NO: 270343 - DNA, 30 bp, Artificial Sequence
  Synthetic oligonucleotide
ctgcccgtataccattacggtaatcttagc

SEQ ID NO: 270344 - DNA, 30 bp, Artificial Sequence
  Synthetic oligonucleotide
tcatcagtatatagcactgcaagtcttagc

SEQ ID NO: 270345 - DNA, 30 bp, Artificial Sequence
  Synthetic oligonucleotide
tctaaactaggaatggtcaaagtagttagc

SEQ ID NO: 270346 - DNA, 30 bp, Artificial Sequence
  Synthetic oligonucleotide
atggaagctaacgattgtcggacggttagc

SEQ ID NO: 270347 - DNA, 30 bp, Artificial Sequence
  Synthetic oligonucleotide
gagtcaaaatgtcaaaagcggcaatttagc

SEQ ID NO: 270348 - DNA, 30 bp, Artificial Sequence
  Synthetic oligonucleotide
cacatgggaggcagaagttagcgctttagc

SEQ ID NO: 270349 - DNA, 30 bp, Artificial Sequence
  Synthetic oligonucleotide
aggacacccctgtaatcggatgggtttagc

SEQ ID NO: 270350 - DNA, 30 bp, Artificial Sequence
  Synthetic oligonucleotide
aaacgagcaactatggctgaaatgtttagc

SEQ ID NO: 270351 - DNA, 30 bp, Artificial Sequence
  Synthetic oligonucleotide
tggtagagcgccgcatgtaccatgtttagc

SEQ ID NO: 270352 - DNA, 30 bp, Artificial Sequence
  Synthetic oligonucleotide
gtcttgggtcacaggaagcatctgtttagc

SEQ ID NO: 270353 - DNA, 30 bp, Artificial Sequence
  Synthetic oligonucleotide
gcgtacacgataggactctgccggaaacgc

SEQ ID NO: 270354 - DNA, 30 bp, Artificial Sequence
  Synthetic oligonucleotide
cgcatataaacataatcggaaggtaaacgc

SEQ ID NO: 270355 - DNA, 30 bp, Artificial Sequence
  Synthetic oligonucleotide
agactattggccacccgcttagttaaacgc

SEQ ID NO: 270356 - DNA, 30 bp, Artificial Sequence
  Synthetic oligonucleotide
atgcctatcctaactttgacttaacaacgc

SEQ ID NO: 270357 - DNA, 30 bp, Artificial Sequence
  Synthetic oligonucleotide
cgcctcttctccaagaaatggcatcaacgc

SEQ ID NO: 270358 - DNA, 30 bp, Artificial Sequence
  Synthetic oligonucleotide
tacattcatctccagtgtatgcaagaacgc

SEQ ID NO: 270359 - DNA, 30 bp, Artificial Sequence
  Synthetic oligonucleotide
agcttgccatcaatccgacatgtagaacgc

SEQ ID NO: 270360 - DNA, 30 bp, Artificial Sequence
  Synthetic oligonucleotide
ctataacactcatagatggcgccggaacgc

SEQ ID NO: 270361 - DNA, 30 bp, Artificial Sequence
  Synthetic oligonucleotide
tcatgcgagggagcttagtatgaataacgc

SEQ ID NO: 270362 - DNA, 30 bp, Artificial Sequence
  Synthetic oligonucleotide
atattttgaatgttgggttcatgataacgc

SEQ ID NO: 270363 - DNA, 30 bp, Artificial Sequence
  Synthetic oligonucleotide
gctccccaacggaaacgtgtactctaacgc

SEQ ID NO: 270364 - DNA, 30 bp, Artificial Sequence
  Synthetic oligonucleotide
cattgtgcgctcgcgtgggtatattaacgc

SEQ ID NO: 270365 - DNA, 30 bp, Artificial Sequence
  Synthetic oligonucleotide
agcccagggctccgaaaattcagaacacgc

SEQ ID NO: 270366 - DNA, 30 bp, Artificial Sequence
  Synthetic oligonucleotide
tgtccaggaactaccacggtttctacacgc

SEQ ID NO: 270367 - DNA, 30 bp, Artificial Sequence
  Synthetic oligonucleotide
cgtcataactccactgttctctgaccacgc

SEQ ID NO: 270368 - DNA, 30 bp, Artificial Sequence
  Synthetic oligonucleotide
acgtgctcaggagtcctttcacagccacgc

SEQ ID NO: 270369 - DNA, 30 bp, Artificial Sequence
  Synthetic oligonucleotide
ctacgagatcagaaatgggtttaggcacgc

SEQ ID NO: 270370 - DNA, 30 bp, Artificial Sequence
  Synthetic oligonucleotide
catatggtcgtaaatataaccacggcacgc

SEQ ID NO: 270371 - DNA, 30 bp, Artificial Sequence
  Synthetic oligonucleotide
ggctctgcaaggccttagcagatggcacgc

SEQ ID NO: 270372 - DNA, 30 bp, Artificial Sequence
  Synthetic oligonucleotide
caaggtacggggtatgaacaggctgcacgc

SEQ ID NO: 270373 - DNA, 30 bp, Artificial Sequence
  Synthetic oligonucleotide
ttgcacggcatactacggtacggatcacgc

SEQ ID NO: 270374 - DNA, 30 bp, Artificial Sequence
  Synthetic oligonucleotide
ccaccgcgtgctgtgagaggatgatcacgc

SEQ ID NO: 270375 - DNA, 30 bp, Artificial Sequence
  Synthetic oligonucleotide
tcctagcactttttagttacgttctcacgc

SEQ ID NO: 270376 - DNA, 30 bp, Artificial Sequence
  Synthetic oligonucleotide
gtcaacttcaaagcgtcaaaaatcagacgc

SEQ ID NO: 270377 - DNA, 30 bp, Artificial Sequence
  Synthetic oligonucleotide
tggaaacacaagaccattgacctcagacgc

SEQ ID NO: 270378 - DNA, 30 bp, Artificial Sequence
  Synthetic oligonucleotide
tgaggaagcgtttagacggaagtacgacgc

SEQ ID NO: 270379 - DNA, 30 bp, Artificial Sequence
  Synthetic oligonucleotide
agatagtgcaaaatatcgactgcccgacgc

SEQ ID NO: 270380 - DNA, 30 bp, Artificial Sequence
  Synthetic oligonucleotide
tgagacactgtacggatcgcgatgcgacgc

SEQ ID NO: 270381 - DNA, 31 bp, Artificial Sequence
  Synthetic oligonucleotide
tacagaattgtacagtccttgaagaggacgc

SEQ ID NO: 270382 - DNA, 30 bp, Artificial Sequence
  Synthetic oligonucleotide
acccaggggatgcggcgagcctgaggacgc

SEQ ID NO: 270383 - DNA, 30 bp, Artificial Sequence
  Synthetic oligonucleotide
ttggccctgccgttgacatgtaaaatacgc

SEQ ID NO: 270384 - DNA, 30 bp, Artificial Sequence
  Synthetic oligonucleotide
gagaagccaacgaaatcatcgtaaatacgc

SEQ ID NO: 270385 - DNA, 30 bp, Artificial Sequence
  Synthetic oligonucleotide
gagttacgtagaccatactttcccatacgc

SEQ ID NO: 270386 - DNA, 30 bp, Artificial Sequence
  Synthetic oligonucleotide
cgtaagataagacgcatgctctagatacgc

SEQ ID NO: 270387 - DNA, 30 bp, Artificial Sequence
  Synthetic oligonucleotide
ccgtcgccgtcttaaagactgcgtatacgc

SEQ ID NO: 270388 - DNA, 30 bp, Artificial Sequence
  Synthetic oligonucleotide
caaatgtggctgccgaccggagtactacgc

SEQ ID NO: 270389 - DNA, 30 bp, Artificial Sequence
  Synthetic oligonucleotide
ccgcggagagatgagatgtgtgagctacgc

SEQ ID NO: 270390 - DNA, 30 bp, Artificial Sequence
  Synthetic oligonucleotide
ctaatggcgggctcaaagtagtcgctacgc

SEQ ID NO: 270391 - DNA, 30 bp, Artificial Sequence
  Synthetic oligonucleotide
cgtagtgacaaggaatccttccggctacgc

SEQ ID NO: 270392 - DNA, 30 bp, Artificial Sequence
  Synthetic oligonucleotide
cgtggcaaggttccctgagattttctacgc

SEQ ID NO: 270393 - DNA, 30 bp, Artificial Sequence
  Synthetic oligonucleotide
aggggagagctagcagactacgcagtacgc

SEQ ID NO: 270394 - DNA, 30 bp, Artificial Sequence
  Synthetic oligonucleotide
aactcaatatgatcatcacgaggagtacgc

SEQ ID NO: 270395 - DNA, 30 bp, Artificial Sequence
  Synthetic oligonucleotide
tacgtgaggggtggttagggcaaggtacgc

SEQ ID NO: 270396 - DNA, 30 bp, Artificial Sequence
  Synthetic oligonucleotide
aatccaacggcaatataccagttggtacgc

SEQ ID NO: 270397 - DNA, 29 bp, Artificial Sequence
  Synthetic oligonucleotide
gactgtgcctcaagcggcaaaatgtacgc

SEQ ID NO: 270398 - DNA, 30 bp, Artificial Sequence
  Synthetic oligonucleotide
tcaaccctaacgcgaaagtaacatgtacgc

SEQ ID NO: 270399 - DNA, 30 bp, Artificial Sequence
  Synthetic oligonucleotide
gttgcaccaactaagctagtgcaattacgc

SEQ ID NO: 270400 - DNA, 30 bp, Artificial Sequence
  Synthetic oligonucleotide
tcaaaatatactttgtagacgtacttacgc

SEQ ID NO: 270401 - DNA, 30 bp, Artificial Sequence
  Synthetic oligonucleotide
cctgtggcaagaacaaggtccccaaaccgc

SEQ ID NO: 270402 - DNA, 30 bp, Artificial Sequence
  Synthetic oligonucleotide
tcggcgttacctaacaactgttcaaaccgc

SEQ ID NO: 270403 - DNA, 30 bp, Artificial Sequence
  Synthetic oligonucleotide
gaaacgtagcgcgataatagtcgaaaccgc

SEQ ID NO: 270404 - DNA, 30 bp, Artificial Sequence
  Synthetic oligonucleotide
agactaggggaaagggtcttcctaaaccgc

SEQ ID NO: 270405 - DNA, 30 bp, Artificial Sequence
  Synthetic oligonucleotide
accaagggaggtgaacatattttaaaccgc

SEQ ID NO: 270406 - DNA, 30 bp, Artificial Sequence
  Synthetic oligonucleotide
tgaagggccaccgtcgggagactcaaccgc

SEQ ID NO: 270407 - DNA, 30 bp, Artificial Sequence
  Synthetic oligonucleotide
gatcgccagcagcaaactcaaaggaaccgc

SEQ ID NO: 270408 - DNA, 30 bp, Artificial Sequence
  Synthetic oligonucleotide
tctggtcctccatcggagtgtggacaccgc

SEQ ID NO: 270409 - DNA, 30 bp, Artificial Sequence
  Synthetic oligonucleotide
tcgttacaagaatttttaatactccaccgc

SEQ ID NO: 270410 - DNA, 30 bp, Artificial Sequence
  Synthetic oligonucleotide
tctcaaacggtatttgctaaataagaccgc

SEQ ID NO: 270411 - DNA, 30 bp, Artificial Sequence
  Synthetic oligonucleotide
acgagggttagcatcgtctagaacgaccgc

SEQ ID NO: 270412 - DNA, 30 bp, Artificial Sequence
  Synthetic oligonucleotide
gaatgtatacctttgttcgcggacgaccgc

SEQ ID NO: 270413 - DNA, 30 bp, Artificial Sequence
  Synthetic oligonucleotide
cgtgagtgacgtcattggataagctaccgc

SEQ ID NO: 270414 - DNA, 30 bp, Artificial Sequence
  Synthetic oligonucleotide
gcgctatttgagggatcttaatagtaccgc

SEQ ID NO: 270415 - DNA, 30 bp, Artificial Sequence
  Synthetic oligonucleotide
acgtacaggcaaagcggggaagcgacccgc

SEQ ID NO: 270416 - DNA, 30 bp, Artificial Sequence
  Synthetic oligonucleotide
cgacacccaaatggaggacgtgtgacccgc

SEQ ID NO: 270417 - DNA, 30 bp, Artificial Sequence
  Synthetic oligonucleotide
tacaggtgtgctactgaaaggccaccccgc

SEQ ID NO: 270418 - DNA, 30 bp, Artificial Sequence
  Synthetic oligonucleotide
tcccactggtgattctaggatcctccccgc

SEQ ID NO: 270419 - DNA, 30 bp, Artificial Sequence
  Synthetic oligonucleotide
agcgagaggcagatattcaaggttccccgc

SEQ ID NO: 270420 - DNA, 30 bp, Artificial Sequence
  Synthetic oligonucleotide
tttaatcagaattcccccgctggggcccgc

SEQ ID NO: 270421 - DNA, 30 bp, Artificial Sequence
  Synthetic oligonucleotide
cagatggctgactgtaaacgaactgcccgc

SEQ ID NO: 270422 - DNA, 30 bp, Artificial Sequence
  Synthetic oligonucleotide
aaccccagtttgacactacatagcagccgc

SEQ ID NO: 270423 - DNA, 30 bp, Artificial Sequence
  Synthetic oligonucleotide
tcttatggacatgggctgtaatgcagccgc

SEQ ID NO: 270424 - DNA, 30 bp, Artificial Sequence
  Synthetic oligonucleotide
acgggggataacggccggcggaagagccgc

SEQ ID NO: 270425 - DNA, 30 bp, Artificial Sequence
  Synthetic oligonucleotide
ttagaataatcgaatccattgcctagccgc

SEQ ID NO: 270426 - DNA, 30 bp, Artificial Sequence
  Synthetic oligonucleotide
taactagtagaaacatgccgcatccgccgc

SEQ ID NO: 270427 - DNA, 30 bp, Artificial Sequence
  Synthetic oligonucleotide
gtagtattcggtaacgaacctatccgccgc

SEQ ID NO: 270428 - DNA, 30 bp, Artificial Sequence
  Synthetic oligonucleotide
taagactcagttggcgtgacggctcgccgc

SEQ ID NO: 270429 - DNA, 30 bp, Artificial Sequence
  Synthetic oligonucleotide
attacaggctcgtatcaggacgttcgccgc

SEQ ID NO: 270430 - DNA, 30 bp, Artificial Sequence
  Synthetic oligonucleotide
ctcacggggaatcgtgaaagcgtcggccgc

SEQ ID NO: 270431 - DNA, 30 bp, Artificial Sequence
  Synthetic oligonucleotide
ttggcagatataaagaccgaaactggccgc

SEQ ID NO: 270432 - DNA, 30 bp, Artificial Sequence
  Synthetic oligonucleotide
cgagcctccgatgccatggcatactgccgc

SEQ ID NO: 270433 - DNA, 30 bp, Artificial Sequence
  Synthetic oligonucleotide
aaaatggcgtattgtgaagaagtttgccgc

SEQ ID NO: 270434 - DNA, 30 bp, Artificial Sequence
  Synthetic oligonucleotide
gcgtagactctcccctaggtaccaatccgc

SEQ ID NO: 270435 - DNA, 30 bp, Artificial Sequence
  Synthetic oligonucleotide
actaacgtgaggccgttctgcagaatccgc

SEQ ID NO: 270436 - DNA, 30 bp, Artificial Sequence
  Synthetic oligonucleotide
tcggacgcgggtaattcagccataatccgc

SEQ ID NO: 270437 - DNA, 30 bp, Artificial Sequence
  Synthetic oligonucleotide
gagaataaaataggtaatagggtaatccgc

SEQ ID NO: 270438 - DNA, 30 bp, Artificial Sequence
  Synthetic oligonucleotide
gatgcagggtttacccatcgggacatccgc

SEQ ID NO: 270439 - DNA, 30 bp, Artificial Sequence
  Synthetic oligonucleotide
aacgatgctcgaacccttgacttgatccgc

SEQ ID NO: 270440 - DNA, 30 bp, Artificial Sequence
  Synthetic oligonucleotide
gaacgggacgcaatagctactcatatccgc

SEQ ID NO: 270441 - DNA, 30 bp, Artificial Sequence
  Synthetic oligonucleotide
gacgaggatggatatatatatattatccgc

SEQ ID NO: 270442 - DNA, 30 bp, Artificial Sequence
  Synthetic oligonucleotide
gcaaggaggggttagactcgagttatccgc

SEQ ID NO: 270443 - DNA, 30 bp, Artificial Sequence
  Synthetic oligonucleotide
gaaggtggcggtgttgtctcccaactccgc

SEQ ID NO: 270444 - DNA, 30 bp, Artificial Sequence
  Synthetic oligonucleotide
ttaccttgcggacttctcaacggactccgc

SEQ ID NO: 270445 - DNA, 30 bp, Artificial Sequence
  Synthetic oligonucleotide
gtagatcatacccaaagacttcccctccgc

SEQ ID NO: 270446 - DNA, 30 bp, Artificial Sequence
  Synthetic oligonucleotide
tctgcgccaaatcggccatcgggagtccgc

SEQ ID NO: 270447 - DNA, 30 bp, Artificial Sequence
  Synthetic oligonucleotide
tgtaggcgggaaccaatctcacgcgtccgc

SEQ ID NO: 270448 - DNA, 30 bp, Artificial Sequence
  Synthetic oligonucleotide
ggaccggaaatctacatgacctgggtccgc

SEQ ID NO: 270449 - DNA, 30 bp, Artificial Sequence
  Synthetic oligonucleotide
atttgagagtttaacgtcaagcatgtccgc

SEQ ID NO: 270450 - DNA, 30 bp, Artificial Sequence
  Synthetic oligonucleotide
gggtcgtaaagtttttgttgtatcttccgc

SEQ ID NO: 270451 - DNA, 30 bp, Artificial Sequence
  Synthetic oligonucleotide
tgattttggttgtggcggcatttgttccgc

SEQ ID NO: 270452 - DNA, 30 bp, Artificial Sequence
  Synthetic oligonucleotide
attgatggaagcgacccagaacatttccgc

SEQ ID NO: 270453 - DNA, 30 bp, Artificial Sequence
  Synthetic oligonucleotide
agcatttaagggcttagtaaaggtttccgc

SEQ ID NO: 270454 - DNA, 30 bp, Artificial Sequence
  Synthetic oligonucleotide
atggagtctacgggcttttacgccaagcgc

SEQ ID NO: 270455 - DNA, 29 bp, Artificial Sequence
  Synthetic oligonucleotide
tagactagtcaatggtcggacgtaagcgc

SEQ ID NO: 270456 - DNA, 30 bp, Artificial Sequence
  Synthetic oligonucleotide
ctagaaacacgtgttctcttacgtaagcgc

SEQ ID NO: 270457 - DNA, 30 bp, Artificial Sequence
  Synthetic oligonucleotide
caggaagatctctcattcctgcaacagcgc

SEQ ID NO: 270458 - DNA, 30 bp, Artificial Sequence
  Synthetic oligonucleotide
agtcacactgcagccttcagcggacagcgc

SEQ ID NO: 270459 - DNA, 30 bp, Artificial Sequence
  Synthetic oligonucleotide
gacgtccgtgcggtctaaacgtgtcagcgc

SEQ ID NO: 270460 - DNA, 30 bp, Artificial Sequence
  Synthetic oligonucleotide
ggccagaaacgtttgtggggaattcagcgc

SEQ ID NO: 270461 - DNA, 30 bp, Artificial Sequence
  Synthetic oligonucleotide
acaagacttgttttaacgtctatagagcgc

SEQ ID NO: 270462 - DNA, 30 bp, Artificial Sequence
  Synthetic oligonucleotide
aactagctcatactcgagtacagcgagcgc

SEQ ID NO: 270463 - DNA, 30 bp, Artificial Sequence
  Synthetic oligonucleotide
atagtatactagggaatccaaatcgagcgc

SEQ ID NO: 270464 - DNA, 30 bp, Artificial Sequence
  Synthetic oligonucleotide
ttatcgggagtcaccggcgagctatagcgc

SEQ ID NO: 270465 - DNA, 30 bp, Artificial Sequence
  Synthetic oligonucleotide
tcgttatcctccgaacagtccacctagcgc

SEQ ID NO: 270466 - DNA, 30 bp, Artificial Sequence
  Synthetic oligonucleotide
tatcctcacatcgctgttgacccttagcgc

SEQ ID NO: 270467 - DNA, 30 bp, Artificial Sequence
  Synthetic oligonucleotide
gttttaggctaacttacgagaaacacgcgc

SEQ ID NO: 270468 - DNA, 30 bp, Artificial Sequence
  Synthetic oligonucleotide
cgtggtacgggtgtgtcgataaggacgcgc

SEQ ID NO: 270469 - DNA, 30 bp, Artificial Sequence
  Synthetic oligonucleotide
ggacgtttccggcgtgtaaccgtaccgcgc

SEQ ID NO: 270470 - DNA, 30 bp, Artificial Sequence
  Synthetic oligonucleotide
ccgtttgcagggggttgataacagccgcgc

SEQ ID NO: 270471 - DNA, 30 bp, Artificial Sequence
  Synthetic oligonucleotide
acacacataattgtcttcgcattgccgcgc

SEQ ID NO: 270472 - DNA, 30 bp, Artificial Sequence
  Synthetic oligonucleotide
attcggggactatgatggtcacctccgcgc

SEQ ID NO: 270473 - DNA, 30 bp, Artificial Sequence
  Synthetic oligonucleotide
tcgcctgggtcacacagatttagagcgcgc

SEQ ID NO: 270474 - DNA, 30 bp, Artificial Sequence
  Synthetic oligonucleotide
cccgtcgtccgaactgatcgggtggcgcgc

SEQ ID NO: 270475 - DNA, 30 bp, Artificial Sequence
  Synthetic oligonucleotide
catttaaatcgatgtgcacgtatctcgcgc

SEQ ID NO: 270476 - DNA, 30 bp, Artificial Sequence
  Synthetic oligonucleotide
tgtacggtcaaatctagtgcacagtcgcgc

SEQ ID NO: 270477 - DNA, 30 bp, Artificial Sequence
  Synthetic oligonucleotide
ctccgatagcggtgggaataaggaaggcgc

SEQ ID NO: 270478 - DNA, 30 bp, Artificial Sequence
  Synthetic oligonucleotide
gtggatcagaacagttgcgcgaagaggcgc

SEQ ID NO: 270479 - DNA, 30 bp, Artificial Sequence
  Synthetic oligonucleotide
gtcagtctcataatactaagagagaggcgc

SEQ ID NO: 270480 - DNA, 30 bp, Artificial Sequence
  Synthetic oligonucleotide
gtatcaaggccacggccgactcaccggcgc

SEQ ID NO: 270481 - DNA, 30 bp, Artificial Sequence
  Synthetic oligonucleotide
ggcatctaataaacccactataagcggcgc

SEQ ID NO: 270482 - DNA, 30 bp, Artificial Sequence
  Synthetic oligonucleotide
tcatatgtcaagcggagcatgcagcggcgc

SEQ ID NO: 270483 - DNA, 30 bp, Artificial Sequence
  Synthetic oligonucleotide
acgggacacctgacaaatcgagagcggcgc

SEQ ID NO: 270484 - DNA, 30 bp, Artificial Sequence
  Synthetic oligonucleotide
gcaaagacagccgaataaccggatcggcgc

SEQ ID NO: 270485 - DNA, 30 bp, Artificial Sequence
  Synthetic oligonucleotide
ttacacctcgctgggtacttaccagggcgc

SEQ ID NO: 270486 - DNA, 30 bp, Artificial Sequence
  Synthetic oligonucleotide
tcaccggccgataaagctcaacaggggcgc

SEQ ID NO: 270487 - DNA, 30 bp, Artificial Sequence
  Synthetic oligonucleotide
acggaaggatctgatgccctgtcggggcgc

SEQ ID NO: 270488 - DNA, 30 bp, Artificial Sequence
  Synthetic oligonucleotide
gattgttagcgtagttctgaccgtgggcgc

SEQ ID NO: 270489 - DNA, 30 bp, Artificial Sequence
  Synthetic oligonucleotide
tgcgcttgcaatctcgaacttacatggcgc

SEQ ID NO: 270490 - DNA, 30 bp, Artificial Sequence
  Synthetic oligonucleotide
gtaacatgtccggatacggagaactggcgc

SEQ ID NO: 270491 - DNA, 30 bp, Artificial Sequence
  Synthetic oligonucleotide
gtgggcacgtctcggacgggaggttggcgc

SEQ ID NO: 270492 - DNA, 30 bp, Artificial Sequence
  Synthetic oligonucleotide
gagcagctctttagaagtgccataatgcgc

SEQ ID NO: 270493 - DNA, 30 bp, Artificial Sequence
  Synthetic oligonucleotide
cgtgatctgcacaggcaatgattaatgcgc

SEQ ID NO: 270494 - DNA, 30 bp, Artificial Sequence
  Synthetic oligonucleotide
tgatgaccgtccctattttgcttcatgcgc

SEQ ID NO: 270495 - DNA, 30 bp, Artificial Sequence
  Synthetic oligonucleotide
tgaccagccgctagaggtgattggatgcgc

SEQ ID NO: 270496 - DNA, 30 bp, Artificial Sequence
  Synthetic oligonucleotide
acgggttcgacacacaccttaaatatgcgc

SEQ ID NO: 270497 - DNA, 30 bp, Artificial Sequence
  Synthetic oligonucleotide
tgcgaagaatttcattttgcatttatgcgc

SEQ ID NO: 270498 - DNA, 30 bp, Artificial Sequence
  Synthetic oligonucleotide
tgtaccggcagtcaggcattaagactgcgc

SEQ ID NO: 270499 - DNA, 30 bp, Artificial Sequence
  Synthetic oligonucleotide
gcttagtggtctgtacttgtcggtctgcgc

SEQ ID NO: 270500 - DNA, 29 bp, Artificial Sequence
  Synthetic oligonucleotide
atacggacaggggtagttggaacgtgcgc

SEQ ID NO: 270501 - DNA, 30 bp, Artificial Sequence
  Synthetic oligonucleotide
caagactataatacagtttatcatgtgcgc

SEQ ID NO: 270502 - DNA, 30 bp, Artificial Sequence
  Synthetic oligonucleotide
ggtctaagataagagtgacaaggattgcgc

SEQ ID NO: 270503 - DNA, 30 bp, Artificial Sequence
  Synthetic oligonucleotide
ttgccataatgtttagagggactcttgcgc

SEQ ID NO: 270504 - DNA, 30 bp, Artificial Sequence
  Synthetic oligonucleotide
tcgtgatcaagataatcagaaaggttgcgc

SEQ ID NO: 270505 - DNA, 30 bp, Artificial Sequence
  Synthetic oligonucleotide
tggacacttttgagataaaaagctttgcgc

SEQ ID NO: 270506 - DNA, 30 bp, Artificial Sequence
  Synthetic oligonucleotide
tcgtagggggattagatcattttaaatcgc

SEQ ID NO: 270507 - DNA, 30 bp, Artificial Sequence
  Synthetic oligonucleotide
atcggccgagcgccattttgtggcaatcgc

SEQ ID NO: 270508 - DNA, 30 bp, Artificial Sequence
  Synthetic oligonucleotide
taaagttaccttccagtgtaatgcaatcgc

SEQ ID NO: 270509 - DNA, 30 bp, Artificial Sequence
  Synthetic oligonucleotide
tgaggcttcacctcccacggtcataatcgc

SEQ ID NO: 270510 - DNA, 30 bp, Artificial Sequence
  Synthetic oligonucleotide
gatagccccgggtagctccgcgttaatcgc

SEQ ID NO: 270511 - DNA, 30 bp, Artificial Sequence
  Synthetic oligonucleotide
tttggaagcaaatcgtgatggtaacatcgc

SEQ ID NO: 270512 - DNA, 30 bp, Artificial Sequence
  Synthetic oligonucleotide
agggggttgctggtacgttacagacatcgc

SEQ ID NO: 270513 - DNA, 30 bp, Artificial Sequence
  Synthetic oligonucleotide
ggaaatgtgtccaagcgctttattcatcgc

SEQ ID NO: 270514 - DNA, 30 bp, Artificial Sequence
  Synthetic oligonucleotide
taatacgcactgtggacaagttaagatcgc

SEQ ID NO: 270515 - DNA, 30 bp, Artificial Sequence
  Synthetic oligonucleotide
gatcaaattggtgacgaccggctagatcgc

SEQ ID NO: 270516 - DNA, 30 bp, Artificial Sequence
  Synthetic oligonucleotide
atgaatctcaatcggtgacggaaggatcgc

SEQ ID NO: 270517 - DNA, 30 bp, Artificial Sequence
  Synthetic oligonucleotide
tgcgatgctaattatgcggagagggatcgc

SEQ ID NO: 270518 - DNA, 30 bp, Artificial Sequence
  Synthetic oligonucleotide
agctgactggatattgattgactggatcgc

SEQ ID NO: 270519 - DNA, 30 bp, Artificial Sequence
  Synthetic oligonucleotide
gtgcgtgtactgggatacctcacatatcgc

SEQ ID NO: 270520 - DNA, 30 bp, Artificial Sequence
  Synthetic oligonucleotide
cgtaggcccaaacagtggcatacatatcgc

SEQ ID NO: 270521 - DNA, 30 bp, Artificial Sequence
  Synthetic oligonucleotide
gccaaccgctgcaagtgccaatcttatcgc

SEQ ID NO: 270522 - DNA, 30 bp, Artificial Sequence
  Synthetic oligonucleotide
cttaggaaactcaaacgtgttgcgactcgc

SEQ ID NO: 270523 - DNA, 30 bp, Artificial Sequence
  Synthetic oligonucleotide
cagagattttccataagagtagctactcgc

SEQ ID NO: 270524 - DNA, 30 bp, Artificial Sequence
  Synthetic oligonucleotide
tgcctagcggaggtttattctgcgcctcgc

SEQ ID NO: 270525 - DNA, 30 bp, Artificial Sequence
  Synthetic oligonucleotide
aacctatgcgtcctggggccttttcctcgc

SEQ ID NO: 270526 - DNA, 30 bp, Artificial Sequence
  Synthetic oligonucleotide
acaagctatatactcggaaagtcagctcgc

SEQ ID NO: 270527 - DNA, 30 bp, Artificial Sequence
  Synthetic oligonucleotide
accgccgttattagattagtgctagctcgc

SEQ ID NO: 270528 - DNA, 30 bp, Artificial Sequence
  Synthetic oligonucleotide
tgtgttactcaggatgggtgcatggctcgc

SEQ ID NO: 270529 - DNA, 30 bp, Artificial Sequence
  Synthetic oligonucleotide
tagcaccgtccatcagatatttgtgctcgc

SEQ ID NO: 270530 - DNA, 30 bp, Artificial Sequence
  Synthetic oligonucleotide
ttgttgaggttgattgtactggaatctcgc

SEQ ID NO: 270531 - DNA, 30 bp, Artificial Sequence
  Synthetic oligonucleotide
gacagtcccattaaggatatctcatctcgc

SEQ ID NO: 270532 - DNA, 30 bp, Artificial Sequence
  Synthetic oligonucleotide
ctaaaggagcggctcgagtgccgatctcgc

SEQ ID NO: 270533 - DNA, 30 bp, Artificial Sequence
  Synthetic oligonucleotide
gtctctatggatatcactaaactatctcgc

SEQ ID NO: 270534 - DNA, 30 bp, Artificial Sequence
  Synthetic oligonucleotide
gtgggacccttcttgagaaggtcctctcgc

SEQ ID NO: 270535 - DNA, 30 bp, Artificial Sequence
  Synthetic oligonucleotide
actgaaaggtcattacagtaggtctctcgc

SEQ ID NO: 270536 - DNA, 31 bp, Artificial Sequence
  Synthetic oligonucleotide
gtgaacggattagctgctattcgggtctcgc

SEQ ID NO: 270537 - DNA, 30 bp, Artificial Sequence
  Synthetic oligonucleotide
taagcattaaaaatattcgtgaattctcgc

SEQ ID NO: 270538 - DNA, 30 bp, Artificial Sequence
  Synthetic oligonucleotide
gtgttggggaagcaccagaaatattctcgc

SEQ ID NO: 270539 - DNA, 30 bp, Artificial Sequence
  Synthetic oligonucleotide
tcattaaccgagtacgggctaagaagtcgc

SEQ ID NO: 270540 - DNA, 30 bp, Artificial Sequence
  Synthetic oligonucleotide
gtggctgaggctgggccacaaatgagtcgc

SEQ ID NO: 270541 - DNA, 30 bp, Artificial Sequence
  Synthetic oligonucleotide
aaggccacgttttttcagtggttacgtcgc

SEQ ID NO: 270542 - DNA, 30 bp, Artificial Sequence
  Synthetic oligonucleotide
gtacaaatctagcatccacgcctccgtcgc

SEQ ID NO: 270543 - DNA, 30 bp, Artificial Sequence
  Synthetic oligonucleotide
gaaagctgtgggattccaaaaattcgtcgc

SEQ ID NO: 270544 - DNA, 30 bp, Artificial Sequence
  Synthetic oligonucleotide
acctgatgggggttttaatgtcagggtcgc

SEQ ID NO: 270545 - DNA, 30 bp, Artificial Sequence
  Synthetic oligonucleotide
taaacaaagggaagaccctgtttgggtcgc

SEQ ID NO: 270546 - DNA, 30 bp, Artificial Sequence
  Synthetic oligonucleotide
taggcgcggggtatgtcgcacgaatgtcgc

SEQ ID NO: 270547 - DNA, 30 bp, Artificial Sequence
  Synthetic oligonucleotide
caccttgaatgggaagctaggcaaattcgc

SEQ ID NO: 270548 - DNA, 30 bp, Artificial Sequence
  Synthetic oligonucleotide
ccctattacgaattgctcggaatcattcgc

SEQ ID NO: 270549 - DNA, 30 bp, Artificial Sequence
  Synthetic oligonucleotide
gcagtgtgcgttacgcgctaattcattcgc

SEQ ID NO: 270550 - DNA, 30 bp, Artificial Sequence
  Synthetic oligonucleotide
aagtctagagctatgaccgcgtcgattcgc

SEQ ID NO: 270551 - DNA, 30 bp, Artificial Sequence
  Synthetic oligonucleotide
gggagtacgtgcacgccacataaacttcgc

SEQ ID NO: 270552 - DNA, 30 bp, Artificial Sequence
  Synthetic oligonucleotide
aaacatgaagacctagcctgagcccttcgc

SEQ ID NO: 270553 - DNA, 30 bp, Artificial Sequence
  Synthetic oligonucleotide
gggtaagtttaacggaccgcttcccttcgc

SEQ ID NO: 270554 - DNA, 30 bp, Artificial Sequence
  Synthetic oligonucleotide
gacacaccttgtgtgaacgggatgcttcgc

SEQ ID NO: 270555 - DNA, 30 bp, Artificial Sequence
  Synthetic oligonucleotide
gggggtggagcaggagttgtagatcttcgc

SEQ ID NO: 270556 - DNA, 30 bp, Artificial Sequence
  Synthetic oligonucleotide
attagtaaggttcgataggtttgtcttcgc

SEQ ID NO: 270557 - DNA, 30 bp, Artificial Sequence
  Synthetic oligonucleotide
cttaggtctgtgaggccagtgtccgttcgc

SEQ ID NO: 270558 - DNA, 30 bp, Artificial Sequence
  Synthetic oligonucleotide
ctcgggggtgtaaggactacatttgttcgc

SEQ ID NO: 270559 - DNA, 30 bp, Artificial Sequence
  Synthetic oligonucleotide
cattcccgggctgcaaggtcatttgttcgc

SEQ ID NO: 270560 - DNA, 30 bp, Artificial Sequence
  Synthetic oligonucleotide
gatctgataaggcgattagggaaatttcgc

SEQ ID NO: 270561 - DNA, 30 bp, Artificial Sequence
  Synthetic oligonucleotide
gctcggttggaacttatcgcgacatttcgc

SEQ ID NO: 270562 - DNA, 30 bp, Artificial Sequence
  Synthetic oligonucleotide
tgctcttggtccctttggtatcgctttcgc

SEQ ID NO: 270563 - DNA, 30 bp, Artificial Sequence
  Synthetic oligonucleotide
tctcctgaatcgcgggcgtattacaaaggc

SEQ ID NO: 270564 - DNA, 30 bp, Artificial Sequence
  Synthetic oligonucleotide
atcaagctcggggcttcgtgtcataaaggc

SEQ ID NO: 270565 - DNA, 30 bp, Artificial Sequence
  Synthetic oligonucleotide
tgctataagcggagcgagaagcttaaaggc

SEQ ID NO: 270566 - DNA, 30 bp, Artificial Sequence
  Synthetic oligonucleotide
gattcctaagcaaggcacgtagttaaaggc

SEQ ID NO: 270567 - DNA, 30 bp, Artificial Sequence
  Synthetic oligonucleotide
gcagcctcaggctgtcggggtactcaaggc

SEQ ID NO: 270568 - DNA, 30 bp, Artificial Sequence
  Synthetic oligonucleotide
tgcatagtttaagataccgctgctcaaggc

SEQ ID NO: 270569 - DNA, 30 bp, Artificial Sequence
  Synthetic oligonucleotide
acttctcatactatagagtacagtcaaggc

SEQ ID NO: 270570 - DNA, 30 bp, Artificial Sequence
  Synthetic oligonucleotide
tactgtggaaagacctgcgaccacgaaggc

SEQ ID NO: 270571 - DNA, 30 bp, Artificial Sequence
  Synthetic oligonucleotide
gtaatggtacaaccgtggagccgcgaaggc

SEQ ID NO: 270572 - DNA, 30 bp, Artificial Sequence
  Synthetic oligonucleotide
gaacctaagcattcaaattagtgggaaggc

SEQ ID NO: 270573 - DNA, 30 bp, Artificial Sequence
  Synthetic oligonucleotide
tggcggggataatgacaatttctggaaggc

SEQ ID NO: 270574 - DNA, 30 bp, Artificial Sequence
  Synthetic oligonucleotide
gtaggattagtcgcataaggcgaataaggc

SEQ ID NO: 270575 - DNA, 30 bp, Artificial Sequence
  Synthetic oligonucleotide
cctcaaaacccccttgtgtgctaataaggc

SEQ ID NO: 270576 - DNA, 30 bp, Artificial Sequence
  Synthetic oligonucleotide
ttccgtaaggcccggtaacttacataaggc

SEQ ID NO: 270577 - DNA, 30 bp, Artificial Sequence
  Synthetic oligonucleotide
tccatcgcggggacaatactagtataaggc

SEQ ID NO: 270578 - DNA, 30 bp, Artificial Sequence
  Synthetic oligonucleotide
ccagtactaagactgatctgctactaaggc

SEQ ID NO: 270579 - DNA, 30 bp, Artificial Sequence
  Synthetic oligonucleotide
gtagtccgaacgcacacaggtatctaaggc

SEQ ID NO: 270580 - DNA, 30 bp, Artificial Sequence
  Synthetic oligonucleotide
catttgcaagcaagacggcgcacgtaaggc

SEQ ID NO: 270581 - DNA, 30 bp, Artificial Sequence
  Synthetic oligonucleotide
gattacctcaagagacaaagaagttaaggc

SEQ ID NO: 270582 - DNA, 30 bp, Artificial Sequence
  Synthetic oligonucleotide
ccagtaagactgggaatcagtcgttaaggc

SEQ ID NO: 270583 - DNA, 30 bp, Artificial Sequence
  Synthetic oligonucleotide
tagtcacggatcagcacgtgaatttaaggc

SEQ ID NO: 270584 - DNA, 30 bp, Artificial Sequence
  Synthetic oligonucleotide
gggtacgtaccaaggcgcactatttaaggc

SEQ ID NO: 270585 - DNA, 30 bp, Artificial Sequence
  Synthetic oligonucleotide
acgttggggctcatagcttcgggaacaggc

SEQ ID NO: 270586 - DNA, 30 bp, Artificial Sequence
  Synthetic oligonucleotide
ttcccttcccagacaagtagagacacaggc

SEQ ID NO: 270587 - DNA, 30 bp, Artificial Sequence
  Synthetic oligonucleotide
aaccttttaccaacaaagagggagacaggc

SEQ ID NO: 270588 - DNA, 30 bp, Artificial Sequence
  Synthetic oligonucleotide
cgtccaaacgacacatcatgttcgacaggc

SEQ ID NO: 270589 - DNA, 30 bp, Artificial Sequence
  Synthetic oligonucleotide
gaaggataaggagttacccctttgacaggc

SEQ ID NO: 270590 - DNA, 30 bp, Artificial Sequence
  Synthetic oligonucleotide
gtgcgtacccggcggatcctcactacaggc

SEQ ID NO: 270591 - DNA, 30 bp, Artificial Sequence
  Synthetic oligonucleotide
ggccccctcatgacacttcgactaccaggc

SEQ ID NO: 270592 - DNA, 30 bp, Artificial Sequence
  Synthetic oligonucleotide
atcatacagcatcgtgatgggtccccaggc

SEQ ID NO: 270593 - DNA, 30 bp, Artificial Sequence
  Synthetic oligonucleotide
gatggatcggggtcaatcggtcttccaggc

SEQ ID NO: 270594 - DNA, 30 bp, Artificial Sequence
  Synthetic oligonucleotide
tcgccccgtcccgcggaataatttccaggc

SEQ ID NO: 270595 - DNA, 30 bp, Artificial Sequence
  Synthetic oligonucleotide
acgaaataggacgacgccagatccgcaggc

SEQ ID NO: 270596 - DNA, 30 bp, Artificial Sequence
  Synthetic oligonucleotide
aactcgcttttataggagaaacaggcaggc

SEQ ID NO: 270597 - DNA, 30 bp, Artificial Sequence
  Synthetic oligonucleotide
acctgacaacgacttatgatggcggcaggc

SEQ ID NO: 270598 - DNA, 30 bp, Artificial Sequence
  Synthetic oligonucleotide
tggttgctggcgggtaggaggtcggcaggc

SEQ ID NO: 270599 - DNA, 30 bp, Artificial Sequence
  Synthetic oligonucleotide
tggcattgtatagagctgcattttgcaggc

SEQ ID NO: 270600 - DNA, 30 bp, Artificial Sequence
  Synthetic oligonucleotide
cacaaccgtccccctcaggtcagatcaggc

SEQ ID NO: 270601 - DNA, 30 bp, Artificial Sequence
  Synthetic oligonucleotide
actgactgtggcaaacgtgttaactcaggc

SEQ ID NO: 270602 - DNA, 30 bp, Artificial Sequence
  Synthetic oligonucleotide
ggagcacaaagttctttatgaggctcaggc

SEQ ID NO: 270603 - DNA, 30 bp, Artificial Sequence
  Synthetic oligonucleotide
aaggacacgtaagctgtaagctggtcaggc

SEQ ID NO: 270604 - DNA, 30 bp, Artificial Sequence
  Synthetic oligonucleotide
gggattgtttagtgtagcagaagaagaggc

SEQ ID NO: 270605 - DNA, 30 bp, Artificial Sequence
  Synthetic oligonucleotide
cgttacggtcgctcaggaaagtgaagaggc

SEQ ID NO: 270606 - DNA, 30 bp, Artificial Sequence
  Synthetic oligonucleotide
cacgtttacgatatccactaaatcagaggc

SEQ ID NO: 270607 - DNA, 30 bp, Artificial Sequence
  Synthetic oligonucleotide
gggcaatgtataaggccattaatcagaggc

SEQ ID NO: 270608 - DNA, 30 bp, Artificial Sequence
  Synthetic oligonucleotide
tctgacatgcgcttacaatgacggagaggc

SEQ ID NO: 270609 - DNA, 30 bp, Artificial Sequence
  Synthetic oligonucleotide
acgctttacaactaaacggtcatgagaggc

SEQ ID NO: 270610 - DNA, 30 bp, Artificial Sequence
  Synthetic oligonucleotide
gcacatgaatattaacggtcacaacgaggc

SEQ ID NO: 270611 - DNA, 30 bp, Artificial Sequence
  Synthetic oligonucleotide
gggttatcatcagattttcgaacacgaggc

SEQ ID NO: 270612 - DNA, 30 bp, Artificial Sequence
  Synthetic oligonucleotide
gtggaaggccctcccaggttttaccgaggc

SEQ ID NO: 270613 - DNA, 35 bp, Artificial Sequence
  Synthetic oligonucleotide
gagatcattagaaacgcctcaagggcagccgaggc

SEQ ID NO: 270614 - DNA, 30 bp, Artificial Sequence
  Synthetic oligonucleotide
gagagggtttcatgaactttgctccgaggc

SEQ ID NO: 270615 - DNA, 30 bp, Artificial Sequence
  Synthetic oligonucleotide
gatcgcggtcatggcacagagaagcgaggc

SEQ ID NO: 270616 - DNA, 30 bp, Artificial Sequence
  Synthetic oligonucleotide
taatggttagtagtggcacggaagcgaggc

SEQ ID NO: 270617 - DNA, 30 bp, Artificial Sequence
  Synthetic oligonucleotide
aatacataaagccattcatccacgcgaggc

SEQ ID NO: 270618 - DNA, 30 bp, Artificial Sequence
  Synthetic oligonucleotide
ttgtactttcattgtacggaatggcgaggc

SEQ ID NO: 270619 - DNA, 30 bp, Artificial Sequence
  Synthetic oligonucleotide
tcaaaccagtggactcccggggtgcgaggc

SEQ ID NO: 270620 - DNA, 30 bp, Artificial Sequence
  Synthetic oligonucleotide
gccacacggatctctgcaagtcatcgaggc

SEQ ID NO: 270621 - DNA, 30 bp, Artificial Sequence
  Synthetic oligonucleotide
cacttttgtgatctggtccgccaaggaggc

SEQ ID NO: 270622 - DNA, 30 bp, Artificial Sequence
  Synthetic oligonucleotide
gctattcggcgatagcagggctccggaggc

SEQ ID NO: 270623 - DNA, 30 bp, Artificial Sequence
  Synthetic oligonucleotide
ttgtatcgcttgttcgacaactgcggaggc

SEQ ID NO: 270624 - DNA, 30 bp, Artificial Sequence
  Synthetic oligonucleotide
cagggatggtggtaacgtaacgagggaggc

SEQ ID NO: 270625 - DNA, 30 bp, Artificial Sequence
  Synthetic oligonucleotide
atcgttgaatgataatcttcttcgggaggc

SEQ ID NO: 270626 - DNA, 30 bp, Artificial Sequence
  Synthetic oligonucleotide
aggtggttctgcaattagtccaatggaggc

SEQ ID NO: 270627 - DNA, 30 bp, Artificial Sequence
  Synthetic oligonucleotide
gggatggtcgcatactatgcggatggaggc

SEQ ID NO: 270628 - DNA, 30 bp, Artificial Sequence
  Synthetic oligonucleotide
ctggccttagttatgtatgagtgtggaggc

SEQ ID NO: 270629 - DNA, 30 bp, Artificial Sequence
  Synthetic oligonucleotide
caccactgcgtaacgagatcaaaatgaggc

SEQ ID NO: 270630 - DNA, 30 bp, Artificial Sequence
  Synthetic oligonucleotide
gataataatatagacgtcgggggctgaggc

SEQ ID NO: 270631 - DNA, 30 bp, Artificial Sequence
  Synthetic oligonucleotide
ataaccggtgtaaccctccgcaagtgaggc

SEQ ID NO: 270632 - DNA, 30 bp, Artificial Sequence
  Synthetic oligonucleotide
aataaagatggcactgaatcgtcgtgaggc

SEQ ID NO: 270633 - DNA, 30 bp, Artificial Sequence
  Synthetic oligonucleotide
gctccctcggaatccaccccgtcttgaggc

SEQ ID NO: 270634 - DNA, 30 bp, Artificial Sequence
  Synthetic oligonucleotide
cgtctatgagaccagagagaattttgaggc

SEQ ID NO: 270635 - DNA, 30 bp, Artificial Sequence
  Synthetic oligonucleotide
gttaagccgagcggtacttgtggaataggc

SEQ ID NO: 270636 - DNA, 30 bp, Artificial Sequence
  Synthetic oligonucleotide
tcttacgccaccgtatgtaactgaataggc

SEQ ID NO: 270637 - DNA, 30 bp, Artificial Sequence
  Synthetic oligonucleotide
tgctactctagtgtaaactttaacataggc

SEQ ID NO: 270638 - DNA, 30 bp, Artificial Sequence
  Synthetic oligonucleotide
cgagggggctgcaagacagcctgcataggc

SEQ ID NO: 270639 - DNA, 30 bp, Artificial Sequence
  Synthetic oligonucleotide
gaggcatctaaataagggagccctataggc

SEQ ID NO: 270640 - DNA, 30 bp, Artificial Sequence
  Synthetic oligonucleotide
tgatcgtgtgctagggcgcagaaactaggc

SEQ ID NO: 270641 - DNA, 30 bp, Artificial Sequence
  Synthetic oligonucleotide
gaggtggtggaatgtatagactttctaggc

SEQ ID NO: 270642 - DNA, 30 bp, Artificial Sequence
  Synthetic oligonucleotide
agttatgtgggtgcgtctcattaagtaggc

SEQ ID NO: 270643 - DNA, 30 bp, Artificial Sequence
  Synthetic oligonucleotide
agtgtctaccgggccctcaaacgagtaggc

SEQ ID NO: 270644 - DNA, 30 bp, Artificial Sequence
  Synthetic oligonucleotide
ctcgctcccgtccagaagtccaaggtaggc

SEQ ID NO: 270645 - DNA, 30 bp, Artificial Sequence
  Synthetic oligonucleotide
gtagaattggtgtttactattaaggtaggc

SEQ ID NO: 270646 - DNA, 30 bp, Artificial Sequence
  Synthetic oligonucleotide
agcagtttcaggagcttctatccggtaggc

SEQ ID NO: 270647 - DNA, 30 bp, Artificial Sequence
  Synthetic oligonucleotide
agagcaacttcgggctatacaggtgtaggc

SEQ ID NO: 270648 - DNA, 30 bp, Artificial Sequence
  Synthetic oligonucleotide
aaaaaacccagtgacaagaccatattaggc

SEQ ID NO: 270649 - DNA, 30 bp, Artificial Sequence
  Synthetic oligonucleotide
aacaaccggtaattatgtgattagttaggc

SEQ ID NO: 270650 - DNA, 30 bp, Artificial Sequence
  Synthetic oligonucleotide
cacctgtattgtaatccactaaatttaggc

SEQ ID NO: 270651 - DNA, 30 bp, Artificial Sequence
  Synthetic oligonucleotide
tgattatgatgtcaaggtgaggatttaggc

SEQ ID NO: 270652 - DNA, 30 bp, Artificial Sequence
  Synthetic oligonucleotide
cacgattcagcgattagcctcccaaacggc

SEQ ID NO: 270653 - DNA, 30 bp, Artificial Sequence
  Synthetic oligonucleotide
ggaaggcgaagcttatgtcccggaaacggc

SEQ ID NO: 270654 - DNA, 30 bp, Artificial Sequence
  Synthetic oligonucleotide
tttcggagaggcccgttcaactacaacggc

SEQ ID NO: 270655 - DNA, 30 bp, Artificial Sequence
  Synthetic oligonucleotide
tacaaaaatacttcgggggcatgcaacggc

SEQ ID NO: 270656 - DNA, 30 bp, Artificial Sequence
  Synthetic oligonucleotide
aaagtccgatgaggctacttcatacacggc

SEQ ID NO: 270657 - DNA, 30 bp, Artificial Sequence
  Synthetic oligonucleotide
agatcaatttttgtggcggtttaccacggc

SEQ ID NO: 270658 - DNA, 30 bp, Artificial Sequence
  Synthetic oligonucleotide
ggttaccatagggatgagaaagtccacggc

SEQ ID NO: 270659 - DNA, 29 bp, Artificial Sequence
  Synthetic oligonucleotide
ggctgttgactatgtgcgacaagcacggc

SEQ ID NO: 270660 - DNA, 30 bp, Artificial Sequence
  Synthetic oligonucleotide
actgggtgtggcctttcagtaaggcacggc

SEQ ID NO: 270661 - DNA, 30 bp, Artificial Sequence
  Synthetic oligonucleotide
ctattctaagcgactgatgttactcacggc

SEQ ID NO: 270662 - DNA, 30 bp, Artificial Sequence
  Synthetic oligonucleotide
tggcagggtaatgagagtggtagagacggc

SEQ ID NO: 270663 - DNA, 30 bp, Artificial Sequence
  Synthetic oligonucleotide
atcacggaagctaagcccaggcgagacggc

SEQ ID NO: 270664 - DNA, 30 bp, Artificial Sequence
  Synthetic oligonucleotide
acccatcaggtaccgtaatgtcacgacggc

SEQ ID NO: 270665 - DNA, 30 bp, Artificial Sequence
  Synthetic oligonucleotide
tcaccgcgcgcatttgggaaaccggacggc

SEQ ID NO: 270666 - DNA, 30 bp, Artificial Sequence
  Synthetic oligonucleotide
aagtatataggttaatcttaagtggacggc

SEQ ID NO: 270667 - DNA, 30 bp, Artificial Sequence
  Synthetic oligonucleotide
cacaatagggtaatgctctttaatgacggc

SEQ ID NO: 270668 - DNA, 30 bp, Artificial Sequence
  Synthetic oligonucleotide
acgaacgactgcgtgcattgttcatacggc

SEQ ID NO: 270669 - DNA, 30 bp, Artificial Sequence
  Synthetic oligonucleotide
ttacggatattctcgcctgcatcttacggc

SEQ ID NO: 270670 - DNA, 30 bp, Artificial Sequence
  Synthetic oligonucleotide
atcttggagacggtgaacgtcggttacggc

SEQ ID NO: 270671 - DNA, 30 bp, Artificial Sequence
  Synthetic oligonucleotide
cgagagcaccgtgtttccaagaaaaccggc

SEQ ID NO: 270672 - DNA, 30 bp, Artificial Sequence
  Synthetic oligonucleotide
ggcgaacgtggggccctggtctcgaccggc

SEQ ID NO: 270673 - DNA, 30 bp, Artificial Sequence
  Synthetic oligonucleotide
ttagaggagtaggtttaaagagataccggc

SEQ ID NO: 270674 - DNA, 29 bp, Artificial Sequence
  Synthetic oligonucleotide
atgcgagcttgatcgcgccatctaccggc

SEQ ID NO: 270675 - DNA, 30 bp, Artificial Sequence
  Synthetic oligonucleotide
caccgacaggtggcaacccatacacccggc

SEQ ID NO: 270676 - DNA, 30 bp, Artificial Sequence
  Synthetic oligonucleotide
gtaagattcgaaagcacgcctatccccggc

SEQ ID NO: 270677 - DNA, 30 bp, Artificial Sequence
  Synthetic oligonucleotide
ctaagagcgcaataccgaggcaaatccggc

SEQ ID NO: 270678 - DNA, 30 bp, Artificial Sequence
  Synthetic oligonucleotide
aagacttaggatacccgatggacatccggc

SEQ ID NO: 270679 - DNA, 30 bp, Artificial Sequence
  Synthetic oligonucleotide
tcattttctaactacaggttttgatccggc

SEQ ID NO: 270680 - DNA, 30 bp, Artificial Sequence
  Synthetic oligonucleotide
ttcggcagtacaacgggcaacttatccggc

SEQ ID NO: 270681 - DNA, 30 bp, Artificial Sequence
  Synthetic oligonucleotide
cttcccacactggagttgaaagtctccggc

SEQ ID NO: 270682 - DNA, 30 bp, Artificial Sequence
  Synthetic oligonucleotide
agggacgacgcaggcacattgtagtccggc

SEQ ID NO: 270683 - DNA, 30 bp, Artificial Sequence
  Synthetic oligonucleotide
ttaggatattgaccgtgattcacaagcggc

SEQ ID NO: 270684 - DNA, 30 bp, Artificial Sequence
  Synthetic oligonucleotide
cgtggtcaagcgttgatttgagcaagcggc

SEQ ID NO: 270685 - DNA, 30 bp, Artificial Sequence
  Synthetic oligonucleotide
tgaatctccgcttatcgttccagaagcggc

SEQ ID NO: 270686 - DNA, 30 bp, Artificial Sequence
  Synthetic oligonucleotide
atggccaaacttactgtcaaggtaagcggc

SEQ ID NO: 270687 - DNA, 30 bp, Artificial Sequence
  Synthetic oligonucleotide
tggtagggccgatttcgactagccagcggc

SEQ ID NO: 270688 - DNA, 30 bp, Artificial Sequence
  Synthetic oligonucleotide
taaccatgcggaggggactatagcagcggc

SEQ ID NO: 270689 - DNA, 30 bp, Artificial Sequence
  Synthetic oligonucleotide
ggaagatacgacgacgccttgttcagcggc

SEQ ID NO: 270690 - DNA, 30 bp, Artificial Sequence
  Synthetic oligonucleotide
ggttgtcgaataacagatcatacgagcggc

SEQ ID NO: 270691 - DNA, 30 bp, Artificial Sequence
  Synthetic oligonucleotide
atcgtgacagtgaattaaatatcgagcggc

SEQ ID NO: 270692 - DNA, 30 bp, Artificial Sequence
  Synthetic oligonucleotide
ccaaaacactattcactagtgtcacgcggc

SEQ ID NO: 270693 - DNA, 30 bp, Artificial Sequence
  Synthetic oligonucleotide
caagggaagaggccgtgctatccgcgcggc

SEQ ID NO: 270694 - DNA, 30 bp, Artificial Sequence
  Synthetic oligonucleotide
atccaaaggccactgcgaacgtttcgcggc

SEQ ID NO: 270695 - DNA, 30 bp, Artificial Sequence
  Synthetic oligonucleotide
cgaagtaaactgccgcgtctgttcggcggc

SEQ ID NO: 270696 - DNA, 30 bp, Artificial Sequence
  Synthetic oligonucleotide
accatgtcaggctagaaggccaggggcggc

SEQ ID NO: 270697 - DNA, 30 bp, Artificial Sequence
  Synthetic oligonucleotide
gcaggctagagtcacatgcaccttggcggc

SEQ ID NO: 270698 - DNA, 30 bp, Artificial Sequence
  Synthetic oligonucleotide
ggccgcgtaatcgctccggtctgatgcggc

SEQ ID NO: 270699 - DNA, 30 bp, Artificial Sequence
  Synthetic oligonucleotide
ctattgcggtaatcctaccaattttgcggc

SEQ ID NO: 270700 - DNA, 30 bp, Artificial Sequence
  Synthetic oligonucleotide
cctatcggtgagtggcccaagtgcatcggc

SEQ ID NO: 270701 - DNA, 30 bp, Artificial Sequence
  Synthetic oligonucleotide
tttgagtattccacgccgtatcagatcggc

SEQ ID NO: 270702 - DNA, 30 bp, Artificial Sequence
  Synthetic oligonucleotide
aagcgtgcacttctgagactctagatcggc

SEQ ID NO: 270703 - DNA, 30 bp, Artificial Sequence
  Synthetic oligonucleotide
aaaacgactcggtcgtaatcacctatcggc

SEQ ID NO: 270704 - DNA, 31 bp, Artificial Sequence
  Synthetic oligonucleotide
agctaacacatgtaatgggacgttactcggc

SEQ ID NO: 270705 - DNA, 30 bp, Artificial Sequence
  Synthetic oligonucleotide
aagtctgactggaaatgtccagacctcggc

SEQ ID NO: 270706 - DNA, 30 bp, Artificial Sequence
  Synthetic oligonucleotide
agtcttcgttgcaggcataaaaaggtcggc

SEQ ID NO: 270707 - DNA, 30 bp, Artificial Sequence
  Synthetic oligonucleotide
tccacgcaccgaatcggtccaagggtcggc

SEQ ID NO: 270708 - DNA, 30 bp, Artificial Sequence
  Synthetic oligonucleotide
tcgacagtaatgcgaacatttaccttcggc

SEQ ID NO: 270709 - DNA, 30 bp, Artificial Sequence
  Synthetic oligonucleotide
atcacagttagacggaaatcaagtttcggc

SEQ ID NO: 270710 - DNA, 30 bp, Artificial Sequence
  Synthetic oligonucleotide
attcgagggtccgaaagtcatgcaaagggc

SEQ ID NO: 270711 - DNA, 30 bp, Artificial Sequence
  Synthetic oligonucleotide
taagttgttacttaaatactgcgaaagggc

SEQ ID NO: 270712 - DNA, 30 bp, Artificial Sequence
  Synthetic oligonucleotide
agatacttaagacacacagagcacaagggc

SEQ ID NO: 270713 - DNA, 30 bp, Artificial Sequence
  Synthetic oligonucleotide
gtgcgcatatacttttgaatcatgaagggc

SEQ ID NO: 270714 - DNA, 30 bp, Artificial Sequence
  Synthetic oligonucleotide
tttagctggaagagtatggggctgaagggc

SEQ ID NO: 270715 - DNA, 30 bp, Artificial Sequence
  Synthetic oligonucleotide
gtcagcgtccatctggaccctgtgaagggc

SEQ ID NO: 270716 - DNA, 30 bp, Artificial Sequence
  Synthetic oligonucleotide
gtggagaggaaaccgcccgccgataagggc

SEQ ID NO: 270717 - DNA, 30 bp, Artificial Sequence
  Synthetic oligonucleotide
aggcaactagtgtacatagtgctccagggc

SEQ ID NO: 270718 - DNA, 30 bp, Artificial Sequence
  Synthetic oligonucleotide
cggttagcagcagagtcagggttccagggc

SEQ ID NO: 270719 - DNA, 30 bp, Artificial Sequence
  Synthetic oligonucleotide
acataaagtttgggaaatcactggcagggc

SEQ ID NO: 270720 - DNA, 30 bp, Artificial Sequence
  Synthetic oligonucleotide
attccagggaacatgcaggcctctcagggc

SEQ ID NO: 270721 - DNA, 30 bp, Artificial Sequence
  Synthetic oligonucleotide
ggtacggaaacgacactattatgtcagggc

SEQ ID NO: 270722 - DNA, 30 bp, Artificial Sequence
  Synthetic oligonucleotide
attacccacctggaacaggaattagagggc

SEQ ID NO: 270723 - DNA, 30 bp, Artificial Sequence
  Synthetic oligonucleotide
agatgcgaacggactttgtcagccgagggc

SEQ ID NO: 270724 - DNA, 30 bp, Artificial Sequence
  Synthetic oligonucleotide
accggctggaagctcttcctacaggagggc

SEQ ID NO: 270725 - DNA, 30 bp, Artificial Sequence
  Synthetic oligonucleotide
ttgcaagtaggaccgagcccgcaggagggc

SEQ ID NO: 270726 - DNA, 30 bp, Artificial Sequence
  Synthetic oligonucleotide
gagtcgtacgtgtacatttccgtggagggc

SEQ ID NO: 270727 - DNA, 30 bp, Artificial Sequence
  Synthetic oligonucleotide
cggttctcacacaacgaagcgcgtgagggc

SEQ ID NO: 270728 - DNA, 30 bp, Artificial Sequence
  Synthetic oligonucleotide
gcaagcaggctgccagtcttaaaatagggc

SEQ ID NO: 270729 - DNA, 30 bp, Artificial Sequence
  Synthetic oligonucleotide
agcaaccaatcccaggttcatcaatagggc

SEQ ID NO: 270730 - DNA, 30 bp, Artificial Sequence
  Synthetic oligonucleotide
gaaacatagcgttttggtcgttaaacgggc

SEQ ID NO: 270731 - DNA, 30 bp, Artificial Sequence
  Synthetic oligonucleotide
taatgccacacggcgacaatcctaacgggc

SEQ ID NO: 270732 - DNA, 30 bp, Artificial Sequence
  Synthetic oligonucleotide
aagtattagtgggaagtagcgaacacgggc

SEQ ID NO: 270733 - DNA, 30 bp, Artificial Sequence
  Synthetic oligonucleotide
gtcaggtgtcagaaatggtccggcacgggc

SEQ ID NO: 270734 - DNA, 30 bp, Artificial Sequence
  Synthetic oligonucleotide
ctgttgaccgagacagtatatcggacgggc

SEQ ID NO: 270735 - DNA, 30 bp, Artificial Sequence
  Synthetic oligonucleotide
agacctctcgaagtggctaaggttacgggc

SEQ ID NO: 270736 - DNA, 30 bp, Artificial Sequence
  Synthetic oligonucleotide
taagttagtgaggtggcttggtttacgggc

SEQ ID NO: 270737 - DNA, 30 bp, Artificial Sequence
  Synthetic oligonucleotide
tatactttcttggttaataattgcccgggc

SEQ ID NO: 270738 - DNA, 30 bp, Artificial Sequence
  Synthetic oligonucleotide
gtaagacttcatatagcagctatcccgggc

SEQ ID NO: 270739 - DNA, 30 bp, Artificial Sequence
  Synthetic oligonucleotide
gcatcaaagttttatgcgtccactccgggc

SEQ ID NO: 270740 - DNA, 30 bp, Artificial Sequence
  Synthetic oligonucleotide
catattcaggctttatgagttggagcgggc

SEQ ID NO: 270741 - DNA, 30 bp, Artificial Sequence
  Synthetic oligonucleotide
gtttgaaaacgtacgaaggcaaacgcgggc

SEQ ID NO: 270742 - DNA, 30 bp, Artificial Sequence
  Synthetic oligonucleotide
accttatacttagggaaaagccgcgcgggc

SEQ ID NO: 270743 - DNA, 30 bp, Artificial Sequence
  Synthetic oligonucleotide
acttataccaagctactcgcgcgggcgggc

SEQ ID NO: 270744 - DNA, 30 bp, Artificial Sequence
  Synthetic oligonucleotide
gcacagttgtcgccgagtattggggcgggc

SEQ ID NO: 270745 - DNA, 30 bp, Artificial Sequence
  Synthetic oligonucleotide
gacaactcgtaccacggcagtactgcgggc

SEQ ID NO: 270746 - DNA, 30 bp, Artificial Sequence
  Synthetic oligonucleotide
tttggcttaccgttccgatctgcatcgggc

SEQ ID NO: 270747 - DNA, 30 bp, Artificial Sequence
  Synthetic oligonucleotide
ctaagatgagaaactttttcatagtcgggc

SEQ ID NO: 270748 - DNA, 30 bp, Artificial Sequence
  Synthetic oligonucleotide
gatagaggacaaggtgggttgaattcgggc

SEQ ID NO: 270749 - DNA, 30 bp, Artificial Sequence
  Synthetic oligonucleotide
cacggacccagaaaggtggtacattcgggc

SEQ ID NO: 270750 - DNA, 30 bp, Artificial Sequence
  Synthetic oligonucleotide
atctcggtttccgaagtagggtacaggggc

SEQ ID NO: 270751 - DNA, 30 bp, Artificial Sequence
  Synthetic oligonucleotide
ctaacgtctcgtgtctacgaaaccaggggc

SEQ ID NO: 270752 - DNA, 30 bp, Artificial Sequence
  Synthetic oligonucleotide
gacactacggcgttcgtataatagaggggc

SEQ ID NO: 270753 - DNA, 30 bp, Artificial Sequence
  Synthetic oligonucleotide
actagtttggcagacgctggttggaggggc

SEQ ID NO: 270754 - DNA, 30 bp, Artificial Sequence
  Synthetic oligonucleotide
atggaaagttggtaggccaggtctaggggc

SEQ ID NO: 270755 - DNA, 30 bp, Artificial Sequence
  Synthetic oligonucleotide
actatgcggggttcgaccgcgacccggggc

SEQ ID NO: 270756 - DNA, 30 bp, Artificial Sequence
  Synthetic oligonucleotide
agatgcgcatccacgggggtgcggcggggc

SEQ ID NO: 270757 - DNA, 30 bp, Artificial Sequence
  Synthetic oligonucleotide
gtctaggcatataaaattaaaatgcggggc

SEQ ID NO: 270758 - DNA, 30 bp, Artificial Sequence
  Synthetic oligonucleotide
gatgctcagggcttgcggtggctgcggggc

SEQ ID NO: 270759 - DNA, 30 bp, Artificial Sequence
  Synthetic oligonucleotide
tgccgttagtttcaattgcccagtcggggc

SEQ ID NO: 270760 - DNA, 30 bp, Artificial Sequence
  Synthetic oligonucleotide
gaagtgccgacatttccacaaggagggggc

SEQ ID NO: 270761 - DNA, 30 bp, Artificial Sequence
  Synthetic oligonucleotide
tgtatagtgcaatggctgtgcgtagggggc

SEQ ID NO: 270762 - DNA, 30 bp, Artificial Sequence
  Synthetic oligonucleotide
agcgaaaagtcatggttacccttagggggc

SEQ ID NO: 270763 - DNA, 30 bp, Artificial Sequence
  Synthetic oligonucleotide
aacagaccgccggactgtgactccgggggc

SEQ ID NO: 270764 - DNA, 30 bp, Artificial Sequence
  Synthetic oligonucleotide
tcggtgcaccgtctagctgtaggcgggggc

SEQ ID NO: 270765 - DNA, 30 bp, Artificial Sequence
  Synthetic oligonucleotide
ccacctagttcgaataaagcgatcgggggc

SEQ ID NO: 270766 - DNA, 30 bp, Artificial Sequence
  Synthetic oligonucleotide
gaacttaatgcagtcggacatgtcgggggc

SEQ ID NO: 270767 - DNA, 30 bp, Artificial Sequence
  Synthetic oligonucleotide
ttaaacgcatagcccacaacgcgggggggc

SEQ ID NO: 270768 - DNA, 30 bp, Artificial Sequence
  Synthetic oligonucleotide
tattaagaggcatgcggatgaatggggggc

SEQ ID NO: 270769 - DNA, 30 bp, Artificial Sequence
  Synthetic oligonucleotide
ttgtgttattctctatctgggaatgggggc

SEQ ID NO: 270770 - DNA, 30 bp, Artificial Sequence
  Synthetic oligonucleotide
accgcagttcaagtgaggcaccctgggggc

SEQ ID NO: 270771 - DNA, 30 bp, Artificial Sequence
  Synthetic oligonucleotide
cagaacttgctctaggtatctgttgggggc

SEQ ID NO: 270772 - DNA, 30 bp, Artificial Sequence
  Synthetic oligonucleotide
ttgccatggagggactgttcagcatggggc

SEQ ID NO: 270773 - DNA, 30 bp, Artificial Sequence
  Synthetic oligonucleotide
ctcaaccaacgcaaagaggagcgatggggc

SEQ ID NO: 270774 - DNA, 30 bp, Artificial Sequence
  Synthetic oligonucleotide
ctctttaaaagctcggggaagtgatggggc

SEQ ID NO: 270775 - DNA, 30 bp, Artificial Sequence
  Synthetic oligonucleotide
aaggaaggtcacgggtacgggccgtggggc

SEQ ID NO: 270776 - DNA, 30 bp, Artificial Sequence
  Synthetic oligonucleotide
ggagtaagaagagtatacaacctttggggc

SEQ ID NO: 270777 - DNA, 30 bp, Artificial Sequence
  Synthetic oligonucleotide
ttaaacgtgacgattggaggggaaatgggc

SEQ ID NO: 270778 - DNA, 30 bp, Artificial Sequence
  Synthetic oligonucleotide
gcaggttgggcttcgtaaagctaaatgggc

SEQ ID NO: 270779 - DNA, 30 bp, Artificial Sequence
  Synthetic oligonucleotide
caggttatgtgtctgcgtcacctcatgggc

SEQ ID NO: 270780 - DNA, 30 bp, Artificial Sequence
  Synthetic oligonucleotide
gcttgatgttctctgaagccaaagatgggc

SEQ ID NO: 270781 - DNA, 30 bp, Artificial Sequence
  Synthetic oligonucleotide
tggcgctgatgtgcgagcctagggatgggc

SEQ ID NO: 270782 - DNA, 31 bp, Artificial Sequence
  Synthetic oligonucleotide
acgttacattgggactctagacatgatgggc

SEQ ID NO: 270783 - DNA, 30 bp, Artificial Sequence
  Synthetic oligonucleotide
tagggctattatgttagcggccgtatgggc

SEQ ID NO: 270784 - DNA, 30 bp, Artificial Sequence
  Synthetic oligonucleotide
gcggacctttcgagtcgtttttgtatgggc

SEQ ID NO: 270785 - DNA, 30 bp, Artificial Sequence
  Synthetic oligonucleotide
tctgtgcctcactgtgctactgaactgggc

SEQ ID NO: 270786 - DNA, 30 bp, Artificial Sequence
  Synthetic oligonucleotide
ggggcccatgtagtattcgggaacctgggc

SEQ ID NO: 270787 - DNA, 30 bp, Artificial Sequence
  Synthetic oligonucleotide
accttcttaacctacactagtcgcctgggc

SEQ ID NO: 270788 - DNA, 30 bp, Artificial Sequence
  Synthetic oligonucleotide
ttatctgagcgttcggtagaacggctgggc

SEQ ID NO: 270789 - DNA, 30 bp, Artificial Sequence
  Synthetic oligonucleotide
agagcgcgatattaacttatacaagtgggc

SEQ ID NO: 270790 - DNA, 30 bp, Artificial Sequence
  Synthetic oligonucleotide
agcaatacttgcgagttcagggtcgtgggc

SEQ ID NO: 270791 - DNA, 30 bp, Artificial Sequence
  Synthetic oligonucleotide
ggggccaagttgcggctaggaacggtgggc

SEQ ID NO: 270792 - DNA, 30 bp, Artificial Sequence
  Synthetic oligonucleotide
cagcttcgggaaccctgacacattgtgggc

SEQ ID NO: 270793 - DNA, 30 bp, Artificial Sequence
  Synthetic oligonucleotide
tagctaacacgggccagctaacaattgggc

SEQ ID NO: 270794 - DNA, 30 bp, Artificial Sequence
  Synthetic oligonucleotide
gccggaatgacaaagagcacgcaattgggc

SEQ ID NO: 270795 - DNA, 30 bp, Artificial Sequence
  Synthetic oligonucleotide
gacaagcagtgcaatggtccgcgattgggc

SEQ ID NO: 270796 - DNA, 30 bp, Artificial Sequence
  Synthetic oligonucleotide
aggcacaagacttcacagtctcatttgggc

SEQ ID NO: 270797 - DNA, 30 bp, Artificial Sequence
  Synthetic oligonucleotide
atgggggtcgttcctgactgttcaaatggc

SEQ ID NO: 270798 - DNA, 30 bp, Artificial Sequence
  Synthetic oligonucleotide
tcactgttttgttctgacactgtcaatggc

SEQ ID NO: 270799 - DNA, 30 bp, Artificial Sequence
  Synthetic oligonucleotide
tcttgcccgaagtagtacgaattcaatggc

SEQ ID NO: 270800 - DNA, 30 bp, Artificial Sequence
  Synthetic oligonucleotide
aatgcttcgttcgggtgagggttcaatggc

SEQ ID NO: 270801 - DNA, 30 bp, Artificial Sequence
  Synthetic oligonucleotide
cgtctgggcgctcgtgtacggcagaatggc

SEQ ID NO: 270802 - DNA, 30 bp, Artificial Sequence
  Synthetic oligonucleotide
ccgcgtctatgggtctgactacggaatggc

SEQ ID NO: 270803 - DNA, 30 bp, Artificial Sequence
  Synthetic oligonucleotide
ccggtcaatggcctaaagtcctttaatggc

SEQ ID NO: 270804 - DNA, 30 bp, Artificial Sequence
  Synthetic oligonucleotide
aatagaacaataaggcctaggccacatggc

SEQ ID NO: 270805 - DNA, 30 bp, Artificial Sequence
  Synthetic oligonucleotide
caaccctcaaggtattaatggtgacatggc

SEQ ID NO: 270806 - DNA, 30 bp, Artificial Sequence
  Synthetic oligonucleotide
ctactaagggtagctgacgaattacatggc

SEQ ID NO: 270807 - DNA, 30 bp, Artificial Sequence
  Synthetic oligonucleotide
gaggagcgttaagcgctcgaagtgcatggc

SEQ ID NO: 270808 - DNA, 30 bp, Artificial Sequence
  Synthetic oligonucleotide
gaatcggaagactgaagaaaccctcatggc

SEQ ID NO: 270809 - DNA, 30 bp, Artificial Sequence
  Synthetic oligonucleotide
ttcgttgtatatggccgccgcgtagatggc

SEQ ID NO: 270810 - DNA, 30 bp, Artificial Sequence
  Synthetic oligonucleotide
gcacagcgcggcactgctgtgtgcgatggc

SEQ ID NO: 270811 - DNA, 30 bp, Artificial Sequence
  Synthetic oligonucleotide
ttaaaacccctgctgattattgaggatggc

SEQ ID NO: 270812 - DNA, 30 bp, Artificial Sequence
  Synthetic oligonucleotide
ttagggagaggcattataacgcctgatggc

SEQ ID NO: 270813 - DNA, 30 bp, Artificial Sequence
  Synthetic oligonucleotide
gcccacgcttgatcgttcaattgtgatggc

SEQ ID NO: 270814 - DNA, 30 bp, Artificial Sequence
  Synthetic oligonucleotide
ctaatccgttctcagtctgcctttgatggc

SEQ ID NO: 270815 - DNA, 30 bp, Artificial Sequence
  Synthetic oligonucleotide
tgtcaatttccgaactgctcgaaatatggc

SEQ ID NO: 270816 - DNA, 30 bp, Artificial Sequence
  Synthetic oligonucleotide
gttggcgaccgggtttggtatgactatggc

SEQ ID NO: 270817 - DNA, 30 bp, Artificial Sequence
  Synthetic oligonucleotide
ggaagtcaacggctccaggtaaggtatggc

SEQ ID NO: 270818 - DNA, 30 bp, Artificial Sequence
  Synthetic oligonucleotide
cagcgaaaccctggagactatggaactggc

SEQ ID NO: 270819 - DNA, 30 bp, Artificial Sequence
  Synthetic oligonucleotide
agtgaggcaactgttaactcccacactggc

SEQ ID NO: 270820 - DNA, 30 bp, Artificial Sequence
  Synthetic oligonucleotide
atgtcaggtgtgtcatccgataagactggc

SEQ ID NO: 270821 - DNA, 30 bp, Artificial Sequence
  Synthetic oligonucleotide
aagcagtcgacccgatcattagagactggc

SEQ ID NO: 270822 - DNA, 30 bp, Artificial Sequence
  Synthetic oligonucleotide
tctggcggttctgccggagctaggactggc

SEQ ID NO: 270823 - DNA, 30 bp, Artificial Sequence
  Synthetic oligonucleotide
cacgtagtgtggcctcacactcggactggc

SEQ ID NO: 270824 - DNA, 30 bp, Artificial Sequence
  Synthetic oligonucleotide
agggagacgtcggcgttatgataacctggc

SEQ ID NO: 270825 - DNA, 30 bp, Artificial Sequence
  Synthetic oligonucleotide
agtctcgacttgaatctgtgcttccctggc

SEQ ID NO: 270826 - DNA, 30 bp, Artificial Sequence
  Synthetic oligonucleotide
gagggttttgtcgaccgggtgacgcctggc

SEQ ID NO: 270827 - DNA, 30 bp, Artificial Sequence
  Synthetic oligonucleotide
ttggttgcaacaatatggtactggcctggc

SEQ ID NO: 270828 - DNA, 30 bp, Artificial Sequence
  Synthetic oligonucleotide
ccacagcgtagttcactagttgatgctggc

SEQ ID NO: 270829 - DNA, 30 bp, Artificial Sequence
  Synthetic oligonucleotide
gtttagttagatggtacgacatctgctggc

SEQ ID NO: 270830 - DNA, 30 bp, Artificial Sequence
  Synthetic oligonucleotide
cttagctttaacactctaaattttgctggc

SEQ ID NO: 270831 - DNA, 30 bp, Artificial Sequence
  Synthetic oligonucleotide
cgggatgatacagggcgaagcgcctctggc

SEQ ID NO: 270832 - DNA, 30 bp, Artificial Sequence
  Synthetic oligonucleotide
taacggcatataagaggtaggctctctggc

SEQ ID NO: 270833 - DNA, 30 bp, Artificial Sequence
  Synthetic oligonucleotide
ggacatacatactggggctctgagtctggc

SEQ ID NO: 270834 - DNA, 30 bp, Artificial Sequence
  Synthetic oligonucleotide
aataattggggtgcgagaatatattctggc

SEQ ID NO: 270835 - DNA, 30 bp, Artificial Sequence
  Synthetic oligonucleotide
gagttaggttgtagagggcccataagtggc

SEQ ID NO: 270836 - DNA, 30 bp, Artificial Sequence
  Synthetic oligonucleotide
gatcgtggcactgtaacaggtggtagtggc

SEQ ID NO: 270837 - DNA, 30 bp, Artificial Sequence
  Synthetic oligonucleotide
ctctaaagcgaagaccttctcaaacgtggc

SEQ ID NO: 270838 - DNA, 31 bp, Artificial Sequence
  Synthetic oligonucleotide
aaaccgccgtggaaagcgcgcataccgtggc

SEQ ID NO: 270839 - DNA, 30 bp, Artificial Sequence
  Synthetic oligonucleotide
ttgggttcaagtgatgtataatcccgtggc

SEQ ID NO: 270840 - DNA, 30 bp, Artificial Sequence
  Synthetic oligonucleotide
cgaggtttaaggcagctagtcccgcgtggc

SEQ ID NO: 270841 - DNA, 30 bp, Artificial Sequence
  Synthetic oligonucleotide
catgggatggccataggtctcctgcgtggc

SEQ ID NO: 270842 - DNA, 30 bp, Artificial Sequence
  Synthetic oligonucleotide
gtgcggatgttacgtcaatctcgaggtggc

SEQ ID NO: 270843 - DNA, 30 bp, Artificial Sequence
  Synthetic oligonucleotide
acagttagcccccttctgcaattgggtggc

SEQ ID NO: 270844 - DNA, 30 bp, Artificial Sequence
  Synthetic oligonucleotide
gtccaagcaaatacaaagggtaatggtggc

SEQ ID NO: 270845 - DNA, 30 bp, Artificial Sequence
  Synthetic oligonucleotide
atgcctgtgtaaacgtcagaacgatgtggc

SEQ ID NO: 270846 - DNA, 30 bp, Artificial Sequence
  Synthetic oligonucleotide
atggaagactatcagggactatagtgtggc

SEQ ID NO: 270847 - DNA, 30 bp, Artificial Sequence
  Synthetic oligonucleotide
acagatcggacccaattgcaccgttgtggc

SEQ ID NO: 270848 - DNA, 30 bp, Artificial Sequence
  Synthetic oligonucleotide
gtttgcaaaatcgacataaaggaaattggc

SEQ ID NO: 270849 - DNA, 30 bp, Artificial Sequence
  Synthetic oligonucleotide
ctgaatgtccaccagttaatgccaattggc

SEQ ID NO: 270850 - DNA, 30 bp, Artificial Sequence
  Synthetic oligonucleotide
tagtcctgcgtgtagaggaagttcattggc

SEQ ID NO: 270851 - DNA, 30 bp, Artificial Sequence
  Synthetic oligonucleotide
cctatatagtctagtgattatacgattggc

SEQ ID NO: 270852 - DNA, 30 bp, Artificial Sequence
  Synthetic oligonucleotide
tggtctatgatgtacatggcttgacttggc

SEQ ID NO: 270853 - DNA, 30 bp, Artificial Sequence
  Synthetic oligonucleotide
tgctacaaacaggccatgactgaagttggc

SEQ ID NO: 270854 - DNA, 30 bp, Artificial Sequence
  Synthetic oligonucleotide
ggcctcttatgatttaagattgaagttggc

SEQ ID NO: 270855 - DNA, 30 bp, Artificial Sequence
  Synthetic oligonucleotide
ggaccaattacagccagcaacgcagttggc

SEQ ID NO: 270856 - DNA, 30 bp, Artificial Sequence
  Synthetic oligonucleotide
ataagtggtgtttaataacccccggttggc

SEQ ID NO: 270857 - DNA, 30 bp, Artificial Sequence
  Synthetic oligonucleotide
cctgaattagtgcgttcgtggcaatttggc

SEQ ID NO: 270858 - DNA, 30 bp, Artificial Sequence
  Synthetic oligonucleotide
cggggtggagccgctgcactagaatttggc

SEQ ID NO: 270859 - DNA, 30 bp, Artificial Sequence
  Synthetic oligonucleotide
tatcgaacgcgggttaggggggcctttggc

SEQ ID NO: 270860 - DNA, 30 bp, Artificial Sequence
  Synthetic oligonucleotide
actgctcaattagaagcatgtagctttggc

SEQ ID NO: 270861 - DNA, 30 bp, Artificial Sequence
  Synthetic oligonucleotide
ccttatataaacgagaatactgtctttggc

SEQ ID NO: 270862 - DNA, 30 bp, Artificial Sequence
  Synthetic oligonucleotide
aagatccttcgataggggcgaaagtttggc

SEQ ID NO: 270863 - DNA, 30 bp, Artificial Sequence
  Synthetic oligonucleotide
gagtaagtactagcgtcaaatacgtttggc

SEQ ID NO: 270864 - DNA, 30 bp, Artificial Sequence
  Synthetic oligonucleotide
gtattcactatgcaaattactaggtttggc

SEQ ID NO: 270865 - DNA, 30 bp, Artificial Sequence
  Synthetic oligonucleotide
atcagtgcgaattttactagaaaaaaatgc

SEQ ID NO: 270866 - DNA, 30 bp, Artificial Sequence
  Synthetic oligonucleotide
gctattagcggtcaccgattgataaaatgc

SEQ ID NO: 270867 - DNA, 30 bp, Artificial Sequence
  Synthetic oligonucleotide
cctgtgttgttgatctgatgagtaaaatgc

SEQ ID NO: 270868 - DNA, 30 bp, Artificial Sequence
  Synthetic oligonucleotide
acaatgttgaggaagttccacggtaaatgc

SEQ ID NO: 270869 - DNA, 30 bp, Artificial Sequence
  Synthetic oligonucleotide
ctatgggtttgcaccctgcagggtaaatgc

SEQ ID NO: 270870 - DNA, 30 bp, Artificial Sequence
  Synthetic oligonucleotide
catgagtcaccgggctaggaaattaaatgc

SEQ ID NO: 270871 - DNA, 30 bp, Artificial Sequence
  Synthetic oligonucleotide
attttaaggcgtaatctaacgctacaatgc

SEQ ID NO: 270872 - DNA, 30 bp, Artificial Sequence
  Synthetic oligonucleotide
taaaggcgttacggttaaataaaccaatgc

SEQ ID NO: 270873 - DNA, 30 bp, Artificial Sequence
  Synthetic oligonucleotide
aaaataaaagttagttggactcaccaatgc

SEQ ID NO: 270874 - DNA, 30 bp, Artificial Sequence
  Synthetic oligonucleotide
tcctgaaaccatgctgtccctctccaatgc

SEQ ID NO: 270875 - DNA, 30 bp, Artificial Sequence
  Synthetic oligonucleotide
ctcgttaagtaaacgggcgtgcggcaatgc

SEQ ID NO: 270876 - DNA, 30 bp, Artificial Sequence
  Synthetic oligonucleotide
ataattacatcagtgtagtagtatcaatgc

SEQ ID NO: 270877 - DNA, 30 bp, Artificial Sequence
  Synthetic oligonucleotide
cgttagccactaggttgcggcaaagaatgc

SEQ ID NO: 270878 - DNA, 30 bp, Artificial Sequence
  Synthetic oligonucleotide
taatgcaatgtataccacttaaaggaatgc

SEQ ID NO: 270879 - DNA, 30 bp, Artificial Sequence
  Synthetic oligonucleotide
attattcggatgtacaagaccgaggaatgc

SEQ ID NO: 270880 - DNA, 30 bp, Artificial Sequence
  Synthetic oligonucleotide
tagaagttgtggcctcaccgtagataatgc

SEQ ID NO: 270881 - DNA, 30 bp, Artificial Sequence
  Synthetic oligonucleotide
cagtgaacgcggtttggctttatataatgc

SEQ ID NO: 270882 - DNA, 30 bp, Artificial Sequence
  Synthetic oligonucleotide
taagtgacatatcgcaattcagcctaatgc

SEQ ID NO: 270883 - DNA, 30 bp, Artificial Sequence
  Synthetic oligonucleotide
gacaattctagcccttagcgccagtaatgc

SEQ ID NO: 270884 - DNA, 30 bp, Artificial Sequence
  Synthetic oligonucleotide
gacccactgcccttcgtactatggtaatgc

SEQ ID NO: 270885 - DNA, 30 bp, Artificial Sequence
  Synthetic oligonucleotide
agaccacccgccaaaggggccaattaatgc

SEQ ID NO: 270886 - DNA, 30 bp, Artificial Sequence
  Synthetic oligonucleotide
ctgttttacaacaggcatgctaattaatgc

SEQ ID NO: 270887 - DNA, 30 bp, Artificial Sequence
  Synthetic oligonucleotide
tgtgtcagctcgctaagtgtttgttaatgc

SEQ ID NO: 270888 - DNA, 30 bp, Artificial Sequence
  Synthetic oligonucleotide
gatatagctcggccgacgtagggaacatgc

SEQ ID NO: 270889 - DNA, 30 bp, Artificial Sequence
  Synthetic oligonucleotide
aacagtggcatcacagcggcaaagacatgc

SEQ ID NO: 270890 - DNA, 30 bp, Artificial Sequence
  Synthetic oligonucleotide
gacgctcgacactacccgggcctgacatgc

SEQ ID NO: 270891 - DNA, 30 bp, Artificial Sequence
  Synthetic oligonucleotide
aggagcatacgtacccctgggcgtacatgc

SEQ ID NO: 270892 - DNA, 30 bp, Artificial Sequence
  Synthetic oligonucleotide
gcagctgggcatcatctcaacattacatgc

SEQ ID NO: 270893 - DNA, 30 bp, Artificial Sequence
  Synthetic oligonucleotide
tcatgcctctggggcaaatacataccatgc

SEQ ID NO: 270894 - DNA, 40 bp, Artificial Sequence
  Synthetic oligonucleotide
attttagcacctggggaagtttaaatagatcctcccatgc

SEQ ID NO: 270895 - DNA, 30 bp, Artificial Sequence
  Synthetic oligonucleotide
cttgggccctggtgcatgcgtcggccatgc

SEQ ID NO: 270896 - DNA, 30 bp, Artificial Sequence
  Synthetic oligonucleotide
ccccgtgcggttggttgggttgggccatgc

SEQ ID NO: 270897 - DNA, 30 bp, Artificial Sequence
  Synthetic oligonucleotide
caataagttcagagaatagggaatccatgc

SEQ ID NO: 270898 - DNA, 30 bp, Artificial Sequence
  Synthetic oligonucleotide
gcatatttgtgtgcatagcggacagcatgc

SEQ ID NO: 270899 - DNA, 30 bp, Artificial Sequence
  Synthetic oligonucleotide
gacttacaacggaggggacggccggcatgc

SEQ ID NO: 270900 - DNA, 30 bp, Artificial Sequence
  Synthetic oligonucleotide
taaatattagcgatccagtggcgtgcatgc

SEQ ID NO: 270901 - DNA, 30 bp, Artificial Sequence
  Synthetic oligonucleotide
atgggcatggcagatcttcatgaatcatgc

SEQ ID NO: 270902 - DNA, 30 bp, Artificial Sequence
  Synthetic oligonucleotide
gtgtatcttataggcactgagagatcatgc

SEQ ID NO: 270903 - DNA, 30 bp, Artificial Sequence
  Synthetic oligonucleotide
ccatgtgtagagataaattttaactcatgc

SEQ ID NO: 270904 - DNA, 30 bp, Artificial Sequence
  Synthetic oligonucleotide
cggaatagcgaccgcaaggacttaagatgc

SEQ ID NO: 270905 - DNA, 30 bp, Artificial Sequence
  Synthetic oligonucleotide
tgtatgtacctggatggtcagttaagatgc

SEQ ID NO: 270906 - DNA, 30 bp, Artificial Sequence
  Synthetic oligonucleotide
gtcttcattgccctgaggtttgacagatgc

SEQ ID NO: 270907 - DNA, 30 bp, Artificial Sequence
  Synthetic oligonucleotide
gtctacgtcttcactgttttctttcgatgc

SEQ ID NO: 270908 - DNA, 30 bp, Artificial Sequence
  Synthetic oligonucleotide
agaaaagtttccctgctaagagtaggatgc

SEQ ID NO: 270909 - DNA, 30 bp, Artificial Sequence
  Synthetic oligonucleotide
cttagcatacgagatcaaatggacggatgc

SEQ ID NO: 270910 - DNA, 30 bp, Artificial Sequence
  Synthetic oligonucleotide
tcgactcgataattggcgggctacggatgc

SEQ ID NO: 270911 - DNA, 30 bp, Artificial Sequence
  Synthetic oligonucleotide
acctagagccaattcagacgctggggatgc

SEQ ID NO: 270912 - DNA, 30 bp, Artificial Sequence
  Synthetic oligonucleotide
attgaaaaagcttaagggtcccatggatgc

SEQ ID NO: 270913 - DNA, 30 bp, Artificial Sequence
  Synthetic oligonucleotide
accggcttgctcaagtaagctcttggatgc

SEQ ID NO: 270914 - DNA, 30 bp, Artificial Sequence
  Synthetic oligonucleotide
ttcgtgcacgtgtacaggactgcatgatgc

SEQ ID NO: 270915 - DNA, 30 bp, Artificial Sequence
  Synthetic oligonucleotide
gatatcagggaaaacgcatatatctgatgc

SEQ ID NO: 270916 - DNA, 30 bp, Artificial Sequence
  Synthetic oligonucleotide
ccaacatatccaactatgggagtctgatgc

SEQ ID NO: 270917 - DNA, 30 bp, Artificial Sequence
  Synthetic oligonucleotide
tgctgtgggacgtacaaccgggtgtgatgc

SEQ ID NO: 270918 - DNA, 30 bp, Artificial Sequence
  Synthetic oligonucleotide
agataggtcacagttattagagaaatatgc

SEQ ID NO: 270919 - DNA, 30 bp, Artificial Sequence
  Synthetic oligonucleotide
agtggcagtgtcctaaaataggaaatatgc

SEQ ID NO: 270920 - DNA, 30 bp, Artificial Sequence
  Synthetic oligonucleotide
attgggccgggtgggcatactcccatatgc

SEQ ID NO: 270921 - DNA, 30 bp, Artificial Sequence
  Synthetic oligonucleotide
aatcacgttagtgtccgaggattcatatgc

SEQ ID NO: 270922 - DNA, 30 bp, Artificial Sequence
  Synthetic oligonucleotide
tcttttcaaagctgtgtagctgcactatgc

SEQ ID NO: 270923 - DNA, 30 bp, Artificial Sequence
  Synthetic oligonucleotide
aagttgaacagaaatggcaagtcactatgc

SEQ ID NO: 270924 - DNA, 30 bp, Artificial Sequence
  Synthetic oligonucleotide
ggagggcgcaggatgtttgtcggactatgc

SEQ ID NO: 270925 - DNA, 30 bp, Artificial Sequence
  Synthetic oligonucleotide
caatcttgaacatagctgaacatcctatgc

SEQ ID NO: 270926 - DNA, 30 bp, Artificial Sequence
  Synthetic oligonucleotide
ataaatatttacgtataccagatcctatgc

SEQ ID NO: 270927 - DNA, 30 bp, Artificial Sequence
  Synthetic oligonucleotide
caaaaccgaagtgtattaaaagtcctatgc

SEQ ID NO: 270928 - DNA, 30 bp, Artificial Sequence
  Synthetic oligonucleotide
gcacgaagggtaagttttccatttctatgc

SEQ ID NO: 270929 - DNA, 30 bp, Artificial Sequence
  Synthetic oligonucleotide
tcaacccctttcaggtctcgggaagtatgc

SEQ ID NO: 270930 - DNA, 30 bp, Artificial Sequence
  Synthetic oligonucleotide
gaggggagatgtaggttaagaccagtatgc

SEQ ID NO: 270931 - DNA, 30 bp, Artificial Sequence
  Synthetic oligonucleotide
cgtgtccccggcaggagtaaccgggtatgc

SEQ ID NO: 270932 - DNA, 30 bp, Artificial Sequence
  Synthetic oligonucleotide
gttaaggagatcactcaaatactattatgc

SEQ ID NO: 270933 - DNA, 30 bp, Artificial Sequence
  Synthetic oligonucleotide
gcggttgtaaccgcccgagactccttatgc

SEQ ID NO: 270934 - DNA, 30 bp, Artificial Sequence
  Synthetic oligonucleotide
gcgcccacacataaaaggtcatgcttatgc

SEQ ID NO: 270935 - DNA, 30 bp, Artificial Sequence
  Synthetic oligonucleotide
atgcttaggtaaatgtccggggtgttatgc

SEQ ID NO: 270936 - DNA, 30 bp, Artificial Sequence
  Synthetic oligonucleotide
tgacagacagtgaagcaaggcgttttatgc

SEQ ID NO: 270937 - DNA, 30 bp, Artificial Sequence
  Synthetic oligonucleotide
gtaaaaatgctgaagtccataccaaactgc

SEQ ID NO: 270938 - DNA, 30 bp, Artificial Sequence
  Synthetic oligonucleotide
tcacaccaagaaggccttattttaaactgc

SEQ ID NO: 270939 - DNA, 30 bp, Artificial Sequence
  Synthetic oligonucleotide
tgcacgtgcgattcagaaaacgcgcactgc

SEQ ID NO: 270940 - DNA, 30 bp, Artificial Sequence
  Synthetic oligonucleotide
tttttcatttctcagcgtagcgtgcactgc

SEQ ID NO: 270941 - DNA, 30 bp, Artificial Sequence
  Synthetic oligonucleotide
tttaagatgatattagacttgacagactgc

SEQ ID NO: 270942 - DNA, 30 bp, Artificial Sequence
  Synthetic oligonucleotide
acctcatatcagtgcgctgctgcagactgc

SEQ ID NO: 270943 - DNA, 30 bp, Artificial Sequence
  Synthetic oligonucleotide
caaaactcagtaggtctcaaaagagactgc

SEQ ID NO: 270944 - DNA, 30 bp, Artificial Sequence
  Synthetic oligonucleotide
gggcaagccggctcattgttagacgactgc

SEQ ID NO: 270945 - DNA, 30 bp, Artificial Sequence
  Synthetic oligonucleotide
atgggcgatacgcgcggtatatcctactgc

SEQ ID NO: 270946 - DNA, 30 bp, Artificial Sequence
  Synthetic oligonucleotide
ttatgtgctacgtgtgcttagggttactgc

SEQ ID NO: 270947 - DNA, 30 bp, Artificial Sequence
  Synthetic oligonucleotide
gtaaacctccgtggacagatggaaacctgc

SEQ ID NO: 270948 - DNA, 30 bp, Artificial Sequence
  Synthetic oligonucleotide
gaatagtgtacagatcctagagatacctgc

SEQ ID NO: 270949 - DNA, 30 bp, Artificial Sequence
  Synthetic oligonucleotide
aaaacccgaggattacaaatgctcccctgc

SEQ ID NO: 270950 - DNA, 30 bp, Artificial Sequence
  Synthetic oligonucleotide
gctgtccgtaaatacctgataagagcctgc

SEQ ID NO: 270951 - DNA, 30 bp, Artificial Sequence
  Synthetic oligonucleotide
tcgctgataggtacagcagaagctgcctgc

SEQ ID NO: 270952 - DNA, 30 bp, Artificial Sequence
  Synthetic oligonucleotide
cattggtcgctctactatgctcgtgcctgc

SEQ ID NO: 270953 - DNA, 30 bp, Artificial Sequence
  Synthetic oligonucleotide
cgattaggaccagccagtggcatgtcctgc

SEQ ID NO: 270954 - DNA, 30 bp, Artificial Sequence
  Synthetic oligonucleotide
cctaaattttcacaagctctgttgtcctgc

SEQ ID NO: 270955 - DNA, 30 bp, Artificial Sequence
  Synthetic oligonucleotide
gaccgtagggtttgtgcgatggattcctgc

SEQ ID NO: 270956 - DNA, 30 bp, Artificial Sequence
  Synthetic oligonucleotide
tcatgtacaattatggcggctcacagctgc

SEQ ID NO: 270957 - DNA, 30 bp, Artificial Sequence
  Synthetic oligonucleotide
gtttgcgagtctgcgggttcaatgcgctgc

SEQ ID NO: 270958 - DNA, 30 bp, Artificial Sequence
  Synthetic oligonucleotide
ctgttgataggaatataacgaattcgctgc

SEQ ID NO: 270959 - DNA, 30 bp, Artificial Sequence
  Synthetic oligonucleotide
cgtcgcattagagatacctttcatggctgc

SEQ ID NO: 270960 - DNA, 30 bp, Artificial Sequence
  Synthetic oligonucleotide
gtgacttctgttcagatgttaggtggctgc

SEQ ID NO: 270961 - DNA, 30 bp, Artificial Sequence
  Synthetic oligonucleotide
atggataccaggatgtttgcaaagtgctgc

SEQ ID NO: 270962 - DNA, 30 bp, Artificial Sequence
  Synthetic oligonucleotide
attgaacggcctccctcgggacgttgctgc

SEQ ID NO: 270963 - DNA, 30 bp, Artificial Sequence
  Synthetic oligonucleotide
gaacttatgtaaacgccaccggaaatctgc

SEQ ID NO: 270964 - DNA, 31 bp, Artificial Sequence
  Synthetic oligonucleotide
tgtgaggcttgtcgagacgagccgaatctgc

SEQ ID NO: 270965 - DNA, 30 bp, Artificial Sequence
  Synthetic oligonucleotide
gtgagagttcaacaatttaaaagcatctgc

SEQ ID NO: 270966 - DNA, 30 bp, Artificial Sequence
  Synthetic oligonucleotide
tgccttcaagtgattaaggcagagatctgc

SEQ ID NO: 270967 - DNA, 30 bp, Artificial Sequence
  Synthetic oligonucleotide
gtcaggagggggtactgtatggaactctgc

SEQ ID NO: 270968 - DNA, 30 bp, Artificial Sequence
  Synthetic oligonucleotide
agcgacattaaacgcgtgtgaggactctgc

SEQ ID NO: 270969 - DNA, 30 bp, Artificial Sequence
  Synthetic oligonucleotide
cgttcgtgccagaacttgccctgactctgc

SEQ ID NO: 270970 - DNA, 30 bp, Artificial Sequence
  Synthetic oligonucleotide
cacagggtctactagaagtaaggcctctgc

SEQ ID NO: 270971 - DNA, 30 bp, Artificial Sequence
  Synthetic oligonucleotide
tataacaataacaaccgagaatggctctgc

SEQ ID NO: 270972 - DNA, 30 bp, Artificial Sequence
  Synthetic oligonucleotide
gacacgaaatcgtgggtcatctggctctgc

SEQ ID NO: 270973 - DNA, 30 bp, Artificial Sequence
  Synthetic oligonucleotide
tagttagacacctagctgactctgctctgc

SEQ ID NO: 270974 - DNA, 30 bp, Artificial Sequence
  Synthetic oligonucleotide
gatatgacacatgtcaatatccttctctgc

SEQ ID NO: 270975 - DNA, 30 bp, Artificial Sequence
  Synthetic oligonucleotide
atcaaataataaggcctgtcagccgtctgc

SEQ ID NO: 270976 - DNA, 30 bp, Artificial Sequence
  Synthetic oligonucleotide
ctgtgcggcgctcgttacggttctgtctgc

SEQ ID NO: 270977 - DNA, 30 bp, Artificial Sequence
  Synthetic oligonucleotide
cgcggagctcaggcaggtatccgtgtctgc

SEQ ID NO: 270978 - DNA, 30 bp, Artificial Sequence
  Synthetic oligonucleotide
acttggcagttaatagttcgctagttctgc

SEQ ID NO: 270979 - DNA, 30 bp, Artificial Sequence
  Synthetic oligonucleotide
gtaacagcagccacatcagctcatttctgc

SEQ ID NO: 270980 - DNA, 30 bp, Artificial Sequence
  Synthetic oligonucleotide
ttaggaacatagcaaggataacgtttctgc

SEQ ID NO: 270981 - DNA, 30 bp, Artificial Sequence
  Synthetic oligonucleotide
tacggaatagtttcactatcaataaagtgc

SEQ ID NO: 270982 - DNA, 30 bp, Artificial Sequence
  Synthetic oligonucleotide
ggacgatttgctgagctaatgctaaagtgc

SEQ ID NO: 270983 - DNA, 30 bp, Artificial Sequence
  Synthetic oligonucleotide
ccttaaaaagttattctttggaacaagtgc

SEQ ID NO: 270984 - DNA, 30 bp, Artificial Sequence
  Synthetic oligonucleotide
tatgtccgatacaagatcgcgggcaagtgc

SEQ ID NO: 270985 - DNA, 30 bp, Artificial Sequence
  Synthetic oligonucleotide
ttcagctgcgggcgtcacgcacctaagtgc

SEQ ID NO: 270986 - DNA, 30 bp, Artificial Sequence
  Synthetic oligonucleotide
ccgtgcaggagttctatagggagtaagtgc

SEQ ID NO: 270987 - DNA, 30 bp, Artificial Sequence
  Synthetic oligonucleotide
ccccgacatgtcacttttattatgcagtgc

SEQ ID NO: 270988 - DNA, 29 bp, Artificial Sequence
  Synthetic oligonucleotide
ccaagtaatatgatagtccaagtcagtgc

SEQ ID NO: 270989 - DNA, 30 bp, Artificial Sequence
  Synthetic oligonucleotide
aagtggggatcactgattactcgagagtgc

SEQ ID NO: 270990 - DNA, 30 bp, Artificial Sequence
  Synthetic oligonucleotide
cagcgggtgcagataaaaaggctcgagtgc

SEQ ID NO: 270991 - DNA, 30 bp, Artificial Sequence
  Synthetic oligonucleotide
ggtctacagtcgttaatcataaatgagtgc

SEQ ID NO: 270992 - DNA, 30 bp, Artificial Sequence
  Synthetic oligonucleotide
aacaagcagtggtatacggctgtctagtgc

SEQ ID NO: 270993 - DNA, 30 bp, Artificial Sequence
  Synthetic oligonucleotide
tcagtcgacccagcctatgttccgtagtgc

SEQ ID NO: 270994 - DNA, 30 bp, Artificial Sequence
  Synthetic oligonucleotide
cacaagatggggcgtaaatttagttagtgc

SEQ ID NO: 270995 - DNA, 30 bp, Artificial Sequence
  Synthetic oligonucleotide
tgatcatatcgaactcgaaatatttagtgc

SEQ ID NO: 270996 - DNA, 30 bp, Artificial Sequence
  Synthetic oligonucleotide
gcggttacgtgagcatcgaattaaacgtgc

SEQ ID NO: 270997 - DNA, 30 bp, Artificial Sequence
  Synthetic oligonucleotide
accgacaacggttcatcattattcacgtgc

SEQ ID NO: 270998 - DNA, 30 bp, Artificial Sequence
  Synthetic oligonucleotide
gtgcggcctcccgtacaacgcccgacgtgc

SEQ ID NO: 270999 - DNA, 30 bp, Artificial Sequence
  Synthetic oligonucleotide
tgtacagaacattcatataattctacgtgc

SEQ ID NO: 271000 - DNA, 30 bp, Artificial Sequence
  Synthetic oligonucleotide
gctggttacgccaaataagctgaaccgtgc

SEQ ID NO: 271001 - DNA, 30 bp, Artificial Sequence
  Synthetic oligonucleotide
cggcccgcgcagagcccccgtgtaccgtgc

SEQ ID NO: 271002 - DNA, 30 bp, Artificial Sequence
  Synthetic oligonucleotide
gccgtgtattgacggtggagaaccccgtgc

SEQ ID NO: 271003 - DNA, 30 bp, Artificial Sequence
  Synthetic oligonucleotide
ataactaatacaaaccggcgattcccgtgc

SEQ ID NO: 271004 - DNA, 30 bp, Artificial Sequence
  Synthetic oligonucleotide
tatttttccacactacaacattctccgtgc

SEQ ID NO: 271005 - DNA, 31 bp, Artificial Sequence
  Synthetic oligonucleotide
ggtaaaatctaaggtggcccaggcagcgtgc

SEQ ID NO: 271006 - DNA, 30 bp, Artificial Sequence
  Synthetic oligonucleotide
ccatacgtccgtgggatgcgaatcgcgtgc

SEQ ID NO: 271007 - DNA, 30 bp, Artificial Sequence
  Synthetic oligonucleotide
tcatgcgcagggcgaataatactcgcgtgc

SEQ ID NO: 271008 - DNA, 30 bp, Artificial Sequence
  Synthetic oligonucleotide
gagcgaggtcaggcgccaaacggggcgtgc

SEQ ID NO: 271009 - DNA, 30 bp, Artificial Sequence
  Synthetic oligonucleotide
acggcggtcacgtaataattttgggcgtgc

SEQ ID NO: 271010 - DNA, 30 bp, Artificial Sequence
  Synthetic oligonucleotide
ttaggccacacgagcgtaacgttggcgtgc

SEQ ID NO: 271011 - DNA, 30 bp, Artificial Sequence
  Synthetic oligonucleotide
cttgtgaaagtgctcttaattgctgcgtgc

SEQ ID NO: 271012 - DNA, 30 bp, Artificial Sequence
  Synthetic oligonucleotide
tgaggactagacccggatatcggatcgtgc

SEQ ID NO: 271013 - DNA, 30 bp, Artificial Sequence
  Synthetic oligonucleotide
ggcaatgtgttctagtgcaggctctcgtgc

SEQ ID NO: 271014 - DNA, 30 bp, Artificial Sequence
  Synthetic oligonucleotide
gacgcacaggtatgctgtgccttctcgtgc

SEQ ID NO: 271015 - DNA, 30 bp, Artificial Sequence
  Synthetic oligonucleotide
tccgtacttgctttctccggaagttcgtgc

SEQ ID NO: 271016 - DNA, 30 bp, Artificial Sequence
  Synthetic oligonucleotide
gcaacgagggcgctttgggcattttcgtgc

SEQ ID NO: 271017 - DNA, 30 bp, Artificial Sequence
  Synthetic oligonucleotide
ccgaatgtcaacgtttggaggacaaggtgc

SEQ ID NO: 271018 - DNA, 30 bp, Artificial Sequence
  Synthetic oligonucleotide
ttaatgcccggggtcttagcgcataggtgc

SEQ ID NO: 271019 - DNA, 30 bp, Artificial Sequence
  Synthetic oligonucleotide
tgctgcacataggacatgaccactaggtgc

SEQ ID NO: 271020 - DNA, 30 bp, Artificial Sequence
  Synthetic oligonucleotide
agagggccaagacaggggggcgttaggtgc

SEQ ID NO: 271021 - DNA, 30 bp, Artificial Sequence
  Synthetic oligonucleotide
ggcgcaccgcagaaatccagttttaggtgc

SEQ ID NO: 271022 - DNA, 30 bp, Artificial Sequence
  Synthetic oligonucleotide
ggagaacactaaatactgaacttacggtgc

SEQ ID NO: 271023 - DNA, 30 bp, Artificial Sequence
  Synthetic oligonucleotide
ataggtctggaaagacttactaagcggtgc

SEQ ID NO: 271024 - DNA, 30 bp, Artificial Sequence
  Synthetic oligonucleotide
tccgcgagggacctaaccgtggagcggtgc

SEQ ID NO: 271025 - DNA, 30 bp, Artificial Sequence
  Synthetic oligonucleotide
catggaaacctggcgtagacatgtcggtgc

SEQ ID NO: 271026 - DNA, 30 bp, Artificial Sequence
  Synthetic oligonucleotide
cggggaactgatttctgctatggcgggtgc

SEQ ID NO: 271027 - DNA, 30 bp, Artificial Sequence
  Synthetic oligonucleotide
ggactgttgaagggtgggcaatgcgggtgc

SEQ ID NO: 271028 - DNA, 30 bp, Artificial Sequence
  Synthetic oligonucleotide
gggactgtttatttgtatccaatggggtgc

SEQ ID NO: 271029 - DNA, 30 bp, Artificial Sequence
  Synthetic oligonucleotide
tgagatcttgcgtacttcgcgaatgggtgc

SEQ ID NO: 271030 - DNA, 30 bp, Artificial Sequence
  Synthetic oligonucleotide
gacacattgattgggacctagcgtgggtgc

SEQ ID NO: 271031 - DNA, 30 bp, Artificial Sequence
  Synthetic oligonucleotide
ttaacttgcagtggatcgaagctatggtgc

SEQ ID NO: 271032 - DNA, 30 bp, Artificial Sequence
  Synthetic oligonucleotide
agtgaggtcggtggccccgatttatggtgc

SEQ ID NO: 271033 - DNA, 30 bp, Artificial Sequence
  Synthetic oligonucleotide
gggagatgtgacaaaaccccactgtggtgc

SEQ ID NO: 271034 - DNA, 30 bp, Artificial Sequence
  Synthetic oligonucleotide
gttaagtactccgtgttatcaggcatgtgc

SEQ ID NO: 271035 - DNA, 30 bp, Artificial Sequence
  Synthetic oligonucleotide
gtactagccgaggaagtgatgttcatgtgc

SEQ ID NO: 271036 - DNA, 30 bp, Artificial Sequence
  Synthetic oligonucleotide
aacgaacggcgctagtttcttaatatgtgc

SEQ ID NO: 271037 - DNA, 30 bp, Artificial Sequence
  Synthetic oligonucleotide
ataggcgctaggtgtaggtgtcaactgtgc

SEQ ID NO: 271038 - DNA, 30 bp, Artificial Sequence
  Synthetic oligonucleotide
gtacattggccaatgaatgtgccactgtgc

SEQ ID NO: 271039 - DNA, 30 bp, Artificial Sequence
  Synthetic oligonucleotide
ggtcagtcatagaagcactttaccctgtgc

SEQ ID NO: 271040 - DNA, 30 bp, Artificial Sequence
  Synthetic oligonucleotide
cccctgttagggtaaatactgtagctgtgc

SEQ ID NO: 271041 - DNA, 30 bp, Artificial Sequence
  Synthetic oligonucleotide
gctcacaacgtgaggtatcatgcgctgtgc

SEQ ID NO: 271042 - DNA, 30 bp, Artificial Sequence
  Synthetic oligonucleotide
ataagaggccaggtataggttgcgctgtgc

SEQ ID NO: 271043 - DNA, 30 bp, Artificial Sequence
  Synthetic oligonucleotide
gagcatccgcgtacgaagggctcgctgtgc

SEQ ID NO: 271044 - DNA, 30 bp, Artificial Sequence
  Synthetic oligonucleotide
ttacttccaagggacgagctctatgtgtgc

SEQ ID NO: 271045 - DNA, 30 bp, Artificial Sequence
  Synthetic oligonucleotide
tggctcgacagcgaaatacaaacattgtgc

SEQ ID NO: 271046 - DNA, 30 bp, Artificial Sequence
  Synthetic oligonucleotide
ttaccagggttgtcctctatcagcttgtgc

SEQ ID NO: 271047 - DNA, 30 bp, Artificial Sequence
  Synthetic oligonucleotide
tgacccgatgctccatcagctcgtttgtgc

SEQ ID NO: 271048 - DNA, 30 bp, Artificial Sequence
  Synthetic oligonucleotide
agtgcggcctcagtggatcattttttgtgc

SEQ ID NO: 271049 - DNA, 30 bp, Artificial Sequence
  Synthetic oligonucleotide
aactcaaagtcaactaccgtgggcaattgc

SEQ ID NO: 271050 - DNA, 30 bp, Artificial Sequence
  Synthetic oligonucleotide
gttgtttcagactaactgaaaatcaattgc

SEQ ID NO: 271051 - DNA, 30 bp, Artificial Sequence
  Synthetic oligonucleotide
gataatcatttggtgtgcggtcctaattgc

SEQ ID NO: 271052 - DNA, 30 bp, Artificial Sequence
  Synthetic oligonucleotide
taactacgctagacgataaaaaaccattgc

SEQ ID NO: 271053 - DNA, 30 bp, Artificial Sequence
  Synthetic oligonucleotide
cttcctataaagatggtaggggaccattgc

SEQ ID NO: 271054 - DNA, 30 bp, Artificial Sequence
  Synthetic oligonucleotide
aggcgggctctagaagtgccatcccattgc

SEQ ID NO: 271055 - DNA, 30 bp, Artificial Sequence
  Synthetic oligonucleotide
gtttaacgcacttagcgacccgatcattgc

SEQ ID NO: 271056 - DNA, 30 bp, Artificial Sequence
  Synthetic oligonucleotide
aggaattgtccagcgtaaaatactcattgc

SEQ ID NO: 271057 - DNA, 30 bp, Artificial Sequence
  Synthetic oligonucleotide
acaaattcatggtctctcgattaagattgc

SEQ ID NO: 271058 - DNA, 30 bp, Artificial Sequence
  Synthetic oligonucleotide
tctgtgcctgttatgggcagatgagattgc

SEQ ID NO: 271059 - DNA, 30 bp, Artificial Sequence
  Synthetic oligonucleotide
agtcctatacattgacctggtgtggattgc

SEQ ID NO: 271060 - DNA, 30 bp, Artificial Sequence
  Synthetic oligonucleotide
gcggagcgctactgcttttcgatctattgc

SEQ ID NO: 271061 - DNA, 30 bp, Artificial Sequence
  Synthetic oligonucleotide
taagggttcgaaggtcatgctctctattgc

SEQ ID NO: 271062 - DNA, 30 bp, Artificial Sequence
  Synthetic oligonucleotide
gcgtcattcttgtgatcttttccgtattgc

SEQ ID NO: 271063 - DNA, 30 bp, Artificial Sequence
  Synthetic oligonucleotide
ggatgcggtaccaactggaagttgtattgc

SEQ ID NO: 271064 - DNA, 30 bp, Artificial Sequence
  Synthetic oligonucleotide
gacgcttgcttgagcatagtacgttattgc

SEQ ID NO: 271065 - DNA, 30 bp, Artificial Sequence
  Synthetic oligonucleotide
tgtttcttgctgttattaaatggttattgc

SEQ ID NO: 271066 - DNA, 30 bp, Artificial Sequence
  Synthetic oligonucleotide
agatggttattgtaccatttcaaaacttgc

SEQ ID NO: 271067 - DNA, 30 bp, Artificial Sequence
  Synthetic oligonucleotide
tgacctcaactggaactatcataaacttgc

SEQ ID NO: 271068 - DNA, 30 bp, Artificial Sequence
  Synthetic oligonucleotide
atgcgtcatctttaagccaatccaacttgc

SEQ ID NO: 271069 - DNA, 29 bp, Artificial Sequence
  Synthetic oligonucleotide
aactgaggtagtaggatagatggacttgc

SEQ ID NO: 271070 - DNA, 30 bp, Artificial Sequence
  Synthetic oligonucleotide
agggtaaatgcatcgaaattagaaccttgc

SEQ ID NO: 271071 - DNA, 30 bp, Artificial Sequence
  Synthetic oligonucleotide
tacgggcgaggcttccccgcgataccttgc

SEQ ID NO: 271072 - DNA, 30 bp, Artificial Sequence
  Synthetic oligonucleotide
tcgttcacgagatgggattgtctaccttgc

SEQ ID NO: 271073 - DNA, 30 bp, Artificial Sequence
  Synthetic oligonucleotide
ccgtccgttgcggtgcgaaatgtaccttgc

SEQ ID NO: 271074 - DNA, 30 bp, Artificial Sequence
  Synthetic oligonucleotide
tcaaaccatggttagtcaaagcacccttgc

SEQ ID NO: 271075 - DNA, 30 bp, Artificial Sequence
  Synthetic oligonucleotide
cttgcgggcatggcttaccccctcccttgc

SEQ ID NO: 271076 - DNA, 30 bp, Artificial Sequence
  Synthetic oligonucleotide
cccatgtatctcacccaacgcgcgccttgc

SEQ ID NO: 271077 - DNA, 30 bp, Artificial Sequence
  Synthetic oligonucleotide
aaatgcgcactattagagagacatccttgc

SEQ ID NO: 271078 - DNA, 30 bp, Artificial Sequence
  Synthetic oligonucleotide
attcaatgggaggggtctgaggttccttgc

SEQ ID NO: 271079 - DNA, 30 bp, Artificial Sequence
  Synthetic oligonucleotide
gtagatcgcggacggggttaaatggcttgc

SEQ ID NO: 271080 - DNA, 30 bp, Artificial Sequence
  Synthetic oligonucleotide
cgattaagatttttggtaattgtggcttgc

SEQ ID NO: 271081 - DNA, 30 bp, Artificial Sequence
  Synthetic oligonucleotide
cccagccaggaggtgcagggtcatgcttgc

SEQ ID NO: 271082 - DNA, 30 bp, Artificial Sequence
  Synthetic oligonucleotide
ccgaagatccgcctttgcacagtgtcttgc

SEQ ID NO: 271083 - DNA, 30 bp, Artificial Sequence
  Synthetic oligonucleotide
gatgggggccagaatgagcacgtgtcttgc

SEQ ID NO: 271084 - DNA, 30 bp, Artificial Sequence
  Synthetic oligonucleotide
cagcgtaatggaggtgccagggattcttgc

SEQ ID NO: 271085 - DNA, 30 bp, Artificial Sequence
  Synthetic oligonucleotide
gtcttgtacataggacatttccaaagttgc

SEQ ID NO: 271086 - DNA, 30 bp, Artificial Sequence
  Synthetic oligonucleotide
aatatcctaaacagctagttgcaaagttgc

SEQ ID NO: 271087 - DNA, 30 bp, Artificial Sequence
  Synthetic oligonucleotide
tcccttcgcttggctttgataaagagttgc

SEQ ID NO: 271088 - DNA, 30 bp, Artificial Sequence
  Synthetic oligonucleotide
catagcagaaattttggcttggggagttgc

SEQ ID NO: 271089 - DNA, 30 bp, Artificial Sequence
  Synthetic oligonucleotide
ttcaatatctaatcgcaggatgctagttgc

SEQ ID NO: 271090 - DNA, 30 bp, Artificial Sequence
  Synthetic oligonucleotide
cagagccaagcaatcggtgacacccgttgc

SEQ ID NO: 271091 - DNA, 30 bp, Artificial Sequence
  Synthetic oligonucleotide
agaacggccgtgaatcatcttgcccgttgc

SEQ ID NO: 271092 - DNA, 30 bp, Artificial Sequence
  Synthetic oligonucleotide
gtttagcggagatcttatctcaagcgttgc

SEQ ID NO: 271093 - DNA, 30 bp, Artificial Sequence
  Synthetic oligonucleotide
gaacattgggtcatcgtgagagttcgttgc

SEQ ID NO: 271094 - DNA, 30 bp, Artificial Sequence
  Synthetic oligonucleotide
gtaggtacgtccttataccgcgttcgttgc

SEQ ID NO: 271095 - DNA, 30 bp, Artificial Sequence
  Synthetic oligonucleotide
tcaccgcgttatagggtatgagcaggttgc

SEQ ID NO: 271096 - DNA, 30 bp, Artificial Sequence
  Synthetic oligonucleotide
tgtaacagaatagacctaagaataggttgc

SEQ ID NO: 271097 - DNA, 30 bp, Artificial Sequence
  Synthetic oligonucleotide
gcaatgaccaagcacaagcggataggttgc

SEQ ID NO: 271098 - DNA, 30 bp, Artificial Sequence
  Synthetic oligonucleotide
tctattccaaggtccggtctgctaggttgc

SEQ ID NO: 271099 - DNA, 30 bp, Artificial Sequence
  Synthetic oligonucleotide
catgcgatttgaacagcaagaatgggttgc

SEQ ID NO: 271100 - DNA, 30 bp, Artificial Sequence
  Synthetic oligonucleotide
tggtgtcgccaggcaggacgaaaatgttgc

SEQ ID NO: 271101 - DNA, 30 bp, Artificial Sequence
  Synthetic oligonucleotide
caggctgggaccgaggatacaggatgttgc

SEQ ID NO: 271102 - DNA, 30 bp, Artificial Sequence
  Synthetic oligonucleotide
ttagctggcccaagcgatagtggatgttgc

SEQ ID NO: 271103 - DNA, 30 bp, Artificial Sequence
  Synthetic oligonucleotide
ttttaaaattggggacgggcgatatgttgc

SEQ ID NO: 271104 - DNA, 30 bp, Artificial Sequence
  Synthetic oligonucleotide
taaaaagtggccgggagttgaacgtgttgc

SEQ ID NO: 271105 - DNA, 30 bp, Artificial Sequence
  Synthetic oligonucleotide
acttgtagattaaaagattgctattgttgc

SEQ ID NO: 271106 - DNA, 30 bp, Artificial Sequence
  Synthetic oligonucleotide
caattgtcaccaattcgatagccttgttgc

SEQ ID NO: 271107 - DNA, 30 bp, Artificial Sequence
  Synthetic oligonucleotide
gcgcttgacaatatatcctgatcaatttgc

SEQ ID NO: 271108 - DNA, 30 bp, Artificial Sequence
  Synthetic oligonucleotide
ggaggccatttcggccccatgggaatttgc

SEQ ID NO: 271109 - DNA, 30 bp, Artificial Sequence
  Synthetic oligonucleotide
tgggttagtaactaagtattaataatttgc

SEQ ID NO: 271110 - DNA, 30 bp, Artificial Sequence
  Synthetic oligonucleotide
taagattagaacgagtgtaataacatttgc

SEQ ID NO: 271111 - DNA, 30 bp, Artificial Sequence
  Synthetic oligonucleotide
gaggtgggcagctttcaacatgacatttgc

SEQ ID NO: 271112 - DNA, 30 bp, Artificial Sequence
  Synthetic oligonucleotide
gcagggtgacgtgcagtttcaggcatttgc

SEQ ID NO: 271113 - DNA, 30 bp, Artificial Sequence
  Synthetic oligonucleotide
cacaaaattaggaacgtgtttttcatttgc

SEQ ID NO: 271114 - DNA, 30 bp, Artificial Sequence
  Synthetic oligonucleotide
cgtatcgcaaatgagtataaatagatttgc

SEQ ID NO: 271115 - DNA, 30 bp, Artificial Sequence
  Synthetic oligonucleotide
gacatggtagctccgatacggccgatttgc

SEQ ID NO: 271116 - DNA, 30 bp, Artificial Sequence
  Synthetic oligonucleotide
tgcaaagagccgcctggaatagatatttgc

SEQ ID NO: 271117 - DNA, 30 bp, Artificial Sequence
  Synthetic oligonucleotide
gatgtcatactaaagcagaaaagactttgc

SEQ ID NO: 271118 - DNA, 30 bp, Artificial Sequence
  Synthetic oligonucleotide
aaagcactctccagcttagcattcctttgc

SEQ ID NO: 271119 - DNA, 30 bp, Artificial Sequence
  Synthetic oligonucleotide
tggcggagcttgtcttagcggcagctttgc

SEQ ID NO: 271120 - DNA, 30 bp, Artificial Sequence
  Synthetic oligonucleotide
tcaccgtgtactcagtactggcatctttgc

SEQ ID NO: 271121 - DNA, 30 bp, Artificial Sequence
  Synthetic oligonucleotide
gagcgcgagaaaatagaagatccggtttgc

SEQ ID NO: 271122 - DNA, 29 bp, Artificial Sequence
  Synthetic oligonucleotide
ggcgatacgtcatgattttccgggtttgc

SEQ ID NO: 271123 - DNA, 30 bp, Artificial Sequence
  Synthetic oligonucleotide
cgtctacctacggattttttctttgtttgc

SEQ ID NO: 271124 - DNA, 30 bp, Artificial Sequence
  Synthetic oligonucleotide
agccgcgtaaggtatattggacgattttgc

SEQ ID NO: 271125 - DNA, 30 bp, Artificial Sequence
  Synthetic oligonucleotide
cactaataagcggactctttcaacttttgc

SEQ ID NO: 271126 - DNA, 30 bp, Artificial Sequence
  Synthetic oligonucleotide
taaagagctattactccaaatgtcttttgc

SEQ ID NO: 271127 - DNA, 30 bp, Artificial Sequence
  Synthetic oligonucleotide
attgtccaggctagatactggcggttttgc

SEQ ID NO: 271128 - DNA, 30 bp, Artificial Sequence
  Synthetic oligonucleotide
ggtatttaagaaagtccgggcgaaaaaatc

SEQ ID NO: 271129 - DNA, 30 bp, Artificial Sequence
  Synthetic oligonucleotide
gtgacactaacgtacatcagccgaaaaatc

SEQ ID NO: 271130 - DNA, 30 bp, Artificial Sequence
  Synthetic oligonucleotide
caggtccggagagttgccgagcacaaaatc

SEQ ID NO: 271131 - DNA, 30 bp, Artificial Sequence
  Synthetic oligonucleotide
gggtaatcgatggcgcgagtttacaaaatc

SEQ ID NO: 271132 - DNA, 30 bp, Artificial Sequence
  Synthetic oligonucleotide
aacgcgggaatcagcctacttagcaaaatc

SEQ ID NO: 271133 - DNA, 30 bp, Artificial Sequence
  Synthetic oligonucleotide
cgatctggatcagcaaccttagagaaaatc

SEQ ID NO: 271134 - DNA, 30 bp, Artificial Sequence
  Synthetic oligonucleotide
atcatacggctcaccgcctcaagtaaaatc

SEQ ID NO: 271135 - DNA, 30 bp, Artificial Sequence
  Synthetic oligonucleotide
aaggatcttcgcaagaatagtcttaaaatc

SEQ ID NO: 271136 - DNA, 30 bp, Artificial Sequence
  Synthetic oligonucleotide
aaacggagtggaccctaagggacacaaatc

SEQ ID NO: 271137 - DNA, 30 bp, Artificial Sequence
  Synthetic oligonucleotide
tttgccattaggataagtttcccgcaaatc

SEQ ID NO: 271138 - DNA, 30 bp, Artificial Sequence
  Synthetic oligonucleotide
acggcgtctctagtaaacgctcatcaaatc

SEQ ID NO: 271139 - DNA, 30 bp, Artificial Sequence
  Synthetic oligonucleotide
tgtggttggtgacgttacccctgagaaatc

SEQ ID NO: 271140 - DNA, 30 bp, Artificial Sequence
  Synthetic oligonucleotide
ctaaggtacagttccctgaggatagaaatc

SEQ ID NO: 271141 - DNA, 30 bp, Artificial Sequence
  Synthetic oligonucleotide
aggcgggtaatactggaggctagcgaaatc

SEQ ID NO: 271142 - DNA, 30 bp, Artificial Sequence
  Synthetic oligonucleotide
tagcggagtgtttatacgatcaaggaaatc

SEQ ID NO: 271143 - DNA, 30 bp, Artificial Sequence
  Synthetic oligonucleotide
ccgtgggccggaaattagaagacggaaatc

SEQ ID NO: 271144 - DNA, 30 bp, Artificial Sequence
  Synthetic oligonucleotide
gatatctaggggtctccagtaagggaaatc

SEQ ID NO: 271145 - DNA, 30 bp, Artificial Sequence
  Synthetic oligonucleotide
gggacgacccagattaccgaatgggaaatc

SEQ ID NO: 271146 - DNA, 30 bp, Artificial Sequence
  Synthetic oligonucleotide
atagggacgctgtcacgggccgttgaaatc

SEQ ID NO: 271147 - DNA, 30 bp, Artificial Sequence
  Synthetic oligonucleotide
agcgctacgtcctcggttgtggcataaatc

SEQ ID NO: 271148 - DNA, 30 bp, Artificial Sequence
  Synthetic oligonucleotide
tcttcccgggcacgcatcgggagataaatc

SEQ ID NO: 271149 - DNA, 30 bp, Artificial Sequence
  Synthetic oligonucleotide
aggccgattagcttccagtagttctaaatc

SEQ ID NO: 271150 - DNA, 30 bp, Artificial Sequence
  Synthetic oligonucleotide
cacatcaagcgctttgccttccagtaaatc

SEQ ID NO: 271151 - DNA, 30 bp, Artificial Sequence
  Synthetic oligonucleotide
ccgcacacatgcaatcgcgactagtaaatc

SEQ ID NO: 271152 - DNA, 30 bp, Artificial Sequence
  Synthetic oligonucleotide
agttagctcacatggcgacgtaattaaatc

SEQ ID NO: 271153 - DNA, 30 bp, Artificial Sequence
  Synthetic oligonucleotide
tctgtcatacaagaaaagatcagttaaatc

SEQ ID NO: 271154 - DNA, 30 bp, Artificial Sequence
  Synthetic oligonucleotide
ttagggcaaacgccattcctataaacaatc

SEQ ID NO: 271155 - DNA, 30 bp, Artificial Sequence
  Synthetic oligonucleotide
tacggtgtcgcttgtcgtattggcacaatc

SEQ ID NO: 271156 - DNA, 30 bp, Artificial Sequence
  Synthetic oligonucleotide
aatgcatatattatgcgttacgggacaatc

SEQ ID NO: 271157 - DNA, 30 bp, Artificial Sequence
  Synthetic oligonucleotide
tgaaccccaacgtgattaaccgagccaatc

SEQ ID NO: 271158 - DNA, 30 bp, Artificial Sequence
  Synthetic oligonucleotide
cgagtttcgggtgttgccgcctagccaatc

SEQ ID NO: 271159 - DNA, 30 bp, Artificial Sequence
  Synthetic oligonucleotide
ctcttaaacgtctgaatctagtgtccaatc

SEQ ID NO: 271160 - DNA, 30 bp, Artificial Sequence
  Synthetic oligonucleotide
ggggtaatacatacacggataatagcaatc

SEQ ID NO: 271161 - DNA, 30 bp, Artificial Sequence
  Synthetic oligonucleotide
aggcatacaacacgcgcacgccgcgcaatc

SEQ ID NO: 271162 - DNA, 30 bp, Artificial Sequence
  Synthetic oligonucleotide
ctggttctcaagttgtggacaaaggcaatc

SEQ ID NO: 271163 - DNA, 30 bp, Artificial Sequence
  Synthetic oligonucleotide
agcatataccagctcctgacaaaggcaatc

SEQ ID NO: 271164 - DNA, 30 bp, Artificial Sequence
  Synthetic oligonucleotide
gtccagcaaccaaaagttgcgggggcaatc

SEQ ID NO: 271165 - DNA, 30 bp, Artificial Sequence
  Synthetic oligonucleotide
cagcgtgagcgtacaaccaggggggcaatc

SEQ ID NO: 271166 - DNA, 30 bp, Artificial Sequence
  Synthetic oligonucleotide
gtggtacgcgtatgccaccgaagtgcaatc

SEQ ID NO: 271167 - DNA, 30 bp, Artificial Sequence
  Synthetic oligonucleotide
gctcgttcagaagccagcggtagatcaatc

SEQ ID NO: 271168 - DNA, 30 bp, Artificial Sequence
  Synthetic oligonucleotide
gacttgtagtcaagtggcgcatagtcaatc

SEQ ID NO: 271169 - DNA, 30 bp, Artificial Sequence
  Synthetic oligonucleotide
agggcttgcatagcgtcactatagtcaatc

SEQ ID NO: 271170 - DNA, 30 bp, Artificial Sequence
  Synthetic oligonucleotide
attttaacgaacagagggtgttagtcaatc

SEQ ID NO: 271171 - DNA, 30 bp, Artificial Sequence
  Synthetic oligonucleotide
gaaatgtgattgaatcgtataaggtcaatc

SEQ ID NO: 271172 - DNA, 30 bp, Artificial Sequence
  Synthetic oligonucleotide
gctcctcacggtcacgtgttaacttcaatc

SEQ ID NO: 271173 - DNA, 30 bp, Artificial Sequence
  Synthetic oligonucleotide
gtagatcactctcgtatggcttcttcaatc

SEQ ID NO: 271174 - DNA, 30 bp, Artificial Sequence
  Synthetic oligonucleotide
tgagatacatgtggggaacaaagttcaatc

SEQ ID NO: 271175 - DNA, 30 bp, Artificial Sequence
  Synthetic oligonucleotide
gctttggcagtcaataggagcctcagaatc

SEQ ID NO: 271176 - DNA, 30 bp, Artificial Sequence
  Synthetic oligonucleotide
cctctagtgcgcgtacacaagctgagaatc

SEQ ID NO: 271177 - DNA, 30 bp, Artificial Sequence
  Synthetic oligonucleotide
tttaactaagatataggacatggtagaatc

SEQ ID NO: 271178 - DNA, 30 bp, Artificial Sequence
  Synthetic oligonucleotide
tgaccatttgcgcacatttacattagaatc

SEQ ID NO: 271179 - DNA, 30 bp, Artificial Sequence
  Synthetic oligonucleotide
actgtctccggaagggttaaagttagaatc

SEQ ID NO: 271180 - DNA, 30 bp, Artificial Sequence
  Synthetic oligonucleotide
atcaaccataagacctattaataacgaatc

SEQ ID NO: 271181 - DNA, 30 bp, Artificial Sequence
  Synthetic oligonucleotide
taacgtcccaaacgtttattctaacgaatc

SEQ ID NO: 271182 - DNA, 30 bp, Artificial Sequence
  Synthetic oligonucleotide
tgttcgcgcctggttgtaactagacgaatc

SEQ ID NO: 271183 - DNA, 30 bp, Artificial Sequence
  Synthetic oligonucleotide
cgggcgacgcagtgggtctatgagcgaatc

SEQ ID NO: 271184 - DNA, 30 bp, Artificial Sequence
  Synthetic oligonucleotide
atgagtgagactcctaagttcgaaggaatc

SEQ ID NO: 271185 - DNA, 30 bp, Artificial Sequence
  Synthetic oligonucleotide
atgtttaaaaataagctgcagctaggaatc

SEQ ID NO: 271186 - DNA, 30 bp, Artificial Sequence
  Synthetic oligonucleotide
tagttggtacctgcgtaggtcaacggaatc

SEQ ID NO: 271187 - DNA, 30 bp, Artificial Sequence
  Synthetic oligonucleotide
tcacccaagactcaggtacgccacggaatc

SEQ ID NO: 271188 - DNA, 30 bp, Artificial Sequence
  Synthetic oligonucleotide
tgccggactcacaaaccgggatccggaatc

SEQ ID NO: 271189 - DNA, 30 bp, Artificial Sequence
  Synthetic oligonucleotide
ccaaccagcatttgcgtcataattggaatc

SEQ ID NO: 271190 - DNA, 30 bp, Artificial Sequence
  Synthetic oligonucleotide
gacaacctggcggaaatgtgaaactgaatc

SEQ ID NO: 271191 - DNA, 30 bp, Artificial Sequence
  Synthetic oligonucleotide
ccttggtccaagcccagttctagctgaatc

SEQ ID NO: 271192 - DNA, 30 bp, Artificial Sequence
  Synthetic oligonucleotide
ggaaggccctgatttttgaacatctgaatc

SEQ ID NO: 271193 - DNA, 30 bp, Artificial Sequence
  Synthetic oligonucleotide
ggagggggtgtaagtctgatcttctgaatc

SEQ ID NO: 271194 - DNA, 30 bp, Artificial Sequence
  Synthetic oligonucleotide
cgaatcttgagcgcatgggtcaagtgaatc

SEQ ID NO: 271195 - DNA, 30 bp, Artificial Sequence
  Synthetic oligonucleotide
ctaaagccgagatcagccacctattgaatc

SEQ ID NO: 271196 - DNA, 30 bp, Artificial Sequence
  Synthetic oligonucleotide
acggtgttcctgcttcaccgcgtttgaatc

SEQ ID NO: 271197 - DNA, 30 bp, Artificial Sequence
  Synthetic oligonucleotide
tacttacgagaatcagagtttttttgaatc

SEQ ID NO: 271198 - DNA, 30 bp, Artificial Sequence
  Synthetic oligonucleotide
atcctagggttaggagtaatgctaataatc

SEQ ID NO: 271199 - DNA, 31 bp, Artificial Sequence
  Synthetic oligonucleotide
ctgaggtaagagccccaatacgcgcataatc

SEQ ID NO: 271200 - DNA, 30 bp, Artificial Sequence
  Synthetic oligonucleotide
agcagggctggatttcaaattaagataatc

SEQ ID NO: 271201 - DNA, 30 bp, Artificial Sequence
  Synthetic oligonucleotide
cttaccatacctgatggagaccggataatc

SEQ ID NO: 271202 - DNA, 30 bp, Artificial Sequence
  Synthetic oligonucleotide
gctgtgtggggtaaaaatgcagatataatc

SEQ ID NO: 271203 - DNA, 30 bp, Artificial Sequence
  Synthetic oligonucleotide
gctggcgtaggggttactcggtaactaatc

SEQ ID NO: 271204 - DNA, 30 bp, Artificial Sequence
  Synthetic oligonucleotide
gggacacctgggtcgtatatagacctaatc

SEQ ID NO: 271205 - DNA, 30 bp, Artificial Sequence
  Synthetic oligonucleotide
tatattgttcgtcgacgattctacctaatc

SEQ ID NO: 271206 - DNA, 30 bp, Artificial Sequence
  Synthetic oligonucleotide
cgcttacataaaacgcagaaacctctaatc

SEQ ID NO: 271207 - DNA, 30 bp, Artificial Sequence
  Synthetic oligonucleotide
gggagttctcggtgaaagtcgcacgtaatc

SEQ ID NO: 271208 - DNA, 30 bp, Artificial Sequence
  Synthetic oligonucleotide
tcaggtgatagcttagaaaagatggtaatc

SEQ ID NO: 271209 - DNA, 30 bp, Artificial Sequence
  Synthetic oligonucleotide
gctcgataatccaagcgtttgggtgtaatc

SEQ ID NO: 271210 - DNA, 30 bp, Artificial Sequence
  Synthetic oligonucleotide
agcaaccaggagctgacatagaagttaatc

SEQ ID NO: 271211 - DNA, 30 bp, Artificial Sequence
  Synthetic oligonucleotide
tatcgcgcatcaacgacataccgtttaatc

SEQ ID NO: 271212 - DNA, 30 bp, Artificial Sequence
  Synthetic oligonucleotide
aactgactttgcggtgtgcgagaaaacatc

SEQ ID NO: 271213 - DNA, 30 bp, Artificial Sequence
  Synthetic oligonucleotide
gtgacacgggcagtaatcttcggcaacatc

SEQ ID NO: 271214 - DNA, 30 bp, Artificial Sequence
  Synthetic oligonucleotide
gtaaaaatgtgcgggcctcctacgaacatc

SEQ ID NO: 271215 - DNA, 30 bp, Artificial Sequence
  Synthetic oligonucleotide
taaaggtggacccttaggctcgtgaacatc

SEQ ID NO: 271216 - DNA, 30 bp, Artificial Sequence
  Synthetic oligonucleotide
tgtttagggacgctactaaataataacatc

SEQ ID NO: 271217 - DNA, 30 bp, Artificial Sequence
  Synthetic oligonucleotide
tacctatcccgaaatgtagcccataacatc

SEQ ID NO: 271218 - DNA, 30 bp, Artificial Sequence
  Synthetic oligonucleotide
acgcgaccgggcgcagtggtgattaacatc

SEQ ID NO: 271219 - DNA, 30 bp, Artificial Sequence
  Synthetic oligonucleotide
aaaggaaaaagaatgctacgcggacacatc

SEQ ID NO: 271220 - DNA, 30 bp, Artificial Sequence
  Synthetic oligonucleotide
caaggatttgccaagcgacaggctcacatc

SEQ ID NO: 271221 - DNA, 30 bp, Artificial Sequence
  Synthetic oligonucleotide
agtcctacaaaggattgaaggggtcacatc

SEQ ID NO: 271222 - DNA, 30 bp, Artificial Sequence
  Synthetic oligonucleotide
tctcgcatgcgaaactaggcaggagacatc

SEQ ID NO: 271223 - DNA, 30 bp, Artificial Sequence
  Synthetic oligonucleotide
tttgagccatatgctgagctgctagacatc

SEQ ID NO: 271224 - DNA, 30 bp, Artificial Sequence
  Synthetic oligonucleotide
acgtcgtggccaaagtatgagctcgacatc

SEQ ID NO: 271225 - DNA, 30 bp, Artificial Sequence
  Synthetic oligonucleotide
aaggacgtctgcgggacggctcaggacatc

SEQ ID NO: 271226 - DNA, 30 bp, Artificial Sequence
  Synthetic oligonucleotide
ggaggctgtggaaggagacggcgggacatc

SEQ ID NO: 271227 - DNA, 30 bp, Artificial Sequence
  Synthetic oligonucleotide
gcacacccctggaagggatgatttgacatc

SEQ ID NO: 271228 - DNA, 30 bp, Artificial Sequence
  Synthetic oligonucleotide
gtctggtggtttatcatcgtctcatacatc

SEQ ID NO: 271229 - DNA, 30 bp, Artificial Sequence
  Synthetic oligonucleotide
acctggataagtactggtatctgatacatc

SEQ ID NO: 271230 - DNA, 30 bp, Artificial Sequence
  Synthetic oligonucleotide
gaaaaaattgtctgagccaacgtatacatc

SEQ ID NO: 271231 - DNA, 30 bp, Artificial Sequence
  Synthetic oligonucleotide
cactagacggttcagatggtcgattacatc

SEQ ID NO: 271232 - DNA, 30 bp, Artificial Sequence
  Synthetic oligonucleotide
caaaaatccaccctgtctagcagttacatc

SEQ ID NO: 271233 - DNA, 30 bp, Artificial Sequence
  Synthetic oligonucleotide
tcctctatgaatgagaggtacgtttacatc

SEQ ID NO: 271234 - DNA, 30 bp, Artificial Sequence
  Synthetic oligonucleotide
tcagtttgccggtaacgtatgttttacatc

SEQ ID NO: 271235 - DNA, 30 bp, Artificial Sequence
  Synthetic oligonucleotide
ttggattcagcacgtaaacggcgcaccatc

SEQ ID NO: 271236 - DNA, 30 bp, Artificial Sequence
  Synthetic oligonucleotide
aacataaatgggaccaacgtctcgaccatc

SEQ ID NO: 271237 - DNA, 30 bp, Artificial Sequence
  Synthetic oligonucleotide
cgcgaactcaatgtggggccccggaccatc

SEQ ID NO: 271238 - DNA, 30 bp, Artificial Sequence
  Synthetic oligonucleotide
tgatcggatcgtgccttcgaatggaccatc

SEQ ID NO: 271239 - DNA, 30 bp, Artificial Sequence
  Synthetic oligonucleotide
tacgtatgaacgtgtgaccttcataccatc

SEQ ID NO: 271240 - DNA, 30 bp, Artificial Sequence
  Synthetic oligonucleotide
gggagagctgctgttcttctagaacccatc

SEQ ID NO: 271241 - DNA, 30 bp, Artificial Sequence
  Synthetic oligonucleotide
ggctcgtagacctcaagggacccccccatc

SEQ ID NO: 271242 - DNA, 30 bp, Artificial Sequence
  Synthetic oligonucleotide
gtcttggcctccggcactacctcccccatc

SEQ ID NO: 271243 - DNA, 30 bp, Artificial Sequence
  Synthetic oligonucleotide
cggacgggatagtgtccatgatgccccatc

SEQ ID NO: 271244 - DNA, 30 bp, Artificial Sequence
  Synthetic oligonucleotide
accgggcgacttaaactctatatccccatc

SEQ ID NO: 271245 - DNA, 30 bp, Artificial Sequence
  Synthetic oligonucleotide
tctcaatgggatcccagacatgcgcccatc

SEQ ID NO: 271246 - DNA, 30 bp, Artificial Sequence
  Synthetic oligonucleotide
gtacgcgacaacagtatttcccttcccatc

SEQ ID NO: 271247 - DNA, 30 bp, Artificial Sequence
  Synthetic oligonucleotide
agctggagcgctggaccccagtaagccatc

SEQ ID NO: 271248 - DNA, 30 bp, Artificial Sequence
  Synthetic oligonucleotide
gctactcaacgtagtctaagacaggccatc

SEQ ID NO: 271249 - DNA, 30 bp, Artificial Sequence
  Synthetic oligonucleotide
cgggcttaggcagatttgggcccggccatc

SEQ ID NO: 271250 - DNA, 30 bp, Artificial Sequence
  Synthetic oligonucleotide
ggaaccaacggcaggcggagataatccatc

SEQ ID NO: 271251 - DNA, 30 bp, Artificial Sequence
  Synthetic oligonucleotide
gcgcgaccagattagtggtatgcatccatc

SEQ ID NO: 271252 - DNA, 30 bp, Artificial Sequence
  Synthetic oligonucleotide
atagctcgacaaatcgcgcggatatccatc

SEQ ID NO: 271253 - DNA, 30 bp, Artificial Sequence
  Synthetic oligonucleotide
aggatctaaggcagccttgacggttccatc

SEQ ID NO: 271254 - DNA, 30 bp, Artificial Sequence
  Synthetic oligonucleotide
tttgatgagtatcggaaaaatagaagcatc

SEQ ID NO: 271255 - DNA, 30 bp, Artificial Sequence
  Synthetic oligonucleotide
tcgtggcttcgcgtaggcttagaacgcatc

SEQ ID NO: 271256 - DNA, 30 bp, Artificial Sequence
  Synthetic oligonucleotide
caggataaggatatctgcggtggacgcatc

SEQ ID NO: 271257 - DNA, 30 bp, Artificial Sequence
  Synthetic oligonucleotide
taaggtcggttgtctcaatctggccgcatc

SEQ ID NO: 271258 - DNA, 30 bp, Artificial Sequence
  Synthetic oligonucleotide
tatagctaggtgacgctacccctccgcatc

SEQ ID NO: 271259 - DNA, 30 bp, Artificial Sequence
  Synthetic oligonucleotide
ttagactccagagttggggatcgtcgcatc

SEQ ID NO: 271260 - DNA, 30 bp, Artificial Sequence
  Synthetic oligonucleotide
cagagggtatgttaaggatgcattcgcatc

SEQ ID NO: 271261 - DNA, 30 bp, Artificial Sequence
  Synthetic oligonucleotide
cggaaataatagtggacgacgggaggcatc

SEQ ID NO: 271262 - DNA, 30 bp, Artificial Sequence
  Synthetic oligonucleotide
gcacgttgaatatgagtgtgcaacggcatc

SEQ ID NO: 271263 - DNA, 30 bp, Artificial Sequence
  Synthetic oligonucleotide
aacattcaagattcacacttcctcggcatc

SEQ ID NO: 271264 - DNA, 30 bp, Artificial Sequence
  Synthetic oligonucleotide
tattcgcggtgtccgagtggatatggcatc

SEQ ID NO: 271265 - DNA, 30 bp, Artificial Sequence
  Synthetic oligonucleotide
ataatttgcagcaacgagtaaagtggcatc

SEQ ID NO: 271266 - DNA, 30 bp, Artificial Sequence
  Synthetic oligonucleotide
cggattgaaggtaactacgttacgtgcatc

SEQ ID NO: 271267 - DNA, 30 bp, Artificial Sequence
  Synthetic oligonucleotide
atactacgtaatggacatctgtcaatcatc

SEQ ID NO: 271268 - DNA, 30 bp, Artificial Sequence
  Synthetic oligonucleotide
ggtatattaatctacacttgattcatcatc

SEQ ID NO: 271269 - DNA, 30 bp, Artificial Sequence
  Synthetic oligonucleotide
ggcaaccaatatccgtcagcttcgatcatc

SEQ ID NO: 271270 - DNA, 30 bp, Artificial Sequence
  Synthetic oligonucleotide
ccacattcaggcgactaatgcgatatcatc

SEQ ID NO: 271271 - DNA, 30 bp, Artificial Sequence
  Synthetic oligonucleotide
caacgagccgccaaggataattgtatcatc

SEQ ID NO: 271272 - DNA, 30 bp, Artificial Sequence
  Synthetic oligonucleotide
gaggcgtagggcagtactggtgcactcatc

SEQ ID NO: 271273 - DNA, 30 bp, Artificial Sequence
  Synthetic oligonucleotide
ttagccaggcggaatgtaccgcatctcatc

SEQ ID NO: 271274 - DNA, 30 bp, Artificial Sequence
  Synthetic oligonucleotide
gagaaagggaccacgattgttctcgtcatc

SEQ ID NO: 271275 - DNA, 30 bp, Artificial Sequence
  Synthetic oligonucleotide
gcgtcactattaggatgattaccattcatc

SEQ ID NO: 271276 - DNA, 30 bp, Artificial Sequence
  Synthetic oligonucleotide
agtagtctggagtcatccgggtgattcatc

SEQ ID NO: 271277 - DNA, 30 bp, Artificial Sequence
  Synthetic oligonucleotide
actagtacgtggggtagttataggttcatc

SEQ ID NO: 271278 - DNA, 30 bp, Artificial Sequence
  Synthetic oligonucleotide
tcgatagaattagcgacgtaagggttcatc

SEQ ID NO: 271279 - DNA, 30 bp, Artificial Sequence
  Synthetic oligonucleotide
agtaagggtgggattcctgcacgtttcatc

SEQ ID NO: 271280 - DNA, 30 bp, Artificial Sequence
  Synthetic oligonucleotide
ccctggttgcatagaagggggggtttcatc

SEQ ID NO: 271281 - DNA, 30 bp, Artificial Sequence
  Synthetic oligonucleotide
atcggtctatataagtagtaccaaaagatc

SEQ ID NO: 271282 - DNA, 30 bp, Artificial Sequence
  Synthetic oligonucleotide
gggaacaacgaggcccatctttacaagatc

SEQ ID NO: 271283 - DNA, 30 bp, Artificial Sequence
  Synthetic oligonucleotide
gcagggtggatgcccttaattcgcaagatc

SEQ ID NO: 271284 - DNA, 30 bp, Artificial Sequence
  Synthetic oligonucleotide
ttaggagcacgacacgagcgcattaagatc

SEQ ID NO: 271285 - DNA, 30 bp, Artificial Sequence
  Synthetic oligonucleotide
cgataacggtcgcgcgggccaaaacagatc

SEQ ID NO: 271286 - DNA, 30 bp, Artificial Sequence
  Synthetic oligonucleotide
cgcgaatacagagtactgctgttacagatc

SEQ ID NO: 271287 - DNA, 31 bp, Artificial Sequence
  Synthetic oligonucleotide
ccctattacaggaatatggcccgaccagatc

SEQ ID NO: 271288 - DNA, 30 bp, Artificial Sequence
  Synthetic oligonucleotide
tatgacgagcataatacacagtagcagatc

SEQ ID NO: 271289 - DNA, 30 bp, Artificial Sequence
  Synthetic oligonucleotide
gatgaaggctcagaggcgggtgatcagatc

SEQ ID NO: 271290 - DNA, 30 bp, Artificial Sequence
  Synthetic oligonucleotide
ctgccgtgggaggaacacgagtctcagatc

SEQ ID NO: 271291 - DNA, 30 bp, Artificial Sequence
  Synthetic oligonucleotide
ggacgatgtaaacagaaaactaaagagatc

SEQ ID NO: 271292 - DNA, 30 bp, Artificial Sequence
  Synthetic oligonucleotide
actcgagtatgccagtcggctatagagatc

SEQ ID NO: 271293 - DNA, 30 bp, Artificial Sequence
  Synthetic oligonucleotide
atcggagctcgggtaaggaatcccgagatc

SEQ ID NO: 271294 - DNA, 30 bp, Artificial Sequence
  Synthetic oligonucleotide
atgctggcggtggattaaatactggagatc

SEQ ID NO: 271295 - DNA, 30 bp, Artificial Sequence
  Synthetic oligonucleotide
ggcagtgcacggtagggcggcactgagatc

SEQ ID NO: 271296 - DNA, 30 bp, Artificial Sequence
  Synthetic oligonucleotide
ttggaccagttttaagggcacgtgtagatc

SEQ ID NO: 271297 - DNA, 30 bp, Artificial Sequence
  Synthetic oligonucleotide
tagtttggtacgtgcgcgaggtaaacgatc

SEQ ID NO: 271298 - DNA, 30 bp, Artificial Sequence
  Synthetic oligonucleotide
ggacagtgggtacgtatgtaccatacgatc

SEQ ID NO: 271299 - DNA, 30 bp, Artificial Sequence
  Synthetic oligonucleotide
cgggaatgtagagttcacctggtcccgatc

SEQ ID NO: 271300 - DNA, 30 bp, Artificial Sequence
  Synthetic oligonucleotide
atcaattccgaccacagcgtcgagccgatc

SEQ ID NO: 271301 - DNA, 30 bp, Artificial Sequence
  Synthetic oligonucleotide
ccgcgtggaaccttccacggatgagcgatc

SEQ ID NO: 271302 - DNA, 30 bp, Artificial Sequence
  Synthetic oligonucleotide
acagctcattacacatgggtaaacgcgatc

SEQ ID NO: 271303 - DNA, 30 bp, Artificial Sequence
  Synthetic oligonucleotide
gacatgacttacagaacgtcacacgcgatc

SEQ ID NO: 271304 - DNA, 30 bp, Artificial Sequence
  Synthetic oligonucleotide
ggatcatcattagacgaggctttatcgatc

SEQ ID NO: 271305 - DNA, 30 bp, Artificial Sequence
  Synthetic oligonucleotide
tcatattaatcaatagcatcatagtcgatc

SEQ ID NO: 271306 - DNA, 30 bp, Artificial Sequence
  Synthetic oligonucleotide
tgccgaggattcgcatattacaattcgatc

SEQ ID NO: 271307 - DNA, 30 bp, Artificial Sequence
  Synthetic oligonucleotide
gctggtaaacaagcgacctatcaaaggatc

SEQ ID NO: 271308 - DNA, 30 bp, Artificial Sequence
  Synthetic oligonucleotide
gcgctgtagaaggatctctgttgaaggatc

SEQ ID NO: 271309 - DNA, 30 bp, Artificial Sequence
  Synthetic oligonucleotide
atgtagaggattggttatgcccacaggatc

SEQ ID NO: 271310 - DNA, 30 bp, Artificial Sequence
  Synthetic oligonucleotide
tacgtttacccccagcttttacagaggatc

SEQ ID NO: 271311 - DNA, 30 bp, Artificial Sequence
  Synthetic oligonucleotide
accgcggtttactattcgtagatgaggatc

SEQ ID NO: 271312 - DNA, 30 bp, Artificial Sequence
  Synthetic oligonucleotide
ggtgccctgttgctcttcagggtgaggatc

SEQ ID NO: 271313 - DNA, 30 bp, Artificial Sequence
  Synthetic oligonucleotide
gagtcaagagggtcgatttgtgttaggatc

SEQ ID NO: 271314 - DNA, 30 bp, Artificial Sequence
  Synthetic oligonucleotide
gtgtgttcaagactcctactcgaacggatc

SEQ ID NO: 271315 - DNA, 30 bp, Artificial Sequence
  Synthetic oligonucleotide
ctcggggaaaggaacagcttcttacggatc

SEQ ID NO: 271316 - DNA, 30 bp, Artificial Sequence
  Synthetic oligonucleotide
ggattggtcataagagtatgacaccggatc

SEQ ID NO: 271317 - DNA, 30 bp, Artificial Sequence
  Synthetic oligonucleotide
taaatcgtcatctgatttgctggccggatc

SEQ ID NO: 271318 - DNA, 30 bp, Artificial Sequence
  Synthetic oligonucleotide
ttgtccccgacgaaattccctgtccggatc

SEQ ID NO: 271319 - DNA, 30 bp, Artificial Sequence
  Synthetic oligonucleotide
caaatcaaaaatttttttttcagcgggatc

SEQ ID NO: 271320 - DNA, 30 bp, Artificial Sequence
  Synthetic oligonucleotide
gctattgatccggcctgagaatgcgggatc

SEQ ID NO: 271321 - DNA, 30 bp, Artificial Sequence
  Synthetic oligonucleotide
tgaacattgtgtcacgtgtatgaggggatc

SEQ ID NO: 271322 - DNA, 30 bp, Artificial Sequence
  Synthetic oligonucleotide
agaacgctgtctctgagatcaaatgggatc

SEQ ID NO: 271323 - DNA, 30 bp, Artificial Sequence
  Synthetic oligonucleotide
tgtctcaacgatagggctaaagctgggatc

SEQ ID NO: 271324 - DNA, 30 bp, Artificial Sequence
  Synthetic oligonucleotide
attgtcaagcgagcacactaatgtgggatc

SEQ ID NO: 271325 - DNA, 30 bp, Artificial Sequence
  Synthetic oligonucleotide
aaataccgacatagatagtgccaatggatc

SEQ ID NO: 271326 - DNA, 30 bp, Artificial Sequence
  Synthetic oligonucleotide
gtcgccaataggttcaccctatgatggatc

SEQ ID NO: 271327 - DNA, 30 bp, Artificial Sequence
  Synthetic oligonucleotide
gtggaactatttccatgtgaagactggatc

SEQ ID NO: 271328 - DNA, 30 bp, Artificial Sequence
  Synthetic oligonucleotide
gatctgcacagcgtgatctgaaagtggatc

SEQ ID NO: 271329 - DNA, 30 bp, Artificial Sequence
  Synthetic oligonucleotide
ctcggattggattgcttgtgcaagtggatc

SEQ ID NO: 271330 - DNA, 30 bp, Artificial Sequence
  Synthetic oligonucleotide
caattatttcgagatataatggcgtggatc

SEQ ID NO: 271331 - DNA, 30 bp, Artificial Sequence
  Synthetic oligonucleotide
ttgtgccctagttctataatcaggtggatc

SEQ ID NO: 271332 - DNA, 30 bp, Artificial Sequence
  Synthetic oligonucleotide
taaggtgcttgatccatgttagtgtggatc

SEQ ID NO: 271333 - DNA, 30 bp, Artificial Sequence
  Synthetic oligonucleotide
ctaaatttgacttcagtgactgtgtggatc

SEQ ID NO: 271334 - DNA, 30 bp, Artificial Sequence
  Synthetic oligonucleotide
aaaacaggttgttctgtccaacattggatc

SEQ ID NO: 271335 - DNA, 30 bp, Artificial Sequence
  Synthetic oligonucleotide
cctaaccagtaatgaaacgaagattggatc

SEQ ID NO: 271336 - DNA, 31 bp, Artificial Sequence
  Synthetic oligonucleotide
tcagagattcacctagcgttatccttggatc

SEQ ID NO: 271337 - DNA, 30 bp, Artificial Sequence
  Synthetic oligonucleotide
actgctagtagcgcacgaaggggttggatc

SEQ ID NO: 271338 - DNA, 30 bp, Artificial Sequence
  Synthetic oligonucleotide
aaataaagggggtttaagctcttcatgatc

SEQ ID NO: 271339 - DNA, 30 bp, Artificial Sequence
  Synthetic oligonucleotide
aaaggtgatcttaattatagccagatgatc

SEQ ID NO: 271340 - DNA, 30 bp, Artificial Sequence
  Synthetic oligonucleotide
cgcgggtgtgtatcatatttagagatgatc

SEQ ID NO: 271341 - DNA, 30 bp, Artificial Sequence
  Synthetic oligonucleotide
gcaaaattagggacctcgattacgatgatc

SEQ ID NO: 271342 - DNA, 30 bp, Artificial Sequence
  Synthetic oligonucleotide
cggggtcacgatcttgtagcaatactgatc

SEQ ID NO: 271343 - DNA, 30 bp, Artificial Sequence
  Synthetic oligonucleotide
ggctccattggaaaagcaggtatcctgatc

SEQ ID NO: 271344 - DNA, 30 bp, Artificial Sequence
  Synthetic oligonucleotide
cagatggcggctacacaaagggcgctgatc

SEQ ID NO: 271345 - DNA, 30 bp, Artificial Sequence
  Synthetic oligonucleotide
caacttgttagaagtcttgacctcgtgatc

SEQ ID NO: 271346 - DNA, 30 bp, Artificial Sequence
  Synthetic oligonucleotide
tacgcacgtcgtctaaacaccggggtgatc

SEQ ID NO: 271347 - DNA, 30 bp, Artificial Sequence
  Synthetic oligonucleotide
aatcctaacgtctgtccatgtactgtgatc

SEQ ID NO: 271348 - DNA, 30 bp, Artificial Sequence
  Synthetic oligonucleotide
gtgcccgactaatgtagggctggattgatc

SEQ ID NO: 271349 - DNA, 30 bp, Artificial Sequence
  Synthetic oligonucleotide
caaatctccatttctgagagcatattgatc

SEQ ID NO: 271350 - DNA, 30 bp, Artificial Sequence
  Synthetic oligonucleotide
tcaggagactgggacgggctcacaaatatc

SEQ ID NO: 271351 - DNA, 30 bp, Artificial Sequence
  Synthetic oligonucleotide
gagtagagttagaacacaaagtagaatatc

SEQ ID NO: 271352 - DNA, 29 bp, Artificial Sequence
  Synthetic oligonucleotide
gtcagacgtttcttttagcgaggaatatc

SEQ ID NO: 271353 - DNA, 30 bp, Artificial Sequence
  Synthetic oligonucleotide
aaatgggtaagtagtatgtttaaacatatc

SEQ ID NO: 271354 - DNA, 30 bp, Artificial Sequence
  Synthetic oligonucleotide
acaccatccgcgtcaactagacagcatatc

SEQ ID NO: 271355 - DNA, 30 bp, Artificial Sequence
  Synthetic oligonucleotide
ggaagtggagataccctcaccgagcatatc

SEQ ID NO: 271356 - DNA, 30 bp, Artificial Sequence
  Synthetic oligonucleotide
ggtgggtgggtctgatacattaatcatatc

SEQ ID NO: 271357 - DNA, 30 bp, Artificial Sequence
  Synthetic oligonucleotide
cactacgtggcgttattcgaggcagatatc

SEQ ID NO: 271358 - DNA, 30 bp, Artificial Sequence
  Synthetic oligonucleotide
aggccgtatgctgaattagagggagatatc

SEQ ID NO: 271359 - DNA, 30 bp, Artificial Sequence
  Synthetic oligonucleotide
tttgaactgaataggggacatagcgatatc

SEQ ID NO: 271360 - DNA, 30 bp, Artificial Sequence
  Synthetic oligonucleotide
caaaagcccaatcatgcgcggagtgatatc

SEQ ID NO: 271361 - DNA, 30 bp, Artificial Sequence
  Synthetic oligonucleotide
gtcttaatgttctatgtgccgggtgatatc

SEQ ID NO: 271362 - DNA, 30 bp, Artificial Sequence
  Synthetic oligonucleotide
acctcgattactgcatacggatgatatatc

SEQ ID NO: 271363 - DNA, 30 bp, Artificial Sequence
  Synthetic oligonucleotide
aggagaggacctttatttgtattatatatc

SEQ ID NO: 271364 - DNA, 30 bp, Artificial Sequence
  Synthetic oligonucleotide
taggttcgtagcccaaccgattcctatatc

SEQ ID NO: 271365 - DNA, 30 bp, Artificial Sequence
  Synthetic oligonucleotide
aatgtagcgttcggatggtatcaaactatc

SEQ ID NO: 271366 - DNA, 30 bp, Artificial Sequence
  Synthetic oligonucleotide
ggcttactctggataaaatcgacaactatc

SEQ ID NO: 271367 - DNA, 30 bp, Artificial Sequence
  Synthetic oligonucleotide
gactgcaaaggaatgatacgcgtaactatc

SEQ ID NO: 271368 - DNA, 30 bp, Artificial Sequence
  Synthetic oligonucleotide
gcagggtaacggaaaataggtagcactatc

SEQ ID NO: 271369 - DNA, 30 bp, Artificial Sequence
  Synthetic oligonucleotide
ctacaaagctttcaactcgtgcggactatc

SEQ ID NO: 271370 - DNA, 30 bp, Artificial Sequence
  Synthetic oligonucleotide
cgtttcctcaaaccggaaacggttactatc

SEQ ID NO: 271371 - DNA, 30 bp, Artificial Sequence
  Synthetic oligonucleotide
ctcgtccgagtcgaggaaagccaacctatc

SEQ ID NO: 271372 - DNA, 30 bp, Artificial Sequence
  Synthetic oligonucleotide
gtactaatgccaagaaatccaatacctatc

SEQ ID NO: 271373 - DNA, 30 bp, Artificial Sequence
  Synthetic oligonucleotide
aggtcgatcggttaagtagcgacccctatc

SEQ ID NO: 271374 - DNA, 30 bp, Artificial Sequence
  Synthetic oligonucleotide
gaaatgagtccgcttatgaaacctcctatc

SEQ ID NO: 271375 - DNA, 30 bp, Artificial Sequence
  Synthetic oligonucleotide
cacatactcactatgcatagtccagctatc

SEQ ID NO: 271376 - DNA, 30 bp, Artificial Sequence
  Synthetic oligonucleotide
gggtagcaatagtaggaaatggccgctatc

SEQ ID NO: 271377 - DNA, 30 bp, Artificial Sequence
  Synthetic oligonucleotide
ctgaacctcaacgatgccggcatggctatc

SEQ ID NO: 271378 - DNA, 30 bp, Artificial Sequence
  Synthetic oligonucleotide
tgcgtgtccgtgtggcgtcgtacgtctatc

SEQ ID NO: 271379 - DNA, 30 bp, Artificial Sequence
  Synthetic oligonucleotide
agatacgcgaggcgtaatctcgtgtctatc

SEQ ID NO: 271380 - DNA, 30 bp, Artificial Sequence
  Synthetic oligonucleotide
cgtagtggggccacgaagatactttctatc

SEQ ID NO: 271381 - DNA, 30 bp, Artificial Sequence
  Synthetic oligonucleotide
catcgacctgactttacgagccaaagtatc

SEQ ID NO: 271382 - DNA, 30 bp, Artificial Sequence
  Synthetic oligonucleotide
taaggcaccggatccgaactagaaagtatc

SEQ ID NO: 271383 - DNA, 30 bp, Artificial Sequence
  Synthetic oligonucleotide
gagggatgtatggcccggtaagcaagtatc

SEQ ID NO: 271384 - DNA, 30 bp, Artificial Sequence
  Synthetic oligonucleotide
gactgcggtgccggataatcccagagtatc

SEQ ID NO: 271385 - DNA, 30 bp, Artificial Sequence
  Synthetic oligonucleotide
cttggacaagaggccgttagatggagtatc

SEQ ID NO: 271386 - DNA, 30 bp, Artificial Sequence
  Synthetic oligonucleotide
tgtgggagtgagattaccagcatgagtatc

SEQ ID NO: 271387 - DNA, 30 bp, Artificial Sequence
  Synthetic oligonucleotide
cagttccgtccgaggagtatactgagtatc

SEQ ID NO: 271388 - DNA, 30 bp, Artificial Sequence
  Synthetic oligonucleotide
ttcaaagttccttaagtaagcgtgagtatc

SEQ ID NO: 271389 - DNA, 30 bp, Artificial Sequence
  Synthetic oligonucleotide
ctgggctcccgaaattcggagttgagtatc

SEQ ID NO: 271390 - DNA, 30 bp, Artificial Sequence
  Synthetic oligonucleotide
tgtaaccaccagaagttagttttgagtatc

SEQ ID NO: 271391 - DNA, 30 bp, Artificial Sequence
  Synthetic oligonucleotide
tctcctaacatatcacagttacatagtatc

SEQ ID NO: 271392 - DNA, 30 bp, Artificial Sequence
  Synthetic oligonucleotide
agcgccccaaaaagagcgtcttgtagtatc

SEQ ID NO: 271393 - DNA, 30 bp, Artificial Sequence
  Synthetic oligonucleotide
ccaatcgggcgggcgaatcacacccgtatc

SEQ ID NO: 271394 - DNA, 30 bp, Artificial Sequence
  Synthetic oligonucleotide
ctgcaacaggattatgaacagttccgtatc

SEQ ID NO: 271395 - DNA, 30 bp, Artificial Sequence
  Synthetic oligonucleotide
ttcgttcgacatcatgggatgttccgtatc

SEQ ID NO: 271396 - DNA, 30 bp, Artificial Sequence
  Synthetic oligonucleotide
tgtgcggactcgtcagggaccctgcgtatc

SEQ ID NO: 271397 - DNA, 30 bp, Artificial Sequence
  Synthetic oligonucleotide
tggtgacaggctccagtttatagaggtatc

SEQ ID NO: 271398 - DNA, 30 bp, Artificial Sequence
  Synthetic oligonucleotide
ctcagatttcagggttacgctaacggtatc

SEQ ID NO: 271399 - DNA, 30 bp, Artificial Sequence
  Synthetic oligonucleotide
ctgtccggaagtggaccaccacagggtatc

SEQ ID NO: 271400 - DNA, 30 bp, Artificial Sequence
  Synthetic oligonucleotide
gtggttctcggtggggaagtacgtggtatc

SEQ ID NO: 271401 - DNA, 30 bp, Artificial Sequence
  Synthetic oligonucleotide
agatccagtgctccaggtgctccatgtatc

SEQ ID NO: 271402 - DNA, 30 bp, Artificial Sequence
  Synthetic oligonucleotide
tgtggctcatatgaacacattatatgtatc

SEQ ID NO: 271403 - DNA, 30 bp, Artificial Sequence
  Synthetic oligonucleotide
tcgtgggatcttccggaaaacaactgtatc

SEQ ID NO: 271404 - DNA, 30 bp, Artificial Sequence
  Synthetic oligonucleotide
tcatttttgcggcagatcctactgtgtatc

SEQ ID NO: 271405 - DNA, 30 bp, Artificial Sequence
  Synthetic oligonucleotide
gggagatgcaatgagcatgagtaaattatc

SEQ ID NO: 271406 - DNA, 30 bp, Artificial Sequence
  Synthetic oligonucleotide
aaacgctcgcctttagatagcgacattatc

SEQ ID NO: 271407 - DNA, 30 bp, Artificial Sequence
  Synthetic oligonucleotide
gcactactaagcatatgtcccttcattatc

SEQ ID NO: 271408 - DNA, 30 bp, Artificial Sequence
  Synthetic oligonucleotide
catgttcgtgtatgtttggtggatattatc

SEQ ID NO: 271409 - DNA, 30 bp, Artificial Sequence
  Synthetic oligonucleotide
ttcacggacttaatactacgcacacttatc

SEQ ID NO: 271410 - DNA, 30 bp, Artificial Sequence
  Synthetic oligonucleotide
cataaggttgggttagattagaaccttatc

SEQ ID NO: 271411 - DNA, 30 bp, Artificial Sequence
  Synthetic oligonucleotide
gcgcattacctacactgcgccaatcttatc

SEQ ID NO: 271412 - DNA, 30 bp, Artificial Sequence
  Synthetic oligonucleotide
gacccgtatagtggtccaacttcagttatc

SEQ ID NO: 271413 - DNA, 30 bp, Artificial Sequence
  Synthetic oligonucleotide
tggacacaaatggacagtgacgtagttatc

SEQ ID NO: 271414 - DNA, 30 bp, Artificial Sequence
  Synthetic oligonucleotide
tatcatgattttgtcgagaagctcgttatc

SEQ ID NO: 271415 - DNA, 30 bp, Artificial Sequence
  Synthetic oligonucleotide
agcggaaatgttatgcctaggaaggttatc

SEQ ID NO: 271416 - DNA, 30 bp, Artificial Sequence
  Synthetic oligonucleotide
aatattgacgaatccacacagcgggttatc

SEQ ID NO: 271417 - DNA, 30 bp, Artificial Sequence
  Synthetic oligonucleotide
gagcgataccatggcgtacatttggttatc

SEQ ID NO: 271418 - DNA, 30 bp, Artificial Sequence
  Synthetic oligonucleotide
atgcttgttggtgcgggacggcgttttatc

SEQ ID NO: 271419 - DNA, 30 bp, Artificial Sequence
  Synthetic oligonucleotide
gggcctcctcagattggcacagtcaaactc

SEQ ID NO: 271420 - DNA, 30 bp, Artificial Sequence
  Synthetic oligonucleotide
catgcatgttcagcagggaccatgaaactc

SEQ ID NO: 271421 - DNA, 30 bp, Artificial Sequence
  Synthetic oligonucleotide
ccgttttcaacaggtaagctgtaacaactc

SEQ ID NO: 271422 - DNA, 30 bp, Artificial Sequence
  Synthetic oligonucleotide
tttaggtaagtcatggtgtactcgcaactc

SEQ ID NO: 271423 - DNA, 30 bp, Artificial Sequence
  Synthetic oligonucleotide
ataaacctaattagatgtcaagggcaactc

SEQ ID NO: 271424 - DNA, 30 bp, Artificial Sequence
  Synthetic oligonucleotide
ccgaaacgcacgagggcagaatggcaactc

SEQ ID NO: 271425 - DNA, 30 bp, Artificial Sequence
  Synthetic oligonucleotide
gaaatgcgtcatccatggtaaaaagaactc

SEQ ID NO: 271426 - DNA, 30 bp, Artificial Sequence
  Synthetic oligonucleotide
acctttaccgcaaacgtcattgaagaactc

SEQ ID NO: 271427 - DNA, 30 bp, Artificial Sequence
  Synthetic oligonucleotide
atacatggagccgagtcgcgaacggaactc

SEQ ID NO: 271428 - DNA, 30 bp, Artificial Sequence
  Synthetic oligonucleotide
tgaccgggataaatgtcccgtcgggaactc

SEQ ID NO: 271429 - DNA, 30 bp, Artificial Sequence
  Synthetic oligonucleotide
actcgcagtccgttgtccaacactgaactc

SEQ ID NO: 271430 - DNA, 30 bp, Artificial Sequence
  Synthetic oligonucleotide
cggtcagccactacgagagagtctgaactc

SEQ ID NO: 271431 - DNA, 30 bp, Artificial Sequence
  Synthetic oligonucleotide
ggataactagaaagcacctagtgtgaactc

SEQ ID NO: 271432 - DNA, 30 bp, Artificial Sequence
  Synthetic oligonucleotide
attcggccaaacagtgtctttcgataactc

SEQ ID NO: 271433 - DNA, 30 bp, Artificial Sequence
  Synthetic oligonucleotide
gtatcgcatcaaacatcctttttataactc

SEQ ID NO: 271434 - DNA, 30 bp, Artificial Sequence
  Synthetic oligonucleotide
gccgctattaaatgcagaagcaggtaactc

SEQ ID NO: 271435 - DNA, 30 bp, Artificial Sequence
  Synthetic oligonucleotide
gacaaagcgaaataatttaatgggtaactc

SEQ ID NO: 271436 - DNA, 30 bp, Artificial Sequence
  Synthetic oligonucleotide
ccagcgtttggataaggtcacgcttaactc

SEQ ID NO: 271437 - DNA, 30 bp, Artificial Sequence
  Synthetic oligonucleotide
agttaggaacatcgtgcatttatgacactc

SEQ ID NO: 271438 - DNA, 30 bp, Artificial Sequence
  Synthetic oligonucleotide
gcatgggaacagagaaccatgccaccactc

SEQ ID NO: 271439 - DNA, 30 bp, Artificial Sequence
  Synthetic oligonucleotide
tataggcgtagcaggtcagaacgagcactc

SEQ ID NO: 271440 - DNA, 30 bp, Artificial Sequence
  Synthetic oligonucleotide
gattcgtcgacagttgagagaggagcactc

SEQ ID NO: 271441 - DNA, 30 bp, Artificial Sequence
  Synthetic oligonucleotide
tatcaacgctcacccatataatacgcactc

SEQ ID NO: 271442 - DNA, 30 bp, Artificial Sequence
  Synthetic oligonucleotide
atgctggggatagggcagtaagccgcactc

SEQ ID NO: 271443 - DNA, 30 bp, Artificial Sequence
  Synthetic oligonucleotide
tgatagtaagtcccggttcagggggcactc

SEQ ID NO: 271444 - DNA, 30 bp, Artificial Sequence
  Synthetic oligonucleotide
gtctcacaagtaagtcccttgtgggcactc

SEQ ID NO: 271445 - DNA, 30 bp, Artificial Sequence
  Synthetic oligonucleotide
gagaggatattattttgccccattgcactc

SEQ ID NO: 271446 - DNA, 30 bp, Artificial Sequence
  Synthetic oligonucleotide
aaaaatgtacaagccttagttcgatcactc

SEQ ID NO: 271447 - DNA, 30 bp, Artificial Sequence
  Synthetic oligonucleotide
atcaaccgctgccgaagaactgactcactc

SEQ ID NO: 271448 - DNA, 30 bp, Artificial Sequence
  Synthetic oligonucleotide
tacccgcatcttccgaggatcgcctcactc

SEQ ID NO: 271449 - DNA, 30 bp, Artificial Sequence
  Synthetic oligonucleotide
ggtgcacggtctatttatagcgcaagactc

SEQ ID NO: 271450 - DNA, 30 bp, Artificial Sequence
  Synthetic oligonucleotide
ggcataatggtgagacggattaccagactc

SEQ ID NO: 271451 - DNA, 30 bp, Artificial Sequence
  Synthetic oligonucleotide
atattgtggtgacaaatacccaggagactc

SEQ ID NO: 271452 - DNA, 30 bp, Artificial Sequence
  Synthetic oligonucleotide
cgtctaatgatataattacgccggagactc

SEQ ID NO: 271453 - DNA, 30 bp, Artificial Sequence
  Synthetic oligonucleotide
cggtgccggcatcacagtatccgacgactc

SEQ ID NO: 271454 - DNA, 30 bp, Artificial Sequence
  Synthetic oligonucleotide
atgaaagcagtcccgataacgcgccgactc

SEQ ID NO: 271455 - DNA, 30 bp, Artificial Sequence
  Synthetic oligonucleotide
atgtatcgccaggtacctctatggcgactc

SEQ ID NO: 271456 - DNA, 30 bp, Artificial Sequence
  Synthetic oligonucleotide
gtgttccttgcagtggatgtcggtcgactc

SEQ ID NO: 271457 - DNA, 30 bp, Artificial Sequence
  Synthetic oligonucleotide
atcgaggcatacatgcatgtaataggactc

SEQ ID NO: 271458 - DNA, 30 bp, Artificial Sequence
  Synthetic oligonucleotide
ttataattaagtctgaaaacacgcggactc

SEQ ID NO: 271459 - DNA, 30 bp, Artificial Sequence
  Synthetic oligonucleotide
ctagaaaagtccgataagtggatcggactc

SEQ ID NO: 271460 - DNA, 30 bp, Artificial Sequence
  Synthetic oligonucleotide
ggaaaacaagtcggtcgccaaaagggactc

SEQ ID NO: 271461 - DNA, 30 bp, Artificial Sequence
  Synthetic oligonucleotide
gtttcgcataccgcgtaggtggagggactc

SEQ ID NO: 271462 - DNA, 30 bp, Artificial Sequence
  Synthetic oligonucleotide
ccttggtattatgcttgccaaaatggactc

SEQ ID NO: 271463 - DNA, 30 bp, Artificial Sequence
  Synthetic oligonucleotide
gttgtgacgtttgtagctgtaggtggactc

SEQ ID NO: 271464 - DNA, 30 bp, Artificial Sequence
  Synthetic oligonucleotide
taataatccaaaaaggttaggggtggactc

SEQ ID NO: 271465 - DNA, 30 bp, Artificial Sequence
  Synthetic oligonucleotide
tctaccgttcaattgaaccgctgtggactc

SEQ ID NO: 271466 - DNA, 30 bp, Artificial Sequence
  Synthetic oligonucleotide
ggacggactatggcgtatttattatgactc

SEQ ID NO: 271467 - DNA, 30 bp, Artificial Sequence
  Synthetic oligonucleotide
agacaaggggtgtcgacccgagcttgactc

SEQ ID NO: 271468 - DNA, 30 bp, Artificial Sequence
  Synthetic oligonucleotide
ggcacataaagggaagcctcgtcttgactc

SEQ ID NO: 271469 - DNA, 30 bp, Artificial Sequence
  Synthetic oligonucleotide
cactaggacacttctcggacacaaatactc

SEQ ID NO: 271470 - DNA, 30 bp, Artificial Sequence
  Synthetic oligonucleotide
atcggtcacgagctacgcgatttaatactc

SEQ ID NO: 271471 - DNA, 30 bp, Artificial Sequence
  Synthetic oligonucleotide
agaggaactgataccgtggactgcatactc

SEQ ID NO: 271472 - DNA, 30 bp, Artificial Sequence
  Synthetic oligonucleotide
ctgcatgcaaattagttgctggggatactc

SEQ ID NO: 271473 - DNA, 30 bp, Artificial Sequence
  Synthetic oligonucleotide
agcagcttgttctggacagagctactactc

SEQ ID NO: 271474 - DNA, 30 bp, Artificial Sequence
  Synthetic oligonucleotide
gttcaggtccaagggagtgccaatctactc

SEQ ID NO: 271475 - DNA, 30 bp, Artificial Sequence
  Synthetic oligonucleotide
ctggtcctggaatacgattgtcatctactc

SEQ ID NO: 271476 - DNA, 30 bp, Artificial Sequence
  Synthetic oligonucleotide
agtaataaagcattatttagacctctactc

SEQ ID NO: 271477 - DNA, 30 bp, Artificial Sequence
  Synthetic oligonucleotide
ggtataaactacgtttcgatgattctactc

SEQ ID NO: 271478 - DNA, 30 bp, Artificial Sequence
  Synthetic oligonucleotide
agattgagtgctggaagagcaagagtactc

SEQ ID NO: 271479 - DNA, 30 bp, Artificial Sequence
  Synthetic oligonucleotide
agcggaaagcgtctcttaagtaccgtactc

SEQ ID NO: 271480 - DNA, 30 bp, Artificial Sequence
  Synthetic oligonucleotide
tacacagtgggatatagttactccgtactc

SEQ ID NO: 271481 - DNA, 30 bp, Artificial Sequence
  Synthetic oligonucleotide
agaacctttcgtcaggtggtccaggtactc

SEQ ID NO: 271482 - DNA, 30 bp, Artificial Sequence
  Synthetic oligonucleotide
acagtgatattcctattatgtgaattactc

SEQ ID NO: 271483 - DNA, 30 bp, Artificial Sequence
  Synthetic oligonucleotide
gaaccaatgcgccatgctggagcattactc

SEQ ID NO: 271484 - DNA, 30 bp, Artificial Sequence
  Synthetic oligonucleotide
cagccagggggctagctttcagagttactc

SEQ ID NO: 271485 - DNA, 30 bp, Artificial Sequence
  Synthetic oligonucleotide
gggttaaacttaacttgccaacatttactc

SEQ ID NO: 271486 - DNA, 30 bp, Artificial Sequence
  Synthetic oligonucleotide
gggttacgatcgacatccttcaacaacctc

SEQ ID NO: 271487 - DNA, 30 bp, Artificial Sequence
  Synthetic oligonucleotide
cgtcagtctacatatgcattagacaacctc

SEQ ID NO: 271488 - DNA, 30 bp, Artificial Sequence
  Synthetic oligonucleotide
gcctgctgggtcacggggggttggaacctc

SEQ ID NO: 271489 - DNA, 30 bp, Artificial Sequence
  Synthetic oligonucleotide
agtcggctcttgtaggcagggatccacctc

SEQ ID NO: 271490 - DNA, 30 bp, Artificial Sequence
  Synthetic oligonucleotide
ctggtcaaacattccaggaagtgtcacctc

SEQ ID NO: 271491 - DNA, 30 bp, Artificial Sequence
  Synthetic oligonucleotide
tttgatatggtgggttatggtggagacctc

SEQ ID NO: 271492 - DNA, 30 bp, Artificial Sequence
  Synthetic oligonucleotide
ttacggtagttaggcgagaacctagacctc

SEQ ID NO: 271493 - DNA, 30 bp, Artificial Sequence
  Synthetic oligonucleotide
cacgctatggctacgccgcggccggacctc

SEQ ID NO: 271494 - DNA, 30 bp, Artificial Sequence
  Synthetic oligonucleotide
tcaaccgcggaaaggttaggtggggacctc

SEQ ID NO: 271495 - DNA, 30 bp, Artificial Sequence
  Synthetic oligonucleotide
gtgctagaatcactcggacactactacctc

SEQ ID NO: 271496 - DNA, 30 bp, Artificial Sequence
  Synthetic oligonucleotide
cgaaccattacttggatagtcggctacctc

SEQ ID NO: 271497 - DNA, 30 bp, Artificial Sequence
  Synthetic oligonucleotide
tctcttgaacttagaaaagatgcgtacctc

SEQ ID NO: 271498 - DNA, 30 bp, Artificial Sequence
  Synthetic oligonucleotide
ctcaagtgcacgacagctcgatgttacctc

SEQ ID NO: 271499 - DNA, 30 bp, Artificial Sequence
  Synthetic oligonucleotide
ggcatacacaagttggcgctcatttacctc

SEQ ID NO: 271500 - DNA, 30 bp, Artificial Sequence
  Synthetic oligonucleotide
ggcggaagcgatttcacctgttgcaccctc

SEQ ID NO: 271501 - DNA, 30 bp, Artificial Sequence
  Synthetic oligonucleotide
agtgaagaggaaaactggcgtgtcaccctc

SEQ ID NO: 271502 - DNA, 30 bp, Artificial Sequence
  Synthetic oligonucleotide
ggatagaagtgatcaactctccagaccctc

SEQ ID NO: 271503 - DNA, 30 bp, Artificial Sequence
  Synthetic oligonucleotide
aattgcggaggggatctcgaaaggaccctc

SEQ ID NO: 271504 - DNA, 30 bp, Artificial Sequence
  Synthetic oligonucleotide
tcagtaataagctcgctttcagttaccctc

SEQ ID NO: 271505 - DNA, 30 bp, Artificial Sequence
  Synthetic oligonucleotide
aagatttggtagagccatcggcgacccctc

SEQ ID NO: 271506 - DNA, 30 bp, Artificial Sequence
  Synthetic oligonucleotide
tctactggttatctacgagtcagtcccctc

SEQ ID NO: 271507 - DNA, 30 bp, Artificial Sequence
  Synthetic oligonucleotide
atgtagtctaatgcggtgaggccagccctc

SEQ ID NO: 271508 - DNA, 30 bp, Artificial Sequence
  Synthetic oligonucleotide
ctcgtgaagtgatcatggggtaacgccctc

SEQ ID NO: 271509 - DNA, 30 bp, Artificial Sequence
  Synthetic oligonucleotide
attaactcctgcgacccaacgacggccctc

SEQ ID NO: 271510 - DNA, 30 bp, Artificial Sequence
  Synthetic oligonucleotide
ggatcgtcctgtgaccgataattggccctc

SEQ ID NO: 271511 - DNA, 30 bp, Artificial Sequence
  Synthetic oligonucleotide
catagcgttgttacctgtctttctgccctc

SEQ ID NO: 271512 - DNA, 30 bp, Artificial Sequence
  Synthetic oligonucleotide
agtatcggaaagtattctgtcgaatccctc

SEQ ID NO: 271513 - DNA, 30 bp, Artificial Sequence
  Synthetic oligonucleotide
agctagggtagatgaatctgtgcgtccctc

SEQ ID NO: 271514 - DNA, 30 bp, Artificial Sequence
  Synthetic oligonucleotide
tcgacgctccctctgacaagcttgtccctc

SEQ ID NO: 271515 - DNA, 30 bp, Artificial Sequence
  Synthetic oligonucleotide
ccttgtattacacatagcgtgtagagcctc

SEQ ID NO: 271516 - DNA, 30 bp, Artificial Sequence
  Synthetic oligonucleotide
gcgctgtctggcagcactaatcggagcctc

SEQ ID NO: 271517 - DNA, 30 bp, Artificial Sequence
  Synthetic oligonucleotide
gctccaaccagcatagggggtgggagcctc

SEQ ID NO: 271518 - DNA, 30 bp, Artificial Sequence
  Synthetic oligonucleotide
gtgtcactccaaaaatctagtttgagcctc

SEQ ID NO: 271519 - DNA, 31 bp, Artificial Sequence
  Synthetic oligonucleotide
cagacggcagtggataacttgcgatagcctc

SEQ ID NO: 271520 - DNA, 30 bp, Artificial Sequence
  Synthetic oligonucleotide
gcgggcctttggcagcaagtcgaacgcctc

SEQ ID NO: 271521 - DNA, 30 bp, Artificial Sequence
  Synthetic oligonucleotide
catctgttagtgattcgcacatcacgcctc

SEQ ID NO: 271522 - DNA, 30 bp, Artificial Sequence
  Synthetic oligonucleotide
agcgtctcgctacgcacaaccttacgcctc

SEQ ID NO: 271523 - DNA, 30 bp, Artificial Sequence
  Synthetic oligonucleotide
gtagataaggactccgttctgacccgcctc

SEQ ID NO: 271524 - DNA, 30 bp, Artificial Sequence
  Synthetic oligonucleotide
ccagtacgcaacgtcacattaggccgcctc

SEQ ID NO: 271525 - DNA, 30 bp, Artificial Sequence
  Synthetic oligonucleotide
gagctcgcaaacctcctcgataaaggcctc

SEQ ID NO: 271526 - DNA, 30 bp, Artificial Sequence
  Synthetic oligonucleotide
ggaagtttcggcaacctctcggacggcctc

SEQ ID NO: 271527 - DNA, 30 bp, Artificial Sequence
  Synthetic oligonucleotide
agttagtacgctcgcggttaaccgggcctc

SEQ ID NO: 271528 - DNA, 30 bp, Artificial Sequence
  Synthetic oligonucleotide
gaacgtagcgaagcccgcaacacatgcctc

SEQ ID NO: 271529 - DNA, 30 bp, Artificial Sequence
  Synthetic oligonucleotide
ttaagcattaagactaatagtgggtgcctc

SEQ ID NO: 271530 - DNA, 30 bp, Artificial Sequence
  Synthetic oligonucleotide
agtcaggattgttaattgatctggtgcctc

SEQ ID NO: 271531 - DNA, 30 bp, Artificial Sequence
  Synthetic oligonucleotide
gacgcgtaaaactgactttttacttgcctc

SEQ ID NO: 271532 - DNA, 30 bp, Artificial Sequence
  Synthetic oligonucleotide
ctgggcagtcaagttcatcgtccttgcctc

SEQ ID NO: 271533 - DNA, 30 bp, Artificial Sequence
  Synthetic oligonucleotide
ggatctccaggagaaggaggcggttgcctc

SEQ ID NO: 271534 - DNA, 30 bp, Artificial Sequence
  Synthetic oligonucleotide
taacactcctgtaaactgtcagacatcctc

SEQ ID NO: 271535 - DNA, 30 bp, Artificial Sequence
  Synthetic oligonucleotide
gtgagtgctccgatcgttgacgttatcctc

SEQ ID NO: 271536 - DNA, 30 bp, Artificial Sequence
  Synthetic oligonucleotide
ggtggaggggttgccctaagggaactcctc

SEQ ID NO: 271537 - DNA, 30 bp, Artificial Sequence
  Synthetic oligonucleotide
tcggggcttatccaacgggtgctgctcctc

SEQ ID NO: 271538 - DNA, 30 bp, Artificial Sequence
  Synthetic oligonucleotide
caatatgtattgccccagcttcttctcctc

SEQ ID NO: 271539 - DNA, 30 bp, Artificial Sequence
  Synthetic oligonucleotide
tttggagacgttctgattagaagagtcctc

SEQ ID NO: 271540 - DNA, 30 bp, Artificial Sequence
  Synthetic oligonucleotide
tcactacaatagtaaccgcaatgagtcctc

SEQ ID NO: 271541 - DNA, 30 bp, Artificial Sequence
  Synthetic oligonucleotide
tgactagaattattcgtaccctgcgtcctc

SEQ ID NO: 271542 - DNA, 30 bp, Artificial Sequence
  Synthetic oligonucleotide
gacgttaacatcctttatcggtaggtcctc

SEQ ID NO: 271543 - DNA, 30 bp, Artificial Sequence
  Synthetic oligonucleotide
atccaactagatggcccggattatgtcctc

SEQ ID NO: 271544 - DNA, 30 bp, Artificial Sequence
  Synthetic oligonucleotide
acaaacgtcaaactttcgccataattcctc

SEQ ID NO: 271545 - DNA, 30 bp, Artificial Sequence
  Synthetic oligonucleotide
gttcgcttgtccataacgcttagcttcctc

SEQ ID NO: 271546 - DNA, 30 bp, Artificial Sequence
  Synthetic oligonucleotide
tattgcacaaggctcgcacggatcttcctc

SEQ ID NO: 271547 - DNA, 30 bp, Artificial Sequence
  Synthetic oligonucleotide
cggtagactgttgacaagtcagcgttcctc

SEQ ID NO: 271548 - DNA, 30 bp, Artificial Sequence
  Synthetic oligonucleotide
tgcaccgaggagctaagaatgcatttcctc

SEQ ID NO: 271549 - DNA, 30 bp, Artificial Sequence
  Synthetic oligonucleotide
gggatgtgtcaaatgaatggggttaagctc

SEQ ID NO: 271550 - DNA, 30 bp, Artificial Sequence
  Synthetic oligonucleotide
ccccatcgtgttgggttgcaaagacagctc

SEQ ID NO: 271551 - DNA, 31 bp, Artificial Sequence
  Synthetic oligonucleotide
acactttgaccgttggcagtagatacagctc

SEQ ID NO: 271552 - DNA, 30 bp, Artificial Sequence
  Synthetic oligonucleotide
gcgtgtaagtcgtaccgtggggtgcagctc

SEQ ID NO: 271553 - DNA, 30 bp, Artificial Sequence
  Synthetic oligonucleotide
tataagatgcgagactcggtgcacgagctc

SEQ ID NO: 271554 - DNA, 30 bp, Artificial Sequence
  Synthetic oligonucleotide
ctgaccgggctcatgaactcactcgagctc

SEQ ID NO: 271555 - DNA, 30 bp, Artificial Sequence
  Synthetic oligonucleotide
gcagtgtggtccacggagtgctgggagctc

SEQ ID NO: 271556 - DNA, 30 bp, Artificial Sequence
  Synthetic oligonucleotide
gtgcttcccgggatgatcggaatggagctc

SEQ ID NO: 271557 - DNA, 30 bp, Artificial Sequence
  Synthetic oligonucleotide
tcgtgggccatctcacgcataatctagctc

SEQ ID NO: 271558 - DNA, 30 bp, Artificial Sequence
  Synthetic oligonucleotide
gtaccctatggatccgtgggcgtctagctc

SEQ ID NO: 271559 - DNA, 30 bp, Artificial Sequence
  Synthetic oligonucleotide
cgcgtccataacctcttgggcgagtagctc

SEQ ID NO: 271560 - DNA, 30 bp, Artificial Sequence
  Synthetic oligonucleotide
gacaaggtccttatgtaggtatagtagctc

SEQ ID NO: 271561 - DNA, 30 bp, Artificial Sequence
  Synthetic oligonucleotide
gctattcaaccgcaccgggaacggtagctc

SEQ ID NO: 271562 - DNA, 30 bp, Artificial Sequence
  Synthetic oligonucleotide
atcagtcctgggcccatcgctcattagctc

SEQ ID NO: 271563 - DNA, 30 bp, Artificial Sequence
  Synthetic oligonucleotide
accactcaggggctagcttgacgttagctc

SEQ ID NO: 271564 - DNA, 30 bp, Artificial Sequence
  Synthetic oligonucleotide
ctatactaagggtgcctaaccccaacgctc

SEQ ID NO: 271565 - DNA, 30 bp, Artificial Sequence
  Synthetic oligonucleotide
gcgctaatgacgccacggtcttgaacgctc

SEQ ID NO: 271566 - DNA, 30 bp, Artificial Sequence
  Synthetic oligonucleotide
gaacacaggcgtcgataggcgtggacgctc

SEQ ID NO: 271567 - DNA, 30 bp, Artificial Sequence
  Synthetic oligonucleotide
gacagccgttaataccagtgtcatacgctc

SEQ ID NO: 271568 - DNA, 30 bp, Artificial Sequence
  Synthetic oligonucleotide
cattggcaatgattggcaatgtaaccgctc

SEQ ID NO: 271569 - DNA, 30 bp, Artificial Sequence
  Synthetic oligonucleotide
ggtaacaacagagctccattatccccgctc

SEQ ID NO: 271570 - DNA, 30 bp, Artificial Sequence
  Synthetic oligonucleotide
acctcataggacgaaaagccgtgtccgctc

SEQ ID NO: 271571 - DNA, 28 bp, Artificial Sequence
  Synthetic oligonucleotide
ctctccttaagtcgactgatccgcgctc

SEQ ID NO: 271572 - DNA, 30 bp, Artificial Sequence
  Synthetic oligonucleotide
ccatcgctccgggatcgattacaggcgctc

SEQ ID NO: 271573 - DNA, 30 bp, Artificial Sequence
  Synthetic oligonucleotide
taatgaagatgagggggttgtgcggcgctc

SEQ ID NO: 271574 - DNA, 30 bp, Artificial Sequence
  Synthetic oligonucleotide
ggtatggctgtcagggtagttcgggcgctc

SEQ ID NO: 271575 - DNA, 30 bp, Artificial Sequence
  Synthetic oligonucleotide
ccagatatggcaactcgggacagctcgctc

SEQ ID NO: 271576 - DNA, 30 bp, Artificial Sequence
  Synthetic oligonucleotide
actaaccctctctggtatgcgagctcgctc

SEQ ID NO: 271577 - DNA, 30 bp, Artificial Sequence
  Synthetic oligonucleotide
ctagcatacctaaacggataatagtcgctc

SEQ ID NO: 271578 - DNA, 30 bp, Artificial Sequence
  Synthetic oligonucleotide
gtgcacgttttcactgagggatggtcgctc

SEQ ID NO: 271579 - DNA, 30 bp, Artificial Sequence
  Synthetic oligonucleotide
ctggctagcttgcagtggatactgtcgctc

SEQ ID NO: 271580 - DNA, 30 bp, Artificial Sequence
  Synthetic oligonucleotide
ctctatcgagtgggcaaaataagttcgctc

SEQ ID NO: 271581 - DNA, 30 bp, Artificial Sequence
  Synthetic oligonucleotide
acgtgtaatacaaaattatagtgttcgctc

SEQ ID NO: 271582 - DNA, 30 bp, Artificial Sequence
  Synthetic oligonucleotide
ctcgcgaaagcccttcggatttgttcgctc

SEQ ID NO: 271583 - DNA, 31 bp, Artificial Sequence
  Synthetic oligonucleotide
atacaagatgtgccgctaccaactttcgctc

SEQ ID NO: 271584 - DNA, 30 bp, Artificial Sequence
  Synthetic oligonucleotide
gatgtttactccaagatctccctaaggctc

SEQ ID NO: 271585 - DNA, 30 bp, Artificial Sequence
  Synthetic oligonucleotide
gatgtgccgacgagcatattggttaggctc

SEQ ID NO: 271586 - DNA, 30 bp, Artificial Sequence
  Synthetic oligonucleotide
aagggggctttaacgccagttgcgcggctc

SEQ ID NO: 271587 - DNA, 30 bp, Artificial Sequence
  Synthetic oligonucleotide
gcgcggcggacaagtgtgaactggcggctc

SEQ ID NO: 271588 - DNA, 30 bp, Artificial Sequence
  Synthetic oligonucleotide
ggacaaactgaaacggtgtcccgtcggctc

SEQ ID NO: 271589 - DNA, 30 bp, Artificial Sequence
  Synthetic oligonucleotide
gggaccattaccttgagaaagtaagggctc

SEQ ID NO: 271590 - DNA, 30 bp, Artificial Sequence
  Synthetic oligonucleotide
ggtttgcccgtttacctaacgagagggctc

SEQ ID NO: 271591 - DNA, 30 bp, Artificial Sequence
  Synthetic oligonucleotide
ccctttgaaaactcgaggctaggcgggctc

SEQ ID NO: 271592 - DNA, 30 bp, Artificial Sequence
  Synthetic oligonucleotide
agtagtcaaatgctactcgacgatgggctc

SEQ ID NO: 271593 - DNA, 30 bp, Artificial Sequence
  Synthetic oligonucleotide
cgctgtgctcggatggcggtcgcgtggctc

SEQ ID NO: 271594 - DNA, 30 bp, Artificial Sequence
  Synthetic oligonucleotide
ataagaagcatctttgcattgggaatgctc

SEQ ID NO: 271595 - DNA, 30 bp, Artificial Sequence
  Synthetic oligonucleotide
cctatggggggatgtttgctttgaatgctc

SEQ ID NO: 271596 - DNA, 30 bp, Artificial Sequence
  Synthetic oligonucleotide
ggcatgccaccgattttaggggtaatgctc

SEQ ID NO: 271597 - DNA, 30 bp, Artificial Sequence
  Synthetic oligonucleotide
ttttcagacaggacatttaacagcatgctc

SEQ ID NO: 271598 - DNA, 30 bp, Artificial Sequence
  Synthetic oligonucleotide
tcaggggcgtgggagtatcattctatgctc

SEQ ID NO: 271599 - DNA, 30 bp, Artificial Sequence
  Synthetic oligonucleotide
ctttaggagtatcgagttgttagactgctc

SEQ ID NO: 271600 - DNA, 30 bp, Artificial Sequence
  Synthetic oligonucleotide
acgtatctacgaacgccttaaatgctgctc

SEQ ID NO: 271601 - DNA, 30 bp, Artificial Sequence
  Synthetic oligonucleotide
actgctttgtctggagcttatgtcgtgctc

SEQ ID NO: 271602 - DNA, 30 bp, Artificial Sequence
  Synthetic oligonucleotide
gttttgtctgggctacgtgtaagggtgctc

SEQ ID NO: 271603 - DNA, 30 bp, Artificial Sequence
  Synthetic oligonucleotide
aaatacaccctaaatgtgctaaatgtgctc

SEQ ID NO: 271604 - DNA, 30 bp, Artificial Sequence
  Synthetic oligonucleotide
atccattaaagtcctgtgcacaatgtgctc

SEQ ID NO: 271605 - DNA, 30 bp, Artificial Sequence
  Synthetic oligonucleotide
gctaggatcggcgtgaacttaattgtgctc

SEQ ID NO: 271606 - DNA, 30 bp, Artificial Sequence
  Synthetic oligonucleotide
tgactttctccataaagcgcgtaattgctc

SEQ ID NO: 271607 - DNA, 30 bp, Artificial Sequence
  Synthetic oligonucleotide
cgcgtcgaccgtgtcgagatcggtttgctc

SEQ ID NO: 271608 - DNA, 30 bp, Artificial Sequence
  Synthetic oligonucleotide
gggcagatggacacgacgaacaaaaatctc

SEQ ID NO: 271609 - DNA, 30 bp, Artificial Sequence
  Synthetic oligonucleotide
tcaaggaaggttaatgttgttcaccatctc

SEQ ID NO: 271610 - DNA, 30 bp, Artificial Sequence
  Synthetic oligonucleotide
cgccgtttccgcctgatcttaaggcatctc

SEQ ID NO: 271611 - DNA, 30 bp, Artificial Sequence
  Synthetic oligonucleotide
agcgtttaaaccaccttagcacctcatctc

SEQ ID NO: 271612 - DNA, 30 bp, Artificial Sequence
  Synthetic oligonucleotide
cattctgtatataaacatgtaaaagatctc

SEQ ID NO: 271613 - DNA, 30 bp, Artificial Sequence
  Synthetic oligonucleotide
cgttaggacacctatgacagtaaagatctc

SEQ ID NO: 271614 - DNA, 30 bp, Artificial Sequence
  Synthetic oligonucleotide
tagacttaacaaatggtacatgaagatctc

SEQ ID NO: 271615 - DNA, 30 bp, Artificial Sequence
  Synthetic oligonucleotide
gtgtacaagacctccgcataataagatctc

SEQ ID NO: 271616 - DNA, 30 bp, Artificial Sequence
  Synthetic oligonucleotide
accggagcgagggtttgaaagcgagatctc

SEQ ID NO: 271617 - DNA, 30 bp, Artificial Sequence
  Synthetic oligonucleotide
ttgatacgacattgagatgagaacgatctc

SEQ ID NO: 271618 - DNA, 30 bp, Artificial Sequence
  Synthetic oligonucleotide
tggttaaataactctttccaatgcgatctc

SEQ ID NO: 271619 - DNA, 30 bp, Artificial Sequence
  Synthetic oligonucleotide
agtaccgaggctcacagaatcaatgatctc

SEQ ID NO: 271620 - DNA, 30 bp, Artificial Sequence
  Synthetic oligonucleotide
tgtgtggcgccaaaaggattcacatatctc

SEQ ID NO: 271621 - DNA, 30 bp, Artificial Sequence
  Synthetic oligonucleotide
accatattggaaatatcagaatgatatctc

SEQ ID NO: 271622 - DNA, 30 bp, Artificial Sequence
  Synthetic oligonucleotide
cttgcgtgagaaaaagattaatcctatctc

SEQ ID NO: 271623 - DNA, 30 bp, Artificial Sequence
  Synthetic oligonucleotide
ggggctcaagtatgtcattactcgtatctc

SEQ ID NO: 271624 - DNA, 30 bp, Artificial Sequence
  Synthetic oligonucleotide
taggacactgccacacgcaaacgttatctc

SEQ ID NO: 271625 - DNA, 30 bp, Artificial Sequence
  Synthetic oligonucleotide
acaatatcacacagtacttaacacactctc

SEQ ID NO: 271626 - DNA, 30 bp, Artificial Sequence
  Synthetic oligonucleotide
aagagaccgaccaagcaattcgagactctc

SEQ ID NO: 271627 - DNA, 30 bp, Artificial Sequence
  Synthetic oligonucleotide
atagtgggcaggattgagtggacgactctc

SEQ ID NO: 271628 - DNA, 30 bp, Artificial Sequence
  Synthetic oligonucleotide
ccagtttgaggctgggatgctccgactctc

SEQ ID NO: 271629 - DNA, 30 bp, Artificial Sequence
  Synthetic oligonucleotide
tgatcatgtttacatatatatgaacctctc

SEQ ID NO: 271630 - DNA, 30 bp, Artificial Sequence
  Synthetic oligonucleotide
aggggatagggttccgatggctgtcctctc

SEQ ID NO: 271631 - DNA, 30 bp, Artificial Sequence
  Synthetic oligonucleotide
gtgtagactacacagttaacgccagctctc

SEQ ID NO: 271632 - DNA, 30 bp, Artificial Sequence
  Synthetic oligonucleotide
atcccctatatagaactcggtatagctctc

SEQ ID NO: 271633 - DNA, 30 bp, Artificial Sequence
  Synthetic oligonucleotide
actaagtctccaggccctcgctcggctctc

SEQ ID NO: 271634 - DNA, 30 bp, Artificial Sequence
  Synthetic oligonucleotide
ccagtcgagatatgaacaaactattctctc

SEQ ID NO: 271635 - DNA, 30 bp, Artificial Sequence
  Synthetic oligonucleotide
taagtaaataggcatttgcaacaaagtctc

SEQ ID NO: 271636 - DNA, 30 bp, Artificial Sequence
  Synthetic oligonucleotide
gattagtcttgacgcggagaataaagtctc

SEQ ID NO: 271637 - DNA, 30 bp, Artificial Sequence
  Synthetic oligonucleotide
attctctgttcactggcatccatgagtctc

SEQ ID NO: 271638 - DNA, 30 bp, Artificial Sequence
  Synthetic oligonucleotide
caggaagacgcatgatactctgtacgtctc

SEQ ID NO: 271639 - DNA, 30 bp, Artificial Sequence
  Synthetic oligonucleotide
tgactcatatcgctttggagtccaggtctc

SEQ ID NO: 271640 - DNA, 30 bp, Artificial Sequence
  Synthetic oligonucleotide
ttcaacacggattacagaacagcaggtctc

SEQ ID NO: 271641 - DNA, 30 bp, Artificial Sequence
  Synthetic oligonucleotide
cagaatgactggaaaatgagtaagggtctc

SEQ ID NO: 271642 - DNA, 30 bp, Artificial Sequence
  Synthetic oligonucleotide
tcaaaatattaaggaaattcatatggtctc

SEQ ID NO: 271643 - DNA, 30 bp, Artificial Sequence
  Synthetic oligonucleotide
aaagaggcgtttgaaattcggctatgtctc

SEQ ID NO: 271644 - DNA, 30 bp, Artificial Sequence
  Synthetic oligonucleotide
tgacttttgcgcggagtcaacgagtgtctc

SEQ ID NO: 271645 - DNA, 30 bp, Artificial Sequence
  Synthetic oligonucleotide
gggtcgccaagtgccagcggggattgtctc

SEQ ID NO: 271646 - DNA, 30 bp, Artificial Sequence
  Synthetic oligonucleotide
ggtgattaccctgcaaataagtgttgtctc

SEQ ID NO: 271647 - DNA, 30 bp, Artificial Sequence
  Synthetic oligonucleotide
tcgggggttcgggatgaacctataattctc

SEQ ID NO: 271648 - DNA, 30 bp, Artificial Sequence
  Synthetic oligonucleotide
cgggttctcagtttataggttgccattctc

SEQ ID NO: 271649 - DNA, 30 bp, Artificial Sequence
  Synthetic oligonucleotide
ctcggagatagatctacgcctccgattctc

SEQ ID NO: 271650 - DNA, 30 bp, Artificial Sequence
  Synthetic oligonucleotide
gtagtaggggtttagaaaagtagtattctc

SEQ ID NO: 271651 - DNA, 30 bp, Artificial Sequence
  Synthetic oligonucleotide
ggccggtaaaacacaatatggggacttctc

SEQ ID NO: 271652 - DNA, 30 bp, Artificial Sequence
  Synthetic oligonucleotide
cgtcgtaagcttcggcaaaactgacttctc

SEQ ID NO: 271653 - DNA, 30 bp, Artificial Sequence
  Synthetic oligonucleotide
tcgcaatgctgttacggatgacatcttctc

SEQ ID NO: 271654 - DNA, 31 bp, Artificial Sequence
  Synthetic oligonucleotide
agtgtaaggggattagagacatacagttctc

SEQ ID NO: 271655 - DNA, 30 bp, Artificial Sequence
  Synthetic oligonucleotide
atagacatcaggatagacgggaatgttctc

SEQ ID NO: 271656 - DNA, 30 bp, Artificial Sequence
  Synthetic oligonucleotide
tgcaagccctctagacgtgaccctgttctc

SEQ ID NO: 271657 - DNA, 30 bp, Artificial Sequence
  Synthetic oligonucleotide
tgtacctggatattcatcgtcggtgttctc

SEQ ID NO: 271658 - DNA, 30 bp, Artificial Sequence
  Synthetic oligonucleotide
aacagatcacagtctgagagactaaaagtc

SEQ ID NO: 271659 - DNA, 30 bp, Artificial Sequence
  Synthetic oligonucleotide
tctcccaccgaggacaaatcgaccaaagtc

SEQ ID NO: 271660 - DNA, 30 bp, Artificial Sequence
  Synthetic oligonucleotide
ctatatcacaaatttgccgctccgaaagtc

SEQ ID NO: 271661 - DNA, 30 bp, Artificial Sequence
  Synthetic oligonucleotide
tagggagccactggtccaagtcggaaagtc

SEQ ID NO: 271662 - DNA, 30 bp, Artificial Sequence
  Synthetic oligonucleotide
ctaggtgtaaatcctggattgggtaaagtc

SEQ ID NO: 271663 - DNA, 30 bp, Artificial Sequence
  Synthetic oligonucleotide
cgcatcagttgcggagggttatgtaaagtc

SEQ ID NO: 271664 - DNA, 30 bp, Artificial Sequence
  Synthetic oligonucleotide
aacgggaaggagaacgtttaagttaaagtc

SEQ ID NO: 271665 - DNA, 30 bp, Artificial Sequence
  Synthetic oligonucleotide
acgctaatcgatctgtgcccgccacaagtc

SEQ ID NO: 271666 - DNA, 30 bp, Artificial Sequence
  Synthetic oligonucleotide
taaaagctacgaggtgttatagtagaagtc

SEQ ID NO: 271667 - DNA, 30 bp, Artificial Sequence
  Synthetic oligonucleotide
gtcgatattcaatagaccggtgccgaagtc

SEQ ID NO: 271668 - DNA, 30 bp, Artificial Sequence
  Synthetic oligonucleotide
gccatgctgtgcattcgtaggtgcgaagtc

SEQ ID NO: 271669 - DNA, 30 bp, Artificial Sequence
  Synthetic oligonucleotide
aacgtttagagtgtaaagaccccggaagtc

SEQ ID NO: 271670 - DNA, 30 bp, Artificial Sequence
  Synthetic oligonucleotide
gacaaggatttcgacaacatcggtgaagtc

SEQ ID NO: 271671 - DNA, 30 bp, Artificial Sequence
  Synthetic oligonucleotide
gctatcagacatcgtgagactatataagtc

SEQ ID NO: 271672 - DNA, 30 bp, Artificial Sequence
  Synthetic oligonucleotide
cacaacgtcagtattaaatatgcgtaagtc

SEQ ID NO: 271673 - DNA, 30 bp, Artificial Sequence
  Synthetic oligonucleotide
agatagggtcgatgcgcgattaattaagtc

SEQ ID NO: 271674 - DNA, 30 bp, Artificial Sequence
  Synthetic oligonucleotide
ccaactagttaaggttcttatgattaagtc

SEQ ID NO: 271675 - DNA, 30 bp, Artificial Sequence
  Synthetic oligonucleotide
ccagtttcttgggtgatccggtaaacagtc

SEQ ID NO: 271676 - DNA, 30 bp, Artificial Sequence
  Synthetic oligonucleotide
tgtcaatgcgcaacgtggcttgccacagtc

SEQ ID NO: 271677 - DNA, 30 bp, Artificial Sequence
  Synthetic oligonucleotide
aataggtaacagcaatcagctcggacagtc

SEQ ID NO: 271678 - DNA, 31 bp, Artificial Sequence
  Synthetic oligonucleotide
tgggttactgtctcgactacgcgatacagtc

SEQ ID NO: 271679 - DNA, 30 bp, Artificial Sequence
  Synthetic oligonucleotide
tcacgatttagtgaggctaactgtacagtc

SEQ ID NO: 271680 - DNA, 30 bp, Artificial Sequence
  Synthetic oligonucleotide
gcacaccgtctataagacaaaaaaccagtc

SEQ ID NO: 271681 - DNA, 30 bp, Artificial Sequence
  Synthetic oligonucleotide
ttctttcgataaccctagtgtgggccagtc

SEQ ID NO: 271682 - DNA, 30 bp, Artificial Sequence
  Synthetic oligonucleotide
aattgccgatcgctctagaaagtgccagtc

SEQ ID NO: 271683 - DNA, 30 bp, Artificial Sequence
  Synthetic oligonucleotide
caatgaacctctctttctctacccgcagtc

SEQ ID NO: 271684 - DNA, 30 bp, Artificial Sequence
  Synthetic oligonucleotide
cgaattcctggcgctctataataatcagtc

SEQ ID NO: 271685 - DNA, 30 bp, Artificial Sequence
  Synthetic oligonucleotide
aaccgccttcctatgtatgttccatcagtc

SEQ ID NO: 271686 - DNA, 30 bp, Artificial Sequence
  Synthetic oligonucleotide
ttgtgtcagtgggggtgagtagcgtcagtc

SEQ ID NO: 271687 - DNA, 30 bp, Artificial Sequence
  Synthetic oligonucleotide
ggacattaggtgaatagttgtaggtcagtc

SEQ ID NO: 271688 - DNA, 30 bp, Artificial Sequence
  Synthetic oligonucleotide
cattcaagaaacatgataacaatgtcagtc

SEQ ID NO: 271689 - DNA, 30 bp, Artificial Sequence
  Synthetic oligonucleotide
tcgacaatcgatgatgcactctcgagagtc

SEQ ID NO: 271690 - DNA, 30 bp, Artificial Sequence
  Synthetic oligonucleotide
atctttgcgcatattttcacgtcgagagtc

SEQ ID NO: 271691 - DNA, 30 bp, Artificial Sequence
  Synthetic oligonucleotide
tactaagcactacttccagttgatagagtc

SEQ ID NO: 271692 - DNA, 30 bp, Artificial Sequence
  Synthetic oligonucleotide
ttcgcgacgtacgattgtatgtatagagtc

SEQ ID NO: 271693 - DNA, 30 bp, Artificial Sequence
  Synthetic oligonucleotide
caccggaagctgcctgtgccatctagagtc

SEQ ID NO: 271694 - DNA, 30 bp, Artificial Sequence
  Synthetic oligonucleotide
gcatgtggattgaatgtcccacttagagtc

SEQ ID NO: 271695 - DNA, 30 bp, Artificial Sequence
  Synthetic oligonucleotide
acagactcttaagatcgtcctgagcgagtc

SEQ ID NO: 271696 - DNA, 30 bp, Artificial Sequence
  Synthetic oligonucleotide
tgcagtgactttacattacaagggcgagtc

SEQ ID NO: 271697 - DNA, 30 bp, Artificial Sequence
  Synthetic oligonucleotide
ttaactcaagtgagacctcaactgcgagtc

SEQ ID NO: 271698 - DNA, 30 bp, Artificial Sequence
  Synthetic oligonucleotide
acttgtcgcaaggtatcagttactcgagtc

SEQ ID NO: 271699 - DNA, 30 bp, Artificial Sequence
  Synthetic oligonucleotide
gcctattgattgttattcaataacggagtc

SEQ ID NO: 271700 - DNA, 30 bp, Artificial Sequence
  Synthetic oligonucleotide
tgctgtcgagataaggcatgatacggagtc

SEQ ID NO: 271701 - DNA, 30 bp, Artificial Sequence
  Synthetic oligonucleotide
tgtaacggtcactcatgccagtcgggagtc

SEQ ID NO: 271702 - DNA, 30 bp, Artificial Sequence
  Synthetic oligonucleotide
cccaggaacgcggagcggtattcgggagtc

SEQ ID NO: 271703 - DNA, 30 bp, Artificial Sequence
  Synthetic oligonucleotide
ctccacatgacgaccagcatcccctgagtc

SEQ ID NO: 271704 - DNA, 30 bp, Artificial Sequence
  Synthetic oligonucleotide
ttggctttagttcaatggtttagctgagtc

SEQ ID NO: 271705 - DNA, 30 bp, Artificial Sequence
  Synthetic oligonucleotide
tcgggatgacgatgactaatcgaaatagtc

SEQ ID NO: 271706 - DNA, 30 bp, Artificial Sequence
  Synthetic oligonucleotide
ctgcagcacggaaaatgcttagcaatagtc

SEQ ID NO: 271707 - DNA, 30 bp, Artificial Sequence
  Synthetic oligonucleotide
cataaacgccgattttaaaaacccatagtc

SEQ ID NO: 271708 - DNA, 30 bp, Artificial Sequence
  Synthetic oligonucleotide
gtgtcacagtgtaatctcccgtccatagtc

SEQ ID NO: 271709 - DNA, 30 bp, Artificial Sequence
  Synthetic oligonucleotide
ttattgggttaatgtaaggagtggatagtc

SEQ ID NO: 271710 - DNA, 30 bp, Artificial Sequence
  Synthetic oligonucleotide
tgccattttaatcgcgatgagagactagtc

SEQ ID NO: 271711 - DNA, 30 bp, Artificial Sequence
  Synthetic oligonucleotide
gcggcgcgcatttaatgtcatcgactagtc

SEQ ID NO: 271712 - DNA, 30 bp, Artificial Sequence
  Synthetic oligonucleotide
cgtggcctagtcgactggcaaggcctagtc

SEQ ID NO: 271713 - DNA, 30 bp, Artificial Sequence
  Synthetic oligonucleotide
gcgaagaacccatgccaggatcagctagtc

SEQ ID NO: 271714 - DNA, 30 bp, Artificial Sequence
  Synthetic oligonucleotide
ctcaaccttaatctagaagagtgtctagtc

SEQ ID NO: 271715 - DNA, 30 bp, Artificial Sequence
  Synthetic oligonucleotide
ccatatggaatctctatcacgtaagtagtc

SEQ ID NO: 271716 - DNA, 30 bp, Artificial Sequence
  Synthetic oligonucleotide
aagattagttcaagtataccggacgtagtc

SEQ ID NO: 271717 - DNA, 30 bp, Artificial Sequence
  Synthetic oligonucleotide
ggtctaccattgaagggatcgttcgtagtc

SEQ ID NO: 271718 - DNA, 30 bp, Artificial Sequence
  Synthetic oligonucleotide
ttgagaagttactcgattcgcatggtagtc

SEQ ID NO: 271719 - DNA, 30 bp, Artificial Sequence
  Synthetic oligonucleotide
tgagaacggggacatacgtaccaaaacgtc

SEQ ID NO: 271720 - DNA, 30 bp, Artificial Sequence
  Synthetic oligonucleotide
gtcgatgccacaggccgatatgaaaacgtc

SEQ ID NO: 271721 - DNA, 30 bp, Artificial Sequence
  Synthetic oligonucleotide
gcagggtccttattcgccaggtaaaacgtc

SEQ ID NO: 271722 - DNA, 30 bp, Artificial Sequence
  Synthetic oligonucleotide
cgtacagtatcagactagttattaaacgtc

SEQ ID NO: 271723 - DNA, 30 bp, Artificial Sequence
  Synthetic oligonucleotide
aatccggtcacatccacgcgtttaaacgtc

SEQ ID NO: 271724 - DNA, 30 bp, Artificial Sequence
  Synthetic oligonucleotide
ctataaggagggtacctgtcacgcaacgtc

SEQ ID NO: 271725 - DNA, 30 bp, Artificial Sequence
  Synthetic oligonucleotide
ccggcgcaacgctgttcaaaaatcaacgtc

SEQ ID NO: 271726 - DNA, 30 bp, Artificial Sequence
  Synthetic oligonucleotide
gtcgctcaccagcttcagggaatcaacgtc

SEQ ID NO: 271727 - DNA, 30 bp, Artificial Sequence
  Synthetic oligonucleotide
caaatgtcacgggtatctactatcaacgtc

SEQ ID NO: 271728 - DNA, 30 bp, Artificial Sequence
  Synthetic oligonucleotide
ctgctaagacggctctgggagctcaacgtc

SEQ ID NO: 271729 - DNA, 30 bp, Artificial Sequence
  Synthetic oligonucleotide
acttcaaagcacggttcggtgtcgaacgtc

SEQ ID NO: 271730 - DNA, 30 bp, Artificial Sequence
  Synthetic oligonucleotide
tgggtggtatgatgtgtacgtgtgaacgtc

SEQ ID NO: 271731 - DNA, 30 bp, Artificial Sequence
  Synthetic oligonucleotide
gtgtctgatcaactttcccatagtaacgtc

SEQ ID NO: 271732 - DNA, 30 bp, Artificial Sequence
  Synthetic oligonucleotide
tgattcttagctattggggtgcgtaacgtc

SEQ ID NO: 271733 - DNA, 30 bp, Artificial Sequence
  Synthetic oligonucleotide
ttctcacgctggatgtgcgcgacccacgtc

SEQ ID NO: 271734 - DNA, 30 bp, Artificial Sequence
  Synthetic oligonucleotide
aggaagagggtccgggcaaggcggcacgtc

SEQ ID NO: 271735 - DNA, 30 bp, Artificial Sequence
  Synthetic oligonucleotide
ccagtcacctgattctaaatttcggacgtc

SEQ ID NO: 271736 - DNA, 30 bp, Artificial Sequence
  Synthetic oligonucleotide
gaaaccattaaaaacaggtgtcgggacgtc

SEQ ID NO: 271737 - DNA, 31 bp, Artificial Sequence
  Synthetic oligonucleotide
catgcaaagtatgcccaagcccatggacgtc

SEQ ID NO: 271738 - DNA, 30 bp, Artificial Sequence
  Synthetic oligonucleotide
cggaataagactttcctctgtagtgacgtc

SEQ ID NO: 271739 - DNA, 30 bp, Artificial Sequence
  Synthetic oligonucleotide
gtcaaggttgtcaataaaggtcgtgacgtc

SEQ ID NO: 271740 - DNA, 30 bp, Artificial Sequence
  Synthetic oligonucleotide
acgacggtccgttgggggtgacaatacgtc

SEQ ID NO: 271741 - DNA, 30 bp, Artificial Sequence
  Synthetic oligonucleotide
cgattagaagacaatgacatctaatacgtc

SEQ ID NO: 271742 - DNA, 30 bp, Artificial Sequence
  Synthetic oligonucleotide
gaggtgagaaaaatgccagtgggatacgtc

SEQ ID NO: 271743 - DNA, 30 bp, Artificial Sequence
  Synthetic oligonucleotide
caaagagattgtggtagcctagggtacgtc

SEQ ID NO: 271744 - DNA, 30 bp, Artificial Sequence
  Synthetic oligonucleotide
ggatcagactcacaattcaaggtttacgtc

SEQ ID NO: 271745 - DNA, 28 bp, Artificial Sequence
  Synthetic oligonucleotide
caggtgctttctgaatcctaccaccgtc

SEQ ID NO: 271746 - DNA, 30 bp, Artificial Sequence
  Synthetic oligonucleotide
aagtccagaactccgccaaaatggaccgtc

SEQ ID NO: 271747 - DNA, 30 bp, Artificial Sequence
  Synthetic oligonucleotide
acggtaactgtgactctaaatacccccgtc

SEQ ID NO: 271748 - DNA, 30 bp, Artificial Sequence
  Synthetic oligonucleotide
gtgtgattggcatataacctctttcccgtc

SEQ ID NO: 271749 - DNA, 30 bp, Artificial Sequence
  Synthetic oligonucleotide
aaatcgatgtgcgtgcttttggaagccgtc

SEQ ID NO: 271750 - DNA, 30 bp, Artificial Sequence
  Synthetic oligonucleotide
tatatacgaaggcaggcgttgtatgccgtc

SEQ ID NO: 271751 - DNA, 30 bp, Artificial Sequence
  Synthetic oligonucleotide
atcaattattggccgatggtatctgccgtc

SEQ ID NO: 271752 - DNA, 30 bp, Artificial Sequence
  Synthetic oligonucleotide
gcgttcggcctatgccagcggtctgccgtc

SEQ ID NO: 271753 - DNA, 30 bp, Artificial Sequence
  Synthetic oligonucleotide
cttccagtaaatggtccctggttctccgtc

SEQ ID NO: 271754 - DNA, 30 bp, Artificial Sequence
  Synthetic oligonucleotide
tgccacctatggtgattgttcctgtccgtc

SEQ ID NO: 271755 - DNA, 30 bp, Artificial Sequence
  Synthetic oligonucleotide
gtcgatccgacgctatctcctgattccgtc

SEQ ID NO: 271756 - DNA, 30 bp, Artificial Sequence
  Synthetic oligonucleotide
ggacacagccgctcaggcagcgcttccgtc

SEQ ID NO: 271757 - DNA, 30 bp, Artificial Sequence
  Synthetic oligonucleotide
aggatttgaaaaaaatcctcgcaaagcgtc

SEQ ID NO: 271758 - DNA, 30 bp, Artificial Sequence
  Synthetic oligonucleotide
caggaacctgcaaagcaaggactaagcgtc

SEQ ID NO: 271759 - DNA, 30 bp, Artificial Sequence
  Synthetic oligonucleotide
gcgggcactctcctttctacagatagcgtc

SEQ ID NO: 271760 - DNA, 30 bp, Artificial Sequence
  Synthetic oligonucleotide
aacaggaacggctcattaaactgacgcgtc

SEQ ID NO: 271761 - DNA, 30 bp, Artificial Sequence
  Synthetic oligonucleotide
gctcagatatagaataaacatatacgcgtc

SEQ ID NO: 271762 - DNA, 30 bp, Artificial Sequence
  Synthetic oligonucleotide
gatgcagataaggcattactccgccgcgtc

SEQ ID NO: 271763 - DNA, 30 bp, Artificial Sequence
  Synthetic oligonucleotide
gagttgcgctaaaaatctaccttccgcgtc

SEQ ID NO: 271764 - DNA, 30 bp, Artificial Sequence
  Synthetic oligonucleotide
tgtcacggtgtaaactccttagttcgcgtc

SEQ ID NO: 271765 - DNA, 30 bp, Artificial Sequence
  Synthetic oligonucleotide
taagagcgtttggatagttgttaaggcgtc

SEQ ID NO: 271766 - DNA, 30 bp, Artificial Sequence
  Synthetic oligonucleotide
catgtaggttgaccggctgcctgctgcgtc

SEQ ID NO: 271767 - DNA, 30 bp, Artificial Sequence
  Synthetic oligonucleotide
atactataacatgattgaaggcggtgcgtc

SEQ ID NO: 271768 - DNA, 30 bp, Artificial Sequence
  Synthetic oligonucleotide
ctatcctctgttcgcctggcacaaatcgtc

SEQ ID NO: 271769 - DNA, 30 bp, Artificial Sequence
  Synthetic oligonucleotide
cttcctaacctgggatctcctgaaatcgtc

SEQ ID NO: 271770 - DNA, 30 bp, Artificial Sequence
  Synthetic oligonucleotide
aggtagatggtacaatcttgagcaatcgtc

SEQ ID NO: 271771 - DNA, 30 bp, Artificial Sequence
  Synthetic oligonucleotide
ggggatcgagtgtctattcaatcaatcgtc

SEQ ID NO: 271772 - DNA, 30 bp, Artificial Sequence
  Synthetic oligonucleotide
tcagatgcaaacaaagttcgcagaatcgtc

SEQ ID NO: 271773 - DNA, 30 bp, Artificial Sequence
  Synthetic oligonucleotide
acacacagccctgggcgcagaataatcgtc

SEQ ID NO: 271774 - DNA, 30 bp, Artificial Sequence
  Synthetic oligonucleotide
aggtttcttgtcaaatcccacttcatcgtc

SEQ ID NO: 271775 - DNA, 30 bp, Artificial Sequence
  Synthetic oligonucleotide
tttgcggtaataaaatccgaatagatcgtc

SEQ ID NO: 271776 - DNA, 30 bp, Artificial Sequence
  Synthetic oligonucleotide
gcagtgtatccctcgttgaacgaactcgtc

SEQ ID NO: 271777 - DNA, 30 bp, Artificial Sequence
  Synthetic oligonucleotide
ctcgagtgtgcgcccatcagtgggctcgtc

SEQ ID NO: 271778 - DNA, 30 bp, Artificial Sequence
  Synthetic oligonucleotide
gtttattagacgaactaaaatgctctcgtc

SEQ ID NO: 271779 - DNA, 30 bp, Artificial Sequence
  Synthetic oligonucleotide
cacgcaatccgcttgcgaacgacagtcgtc

SEQ ID NO: 271780 - DNA, 30 bp, Artificial Sequence
  Synthetic oligonucleotide
aaatgtagctataaacagttctgtgtcgtc

SEQ ID NO: 271781 - DNA, 30 bp, Artificial Sequence
  Synthetic oligonucleotide
tatggatttctatggcatggtattgtcgtc

SEQ ID NO: 271782 - DNA, 30 bp, Artificial Sequence
  Synthetic oligonucleotide
ccaaggttaactggacggaggccattcgtc

SEQ ID NO: 271783 - DNA, 30 bp, Artificial Sequence
  Synthetic oligonucleotide
acggggaacgccggacagcagatattcgtc

SEQ ID NO: 271784 - DNA, 30 bp, Artificial Sequence
  Synthetic oligonucleotide
aaactgttggctcagttagtaatcttcgtc

SEQ ID NO: 271785 - DNA, 30 bp, Artificial Sequence
  Synthetic oligonucleotide
cgagattaccaaaaaatggggtagttcgtc

SEQ ID NO: 271786 - DNA, 30 bp, Artificial Sequence
  Synthetic oligonucleotide
accgtgaagcgtattatagatacgttcgtc

SEQ ID NO: 271787 - DNA, 30 bp, Artificial Sequence
  Synthetic oligonucleotide
gccgtatcaggtcggctgcgaaccaaggtc

SEQ ID NO: 271788 - DNA, 29 bp, Artificial Sequence
  Synthetic oligonucleotide
agaggggtcgtcgaaagcggcccaaggtc

SEQ ID NO: 271789 - DNA, 30 bp, Artificial Sequence
  Synthetic oligonucleotide
tgtggtcctcatacgcttattagcaaggtc

SEQ ID NO: 271790 - DNA, 30 bp, Artificial Sequence
  Synthetic oligonucleotide
ggtgattacgtcaacaatgtacataaggtc

SEQ ID NO: 271791 - DNA, 30 bp, Artificial Sequence
  Synthetic oligonucleotide
actatgggcttgtgtgtaatctctaaggtc

SEQ ID NO: 271792 - DNA, 30 bp, Artificial Sequence
  Synthetic oligonucleotide
tttaagggccagatccaaactcaccaggtc

SEQ ID NO: 271793 - DNA, 30 bp, Artificial Sequence
  Synthetic oligonucleotide
gttcttccagggcaattcattacccaggtc

SEQ ID NO: 271794 - DNA, 30 bp, Artificial Sequence
  Synthetic oligonucleotide
cttggtcttagtggcctgatttgccaggtc

SEQ ID NO: 271795 - DNA, 30 bp, Artificial Sequence
  Synthetic oligonucleotide
agaatgctgttgggttcatgcctccaggtc

SEQ ID NO: 271796 - DNA, 30 bp, Artificial Sequence
  Synthetic oligonucleotide
tatcagacgtcggttagggttgggcaggtc

SEQ ID NO: 271797 - DNA, 30 bp, Artificial Sequence
  Synthetic oligonucleotide
catcgtgccatcgttagaagacacgaggtc

SEQ ID NO: 271798 - DNA, 30 bp, Artificial Sequence
  Synthetic oligonucleotide
aacgcgtctcatgtctcttaaatcgaggtc

SEQ ID NO: 271799 - DNA, 30 bp, Artificial Sequence
  Synthetic oligonucleotide
ggaaaggtaaagaaggaggcgacggaggtc

SEQ ID NO: 271800 - DNA, 30 bp, Artificial Sequence
  Synthetic oligonucleotide
taatggggtgtattagccggagaataggtc

SEQ ID NO: 271801 - DNA, 30 bp, Artificial Sequence
  Synthetic oligonucleotide
gtaaaacgcggtaattgcttataataggtc

SEQ ID NO: 271802 - DNA, 30 bp, Artificial Sequence
  Synthetic oligonucleotide
aatgtcatccccgatgacaggccctaggtc

SEQ ID NO: 271803 - DNA, 30 bp, Artificial Sequence
  Synthetic oligonucleotide
acagaccgctgggagatcttcgcctaggtc

SEQ ID NO: 271804 - DNA, 30 bp, Artificial Sequence
  Synthetic oligonucleotide
ctcagtagctattaaggaagggcgtaggtc

SEQ ID NO: 271805 - DNA, 30 bp, Artificial Sequence
  Synthetic oligonucleotide
gtcccatggtcaggtgcaaaaagttaggtc

SEQ ID NO: 271806 - DNA, 30 bp, Artificial Sequence
  Synthetic oligonucleotide
tggacatggagcgtatcaaacctttaggtc

SEQ ID NO: 271807 - DNA, 30 bp, Artificial Sequence
  Synthetic oligonucleotide
ttcagttgctaaccggggactaacacggtc

SEQ ID NO: 271808 - DNA, 30 bp, Artificial Sequence
  Synthetic oligonucleotide
cgaggtgtatgaggcattactgtcacggtc

SEQ ID NO: 271809 - DNA, 30 bp, Artificial Sequence
  Synthetic oligonucleotide
tcctgaacgactgtaggttccatgacggtc

SEQ ID NO: 271810 - DNA, 30 bp, Artificial Sequence
  Synthetic oligonucleotide
ccgacaactgaccctgaatttgcaccggtc

SEQ ID NO: 271811 - DNA, 30 bp, Artificial Sequence
  Synthetic oligonucleotide
atatcacctcttgcaagcccgataccggtc

SEQ ID NO: 271812 - DNA, 30 bp, Artificial Sequence
  Synthetic oligonucleotide
taaactgagatattgtacgacggcccggtc

SEQ ID NO: 271813 - DNA, 30 bp, Artificial Sequence
  Synthetic oligonucleotide
gggcgagcgatgacctaccagttcccggtc

SEQ ID NO: 271814 - DNA, 30 bp, Artificial Sequence
  Synthetic oligonucleotide
tgagtgtccaccctgaaacacctagcggtc

SEQ ID NO: 271815 - DNA, 30 bp, Artificial Sequence
  Synthetic oligonucleotide
ctatttttaggggcaaaccgtagcgcggtc

SEQ ID NO: 271816 - DNA, 30 bp, Artificial Sequence
  Synthetic oligonucleotide
agctcaaacgtcagtcctgcccatgcggtc

SEQ ID NO: 271817 - DNA, 30 bp, Artificial Sequence
  Synthetic oligonucleotide
cccccaagtgtgaggagctaatgctcggtc

SEQ ID NO: 271818 - DNA, 28 bp, Artificial Sequence
  Synthetic oligonucleotide
agtcaagcgacttgactcacattcggtc

SEQ ID NO: 271819 - DNA, 30 bp, Artificial Sequence
  Synthetic oligonucleotide
ctggccgtagcaagtacaggccattcggtc

SEQ ID NO: 271820 - DNA, 30 bp, Artificial Sequence
  Synthetic oligonucleotide
gtttgtgatggcaacaactgcacttcggtc

SEQ ID NO: 271821 - DNA, 30 bp, Artificial Sequence
  Synthetic oligonucleotide
agtcgggtattgccacctacacccagggtc

SEQ ID NO: 271822 - DNA, 30 bp, Artificial Sequence
  Synthetic oligonucleotide
ccagggtattctcgggagacgtccagggtc

SEQ ID NO: 271823 - DNA, 30 bp, Artificial Sequence
  Synthetic oligonucleotide
cccgtttactagcatgtcacctgcagggtc

SEQ ID NO: 271824 - DNA, 30 bp, Artificial Sequence
  Synthetic oligonucleotide
catccgtgagtctcgggtaagcagagggtc

SEQ ID NO: 271825 - DNA, 30 bp, Artificial Sequence
  Synthetic oligonucleotide
tttaatcatctccctattcaagagagggtc

SEQ ID NO: 271826 - DNA, 30 bp, Artificial Sequence
  Synthetic oligonucleotide
attccccgtaaaggcagtacctagagggtc

SEQ ID NO: 271827 - DNA, 30 bp, Artificial Sequence
  Synthetic oligonucleotide
gaactgtgggggtgcctaggtcgtagggtc

SEQ ID NO: 271828 - DNA, 30 bp, Artificial Sequence
  Synthetic oligonucleotide
actcccgcgttgattgtacatgcacgggtc

SEQ ID NO: 271829 - DNA, 30 bp, Artificial Sequence
  Synthetic oligonucleotide
aagtaggtagcatggatagatcatcgggtc

SEQ ID NO: 271830 - DNA, 30 bp, Artificial Sequence
  Synthetic oligonucleotide
gaggtagtatgagtacctgtgagaggggtc

SEQ ID NO: 271831 - DNA, 30 bp, Artificial Sequence
  Synthetic oligonucleotide
gcgagtcttatgaagccaggagccggggtc

SEQ ID NO: 271832 - DNA, 30 bp, Artificial Sequence
  Synthetic oligonucleotide
gcgagggcgccgttggcgaggctcggggtc

SEQ ID NO: 271833 - DNA, 30 bp, Artificial Sequence
  Synthetic oligonucleotide
gaaaagcatagatcggtgactacgggggtc

SEQ ID NO: 271834 - DNA, 30 bp, Artificial Sequence
  Synthetic oligonucleotide
cctatcagcgtttctaactcgaggggggtc

SEQ ID NO: 271835 - DNA, 30 bp, Artificial Sequence
  Synthetic oligonucleotide
ggcgcactggagtgcggtgtgaatggggtc

SEQ ID NO: 271836 - DNA, 30 bp, Artificial Sequence
  Synthetic oligonucleotide
ataagtgggcaagctcgtttccatggggtc

SEQ ID NO: 271837 - DNA, 30 bp, Artificial Sequence
  Synthetic oligonucleotide
ggggaaggccgtacagaggtaggtggggtc

SEQ ID NO: 271838 - DNA, 30 bp, Artificial Sequence
  Synthetic oligonucleotide
atatctataaaacaggcgaaacaatgggtc

SEQ ID NO: 271839 - DNA, 30 bp, Artificial Sequence
  Synthetic oligonucleotide
agccgtaacaggtgctcgtaatagtgggtc

SEQ ID NO: 271840 - DNA, 30 bp, Artificial Sequence
  Synthetic oligonucleotide
cttgcaaccctggttcggcctcattgggtc

SEQ ID NO: 271841 - DNA, 30 bp, Artificial Sequence
  Synthetic oligonucleotide
tatgggttgagactaataatgcaaatggtc

SEQ ID NO: 271842 - DNA, 30 bp, Artificial Sequence
  Synthetic oligonucleotide
atgcggtgtgagcggcgtaaacgcatggtc

SEQ ID NO: 271843 - DNA, 30 bp, Artificial Sequence
  Synthetic oligonucleotide
cagaaatattaagatatgtcctagatggtc

SEQ ID NO: 271844 - DNA, 30 bp, Artificial Sequence
  Synthetic oligonucleotide
acccaggcggttattggctcaccgatggtc

SEQ ID NO: 271845 - DNA, 30 bp, Artificial Sequence
  Synthetic oligonucleotide
gcacaatccggtacagccgttcttatggtc

SEQ ID NO: 271846 - DNA, 30 bp, Artificial Sequence
  Synthetic oligonucleotide
aaaagtaattaatggccaccggaactggtc

SEQ ID NO: 271847 - DNA, 30 bp, Artificial Sequence
  Synthetic oligonucleotide
gaagacccaataatgggcgagaccctggtc

SEQ ID NO: 271848 - DNA, 30 bp, Artificial Sequence
  Synthetic oligonucleotide
tctatgactggctgctcgcctcgcctggtc

SEQ ID NO: 271849 - DNA, 30 bp, Artificial Sequence
  Synthetic oligonucleotide
actttgtcttacactcacaggcagctggtc

SEQ ID NO: 271850 - DNA, 30 bp, Artificial Sequence
  Synthetic oligonucleotide
cgatcctataagatcataagttagctggtc

SEQ ID NO: 271851 - DNA, 30 bp, Artificial Sequence
  Synthetic oligonucleotide
aatagcttggaagggtccaccgctctggtc

SEQ ID NO: 271852 - DNA, 30 bp, Artificial Sequence
  Synthetic oligonucleotide
tcagcattataggattcaagggtagtggtc

SEQ ID NO: 271853 - DNA, 30 bp, Artificial Sequence
  Synthetic oligonucleotide
gacaacttgtacgatctggtatacgtggtc

SEQ ID NO: 271854 - DNA, 30 bp, Artificial Sequence
  Synthetic oligonucleotide
tctctgccacgccctcaaaaatccgtggtc

SEQ ID NO: 271855 - DNA, 30 bp, Artificial Sequence
  Synthetic oligonucleotide
tctacacacggcagtggaagatttgtggtc

SEQ ID NO: 271856 - DNA, 30 bp, Artificial Sequence
  Synthetic oligonucleotide
aacgtatagggactgcgccgtaggttggtc

SEQ ID NO: 271857 - DNA, 30 bp, Artificial Sequence
  Synthetic oligonucleotide
agtttaacgcaacatcggaaaagtttggtc

SEQ ID NO: 271858 - DNA, 30 bp, Artificial Sequence
  Synthetic oligonucleotide
agacaatttgtagatcgccggacaaatgtc

SEQ ID NO: 271859 - DNA, 30 bp, Artificial Sequence
  Synthetic oligonucleotide
cgaacgcgtacctctgcctaatcaaatgtc

SEQ ID NO: 271860 - DNA, 30 bp, Artificial Sequence
  Synthetic oligonucleotide
caggcgtatcataattgcttcggaaatgtc

SEQ ID NO: 271861 - DNA, 30 bp, Artificial Sequence
  Synthetic oligonucleotide
aatgtgtgctcgtaaggagaaataaatgtc

SEQ ID NO: 271862 - DNA, 30 bp, Artificial Sequence
  Synthetic oligonucleotide
ggagatagttacggtgactaacacaatgtc

SEQ ID NO: 271863 - DNA, 30 bp, Artificial Sequence
  Synthetic oligonucleotide
aaggtgtgcactacaaagttgtacaatgtc

SEQ ID NO: 271864 - DNA, 30 bp, Artificial Sequence
  Synthetic oligonucleotide
atgtgcgatgttgcaagaagaacacatgtc

SEQ ID NO: 271865 - DNA, 30 bp, Artificial Sequence
  Synthetic oligonucleotide
gcacccacaccaccagcaaagctccatgtc

SEQ ID NO: 271866 - DNA, 30 bp, Artificial Sequence
  Synthetic oligonucleotide
gtaacacgtgtgggtcccgctaagcatgtc

SEQ ID NO: 271867 - DNA, 30 bp, Artificial Sequence
  Synthetic oligonucleotide
tccagtttactaaactcgcgtaagcatgtc

SEQ ID NO: 271868 - DNA, 30 bp, Artificial Sequence
  Synthetic oligonucleotide
ggaagtcatgtaggggctgtatgtcatgtc

SEQ ID NO: 271869 - DNA, 30 bp, Artificial Sequence
  Synthetic oligonucleotide
atgtcagaccccgcaatatatcaagatgtc

SEQ ID NO: 271870 - DNA, 30 bp, Artificial Sequence
  Synthetic oligonucleotide
aaagccttacacatcgacggaccagatgtc

SEQ ID NO: 271871 - DNA, 30 bp, Artificial Sequence
  Synthetic oligonucleotide
accttctaaacagtaaatgtaagagatgtc

SEQ ID NO: 271872 - DNA, 30 bp, Artificial Sequence
  Synthetic oligonucleotide
taaccgtacttgtcaagctgagcatatgtc

SEQ ID NO: 271873 - DNA, 30 bp, Artificial Sequence
  Synthetic oligonucleotide
gggttttgtaaagaggaaaatcgctatgtc

SEQ ID NO: 271874 - DNA, 30 bp, Artificial Sequence
  Synthetic oligonucleotide
gcacattttatacagattattccgtatgtc

SEQ ID NO: 271875 - DNA, 30 bp, Artificial Sequence
  Synthetic oligonucleotide
aacgtgggtaagcagggcttgtcaactgtc

SEQ ID NO: 271876 - DNA, 30 bp, Artificial Sequence
  Synthetic oligonucleotide
gggcaatcctctcatgatatatgaactgtc

SEQ ID NO: 271877 - DNA, 30 bp, Artificial Sequence
  Synthetic oligonucleotide
ttcatcccgtggggcctaaatctaactgtc

SEQ ID NO: 271878 - DNA, 30 bp, Artificial Sequence
  Synthetic oligonucleotide
gattcgtctagatgcttccacagcactgtc

SEQ ID NO: 271879 - DNA, 30 bp, Artificial Sequence
  Synthetic oligonucleotide
cacctcggggacatggcgcgcggcactgtc

SEQ ID NO: 271880 - DNA, 30 bp, Artificial Sequence
  Synthetic oligonucleotide
gcttgttgactacacccgtcctgtactgtc

SEQ ID NO: 271881 - DNA, 30 bp, Artificial Sequence
  Synthetic oligonucleotide
tgggtccgtgtggtgaatattggtcctgtc

SEQ ID NO: 271882 - DNA, 31 bp, Artificial Sequence
  Synthetic oligonucleotide
tactgtctcccgttgcgacgatcacgctgtc

SEQ ID NO: 271883 - DNA, 30 bp, Artificial Sequence
  Synthetic oligonucleotide
tcaccgagattattggggggtggcgctgtc

SEQ ID NO: 271884 - DNA, 30 bp, Artificial Sequence
  Synthetic oligonucleotide
atatcgtattgacgtaatcacattgctgtc

SEQ ID NO: 271885 - DNA, 30 bp, Artificial Sequence
  Synthetic oligonucleotide
gtgaaggcgtagcctgaccgaaaatctgtc

SEQ ID NO: 271886 - DNA, 30 bp, Artificial Sequence
  Synthetic oligonucleotide
cagaacgacgatatgctggatagttctgtc

SEQ ID NO: 271887 - DNA, 30 bp, Artificial Sequence
  Synthetic oligonucleotide
gagccttgcttatcgaggccaggttctgtc

SEQ ID NO: 271888 - DNA, 30 bp, Artificial Sequence
  Synthetic oligonucleotide
tccaaaggaaatcccattctatgttctgtc

SEQ ID NO: 271889 - DNA, 30 bp, Artificial Sequence
  Synthetic oligonucleotide
aaatccggtcagtggtggacacacagtgtc

SEQ ID NO: 271890 - DNA, 30 bp, Artificial Sequence
  Synthetic oligonucleotide
tattaaagaatagtggttgtcctcagtgtc

SEQ ID NO: 271891 - DNA, 30 bp, Artificial Sequence
  Synthetic oligonucleotide
ataactcgagtaacaaaatacttcagtgtc

SEQ ID NO: 271892 - DNA, 30 bp, Artificial Sequence
  Synthetic oligonucleotide
tggacattcacggattgtctttcgagtgtc

SEQ ID NO: 271893 - DNA, 30 bp, Artificial Sequence
  Synthetic oligonucleotide
atgtgcatcgaatgggttacgtggagtgtc

SEQ ID NO: 271894 - DNA, 30 bp, Artificial Sequence
  Synthetic oligonucleotide
ccagtccaaacggtgcctcgcaatagtgtc

SEQ ID NO: 271895 - DNA, 30 bp, Artificial Sequence
  Synthetic oligonucleotide
gctttccacacagcgtataggcgtagtgtc

SEQ ID NO: 271896 - DNA, 30 bp, Artificial Sequence
  Synthetic oligonucleotide
aagagtttcctcatcagtttaccccgtgtc

SEQ ID NO: 271897 - DNA, 30 bp, Artificial Sequence
  Synthetic oligonucleotide
ggatgtctcacgtcttattagggaggtgtc

SEQ ID NO: 271898 - DNA, 30 bp, Artificial Sequence
  Synthetic oligonucleotide
tttcgtttggccgtggcggatctaggtgtc

SEQ ID NO: 271899 - DNA, 30 bp, Artificial Sequence
  Synthetic oligonucleotide
gagatgtccacgcatgggaccagcggtgtc

SEQ ID NO: 271900 - DNA, 30 bp, Artificial Sequence
  Synthetic oligonucleotide
gactaagacctcggtagtgtgtcgggtgtc

SEQ ID NO: 271901 - DNA, 30 bp, Artificial Sequence
  Synthetic oligonucleotide
tcattaatagattcttcgttgcgtggtgtc

SEQ ID NO: 271902 - DNA, 30 bp, Artificial Sequence
  Synthetic oligonucleotide
ccgattgcatcaggctagaataaatgtgtc

SEQ ID NO: 271903 - DNA, 30 bp, Artificial Sequence
  Synthetic oligonucleotide
ctataaaagggaaccatggcttcatgtgtc

SEQ ID NO: 271904 - DNA, 30 bp, Artificial Sequence
  Synthetic oligonucleotide
ccgctagattacgaatggcacggatgtgtc

SEQ ID NO: 271905 - DNA, 30 bp, Artificial Sequence
  Synthetic oligonucleotide
aaacgcgccgctgtatctaaacggtgtgtc

SEQ ID NO: 271906 - DNA, 30 bp, Artificial Sequence
  Synthetic oligonucleotide
gttcaacgtcctcagcaatggctaattgtc

SEQ ID NO: 271907 - DNA, 30 bp, Artificial Sequence
  Synthetic oligonucleotide
tcgtacgatcatgtttgagctaacattgtc

SEQ ID NO: 271908 - DNA, 30 bp, Artificial Sequence
  Synthetic oligonucleotide
ggtgacatctaggtaagaagctacattgtc

SEQ ID NO: 271909 - DNA, 30 bp, Artificial Sequence
  Synthetic oligonucleotide
attcgtatagtgtcgttaaggtgcattgtc

SEQ ID NO: 271910 - DNA, 30 bp, Artificial Sequence
  Synthetic oligonucleotide
tattaggtctgcgccctcgtcccgattgtc

SEQ ID NO: 271911 - DNA, 30 bp, Artificial Sequence
  Synthetic oligonucleotide
cagatgcgtccgactcgccctcatattgtc

SEQ ID NO: 271912 - DNA, 30 bp, Artificial Sequence
  Synthetic oligonucleotide
cttagcaggcattatgtttcacgtattgtc

SEQ ID NO: 271913 - DNA, 30 bp, Artificial Sequence
  Synthetic oligonucleotide
agatagtgtgcagccactgactttattgtc

SEQ ID NO: 271914 - DNA, 30 bp, Artificial Sequence
  Synthetic oligonucleotide
gcaaggacgtaaccagcaaggctacttgtc

SEQ ID NO: 271915 - DNA, 30 bp, Artificial Sequence
  Synthetic oligonucleotide
accattcgtgctgggccaatactgcttgtc

SEQ ID NO: 271916 - DNA, 30 bp, Artificial Sequence
  Synthetic oligonucleotide
gactgggactcgcagatatgaaaagttgtc

SEQ ID NO: 271917 - DNA, 30 bp, Artificial Sequence
  Synthetic oligonucleotide
agctcttactagtcgtaaagattagttgtc

SEQ ID NO: 271918 - DNA, 30 bp, Artificial Sequence
  Synthetic oligonucleotide
gtgctggggggctagacacagcacgttgtc

SEQ ID NO: 271919 - DNA, 30 bp, Artificial Sequence
  Synthetic oligonucleotide
taacgattcgtaatgaaacaattcgttgtc

SEQ ID NO: 271920 - DNA, 30 bp, Artificial Sequence
  Synthetic oligonucleotide
ctgccgacaagactgatgtcacagtttgtc

SEQ ID NO: 271921 - DNA, 30 bp, Artificial Sequence
  Synthetic oligonucleotide
aacaagtggtctggggacgcccaaaaattc

SEQ ID NO: 271922 - DNA, 30 bp, Artificial Sequence
  Synthetic oligonucleotide
gtcgatatagcattcgggtttaccaaattc

SEQ ID NO: 271923 - DNA, 30 bp, Artificial Sequence
  Synthetic oligonucleotide
acattcttgccattggattgctccaaattc

SEQ ID NO: 271924 - DNA, 30 bp, Artificial Sequence
  Synthetic oligonucleotide
agtgaaatggataacggttgcgtcaaattc

SEQ ID NO: 271925 - DNA, 30 bp, Artificial Sequence
  Synthetic oligonucleotide
agtcatagatcatggcacaatcggaaattc

SEQ ID NO: 271926 - DNA, 30 bp, Artificial Sequence
  Synthetic oligonucleotide
atcagtggggttttcctctggacacaattc

SEQ ID NO: 271927 - DNA, 30 bp, Artificial Sequence
  Synthetic oligonucleotide
aagtgagccaatccccattttgcacaattc

SEQ ID NO: 271928 - DNA, 30 bp, Artificial Sequence
  Synthetic oligonucleotide
tggtgttgcgtatgtgctatctcacaattc

SEQ ID NO: 271929 - DNA, 30 bp, Artificial Sequence
  Synthetic oligonucleotide
taagcaggaaagaagcgaagcatacaattc

SEQ ID NO: 271930 - DNA, 30 bp, Artificial Sequence
  Synthetic oligonucleotide
aaaactagggccgagaagtacatccaattc

SEQ ID NO: 271931 - DNA, 30 bp, Artificial Sequence
  Synthetic oligonucleotide
gtaaattgtcgatcaagattcatgcaattc

SEQ ID NO: 271932 - DNA, 30 bp, Artificial Sequence
  Synthetic oligonucleotide
ggaaaggagggctggtaaagggtgcaattc

SEQ ID NO: 271933 - DNA, 31 bp, Artificial Sequence
  Synthetic oligonucleotide
ggggaatcgttaagcaagctagcgagaattc

SEQ ID NO: 271934 - DNA, 30 bp, Artificial Sequence
  Synthetic oligonucleotide
gctaagtagctacgatgggcccccgaattc

SEQ ID NO: 271935 - DNA, 30 bp, Artificial Sequence
  Synthetic oligonucleotide
atggaaacgctctcattgcctctcgaattc

SEQ ID NO: 271936 - DNA, 31 bp, Artificial Sequence
  Synthetic oligonucleotide
ggagcatactactatcacttctaactaattc

SEQ ID NO: 271937 - DNA, 30 bp, Artificial Sequence
  Synthetic oligonucleotide
agtaaactagcgttcacacgtgtctaattc

SEQ ID NO: 271938 - DNA, 30 bp, Artificial Sequence
  Synthetic oligonucleotide
ctcacttaactgagatcgccgtagtaattc

SEQ ID NO: 271939 - DNA, 30 bp, Artificial Sequence
  Synthetic oligonucleotide
gtcgcaactagaccgtaacatttgtaattc

SEQ ID NO: 271940 - DNA, 30 bp, Artificial Sequence
  Synthetic oligonucleotide
tggctgttctgacatcttattccttaattc

SEQ ID NO: 271941 - DNA, 30 bp, Artificial Sequence
  Synthetic oligonucleotide
actgtggccttatggagaccatcgacattc

SEQ ID NO: 271942 - DNA, 30 bp, Artificial Sequence
  Synthetic oligonucleotide
atgaggccagtggctatgggcgggacattc

SEQ ID NO: 271943 - DNA, 30 bp, Artificial Sequence
  Synthetic oligonucleotide
cgcgtgtgccaccgatgtatctggacattc

SEQ ID NO: 271944 - DNA, 30 bp, Artificial Sequence
  Synthetic oligonucleotide
tctctctcgcgcatcccacatactacattc

SEQ ID NO: 271945 - DNA, 30 bp, Artificial Sequence
  Synthetic oligonucleotide
ttcagcgcgagattgaaacttgaaccattc

SEQ ID NO: 271946 - DNA, 30 bp, Artificial Sequence
  Synthetic oligonucleotide
ggcaaaaaactccgggcaccataaccattc

SEQ ID NO: 271947 - DNA, 30 bp, Artificial Sequence
  Synthetic oligonucleotide
cataggtgtaatggaggctcgtaaccattc

SEQ ID NO: 271948 - DNA, 30 bp, Artificial Sequence
  Synthetic oligonucleotide
ctttgagagttcgggcccttgacaccattc

SEQ ID NO: 271949 - DNA, 30 bp, Artificial Sequence
  Synthetic oligonucleotide
atagatgacacggaactgcaacagccattc

SEQ ID NO: 271950 - DNA, 30 bp, Artificial Sequence
  Synthetic oligonucleotide
ggtggtcgtcaccggaccaacggagcattc

SEQ ID NO: 271951 - DNA, 30 bp, Artificial Sequence
  Synthetic oligonucleotide
aggctcgggcgaaaaccttcagtagcattc

SEQ ID NO: 271952 - DNA, 30 bp, Artificial Sequence
  Synthetic oligonucleotide
tgactatacgtggatgaatacttagcattc

SEQ ID NO: 271953 - DNA, 30 bp, Artificial Sequence
  Synthetic oligonucleotide
aaacgagtgcgttggctcgcgcacgcattc

SEQ ID NO: 271954 - DNA, 30 bp, Artificial Sequence
  Synthetic oligonucleotide
ctggtctaggagatgttaatctacgcattc

SEQ ID NO: 271955 - DNA, 30 bp, Artificial Sequence
  Synthetic oligonucleotide
gatatggatcggcaatcgtcgagcgcattc

SEQ ID NO: 271956 - DNA, 30 bp, Artificial Sequence
  Synthetic oligonucleotide
tcggagcacattcgacccttaggcgcattc

SEQ ID NO: 271957 - DNA, 30 bp, Artificial Sequence
  Synthetic oligonucleotide
gctggtcgttcaagagcaatttaggcattc

SEQ ID NO: 271958 - DNA, 30 bp, Artificial Sequence
  Synthetic oligonucleotide
ttcagtttgttttaattgaattgtgcattc

SEQ ID NO: 271959 - DNA, 30 bp, Artificial Sequence
  Synthetic oligonucleotide
tgctagtacaagggcgtcaaaatatcattc

SEQ ID NO: 271960 - DNA, 30 bp, Artificial Sequence
  Synthetic oligonucleotide
gggctccaaaggggatgtagggagtcattc

SEQ ID NO: 271961 - DNA, 30 bp, Artificial Sequence
  Synthetic oligonucleotide
acaaacctgggacggggatatgagtcattc

SEQ ID NO: 271962 - DNA, 30 bp, Artificial Sequence
  Synthetic oligonucleotide
tttggccactaaagcgggcaaaattcattc

SEQ ID NO: 271963 - DNA, 30 bp, Artificial Sequence
  Synthetic oligonucleotide
cggataattgccaatggtgagtgttcattc

SEQ ID NO: 271964 - DNA, 30 bp, Artificial Sequence
  Synthetic oligonucleotide
gatatctcctgatagtcattcatttcattc

SEQ ID NO: 271965 - DNA, 30 bp, Artificial Sequence
  Synthetic oligonucleotide
agggatgtcggctagtaacccattagattc

SEQ ID NO: 271966 - DNA, 30 bp, Artificial Sequence
  Synthetic oligonucleotide
agaattggaacacatccgctctgacgattc

SEQ ID NO: 271967 - DNA, 30 bp, Artificial Sequence
  Synthetic oligonucleotide
ctgtaggtacaggttgacaaggtccgattc

SEQ ID NO: 271968 - DNA, 30 bp, Artificial Sequence
  Synthetic oligonucleotide
ggcatgagctaatgacattctgagcgattc

SEQ ID NO: 271969 - DNA, 30 bp, Artificial Sequence
  Synthetic oligonucleotide
gacccatatcgggttagagtccatcgattc

SEQ ID NO: 271970 - DNA, 30 bp, Artificial Sequence
  Synthetic oligonucleotide
gttagccggaaaggtgaacgaaggggattc

SEQ ID NO: 271971 - DNA, 30 bp, Artificial Sequence
  Synthetic oligonucleotide
gatttacggcagttccaacgacctggattc

SEQ ID NO: 271972 - DNA, 30 bp, Artificial Sequence
  Synthetic oligonucleotide
tacgaatgaatcgaataatactctggattc

SEQ ID NO: 271973 - DNA, 30 bp, Artificial Sequence
  Synthetic oligonucleotide
ccggtggggcatcaacaaatagtctgattc

SEQ ID NO: 271974 - DNA, 30 bp, Artificial Sequence
  Synthetic oligonucleotide
gctgacacacgacaagcctttgtctgattc

SEQ ID NO: 271975 - DNA, 30 bp, Artificial Sequence
  Synthetic oligonucleotide
aaggaatgccggtcctattcgtcgtgattc

SEQ ID NO: 271976 - DNA, 30 bp, Artificial Sequence
  Synthetic oligonucleotide
tcaagcgcaggggaaattaggaattgattc

SEQ ID NO: 271977 - DNA, 30 bp, Artificial Sequence
  Synthetic oligonucleotide
catcgcgtccaagcaaaagacgattgattc

SEQ ID NO: 271978 - DNA, 31 bp, Artificial Sequence
  Synthetic oligonucleotide
ggtgaggtcatccagtatttgcacttgattc

SEQ ID NO: 271979 - DNA, 30 bp, Artificial Sequence
  Synthetic oligonucleotide
gcagtgactaaacgagtgcgaccttgattc

SEQ ID NO: 271980 - DNA, 30 bp, Artificial Sequence
  Synthetic oligonucleotide
gaatcaaaacttcagcaggcatgttgattc

SEQ ID NO: 271981 - DNA, 30 bp, Artificial Sequence
  Synthetic oligonucleotide
cgaatcgttccttctgaatgtcaaatattc

SEQ ID NO: 271982 - DNA, 30 bp, Artificial Sequence
  Synthetic oligonucleotide
ccagggtaatgctctctgaattaaatattc

SEQ ID NO: 271983 - DNA, 30 bp, Artificial Sequence
  Synthetic oligonucleotide
attccgtcgttcgatacgattcatatattc

SEQ ID NO: 271984 - DNA, 30 bp, Artificial Sequence
  Synthetic oligonucleotide
gccagctaacgactgcatttggatatattc

SEQ ID NO: 271985 - DNA, 30 bp, Artificial Sequence
  Synthetic oligonucleotide
accttcaaagaattccgtacctctatattc

SEQ ID NO: 271986 - DNA, 30 bp, Artificial Sequence
  Synthetic oligonucleotide
agataggtataatgacagttcaaactattc

SEQ ID NO: 271987 - DNA, 30 bp, Artificial Sequence
  Synthetic oligonucleotide
taagaaattatggaactgtcggcactattc

SEQ ID NO: 271988 - DNA, 31 bp, Artificial Sequence
  Synthetic oligonucleotide
aagagggtacaagaccggggaactcctattc

SEQ ID NO: 271989 - DNA, 30 bp, Artificial Sequence
  Synthetic oligonucleotide
atgctctgtcgacacgtggataggctattc

SEQ ID NO: 271990 - DNA, 30 bp, Artificial Sequence
  Synthetic oligonucleotide
ataagaaagatggggcctactaggctattc

SEQ ID NO: 271991 - DNA, 30 bp, Artificial Sequence
  Synthetic oligonucleotide
tcaacccgttaaccgacagtcgggctattc

SEQ ID NO: 271992 - DNA, 30 bp, Artificial Sequence
  Synthetic oligonucleotide
gcatcgtagcaagcggaggtatggctattc

SEQ ID NO: 271993 - DNA, 30 bp, Artificial Sequence
  Synthetic oligonucleotide
agttcatgtgatggcaggagcatgctattc

SEQ ID NO: 271994 - DNA, 30 bp, Artificial Sequence
  Synthetic oligonucleotide
cttggagccaatatcagcgattatctattc

SEQ ID NO: 271995 - DNA, 30 bp, Artificial Sequence
  Synthetic oligonucleotide
aagcttcaccgtcaaatcttagttctattc

SEQ ID NO: 271996 - DNA, 30 bp, Artificial Sequence
  Synthetic oligonucleotide
ttagagtcatttacagtgaagaaagtattc

SEQ ID NO: 271997 - DNA, 30 bp, Artificial Sequence
  Synthetic oligonucleotide
gacgtgctctggtttcaacgtgaagtattc

SEQ ID NO: 271998 - DNA, 30 bp, Artificial Sequence
  Synthetic oligonucleotide
agggtataaccaaaggaggcttgagtattc

SEQ ID NO: 271999 - DNA, 30 bp, Artificial Sequence
  Synthetic oligonucleotide
acaatgagcactataagtgaggtagtattc

SEQ ID NO: 272000 - DNA, 30 bp, Artificial Sequence
  Synthetic oligonucleotide
ccttcctgtatctctttcgggcaggtattc

SEQ ID NO: 272001 - DNA, 30 bp, Artificial Sequence
  Synthetic oligonucleotide
atcgattgggggaaagactattaggtattc

SEQ ID NO: 272002 - DNA, 30 bp, Artificial Sequence
  Synthetic oligonucleotide
aacttgctcgaaagagactgttgggtattc

SEQ ID NO: 272003 - DNA, 30 bp, Artificial Sequence
  Synthetic oligonucleotide
ggctcggtgcattcgcgattcgttgtattc

SEQ ID NO: 272004 - DNA, 30 bp, Artificial Sequence
  Synthetic oligonucleotide
acaaccaacgccagccctcgactattattc

SEQ ID NO: 272005 - DNA, 30 bp, Artificial Sequence
  Synthetic oligonucleotide
agaattcttgcgaagaaatcattattattc

SEQ ID NO: 272006 - DNA, 30 bp, Artificial Sequence
  Synthetic oligonucleotide
ttgcgccacgtatatggatgtcgcttattc

SEQ ID NO: 272007 - DNA, 30 bp, Artificial Sequence
  Synthetic oligonucleotide
aaagcggcgttttctcagctcgaaaacttc

SEQ ID NO: 272008 - DNA, 30 bp, Artificial Sequence
  Synthetic oligonucleotide
tattcacggcgttcacagaacggaaacttc

SEQ ID NO: 272009 - DNA, 30 bp, Artificial Sequence
  Synthetic oligonucleotide
tcaaccctcgcagtctactcgtgaaacttc

SEQ ID NO: 272010 - DNA, 30 bp, Artificial Sequence
  Synthetic oligonucleotide
catactggggcggggggagaggtaaacttc

SEQ ID NO: 272011 - DNA, 30 bp, Artificial Sequence
  Synthetic oligonucleotide
acataaggggccaaggcaactcgcaacttc

SEQ ID NO: 272012 - DNA, 30 bp, Artificial Sequence
  Synthetic oligonucleotide
aggccgaagactagttccgtacataacttc

SEQ ID NO: 272013 - DNA, 30 bp, Artificial Sequence
  Synthetic oligonucleotide
gcgtgtacctctctcagacatgcacacttc

SEQ ID NO: 272014 - DNA, 30 bp, Artificial Sequence
  Synthetic oligonucleotide
agcagagctgaccggctaccagcccacttc

SEQ ID NO: 272015 - DNA, 30 bp, Artificial Sequence
  Synthetic oligonucleotide
ttaccgatgattatgggattacggcacttc

SEQ ID NO: 272016 - DNA, 30 bp, Artificial Sequence
  Synthetic oligonucleotide
tttcgaaaattgattccaacctctcacttc

SEQ ID NO: 272017 - DNA, 30 bp, Artificial Sequence
  Synthetic oligonucleotide
gttatctgttgttaatatttatgtcacttc

SEQ ID NO: 272018 - DNA, 30 bp, Artificial Sequence
  Synthetic oligonucleotide
gatccatcgtgcaccaagtccaaagacttc

SEQ ID NO: 272019 - DNA, 30 bp, Artificial Sequence
  Synthetic oligonucleotide
gagcgccgggtaagggtagacagggacttc

SEQ ID NO: 272020 - DNA, 30 bp, Artificial Sequence
  Synthetic oligonucleotide
tagtatagagctcgggcacgagaatacttc

SEQ ID NO: 272021 - DNA, 30 bp, Artificial Sequence
  Synthetic oligonucleotide
agccaagacaatcgctttacgtaatacttc

SEQ ID NO: 272022 - DNA, 30 bp, Artificial Sequence
  Synthetic oligonucleotide
accatggagacccaacggtattcgtacttc

SEQ ID NO: 272023 - DNA, 30 bp, Artificial Sequence
  Synthetic oligonucleotide
tacgctcaaagcagtgaaacacataccttc

SEQ ID NO: 272024 - DNA, 30 bp, Artificial Sequence
  Synthetic oligonucleotide
acatcttatgacagctcaacgcttaccttc

SEQ ID NO: 272025 - DNA, 30 bp, Artificial Sequence
  Synthetic oligonucleotide
caacctaattcatgaaaaggacaacccttc

SEQ ID NO: 272026 - DNA, 30 bp, Artificial Sequence
  Synthetic oligonucleotide
tccataacctacctgactagcaaccccttc

SEQ ID NO: 272027 - DNA, 30 bp, Artificial Sequence
  Synthetic oligonucleotide
aatatgcgttacagtaccgcccttcccttc

SEQ ID NO: 272028 - DNA, 30 bp, Artificial Sequence
  Synthetic oligonucleotide
ggcacgtatagttacgatcgggcagccttc

SEQ ID NO: 272029 - DNA, 30 bp, Artificial Sequence
  Synthetic oligonucleotide
aattgtgccaacggccagtatctagccttc

SEQ ID NO: 272030 - DNA, 30 bp, Artificial Sequence
  Synthetic oligonucleotide
catcttatgccgaaatatacgcgcgccttc

SEQ ID NO: 272031 - DNA, 30 bp, Artificial Sequence
  Synthetic oligonucleotide
cgtgagtcacgcgctgagggacttgccttc

SEQ ID NO: 272032 - DNA, 30 bp, Artificial Sequence
  Synthetic oligonucleotide
cagggtaatttcatcgatgaatagtccttc

SEQ ID NO: 272033 - DNA, 30 bp, Artificial Sequence
  Synthetic oligonucleotide
caatccgatgaggatctcgagcaaagcttc

SEQ ID NO: 272034 - DNA, 30 bp, Artificial Sequence
  Synthetic oligonucleotide
ccttgggggaggcgaggattgtacagcttc

SEQ ID NO: 272035 - DNA, 30 bp, Artificial Sequence
  Synthetic oligonucleotide
agaggatgctttagtaaccattacagcttc

SEQ ID NO: 272036 - DNA, 30 bp, Artificial Sequence
  Synthetic oligonucleotide
acaccgacacctaagtctggcttacgcttc

SEQ ID NO: 272037 - DNA, 30 bp, Artificial Sequence
  Synthetic oligonucleotide
ttggcgtcttctcctggcctgctgcgcttc

SEQ ID NO: 272038 - DNA, 30 bp, Artificial Sequence
  Synthetic oligonucleotide
ttgcagtacctcgggcaatcgtgcggcttc

SEQ ID NO: 272039 - DNA, 30 bp, Artificial Sequence
  Synthetic oligonucleotide
taagtgttcaacatctggagaaatggcttc

SEQ ID NO: 272040 - DNA, 30 bp, Artificial Sequence
  Synthetic oligonucleotide
ctcagtcaaacagccacgtcttccatcttc

SEQ ID NO: 272041 - DNA, 30 bp, Artificial Sequence
  Synthetic oligonucleotide
aactcgaatgtcaagtactgagctatcttc

SEQ ID NO: 272042 - DNA, 31 bp, Artificial Sequence
  Synthetic oligonucleotide
gcagcacagcggacaatgtctctctatcttc

SEQ ID NO: 272043 - DNA, 30 bp, Artificial Sequence
  Synthetic oligonucleotide
ccgagcgtaatgggctaagctacgctcttc

SEQ ID NO: 272044 - DNA, 30 bp, Artificial Sequence
  Synthetic oligonucleotide
caaacctttagctagaggaacaccgtcttc

SEQ ID NO: 272045 - DNA, 30 bp, Artificial Sequence
  Synthetic oligonucleotide
gggtcatctctaatgtagtcgagtgtcttc

SEQ ID NO: 272046 - DNA, 30 bp, Artificial Sequence
  Synthetic oligonucleotide
agaataaggtaaaaaacatgcttcttcttc

SEQ ID NO: 272047 - DNA, 30 bp, Artificial Sequence
  Synthetic oligonucleotide
cagcaacgaacaaaaattatcaagttcttc

SEQ ID NO: 272048 - DNA, 30 bp, Artificial Sequence
  Synthetic oligonucleotide
agatccatggccttgaagttgcagttcttc

SEQ ID NO: 272049 - DNA, 30 bp, Artificial Sequence
  Synthetic oligonucleotide
gctaatgtacttttgaatacctggttcttc

SEQ ID NO: 272050 - DNA, 30 bp, Artificial Sequence
  Synthetic oligonucleotide
gttcttaggtgtattgagaagagaaagttc

SEQ ID NO: 272051 - DNA, 30 bp, Artificial Sequence
  Synthetic oligonucleotide
gcctccgcgggaggtagaagtagcaagttc

SEQ ID NO: 272052 - DNA, 30 bp, Artificial Sequence
  Synthetic oligonucleotide
cgatctatcgtcggacggatgccgaagttc

SEQ ID NO: 272053 - DNA, 30 bp, Artificial Sequence
  Synthetic oligonucleotide
tagggaggacatcctaggaagtataagttc

SEQ ID NO: 272054 - DNA, 30 bp, Artificial Sequence
  Synthetic oligonucleotide
ccgtgcggctaagactgtaaaagtaagttc

SEQ ID NO: 272055 - DNA, 30 bp, Artificial Sequence
  Synthetic oligonucleotide
attagtggctactggaccaagtaccagttc

SEQ ID NO: 272056 - DNA, 30 bp, Artificial Sequence
  Synthetic oligonucleotide
aaaacgcgtagcattcgaaactagcagttc

SEQ ID NO: 272057 - DNA, 30 bp, Artificial Sequence
  Synthetic oligonucleotide
gtcgtagtccggggtgccatgcccgagttc

SEQ ID NO: 272058 - DNA, 30 bp, Artificial Sequence
  Synthetic oligonucleotide
gtccagcagataaaaacgaacgctgagttc

SEQ ID NO: 272059 - DNA, 30 bp, Artificial Sequence
  Synthetic oligonucleotide
agactcgcggatgatatacagaagtagttc

SEQ ID NO: 272060 - DNA, 30 bp, Artificial Sequence
  Synthetic oligonucleotide
cccaagggtaggattttggctcaaacgttc

SEQ ID NO: 272061 - DNA, 30 bp, Artificial Sequence
  Synthetic oligonucleotide
ctaataggttggctcaagcagtcaacgttc

SEQ ID NO: 272062 - DNA, 30 bp, Artificial Sequence
  Synthetic oligonucleotide
ggaggttatgcgccccaatacgtaacgttc

SEQ ID NO: 272063 - DNA, 30 bp, Artificial Sequence
  Synthetic oligonucleotide
gtgacttccttatagggcccactgacgttc

SEQ ID NO: 272064 - DNA, 30 bp, Artificial Sequence
  Synthetic oligonucleotide
actagaaatccgtattgcgctaagccgttc

SEQ ID NO: 272065 - DNA, 30 bp, Artificial Sequence
  Synthetic oligonucleotide
gagagagcccttccaatctgatgagcgttc

SEQ ID NO: 272066 - DNA, 30 bp, Artificial Sequence
  Synthetic oligonucleotide
gtcacgtgcgactaatcgccataggcgttc

SEQ ID NO: 272067 - DNA, 30 bp, Artificial Sequence
  Synthetic oligonucleotide
ggcggctccgtgaagcgtagcatatcgttc

SEQ ID NO: 272068 - DNA, 30 bp, Artificial Sequence
  Synthetic oligonucleotide
cgaatcccgttaaacccgattatatcgttc

SEQ ID NO: 272069 - DNA, 30 bp, Artificial Sequence
  Synthetic oligonucleotide
atttaacgagaagggaaaggtgtttcgttc

SEQ ID NO: 272070 - DNA, 30 bp, Artificial Sequence
  Synthetic oligonucleotide
caacgcctctcgtctacaattgaaaggttc

SEQ ID NO: 272071 - DNA, 30 bp, Artificial Sequence
  Synthetic oligonucleotide
gaagggcgaccatagcttgtgtaaaggttc

SEQ ID NO: 272072 - DNA, 30 bp, Artificial Sequence
  Synthetic oligonucleotide
cgcggcaccaataggctaggatgaaggttc

SEQ ID NO: 272073 - DNA, 30 bp, Artificial Sequence
  Synthetic oligonucleotide
gggtgacaagaatgagtctcccacaggttc

SEQ ID NO: 272074 - DNA, 30 bp, Artificial Sequence
  Synthetic oligonucleotide
tcttggcttgcgtactaacgaatcaggttc

SEQ ID NO: 272075 - DNA, 30 bp, Artificial Sequence
  Synthetic oligonucleotide
cgctattgggtatctccgattaagaggttc

SEQ ID NO: 272076 - DNA, 30 bp, Artificial Sequence
  Synthetic oligonucleotide
catagcttggatgttttgccaacgaggttc

SEQ ID NO: 272077 - DNA, 30 bp, Artificial Sequence
  Synthetic oligonucleotide
aacgcgtggaaggtgttacaccataggttc

SEQ ID NO: 272078 - DNA, 30 bp, Artificial Sequence
  Synthetic oligonucleotide
agaccaggtggaggaatccgggataggttc

SEQ ID NO: 272079 - DNA, 30 bp, Artificial Sequence
  Synthetic oligonucleotide
tgaggctcgactcagacggaatctaggttc

SEQ ID NO: 272080 - DNA, 30 bp, Artificial Sequence
  Synthetic oligonucleotide
gtaagggatatacgtacgggcggtaggttc

SEQ ID NO: 272081 - DNA, 29 bp, Artificial Sequence
  Synthetic oligonucleotide
ccttccactagtttaatgttcttaggttc

SEQ ID NO: 272082 - DNA, 30 bp, Artificial Sequence
  Synthetic oligonucleotide
tgagaaactcgtgaactgtaaggacggttc

SEQ ID NO: 272083 - DNA, 30 bp, Artificial Sequence
  Synthetic oligonucleotide
aatgtcataacagtcgtctgcttacggttc

SEQ ID NO: 272084 - DNA, 30 bp, Artificial Sequence
  Synthetic oligonucleotide
tatacaaattaccacgtgtgaagccggttc

SEQ ID NO: 272085 - DNA, 30 bp, Artificial Sequence
  Synthetic oligonucleotide
aaccggttacacatagacttgtatcggttc

SEQ ID NO: 272086 - DNA, 30 bp, Artificial Sequence
  Synthetic oligonucleotide
agctaatgacggattgactgctttcggttc

SEQ ID NO: 272087 - DNA, 30 bp, Artificial Sequence
  Synthetic oligonucleotide
ccgtagtggggccaagacccccaagggttc

SEQ ID NO: 272088 - DNA, 30 bp, Artificial Sequence
  Synthetic oligonucleotide
taccaactgttccctgatatcttcgggttc

SEQ ID NO: 272089 - DNA, 30 bp, Artificial Sequence
  Synthetic oligonucleotide
atacggagggcaaatttccgtacggggttc

SEQ ID NO: 272090 - DNA, 30 bp, Artificial Sequence
  Synthetic oligonucleotide
taaacttaactggacgatgatttggggttc

SEQ ID NO: 272091 - DNA, 30 bp, Artificial Sequence
  Synthetic oligonucleotide
gtcctaacactgagtggcccgcatgggttc

SEQ ID NO: 272092 - DNA, 30 bp, Artificial Sequence
  Synthetic oligonucleotide
gacgagacagatatattaacagatgggttc

SEQ ID NO: 272093 - DNA, 30 bp, Artificial Sequence
  Synthetic oligonucleotide
gtatccctcatgtgagataaggctgggttc

SEQ ID NO: 272094 - DNA, 30 bp, Artificial Sequence
  Synthetic oligonucleotide
ccggttgggatttgtacgtcgaggtggttc

SEQ ID NO: 272095 - DNA, 30 bp, Artificial Sequence
  Synthetic oligonucleotide
gcgcgtaaaatataaacgtcatgttggttc

SEQ ID NO: 272096 - DNA, 30 bp, Artificial Sequence
  Synthetic oligonucleotide
tgttttataatggcattaagtaaaatgttc

SEQ ID NO: 272097 - DNA, 30 bp, Artificial Sequence
  Synthetic oligonucleotide
ctgcgtgtatgaaggatatacgcaatgttc

SEQ ID NO: 272098 - DNA, 30 bp, Artificial Sequence
  Synthetic oligonucleotide
tccacagagtcttggacggcccgaatgttc

SEQ ID NO: 272099 - DNA, 30 bp, Artificial Sequence
  Synthetic oligonucleotide
tacatcggatccggccttctaataatgttc

SEQ ID NO: 272100 - DNA, 30 bp, Artificial Sequence
  Synthetic oligonucleotide
tcgtagggtaaggtctactaggtaatgttc

SEQ ID NO: 272101 - DNA, 30 bp, Artificial Sequence
  Synthetic oligonucleotide
aagggtagaattgaaacgccattcatgttc

SEQ ID NO: 272102 - DNA, 30 bp, Artificial Sequence
  Synthetic oligonucleotide
acagtgaatacagtgtactgtattatgttc

SEQ ID NO: 272103 - DNA, 30 bp, Artificial Sequence
  Synthetic oligonucleotide
tagagtataatagggtatgtactactgttc

SEQ ID NO: 272104 - DNA, 30 bp, Artificial Sequence
  Synthetic oligonucleotide
aggataatacttccgcgactgtcgctgttc

SEQ ID NO: 272105 - DNA, 30 bp, Artificial Sequence
  Synthetic oligonucleotide
tcataatttaccgagacctagcgtctgttc

SEQ ID NO: 272106 - DNA, 30 bp, Artificial Sequence
  Synthetic oligonucleotide
ggggtgcacacctacgcagagaaagtgttc

SEQ ID NO: 272107 - DNA, 30 bp, Artificial Sequence
  Synthetic oligonucleotide
gccacgtctgtccggcccgcgaaagtgttc

SEQ ID NO: 272108 - DNA, 30 bp, Artificial Sequence
  Synthetic oligonucleotide
tgctcacacaagcattcgccaacagtgttc

SEQ ID NO: 272109 - DNA, 30 bp, Artificial Sequence
  Synthetic oligonucleotide
ttgagcatccatagaatgtcaactgtgttc

SEQ ID NO: 272110 - DNA, 30 bp, Artificial Sequence
  Synthetic oligonucleotide
ccgtgagcctcacgctaagcggggttgttc

SEQ ID NO: 272111 - DNA, 30 bp, Artificial Sequence
  Synthetic oligonucleotide
ctcgggaggggtaacatcttttttttgttc

SEQ ID NO: 272112 - DNA, 30 bp, Artificial Sequence
  Synthetic oligonucleotide
acagaagtgggttccaagctcctcaatttc

SEQ ID NO: 272113 - DNA, 30 bp, Artificial Sequence
  Synthetic oligonucleotide
tgagaggacttctccgtgcgaagtaatttc

SEQ ID NO: 272114 - DNA, 30 bp, Artificial Sequence
  Synthetic oligonucleotide
ggaagattcacacatatacgttaacatttc

SEQ ID NO: 272115 - DNA, 30 bp, Artificial Sequence
  Synthetic oligonucleotide
atacgcaacctaactgatcttccgcatttc

SEQ ID NO: 272116 - DNA, 30 bp, Artificial Sequence
  Synthetic oligonucleotide
acctcccaggtatcggcaaactcgcatttc

SEQ ID NO: 272117 - DNA, 30 bp, Artificial Sequence
  Synthetic oligonucleotide
gaaatcactctgtggagggcttggcatttc

SEQ ID NO: 272118 - DNA, 30 bp, Artificial Sequence
  Synthetic oligonucleotide
tactaacaagatataatctatactcatttc

SEQ ID NO: 272119 - DNA, 30 bp, Artificial Sequence
  Synthetic oligonucleotide
gcctaagtgaaaatttggtcgcttcatttc

SEQ ID NO: 272120 - DNA, 30 bp, Artificial Sequence
  Synthetic oligonucleotide
gacgtgatacgggccaacggaggcgatttc

SEQ ID NO: 272121 - DNA, 30 bp, Artificial Sequence
  Synthetic oligonucleotide
tttgtattatcggtttgctgagtcgatttc

SEQ ID NO: 272122 - DNA, 30 bp, Artificial Sequence
  Synthetic oligonucleotide
cgcgcgtgggtaaaaaattgagaggatttc

SEQ ID NO: 272123 - DNA, 30 bp, Artificial Sequence
  Synthetic oligonucleotide
acttgactaacagaaataaagacggatttc

SEQ ID NO: 272124 - DNA, 30 bp, Artificial Sequence
  Synthetic oligonucleotide
cggcattccgagccgttttgcgatgatttc

SEQ ID NO: 272125 - DNA, 30 bp, Artificial Sequence
  Synthetic oligonucleotide
gttgaaggtattgaagaagaatactatttc

SEQ ID NO: 272126 - DNA, 30 bp, Artificial Sequence
  Synthetic oligonucleotide
cgtgactattcctctgaagccaagtatttc

SEQ ID NO: 272127 - DNA, 30 bp, Artificial Sequence
  Synthetic oligonucleotide
ccaaaacggtatgcggacattgtgtatttc

SEQ ID NO: 272128 - DNA, 30 bp, Artificial Sequence
  Synthetic oligonucleotide
ctctgatttgactcggtttacgattatttc

SEQ ID NO: 272129 - DNA, 30 bp, Artificial Sequence
  Synthetic oligonucleotide
ttggaacaaagatgaatagtttaaactttc

SEQ ID NO: 272130 - DNA, 30 bp, Artificial Sequence
  Synthetic oligonucleotide
tgctagaatatttcattcacagcaactttc

SEQ ID NO: 272131 - DNA, 30 bp, Artificial Sequence
  Synthetic oligonucleotide
ctttgcaaactaatttaaaccctaactttc

SEQ ID NO: 272132 - DNA, 30 bp, Artificial Sequence
  Synthetic oligonucleotide
tcgacgggaggtggcgggcttaccactttc

SEQ ID NO: 272133 - DNA, 30 bp, Artificial Sequence
  Synthetic oligonucleotide
aggagaggatataaagcacttacgactttc

SEQ ID NO: 272134 - DNA, 30 bp, Artificial Sequence
  Synthetic oligonucleotide
accgtttgggaaaggtcacgatttactttc

SEQ ID NO: 272135 - DNA, 30 bp, Artificial Sequence
  Synthetic oligonucleotide
tggatgtaagtcctgcattcataacctttc

SEQ ID NO: 272136 - DNA, 30 bp, Artificial Sequence
  Synthetic oligonucleotide
tcaaaccctcaatagacagtgctacctttc

SEQ ID NO: 272137 - DNA, 30 bp, Artificial Sequence
  Synthetic oligonucleotide
taacagcacgtgaatcattcgttacctttc

SEQ ID NO: 272138 - DNA, 30 bp, Artificial Sequence
  Synthetic oligonucleotide
ttgttacaacaccgtagatcgaaccctttc

SEQ ID NO: 272139 - DNA, 30 bp, Artificial Sequence
  Synthetic oligonucleotide
atagcttcggaccacgggagtcaccctttc

SEQ ID NO: 272140 - DNA, 30 bp, Artificial Sequence
  Synthetic oligonucleotide
accttcgcgaaatagtatgcaacccctttc

SEQ ID NO: 272141 - DNA, 30 bp, Artificial Sequence
  Synthetic oligonucleotide
gctcaaaccgcaaaagatatacaagctttc

SEQ ID NO: 272142 - DNA, 30 bp, Artificial Sequence
  Synthetic oligonucleotide
ttagggactactagttggatagcagctttc

SEQ ID NO: 272143 - DNA, 30 bp, Artificial Sequence
  Synthetic oligonucleotide
tctcatacctccaacgttcctagggctttc

SEQ ID NO: 272144 - DNA, 30 bp, Artificial Sequence
  Synthetic oligonucleotide
ataggcatctacgtgctgtactcttctttc

SEQ ID NO: 272145 - DNA, 30 bp, Artificial Sequence
  Synthetic oligonucleotide
tcggattgaagccattgacaactaagtttc

SEQ ID NO: 272146 - DNA, 30 bp, Artificial Sequence
  Synthetic oligonucleotide
agtaggttattctccaaccaagggagtttc

SEQ ID NO: 272147 - DNA, 30 bp, Artificial Sequence
  Synthetic oligonucleotide
cacttgaaaacgcacaccctgtggagtttc

SEQ ID NO: 272148 - DNA, 30 bp, Artificial Sequence
  Synthetic oligonucleotide
gggaagcgtcctaggacaagcgtgagtttc

SEQ ID NO: 272149 - DNA, 30 bp, Artificial Sequence
  Synthetic oligonucleotide
ctgggaatatcggtagtgggcttgagtttc

SEQ ID NO: 272150 - DNA, 30 bp, Artificial Sequence
  Synthetic oligonucleotide
ctgcacatcctggagcctcgcggtagtttc

SEQ ID NO: 272151 - DNA, 30 bp, Artificial Sequence
  Synthetic oligonucleotide
atgaacgctactagcaagttgcaacgtttc

SEQ ID NO: 272152 - DNA, 30 bp, Artificial Sequence
  Synthetic oligonucleotide
ctaacggattaagctatatctgaacgtttc

SEQ ID NO: 272153 - DNA, 30 bp, Artificial Sequence
  Synthetic oligonucleotide
ccgaagtatatagcacgtgagtgccgtttc

SEQ ID NO: 272154 - DNA, 31 bp, Artificial Sequence
  Synthetic oligonucleotide
cagggataagatctggatccatcggcgtttc

SEQ ID NO: 272155 - DNA, 30 bp, Artificial Sequence
  Synthetic oligonucleotide
aggcgacgaagttgattacactagggtttc

SEQ ID NO: 272156 - DNA, 30 bp, Artificial Sequence
  Synthetic oligonucleotide
ggacatgtacggacgggaactacgggtttc

SEQ ID NO: 272157 - DNA, 30 bp, Artificial Sequence
  Synthetic oligonucleotide
agagatttgcgttcaatcttgattggtttc

SEQ ID NO: 272158 - DNA, 30 bp, Artificial Sequence
  Synthetic oligonucleotide
acgaataagaagggcttcaagttatgtttc

SEQ ID NO: 272159 - DNA, 30 bp, Artificial Sequence
  Synthetic oligonucleotide
ttcaaagaaacgatgagagtcaactgtttc

SEQ ID NO: 272160 - DNA, 30 bp, Artificial Sequence
  Synthetic oligonucleotide
taatacccgccctagctaataacgtgtttc

SEQ ID NO: 272161 - DNA, 30 bp, Artificial Sequence
  Synthetic oligonucleotide
acagagaatcgactcacgaacgaaattttc

SEQ ID NO: 272162 - DNA, 30 bp, Artificial Sequence
  Synthetic oligonucleotide
tggatgaagacggcggacaggacaattttc

SEQ ID NO: 272163 - DNA, 30 bp, Artificial Sequence
  Synthetic oligonucleotide
agggagatcgtatgttgtccacctattttc

SEQ ID NO: 272164 - DNA, 30 bp, Artificial Sequence
  Synthetic oligonucleotide
tcagttgcgcacccgtagtccgagcttttc

SEQ ID NO: 272165 - DNA, 30 bp, Artificial Sequence
  Synthetic oligonucleotide
agatcattcgaaaagggccccacgcttttc

SEQ ID NO: 272166 - DNA, 30 bp, Artificial Sequence
  Synthetic oligonucleotide
acagtaaatggctacagtgatatgcttttc

SEQ ID NO: 272167 - DNA, 30 bp, Artificial Sequence
  Synthetic oligonucleotide
cacggccagattatcgagcgtaatcttttc

SEQ ID NO: 272168 - DNA, 30 bp, Artificial Sequence
  Synthetic oligonucleotide
ctcttggcccctaggaggaaaagtcttttc

SEQ ID NO: 272169 - DNA, 30 bp, Artificial Sequence
  Synthetic oligonucleotide
actccgcgaatagttgcgttcgaagttttc

SEQ ID NO: 272170 - DNA, 30 bp, Artificial Sequence
  Synthetic oligonucleotide
gtaccacaccacatgttggtgtaggttttc

SEQ ID NO: 272171 - DNA, 30 bp, Artificial Sequence
  Synthetic oligonucleotide
gggtatgccaatttgccgagatcatttttc

SEQ ID NO: 272172 - DNA, 30 bp, Artificial Sequence
  Synthetic oligonucleotide
ccacaaggaggtaaccctagatactttttc

SEQ ID NO: 272173 - DNA, 30 bp, Artificial Sequence
  Synthetic oligonucleotide
aggtagcgcgagggtgtctcacattttttc

SEQ ID NO: 272174 - DNA, 30 bp, Artificial Sequence
  Synthetic oligonucleotide
agcttggcgtcgttataatggcaaaaaaag

SEQ ID NO: 272175 - DNA, 30 bp, Artificial Sequence
  Synthetic oligonucleotide
taatgtggggtttctaagggttgaaaaaag

SEQ ID NO: 272176 - DNA, 30 bp, Artificial Sequence
  Synthetic oligonucleotide
tgtggccatacccttctactgctaaaaaag

SEQ ID NO: 272177 - DNA, 30 bp, Artificial Sequence
  Synthetic oligonucleotide
ggcgggctcagtccttgtagacgcaaaaag

SEQ ID NO: 272178 - DNA, 30 bp, Artificial Sequence
  Synthetic oligonucleotide
aatcagtagtccaggcctcttgcgaaaaag

SEQ ID NO: 272179 - DNA, 30 bp, Artificial Sequence
  Synthetic oligonucleotide
cctactgggcaacgacttagtactaaaaag

SEQ ID NO: 272180 - DNA, 30 bp, Artificial Sequence
  Synthetic oligonucleotide
caatcctctgattgtaaaccgtgtaaaaag

SEQ ID NO: 272181 - DNA, 30 bp, Artificial Sequence
  Synthetic oligonucleotide
gcgtttaaataaatcgctgaggttaaaaag

SEQ ID NO: 272182 - DNA, 30 bp, Artificial Sequence
  Synthetic oligonucleotide
gggatgggctgcgacgttccagcacaaaag

SEQ ID NO: 272183 - DNA, 30 bp, Artificial Sequence
  Synthetic oligonucleotide
caccgaaattggggacggagtagtcaaaag

SEQ ID NO: 272184 - DNA, 30 bp, Artificial Sequence
  Synthetic oligonucleotide
ttgggtcgcccatcggtgggaaacgaaaag

SEQ ID NO: 272185 - DNA, 30 bp, Artificial Sequence
  Synthetic oligonucleotide
ttaatagtatttaagcatgtaggcgaaaag

SEQ ID NO: 272186 - DNA, 30 bp, Artificial Sequence
  Synthetic oligonucleotide
gaaggtaagggtcactctggcacggaaaag

SEQ ID NO: 272187 - DNA, 30 bp, Artificial Sequence
  Synthetic oligonucleotide
gcattagttcggtagcgtaaaggggaaaag

SEQ ID NO: 272188 - DNA, 30 bp, Artificial Sequence
  Synthetic oligonucleotide
gagtgccacacgaagaacgccggggaaaag

SEQ ID NO: 272189 - DNA, 30 bp, Artificial Sequence
  Synthetic oligonucleotide
agagccccaccatgcaattcgtgggaaaag

SEQ ID NO: 272190 - DNA, 30 bp, Artificial Sequence
  Synthetic oligonucleotide
ataggttacggattttataggcgtgaaaag

SEQ ID NO: 272191 - DNA, 30 bp, Artificial Sequence
  Synthetic oligonucleotide
ggaggtgagttcgttttatcgccataaaag

SEQ ID NO: 272192 - DNA, 30 bp, Artificial Sequence
  Synthetic oligonucleotide
ggcgtaagcgcctccttagctagataaaag

SEQ ID NO: 272193 - DNA, 30 bp, Artificial Sequence
  Synthetic oligonucleotide
cttattcacgctaacatcaaacgataaaag

SEQ ID NO: 272194 - DNA, 30 bp, Artificial Sequence
  Synthetic oligonucleotide
gatcactggagcctactgtgctcgtaaaag

SEQ ID NO: 272195 - DNA, 30 bp, Artificial Sequence
  Synthetic oligonucleotide
ttgggggactcttagggctgagggtaaaag

SEQ ID NO: 272196 - DNA, 30 bp, Artificial Sequence
  Synthetic oligonucleotide
actgaaccttacggagaataaaattaaaag

SEQ ID NO: 272197 - DNA, 30 bp, Artificial Sequence
  Synthetic oligonucleotide
tcaagcggtcgggacctcgtggattaaaag

SEQ ID NO: 272198 - DNA, 30 bp, Artificial Sequence
  Synthetic oligonucleotide
aattgaaggacagagcagctgggttaaaag

SEQ ID NO: 272199 - DNA, 30 bp, Artificial Sequence
  Synthetic oligonucleotide
ggaagtatttgcaggggtgatgcaacaaag

SEQ ID NO: 272200 - DNA, 30 bp, Artificial Sequence
  Synthetic oligonucleotide
taagctccaacacccatgtctggcacaaag

SEQ ID NO: 272201 - DNA, 30 bp, Artificial Sequence
  Synthetic oligonucleotide
tggttcgaatccatgtcaataaatacaaag

SEQ ID NO: 272202 - DNA, 30 bp, Artificial Sequence
  Synthetic oligonucleotide
ggactggctgaaggacgtccgaatacaaag

SEQ ID NO: 272203 - DNA, 30 bp, Artificial Sequence
  Synthetic oligonucleotide
accgagggtatgatgtgagaatacccaaag

SEQ ID NO: 272204 - DNA, 30 bp, Artificial Sequence
  Synthetic oligonucleotide
cgcaaacctaggtaataagtgacgccaaag

SEQ ID NO: 272205 - DNA, 30 bp, Artificial Sequence
  Synthetic oligonucleotide
gcagcaaaacgtcttcacgccaggccaaag

SEQ ID NO: 272206 - DNA, 30 bp, Artificial Sequence
  Synthetic oligonucleotide
tgctaaagccgctgccgagcagtgccaaag

SEQ ID NO: 272207 - DNA, 30 bp, Artificial Sequence
  Synthetic oligonucleotide
tctcatccgcgaggggtactatgtccaaag

SEQ ID NO: 272208 - DNA, 30 bp, Artificial Sequence
  Synthetic oligonucleotide
cgcttccgggtccggaaggagccagcaaag

SEQ ID NO: 272209 - DNA, 30 bp, Artificial Sequence
  Synthetic oligonucleotide
ctctagtcctcggggtctccttcagcaaag

SEQ ID NO: 272210 - DNA, 30 bp, Artificial Sequence
  Synthetic oligonucleotide
gtgtggttagcatggtgtcctggagcaaag

SEQ ID NO: 272211 - DNA, 30 bp, Artificial Sequence
  Synthetic oligonucleotide
atttgacggcctaataacggttgagcaaag

SEQ ID NO: 272212 - DNA, 30 bp, Artificial Sequence
  Synthetic oligonucleotide
aggggcaaggggtatttggggtacgcaaag

SEQ ID NO: 272213 - DNA, 30 bp, Artificial Sequence
  Synthetic oligonucleotide
aagcgtattgtccatatagttcgcgcaaag

SEQ ID NO: 272214 - DNA, 30 bp, Artificial Sequence
  Synthetic oligonucleotide
ttttaccacagagaaaaacgtacggcaaag

SEQ ID NO: 272215 - DNA, 30 bp, Artificial Sequence
  Synthetic oligonucleotide
gttcgaataatgactcgcattactgcaaag

SEQ ID NO: 272216 - DNA, 30 bp, Artificial Sequence
  Synthetic oligonucleotide
aatacacgatgtgcatgatagaaatcaaag

SEQ ID NO: 272217 - DNA, 30 bp, Artificial Sequence
  Synthetic oligonucleotide
tcctgaagagagagactttgcttatcaaag

SEQ ID NO: 272218 - DNA, 30 bp, Artificial Sequence
  Synthetic oligonucleotide
taacactggttcattttagcacggtcaaag

SEQ ID NO: 272219 - DNA, 30 bp, Artificial Sequence
  Synthetic oligonucleotide
aaacaattaagtaagaagcggtaaagaaag

SEQ ID NO: 272220 - DNA, 30 bp, Artificial Sequence
  Synthetic oligonucleotide
ggtgtccaaaaggaggcattagcaagaaag

SEQ ID NO: 272221 - DNA, 30 bp, Artificial Sequence
  Synthetic oligonucleotide
gattctacgatattacttgtagccagaaag

SEQ ID NO: 272222 - DNA, 30 bp, Artificial Sequence
  Synthetic oligonucleotide
gtgacatattactaggctcccgccagaaag

SEQ ID NO: 272223 - DNA, 30 bp, Artificial Sequence
  Synthetic oligonucleotide
ctttagttatcactggaactggtcagaaag

SEQ ID NO: 272224 - DNA, 31 bp, Artificial Sequence
  Synthetic oligonucleotide
gttgttcttatgcggtaaaagtttcagaaag

SEQ ID NO: 272225 - DNA, 30 bp, Artificial Sequence
  Synthetic oligonucleotide
gacacaatctgcaccttgatctggagaaag

SEQ ID NO: 272226 - DNA, 30 bp, Artificial Sequence
  Synthetic oligonucleotide
cacggagtatcggttggcttggtgagaaag

SEQ ID NO: 272227 - DNA, 30 bp, Artificial Sequence
  Synthetic oligonucleotide
tcaagttaacatgcgggatgaaatagaaag

SEQ ID NO: 272228 - DNA, 30 bp, Artificial Sequence
  Synthetic oligonucleotide
ttaagccagcgttactcagccaatagaaag

SEQ ID NO: 272229 - DNA, 30 bp, Artificial Sequence
  Synthetic oligonucleotide
atgatggtgtgtctttaaaagcatagaaag

SEQ ID NO: 272230 - DNA, 30 bp, Artificial Sequence
  Synthetic oligonucleotide
ttaccctgtggaagtattgtgtgtagaaag

SEQ ID NO: 272231 - DNA, 30 bp, Artificial Sequence
  Synthetic oligonucleotide
acctaaggggtgtaatatatacaacgaaag

SEQ ID NO: 272232 - DNA, 30 bp, Artificial Sequence
  Synthetic oligonucleotide
cgtgctacaatgacgagggcttaacgaaag

SEQ ID NO: 272233 - DNA, 30 bp, Artificial Sequence
  Synthetic oligonucleotide
atggtacatttgccccctcgggagcgaaag

SEQ ID NO: 272234 - DNA, 30 bp, Artificial Sequence
  Synthetic oligonucleotide
aacggtttttaacctacatattctcgaaag

SEQ ID NO: 272235 - DNA, 30 bp, Artificial Sequence
  Synthetic oligonucleotide
accttgttatcttggtgaccaggtcgaaag

SEQ ID NO: 272236 - DNA, 30 bp, Artificial Sequence
  Synthetic oligonucleotide
cgctaagacaaatatttactttttcgaaag

SEQ ID NO: 272237 - DNA, 30 bp, Artificial Sequence
  Synthetic oligonucleotide
tctattctcaggatgatcgacgaaggaaag

SEQ ID NO: 272238 - DNA, 30 bp, Artificial Sequence
  Synthetic oligonucleotide
atccgatgtcttttggtgaggggaggaaag

SEQ ID NO: 272239 - DNA, 30 bp, Artificial Sequence
  Synthetic oligonucleotide
tttctcgggcgatggggtacggacggaaag

SEQ ID NO: 272240 - DNA, 30 bp, Artificial Sequence
  Synthetic oligonucleotide
ctccattagtgcaaaactgtggccggaaag

SEQ ID NO: 272241 - DNA, 30 bp, Artificial Sequence
  Synthetic oligonucleotide
ccaaagaccctcttccgctaaaagggaaag

SEQ ID NO: 272242 - DNA, 30 bp, Artificial Sequence
  Synthetic oligonucleotide
gggatcggctgtataagcaagcggggaaag

SEQ ID NO: 272243 - DNA, 30 bp, Artificial Sequence
  Synthetic oligonucleotide
aaccaccagatgcataaatgattgggaaag

SEQ ID NO: 272244 - DNA, 30 bp, Artificial Sequence
  Synthetic oligonucleotide
gcaacggtgactccccataatccatgaaag

SEQ ID NO: 272245 - DNA, 30 bp, Artificial Sequence
  Synthetic oligonucleotide
gcaagtcgcctaggctataacgagtgaaag

SEQ ID NO: 272246 - DNA, 30 bp, Artificial Sequence
  Synthetic oligonucleotide
atattgtgaaatgtcaggatcgagtgaaag

SEQ ID NO: 272247 - DNA, 30 bp, Artificial Sequence
  Synthetic oligonucleotide
atgcgtccgcaagtccctctatggtgaaag

SEQ ID NO: 272248 - DNA, 30 bp, Artificial Sequence
  Synthetic oligonucleotide
ctctaggcggctaaaaggcttatgtgaaag

SEQ ID NO: 272249 - DNA, 30 bp, Artificial Sequence
  Synthetic oligonucleotide
atgacaatcacaaacctctataaaataaag

SEQ ID NO: 272250 - DNA, 30 bp, Artificial Sequence
  Synthetic oligonucleotide
acaatacagtctacgtattagttgataaag

SEQ ID NO: 272251 - DNA, 30 bp, Artificial Sequence
  Synthetic oligonucleotide
gagaagacgttccaggcatttcagctaaag

SEQ ID NO: 272252 - DNA, 30 bp, Artificial Sequence
  Synthetic oligonucleotide
cggataataagcatgcttatttcgctaaag

SEQ ID NO: 272253 - DNA, 30 bp, Artificial Sequence
  Synthetic oligonucleotide
tgactggtgcacgggatggtttggctaaag

SEQ ID NO: 272254 - DNA, 30 bp, Artificial Sequence
  Synthetic oligonucleotide
caatattgttcatcttgtgatgtgctaaag

SEQ ID NO: 272255 - DNA, 30 bp, Artificial Sequence
  Synthetic oligonucleotide
ccgcacgaacttaggcggtaacgtctaaag

SEQ ID NO: 272256 - DNA, 30 bp, Artificial Sequence
  Synthetic oligonucleotide
gttggagtttaatacctttagcgtctaaag

SEQ ID NO: 272257 - DNA, 30 bp, Artificial Sequence
  Synthetic oligonucleotide
gtaagacccgatccacagaggggtctaaag

SEQ ID NO: 272258 - DNA, 30 bp, Artificial Sequence
  Synthetic oligonucleotide
cccatcataactataatcgggtaagtaaag

SEQ ID NO: 272259 - DNA, 30 bp, Artificial Sequence
  Synthetic oligonucleotide
tattccccgggactcaagaactgagtaaag

SEQ ID NO: 272260 - DNA, 30 bp, Artificial Sequence
  Synthetic oligonucleotide
ctcagggctggctttagggacctagtaaag

SEQ ID NO: 272261 - DNA, 30 bp, Artificial Sequence
  Synthetic oligonucleotide
tcaaatctgacgttcctgatacacgtaaag

SEQ ID NO: 272262 - DNA, 30 bp, Artificial Sequence
  Synthetic oligonucleotide
ggagaaatagccggactatccggcgtaaag

SEQ ID NO: 272263 - DNA, 30 bp, Artificial Sequence
  Synthetic oligonucleotide
atgaacggcgaactgtgtgggccggtaaag

SEQ ID NO: 272264 - DNA, 30 bp, Artificial Sequence
  Synthetic oligonucleotide
ttgggcccgggtgtggttgtaactgtaaag

SEQ ID NO: 272265 - DNA, 30 bp, Artificial Sequence
  Synthetic oligonucleotide
gaggctctcgcatgtttcgggagtgtaaag

SEQ ID NO: 272266 - DNA, 30 bp, Artificial Sequence
  Synthetic oligonucleotide
atggaccattacattgaatatattgtaaag

SEQ ID NO: 272267 - DNA, 30 bp, Artificial Sequence
  Synthetic oligonucleotide
ggtgacgtcaggggatgtatgtttgtaaag

SEQ ID NO: 272268 - DNA, 30 bp, Artificial Sequence
  Synthetic oligonucleotide
atgggaaatagtatgcttagcacattaaag

SEQ ID NO: 272269 - DNA, 30 bp, Artificial Sequence
  Synthetic oligonucleotide
tgctcctacttatttgctggaagattaaag

SEQ ID NO: 272270 - DNA, 30 bp, Artificial Sequence
  Synthetic oligonucleotide
gcactaggaaataatggggccatattaaag

SEQ ID NO: 272271 - DNA, 30 bp, Artificial Sequence
  Synthetic oligonucleotide
aaatacggttgtggctaaattatattaaag

SEQ ID NO: 272272 - DNA, 30 bp, Artificial Sequence
  Synthetic oligonucleotide
agggtgagtgattgtcggtctgtattaaag

SEQ ID NO: 272273 - DNA, 30 bp, Artificial Sequence
  Synthetic oligonucleotide
aacgtgaagctgaatcatgctttattaaag

SEQ ID NO: 272274 - DNA, 30 bp, Artificial Sequence
  Synthetic oligonucleotide
cgttccgatcgcggtacaagacgcttaaag

SEQ ID NO: 272275 - DNA, 30 bp, Artificial Sequence
  Synthetic oligonucleotide
gtcagtaaccgaaaagcagtttagttaaag

SEQ ID NO: 272276 - DNA, 30 bp, Artificial Sequence
  Synthetic oligonucleotide
acgggcttttggaactcgaagtcgttaaag

SEQ ID NO: 272277 - DNA, 30 bp, Artificial Sequence
  Synthetic oligonucleotide
ttattggtccgggtaggcgggtcgttaaag

SEQ ID NO: 272278 - DNA, 30 bp, Artificial Sequence
  Synthetic oligonucleotide
tgttccgacataccactcaaagggttaaag

SEQ ID NO: 272279 - DNA, 30 bp, Artificial Sequence
  Synthetic oligonucleotide
attgcaaatgagcataactaaatgttaaag

SEQ ID NO: 272280 - DNA, 30 bp, Artificial Sequence
  Synthetic oligonucleotide
tcgagcctacgagctataggggatttaaag

SEQ ID NO: 272281 - DNA, 30 bp, Artificial Sequence
  Synthetic oligonucleotide
ggtgaagggccatcccaaagtagtttaaag

SEQ ID NO: 272282 - DNA, 31 bp, Artificial Sequence
  Synthetic oligonucleotide
caaacctaaggtttctgttgatacgaacaag

SEQ ID NO: 272283 - DNA, 30 bp, Artificial Sequence
  Synthetic oligonucleotide
ctctccgaatagagtgattccgaacacaag

SEQ ID NO: 272284 - DNA, 30 bp, Artificial Sequence
  Synthetic oligonucleotide
tgggtcgtgcaatgctctgcatgacacaag

SEQ ID NO: 272285 - DNA, 30 bp, Artificial Sequence
  Synthetic oligonucleotide
gttctagcttgaataggaggtccccacaag

SEQ ID NO: 272286 - DNA, 30 bp, Artificial Sequence
  Synthetic oligonucleotide
cttccgtggtctttataaccagtccacaag

SEQ ID NO: 272287 - DNA, 30 bp, Artificial Sequence
  Synthetic oligonucleotide
agggggcacgcatatagccctacgcacaag

SEQ ID NO: 272288 - DNA, 30 bp, Artificial Sequence
  Synthetic oligonucleotide
gcccgcggttgtgtccccaacctgcacaag

SEQ ID NO: 272289 - DNA, 30 bp, Artificial Sequence
  Synthetic oligonucleotide
aaagtagggtattagataacgtaggacaag

SEQ ID NO: 272290 - DNA, 30 bp, Artificial Sequence
  Synthetic oligonucleotide
tgtcggatgtctcaatactactttgacaag

SEQ ID NO: 272291 - DNA, 30 bp, Artificial Sequence
  Synthetic oligonucleotide
ggactttggctccaagcgacataatacaag

SEQ ID NO: 272292 - DNA, 30 bp, Artificial Sequence
  Synthetic oligonucleotide
gcggagcctggataaatctgaatatacaag

SEQ ID NO: 272293 - DNA, 30 bp, Artificial Sequence
  Synthetic oligonucleotide
ggtaataaataagactatagtcgttacaag

SEQ ID NO: 272294 - DNA, 30 bp, Artificial Sequence
  Synthetic oligonucleotide
ctaaggggggcctgtgaatctacaaccaag

SEQ ID NO: 272295 - DNA, 30 bp, Artificial Sequence
  Synthetic oligonucleotide
ctccattggccgttggcttcaataaccaag

SEQ ID NO: 272296 - DNA, 29 bp, Artificial Sequence
  Synthetic oligonucleotide
ggtaagattttctgccggcaggcaccaag

SEQ ID NO: 272297 - DNA, 30 bp, Artificial Sequence
  Synthetic oligonucleotide
ggctgcgcaaaggaatagtacgcacccaag

SEQ ID NO: 272298 - DNA, 30 bp, Artificial Sequence
  Synthetic oligonucleotide
tgtttaccataacggcacgatgaccccaag

SEQ ID NO: 272299 - DNA, 30 bp, Artificial Sequence
  Synthetic oligonucleotide
ctatgtactcgcacaatcgagacgcccaag

SEQ ID NO: 272300 - DNA, 30 bp, Artificial Sequence
  Synthetic oligonucleotide
cggggcatattcacgccctgcgtgcccaag

SEQ ID NO: 272301 - DNA, 30 bp, Artificial Sequence
  Synthetic oligonucleotide
gggcctacgccctgtgacgatgctcccaag

SEQ ID NO: 272302 - DNA, 30 bp, Artificial Sequence
  Synthetic oligonucleotide
cgaaatgacctgaggctgcgctacgccaag

SEQ ID NO: 272303 - DNA, 30 bp, Artificial Sequence
  Synthetic oligonucleotide
catagctacgcgaactccggggccgccaag

SEQ ID NO: 272304 - DNA, 30 bp, Artificial Sequence
  Synthetic oligonucleotide
atgtaactgtctggtgcacatgtggccaag

SEQ ID NO: 272305 - DNA, 30 bp, Artificial Sequence
  Synthetic oligonucleotide
gatccgtggggtcgcaaagttgtggccaag

SEQ ID NO: 272306 - DNA, 30 bp, Artificial Sequence
  Synthetic oligonucleotide
catgtagactgctgggcacatagatccaag

SEQ ID NO: 272307 - DNA, 30 bp, Artificial Sequence
  Synthetic oligonucleotide
cgtgggctagcagagtgccgcctctccaag

SEQ ID NO: 272308 - DNA, 30 bp, Artificial Sequence
  Synthetic oligonucleotide
acttgtaagggtggcggctgcgtaagcaag

SEQ ID NO: 272309 - DNA, 30 bp, Artificial Sequence
  Synthetic oligonucleotide
gcccgagacgtcttgaacggtagcagcaag

SEQ ID NO: 272310 - DNA, 30 bp, Artificial Sequence
  Synthetic oligonucleotide
tagttattacggagtagcctttagagcaag

SEQ ID NO: 272311 - DNA, 30 bp, Artificial Sequence
  Synthetic oligonucleotide
ccacaataagctaatgcctgcaatagcaag

SEQ ID NO: 272312 - DNA, 30 bp, Artificial Sequence
  Synthetic oligonucleotide
gttctttagatcaccgggcaaggtagcaag

SEQ ID NO: 272313 - DNA, 30 bp, Artificial Sequence
  Synthetic oligonucleotide
acccaacagtctagggggcgcattagcaag

SEQ ID NO: 272314 - DNA, 30 bp, Artificial Sequence
  Synthetic oligonucleotide
tgggtcagattacttccgcgtcaccgcaag

SEQ ID NO: 272315 - DNA, 30 bp, Artificial Sequence
  Synthetic oligonucleotide
tgacgagtatggacttcatggccccgcaag

SEQ ID NO: 272316 - DNA, 30 bp, Artificial Sequence
  Synthetic oligonucleotide
cggcgggggatggcttagcttgtccgcaag

SEQ ID NO: 272317 - DNA, 30 bp, Artificial Sequence
  Synthetic oligonucleotide
gttgaacctttactcattagaacaggcaag

SEQ ID NO: 272318 - DNA, 30 bp, Artificial Sequence
  Synthetic oligonucleotide
attgcgaaacctattacctgggcaggcaag

SEQ ID NO: 272319 - DNA, 30 bp, Artificial Sequence
  Synthetic oligonucleotide
cctctgctctagaggcccacttcaggcaag

SEQ ID NO: 272320 - DNA, 30 bp, Artificial Sequence
  Synthetic oligonucleotide
ccaaggttttagggctgaactcgcggcaag

SEQ ID NO: 272321 - DNA, 30 bp, Artificial Sequence
  Synthetic oligonucleotide
accctgcttggtacgaacatacggggcaag

SEQ ID NO: 272322 - DNA, 30 bp, Artificial Sequence
  Synthetic oligonucleotide
gcgtcgagtcatttcaggatcaaatgcaag

SEQ ID NO: 272323 - DNA, 30 bp, Artificial Sequence
  Synthetic oligonucleotide
tgcagtcgagccacatggcttgaatgcaag

SEQ ID NO: 272324 - DNA, 30 bp, Artificial Sequence
  Synthetic oligonucleotide
tgtatactagaaggcggcaaggtatgcaag

SEQ ID NO: 272325 - DNA, 30 bp, Artificial Sequence
  Synthetic oligonucleotide
agactaatctcgcgtacaatacactgcaag

SEQ ID NO: 272326 - DNA, 30 bp, Artificial Sequence
  Synthetic oligonucleotide
ttacagtgggcgctggaacccacgtgcaag

SEQ ID NO: 272327 - DNA, 30 bp, Artificial Sequence
  Synthetic oligonucleotide
gagatgctcaactttaacgtcatgtgcaag

SEQ ID NO: 272328 - DNA, 30 bp, Artificial Sequence
  Synthetic oligonucleotide
tccgcatagagcaggctatttggttgcaag

SEQ ID NO: 272329 - DNA, 30 bp, Artificial Sequence
  Synthetic oligonucleotide
tgctccgccttatttcattgatccatcaag

SEQ ID NO: 272330 - DNA, 31 bp, Artificial Sequence
  Synthetic oligonucleotide
taggctagggttttggcggagtgcgatcaag

SEQ ID NO: 272331 - DNA, 30 bp, Artificial Sequence
  Synthetic oligonucleotide
tgcacggacttacagtgaccgcggatcaag

SEQ ID NO: 272332 - DNA, 30 bp, Artificial Sequence
  Synthetic oligonucleotide
ctgtgtcggactaagagactgtatatcaag

SEQ ID NO: 272333 - DNA, 30 bp, Artificial Sequence
  Synthetic oligonucleotide
atcgggcttatatgctagatgactatcaag

SEQ ID NO: 272334 - DNA, 30 bp, Artificial Sequence
  Synthetic oligonucleotide
ggtgaacggctagccggcaggggtatcaag

SEQ ID NO: 272335 - DNA, 31 bp, Artificial Sequence
  Synthetic oligonucleotide
aaagaggttgtgctagtctgtttaactcaag

SEQ ID NO: 272336 - DNA, 30 bp, Artificial Sequence
  Synthetic oligonucleotide
agttagcttcaaactgaatcatcactcaag

SEQ ID NO: 272337 - DNA, 30 bp, Artificial Sequence
  Synthetic oligonucleotide
tcttcgcaggccgtggctatcctactcaag

SEQ ID NO: 272338 - DNA, 30 bp, Artificial Sequence
  Synthetic oligonucleotide
aaaagatttatcccctcgtgaagcctcaag

SEQ ID NO: 272339 - DNA, 30 bp, Artificial Sequence
  Synthetic oligonucleotide
gtctggttctaacagtgcgaccgcctcaag

SEQ ID NO: 272340 - DNA, 30 bp, Artificial Sequence
  Synthetic oligonucleotide
gtcctttgtcaagtacatatcatgctcaag

SEQ ID NO: 272341 - DNA, 30 bp, Artificial Sequence
  Synthetic oligonucleotide
gaaggatggtcagtggcagttgtgctcaag

SEQ ID NO: 272342 - DNA, 30 bp, Artificial Sequence
  Synthetic oligonucleotide
ttggcatataaagtcttccttgaagtcaag

SEQ ID NO: 272343 - DNA, 30 bp, Artificial Sequence
  Synthetic oligonucleotide
tgtatctttgctgtgttctggtccgtcaag

SEQ ID NO: 272344 - DNA, 30 bp, Artificial Sequence
  Synthetic oligonucleotide
ggttcagtggtccctaaggcaagcgtcaag

SEQ ID NO: 272345 - DNA, 30 bp, Artificial Sequence
  Synthetic oligonucleotide
taaattcaacatcattatacgtgcgtcaag

SEQ ID NO: 272346 - DNA, 30 bp, Artificial Sequence
  Synthetic oligonucleotide
tctctaacgagccaccattgaaaggtcaag

SEQ ID NO: 272347 - DNA, 30 bp, Artificial Sequence
  Synthetic oligonucleotide
tttaaaaagaacggcgggtagcttgtcaag

SEQ ID NO: 272348 - DNA, 30 bp, Artificial Sequence
  Synthetic oligonucleotide
gccccgcaatgatagcgataagctttcaag

SEQ ID NO: 272349 - DNA, 30 bp, Artificial Sequence
  Synthetic oligonucleotide
atacggagtcgggttgcataatgtttcaag

SEQ ID NO: 272350 - DNA, 30 bp, Artificial Sequence
  Synthetic oligonucleotide
gaaaagaaatgtcgcccttaaaaaaagaag

SEQ ID NO: 272351 - DNA, 30 bp, Artificial Sequence
  Synthetic oligonucleotide
ataattctttccgtgggggggcgaaagaag

SEQ ID NO: 272352 - DNA, 30 bp, Artificial Sequence
  Synthetic oligonucleotide
catgggaattctttccggggccacaagaag

SEQ ID NO: 272353 - DNA, 30 bp, Artificial Sequence
  Synthetic oligonucleotide
ccagcgctgtgaactgtgccgcataagaag

SEQ ID NO: 272354 - DNA, 30 bp, Artificial Sequence
  Synthetic oligonucleotide
taagtgtttaatcaggaatcagataagaag

SEQ ID NO: 272355 - DNA, 30 bp, Artificial Sequence
  Synthetic oligonucleotide
caatctggtatacccaaccaagcacagaag

SEQ ID NO: 272356 - DNA, 30 bp, Artificial Sequence
  Synthetic oligonucleotide
tgtttaaattcgaatagtccgggacagaag

SEQ ID NO: 272357 - DNA, 30 bp, Artificial Sequence
  Synthetic oligonucleotide
gacagtgtctgcctgtaaaccctacagaag

SEQ ID NO: 272358 - DNA, 30 bp, Artificial Sequence
  Synthetic oligonucleotide
attcccaaaggggccgcgtggtgtcagaag

SEQ ID NO: 272359 - DNA, 30 bp, Artificial Sequence
  Synthetic oligonucleotide
gcggttcagcccggagctggagaagagaag

SEQ ID NO: 272360 - DNA, 30 bp, Artificial Sequence
  Synthetic oligonucleotide
atcttatgtttttctagtcgagcagagaag

SEQ ID NO: 272361 - DNA, 30 bp, Artificial Sequence
  Synthetic oligonucleotide
tactcaacatcacggtcgtcacccgagaag

SEQ ID NO: 272362 - DNA, 30 bp, Artificial Sequence
  Synthetic oligonucleotide
caatttacgttgcctccaaacggcgagaag

SEQ ID NO: 272363 - DNA, 30 bp, Artificial Sequence
  Synthetic oligonucleotide
cttggaatcccctgcaccagcgactagaag

SEQ ID NO: 272364 - DNA, 30 bp, Artificial Sequence
  Synthetic oligonucleotide
tgttgatatggtcccaggtggggctagaag

SEQ ID NO: 272365 - DNA, 30 bp, Artificial Sequence
  Synthetic oligonucleotide
gagagtgaaattattctattgcagtagaag

SEQ ID NO: 272366 - DNA, 30 bp, Artificial Sequence
  Synthetic oligonucleotide
aagaatggtatgtacggcaatgcgtagaag

SEQ ID NO: 272367 - DNA, 30 bp, Artificial Sequence
  Synthetic oligonucleotide
tatccaccgtatgttcaatagacttagaag

SEQ ID NO: 272368 - DNA, 30 bp, Artificial Sequence
  Synthetic oligonucleotide
tcgatcgccggtcttacgaaaatttagaag

SEQ ID NO: 272369 - DNA, 30 bp, Artificial Sequence
  Synthetic oligonucleotide
ccttccatgaagaggggtgaattttagaag

SEQ ID NO: 272370 - DNA, 30 bp, Artificial Sequence
  Synthetic oligonucleotide
cgtgctgttcttcagcgttagttttagaag

SEQ ID NO: 272371 - DNA, 30 bp, Artificial Sequence
  Synthetic oligonucleotide
gtcgctggaggcaaaggccggttttagaag

SEQ ID NO: 272372 - DNA, 30 bp, Artificial Sequence
  Synthetic oligonucleotide
gataaaatcaaacaacacgagtaaacgaag

SEQ ID NO: 272373 - DNA, 30 bp, Artificial Sequence
  Synthetic oligonucleotide
tgcactagacgggagtcaattggaacgaag

SEQ ID NO: 272374 - DNA, 30 bp, Artificial Sequence
  Synthetic oligonucleotide
ccaggaatacctgggtggttaaccacgaag

SEQ ID NO: 272375 - DNA, 31 bp, Artificial Sequence
  Synthetic oligonucleotide
agcctcttgcctatagcgcacggccacgaag

SEQ ID NO: 272376 - DNA, 30 bp, Artificial Sequence
  Synthetic oligonucleotide
atatctttaggatgcttcagagatacgaag

SEQ ID NO: 272377 - DNA, 30 bp, Artificial Sequence
  Synthetic oligonucleotide
caagcttctgtgggcgttgattccccgaag

SEQ ID NO: 272378 - DNA, 30 bp, Artificial Sequence
  Synthetic oligonucleotide
tacttgcgcgcatgtgattagtagccgaag

SEQ ID NO: 272379 - DNA, 30 bp, Artificial Sequence
  Synthetic oligonucleotide
gaggaagaggtatgggacgggtggccgaag

SEQ ID NO: 272380 - DNA, 30 bp, Artificial Sequence
  Synthetic oligonucleotide
tgctagtcttcaaatttgtggccagcgaag

SEQ ID NO: 272381 - DNA, 30 bp, Artificial Sequence
  Synthetic oligonucleotide
acttggataaatttacccgtaaacgcgaag

SEQ ID NO: 272382 - DNA, 30 bp, Artificial Sequence
  Synthetic oligonucleotide
ttagctacttgttgccctcgctacgcgaag

SEQ ID NO: 272383 - DNA, 30 bp, Artificial Sequence
  Synthetic oligonucleotide
cgtaggtcgtaaaagttttgacccgcgaag

SEQ ID NO: 272384 - DNA, 30 bp, Artificial Sequence
  Synthetic oligonucleotide
aatgggaggtaagggatttggggggcgaag

SEQ ID NO: 272385 - DNA, 30 bp, Artificial Sequence
  Synthetic oligonucleotide
atagagtaactcgcttcaatgattgcgaag

SEQ ID NO: 272386 - DNA, 30 bp, Artificial Sequence
  Synthetic oligonucleotide
tgtcgatcggctgcggcagctcaatcgaag

SEQ ID NO: 272387 - DNA, 30 bp, Artificial Sequence
  Synthetic oligonucleotide
gccgttctgtgtctagtctattcctcgaag

SEQ ID NO: 272388 - DNA, 30 bp, Artificial Sequence
  Synthetic oligonucleotide
gcattccataactaaaaggctggctcgaag

SEQ ID NO: 272389 - DNA, 30 bp, Artificial Sequence
  Synthetic oligonucleotide
taatagcggctctgacgaactatttcgaag

SEQ ID NO: 272390 - DNA, 30 bp, Artificial Sequence
  Synthetic oligonucleotide
ttgtcctctttggccccgtagggaaggaag

SEQ ID NO: 272391 - DNA, 30 bp, Artificial Sequence
  Synthetic oligonucleotide
attaggtggacctgccggtacgacaggaag

SEQ ID NO: 272392 - DNA, 30 bp, Artificial Sequence
  Synthetic oligonucleotide
ttgtttcaacaatcctcgcatcggaggaag

SEQ ID NO: 272393 - DNA, 30 bp, Artificial Sequence
  Synthetic oligonucleotide
tgtgtattagggcggccatattctaggaag

SEQ ID NO: 272394 - DNA, 30 bp, Artificial Sequence
  Synthetic oligonucleotide
accaggccggcattaccgaggacacggaag

SEQ ID NO: 272395 - DNA, 30 bp, Artificial Sequence
  Synthetic oligonucleotide
tgaactgtctacagagcggccgtacggaag

SEQ ID NO: 272396 - DNA, 30 bp, Artificial Sequence
  Synthetic oligonucleotide
gaattgagccccggtgcccttgagcggaag

SEQ ID NO: 272397 - DNA, 30 bp, Artificial Sequence
  Synthetic oligonucleotide
tgcggtaacgcgcagtaagttatgcggaag

SEQ ID NO: 272398 - DNA, 30 bp, Artificial Sequence
  Synthetic oligonucleotide
atatacgatctcaagatgaatgtgcggaag

SEQ ID NO: 272399 - DNA, 30 bp, Artificial Sequence
  Synthetic oligonucleotide
gtatatggaccctcgtgcggttatcggaag

SEQ ID NO: 272400 - DNA, 30 bp, Artificial Sequence
  Synthetic oligonucleotide
tcgatttacaacacgcatccgacagggaag

SEQ ID NO: 272401 - DNA, 30 bp, Artificial Sequence
  Synthetic oligonucleotide
tgttgatgattgttattgccttcagggaag

SEQ ID NO: 272402 - DNA, 30 bp, Artificial Sequence
  Synthetic oligonucleotide
gtttagaaatactcctttttccacgggaag

SEQ ID NO: 272403 - DNA, 30 bp, Artificial Sequence
  Synthetic oligonucleotide
ctctccctcgtaaaataggttcacgggaag

SEQ ID NO: 272404 - DNA, 30 bp, Artificial Sequence
  Synthetic oligonucleotide
ggctcctatctgctaggatggcaggggaag

SEQ ID NO: 272405 - DNA, 30 bp, Artificial Sequence
  Synthetic oligonucleotide
gaccgccatcctaatctctgtgcggggaag

SEQ ID NO: 272406 - DNA, 30 bp, Artificial Sequence
  Synthetic oligonucleotide
tctatagtgcaaaaatttctcctggggaag

SEQ ID NO: 272407 - DNA, 30 bp, Artificial Sequence
  Synthetic oligonucleotide
tttgaggtaaatggatgattcctggggaag

SEQ ID NO: 272408 - DNA, 30 bp, Artificial Sequence
  Synthetic oligonucleotide
tgatagagtcaatggtcgggtcatgggaag

SEQ ID NO: 272409 - DNA, 30 bp, Artificial Sequence
  Synthetic oligonucleotide
tagtccctatggggcgtccgttctgggaag

SEQ ID NO: 272410 - DNA, 30 bp, Artificial Sequence
  Synthetic oligonucleotide
tatctgcacgtatgcgtagatattgggaag

SEQ ID NO: 272411 - DNA, 31 bp, Artificial Sequence
  Synthetic oligonucleotide
accatcagcagagaagttctataaatggaag

SEQ ID NO: 272412 - DNA, 30 bp, Artificial Sequence
  Synthetic oligonucleotide
atatgttgggtttaccttcttaactggaag

SEQ ID NO: 272413 - DNA, 30 bp, Artificial Sequence
  Synthetic oligonucleotide
actagtcgcgactacggttggcactggaag

SEQ ID NO: 272414 - DNA, 30 bp, Artificial Sequence
  Synthetic oligonucleotide
gttcgagggtaataggtttcgtactggaag

SEQ ID NO: 272415 - DNA, 30 bp, Artificial Sequence
  Synthetic oligonucleotide
ccagggatagtgtgagctattgagtggaag

SEQ ID NO: 272416 - DNA, 30 bp, Artificial Sequence
  Synthetic oligonucleotide
catcccgaatgtatacagtcaatgtggaag

SEQ ID NO: 272417 - DNA, 30 bp, Artificial Sequence
  Synthetic oligonucleotide
gatgacacttacgcggctgtgtgttggaag

SEQ ID NO: 272418 - DNA, 30 bp, Artificial Sequence
  Synthetic oligonucleotide
gtttgaactgtgtacctaagctgaatgaag

SEQ ID NO: 272419 - DNA, 30 bp, Artificial Sequence
  Synthetic oligonucleotide
cgccgcttcactgcgaggagttttatgaag

SEQ ID NO: 272420 - DNA, 30 bp, Artificial Sequence
  Synthetic oligonucleotide
gcgcatcaatatctctcgcgctgactgaag

SEQ ID NO: 272421 - DNA, 30 bp, Artificial Sequence
  Synthetic oligonucleotide
aagtgggtcagacttggtaaaaacctgaag

SEQ ID NO: 272422 - DNA, 30 bp, Artificial Sequence
  Synthetic oligonucleotide
gtaagacaaatgcgtatctccctcctgaag

SEQ ID NO: 272423 - DNA, 30 bp, Artificial Sequence
  Synthetic oligonucleotide
ataatgataaatggtgatcgggagctgaag

SEQ ID NO: 272424 - DNA, 30 bp, Artificial Sequence
  Synthetic oligonucleotide
cgaaggaacaacttctcttaggggctgaag

SEQ ID NO: 272425 - DNA, 30 bp, Artificial Sequence
  Synthetic oligonucleotide
cgcaccagcctaactgtcagggtgctgaag

SEQ ID NO: 272426 - DNA, 30 bp, Artificial Sequence
  Synthetic oligonucleotide
actgtcttcgggttataacgtttgctgaag

SEQ ID NO: 272427 - DNA, 30 bp, Artificial Sequence
  Synthetic oligonucleotide
tagcacggattcggcaccatctatctgaag

SEQ ID NO: 272428 - DNA, 30 bp, Artificial Sequence
  Synthetic oligonucleotide
aacgggtcgtaatcaacattatgtctgaag

SEQ ID NO: 272429 - DNA, 30 bp, Artificial Sequence
  Synthetic oligonucleotide
ccctcagggacgtgcgaggcgcttctgaag

SEQ ID NO: 272430 - DNA, 30 bp, Artificial Sequence
  Synthetic oligonucleotide
atgatagccatgggggcagattttctgaag

SEQ ID NO: 272431 - DNA, 30 bp, Artificial Sequence
  Synthetic oligonucleotide
tctaaatttctaagggtctgaggagtgaag

SEQ ID NO: 272432 - DNA, 30 bp, Artificial Sequence
  Synthetic oligonucleotide
atttctgactcatccggttcgatggtgaag

SEQ ID NO: 272433 - DNA, 30 bp, Artificial Sequence
  Synthetic oligonucleotide
aaccttacttgtgctatgggtcaattgaag

SEQ ID NO: 272434 - DNA, 30 bp, Artificial Sequence
  Synthetic oligonucleotide
acgtaaaaacaaaggagacggcgcttgaag

SEQ ID NO: 272435 - DNA, 30 bp, Artificial Sequence
  Synthetic oligonucleotide
cccatggctgcatagcaccgattcttgaag

SEQ ID NO: 272436 - DNA, 30 bp, Artificial Sequence
  Synthetic oligonucleotide
agtagagcgccctaatgatatccgttgaag

SEQ ID NO: 272437 - DNA, 30 bp, Artificial Sequence
  Synthetic oligonucleotide
tgcgatgtctggcctagataccgtttgaag

SEQ ID NO: 272438 - DNA, 30 bp, Artificial Sequence
  Synthetic oligonucleotide
tcagttttcgggcgtttagaaggtttgaag

SEQ ID NO: 272439 - DNA, 30 bp, Artificial Sequence
  Synthetic oligonucleotide
ggtagacactagtacccttatggaaataag

SEQ ID NO: 272440 - DNA, 30 bp, Artificial Sequence
  Synthetic oligonucleotide
cgttctattcgattacgtggttccaataag

SEQ ID NO: 272441 - DNA, 30 bp, Artificial Sequence
  Synthetic oligonucleotide
ctcgtttgagcaacaactaggatcaataag

SEQ ID NO: 272442 - DNA, 30 bp, Artificial Sequence
  Synthetic oligonucleotide
aggtcgaagaccttcgggtttatcaataag

SEQ ID NO: 272443 - DNA, 30 bp, Artificial Sequence
  Synthetic oligonucleotide
attgagctaggttcagcgatggggaataag

SEQ ID NO: 272444 - DNA, 30 bp, Artificial Sequence
  Synthetic oligonucleotide
ctgagtgtcaaccaactaacatctaataag

SEQ ID NO: 272445 - DNA, 30 bp, Artificial Sequence
  Synthetic oligonucleotide
atgcacgatacgcgcgcgatgcaacataag

SEQ ID NO: 272446 - DNA, 30 bp, Artificial Sequence
  Synthetic oligonucleotide
ccccctattcgcgtaaattgtcaacataag

SEQ ID NO: 272447 - DNA, 30 bp, Artificial Sequence
  Synthetic oligonucleotide
ggacaacacgtgtccgtcggataacataag

SEQ ID NO: 272448 - DNA, 30 bp, Artificial Sequence
  Synthetic oligonucleotide
actgagaacatcggcatttagccacataag

SEQ ID NO: 272449 - DNA, 30 bp, Artificial Sequence
  Synthetic oligonucleotide
tcggacttggaggttcagtgggcccataag

SEQ ID NO: 272450 - DNA, 30 bp, Artificial Sequence
  Synthetic oligonucleotide
ctgggtagaagacggatcttggagcataag

SEQ ID NO: 272451 - DNA, 30 bp, Artificial Sequence
  Synthetic oligonucleotide
aaaggtgattattgagccttttatcataag

SEQ ID NO: 272452 - DNA, 30 bp, Artificial Sequence
  Synthetic oligonucleotide
agcgataccaaatacgattttcgtcataag

SEQ ID NO: 272453 - DNA, 30 bp, Artificial Sequence
  Synthetic oligonucleotide
gttggctctgggtccaggcgatcagataag

SEQ ID NO: 272454 - DNA, 30 bp, Artificial Sequence
  Synthetic oligonucleotide
taagcactgggtcgcgcattgagcgataag

SEQ ID NO: 272455 - DNA, 30 bp, Artificial Sequence
  Synthetic oligonucleotide
cagcttttcctgctgtcgcgtgaggataag

SEQ ID NO: 272456 - DNA, 30 bp, Artificial Sequence
  Synthetic oligonucleotide
agcgctttaactttggcgacataggataag

SEQ ID NO: 272457 - DNA, 30 bp, Artificial Sequence
  Synthetic oligonucleotide
cttacacggtattcaggcaaattggataag

SEQ ID NO: 272458 - DNA, 30 bp, Artificial Sequence
  Synthetic oligonucleotide
agagccgagccttgtccgttccttgataag

SEQ ID NO: 272459 - DNA, 30 bp, Artificial Sequence
  Synthetic oligonucleotide
atccacgcttgaactcaagaggttgataag

SEQ ID NO: 272460 - DNA, 30 bp, Artificial Sequence
  Synthetic oligonucleotide
tgagttaaagacgtaattagttaatataag

SEQ ID NO: 272461 - DNA, 30 bp, Artificial Sequence
  Synthetic oligonucleotide
ataccggattcgtgaacgggaacatataag

SEQ ID NO: 272462 - DNA, 30 bp, Artificial Sequence
  Synthetic oligonucleotide
tcacatcataacgctcccataatatataag

SEQ ID NO: 272463 - DNA, 30 bp, Artificial Sequence
  Synthetic oligonucleotide
ataaataggcgtggtgtcgtcgactataag

SEQ ID NO: 272464 - DNA, 30 bp, Artificial Sequence
  Synthetic oligonucleotide
atgttgggggggaataacgggctctataag

SEQ ID NO: 272465 - DNA, 30 bp, Artificial Sequence
  Synthetic oligonucleotide
aggcacaatcaagttttagccctgtataag

SEQ ID NO: 272466 - DNA, 30 bp, Artificial Sequence
  Synthetic oligonucleotide
cggtcgaccgcatacgtacgcaaaactaag

SEQ ID NO: 272467 - DNA, 30 bp, Artificial Sequence
  Synthetic oligonucleotide
ctgtatagtcacaggcgccttggcactaag

SEQ ID NO: 272468 - DNA, 30 bp, Artificial Sequence
  Synthetic oligonucleotide
caagggagatatgagggttctctcactaag

SEQ ID NO: 272469 - DNA, 30 bp, Artificial Sequence
  Synthetic oligonucleotide
actcggccaggttctaattgtgctactaag

SEQ ID NO: 272470 - DNA, 30 bp, Artificial Sequence
  Synthetic oligonucleotide
cctacatcctcctaagagtaacttactaag

SEQ ID NO: 272471 - DNA, 30 bp, Artificial Sequence
  Synthetic oligonucleotide
gtccactgtgacgaggcaagcaaacctaag

SEQ ID NO: 272472 - DNA, 30 bp, Artificial Sequence
  Synthetic oligonucleotide
tttgtaacagaggtacataacttacctaag

SEQ ID NO: 272473 - DNA, 30 bp, Artificial Sequence
  Synthetic oligonucleotide
caaacgagccgtacagtgcacggagctaag

SEQ ID NO: 272474 - DNA, 30 bp, Artificial Sequence
  Synthetic oligonucleotide
agttcgcgcaggtccattgtttacgctaag

SEQ ID NO: 272475 - DNA, 30 bp, Artificial Sequence
  Synthetic oligonucleotide
ggatttacccaagacacattttgggctaag

SEQ ID NO: 272476 - DNA, 30 bp, Artificial Sequence
  Synthetic oligonucleotide
ggaatctgaggcgattcactaaaatctaag

SEQ ID NO: 272477 - DNA, 30 bp, Artificial Sequence
  Synthetic oligonucleotide
cttattcctccgctcgcaagaacatctaag

SEQ ID NO: 272478 - DNA, 30 bp, Artificial Sequence
  Synthetic oligonucleotide
ttgaccatttgcttagttcatgcatctaag

SEQ ID NO: 272479 - DNA, 30 bp, Artificial Sequence
  Synthetic oligonucleotide
ctattgtaaagcaccccatccaactctaag

SEQ ID NO: 272480 - DNA, 30 bp, Artificial Sequence
  Synthetic oligonucleotide
ttgttctttgagcgattgcgcaattctaag

SEQ ID NO: 272481 - DNA, 30 bp, Artificial Sequence
  Synthetic oligonucleotide
tacttcgaatcttcgcagataagaagtaag

SEQ ID NO: 272482 - DNA, 30 bp, Artificial Sequence
  Synthetic oligonucleotide
tcaagtcctgactctttatttgccagtaag

SEQ ID NO: 272483 - DNA, 30 bp, Artificial Sequence
  Synthetic oligonucleotide
ttggatactgcgcctattgataagagtaag

SEQ ID NO: 272484 - DNA, 30 bp, Artificial Sequence
  Synthetic oligonucleotide
attcacccatagggcttcgtgagtagtaag

SEQ ID NO: 272485 - DNA, 30 bp, Artificial Sequence
  Synthetic oligonucleotide
acctagaatttaagagtgaggcttagtaag

SEQ ID NO: 272486 - DNA, 30 bp, Artificial Sequence
  Synthetic oligonucleotide
ttcgatccttcgctgaaggtctaacgtaag

SEQ ID NO: 272487 - DNA, 30 bp, Artificial Sequence
  Synthetic oligonucleotide
tatgggtactagttccctgaatcacgtaag

SEQ ID NO: 272488 - DNA, 30 bp, Artificial Sequence
  Synthetic oligonucleotide
gaggcctactcactgtgtgaccaccgtaag

SEQ ID NO: 272489 - DNA, 30 bp, Artificial Sequence
  Synthetic oligonucleotide
atgaaacttaaacagtgcttgcaccgtaag

SEQ ID NO: 272490 - DNA, 30 bp, Artificial Sequence
  Synthetic oligonucleotide
aggtaataccgtcctgctcatccccgtaag

SEQ ID NO: 272491 - DNA, 30 bp, Artificial Sequence
  Synthetic oligonucleotide
gccctgatgcctagcgcgaatgcccgtaag

SEQ ID NO: 272492 - DNA, 30 bp, Artificial Sequence
  Synthetic oligonucleotide
aaaaccgtggaaacccttttttcccgtaag

SEQ ID NO: 272493 - DNA, 30 bp, Artificial Sequence
  Synthetic oligonucleotide
ctgactatgggttccctaggtgcgcgtaag

SEQ ID NO: 272494 - DNA, 30 bp, Artificial Sequence
  Synthetic oligonucleotide
gcgtaataaggttaagaaacctatcgtaag

SEQ ID NO: 272495 - DNA, 30 bp, Artificial Sequence
  Synthetic oligonucleotide
cttccgcctaacatattattcagtcgtaag

SEQ ID NO: 272496 - DNA, 30 bp, Artificial Sequence
  Synthetic oligonucleotide
gcaacccgaatgtcgggtttcagtcgtaag

SEQ ID NO: 272497 - DNA, 30 bp, Artificial Sequence
  Synthetic oligonucleotide
caagtacattaacaagttcagattcgtaag

SEQ ID NO: 272498 - DNA, 30 bp, Artificial Sequence
  Synthetic oligonucleotide
cagattagtcgtaattgttttgaaggtaag

SEQ ID NO: 272499 - DNA, 30 bp, Artificial Sequence
  Synthetic oligonucleotide
agactgcttagctaacaacgttagggtaag

SEQ ID NO: 272500 - DNA, 30 bp, Artificial Sequence
  Synthetic oligonucleotide
acggctgagtgctggcgcatcacgggtaag

SEQ ID NO: 272501 - DNA, 30 bp, Artificial Sequence
  Synthetic oligonucleotide
ctaacgaaagataagtatggacggggtaag

SEQ ID NO: 272502 - DNA, 30 bp, Artificial Sequence
  Synthetic oligonucleotide
tcgccattggttggtacattttggggtaag

SEQ ID NO: 272503 - DNA, 30 bp, Artificial Sequence
  Synthetic oligonucleotide
tcagtatagaaggacggatacggatgtaag

SEQ ID NO: 272504 - DNA, 30 bp, Artificial Sequence
  Synthetic oligonucleotide
gaatatcaggcatgatctatattatgtaag

SEQ ID NO: 272505 - DNA, 30 bp, Artificial Sequence
  Synthetic oligonucleotide
tgtacgccagtttatcattggacctgtaag

SEQ ID NO: 272506 - DNA, 30 bp, Artificial Sequence
  Synthetic oligonucleotide
tcgatttatgctgtttgacaagagtgtaag

SEQ ID NO: 272507 - DNA, 30 bp, Artificial Sequence
  Synthetic oligonucleotide
agatagctgcggacgaggtacaattgtaag

SEQ ID NO: 272508 - DNA, 30 bp, Artificial Sequence
  Synthetic oligonucleotide
aacatccatgcctagaggaaaccttgtaag

SEQ ID NO: 272509 - DNA, 30 bp, Artificial Sequence
  Synthetic oligonucleotide
agatccggctgctcgcctgaagcttgtaag

SEQ ID NO: 272510 - DNA, 30 bp, Artificial Sequence
  Synthetic oligonucleotide
tttcaaatggtagtgaccaggaaaattaag

SEQ ID NO: 272511 - DNA, 30 bp, Artificial Sequence
  Synthetic oligonucleotide
gttggtcggaagaccaagggatgaattaag

SEQ ID NO: 272512 - DNA, 30 bp, Artificial Sequence
  Synthetic oligonucleotide
cccctaacatccccaaccggcttaattaag

SEQ ID NO: 272513 - DNA, 30 bp, Artificial Sequence
  Synthetic oligonucleotide
aaacgggatatttgctctttctccattaag

SEQ ID NO: 272514 - DNA, 30 bp, Artificial Sequence
  Synthetic oligonucleotide
caataactttagcggactccgttcattaag

SEQ ID NO: 272515 - DNA, 30 bp, Artificial Sequence
  Synthetic oligonucleotide
gtaatggctaatgggacgtaccctattaag

SEQ ID NO: 272516 - DNA, 30 bp, Artificial Sequence
  Synthetic oligonucleotide
agggagcactattgcggcgccaaccttaag

SEQ ID NO: 272517 - DNA, 30 bp, Artificial Sequence
  Synthetic oligonucleotide
atgtacctattgccacagagggcccttaag

SEQ ID NO: 272518 - DNA, 30 bp, Artificial Sequence
  Synthetic oligonucleotide
gccatttgtaccaatcccgcactccttaag

SEQ ID NO: 272519 - DNA, 30 bp, Artificial Sequence
  Synthetic oligonucleotide
ataggttttagatgagttagtgtagttaag

SEQ ID NO: 272520 - DNA, 30 bp, Artificial Sequence
  Synthetic oligonucleotide
gacggtcgaaagtgcatattatatgttaag

SEQ ID NO: 272521 - DNA, 30 bp, Artificial Sequence
  Synthetic oligonucleotide
gaactagtgagtacatattagtgtgttaag

SEQ ID NO: 272522 - DNA, 30 bp, Artificial Sequence
  Synthetic oligonucleotide
attgtgcttaaaccgaaccaacaatttaag

SEQ ID NO: 272523 - DNA, 30 bp, Artificial Sequence
  Synthetic oligonucleotide
aacagataattacgtaggaatagatttaag

SEQ ID NO: 272524 - DNA, 30 bp, Artificial Sequence
  Synthetic oligonucleotide
tgtcaggaggcatcagtgtgcggatttaag

SEQ ID NO: 272525 - DNA, 30 bp, Artificial Sequence
  Synthetic oligonucleotide
gcggttcttggatacaccttcatatttaag

SEQ ID NO: 272526 - DNA, 30 bp, Artificial Sequence
  Synthetic oligonucleotide
ttgtgtgcagcatcaagttaattctttaag

SEQ ID NO: 272527 - DNA, 30 bp, Artificial Sequence
  Synthetic oligonucleotide
aaccggaggtaatttgctgacaattttaag

SEQ ID NO: 272528 - DNA, 30 bp, Artificial Sequence
  Synthetic oligonucleotide
ctcagcactggatgagggaacagttttaag

SEQ ID NO: 272529 - DNA, 30 bp, Artificial Sequence
  Synthetic oligonucleotide
tggaacgttggctcctaggtctaaaaacag

SEQ ID NO: 272530 - DNA, 30 bp, Artificial Sequence
  Synthetic oligonucleotide
caatcatcttttaggccagctcgaaaacag

SEQ ID NO: 272531 - DNA, 30 bp, Artificial Sequence
  Synthetic oligonucleotide
agattaggtatttactcaatgggaaaacag

SEQ ID NO: 272532 - DNA, 30 bp, Artificial Sequence
  Synthetic oligonucleotide
cgaaaaacgcgagggctaactggcaaacag

SEQ ID NO: 272533 - DNA, 30 bp, Artificial Sequence
  Synthetic oligonucleotide
ccaagcacagcggggacgaaggcgaaacag

SEQ ID NO: 272534 - DNA, 30 bp, Artificial Sequence
  Synthetic oligonucleotide
ctcaaagttgggcaggattgtgcgaaacag

SEQ ID NO: 272535 - DNA, 30 bp, Artificial Sequence
  Synthetic oligonucleotide
ctagaagttatgggaccagttggacaacag

SEQ ID NO: 272536 - DNA, 30 bp, Artificial Sequence
  Synthetic oligonucleotide
agagggtgcacagattggacccaccaacag

SEQ ID NO: 272537 - DNA, 30 bp, Artificial Sequence
  Synthetic oligonucleotide
gaattgactcgtttctctcgactccaacag

SEQ ID NO: 272538 - DNA, 30 bp, Artificial Sequence
  Synthetic oligonucleotide
tcatagatggccgtgttttactagcaacag

SEQ ID NO: 272539 - DNA, 30 bp, Artificial Sequence
  Synthetic oligonucleotide
tatagtagggtcagcatatcatcgcaacag

SEQ ID NO: 272540 - DNA, 30 bp, Artificial Sequence
  Synthetic oligonucleotide
aaacggtgatgctcaggttttcgagaacag

SEQ ID NO: 272541 - DNA, 30 bp, Artificial Sequence
  Synthetic oligonucleotide
gggtgcaagggaccagggcctgtagaacag

SEQ ID NO: 272542 - DNA, 30 bp, Artificial Sequence
  Synthetic oligonucleotide
gacgggttcaaccttgcgaggtacgaacag

SEQ ID NO: 272543 - DNA, 30 bp, Artificial Sequence
  Synthetic oligonucleotide
atgcgcgttggtcgactccagcaggaacag

SEQ ID NO: 272544 - DNA, 30 bp, Artificial Sequence
  Synthetic oligonucleotide
ggttattacaaggtaagggtcgaggaacag

SEQ ID NO: 272545 - DNA, 30 bp, Artificial Sequence
  Synthetic oligonucleotide
tcctacacatagaatgctgaagcggaacag

SEQ ID NO: 272546 - DNA, 30 bp, Artificial Sequence
  Synthetic oligonucleotide
tctctcagagcggcttcagttagggaacag

SEQ ID NO: 272547 - DNA, 30 bp, Artificial Sequence
  Synthetic oligonucleotide
tcgctactcttatcctacgcggatgaacag

SEQ ID NO: 272548 - DNA, 30 bp, Artificial Sequence
  Synthetic oligonucleotide
agatccgtgcacatggggcttattgaacag

SEQ ID NO: 272549 - DNA, 30 bp, Artificial Sequence
  Synthetic oligonucleotide
tgtctgcgtgttttttggcactttgaacag

SEQ ID NO: 272550 - DNA, 30 bp, Artificial Sequence
  Synthetic oligonucleotide
agcacccatttatcagttataaaataacag

SEQ ID NO: 272551 - DNA, 30 bp, Artificial Sequence
  Synthetic oligonucleotide
gggtagacggttacaggtgggctataacag

SEQ ID NO: 272552 - DNA, 30 bp, Artificial Sequence
  Synthetic oligonucleotide
ggcgacttcgtttcctggctgtcctaacag

SEQ ID NO: 272553 - DNA, 30 bp, Artificial Sequence
  Synthetic oligonucleotide
ccggggggtatgaagcagcaagggtaacag

SEQ ID NO: 272554 - DNA, 30 bp, Artificial Sequence
  Synthetic oligonucleotide
tacttaaacagtaaaggaatactttaacag

SEQ ID NO: 272555 - DNA, 30 bp, Artificial Sequence
  Synthetic oligonucleotide
agtccgtaacaagcattgcgatgcacacag

SEQ ID NO: 272556 - DNA, 30 bp, Artificial Sequence
  Synthetic oligonucleotide
atccctcaagcagacggagggtgcacacag

SEQ ID NO: 272557 - DNA, 30 bp, Artificial Sequence
  Synthetic oligonucleotide
atggaggaacggtcggcgagtaagacacag

SEQ ID NO: 272558 - DNA, 30 bp, Artificial Sequence
  Synthetic oligonucleotide
acctttgcacggtagtcttgagtcccacag

SEQ ID NO: 272559 - DNA, 31 bp, Artificial Sequence
  Synthetic oligonucleotide
acaagtaggggtttaatcatggcggccacag

SEQ ID NO: 272560 - DNA, 30 bp, Artificial Sequence
  Synthetic oligonucleotide
ttcgggtgtttaagggttcacatgccacag

SEQ ID NO: 272561 - DNA, 30 bp, Artificial Sequence
  Synthetic oligonucleotide
cttggggaatatgactgagcgagagcacag

SEQ ID NO: 272562 - DNA, 30 bp, Artificial Sequence
  Synthetic oligonucleotide
ctcatagtagctgggtatatggcatcacag

SEQ ID NO: 272563 - DNA, 30 bp, Artificial Sequence
  Synthetic oligonucleotide
gaaaccaaaaagtgtcgagtttactcacag

SEQ ID NO: 272564 - DNA, 30 bp, Artificial Sequence
  Synthetic oligonucleotide
ccatcccccgacatcagtgggacctcacag

SEQ ID NO: 272565 - DNA, 30 bp, Artificial Sequence
  Synthetic oligonucleotide
cgttcgtcctcatcaagctcctcctcacag

SEQ ID NO: 272566 - DNA, 30 bp, Artificial Sequence
  Synthetic oligonucleotide
tggtcattttaatgccattacatctcacag

SEQ ID NO: 272567 - DNA, 30 bp, Artificial Sequence
  Synthetic oligonucleotide
tgagtgaacaggcactcaaatttctcacag

SEQ ID NO: 272568 - DNA, 30 bp, Artificial Sequence
  Synthetic oligonucleotide
caaccccgattcctgtacataaagtcacag

SEQ ID NO: 272569 - DNA, 30 bp, Artificial Sequence
  Synthetic oligonucleotide
agtttgggtggctgccccaagatgtcacag

SEQ ID NO: 272570 - DNA, 30 bp, Artificial Sequence
  Synthetic oligonucleotide
tagcggcaattagccgcgagagagagacag

SEQ ID NO: 272571 - DNA, 30 bp, Artificial Sequence
  Synthetic oligonucleotide
cttaaggagtttaacatttgagtacgacag

SEQ ID NO: 272572 - DNA, 30 bp, Artificial Sequence
  Synthetic oligonucleotide
agacttgggaggtacgcgggttctcgacag

SEQ ID NO: 272573 - DNA, 30 bp, Artificial Sequence
  Synthetic oligonucleotide
ccgcctcagtgtttccgaaaagaaggacag

SEQ ID NO: 272574 - DNA, 30 bp, Artificial Sequence
  Synthetic oligonucleotide
attgtacggtggtaggtagggataggacag

SEQ ID NO: 272575 - DNA, 30 bp, Artificial Sequence
  Synthetic oligonucleotide
gctcatgacgtctatcccgtggccggacag

SEQ ID NO: 272576 - DNA, 30 bp, Artificial Sequence
  Synthetic oligonucleotide
ggatgatcattgtcaacggtccgctgacag

SEQ ID NO: 272577 - DNA, 30 bp, Artificial Sequence
  Synthetic oligonucleotide
aatgaccggctgggccactataggtgacag

SEQ ID NO: 272578 - DNA, 30 bp, Artificial Sequence
  Synthetic oligonucleotide
aaggtattccttcagatgtgattgtgacag

SEQ ID NO: 272579 - DNA, 30 bp, Artificial Sequence
  Synthetic oligonucleotide
gatgaagacacacatgaagccttttgacag

SEQ ID NO: 272580 - DNA, 30 bp, Artificial Sequence
  Synthetic oligonucleotide
aaagcttaggcatacgagcggaaaatacag

SEQ ID NO: 272581 - DNA, 30 bp, Artificial Sequence
  Synthetic oligonucleotide
ttcctatttcacgctttggcttaaatacag

SEQ ID NO: 272582 - DNA, 30 bp, Artificial Sequence
  Synthetic oligonucleotide
caccgtgccgaataaatatggagaatacag

SEQ ID NO: 272583 - DNA, 30 bp, Artificial Sequence
  Synthetic oligonucleotide
atcacgtgtaggcgtcgacgatgcatacag

SEQ ID NO: 272584 - DNA, 30 bp, Artificial Sequence
  Synthetic oligonucleotide
ttaagacccttcaccaactgtcggatacag

SEQ ID NO: 272585 - DNA, 30 bp, Artificial Sequence
  Synthetic oligonucleotide
agggacgcatcagtgtcttgtcggatacag

SEQ ID NO: 272586 - DNA, 30 bp, Artificial Sequence
  Synthetic oligonucleotide
gtactagagtctcgtccagtcgttatacag

SEQ ID NO: 272587 - DNA, 30 bp, Artificial Sequence
  Synthetic oligonucleotide
ccaaccctcgctgcatcgcatgacctacag

SEQ ID NO: 272588 - DNA, 30 bp, Artificial Sequence
  Synthetic oligonucleotide
tacgccaggcagcgtagcgaggccctacag

SEQ ID NO: 272589 - DNA, 30 bp, Artificial Sequence
  Synthetic oligonucleotide
tgggtgggaattcagtattgtacagtacag

SEQ ID NO: 272590 - DNA, 30 bp, Artificial Sequence
  Synthetic oligonucleotide
agacggtcttttacgtaatacatcgtacag

SEQ ID NO: 272591 - DNA, 30 bp, Artificial Sequence
  Synthetic oligonucleotide
tgcatcgtgccaactttagaccatgtacag

SEQ ID NO: 272592 - DNA, 30 bp, Artificial Sequence
  Synthetic oligonucleotide
catcactcgtaggagttccgatatgtacag

SEQ ID NO: 272593 - DNA, 30 bp, Artificial Sequence
  Synthetic oligonucleotide
acaacgcgcagtgtccaatcacaattacag

SEQ ID NO: 272594 - DNA, 30 bp, Artificial Sequence
  Synthetic oligonucleotide
aaagtaagccttctttgagcgtggttacag

SEQ ID NO: 272595 - DNA, 30 bp, Artificial Sequence
  Synthetic oligonucleotide
tgtgtggaataagcatggccgcttttacag

SEQ ID NO: 272596 - DNA, 30 bp, Artificial Sequence
  Synthetic oligonucleotide
ctggcggcattcaatcgtttcaaaaaccag

SEQ ID NO: 272597 - DNA, 30 bp, Artificial Sequence
  Synthetic oligonucleotide
ctagggcgtgcaacgtccgttgaaaaccag

SEQ ID NO: 272598 - DNA, 30 bp, Artificial Sequence
  Synthetic oligonucleotide
gggatcgcgggaattacagggggcaaccag

SEQ ID NO: 272599 - DNA, 30 bp, Artificial Sequence
  Synthetic oligonucleotide
gaaccggcggtgtacgtgggcgagaaccag

SEQ ID NO: 272600 - DNA, 30 bp, Artificial Sequence
  Synthetic oligonucleotide
acacctatcacgagggttcatgggaaccag

SEQ ID NO: 272601 - DNA, 30 bp, Artificial Sequence
  Synthetic oligonucleotide
gtggtgtatctcggagactacggtaaccag

SEQ ID NO: 272602 - DNA, 28 bp, Artificial Sequence
  Synthetic oligonucleotide
aaccgcggacgctatctagtaacaccag

SEQ ID NO: 272603 - DNA, 30 bp, Artificial Sequence
  Synthetic oligonucleotide
tcactccaagggcctgtatggtaacaccag

SEQ ID NO: 272604 - DNA, 30 bp, Artificial Sequence
  Synthetic oligonucleotide
gaggaaaccgacgtggcagactgacaccag

SEQ ID NO: 272605 - DNA, 30 bp, Artificial Sequence
  Synthetic oligonucleotide
atggtctgtgtaaaattgggcctgcaccag

SEQ ID NO: 272606 - DNA, 29 bp, Artificial Sequence
  Synthetic oligonucleotide
agtgttcgcgacagaggctctatcaccag

SEQ ID NO: 272607 - DNA, 30 bp, Artificial Sequence
  Synthetic oligonucleotide
cggacgcctctactgtcgggtacagaccag

SEQ ID NO: 272608 - DNA, 30 bp, Artificial Sequence
  Synthetic oligonucleotide
ggcccacgtgggcgttctggtagggaccag

SEQ ID NO: 272609 - DNA, 30 bp, Artificial Sequence
  Synthetic oligonucleotide
tggagttggaatagccttgaaactgaccag

SEQ ID NO: 272610 - DNA, 30 bp, Artificial Sequence
  Synthetic oligonucleotide
tgggttttcggataacgagaaggtgaccag

SEQ ID NO: 272611 - DNA, 30 bp, Artificial Sequence
  Synthetic oligonucleotide
tactggtcctacgtctcagactgataccag

SEQ ID NO: 272612 - DNA, 31 bp, Artificial Sequence
  Synthetic oligonucleotide
cattaatatagcatgaaaacgcttataccag

SEQ ID NO: 272613 - DNA, 30 bp, Artificial Sequence
  Synthetic oligonucleotide
agcttttgccaggacatgtatgactaccag

SEQ ID NO: 272614 - DNA, 30 bp, Artificial Sequence
  Synthetic oligonucleotide
attcgtcgattatcattaggtggctaccag

SEQ ID NO: 272615 - DNA, 30 bp, Artificial Sequence
  Synthetic oligonucleotide
ctgctagatttaacagctcatgtgtaccag

SEQ ID NO: 272616 - DNA, 30 bp, Artificial Sequence
  Synthetic oligonucleotide
aaatatgcaccggtgaacctgccttaccag

SEQ ID NO: 272617 - DNA, 30 bp, Artificial Sequence
  Synthetic oligonucleotide
ttgccagcgtgggtaggccggggttaccag

SEQ ID NO: 272618 - DNA, 30 bp, Artificial Sequence
  Synthetic oligonucleotide
gagatcggccatagcggcagtgtaacccag

SEQ ID NO: 272619 - DNA, 30 bp, Artificial Sequence
  Synthetic oligonucleotide
ggatttagcagtgaaggtctatcgacccag

SEQ ID NO: 272620 - DNA, 30 bp, Artificial Sequence
  Synthetic oligonucleotide
gggaataagataatccgcgtcaacccccag

SEQ ID NO: 272621 - DNA, 30 bp, Artificial Sequence
  Synthetic oligonucleotide
gcagacagatcggcgacgcgacttccccag

SEQ ID NO: 272622 - DNA, 30 bp, Artificial Sequence
  Synthetic oligonucleotide
gttcccatgtagcgtagatcctaagcccag

SEQ ID NO: 272623 - DNA, 30 bp, Artificial Sequence
  Synthetic oligonucleotide
gttagctattatcacttccttatagcccag

SEQ ID NO: 272624 - DNA, 31 bp, Artificial Sequence
  Synthetic oligonucleotide
attgaagagagcagactcaacgctcgcccag

SEQ ID NO: 272625 - DNA, 30 bp, Artificial Sequence
  Synthetic oligonucleotide
gccttgcatgctatttctggctaggcccag

SEQ ID NO: 272626 - DNA, 30 bp, Artificial Sequence
  Synthetic oligonucleotide
gggcaaagcaccctataggttttggcccag

SEQ ID NO: 272627 - DNA, 30 bp, Artificial Sequence
  Synthetic oligonucleotide
acccggaacataaaggtccaacttgcccag

SEQ ID NO: 272628 - DNA, 30 bp, Artificial Sequence
  Synthetic oligonucleotide
tagctctgttctcagagctcataatcccag

SEQ ID NO: 272629 - DNA, 30 bp, Artificial Sequence
  Synthetic oligonucleotide
tgtattatgtatcaaccgataccatcccag

SEQ ID NO: 272630 - DNA, 30 bp, Artificial Sequence
  Synthetic oligonucleotide
ggagggccattattccgctatgtatcccag

SEQ ID NO: 272631 - DNA, 30 bp, Artificial Sequence
  Synthetic oligonucleotide
tcctaatttccaatacgggacaggtcccag

SEQ ID NO: 272632 - DNA, 30 bp, Artificial Sequence
  Synthetic oligonucleotide
ggtatgggagccgtggtaacaacaagccag

SEQ ID NO: 272633 - DNA, 30 bp, Artificial Sequence
  Synthetic oligonucleotide
ttctgacctcccatagggaatataagccag

SEQ ID NO: 272634 - DNA, 31 bp, Artificial Sequence
  Synthetic oligonucleotide
cgcaaagacggcttgaataccacacagccag

SEQ ID NO: 272635 - DNA, 30 bp, Artificial Sequence
  Synthetic oligonucleotide
ttgcaacacacggttgcgaccatcagccag

SEQ ID NO: 272636 - DNA, 30 bp, Artificial Sequence
  Synthetic oligonucleotide
gaactcaatccaatcgggaacaagagccag

SEQ ID NO: 272637 - DNA, 30 bp, Artificial Sequence
  Synthetic oligonucleotide
ggctgttccggataggacggacagagccag

SEQ ID NO: 272638 - DNA, 30 bp, Artificial Sequence
  Synthetic oligonucleotide
ataaggggacaacgtttgtctcagagccag

SEQ ID NO: 272639 - DNA, 30 bp, Artificial Sequence
  Synthetic oligonucleotide
agctgcgcacaccttgtctcgaggagccag

SEQ ID NO: 272640 - DNA, 30 bp, Artificial Sequence
  Synthetic oligonucleotide
gatgggtccgtggtcaattctctgcgccag

SEQ ID NO: 272641 - DNA, 30 bp, Artificial Sequence
  Synthetic oligonucleotide
agcccagaaaatctggaggcgtctcgccag

SEQ ID NO: 272642 - DNA, 30 bp, Artificial Sequence
  Synthetic oligonucleotide
accgcggatctcctgaaaaggtgaggccag

SEQ ID NO: 272643 - DNA, 30 bp, Artificial Sequence
  Synthetic oligonucleotide
tagcgacgttcaaaggatgcacatggccag

SEQ ID NO: 272644 - DNA, 30 bp, Artificial Sequence
  Synthetic oligonucleotide
gaaaagtggccgacagtagtagactgccag

SEQ ID NO: 272645 - DNA, 30 bp, Artificial Sequence
  Synthetic oligonucleotide
aaaaaacggcacccacggagtgcctgccag

SEQ ID NO: 272646 - DNA, 30 bp, Artificial Sequence
  Synthetic oligonucleotide
agtaaagatcgtagtttagacctgtgccag

SEQ ID NO: 272647 - DNA, 30 bp, Artificial Sequence
  Synthetic oligonucleotide
agcacaccgggggcctctagtggaatccag

SEQ ID NO: 272648 - DNA, 30 bp, Artificial Sequence
  Synthetic oligonucleotide
accattcacgcttgcgaatttcagatccag

SEQ ID NO: 272649 - DNA, 30 bp, Artificial Sequence
  Synthetic oligonucleotide
cgtgtacgttaactcccggcctatatccag

SEQ ID NO: 272650 - DNA, 30 bp, Artificial Sequence
  Synthetic oligonucleotide
aggatgtaacagcggttcgggtctatccag

SEQ ID NO: 272651 - DNA, 30 bp, Artificial Sequence
  Synthetic oligonucleotide
ctacccgttctcctccggccgagtatccag

SEQ ID NO: 272652 - DNA, 30 bp, Artificial Sequence
  Synthetic oligonucleotide
acaccctcaaagtgatatgaaggtatccag

SEQ ID NO: 272653 - DNA, 30 bp, Artificial Sequence
  Synthetic oligonucleotide
acgtatccggttcgaggtctctcactccag

SEQ ID NO: 272654 - DNA, 30 bp, Artificial Sequence
  Synthetic oligonucleotide
gaatatcaagcaggtgaattttagctccag

SEQ ID NO: 272655 - DNA, 30 bp, Artificial Sequence
  Synthetic oligonucleotide
agaactgaataggttcagttgcgtctccag

SEQ ID NO: 272656 - DNA, 30 bp, Artificial Sequence
  Synthetic oligonucleotide
gagcagagtgcaggaggttttgttctccag

SEQ ID NO: 272657 - DNA, 30 bp, Artificial Sequence
  Synthetic oligonucleotide
tcgcattcggtcatatgtttatacgtccag

SEQ ID NO: 272658 - DNA, 30 bp, Artificial Sequence
  Synthetic oligonucleotide
ggtgacagcgaatttactacgcaggtccag

SEQ ID NO: 272659 - DNA, 30 bp, Artificial Sequence
  Synthetic oligonucleotide
gtgtgagctaagcaaccggagaaattccag

SEQ ID NO: 272660 - DNA, 30 bp, Artificial Sequence
  Synthetic oligonucleotide
tgggtggcaaccctaatgacgtaattccag

SEQ ID NO: 272661 - DNA, 30 bp, Artificial Sequence
  Synthetic oligonucleotide
tgctttctgcaaggtaataacacattccag

SEQ ID NO: 272662 - DNA, 30 bp, Artificial Sequence
  Synthetic oligonucleotide
aggaccctaatttgtgttgccccattccag

SEQ ID NO: 272663 - DNA, 30 bp, Artificial Sequence
  Synthetic oligonucleotide
gacttatatgcatcttagcgtttcttccag

SEQ ID NO: 272664 - DNA, 30 bp, Artificial Sequence
  Synthetic oligonucleotide
ctgactcaggcacagcgggtggatttccag

SEQ ID NO: 272665 - DNA, 30 bp, Artificial Sequence
  Synthetic oligonucleotide
aggtccgaacgatggcggttacttttccag

SEQ ID NO: 272666 - DNA, 30 bp, Artificial Sequence
  Synthetic oligonucleotide
cttgggctcaccgaatagcgtctaaagcag

SEQ ID NO: 272667 - DNA, 30 bp, Artificial Sequence
  Synthetic oligonucleotide
aagtgtacggaggaatgttaccccaagcag

SEQ ID NO: 272668 - DNA, 30 bp, Artificial Sequence
  Synthetic oligonucleotide
tggggttagatagagttttgcgcgaagcag

SEQ ID NO: 272669 - DNA, 30 bp, Artificial Sequence
  Synthetic oligonucleotide
ctcgacagtagattctgtttaaagcagcag

SEQ ID NO: 272670 - DNA, 30 bp, Artificial Sequence
  Synthetic oligonucleotide
ggtaaaattccataagatgtgggtcagcag

SEQ ID NO: 272671 - DNA, 30 bp, Artificial Sequence
  Synthetic oligonucleotide
gaacctttcactcgtctacgtatggagcag

SEQ ID NO: 272672 - DNA, 30 bp, Artificial Sequence
  Synthetic oligonucleotide
ccacgctcgactccgtcccatgtggagcag

SEQ ID NO: 272673 - DNA, 31 bp, Artificial Sequence
  Synthetic oligonucleotide
aagccttatgaatgcacaacataaatagcag

SEQ ID NO: 272674 - DNA, 30 bp, Artificial Sequence
  Synthetic oligonucleotide
tacggaaaccggtagctccggagatagcag

SEQ ID NO: 272675 - DNA, 30 bp, Artificial Sequence
  Synthetic oligonucleotide
atagaaatatcattagaccgcggatagcag

SEQ ID NO: 272676 - DNA, 30 bp, Artificial Sequence
  Synthetic oligonucleotide
acatagcccctagcacgcctgaagtagcag

SEQ ID NO: 272677 - DNA, 30 bp, Artificial Sequence
  Synthetic oligonucleotide
gggtcaccgcgggggttgtttaggtagcag

SEQ ID NO: 272678 - DNA, 30 bp, Artificial Sequence
  Synthetic oligonucleotide
gacccaaattaggctaatgcagggtagcag

SEQ ID NO: 272679 - DNA, 30 bp, Artificial Sequence
  Synthetic oligonucleotide
cgagagctacttccatggctagggtagcag

SEQ ID NO: 272680 - DNA, 30 bp, Artificial Sequence
  Synthetic oligonucleotide
gaggagttgtaccacaaccatgacacgcag

SEQ ID NO: 272681 - DNA, 30 bp, Artificial Sequence
  Synthetic oligonucleotide
tagagataaagtcttccttagagtacgcag

SEQ ID NO: 272682 - DNA, 30 bp, Artificial Sequence
  Synthetic oligonucleotide
aacagacccacgttcaaggtctccccgcag

SEQ ID NO: 272683 - DNA, 30 bp, Artificial Sequence
  Synthetic oligonucleotide
ggtagctgtgttgtcggaagtagcccgcag

SEQ ID NO: 272684 - DNA, 30 bp, Artificial Sequence
  Synthetic oligonucleotide
ttgccggacaggtcccacacttggccgcag

SEQ ID NO: 272685 - DNA, 30 bp, Artificial Sequence
  Synthetic oligonucleotide
ggtattacatttgctggaacagtagcgcag

SEQ ID NO: 272686 - DNA, 30 bp, Artificial Sequence
  Synthetic oligonucleotide
tgtccgatgggattcatataaggggcgcag

SEQ ID NO: 272687 - DNA, 30 bp, Artificial Sequence
  Synthetic oligonucleotide
gctcgaacatccacaagcttcaatgcgcag

SEQ ID NO: 272688 - DNA, 30 bp, Artificial Sequence
  Synthetic oligonucleotide
ggaatgaggctggatagtgtgcatgcgcag

SEQ ID NO: 272689 - DNA, 30 bp, Artificial Sequence
  Synthetic oligonucleotide
gtgcgaattgccggttcccggcttgcgcag

SEQ ID NO: 272690 - DNA, 30 bp, Artificial Sequence
  Synthetic oligonucleotide
aaggcacgccgtcgtatatcctcatcgcag

SEQ ID NO: 272691 - DNA, 30 bp, Artificial Sequence
  Synthetic oligonucleotide
gaagtgtgcgcccatgagagaccgtcgcag

SEQ ID NO: 272692 - DNA, 30 bp, Artificial Sequence
  Synthetic oligonucleotide
tataagtgtaagacaggtgaaatgtcgcag

SEQ ID NO: 272693 - DNA, 30 bp, Artificial Sequence
  Synthetic oligonucleotide
cgtgtaaaaaaagctaccacggtttcgcag

SEQ ID NO: 272694 - DNA, 30 bp, Artificial Sequence
  Synthetic oligonucleotide
gttgagtgtcggctgggtggagataggcag

SEQ ID NO: 272695 - DNA, 30 bp, Artificial Sequence
  Synthetic oligonucleotide
gcggtgcggttgggttatggccctaggcag

SEQ ID NO: 272696 - DNA, 30 bp, Artificial Sequence
  Synthetic oligonucleotide
aacacgtaacctttttgtctcacacggcag

SEQ ID NO: 272697 - DNA, 30 bp, Artificial Sequence
  Synthetic oligonucleotide
tgtcgttgaacgaatctgcaatcacggcag

SEQ ID NO: 272698 - DNA, 30 bp, Artificial Sequence
  Synthetic oligonucleotide
caaaagtcccttcaaactcggctacggcag

SEQ ID NO: 272699 - DNA, 30 bp, Artificial Sequence
  Synthetic oligonucleotide
ctcccggttctaccacacaatgaccggcag

SEQ ID NO: 272700 - DNA, 30 bp, Artificial Sequence
  Synthetic oligonucleotide
ctaatgatggttcaatgttcactccggcag

SEQ ID NO: 272701 - DNA, 30 bp, Artificial Sequence
  Synthetic oligonucleotide
tgacgtcttgcgtacaatacatatcggcag

SEQ ID NO: 272702 - DNA, 30 bp, Artificial Sequence
  Synthetic oligonucleotide
gctatttagttttcagtccgaagtcggcag

SEQ ID NO: 272703 - DNA, 30 bp, Artificial Sequence
  Synthetic oligonucleotide
atgcacctggccttcagcatacaagggcag

SEQ ID NO: 272704 - DNA, 30 bp, Artificial Sequence
  Synthetic oligonucleotide
aatctgaaggcattttgcctagaagggcag

SEQ ID NO: 272705 - DNA, 31 bp, Artificial Sequence
  Synthetic oligonucleotide
ttagaatcaaaaaacatttcatggagggcag

SEQ ID NO: 272706 - DNA, 30 bp, Artificial Sequence
  Synthetic oligonucleotide
ttatctgacggttacagggcttacgggcag

SEQ ID NO: 272707 - DNA, 30 bp, Artificial Sequence
  Synthetic oligonucleotide
aagatcgttaagtgtgctacgtccgggcag

SEQ ID NO: 272708 - DNA, 30 bp, Artificial Sequence
  Synthetic oligonucleotide
gcgctcagaagagaacttcctatcgggcag

SEQ ID NO: 272709 - DNA, 30 bp, Artificial Sequence
  Synthetic oligonucleotide
ctacgtcgaatgttcagttcgacggggcag

SEQ ID NO: 272710 - DNA, 30 bp, Artificial Sequence
  Synthetic oligonucleotide
atgtgcgaccaggtcatctctccggggcag

SEQ ID NO: 272711 - DNA, 30 bp, Artificial Sequence
  Synthetic oligonucleotide
atacgccatctggttgatcacgcggggcag

SEQ ID NO: 272712 - DNA, 30 bp, Artificial Sequence
  Synthetic oligonucleotide
caccccggttttagtaagcggcttgggcag

SEQ ID NO: 272713 - DNA, 30 bp, Artificial Sequence
  Synthetic oligonucleotide
gacacccgcggaagctggtggaaatggcag

SEQ ID NO: 272714 - DNA, 30 bp, Artificial Sequence
  Synthetic oligonucleotide
tttagaggttaccacgccctacaatggcag

SEQ ID NO: 272715 - DNA, 30 bp, Artificial Sequence
  Synthetic oligonucleotide
agaatctagtaatattattaggactggcag

SEQ ID NO: 272716 - DNA, 30 bp, Artificial Sequence
  Synthetic oligonucleotide
ggctctgtttcgtgcgagtggctctggcag

SEQ ID NO: 272717 - DNA, 30 bp, Artificial Sequence
  Synthetic oligonucleotide
atggggtattctgggggcgaacgaatgcag

SEQ ID NO: 272718 - DNA, 30 bp, Artificial Sequence
  Synthetic oligonucleotide
gcccccgtgtaggaaccgctaataatgcag

SEQ ID NO: 272719 - DNA, 30 bp, Artificial Sequence
  Synthetic oligonucleotide
tcaattacagtttctggattcctaatgcag

SEQ ID NO: 272720 - DNA, 30 bp, Artificial Sequence
  Synthetic oligonucleotide
cctcaatggctgcatagtggatcgatgcag

SEQ ID NO: 272721 - DNA, 30 bp, Artificial Sequence
  Synthetic oligonucleotide
agcaaaatctcacgtttaagggggatgcag

SEQ ID NO: 272722 - DNA, 30 bp, Artificial Sequence
  Synthetic oligonucleotide
gtgacacggggataatggaatttgatgcag

SEQ ID NO: 272723 - DNA, 30 bp, Artificial Sequence
  Synthetic oligonucleotide
gctatcgcgagttttaggagtaatatgcag

SEQ ID NO: 272724 - DNA, 30 bp, Artificial Sequence
  Synthetic oligonucleotide
attacttggattggtgatctaaaactgcag

SEQ ID NO: 272725 - DNA, 30 bp, Artificial Sequence
  Synthetic oligonucleotide
cgtgccggcacacaagcagaataactgcag

SEQ ID NO: 272726 - DNA, 30 bp, Artificial Sequence
  Synthetic oligonucleotide
ttgagaccccccgtgtaatgaggcctgcag

SEQ ID NO: 272727 - DNA, 30 bp, Artificial Sequence
  Synthetic oligonucleotide
attcctctcgtatgataaccagtcctgcag

SEQ ID NO: 272728 - DNA, 30 bp, Artificial Sequence
  Synthetic oligonucleotide
cgatatgtaattttagcggcaaatctgcag

SEQ ID NO: 272729 - DNA, 30 bp, Artificial Sequence
  Synthetic oligonucleotide
tcgagctgacgcccaaaggtccccgtgcag

SEQ ID NO: 272730 - DNA, 30 bp, Artificial Sequence
  Synthetic oligonucleotide
ttgaataggtgtaagataacgggcgtgcag

SEQ ID NO: 272731 - DNA, 30 bp, Artificial Sequence
  Synthetic oligonucleotide
ctccaacgacgttccctaacgcgggtgcag

SEQ ID NO: 272732 - DNA, 30 bp, Artificial Sequence
  Synthetic oligonucleotide
ctggaacgcgtggcacaggtccatgtgcag

SEQ ID NO: 272733 - DNA, 30 bp, Artificial Sequence
  Synthetic oligonucleotide
gttgctgaagcccatgggttgtgtgtgcag

SEQ ID NO: 272734 - DNA, 30 bp, Artificial Sequence
  Synthetic oligonucleotide
gtatgttattctaggtccaactttgtgcag

SEQ ID NO: 272735 - DNA, 30 bp, Artificial Sequence
  Synthetic oligonucleotide
tgcccccagggccaagggcggcaattgcag

SEQ ID NO: 272736 - DNA, 30 bp, Artificial Sequence
  Synthetic oligonucleotide
tctgtccctttaggaagtccgcgattgcag

SEQ ID NO: 272737 - DNA, 30 bp, Artificial Sequence
  Synthetic oligonucleotide
acgttccgagagaaccggcactccttgcag

SEQ ID NO: 272738 - DNA, 30 bp, Artificial Sequence
  Synthetic oligonucleotide
tgcttgctacgtatcgtgaatctgttgcag

SEQ ID NO: 272739 - DNA, 30 bp, Artificial Sequence
  Synthetic oligonucleotide
ttatcacgagtgtgatgagcctctttgcag

SEQ ID NO: 272740 - DNA, 31 bp, Artificial Sequence
  Synthetic oligonucleotide
ctctcaagcactggtgaattcagaaaatcag

SEQ ID NO: 272741 - DNA, 30 bp, Artificial Sequence
  Synthetic oligonucleotide
ttcccttagcttatgaatggagacaatcag

SEQ ID NO: 272742 - DNA, 30 bp, Artificial Sequence
  Synthetic oligonucleotide
tccaactggagttgttgaatcacgaatcag

SEQ ID NO: 272743 - DNA, 30 bp, Artificial Sequence
  Synthetic oligonucleotide
gatatggtttatacaggccgagctaatcag

SEQ ID NO: 272744 - DNA, 30 bp, Artificial Sequence
  Synthetic oligonucleotide
tattttggcatcaactgtttcggtaatcag

SEQ ID NO: 272745 - DNA, 30 bp, Artificial Sequence
  Synthetic oligonucleotide
gacttctgagaaagtctcgacaaacatcag

SEQ ID NO: 272746 - DNA, 30 bp, Artificial Sequence
  Synthetic oligonucleotide
aatcatctgctttgtaatatagcacatcag

SEQ ID NO: 272747 - DNA, 30 bp, Artificial Sequence
  Synthetic oligonucleotide
gttgtcggttaaagtgtctttgcacatcag

SEQ ID NO: 272748 - DNA, 30 bp, Artificial Sequence
  Synthetic oligonucleotide
tacggaccattctgtaggtcaccgcatcag

SEQ ID NO: 272749 - DNA, 30 bp, Artificial Sequence
  Synthetic oligonucleotide
actatgccactagcggtaattactcatcag

SEQ ID NO: 272750 - DNA, 30 bp, Artificial Sequence
  Synthetic oligonucleotide
gatgcaattcagtgagcaggatctcatcag

SEQ ID NO: 272751 - DNA, 30 bp, Artificial Sequence
  Synthetic oligonucleotide
ccttcatagtttccgcattaagcagatcag

SEQ ID NO: 272752 - DNA, 30 bp, Artificial Sequence
  Synthetic oligonucleotide
tacaaaatttttatgtctccagccgatcag

SEQ ID NO: 272753 - DNA, 30 bp, Artificial Sequence
  Synthetic oligonucleotide
gagctgcggcccttatcgtcgccggatcag

SEQ ID NO: 272754 - DNA, 30 bp, Artificial Sequence
  Synthetic oligonucleotide
gtacttttagaacattgtagcggggatcag

SEQ ID NO: 272755 - DNA, 30 bp, Artificial Sequence
  Synthetic oligonucleotide
tggtgtgctaacgtccatccacgtgatcag

SEQ ID NO: 272756 - DNA, 30 bp, Artificial Sequence
  Synthetic oligonucleotide
catagagccttttactttatccaatatcag

SEQ ID NO: 272757 - DNA, 30 bp, Artificial Sequence
  Synthetic oligonucleotide
tgaaatcttccggtttgcatggtctatcag

SEQ ID NO: 272758 - DNA, 30 bp, Artificial Sequence
  Synthetic oligonucleotide
gtccggattaaactggatctagtgtatcag

SEQ ID NO: 272759 - DNA, 30 bp, Artificial Sequence
  Synthetic oligonucleotide
ttacggcaagattatccagagttttatcag

SEQ ID NO: 272760 - DNA, 30 bp, Artificial Sequence
  Synthetic oligonucleotide
cgcggcatcatcatcacgggacgcactcag

SEQ ID NO: 272761 - DNA, 30 bp, Artificial Sequence
  Synthetic oligonucleotide
ggtactaggagcctgatgagcaggactcag

SEQ ID NO: 272762 - DNA, 30 bp, Artificial Sequence
  Synthetic oligonucleotide
cttcgcggaacatgactcgcggatactcag

SEQ ID NO: 272763 - DNA, 30 bp, Artificial Sequence
  Synthetic oligonucleotide
cagaagaagtgtcttggtgattttactcag

SEQ ID NO: 272764 - DNA, 30 bp, Artificial Sequence
  Synthetic oligonucleotide
ctccgaatctagcgaagctaagcacctcag

SEQ ID NO: 272765 - DNA, 30 bp, Artificial Sequence
  Synthetic oligonucleotide
tgtcgtactttggattacttcctacctcag

SEQ ID NO: 272766 - DNA, 30 bp, Artificial Sequence
  Synthetic oligonucleotide
cttgctacgatctcatgcctggaccctcag

SEQ ID NO: 272767 - DNA, 30 bp, Artificial Sequence
  Synthetic oligonucleotide
atagcgagatggtaatagtaccggcctcag

SEQ ID NO: 272768 - DNA, 30 bp, Artificial Sequence
  Synthetic oligonucleotide
accccggcgagttgtacacacgatcctcag

SEQ ID NO: 272769 - DNA, 30 bp, Artificial Sequence
  Synthetic oligonucleotide
agatagctgctagtttgtataagtcctcag

SEQ ID NO: 272770 - DNA, 30 bp, Artificial Sequence
  Synthetic oligonucleotide
tatccgacgcataacctcatagaagctcag

SEQ ID NO: 272771 - DNA, 30 bp, Artificial Sequence
  Synthetic oligonucleotide
tcctctgtcccgagctacttattagctcag

SEQ ID NO: 272772 - DNA, 30 bp, Artificial Sequence
  Synthetic oligonucleotide
agaaatggggagcaggcggctatggctcag

SEQ ID NO: 272773 - DNA, 30 bp, Artificial Sequence
  Synthetic oligonucleotide
tatacttggaccctcaacgcaaatgctcag

SEQ ID NO: 272774 - DNA, 30 bp, Artificial Sequence
  Synthetic oligonucleotide
ctagcttgtcgtacatgaaatattgctcag

SEQ ID NO: 272775 - DNA, 30 bp, Artificial Sequence
  Synthetic oligonucleotide
aacaataaaatctgaatatgaggctctcag

SEQ ID NO: 272776 - DNA, 30 bp, Artificial Sequence
  Synthetic oligonucleotide
gggcatgcctataaaaccttctacagtcag

SEQ ID NO: 272777 - DNA, 30 bp, Artificial Sequence
  Synthetic oligonucleotide
ggcttccactgttagcccgcgtacagtcag

SEQ ID NO: 272778 - DNA, 30 bp, Artificial Sequence
  Synthetic oligonucleotide
cttaattccccgaaccgggtaaccagtcag

SEQ ID NO: 272779 - DNA, 30 bp, Artificial Sequence
  Synthetic oligonucleotide
acgagcgcctgtaacgcacagatgagtcag

SEQ ID NO: 272780 - DNA, 30 bp, Artificial Sequence
  Synthetic oligonucleotide
cataattagctttatactctctctagtcag

SEQ ID NO: 272781 - DNA, 30 bp, Artificial Sequence
  Synthetic oligonucleotide
agttccaagagcttagattgttgtagtcag

SEQ ID NO: 272782 - DNA, 30 bp, Artificial Sequence
  Synthetic oligonucleotide
tctggcgaaagctcacggttgtttagtcag

SEQ ID NO: 272783 - DNA, 30 bp, Artificial Sequence
  Synthetic oligonucleotide
agcacggatcgcagaaaggctcaccgtcag

SEQ ID NO: 272784 - DNA, 30 bp, Artificial Sequence
  Synthetic oligonucleotide
atcacatgatggtccgagcgcttgcgtcag

SEQ ID NO: 272785 - DNA, 30 bp, Artificial Sequence
  Synthetic oligonucleotide
atacggttggagctggtcgatcgaggtcag

SEQ ID NO: 272786 - DNA, 30 bp, Artificial Sequence
  Synthetic oligonucleotide
agaactctccacgtcggatggtagggtcag

SEQ ID NO: 272787 - DNA, 29 bp, Artificial Sequence
  Synthetic oligonucleotide
gcggaggcgatgtaaggggtaggggtcag

SEQ ID NO: 272788 - DNA, 30 bp, Artificial Sequence
  Synthetic oligonucleotide
cacgtgcgtttgagctaaaggcatggtcag

SEQ ID NO: 272789 - DNA, 30 bp, Artificial Sequence
  Synthetic oligonucleotide
ttggagttagtactgcgggattttggtcag

SEQ ID NO: 272790 - DNA, 30 bp, Artificial Sequence
  Synthetic oligonucleotide
cgtacagaagcagatgctagttgatgtcag

SEQ ID NO: 272791 - DNA, 30 bp, Artificial Sequence
  Synthetic oligonucleotide
agtattcttactagctgccgaacgtgtcag

SEQ ID NO: 272792 - DNA, 30 bp, Artificial Sequence
  Synthetic oligonucleotide
ggatgaataatctcgtagactaattgtcag

SEQ ID NO: 272793 - DNA, 30 bp, Artificial Sequence
  Synthetic oligonucleotide
cccggtcaattaaaccgaaggctaattcag

SEQ ID NO: 272794 - DNA, 30 bp, Artificial Sequence
  Synthetic oligonucleotide
ggcacattctaatccattgccaccattcag

SEQ ID NO: 272795 - DNA, 30 bp, Artificial Sequence
  Synthetic oligonucleotide
accagaaaacgccccgtgatccgcattcag

SEQ ID NO: 272796 - DNA, 30 bp, Artificial Sequence
  Synthetic oligonucleotide
ccgcaggggctcggtcgcacagtgattcag

SEQ ID NO: 272797 - DNA, 30 bp, Artificial Sequence
  Synthetic oligonucleotide
acgttccttcggtgtaggcacgatattcag

SEQ ID NO: 272798 - DNA, 30 bp, Artificial Sequence
  Synthetic oligonucleotide
cacggaatacgccttgtaaaggctattcag

SEQ ID NO: 272799 - DNA, 30 bp, Artificial Sequence
  Synthetic oligonucleotide
gcttgcaataggatgggagcacagcttcag

SEQ ID NO: 272800 - DNA, 30 bp, Artificial Sequence
  Synthetic oligonucleotide
accctagcgtgaggctccatagcgcttcag

SEQ ID NO: 272801 - DNA, 30 bp, Artificial Sequence
  Synthetic oligonucleotide
atgtacagtgcgcatcggccatcgcttcag

SEQ ID NO: 272802 - DNA, 30 bp, Artificial Sequence
  Synthetic oligonucleotide
cgggagtttggcgctcacaccctgcttcag

SEQ ID NO: 272803 - DNA, 30 bp, Artificial Sequence
  Synthetic oligonucleotide
ctgttagggggcgtttgatagccagttcag

SEQ ID NO: 272804 - DNA, 30 bp, Artificial Sequence
  Synthetic oligonucleotide
taatcttacaagaagagtgttaacgttcag

SEQ ID NO: 272805 - DNA, 30 bp, Artificial Sequence
  Synthetic oligonucleotide
gaaaagtgccgctactcaaaagtggttcag

SEQ ID NO: 272806 - DNA, 30 bp, Artificial Sequence
  Synthetic oligonucleotide
taatgcatgcaattacgttgtaatgttcag

SEQ ID NO: 272807 - DNA, 30 bp, Artificial Sequence
  Synthetic oligonucleotide
cgtaatgttcctccttgggtgactgttcag

SEQ ID NO: 272808 - DNA, 30 bp, Artificial Sequence
  Synthetic oligonucleotide
atggtgtaatgccaataaactccatttcag

SEQ ID NO: 272809 - DNA, 30 bp, Artificial Sequence
  Synthetic oligonucleotide
agcgctatattttctcggcgggtatttcag

SEQ ID NO: 272810 - DNA, 30 bp, Artificial Sequence
  Synthetic oligonucleotide
ataagagtacctaccgcaggggtatttcag

SEQ ID NO: 272811 - DNA, 30 bp, Artificial Sequence
  Synthetic oligonucleotide
ctcgcggtctgcttaaaggttccctttcag

SEQ ID NO: 272812 - DNA, 30 bp, Artificial Sequence
  Synthetic oligonucleotide
tagtcaaccgacccactcagaagctttcag

SEQ ID NO: 272813 - DNA, 30 bp, Artificial Sequence
  Synthetic oligonucleotide
gctgaggagggtataccatggttctttcag

SEQ ID NO: 272814 - DNA, 30 bp, Artificial Sequence
  Synthetic oligonucleotide
atctgcacggattggcgtcacgcgtttcag

SEQ ID NO: 272815 - DNA, 30 bp, Artificial Sequence
  Synthetic oligonucleotide
gactgaaaccttgaattcattgcgtttcag

SEQ ID NO: 272816 - DNA, 30 bp, Artificial Sequence
  Synthetic oligonucleotide
tgtgctcgggacacgacaatggcttttcag

SEQ ID NO: 272817 - DNA, 29 bp, Artificial Sequence
  Synthetic oligonucleotide
ctaatacgggaccatgcctgggaaaagag

SEQ ID NO: 272818 - DNA, 30 bp, Artificial Sequence
  Synthetic oligonucleotide
ggtcggacaggtgtgcggaggtgaaaagag

SEQ ID NO: 272819 - DNA, 30 bp, Artificial Sequence
  Synthetic oligonucleotide
aaacataggattgggttgtggtgaaaagag

SEQ ID NO: 272820 - DNA, 30 bp, Artificial Sequence
  Synthetic oligonucleotide
tcgtataaagtttaaaagctgtgaaaagag

SEQ ID NO: 272821 - DNA, 30 bp, Artificial Sequence
  Synthetic oligonucleotide
ggcatgatttatggtccgatgataaaagag

SEQ ID NO: 272822 - DNA, 30 bp, Artificial Sequence
  Synthetic oligonucleotide
ctgttatccgatgaacttgtgttaaaagag

SEQ ID NO: 272823 - DNA, 30 bp, Artificial Sequence
  Synthetic oligonucleotide
tgtgcgcttagtcatccacaccccaaagag

SEQ ID NO: 272824 - DNA, 30 bp, Artificial Sequence
  Synthetic oligonucleotide
tgtttgtcccagaacccagcatccaaagag

SEQ ID NO: 272825 - DNA, 30 bp, Artificial Sequence
  Synthetic oligonucleotide
cccggtatgcgcgagtccatccagaaagag

SEQ ID NO: 272826 - DNA, 30 bp, Artificial Sequence
  Synthetic oligonucleotide
gctgttcgagctgtaaccgaggagaaagag

SEQ ID NO: 272827 - DNA, 30 bp, Artificial Sequence
  Synthetic oligonucleotide
ttacgtctacgattagtggctttgaaagag

SEQ ID NO: 272828 - DNA, 30 bp, Artificial Sequence
  Synthetic oligonucleotide
tatcaaggttgaccgatatgtaataaagag

SEQ ID NO: 272829 - DNA, 30 bp, Artificial Sequence
  Synthetic oligonucleotide
ctgtacccgggaggcgtctaggataaagag

SEQ ID NO: 272830 - DNA, 30 bp, Artificial Sequence
  Synthetic oligonucleotide
gcattgagtttcaggggcttaactaaagag

SEQ ID NO: 272831 - DNA, 30 bp, Artificial Sequence
  Synthetic oligonucleotide
ttcgacgagtgttattctcccactaaagag

SEQ ID NO: 272832 - DNA, 30 bp, Artificial Sequence
  Synthetic oligonucleotide
ggatagtcggtctagtcttcatgacaagag

SEQ ID NO: 272833 - DNA, 30 bp, Artificial Sequence
  Synthetic oligonucleotide
ctgcgtataagctaggctctgtgacaagag

SEQ ID NO: 272834 - DNA, 30 bp, Artificial Sequence
  Synthetic oligonucleotide
tattacgcgattcgcattgaactacaagag

SEQ ID NO: 272835 - DNA, 30 bp, Artificial Sequence
  Synthetic oligonucleotide
aatggttacgggatgttgggcttccaagag

SEQ ID NO: 272836 - DNA, 30 bp, Artificial Sequence
  Synthetic oligonucleotide
ggtactcctggttaggggttcaagcaagag

SEQ ID NO: 272837 - DNA, 30 bp, Artificial Sequence
  Synthetic oligonucleotide
tgtttgtgccgatcgcattacaggcaagag

SEQ ID NO: 272838 - DNA, 30 bp, Artificial Sequence
  Synthetic oligonucleotide
gttggctttgacacccagacaagtcaagag

SEQ ID NO: 272839 - DNA, 30 bp, Artificial Sequence
  Synthetic oligonucleotide
tcaaagaaaggaccgcagggataagaagag

SEQ ID NO: 272840 - DNA, 30 bp, Artificial Sequence
  Synthetic oligonucleotide
aattatgtacctgtaattcatcccgaagag

SEQ ID NO: 272841 - DNA, 30 bp, Artificial Sequence
  Synthetic oligonucleotide
gctctaagctcaggggttagacaggaagag

SEQ ID NO: 272842 - DNA, 30 bp, Artificial Sequence
  Synthetic oligonucleotide
acttccttcggctatcacttgatggaagag

SEQ ID NO: 272843 - DNA, 30 bp, Artificial Sequence
  Synthetic oligonucleotide
agatcgggagatactgtaaaagttgaagag

SEQ ID NO: 272844 - DNA, 30 bp, Artificial Sequence
  Synthetic oligonucleotide
acgtaaggttgacaccgcggttaataagag

SEQ ID NO: 272845 - DNA, 30 bp, Artificial Sequence
  Synthetic oligonucleotide
gatcctgtacccttcattccgccataagag

SEQ ID NO: 272846 - DNA, 30 bp, Artificial Sequence
  Synthetic oligonucleotide
cagctatatagtccaggctgtaagtaagag

SEQ ID NO: 272847 - DNA, 30 bp, Artificial Sequence
  Synthetic oligonucleotide
ttaaattaagagctgagaaaagcgtaagag

SEQ ID NO: 272848 - DNA, 29 bp, Artificial Sequence
  Synthetic oligonucleotide
atactactggaaggtaggggtattaagag

SEQ ID NO: 272849 - DNA, 30 bp, Artificial Sequence
  Synthetic oligonucleotide
tataagaagacaggtgattaccgaacagag

SEQ ID NO: 272850 - DNA, 30 bp, Artificial Sequence
  Synthetic oligonucleotide
gaaatcgtgcaaccgggtgtttagacagag

SEQ ID NO: 272851 - DNA, 30 bp, Artificial Sequence
  Synthetic oligonucleotide
gcttcgttcgtctgcgaaagtaacgcagag

SEQ ID NO: 272852 - DNA, 30 bp, Artificial Sequence
  Synthetic oligonucleotide
tggggtcctggagggcaatgccacgcagag

SEQ ID NO: 272853 - DNA, 30 bp, Artificial Sequence
  Synthetic oligonucleotide
ccgggtgttgtcaaaatatctggcgcagag

SEQ ID NO: 272854 - DNA, 30 bp, Artificial Sequence
  Synthetic oligonucleotide
agcttatgtgttaagtctagaacggcagag

SEQ ID NO: 272855 - DNA, 30 bp, Artificial Sequence
  Synthetic oligonucleotide
ttctagaataagacacactacatggcagag

SEQ ID NO: 272856 - DNA, 30 bp, Artificial Sequence
  Synthetic oligonucleotide
gagatgttggcgggaatcttcccatcagag

SEQ ID NO: 272857 - DNA, 30 bp, Artificial Sequence
  Synthetic oligonucleotide
acgttcgcacggctccgacaggggtcagag

SEQ ID NO: 272858 - DNA, 30 bp, Artificial Sequence
  Synthetic oligonucleotide
tcctgctgtacagtaaggtgtttttcagag

SEQ ID NO: 272859 - DNA, 30 bp, Artificial Sequence
  Synthetic oligonucleotide
ttatggagctcgaggtgttttgcaagagag

SEQ ID NO: 272860 - DNA, 30 bp, Artificial Sequence
  Synthetic oligonucleotide
gtcccgtatggtgacttcttatcaagagag

SEQ ID NO: 272861 - DNA, 30 bp, Artificial Sequence
  Synthetic oligonucleotide
tactaaacgcttagtctccgccgcagagag

SEQ ID NO: 272862 - DNA, 30 bp, Artificial Sequence
  Synthetic oligonucleotide
cccgtgtaggtagggacccaatagagagag

SEQ ID NO: 272863 - DNA, 30 bp, Artificial Sequence
  Synthetic oligonucleotide
ttcgagctctcattagctttgtcacgagag

SEQ ID NO: 272864 - DNA, 30 bp, Artificial Sequence
  Synthetic oligonucleotide
gagagttgcggtgcctgagagttgcgagag

SEQ ID NO: 272865 - DNA, 30 bp, Artificial Sequence
  Synthetic oligonucleotide
gtaatggggccgacccctagatgcggagag

SEQ ID NO: 272866 - DNA, 30 bp, Artificial Sequence
  Synthetic oligonucleotide
ctggtgttaccatacacggagcagggagag

SEQ ID NO: 272867 - DNA, 30 bp, Artificial Sequence
  Synthetic oligonucleotide
atgaaggtaattgcgctacatactggagag

SEQ ID NO: 272868 - DNA, 30 bp, Artificial Sequence
  Synthetic oligonucleotide
agatggtaaggttcatagagggtatgagag

SEQ ID NO: 272869 - DNA, 30 bp, Artificial Sequence
  Synthetic oligonucleotide
tcgatccaagtgattttgggcttatgagag

SEQ ID NO: 272870 - DNA, 30 bp, Artificial Sequence
  Synthetic oligonucleotide
agtcggggcgccgaccgggcgagctgagag

SEQ ID NO: 272871 - DNA, 30 bp, Artificial Sequence
  Synthetic oligonucleotide
gtattgacctggcagaactgtcattgagag

SEQ ID NO: 272872 - DNA, 30 bp, Artificial Sequence
  Synthetic oligonucleotide
taccttgcgcaccctactaatgcaatagag

SEQ ID NO: 272873 - DNA, 30 bp, Artificial Sequence
  Synthetic oligonucleotide
ctgtgacgccgggaatggctatacatagag

SEQ ID NO: 272874 - DNA, 30 bp, Artificial Sequence
  Synthetic oligonucleotide
gaacagatctgctaatgctacatgatagag

SEQ ID NO: 272875 - DNA, 30 bp, Artificial Sequence
  Synthetic oligonucleotide
ttatttgaccgattaaaatggagtatagag

SEQ ID NO: 272876 - DNA, 30 bp, Artificial Sequence
  Synthetic oligonucleotide
atcgattgcacgacggaaatttgtatagag

SEQ ID NO: 272877 - DNA, 30 bp, Artificial Sequence
  Synthetic oligonucleotide
gcaccgtcagttcgataaaacgaactagag

SEQ ID NO: 272878 - DNA, 30 bp, Artificial Sequence
  Synthetic oligonucleotide
cgatttgaggactttgggttaaacctagag

SEQ ID NO: 272879 - DNA, 30 bp, Artificial Sequence
  Synthetic oligonucleotide
tgttgggatatggggggaagtatcctagag

SEQ ID NO: 272880 - DNA, 30 bp, Artificial Sequence
  Synthetic oligonucleotide
taactcagtgtctgcttggttacgctagag

SEQ ID NO: 272881 - DNA, 30 bp, Artificial Sequence
  Synthetic oligonucleotide
tgagtattgtccccgttcgccgaagtagag

SEQ ID NO: 272882 - DNA, 30 bp, Artificial Sequence
  Synthetic oligonucleotide
tggagtacatatcattagatttaagtagag

SEQ ID NO: 272883 - DNA, 30 bp, Artificial Sequence
  Synthetic oligonucleotide
gaccaatgggaatgcgacccctccgtagag

SEQ ID NO: 272884 - DNA, 30 bp, Artificial Sequence
  Synthetic oligonucleotide
ctgggcgttgcgaggccacggggggtagag

SEQ ID NO: 272885 - DNA, 30 bp, Artificial Sequence
  Synthetic oligonucleotide
ggcatagactggctatcaactcttgtagag

SEQ ID NO: 272886 - DNA, 30 bp, Artificial Sequence
  Synthetic oligonucleotide
gctggctgaaaggttgtatcgtgattagag

SEQ ID NO: 272887 - DNA, 30 bp, Artificial Sequence
  Synthetic oligonucleotide
tattccgtagaggcgcaggcaaagttagag

SEQ ID NO: 272888 - DNA, 30 bp, Artificial Sequence
  Synthetic oligonucleotide
cgtagtgtttaggacatgtatgggttagag

SEQ ID NO: 272889 - DNA, 30 bp, Artificial Sequence
  Synthetic oligonucleotide
ccctggcagggtcgggaaactgtgttagag

SEQ ID NO: 272890 - DNA, 30 bp, Artificial Sequence
  Synthetic oligonucleotide
tcccgtgcgggaacatggtcacatttagag

SEQ ID NO: 272891 - DNA, 30 bp, Artificial Sequence
  Synthetic oligonucleotide
actcgagtagtgatgatgtgacatttagag

SEQ ID NO: 272892 - DNA, 30 bp, Artificial Sequence
  Synthetic oligonucleotide
ttgataaaatgcgttacagctactttagag

SEQ ID NO: 272893 - DNA, 30 bp, Artificial Sequence
  Synthetic oligonucleotide
tgggcattccggtattttgtagctttagag

SEQ ID NO: 272894 - DNA, 30 bp, Artificial Sequence
  Synthetic oligonucleotide
cttcagacttacatctcagcggctttagag

SEQ ID NO: 272895 - DNA, 30 bp, Artificial Sequence
  Synthetic oligonucleotide
accttgaagggacattcttcccaaaacgag

SEQ ID NO: 272896 - DNA, 30 bp, Artificial Sequence
  Synthetic oligonucleotide
accaaggccaggtacctagctccaaacgag

SEQ ID NO: 272897 - DNA, 30 bp, Artificial Sequence
  Synthetic oligonucleotide
tacactttccggcattagccaaacaacgag

SEQ ID NO: 272898 - DNA, 30 bp, Artificial Sequence
  Synthetic oligonucleotide
tcattaccattgttggggttcatcaacgag

SEQ ID NO: 272899 - DNA, 30 bp, Artificial Sequence
  Synthetic oligonucleotide
atcaacttgttcgacgtgatcgcgaacgag

SEQ ID NO: 272900 - DNA, 30 bp, Artificial Sequence
  Synthetic oligonucleotide
cgtaaccccggtgtaccgtcatcgaacgag

SEQ ID NO: 272901 - DNA, 30 bp, Artificial Sequence
  Synthetic oligonucleotide
ctccgttctgtttttgtataagggaacgag

SEQ ID NO: 272902 - DNA, 30 bp, Artificial Sequence
  Synthetic oligonucleotide
gtgtgaaatcgccatggcggtggccacgag

SEQ ID NO: 272903 - DNA, 30 bp, Artificial Sequence
  Synthetic oligonucleotide
aacgggtcgctttctaccgtaacgcacgag

SEQ ID NO: 272904 - DNA, 30 bp, Artificial Sequence
  Synthetic oligonucleotide
ctcttggtacacaagattaagaaagacgag

SEQ ID NO: 272905 - DNA, 30 bp, Artificial Sequence
  Synthetic oligonucleotide
cgaatttcacgttacaagaggtgagacgag

SEQ ID NO: 272906 - DNA, 30 bp, Artificial Sequence
  Synthetic oligonucleotide
ggcggattgtcgttgtcagtgcacgacgag

SEQ ID NO: 272907 - DNA, 30 bp, Artificial Sequence
  Synthetic oligonucleotide
ctcggcttcgatgcaatgttggaatacgag

SEQ ID NO: 272908 - DNA, 30 bp, Artificial Sequence
  Synthetic oligonucleotide
gttccgccgaaacaccgttgttaatacgag

SEQ ID NO: 272909 - DNA, 30 bp, Artificial Sequence
  Synthetic oligonucleotide
gttacactgctcgcacactgcagctacgag

SEQ ID NO: 272910 - DNA, 30 bp, Artificial Sequence
  Synthetic oligonucleotide
attacgaaggtgttccttcggcgctacgag

SEQ ID NO: 272911 - DNA, 30 bp, Artificial Sequence
  Synthetic oligonucleotide
atatcgggaatctgcagagcagtgtacgag

SEQ ID NO: 272912 - DNA, 30 bp, Artificial Sequence
  Synthetic oligonucleotide
cgacttattgtcaaatgcgaactttacgag

SEQ ID NO: 272913 - DNA, 30 bp, Artificial Sequence
  Synthetic oligonucleotide
gcgctacgtcgtccggtaccggtcaccgag

SEQ ID NO: 272914 - DNA, 30 bp, Artificial Sequence
  Synthetic oligonucleotide
tagagaaacgagccagcctttagtaccgag

SEQ ID NO: 272915 - DNA, 30 bp, Artificial Sequence
  Synthetic oligonucleotide
tcactgtccaggtggggatgggttaccgag

SEQ ID NO: 272916 - DNA, 30 bp, Artificial Sequence
  Synthetic oligonucleotide
aaagttaatggttaccttgcggcgcccgag

SEQ ID NO: 272917 - DNA, 30 bp, Artificial Sequence
  Synthetic oligonucleotide
tctcatccaaatgataggtttgcgcccgag

SEQ ID NO: 272918 - DNA, 30 bp, Artificial Sequence
  Synthetic oligonucleotide
gcctgttttgaagctttctgtccagccgag

SEQ ID NO: 272919 - DNA, 30 bp, Artificial Sequence
  Synthetic oligonucleotide
tattaattgggatgagcaattcacgccgag

SEQ ID NO: 272920 - DNA, 30 bp, Artificial Sequence
  Synthetic oligonucleotide
ttgcctgtttatgcgtctcgacgcgccgag

SEQ ID NO: 272921 - DNA, 30 bp, Artificial Sequence
  Synthetic oligonucleotide
ggtagggctggggtgactgatgaatccgag

SEQ ID NO: 272922 - DNA, 30 bp, Artificial Sequence
  Synthetic oligonucleotide
aaagtataagctaaaccttgcttatccgag

SEQ ID NO: 272923 - DNA, 30 bp, Artificial Sequence
  Synthetic oligonucleotide
tagcccaagcggccgtctaatggttccgag

SEQ ID NO: 272924 - DNA, 30 bp, Artificial Sequence
  Synthetic oligonucleotide
acgaccgtcctgttccataaattttccgag

SEQ ID NO: 272925 - DNA, 30 bp, Artificial Sequence
  Synthetic oligonucleotide
gacacttttaggcagaaggtgctaagcgag

SEQ ID NO: 272926 - DNA, 30 bp, Artificial Sequence
  Synthetic oligonucleotide
gcccttgctattaccttccctcccagcgag

SEQ ID NO: 272927 - DNA, 30 bp, Artificial Sequence
  Synthetic oligonucleotide
gataactgtatgggtcagcagtccagcgag

SEQ ID NO: 272928 - DNA, 30 bp, Artificial Sequence
  Synthetic oligonucleotide
tatggcagtccatattggaactgcagcgag

SEQ ID NO: 272929 - DNA, 30 bp, Artificial Sequence
  Synthetic oligonucleotide
gcgaacgaggagcgagatggctcgcgcgag

SEQ ID NO: 272930 - DNA, 30 bp, Artificial Sequence
  Synthetic oligonucleotide
aacacatttcggtagccaccgatgcgcgag

SEQ ID NO: 272931 - DNA, 30 bp, Artificial Sequence
  Synthetic oligonucleotide
agcgtataaacaagcgtgttttctcgcgag

SEQ ID NO: 272932 - DNA, 30 bp, Artificial Sequence
  Synthetic oligonucleotide
ggcctactagtttcgagaaaaaacggcgag

SEQ ID NO: 272933 - DNA, 30 bp, Artificial Sequence
  Synthetic oligonucleotide
acctacagtcacaacgctggcttcggcgag

SEQ ID NO: 272934 - DNA, 30 bp, Artificial Sequence
  Synthetic oligonucleotide
aaaactacagtgccaagtcacacatgcgag

SEQ ID NO: 272935 - DNA, 30 bp, Artificial Sequence
  Synthetic oligonucleotide
agctcgatgacccgctaggtgtcatgcgag

SEQ ID NO: 272936 - DNA, 30 bp, Artificial Sequence
  Synthetic oligonucleotide
cgggtatggggcacccagggaacgtgcgag

SEQ ID NO: 272937 - DNA, 30 bp, Artificial Sequence
  Synthetic oligonucleotide
agccggacaggtggttccccagggtgcgag

SEQ ID NO: 272938 - DNA, 30 bp, Artificial Sequence
  Synthetic oligonucleotide
ttttcggaggttccgaaggacctgtgcgag

SEQ ID NO: 272939 - DNA, 30 bp, Artificial Sequence
  Synthetic oligonucleotide
aagccgggctcgcacgtatctgattgcgag

SEQ ID NO: 272940 - DNA, 30 bp, Artificial Sequence
  Synthetic oligonucleotide
ccgattccttagaaagttttaagaatcgag

SEQ ID NO: 272941 - DNA, 30 bp, Artificial Sequence
  Synthetic oligonucleotide
actatttgcttccgcgttgggataatcgag

SEQ ID NO: 272942 - DNA, 30 bp, Artificial Sequence
  Synthetic oligonucleotide
gtgtggtaaaattcggccacggtaatcgag

SEQ ID NO: 272943 - DNA, 30 bp, Artificial Sequence
  Synthetic oligonucleotide
ggtgtttggccaatactggtgaatatcgag

SEQ ID NO: 272944 - DNA, 30 bp, Artificial Sequence
  Synthetic oligonucleotide
tgcgtaggcaatcgagtcagtgcactcgag

SEQ ID NO: 272945 - DNA, 30 bp, Artificial Sequence
  Synthetic oligonucleotide
gacgtgactgaagctacggtaactctcgag

SEQ ID NO: 272946 - DNA, 30 bp, Artificial Sequence
  Synthetic oligonucleotide
atgcgttgtaaaacgccctcgactctcgag

SEQ ID NO: 272947 - DNA, 30 bp, Artificial Sequence
  Synthetic oligonucleotide
actatggtagacacgctctttaaagtcgag

SEQ ID NO: 272948 - DNA, 30 bp, Artificial Sequence
  Synthetic oligonucleotide
catcaagtgttcgcgcgtgggtgtgtcgag

SEQ ID NO: 272949 - DNA, 30 bp, Artificial Sequence
  Synthetic oligonucleotide
gttctgctgggtcgggccggagaattcgag

SEQ ID NO: 272950 - DNA, 30 bp, Artificial Sequence
  Synthetic oligonucleotide
gtagcactgaggagtcatgattgattcgag

SEQ ID NO: 272951 - DNA, 30 bp, Artificial Sequence
  Synthetic oligonucleotide
ccacaggccctaagattttcattattcgag

SEQ ID NO: 272952 - DNA, 30 bp, Artificial Sequence
  Synthetic oligonucleotide
ttcgctagatgataattggctgacttcgag

SEQ ID NO: 272953 - DNA, 30 bp, Artificial Sequence
  Synthetic oligonucleotide
aaatcggaggggcataggtccctcttcgag

SEQ ID NO: 272954 - DNA, 30 bp, Artificial Sequence
  Synthetic oligonucleotide
atttcggaacgtggtctatcctagttcgag

SEQ ID NO: 272955 - DNA, 30 bp, Artificial Sequence
  Synthetic oligonucleotide
gtggtagccggcataaaaatttatttcgag

SEQ ID NO: 272956 - DNA, 30 bp, Artificial Sequence
  Synthetic oligonucleotide
gccacacagggcagactacactctttcgag

SEQ ID NO: 272957 - DNA, 30 bp, Artificial Sequence
  Synthetic oligonucleotide
ttagtacgtgtaaagccgcgtcacaaggag

SEQ ID NO: 272958 - DNA, 30 bp, Artificial Sequence
  Synthetic oligonucleotide
actgggtggaaccctgtagcatccaaggag

SEQ ID NO: 272959 - DNA, 30 bp, Artificial Sequence
  Synthetic oligonucleotide
aaattatacagtaagtgttgagataaggag

SEQ ID NO: 272960 - DNA, 30 bp, Artificial Sequence
  Synthetic oligonucleotide
acttctcgcagcctacgagtgtataaggag

SEQ ID NO: 272961 - DNA, 30 bp, Artificial Sequence
  Synthetic oligonucleotide
tcctgacagagccccggtaggtgtaaggag

SEQ ID NO: 272962 - DNA, 30 bp, Artificial Sequence
  Synthetic oligonucleotide
tatacccaagaccacgtgtaactgcaggag

SEQ ID NO: 272963 - DNA, 30 bp, Artificial Sequence
  Synthetic oligonucleotide
ctatttgcgggcagggctgggaatcaggag

SEQ ID NO: 272964 - DNA, 30 bp, Artificial Sequence
  Synthetic oligonucleotide
caggttccccattaaaccctatgtcaggag

SEQ ID NO: 272965 - DNA, 30 bp, Artificial Sequence
  Synthetic oligonucleotide
attcggctcgttccaataatgtacgaggag

SEQ ID NO: 272966 - DNA, 30 bp, Artificial Sequence
  Synthetic oligonucleotide
tgggcaactggaagctttttctgggaggag

SEQ ID NO: 272967 - DNA, 30 bp, Artificial Sequence
  Synthetic oligonucleotide
gtagccgggtgactggaatttatggaggag

SEQ ID NO: 272968 - DNA, 30 bp, Artificial Sequence
  Synthetic oligonucleotide
gagtaatgaagcacaaacctttctgaggag

SEQ ID NO: 272969 - DNA, 30 bp, Artificial Sequence
  Synthetic oligonucleotide
tagggggcaacgctggtcgggggataggag

SEQ ID NO: 272970 - DNA, 30 bp, Artificial Sequence
  Synthetic oligonucleotide
acattcatggggtcgacactcatataggag

SEQ ID NO: 272971 - DNA, 30 bp, Artificial Sequence
  Synthetic oligonucleotide
gtctcccggaacgtatgtatttagtaggag

SEQ ID NO: 272972 - DNA, 30 bp, Artificial Sequence
  Synthetic oligonucleotide
ttgctttaaaatgcgccccatatgtaggag

SEQ ID NO: 272973 - DNA, 30 bp, Artificial Sequence
  Synthetic oligonucleotide
aaaattagagccttgtgtaggcattaggag

SEQ ID NO: 272974 - DNA, 30 bp, Artificial Sequence
  Synthetic oligonucleotide
cgtcggcacagcatatatgaacgttaggag

SEQ ID NO: 272975 - DNA, 30 bp, Artificial Sequence
  Synthetic oligonucleotide
atggggatttgatatttataatgttaggag

SEQ ID NO: 272976 - DNA, 30 bp, Artificial Sequence
  Synthetic oligonucleotide
ggtccttgtaagccccgaatcgtttaggag

SEQ ID NO: 272977 - DNA, 30 bp, Artificial Sequence
  Synthetic oligonucleotide
accaaatcaatgtgacgcttttaaacggag

SEQ ID NO: 272978 - DNA, 30 bp, Artificial Sequence
  Synthetic oligonucleotide
tcagatggacaatactccattggaacggag

SEQ ID NO: 272979 - DNA, 30 bp, Artificial Sequence
  Synthetic oligonucleotide
tacgctgaatggacccggaatgtaacggag

SEQ ID NO: 272980 - DNA, 30 bp, Artificial Sequence
  Synthetic oligonucleotide
taggagtcttaagcagtacttcgcacggag

SEQ ID NO: 272981 - DNA, 30 bp, Artificial Sequence
  Synthetic oligonucleotide
tacccaataattttaggctcttatacggag

SEQ ID NO: 272982 - DNA, 30 bp, Artificial Sequence
  Synthetic oligonucleotide
tggctgctgggttatttgattggtacggag

SEQ ID NO: 272983 - DNA, 30 bp, Artificial Sequence
  Synthetic oligonucleotide
gtttttgacggggcagagcgtgacccggag

SEQ ID NO: 272984 - DNA, 30 bp, Artificial Sequence
  Synthetic oligonucleotide
atttgcggtctcacggggctatgagcggag

SEQ ID NO: 272985 - DNA, 30 bp, Artificial Sequence
  Synthetic oligonucleotide
cagcccatcggcgtggctctgctggcggag

SEQ ID NO: 272986 - DNA, 30 bp, Artificial Sequence
  Synthetic oligonucleotide
gtaataatcacggtcgcgacttctgcggag

SEQ ID NO: 272987 - DNA, 30 bp, Artificial Sequence
  Synthetic oligonucleotide
atgtgaaacttttagctattgcaatcggag

SEQ ID NO: 272988 - DNA, 30 bp, Artificial Sequence
  Synthetic oligonucleotide
atgtactcacacaacgatctctaatcggag

SEQ ID NO: 272989 - DNA, 30 bp, Artificial Sequence
  Synthetic oligonucleotide
gaaatatgactcgagaaaggtccatcggag

SEQ ID NO: 272990 - DNA, 30 bp, Artificial Sequence
  Synthetic oligonucleotide
cgcatcgggatagctcttctggattcggag

SEQ ID NO: 272991 - DNA, 30 bp, Artificial Sequence
  Synthetic oligonucleotide
agaattgtgaatcgatccaagcgttcggag

SEQ ID NO: 272992 - DNA, 30 bp, Artificial Sequence
  Synthetic oligonucleotide
gagtgtggcaaactggtcacgcaaagggag

SEQ ID NO: 272993 - DNA, 30 bp, Artificial Sequence
  Synthetic oligonucleotide
cggccgcgttccttataggctgtaagggag

SEQ ID NO: 272994 - DNA, 30 bp, Artificial Sequence
  Synthetic oligonucleotide
ttggtcacgttagtctggaagcacagggag

SEQ ID NO: 272995 - DNA, 30 bp, Artificial Sequence
  Synthetic oligonucleotide
gccatcgaccatttagttacagccagggag

SEQ ID NO: 272996 - DNA, 30 bp, Artificial Sequence
  Synthetic oligonucleotide
agatttggcctaacgaatgtgcatagggag

SEQ ID NO: 272997 - DNA, 30 bp, Artificial Sequence
  Synthetic oligonucleotide
tactttgagcggggtctatgttgtagggag

SEQ ID NO: 272998 - DNA, 30 bp, Artificial Sequence
  Synthetic oligonucleotide
tgcactgtacttacacattagtttagggag

SEQ ID NO: 272999 - DNA, 30 bp, Artificial Sequence
  Synthetic oligonucleotide
aagcacgattctaatttataacctcgggag

SEQ ID NO: 273000 - DNA, 30 bp, Artificial Sequence
  Synthetic oligonucleotide
gctgtgcggaggtagaggttcagtcgggag

SEQ ID NO: 273001 - DNA, 30 bp, Artificial Sequence
  Synthetic oligonucleotide
gcaagttgacgctgtcgatgaattcgggag

SEQ ID NO: 273002 - DNA, 30 bp, Artificial Sequence
  Synthetic oligonucleotide
cgcatgacgcgcatgccgagttaaggggag

SEQ ID NO: 273003 - DNA, 30 bp, Artificial Sequence
  Synthetic oligonucleotide
gttagtgtcgcggctctgagtttcggggag

SEQ ID NO: 273004 - DNA, 30 bp, Artificial Sequence
  Synthetic oligonucleotide
ggaaacataagtgtttgtccgctgggggag

SEQ ID NO: 273005 - DNA, 30 bp, Artificial Sequence
  Synthetic oligonucleotide
tttgggtagaatagatctgtgtatggggag

SEQ ID NO: 273006 - DNA, 30 bp, Artificial Sequence
  Synthetic oligonucleotide
tagtgaggtttaaccgtacctcttggggag

SEQ ID NO: 273007 - DNA, 30 bp, Artificial Sequence
  Synthetic oligonucleotide
aggtggaacacaagttgccgcagatgggag

SEQ ID NO: 273008 - DNA, 30 bp, Artificial Sequence
  Synthetic oligonucleotide
cgaacactgccatctttctctctatgggag

SEQ ID NO: 273009 - DNA, 30 bp, Artificial Sequence
  Synthetic oligonucleotide
gtaggaatgtgtcctctaatcttctgggag

SEQ ID NO: 273010 - DNA, 30 bp, Artificial Sequence
  Synthetic oligonucleotide
gagctcggtgctaatgacactgagtgggag

SEQ ID NO: 273011 - DNA, 30 bp, Artificial Sequence
  Synthetic oligonucleotide
gacgcggagtagcgccaatcttagtgggag

SEQ ID NO: 273012 - DNA, 30 bp, Artificial Sequence
  Synthetic oligonucleotide
acacgcggccgtcgcgtttgaaattgggag

SEQ ID NO: 273013 - DNA, 30 bp, Artificial Sequence
  Synthetic oligonucleotide
actctcgaataacttcaggtgctttgggag

SEQ ID NO: 273014 - DNA, 30 bp, Artificial Sequence
  Synthetic oligonucleotide
ctatggcggaggcctgggtagttttgggag

SEQ ID NO: 273015 - DNA, 30 bp, Artificial Sequence
  Synthetic oligonucleotide
gatcggcgcgaatgcttgtaatgcatggag

SEQ ID NO: 273016 - DNA, 30 bp, Artificial Sequence
  Synthetic oligonucleotide
tatgtacatatttggatgctggtcatggag

SEQ ID NO: 273017 - DNA, 30 bp, Artificial Sequence
  Synthetic oligonucleotide
atttggggccgtggggctcagaagatggag

SEQ ID NO: 273018 - DNA, 30 bp, Artificial Sequence
  Synthetic oligonucleotide
cgcttcctgtaaaaggaagctccgatggag

SEQ ID NO: 273019 - DNA, 30 bp, Artificial Sequence
  Synthetic oligonucleotide
tactttgattattggaatgccactatggag

SEQ ID NO: 273020 - DNA, 30 bp, Artificial Sequence
  Synthetic oligonucleotide
cggtcgaatgcaaacggggcttctatggag

SEQ ID NO: 273021 - DNA, 30 bp, Artificial Sequence
  Synthetic oligonucleotide
aaacagcagaatgggtatttccttatggag

SEQ ID NO: 273022 - DNA, 30 bp, Artificial Sequence
  Synthetic oligonucleotide
aattgcaggtagacgcttggcgtactggag

SEQ ID NO: 273023 - DNA, 30 bp, Artificial Sequence
  Synthetic oligonucleotide
gacatggttgaaaagccggtgttgctggag

SEQ ID NO: 273024 - DNA, 30 bp, Artificial Sequence
  Synthetic oligonucleotide
ttaatactacaatccggggaaaccgtggag

SEQ ID NO: 273025 - DNA, 30 bp, Artificial Sequence
  Synthetic oligonucleotide
aggtaaacagtggtagtaggcggcgtggag

SEQ ID NO: 273026 - DNA, 30 bp, Artificial Sequence
  Synthetic oligonucleotide
gagacttgagcatgaattgtaccggtggag

SEQ ID NO: 273027 - DNA, 30 bp, Artificial Sequence
  Synthetic oligonucleotide
ggcggggctaaggaaggtgcggcggtggag

SEQ ID NO: 273028 - DNA, 30 bp, Artificial Sequence
  Synthetic oligonucleotide
agctaactcagggagccgttctcggtggag

SEQ ID NO: 273029 - DNA, 30 bp, Artificial Sequence
  Synthetic oligonucleotide
ctcgggtttctacctcagaacggggtggag

SEQ ID NO: 273030 - DNA, 30 bp, Artificial Sequence
  Synthetic oligonucleotide
ttcctcgggtcccaggctgaccatgtggag

SEQ ID NO: 273031 - DNA, 30 bp, Artificial Sequence
  Synthetic oligonucleotide
gaaaaaccccccacctagatgggtgtggag

SEQ ID NO: 273032 - DNA, 30 bp, Artificial Sequence
  Synthetic oligonucleotide
cgggggttagcgggtctaaagtcattggag

SEQ ID NO: 273033 - DNA, 30 bp, Artificial Sequence
  Synthetic oligonucleotide
taaaacatgcgaacatgctagtccttggag

SEQ ID NO: 273034 - DNA, 30 bp, Artificial Sequence
  Synthetic oligonucleotide
gggggtctccaggacgcccttagaaatgag

SEQ ID NO: 273035 - DNA, 30 bp, Artificial Sequence
  Synthetic oligonucleotide
cttcacgtaaatgggttttcaataaatgag

SEQ ID NO: 273036 - DNA, 30 bp, Artificial Sequence
  Synthetic oligonucleotide
tttctgatagtaacagatagtgacaatgag

SEQ ID NO: 273037 - DNA, 30 bp, Artificial Sequence
  Synthetic oligonucleotide
aagagtttcgggataggggtccagaatgag

SEQ ID NO: 273038 - DNA, 30 bp, Artificial Sequence
  Synthetic oligonucleotide
tgtcggttgttgctttgcacatagaatgag

SEQ ID NO: 273039 - DNA, 30 bp, Artificial Sequence
  Synthetic oligonucleotide
aacagctagtatttaggcctcaggaatgag

SEQ ID NO: 273040 - DNA, 30 bp, Artificial Sequence
  Synthetic oligonucleotide
acgttagggcagagtaagcatactaatgag

SEQ ID NO: 273041 - DNA, 30 bp, Artificial Sequence
  Synthetic oligonucleotide
ctgacttcctgtgtttctgagtgtaatgag

SEQ ID NO: 273042 - DNA, 30 bp, Artificial Sequence
  Synthetic oligonucleotide
acgacgtgtccgagtgttgctttacatgag

SEQ ID NO: 273043 - DNA, 30 bp, Artificial Sequence
  Synthetic oligonucleotide
ctgaccttccaacctatttgatcgcatgag

SEQ ID NO: 273044 - DNA, 30 bp, Artificial Sequence
  Synthetic oligonucleotide
agaatctggaccggaactacgaatcatgag

SEQ ID NO: 273045 - DNA, 30 bp, Artificial Sequence
  Synthetic oligonucleotide
ttgcggactccggatctgtcgtgtcatgag

SEQ ID NO: 273046 - DNA, 30 bp, Artificial Sequence
  Synthetic oligonucleotide
taagcaggacacacatgtgcgcttcatgag

SEQ ID NO: 273047 - DNA, 30 bp, Artificial Sequence
  Synthetic oligonucleotide
gatatgcgttaacctcgcttatgagatgag

SEQ ID NO: 273048 - DNA, 30 bp, Artificial Sequence
  Synthetic oligonucleotide
acatgtgtgtggttgttccatttagatgag

SEQ ID NO: 273049 - DNA, 30 bp, Artificial Sequence
  Synthetic oligonucleotide
tcctaagaccgagttgccgcgtacgatgag

SEQ ID NO: 273050 - DNA, 30 bp, Artificial Sequence
  Synthetic oligonucleotide
ttcaggactataacactgtttgcggatgag

SEQ ID NO: 273051 - DNA, 30 bp, Artificial Sequence
  Synthetic oligonucleotide
ggaaacaggtcgcagcctgcgtcggatgag

SEQ ID NO: 273052 - DNA, 30 bp, Artificial Sequence
  Synthetic oligonucleotide
cacataatggaaccagaccaattggatgag

SEQ ID NO: 273053 - DNA, 30 bp, Artificial Sequence
  Synthetic oligonucleotide
attgtgacctcgatcttacacacatatgag

SEQ ID NO: 273054 - DNA, 30 bp, Artificial Sequence
  Synthetic oligonucleotide
gacggtgagcagtccaatagaggatatgag

SEQ ID NO: 273055 - DNA, 30 bp, Artificial Sequence
  Synthetic oligonucleotide
acatggaggggtcttagtattaattatgag

SEQ ID NO: 273056 - DNA, 30 bp, Artificial Sequence
  Synthetic oligonucleotide
ggctgaggtctttgctagacctaaactgag

SEQ ID NO: 273057 - DNA, 30 bp, Artificial Sequence
  Synthetic oligonucleotide
gtttcaatcagttgaggattgcgcactgag

SEQ ID NO: 273058 - DNA, 30 bp, Artificial Sequence
  Synthetic oligonucleotide
agcaacgtcacttataaggagacgactgag

SEQ ID NO: 273059 - DNA, 30 bp, Artificial Sequence
  Synthetic oligonucleotide
aagatcgccaggctgtcttatgtgactgag

SEQ ID NO: 273060 - DNA, 30 bp, Artificial Sequence
  Synthetic oligonucleotide
cagtgcgcccaccgtggtgctaaccctgag

SEQ ID NO: 273061 - DNA, 30 bp, Artificial Sequence
  Synthetic oligonucleotide
gccgaatcgtagttcggtcgtagagctgag

SEQ ID NO: 273062 - DNA, 30 bp, Artificial Sequence
  Synthetic oligonucleotide
agccgcacaccccgcgactaacccgctgag

SEQ ID NO: 273063 - DNA, 30 bp, Artificial Sequence
  Synthetic oligonucleotide
ttttcggagtggtagatataacatgctgag

SEQ ID NO: 273064 - DNA, 30 bp, Artificial Sequence
  Synthetic oligonucleotide
tgttgcttgaaattacagagtttatctgag

SEQ ID NO: 273065 - DNA, 30 bp, Artificial Sequence
  Synthetic oligonucleotide
cgatatgtcatattctttcatgagtctgag

SEQ ID NO: 273066 - DNA, 30 bp, Artificial Sequence
  Synthetic oligonucleotide
aatccgtcattaggtgggaaaccgtctgag

SEQ ID NO: 273067 - DNA, 30 bp, Artificial Sequence
  Synthetic oligonucleotide
ctcatcacgcgcaagactgatgtgtctgag

SEQ ID NO: 273068 - DNA, 30 bp, Artificial Sequence
  Synthetic oligonucleotide
cgtcgcgagtctccggaacgacgttctgag

SEQ ID NO: 273069 - DNA, 30 bp, Artificial Sequence
  Synthetic oligonucleotide
taacttggcttgggttgacaaaaaagtgag

SEQ ID NO: 273070 - DNA, 30 bp, Artificial Sequence
  Synthetic oligonucleotide
ctcaggggaagcggtaatcgaggcagtgag

SEQ ID NO: 273071 - DNA, 30 bp, Artificial Sequence
  Synthetic oligonucleotide
aaaataaacatgatactacctggcagtgag

SEQ ID NO: 273072 - DNA, 30 bp, Artificial Sequence
  Synthetic oligonucleotide
aagtacccggaattcaagctatagagtgag

SEQ ID NO: 273073 - DNA, 30 bp, Artificial Sequence
  Synthetic oligonucleotide
tcggacatgagtgttatactcggccgtgag

SEQ ID NO: 273074 - DNA, 30 bp, Artificial Sequence
  Synthetic oligonucleotide
acttcgagttttcgtgtgattaaaggtgag

SEQ ID NO: 273075 - DNA, 30 bp, Artificial Sequence
  Synthetic oligonucleotide
gaatgtcagaggacctacagttgaggtgag

SEQ ID NO: 273076 - DNA, 30 bp, Artificial Sequence
  Synthetic oligonucleotide
acggtcttcgaattgttgtgtaacggtgag

SEQ ID NO: 273077 - DNA, 30 bp, Artificial Sequence
  Synthetic oligonucleotide
tatacatgtcgttaggtcggcgacggtgag

SEQ ID NO: 273078 - DNA, 30 bp, Artificial Sequence
  Synthetic oligonucleotide
ctatcatattgagcatttctaggcggtgag

SEQ ID NO: 273079 - DNA, 30 bp, Artificial Sequence
  Synthetic oligonucleotide
ttggagcggataaatctctctttcggtgag

SEQ ID NO: 273080 - DNA, 30 bp, Artificial Sequence
  Synthetic oligonucleotide
ttcctgggaaattatttttactagggtgag

SEQ ID NO: 273081 - DNA, 30 bp, Artificial Sequence
  Synthetic oligonucleotide
actctaattctgtaagcgaagacctgtgag

SEQ ID NO: 273082 - DNA, 30 bp, Artificial Sequence
  Synthetic oligonucleotide
ttctaacaacgctattaagcggggtgtgag

SEQ ID NO: 273083 - DNA, 30 bp, Artificial Sequence
  Synthetic oligonucleotide
aaggtccggcttgtcgctgagatgtgtgag

SEQ ID NO: 273084 - DNA, 30 bp, Artificial Sequence
  Synthetic oligonucleotide
gacctcattcggtactacaatgtgtgtgag

SEQ ID NO: 273085 - DNA, 30 bp, Artificial Sequence
  Synthetic oligonucleotide
ggctttgtataaagaccgagatattgtgag

SEQ ID NO: 273086 - DNA, 30 bp, Artificial Sequence
  Synthetic oligonucleotide
aaaccgtccgggcatggcggcggaattgag

SEQ ID NO: 273087 - DNA, 30 bp, Artificial Sequence
  Synthetic oligonucleotide
gatgatcatttccgtggtgaacatattgag

SEQ ID NO: 273088 - DNA, 30 bp, Artificial Sequence
  Synthetic oligonucleotide
accgcctcttacttggcggtccaacttgag

SEQ ID NO: 273089 - DNA, 30 bp, Artificial Sequence
  Synthetic oligonucleotide
atgtcagtccgcttccatattgaacttgag

SEQ ID NO: 273090 - DNA, 30 bp, Artificial Sequence
  Synthetic oligonucleotide
ataacatatatccctccccttgaacttgag

SEQ ID NO: 273091 - DNA, 30 bp, Artificial Sequence
  Synthetic oligonucleotide
tacgtacaccacgttattacgacacttgag

SEQ ID NO: 273092 - DNA, 30 bp, Artificial Sequence
  Synthetic oligonucleotide
gtcccctaccgcagtaatgattgacttgag

SEQ ID NO: 273093 - DNA, 30 bp, Artificial Sequence
  Synthetic oligonucleotide
gacctgggtggtccgtttccctaccttgag

SEQ ID NO: 273094 - DNA, 30 bp, Artificial Sequence
  Synthetic oligonucleotide
gtaattcatccacagaatgagtaccttgag

SEQ ID NO: 273095 - DNA, 30 bp, Artificial Sequence
  Synthetic oligonucleotide
ccgtaggtttctctttctatcccccttgag

SEQ ID NO: 273096 - DNA, 30 bp, Artificial Sequence
  Synthetic oligonucleotide
accgcgcatggaatcggggcggagcttgag

SEQ ID NO: 273097 - DNA, 30 bp, Artificial Sequence
  Synthetic oligonucleotide
tactgtggaaaattgggtaagtgagttgag

SEQ ID NO: 273098 - DNA, 30 bp, Artificial Sequence
  Synthetic oligonucleotide
attggcgctcgctacagcgttatagttgag

SEQ ID NO: 273099 - DNA, 30 bp, Artificial Sequence
  Synthetic oligonucleotide
tcgggcacataaaaaactcgtttagttgag

SEQ ID NO: 273100 - DNA, 30 bp, Artificial Sequence
  Synthetic oligonucleotide
ccgtacggatgatgcaaggagcacgttgag

SEQ ID NO: 273101 - DNA, 30 bp, Artificial Sequence
  Synthetic oligonucleotide
ttgtctgtggcaattgtattggtggttgag

SEQ ID NO: 273102 - DNA, 30 bp, Artificial Sequence
  Synthetic oligonucleotide
acttaatatataataccatgattggttgag

SEQ ID NO: 273103 - DNA, 30 bp, Artificial Sequence
  Synthetic oligonucleotide
gcattttgagtggggccacgtcatgttgag

SEQ ID NO: 273104 - DNA, 30 bp, Artificial Sequence
  Synthetic oligonucleotide
aattgcaaacgtaggagcgtttatgttgag

SEQ ID NO: 273105 - DNA, 30 bp, Artificial Sequence
  Synthetic oligonucleotide
gtacggccctgctccacccatgaatttgag

SEQ ID NO: 273106 - DNA, 30 bp, Artificial Sequence
  Synthetic oligonucleotide
ttcaagcgttaagccaagatgtcatttgag

SEQ ID NO: 273107 - DNA, 30 bp, Artificial Sequence
  Synthetic oligonucleotide
gagcgattttgagatccccgcaactttgag

SEQ ID NO: 273108 - DNA, 30 bp, Artificial Sequence
  Synthetic oligonucleotide
cctttgcaacgagttaaggtccactttgag

SEQ ID NO: 273109 - DNA, 30 bp, Artificial Sequence
  Synthetic oligonucleotide
aataacgggacacttgaggtaccctttgag

SEQ ID NO: 273110 - DNA, 30 bp, Artificial Sequence
  Synthetic oligonucleotide
gatactcgctcccataaagaacgctttgag

SEQ ID NO: 273111 - DNA, 30 bp, Artificial Sequence
  Synthetic oligonucleotide
gtcatgaatatttgtagtcaggtctttgag

SEQ ID NO: 273112 - DNA, 30 bp, Artificial Sequence
  Synthetic oligonucleotide
aattgtcgtcgtgacgagaatcagtttgag

SEQ ID NO: 273113 - DNA, 30 bp, Artificial Sequence
  Synthetic oligonucleotide
ccgggtggccgttaatgagtatcgtttgag

SEQ ID NO: 273114 - DNA, 30 bp, Artificial Sequence
  Synthetic oligonucleotide
ggcattggctctactagatcaaaaaaatag

SEQ ID NO: 273115 - DNA, 30 bp, Artificial Sequence
  Synthetic oligonucleotide
ggtgacccgcttcactagccctaaaaatag

SEQ ID NO: 273116 - DNA, 30 bp, Artificial Sequence
  Synthetic oligonucleotide
gattcatcagagggacgtgtaacaaaatag

SEQ ID NO: 273117 - DNA, 30 bp, Artificial Sequence
  Synthetic oligonucleotide
tttacgcattagacgaaattaataaaatag

SEQ ID NO: 273118 - DNA, 30 bp, Artificial Sequence
  Synthetic oligonucleotide
aattagttatcggggatataggtaaaatag

SEQ ID NO: 273119 - DNA, 30 bp, Artificial Sequence
  Synthetic oligonucleotide
tgaccataccagcagggcaatagcaaatag

SEQ ID NO: 273120 - DNA, 30 bp, Artificial Sequence
  Synthetic oligonucleotide
taggatacgtttactcattctgagaaatag

SEQ ID NO: 273121 - DNA, 30 bp, Artificial Sequence
  Synthetic oligonucleotide
ccatctagggaatcacgtgtggcgaaatag

SEQ ID NO: 273122 - DNA, 30 bp, Artificial Sequence
  Synthetic oligonucleotide
gacgggattgatcgaatccttaaacaatag

SEQ ID NO: 273123 - DNA, 30 bp, Artificial Sequence
  Synthetic oligonucleotide
ctggtcatcacccaaaggggaccacaatag

SEQ ID NO: 273124 - DNA, 30 bp, Artificial Sequence
  Synthetic oligonucleotide
tttcgttccaaatggtgttaggaccaatag

SEQ ID NO: 273125 - DNA, 30 bp, Artificial Sequence
  Synthetic oligonucleotide
cccaatgctattaactggatagggcaatag

SEQ ID NO: 273126 - DNA, 30 bp, Artificial Sequence
  Synthetic oligonucleotide
agctacactagcgccctgaatgcagaatag

SEQ ID NO: 273127 - DNA, 30 bp, Artificial Sequence
  Synthetic oligonucleotide
tagttcgacaaggctgatgccttcgaatag

SEQ ID NO: 273128 - DNA, 30 bp, Artificial Sequence
  Synthetic oligonucleotide
gctttatttatcgatatatgatgggaatag

SEQ ID NO: 273129 - DNA, 30 bp, Artificial Sequence
  Synthetic oligonucleotide
gaggattgcgctatcgcatcgttggaatag

SEQ ID NO: 273130 - DNA, 30 bp, Artificial Sequence
  Synthetic oligonucleotide
caaaccaagtgactttattacgactaatag

SEQ ID NO: 273131 - DNA, 30 bp, Artificial Sequence
  Synthetic oligonucleotide
tccgtcccgcttagtgcactgctctaatag

SEQ ID NO: 273132 - DNA, 30 bp, Artificial Sequence
  Synthetic oligonucleotide
atcaacattgtcgaggccatcttctaatag

SEQ ID NO: 273133 - DNA, 30 bp, Artificial Sequence
  Synthetic oligonucleotide
ttcgttagcgagtatgggcttcagtaatag

SEQ ID NO: 273134 - DNA, 30 bp, Artificial Sequence
  Synthetic oligonucleotide
tgagtcataggagatttcgaagcgtaatag

SEQ ID NO: 273135 - DNA, 30 bp, Artificial Sequence
  Synthetic oligonucleotide
gtactctctcgatgcttgtagtcgtaatag

SEQ ID NO: 273136 - DNA, 30 bp, Artificial Sequence
  Synthetic oligonucleotide
ggctcccagaaaatcaagtaaaggtaatag

SEQ ID NO: 273137 - DNA, 30 bp, Artificial Sequence
  Synthetic oligonucleotide
ccccgaaaggcggtgattttagtaacatag

SEQ ID NO: 273138 - DNA, 30 bp, Artificial Sequence
  Synthetic oligonucleotide
aacttacgttaacatttatttatcacatag

SEQ ID NO: 273139 - DNA, 30 bp, Artificial Sequence
  Synthetic oligonucleotide
ggaatatacatccaagagtatatgacatag

SEQ ID NO: 273140 - DNA, 30 bp, Artificial Sequence
  Synthetic oligonucleotide
ggcactacggacgctaatgatgtgacatag

SEQ ID NO: 273141 - DNA, 30 bp, Artificial Sequence
  Synthetic oligonucleotide
atattgatattgggaaggtaacatacatag

SEQ ID NO: 273142 - DNA, 30 bp, Artificial Sequence
  Synthetic oligonucleotide
tgcctgatcgtacggttagggagtacatag

SEQ ID NO: 273143 - DNA, 30 bp, Artificial Sequence
  Synthetic oligonucleotide
cggatagaattgcgggcggggcacccatag

SEQ ID NO: 273144 - DNA, 30 bp, Artificial Sequence
  Synthetic oligonucleotide
gaaacacttctgaacacacaacatccatag

SEQ ID NO: 273145 - DNA, 30 bp, Artificial Sequence
  Synthetic oligonucleotide
tacaatagctgcccgtgcaggtatccatag

SEQ ID NO: 273146 - DNA, 30 bp, Artificial Sequence
  Synthetic oligonucleotide
caaagtgctgagtccgtgaaagttccatag

SEQ ID NO: 273147 - DNA, 30 bp, Artificial Sequence
  Synthetic oligonucleotide
gtgggtaggttactggatgcacacgcatag

SEQ ID NO: 273148 - DNA, 30 bp, Artificial Sequence
  Synthetic oligonucleotide
accttaccgggctactaccggccggcatag

SEQ ID NO: 273149 - DNA, 30 bp, Artificial Sequence
  Synthetic oligonucleotide
agtcgacctgtcactgaataacgggcatag

SEQ ID NO: 273150 - DNA, 30 bp, Artificial Sequence
  Synthetic oligonucleotide
ccattaatgtctatagatggccgtgcatag

SEQ ID NO: 273151 - DNA, 30 bp, Artificial Sequence
  Synthetic oligonucleotide
atccaaacaatagatcatgttcgtgcatag

SEQ ID NO: 273152 - DNA, 30 bp, Artificial Sequence
  Synthetic oligonucleotide
gatatctgctccactgtagcggtatcatag

SEQ ID NO: 273153 - DNA, 30 bp, Artificial Sequence
  Synthetic oligonucleotide
ggatctggataaggcaatataaggtcatag

SEQ ID NO: 273154 - DNA, 30 bp, Artificial Sequence
  Synthetic oligonucleotide
aatgaggcttcacacaggtctcaaagatag

SEQ ID NO: 273155 - DNA, 30 bp, Artificial Sequence
  Synthetic oligonucleotide
gatacaaaaggtaaactctgtagaagatag

SEQ ID NO: 273156 - DNA, 30 bp, Artificial Sequence
  Synthetic oligonucleotide
ctcttgtgtgcagcggagtggcccagatag

SEQ ID NO: 273157 - DNA, 30 bp, Artificial Sequence
  Synthetic oligonucleotide
tagattgactatctgaccatcatcagatag

SEQ ID NO: 273158 - DNA, 30 bp, Artificial Sequence
  Synthetic oligonucleotide
ggttagagattgataggcggtaatagatag

SEQ ID NO: 273159 - DNA, 30 bp, Artificial Sequence
  Synthetic oligonucleotide
gagaaagtcatgatgttaactcctagatag

SEQ ID NO: 273160 - DNA, 30 bp, Artificial Sequence
  Synthetic oligonucleotide
aagaaaacgtttgttccggactaacgatag

SEQ ID NO: 273161 - DNA, 30 bp, Artificial Sequence
  Synthetic oligonucleotide
ttatacattctggtcagggtacaccgatag

SEQ ID NO: 273162 - DNA, 30 bp, Artificial Sequence
  Synthetic oligonucleotide
atttggcggggtgattagttcctccgatag

SEQ ID NO: 273163 - DNA, 30 bp, Artificial Sequence
  Synthetic oligonucleotide
gaacatgaagtccactgaaatggtcgatag

SEQ ID NO: 273164 - DNA, 30 bp, Artificial Sequence
  Synthetic oligonucleotide
ctctgttaaaactcgcgtgctattcgatag

SEQ ID NO: 273165 - DNA, 30 bp, Artificial Sequence
  Synthetic oligonucleotide
aaaatacggccatgcgttaccgaaggatag

SEQ ID NO: 273166 - DNA, 30 bp, Artificial Sequence
  Synthetic oligonucleotide
ggaagtttatattctagagatccaggatag

SEQ ID NO: 273167 - DNA, 30 bp, Artificial Sequence
  Synthetic oligonucleotide
gatcccatcgagggcttatcgtaatgatag

SEQ ID NO: 273168 - DNA, 30 bp, Artificial Sequence
  Synthetic oligonucleotide
ggaaaccaacttttggttacaagatgatag

SEQ ID NO: 273169 - DNA, 29 bp, Artificial Sequence
  Synthetic oligonucleotide
tcaaaccaatcaactgggtgacctgatag

SEQ ID NO: 273170 - DNA, 30 bp, Artificial Sequence
  Synthetic oligonucleotide
aacggtatcccgtcattattatcctgatag

SEQ ID NO: 273171 - DNA, 30 bp, Artificial Sequence
  Synthetic oligonucleotide
gaaagacctgttgtgcaccatctctgatag

SEQ ID NO: 273172 - DNA, 30 bp, Artificial Sequence
  Synthetic oligonucleotide
gattacgttgctttacactttaattgatag

SEQ ID NO: 273173 - DNA, 30 bp, Artificial Sequence
  Synthetic oligonucleotide
tcaatttaaggggtaatgaggcattgatag

SEQ ID NO: 273174 - DNA, 30 bp, Artificial Sequence
  Synthetic oligonucleotide
accgttcacccacgggagaaaacttgatag

SEQ ID NO: 273175 - DNA, 30 bp, Artificial Sequence
  Synthetic oligonucleotide
acgaagccgacttgccgcatcatttgatag

SEQ ID NO: 273176 - DNA, 30 bp, Artificial Sequence
  Synthetic oligonucleotide
aactcaaaagatattaagtgaggaatatag

SEQ ID NO: 273177 - DNA, 30 bp, Artificial Sequence
  Synthetic oligonucleotide
tctctatggatttggagtgagggaatatag

SEQ ID NO: 273178 - DNA, 30 bp, Artificial Sequence
  Synthetic oligonucleotide
tgacttcgttacaggtttcagatgatatag

SEQ ID NO: 273179 - DNA, 30 bp, Artificial Sequence
  Synthetic oligonucleotide
ttcaagcatagagtgagagaggcactatag

SEQ ID NO: 273180 - DNA, 30 bp, Artificial Sequence
  Synthetic oligonucleotide
agaaagcacccttctaaaataatactatag

SEQ ID NO: 273181 - DNA, 30 bp, Artificial Sequence
  Synthetic oligonucleotide
cgaatggccggcacgacccgcagcctatag

SEQ ID NO: 273182 - DNA, 30 bp, Artificial Sequence
  Synthetic oligonucleotide
gatatcaagaccggcattccagagctatag

SEQ ID NO: 273183 - DNA, 30 bp, Artificial Sequence
  Synthetic oligonucleotide
ggtaatataccagactcacctgcgctatag

SEQ ID NO: 273184 - DNA, 30 bp, Artificial Sequence
  Synthetic oligonucleotide
tacagagaacctcaatgatgttcgctatag

SEQ ID NO: 273185 - DNA, 31 bp, Artificial Sequence
  Synthetic oligonucleotide
caggtgtggaatgagcaagcacgctctatag

SEQ ID NO: 273186 - DNA, 30 bp, Artificial Sequence
  Synthetic oligonucleotide
tagatggagtattataaaggatctctatag

SEQ ID NO: 273187 - DNA, 30 bp, Artificial Sequence
  Synthetic oligonucleotide
cgcagaagagatatggctcggcacgtatag

SEQ ID NO: 273188 - DNA, 30 bp, Artificial Sequence
  Synthetic oligonucleotide
gtaagcacattcattggcaaagaggtatag

SEQ ID NO: 273189 - DNA, 30 bp, Artificial Sequence
  Synthetic oligonucleotide
tttagaacccggtatacacatcatgtatag

SEQ ID NO: 273190 - DNA, 30 bp, Artificial Sequence
  Synthetic oligonucleotide
tatcagtaaaagatacagtatattgtatag

SEQ ID NO: 273191 - DNA, 30 bp, Artificial Sequence
  Synthetic oligonucleotide
gagatattcgttcaacattcagttgtatag

SEQ ID NO: 273192 - DNA, 30 bp, Artificial Sequence
  Synthetic oligonucleotide
agtggtctacggctcaaaggcaaattatag

SEQ ID NO: 273193 - DNA, 30 bp, Artificial Sequence
  Synthetic oligonucleotide
atcaccagtcaactacgtgatatattatag

SEQ ID NO: 273194 - DNA, 30 bp, Artificial Sequence
  Synthetic oligonucleotide
gaatctagagcgggtgccaggcgcttatag

SEQ ID NO: 273195 - DNA, 30 bp, Artificial Sequence
  Synthetic oligonucleotide
cagcagaggaccggagtggcgatcttatag

SEQ ID NO: 273196 - DNA, 30 bp, Artificial Sequence
  Synthetic oligonucleotide
ccgtagtgtttaagctatcttgcgttatag

SEQ ID NO: 273197 - DNA, 30 bp, Artificial Sequence
  Synthetic oligonucleotide
ggaagttccggccttagtaaatttttatag

SEQ ID NO: 273198 - DNA, 30 bp, Artificial Sequence
  Synthetic oligonucleotide
ttggagaatgatcaataaaggtgaaactag

SEQ ID NO: 273199 - DNA, 30 bp, Artificial Sequence
  Synthetic oligonucleotide
cagatcgcgtttgtgacaactcagaactag

SEQ ID NO: 273200 - DNA, 30 bp, Artificial Sequence
  Synthetic oligonucleotide
tagagaatatatcgatgtgaagggaactag

SEQ ID NO: 273201 - DNA, 30 bp, Artificial Sequence
  Synthetic oligonucleotide
acctttggtcatgtaatgcacaataactag

SEQ ID NO: 273202 - DNA, 30 bp, Artificial Sequence
  Synthetic oligonucleotide
agtcgttattgacgattggacgttaactag

SEQ ID NO: 273203 - DNA, 30 bp, Artificial Sequence
  Synthetic oligonucleotide
ccaatgtggatagtcggctgggaacactag

SEQ ID NO: 273204 - DNA, 30 bp, Artificial Sequence
  Synthetic oligonucleotide
ctagtttagtgattacgtagtgtacactag

SEQ ID NO: 273205 - DNA, 30 bp, Artificial Sequence
  Synthetic oligonucleotide
tttgaccaagtaatctcgtggtgccactag

SEQ ID NO: 273206 - DNA, 30 bp, Artificial Sequence
  Synthetic oligonucleotide
gatatgcaccaactcttaatgtggcactag

SEQ ID NO: 273207 - DNA, 30 bp, Artificial Sequence
  Synthetic oligonucleotide
aaaatggctcaaatagtaatctatcactag

SEQ ID NO: 273208 - DNA, 30 bp, Artificial Sequence
  Synthetic oligonucleotide
taattagaggattgcggggaaactcactag

SEQ ID NO: 273209 - DNA, 30 bp, Artificial Sequence
  Synthetic oligonucleotide
cgggtaaatgcatcctggcagggtcactag

SEQ ID NO: 273210 - DNA, 29 bp, Artificial Sequence
  Synthetic oligonucleotide
atacgtttagaaggatgtcagaagactag

SEQ ID NO: 273211 - DNA, 30 bp, Artificial Sequence
  Synthetic oligonucleotide
aacttgtacacccgtactgagagagactag

SEQ ID NO: 273212 - DNA, 30 bp, Artificial Sequence
  Synthetic oligonucleotide
gtctcagtacgaagtattgaattagactag

SEQ ID NO: 273213 - DNA, 30 bp, Artificial Sequence
  Synthetic oligonucleotide
tttgaaatatggatcgaaaacaccgactag

SEQ ID NO: 273214 - DNA, 30 bp, Artificial Sequence
  Synthetic oligonucleotide
tatctttagggcaaggccgtcggggactag

SEQ ID NO: 273215 - DNA, 30 bp, Artificial Sequence
  Synthetic oligonucleotide
aggaactacaagcctgttacggcatactag

SEQ ID NO: 273216 - DNA, 30 bp, Artificial Sequence
  Synthetic oligonucleotide
aacactaagtatgacacagaccattactag

SEQ ID NO: 273217 - DNA, 30 bp, Artificial Sequence
  Synthetic oligonucleotide
tttagggaggtatttacgtgcggttactag

SEQ ID NO: 273218 - DNA, 30 bp, Artificial Sequence
  Synthetic oligonucleotide
tgcttaaaatcgcaaaccgttatttactag

SEQ ID NO: 273219 - DNA, 30 bp, Artificial Sequence
  Synthetic oligonucleotide
cttcaactgtcggggtcagtattgacctag

SEQ ID NO: 273220 - DNA, 30 bp, Artificial Sequence
  Synthetic oligonucleotide
aaggcatccgttcggggccagcctacctag

SEQ ID NO: 273221 - DNA, 30 bp, Artificial Sequence
  Synthetic oligonucleotide
ggcagtaagtacaaggttaacgacccctag

SEQ ID NO: 273222 - DNA, 30 bp, Artificial Sequence
  Synthetic oligonucleotide
gctttcacgcggggtggggacctcccctag

SEQ ID NO: 273223 - DNA, 30 bp, Artificial Sequence
  Synthetic oligonucleotide
tcgctcaacctcaaagatgtattcccctag

SEQ ID NO: 273224 - DNA, 30 bp, Artificial Sequence
  Synthetic oligonucleotide
aatcagcatataataccacacttcccctag

SEQ ID NO: 273225 - DNA, 30 bp, Artificial Sequence
  Synthetic oligonucleotide
cacttatgcagcgtcagcggcgagccctag

SEQ ID NO: 273226 - DNA, 30 bp, Artificial Sequence
  Synthetic oligonucleotide
tggcgtatgcacttctctacatatccctag

SEQ ID NO: 273227 - DNA, 30 bp, Artificial Sequence
  Synthetic oligonucleotide
atgtctcctcagttgaacttgtcagcctag

SEQ ID NO: 273228 - DNA, 30 bp, Artificial Sequence
  Synthetic oligonucleotide
tacgatttctggaaaaataagcacgcctag

SEQ ID NO: 273229 - DNA, 30 bp, Artificial Sequence
  Synthetic oligonucleotide
tcagtaaagtgcgtagtgggtcgcgcctag

SEQ ID NO: 273230 - DNA, 30 bp, Artificial Sequence
  Synthetic oligonucleotide
aaccgttcccgaaccccggggcatgcctag

SEQ ID NO: 273231 - DNA, 30 bp, Artificial Sequence
  Synthetic oligonucleotide
gaccatcttatatgtgaagagttatcctag

SEQ ID NO: 273232 - DNA, 30 bp, Artificial Sequence
  Synthetic oligonucleotide
cgagtccatttggcaatcaattcgtcctag

SEQ ID NO: 273233 - DNA, 30 bp, Artificial Sequence
  Synthetic oligonucleotide
ttgccagataaatatatggtaaggtcctag

SEQ ID NO: 273234 - DNA, 30 bp, Artificial Sequence
  Synthetic oligonucleotide
gtaacgtttcctcagaaattctcaagctag

SEQ ID NO: 273235 - DNA, 30 bp, Artificial Sequence
  Synthetic oligonucleotide
atacactgccttccgcgctatctacgctag

SEQ ID NO: 273236 - DNA, 30 bp, Artificial Sequence
  Synthetic oligonucleotide
ggtattcaactcccaagcggtcaccgctag

SEQ ID NO: 273237 - DNA, 30 bp, Artificial Sequence
  Synthetic oligonucleotide
tctgtaagtcccagatagggtaggcgctag

SEQ ID NO: 273238 - DNA, 30 bp, Artificial Sequence
  Synthetic oligonucleotide
cattagagctctcaacaaagtgtgcgctag

SEQ ID NO: 273239 - DNA, 30 bp, Artificial Sequence
  Synthetic oligonucleotide
aagtgctcgggcatattacagtttcgctag

SEQ ID NO: 273240 - DNA, 30 bp, Artificial Sequence
  Synthetic oligonucleotide
tatgtcacccgcaggagcacaaaaggctag

SEQ ID NO: 273241 - DNA, 30 bp, Artificial Sequence
  Synthetic oligonucleotide
atctagtaagttatccgttatcaaggctag

SEQ ID NO: 273242 - DNA, 30 bp, Artificial Sequence
  Synthetic oligonucleotide
taataagcgtgacagtcttatagaggctag

SEQ ID NO: 273243 - DNA, 30 bp, Artificial Sequence
  Synthetic oligonucleotide
agttgggagcagtcacggctatccggctag

SEQ ID NO: 273244 - DNA, 30 bp, Artificial Sequence
  Synthetic oligonucleotide
gacctcaaggggggcatttagtcgggctag

SEQ ID NO: 273245 - DNA, 30 bp, Artificial Sequence
  Synthetic oligonucleotide
ctttctcaataagtgtaatccgggggctag

SEQ ID NO: 273246 - DNA, 29 bp, Artificial Sequence
  Synthetic oligonucleotide
cacaggccggtatagtggatgggggctag

SEQ ID NO: 273247 - DNA, 30 bp, Artificial Sequence
  Synthetic oligonucleotide
cgtcagctccgttgtagagcgcatggctag

SEQ ID NO: 273248 - DNA, 30 bp, Artificial Sequence
  Synthetic oligonucleotide
gcaagggagtcgcttctcaggactggctag

SEQ ID NO: 273249 - DNA, 30 bp, Artificial Sequence
  Synthetic oligonucleotide
ctcaagcccatcagggtaaattcatgctag

SEQ ID NO: 273250 - DNA, 30 bp, Artificial Sequence
  Synthetic oligonucleotide
ttcgtgacgcttcccgcgagaatatgctag

SEQ ID NO: 273251 - DNA, 30 bp, Artificial Sequence
  Synthetic oligonucleotide
agggatgctatgcacatcgttttatgctag

SEQ ID NO: 273252 - DNA, 30 bp, Artificial Sequence
  Synthetic oligonucleotide
gtcgccagcaagtttacttttcactgctag

SEQ ID NO: 273253 - DNA, 30 bp, Artificial Sequence
  Synthetic oligonucleotide
cttgatgtatcagccagccttacgtgctag

SEQ ID NO: 273254 - DNA, 30 bp, Artificial Sequence
  Synthetic oligonucleotide
ctcaatatgctgcaagcaaacttttgctag

SEQ ID NO: 273255 - DNA, 30 bp, Artificial Sequence
  Synthetic oligonucleotide
tgcgacaaatggacacgagtgcacatctag

SEQ ID NO: 273256 - DNA, 30 bp, Artificial Sequence
  Synthetic oligonucleotide
ggtaccggtcactactcttccctgatctag

SEQ ID NO: 273257 - DNA, 30 bp, Artificial Sequence
  Synthetic oligonucleotide
cacagacctatagtatcagctcacctctag

SEQ ID NO: 273258 - DNA, 30 bp, Artificial Sequence
  Synthetic oligonucleotide
gacccggactaatgtggatcactcctctag

SEQ ID NO: 273259 - DNA, 31 bp, Artificial Sequence
  Synthetic oligonucleotide
aaagtcccgccatacacacaatccgctctag

SEQ ID NO: 273260 - DNA, 30 bp, Artificial Sequence
  Synthetic oligonucleotide
gagggttcacccggacgtggacatctctag

SEQ ID NO: 273261 - DNA, 30 bp, Artificial Sequence
  Synthetic oligonucleotide
gcaggcgtagtgtgcgtccgcactctctag

SEQ ID NO: 273262 - DNA, 30 bp, Artificial Sequence
  Synthetic oligonucleotide
ctatagcgcgagaccggggcgaaagtctag

SEQ ID NO: 273263 - DNA, 30 bp, Artificial Sequence
  Synthetic oligonucleotide
ataaattccagtcattttatgtcagtctag

SEQ ID NO: 273264 - DNA, 30 bp, Artificial Sequence
  Synthetic oligonucleotide
tgtgtgcagcgggctgagcagaacgtctag

SEQ ID NO: 273265 - DNA, 30 bp, Artificial Sequence
  Synthetic oligonucleotide
atcaacgggttggtcttgcaaggggtctag

SEQ ID NO: 273266 - DNA, 30 bp, Artificial Sequence
  Synthetic oligonucleotide
gtaacgcagggttaatggccgaacttctag

SEQ ID NO: 273267 - DNA, 30 bp, Artificial Sequence
  Synthetic oligonucleotide
tgtataatgtgcaggtgacttaacttctag

SEQ ID NO: 273268 - DNA, 30 bp, Artificial Sequence
  Synthetic oligonucleotide
gcggcatcacatccaacttttatcttctag

SEQ ID NO: 273269 - DNA, 30 bp, Artificial Sequence
  Synthetic oligonucleotide
ctagctccgctattggcgtgactcttctag

SEQ ID NO: 273270 - DNA, 30 bp, Artificial Sequence
  Synthetic oligonucleotide
gccgatacagtcgcgtactctgttttctag

SEQ ID NO: 273271 - DNA, 30 bp, Artificial Sequence
  Synthetic oligonucleotide
tttcgtgaaatgggtaatgctgccaagtag

SEQ ID NO: 273272 - DNA, 30 bp, Artificial Sequence
  Synthetic oligonucleotide
gggcgtgatgcggtactccacaataagtag

SEQ ID NO: 273273 - DNA, 30 bp, Artificial Sequence
  Synthetic oligonucleotide
gtggtaagagtcagatattgaactaagtag

SEQ ID NO: 273274 - DNA, 30 bp, Artificial Sequence
  Synthetic oligonucleotide
ttgcttcccactgaatgaagatttaagtag

SEQ ID NO: 273275 - DNA, 30 bp, Artificial Sequence
  Synthetic oligonucleotide
gtgtgctgggatataaccaattcacagtag

SEQ ID NO: 273276 - DNA, 30 bp, Artificial Sequence
  Synthetic oligonucleotide
gccattggtccgtctctagtatgacagtag

SEQ ID NO: 273277 - DNA, 30 bp, Artificial Sequence
  Synthetic oligonucleotide
atatatcgaaagctattattagtccagtag

SEQ ID NO: 273278 - DNA, 30 bp, Artificial Sequence
  Synthetic oligonucleotide
actatatgtgtccccgaccagtttcagtag

SEQ ID NO: 273279 - DNA, 30 bp, Artificial Sequence
  Synthetic oligonucleotide
taaagatcaagctttcgtatcgcagagtag

SEQ ID NO: 273280 - DNA, 30 bp, Artificial Sequence
  Synthetic oligonucleotide
ggtgcagcaattatgcgtaagacggagtag

SEQ ID NO: 273281 - DNA, 30 bp, Artificial Sequence
  Synthetic oligonucleotide
tgggccacagcggacgcgtgctatgagtag

SEQ ID NO: 273282 - DNA, 30 bp, Artificial Sequence
  Synthetic oligonucleotide
ctccgtgggcaaggtgctagaattgagtag

SEQ ID NO: 273283 - DNA, 30 bp, Artificial Sequence
  Synthetic oligonucleotide
cgtcttatccagtcagtaatcacatagtag

SEQ ID NO: 273284 - DNA, 30 bp, Artificial Sequence
  Synthetic oligonucleotide
atttggcactgtatggggatggtatagtag

SEQ ID NO: 273285 - DNA, 30 bp, Artificial Sequence
  Synthetic oligonucleotide
tggtatgtggagtcttaattattctagtag

SEQ ID NO: 273286 - DNA, 30 bp, Artificial Sequence
  Synthetic oligonucleotide
attaagttggctaggcctcagtggtagtag

SEQ ID NO: 273287 - DNA, 30 bp, Artificial Sequence
  Synthetic oligonucleotide
cctcgtagcgcgaccttcacaatgtagtag

SEQ ID NO: 273288 - DNA, 30 bp, Artificial Sequence
  Synthetic oligonucleotide
gaaatacttaagggagcgggcatgtagtag

SEQ ID NO: 273289 - DNA, 30 bp, Artificial Sequence
  Synthetic oligonucleotide
agtaaatacaattcgctcttgtattagtag

SEQ ID NO: 273290 - DNA, 30 bp, Artificial Sequence
  Synthetic oligonucleotide
tggatctttgaatttttagtaacttagtag

SEQ ID NO: 273291 - DNA, 30 bp, Artificial Sequence
  Synthetic oligonucleotide
tataaaacaccaccacatggacttacgtag

SEQ ID NO: 273292 - DNA, 30 bp, Artificial Sequence
  Synthetic oligonucleotide
aagtacgatgataaggtacggtagccgtag

SEQ ID NO: 273293 - DNA, 30 bp, Artificial Sequence
  Synthetic oligonucleotide
ttagatgtcggggcgggttgctggccgtag

SEQ ID NO: 273294 - DNA, 30 bp, Artificial Sequence
  Synthetic oligonucleotide
cttatgcttgactcaaggacattgccgtag

SEQ ID NO: 273295 - DNA, 30 bp, Artificial Sequence
  Synthetic oligonucleotide
acggggtgcccttactaagggaatccgtag

SEQ ID NO: 273296 - DNA, 30 bp, Artificial Sequence
  Synthetic oligonucleotide
taattttcgaaaccttcatcctatccgtag

SEQ ID NO: 273297 - DNA, 30 bp, Artificial Sequence
  Synthetic oligonucleotide
tgtatacgtatggtgaaaatctctccgtag

SEQ ID NO: 273298 - DNA, 30 bp, Artificial Sequence
  Synthetic oligonucleotide
cgcgggggaaactctgaagacagtccgtag

SEQ ID NO: 273299 - DNA, 30 bp, Artificial Sequence
  Synthetic oligonucleotide
catatatgcttcctccttggggaagcgtag

SEQ ID NO: 273300 - DNA, 30 bp, Artificial Sequence
  Synthetic oligonucleotide
atattaaaaaaaccaaattaggcagcgtag

SEQ ID NO: 273301 - DNA, 30 bp, Artificial Sequence
  Synthetic oligonucleotide
cggtgtcataaacaatggcggcgagcgtag

SEQ ID NO: 273302 - DNA, 30 bp, Artificial Sequence
  Synthetic oligonucleotide
gatcgacgccttccatggtctgacgcgtag

SEQ ID NO: 273303 - DNA, 30 bp, Artificial Sequence
  Synthetic oligonucleotide
tttagagtgatagcaactgctggcgcgtag

SEQ ID NO: 273304 - DNA, 30 bp, Artificial Sequence
  Synthetic oligonucleotide
agtgaaccgacgtatttgatctatgcgtag

SEQ ID NO: 273305 - DNA, 30 bp, Artificial Sequence
  Synthetic oligonucleotide
acttgtacgttgaaccagcttgcatcgtag

SEQ ID NO: 273306 - DNA, 30 bp, Artificial Sequence
  Synthetic oligonucleotide
acccgcgggcgggctttaagcatatcgtag

SEQ ID NO: 273307 - DNA, 30 bp, Artificial Sequence
  Synthetic oligonucleotide
tctgtcagcttcagcaagtcggactcgtag

SEQ ID NO: 273308 - DNA, 30 bp, Artificial Sequence
  Synthetic oligonucleotide
actgatagtgtcgttgaggggtggtcgtag

SEQ ID NO: 273309 - DNA, 30 bp, Artificial Sequence
  Synthetic oligonucleotide
ttggcataccctgaatgtaacctgtcgtag

SEQ ID NO: 273310 - DNA, 30 bp, Artificial Sequence
  Synthetic oligonucleotide
aacaacatgcaccgcgcgcctacttcgtag

SEQ ID NO: 273311 - DNA, 30 bp, Artificial Sequence
  Synthetic oligonucleotide
atttatcgacttgtcctctttggaaggtag

SEQ ID NO: 273312 - DNA, 30 bp, Artificial Sequence
  Synthetic oligonucleotide
agcaagcccgtgcaggcacccgacaggtag

SEQ ID NO: 273313 - DNA, 30 bp, Artificial Sequence
  Synthetic oligonucleotide
tgtcaatggaatataattcctgacaggtag

SEQ ID NO: 273314 - DNA, 30 bp, Artificial Sequence
  Synthetic oligonucleotide
agaattagggttaaagtgtacaccaggtag

SEQ ID NO: 273315 - DNA, 30 bp, Artificial Sequence
  Synthetic oligonucleotide
ggggacaagggaccactttagtccaggtag

SEQ ID NO: 273316 - DNA, 30 bp, Artificial Sequence
  Synthetic oligonucleotide
cttgcgaaatatttgtaagcgcagaggtag

SEQ ID NO: 273317 - DNA, 30 bp, Artificial Sequence
  Synthetic oligonucleotide
acacaaaccgttattcacgtaacgaggtag

SEQ ID NO: 273318 - DNA, 30 bp, Artificial Sequence
  Synthetic oligonucleotide
gatataccctcaataggttgtcttaggtag

SEQ ID NO: 273319 - DNA, 30 bp, Artificial Sequence
  Synthetic oligonucleotide
caggaattcaagtacaatgtgcaacggtag

SEQ ID NO: 273320 - DNA, 30 bp, Artificial Sequence
  Synthetic oligonucleotide
ggatattttcgtacttaacccggccggtag

SEQ ID NO: 273321 - DNA, 30 bp, Artificial Sequence
  Synthetic oligonucleotide
aaacgtctgtgactatagtatttccggtag

SEQ ID NO: 273322 - DNA, 30 bp, Artificial Sequence
  Synthetic oligonucleotide
cctccggtgggagaacgtaggcagcggtag

SEQ ID NO: 273323 - DNA, 30 bp, Artificial Sequence
  Synthetic oligonucleotide
ggagtggcgacgcgtgaggacgagcggtag

SEQ ID NO: 273324 - DNA, 30 bp, Artificial Sequence
  Synthetic oligonucleotide
tagcgagtggagcgccgccggtatcggtag

SEQ ID NO: 273325 - DNA, 30 bp, Artificial Sequence
  Synthetic oligonucleotide
gggactcaggatacaggactaagtcggtag

SEQ ID NO: 273326 - DNA, 30 bp, Artificial Sequence
  Synthetic oligonucleotide
gggcgctcacacaccacttaaccagggtag

SEQ ID NO: 273327 - DNA, 30 bp, Artificial Sequence
  Synthetic oligonucleotide
gtataatcggtgcagtcttaactagggtag

SEQ ID NO: 273328 - DNA, 30 bp, Artificial Sequence
  Synthetic oligonucleotide
ggcaactgtaacgatcgtaccttagggtag

SEQ ID NO: 273329 - DNA, 30 bp, Artificial Sequence
  Synthetic oligonucleotide
tcttagtggtgtcggaagagtttagggtag

SEQ ID NO: 273330 - DNA, 30 bp, Artificial Sequence
  Synthetic oligonucleotide
atgctctatcacttccagtctaacgggtag

SEQ ID NO: 273331 - DNA, 30 bp, Artificial Sequence
  Synthetic oligonucleotide
gcattgctaaatctggaacggaaggggtag

SEQ ID NO: 273332 - DNA, 30 bp, Artificial Sequence
  Synthetic oligonucleotide
ctcggcgggatgtctgttgggaaggggtag

SEQ ID NO: 273333 - DNA, 30 bp, Artificial Sequence
  Synthetic oligonucleotide
gtgttttagataattgttaggcatgggtag

SEQ ID NO: 273334 - DNA, 30 bp, Artificial Sequence
  Synthetic oligonucleotide
gtgagtgggtaagatgcagaaactgggtag

SEQ ID NO: 273335 - DNA, 30 bp, Artificial Sequence
  Synthetic oligonucleotide
cgactgacgtaaataaaaccaactgggtag

SEQ ID NO: 273336 - DNA, 30 bp, Artificial Sequence
  Synthetic oligonucleotide
atttcaatggagctcgcccctggtgggtag

SEQ ID NO: 273337 - DNA, 30 bp, Artificial Sequence
  Synthetic oligonucleotide
cgcagtaccggccaatacgattgtgggtag

SEQ ID NO: 273338 - DNA, 30 bp, Artificial Sequence
  Synthetic oligonucleotide
gacatcggatcccacactaaggttgggtag

SEQ ID NO: 273339 - DNA, 30 bp, Artificial Sequence
  Synthetic oligonucleotide
ttcatggatgacctaggccttatatggtag

SEQ ID NO: 273340 - DNA, 30 bp, Artificial Sequence
  Synthetic oligonucleotide
gttgttgaaactcatcgtcccctctggtag

SEQ ID NO: 273341 - DNA, 30 bp, Artificial Sequence
  Synthetic oligonucleotide
ataaccgcggttaatcgtggagaaatgtag

SEQ ID NO: 273342 - DNA, 30 bp, Artificial Sequence
  Synthetic oligonucleotide
tacaagagggccggcgtattagcaatgtag

SEQ ID NO: 273343 - DNA, 30 bp, Artificial Sequence
  Synthetic oligonucleotide
ctagcagtatttacctatgatgcaatgtag

SEQ ID NO: 273344 - DNA, 30 bp, Artificial Sequence
  Synthetic oligonucleotide
gtcagtatcttagctgagaatggaatgtag

SEQ ID NO: 273345 - DNA, 30 bp, Artificial Sequence
  Synthetic oligonucleotide
cacaagacccgcggcaacgactcgatgtag

SEQ ID NO: 273346 - DNA, 30 bp, Artificial Sequence
  Synthetic oligonucleotide
ctgggacacgcgagacatattaatatgtag

SEQ ID NO: 273347 - DNA, 30 bp, Artificial Sequence
  Synthetic oligonucleotide
attcttacaggttcggtgctgagtatgtag

SEQ ID NO: 273348 - DNA, 30 bp, Artificial Sequence
  Synthetic oligonucleotide
gtcaatccgataatccgccatggtatgtag

SEQ ID NO: 273349 - DNA, 30 bp, Artificial Sequence
  Synthetic oligonucleotide
gctcgccgttaaacatggataacactgtag

SEQ ID NO: 273350 - DNA, 30 bp, Artificial Sequence
  Synthetic oligonucleotide
tcaaaccattacatgatggttagcctgtag

SEQ ID NO: 273351 - DNA, 30 bp, Artificial Sequence
  Synthetic oligonucleotide
ttgtataataaacgtcgtgaccctctgtag

SEQ ID NO: 273352 - DNA, 30 bp, Artificial Sequence
  Synthetic oligonucleotide
ctgcttctgagatcgtaaaggagtctgtag

SEQ ID NO: 273353 - DNA, 29 bp, Artificial Sequence
  Synthetic oligonucleotide
gcactggtacctacgctgttctcgtgtag

SEQ ID NO: 273354 - DNA, 30 bp, Artificial Sequence
  Synthetic oligonucleotide
ctttgtacaggaggtgctgcccgggtgtag

SEQ ID NO: 273355 - DNA, 30 bp, Artificial Sequence
  Synthetic oligonucleotide
ccctcgggaggcacttccgacagtgtgtag

SEQ ID NO: 273356 - DNA, 30 bp, Artificial Sequence
  Synthetic oligonucleotide
agcaaccggtgggccacaaagaaattgtag

SEQ ID NO: 273357 - DNA, 30 bp, Artificial Sequence
  Synthetic oligonucleotide
ctggtcttacggcgtctacctcaattgtag

SEQ ID NO: 273358 - DNA, 30 bp, Artificial Sequence
  Synthetic oligonucleotide
cggaattaaaccgctcccggggtcttgtag

SEQ ID NO: 273359 - DNA, 30 bp, Artificial Sequence
  Synthetic oligonucleotide
gtcattcgcctgtagttgtgagcaaattag

SEQ ID NO: 273360 - DNA, 31 bp, Artificial Sequence
  Synthetic oligonucleotide
acacctgagattcgaataagaatcaaattag

SEQ ID NO: 273361 - DNA, 30 bp, Artificial Sequence
  Synthetic oligonucleotide
ttgtctaacacaatttttacaaacaattag

SEQ ID NO: 273362 - DNA, 30 bp, Artificial Sequence
  Synthetic oligonucleotide
gcataaacaaccgaggagacgcacaattag

SEQ ID NO: 273363 - DNA, 30 bp, Artificial Sequence
  Synthetic oligonucleotide
agaacccgatgcgtaatgctggtgaattag

SEQ ID NO: 273364 - DNA, 30 bp, Artificial Sequence
  Synthetic oligonucleotide
ttaagccggtcatggcgacctgataattag

SEQ ID NO: 273365 - DNA, 30 bp, Artificial Sequence
  Synthetic oligonucleotide
tgattatggttcgctcgaacaacagattag

SEQ ID NO: 273366 - DNA, 30 bp, Artificial Sequence
  Synthetic oligonucleotide
ggatctcgcagattgtcgcctcgcgattag

SEQ ID NO: 273367 - DNA, 30 bp, Artificial Sequence
  Synthetic oligonucleotide
ataaaaactggttgcgcggtatgggattag

SEQ ID NO: 273368 - DNA, 30 bp, Artificial Sequence
  Synthetic oligonucleotide
ccgcacgcttgggtaacttaagtggattag

SEQ ID NO: 273369 - DNA, 30 bp, Artificial Sequence
  Synthetic oligonucleotide
tgcctgcctgctatatgtgaggtggattag

SEQ ID NO: 273370 - DNA, 30 bp, Artificial Sequence
  Synthetic oligonucleotide
catgtaatgggcgaaataggaactgattag

SEQ ID NO: 273371 - DNA, 30 bp, Artificial Sequence
  Synthetic oligonucleotide
catctaagttgcgtttgggtaggtgattag

SEQ ID NO: 273372 - DNA, 30 bp, Artificial Sequence
  Synthetic oligonucleotide
atcctcctcatgttggatttccttgattag

SEQ ID NO: 273373 - DNA, 30 bp, Artificial Sequence
  Synthetic oligonucleotide
cactgttgatagcggtacagctgatattag

SEQ ID NO: 273374 - DNA, 30 bp, Artificial Sequence
  Synthetic oligonucleotide
ccttggattgttatcatacggaactattag

SEQ ID NO: 273375 - DNA, 30 bp, Artificial Sequence
  Synthetic oligonucleotide
atcaatctagggtgtttagagtactattag

SEQ ID NO: 273376 - DNA, 30 bp, Artificial Sequence
  Synthetic oligonucleotide
caaccggggatacgattagaaagctattag

SEQ ID NO: 273377 - DNA, 30 bp, Artificial Sequence
  Synthetic oligonucleotide
ataggtatgccttgtatggcttgctattag

SEQ ID NO: 273378 - DNA, 30 bp, Artificial Sequence
  Synthetic oligonucleotide
caactaccaaaattaagcgtttggtattag

SEQ ID NO: 273379 - DNA, 30 bp, Artificial Sequence
  Synthetic oligonucleotide
ttaccgtacgagggatacacgcattattag

SEQ ID NO: 273380 - DNA, 30 bp, Artificial Sequence
  Synthetic oligonucleotide
aattggggcccagcccgagtagattattag

SEQ ID NO: 273381 - DNA, 30 bp, Artificial Sequence
  Synthetic oligonucleotide
tgagaggagatcatggacactgattattag

SEQ ID NO: 273382 - DNA, 30 bp, Artificial Sequence
  Synthetic oligonucleotide
cactatcgcttaggaggatcaagttattag

SEQ ID NO: 273383 - DNA, 30 bp, Artificial Sequence
  Synthetic oligonucleotide
aaccgtgtaccctcagccaccggcacttag

SEQ ID NO: 273384 - DNA, 30 bp, Artificial Sequence
  Synthetic oligonucleotide
taggtaaatcggtcattgcttgatacttag

SEQ ID NO: 273385 - DNA, 30 bp, Artificial Sequence
  Synthetic oligonucleotide
ctctctgcaggagcagcttgggacccttag

SEQ ID NO: 273386 - DNA, 30 bp, Artificial Sequence
  Synthetic oligonucleotide
atgccagggtgtacgctatgttgcccttag

SEQ ID NO: 273387 - DNA, 30 bp, Artificial Sequence
  Synthetic oligonucleotide
acctgttccaacggggtacggtcagcttag

SEQ ID NO: 273388 - DNA, 30 bp, Artificial Sequence
  Synthetic oligonucleotide
gcggatagccgagctcatgagcgagcttag

SEQ ID NO: 273389 - DNA, 30 bp, Artificial Sequence
  Synthetic oligonucleotide
ctaccaagcctaaagtgtcagtgagcttag

SEQ ID NO: 273390 - DNA, 30 bp, Artificial Sequence
  Synthetic oligonucleotide
acgcatactgtccggcttgcgaccgcttag

SEQ ID NO: 273391 - DNA, 30 bp, Artificial Sequence
  Synthetic oligonucleotide
gatcgttgaagataatggcataaggcttag

SEQ ID NO: 273392 - DNA, 30 bp, Artificial Sequence
  Synthetic oligonucleotide
atcttaagtccggagacctagtcggcttag

SEQ ID NO: 273393 - DNA, 30 bp, Artificial Sequence
  Synthetic oligonucleotide
taaattggagacggcgggtttttatcttag

SEQ ID NO: 273394 - DNA, 30 bp, Artificial Sequence
  Synthetic oligonucleotide
actagggaggagtgcactagcttgtcttag

SEQ ID NO: 273395 - DNA, 30 bp, Artificial Sequence
  Synthetic oligonucleotide
atcaacgacgtttacaagtggtattcttag

SEQ ID NO: 273396 - DNA, 30 bp, Artificial Sequence
  Synthetic oligonucleotide
attcgaagtaatgtatgctaacgttcttag

SEQ ID NO: 273397 - DNA, 29 bp, Artificial Sequence
  Synthetic oligonucleotide
aatgacggaggtctgcaggacgttcttag

SEQ ID NO: 273398 - DNA, 30 bp, Artificial Sequence
  Synthetic oligonucleotide
aggttagttagaccgaagagtgtcagttag

SEQ ID NO: 273399 - DNA, 30 bp, Artificial Sequence
  Synthetic oligonucleotide
acagcactgctgggcaggccctcgagttag

SEQ ID NO: 273400 - DNA, 30 bp, Artificial Sequence
  Synthetic oligonucleotide
cctaggaatgccacgcactatcttagttag

SEQ ID NO: 273401 - DNA, 30 bp, Artificial Sequence
  Synthetic oligonucleotide
gttgcaaaaaggcatagcagggttagttag

SEQ ID NO: 273402 - DNA, 30 bp, Artificial Sequence
  Synthetic oligonucleotide
ctggtaatagaccaggacacctaacgttag

SEQ ID NO: 273403 - DNA, 30 bp, Artificial Sequence
  Synthetic oligonucleotide
tgtgctgatggcgttaagcgtaaccgttag

SEQ ID NO: 273404 - DNA, 30 bp, Artificial Sequence
  Synthetic oligonucleotide
ctatgcacactctttggttgaccccgttag

SEQ ID NO: 273405 - DNA, 30 bp, Artificial Sequence
  Synthetic oligonucleotide
attcaacttccctcaagggtaatccgttag

SEQ ID NO: 273406 - DNA, 30 bp, Artificial Sequence
  Synthetic oligonucleotide
gagcagcacgcggctcgggctgttcgttag

SEQ ID NO: 273407 - DNA, 30 bp, Artificial Sequence
  Synthetic oligonucleotide
gcttggataatctcctttcgcttaggttag

SEQ ID NO: 273408 - DNA, 31 bp, Artificial Sequence
  Synthetic oligonucleotide
cactggattcgtttgcggcaatcccggttag

SEQ ID NO: 273409 - DNA, 30 bp, Artificial Sequence
  Synthetic oligonucleotide
accattcaagctgacgtaatttgcggttag

SEQ ID NO: 273410 - DNA, 30 bp, Artificial Sequence
  Synthetic oligonucleotide
tgacaacattatgtagtgagaaagggttag

SEQ ID NO: 273411 - DNA, 30 bp, Artificial Sequence
  Synthetic oligonucleotide
acgttcttgtaaagagatcaagagggttag

SEQ ID NO: 273412 - DNA, 30 bp, Artificial Sequence
  Synthetic oligonucleotide
gacagtccagtgaccattgtcatgggttag

SEQ ID NO: 273413 - DNA, 30 bp, Artificial Sequence
  Synthetic oligonucleotide
taacgtataacccattctgcatgtggttag

SEQ ID NO: 273414 - DNA, 30 bp, Artificial Sequence
  Synthetic oligonucleotide
catccaaattccagatttcgtgttggttag

SEQ ID NO: 273415 - DNA, 30 bp, Artificial Sequence
  Synthetic oligonucleotide
agaataccatttaccgttgtaagatgttag

SEQ ID NO: 273416 - DNA, 30 bp, Artificial Sequence
  Synthetic oligonucleotide
cataccgtaaccggatcataggcctgttag

SEQ ID NO: 273417 - DNA, 30 bp, Artificial Sequence
  Synthetic oligonucleotide
ttcctggtgagccgcgatcactgctgttag

SEQ ID NO: 273418 - DNA, 30 bp, Artificial Sequence
  Synthetic oligonucleotide
tagagggcatgtccgctttggatctgttag

SEQ ID NO: 273419 - DNA, 30 bp, Artificial Sequence
  Synthetic oligonucleotide
tgttagggaaataatcttaattagtgttag

SEQ ID NO: 273420 - DNA, 30 bp, Artificial Sequence
  Synthetic oligonucleotide
cgggctctctttgcacgaggcttgtgttag

SEQ ID NO: 273421 - DNA, 30 bp, Artificial Sequence
  Synthetic oligonucleotide
tgtctgaattcactagtagctcattgttag

SEQ ID NO: 273422 - DNA, 30 bp, Artificial Sequence
  Synthetic oligonucleotide
agatagaactcccccaaatattattgttag

SEQ ID NO: 273423 - DNA, 30 bp, Artificial Sequence
  Synthetic oligonucleotide
tctgatgtaattatcaggcgaaaaatttag

SEQ ID NO: 273424 - DNA, 30 bp, Artificial Sequence
  Synthetic oligonucleotide
attgggagttgatattagttagtaatttag

SEQ ID NO: 273425 - DNA, 30 bp, Artificial Sequence
  Synthetic oligonucleotide
actagaagtcacatcagggggttaatttag

SEQ ID NO: 273426 - DNA, 30 bp, Artificial Sequence
  Synthetic oligonucleotide
ttatgcctagattcacagtcgtccatttag

SEQ ID NO: 273427 - DNA, 30 bp, Artificial Sequence
  Synthetic oligonucleotide
agcgcccccctattttgttgtcggatttag

SEQ ID NO: 273428 - DNA, 30 bp, Artificial Sequence
  Synthetic oligonucleotide
gcagtggcattttggtcagctgtgatttag

SEQ ID NO: 273429 - DNA, 30 bp, Artificial Sequence
  Synthetic oligonucleotide
cgggcctatttgagaagcaggaatatttag

SEQ ID NO: 273430 - DNA, 30 bp, Artificial Sequence
  Synthetic oligonucleotide
agcaaactacaggtgcaaatgaaactttag

SEQ ID NO: 273431 - DNA, 30 bp, Artificial Sequence
  Synthetic oligonucleotide
tggcgtcgaagttctaattcttaactttag

SEQ ID NO: 273432 - DNA, 30 bp, Artificial Sequence
  Synthetic oligonucleotide
gaaaccttgacagggcaaataacactttag

SEQ ID NO: 273433 - DNA, 30 bp, Artificial Sequence
  Synthetic oligonucleotide
cgatgaaggaagtgtgaatggacactttag

SEQ ID NO: 273434 - DNA, 30 bp, Artificial Sequence
  Synthetic oligonucleotide
tgaccatagtgggccgtctaagtactttag

SEQ ID NO: 273435 - DNA, 30 bp, Artificial Sequence
  Synthetic oligonucleotide
gttagattagtcaccaagttttggctttag

SEQ ID NO: 273436 - DNA, 30 bp, Artificial Sequence
  Synthetic oligonucleotide
gcccaagggaaattcacctattttctttag

SEQ ID NO: 273437 - DNA, 30 bp, Artificial Sequence
  Synthetic oligonucleotide
aagctaacataagcggagaatcaagtttag

SEQ ID NO: 273438 - DNA, 30 bp, Artificial Sequence
  Synthetic oligonucleotide
aaaggcgctcttttctatgcacaggtttag

SEQ ID NO: 273439 - DNA, 30 bp, Artificial Sequence
  Synthetic oligonucleotide
ttcaatgtctgcctccagtaaatggtttag

SEQ ID NO: 273440 - DNA, 30 bp, Artificial Sequence
  Synthetic oligonucleotide
ggccctcatacttctttatgtctggtttag

SEQ ID NO: 273441 - DNA, 30 bp, Artificial Sequence
  Synthetic oligonucleotide
acgctacgtggggttgtatacactgtttag

SEQ ID NO: 273442 - DNA, 30 bp, Artificial Sequence
  Synthetic oligonucleotide
agtgatcgaacttcagctatttacttttag

SEQ ID NO: 273443 - DNA, 30 bp, Artificial Sequence
  Synthetic oligonucleotide
ctctacactatctttaagaggcccttttag

SEQ ID NO: 273444 - DNA, 30 bp, Artificial Sequence
  Synthetic oligonucleotide
tcataacccggtttgcagaggaggttttag

SEQ ID NO: 273445 - DNA, 30 bp, Artificial Sequence
  Synthetic oligonucleotide
catgtagggctcagctttcgcatgttttag

SEQ ID NO: 273446 - DNA, 30 bp, Artificial Sequence
  Synthetic oligonucleotide
gtacaagcggtccagggagaagtgttttag

SEQ ID NO: 273447 - DNA, 30 bp, Artificial Sequence
  Synthetic oligonucleotide
aggcagaaatgcgctgcgggtgatttttag

SEQ ID NO: 273448 - DNA, 30 bp, Artificial Sequence
  Synthetic oligonucleotide
ttgtctgaacgatatacatagtttttttag

SEQ ID NO: 273449 - DNA, 30 bp, Artificial Sequence
  Synthetic oligonucleotide
agaagtgtgatcctttaaatgtttttttag

SEQ ID NO: 273450 - DNA, 30 bp, Artificial Sequence
  Synthetic oligonucleotide
ttaccggttagggactcgctcacaaaaacg

SEQ ID NO: 273451 - DNA, 30 bp, Artificial Sequence
  Synthetic oligonucleotide
agagggtcctgactataatccgtaaaaacg

SEQ ID NO: 273452 - DNA, 30 bp, Artificial Sequence
  Synthetic oligonucleotide
aaaaaagtaagataagatgcattcaaaacg

SEQ ID NO: 273453 - DNA, 30 bp, Artificial Sequence
  Synthetic oligonucleotide
tcccgcctctagatttggctctagaaaacg

SEQ ID NO: 273454 - DNA, 30 bp, Artificial Sequence
  Synthetic oligonucleotide
cgtcgataggacatttacaggacgaaaacg

SEQ ID NO: 273455 - DNA, 30 bp, Artificial Sequence
  Synthetic oligonucleotide
caataactcccacctaatcttgggaaaacg

SEQ ID NO: 273456 - DNA, 30 bp, Artificial Sequence
  Synthetic oligonucleotide
tgtcatatcggctacaggtgagtgaaaacg

SEQ ID NO: 273457 - DNA, 30 bp, Artificial Sequence
  Synthetic oligonucleotide
gccgagggctaggtggattttagccaaacg

SEQ ID NO: 273458 - DNA, 29 bp, Artificial Sequence
  Synthetic oligonucleotide
tgctatgccctagggtggcgtggcaaacg

SEQ ID NO: 273459 - DNA, 30 bp, Artificial Sequence
  Synthetic oligonucleotide
ttccctataattggagttatcatgcaaacg

SEQ ID NO: 273460 - DNA, 30 bp, Artificial Sequence
  Synthetic oligonucleotide
agtgagagattgtgtcgatcaattcaaacg

SEQ ID NO: 273461 - DNA, 30 bp, Artificial Sequence
  Synthetic oligonucleotide
agtaggcagccttttactgaggaagaaacg

SEQ ID NO: 273462 - DNA, 30 bp, Artificial Sequence
  Synthetic oligonucleotide
cggttagatcttcagcgggcggaagaaacg

SEQ ID NO: 273463 - DNA, 30 bp, Artificial Sequence
  Synthetic oligonucleotide
gagtaacatcgtcgggacagaacagaaacg

SEQ ID NO: 273464 - DNA, 30 bp, Artificial Sequence
  Synthetic oligonucleotide
gacgctattgcatgggtcgacgccgaaacg

SEQ ID NO: 273465 - DNA, 30 bp, Artificial Sequence
  Synthetic oligonucleotide
gtccaagttctgtataggggggccgaaacg

SEQ ID NO: 273466 - DNA, 30 bp, Artificial Sequence
  Synthetic oligonucleotide
tgccgatacacgtgttaatggcgcgaaacg

SEQ ID NO: 273467 - DNA, 30 bp, Artificial Sequence
  Synthetic oligonucleotide
taataggctgcaacagaacgtgtcgaaacg

SEQ ID NO: 273468 - DNA, 30 bp, Artificial Sequence
  Synthetic oligonucleotide
tcatcgttacgcgtccccaagggggaaacg

SEQ ID NO: 273469 - DNA, 30 bp, Artificial Sequence
  Synthetic oligonucleotide
ctatgacagaacaagagtgttttggaaacg

SEQ ID NO: 273470 - DNA, 30 bp, Artificial Sequence
  Synthetic oligonucleotide
cagtacgctcgaatccggtgtgatgaaacg

SEQ ID NO: 273471 - DNA, 30 bp, Artificial Sequence
  Synthetic oligonucleotide
cgcggattcgcgtactgcggccgtgaaacg

SEQ ID NO: 273472 - DNA, 30 bp, Artificial Sequence
  Synthetic oligonucleotide
aaagtgccttgtaaaccccagcttgaaacg

SEQ ID NO: 273473 - DNA, 30 bp, Artificial Sequence
  Synthetic oligonucleotide
tgggcgtgggtaactatggttccataaacg

SEQ ID NO: 273474 - DNA, 30 bp, Artificial Sequence
  Synthetic oligonucleotide
aagtctcgagctggggtggtgatataaacg

SEQ ID NO: 273475 - DNA, 30 bp, Artificial Sequence
  Synthetic oligonucleotide
aattgggcgagcactcacttgttataaacg

SEQ ID NO: 273476 - DNA, 30 bp, Artificial Sequence
  Synthetic oligonucleotide
cctaacgcgtattgtcatataatgtaaacg

SEQ ID NO: 273477 - DNA, 30 bp, Artificial Sequence
  Synthetic oligonucleotide
ccagggtgagcattgtttacatgttaaacg

SEQ ID NO: 273478 - DNA, 30 bp, Artificial Sequence
  Synthetic oligonucleotide
ataatttgtgaccttaaaaatagaacaacg

SEQ ID NO: 273479 - DNA, 30 bp, Artificial Sequence
  Synthetic oligonucleotide
ctatgagattatttatttacggtaacaacg

SEQ ID NO: 273480 - DNA, 30 bp, Artificial Sequence
  Synthetic oligonucleotide
tgaaaaagtcctccggaccccttcacaacg

SEQ ID NO: 273481 - DNA, 30 bp, Artificial Sequence
  Synthetic oligonucleotide
gaagcgatttttaaggttcactagccaacg

SEQ ID NO: 273482 - DNA, 30 bp, Artificial Sequence
  Synthetic oligonucleotide
ctagcattccccggcctctcgatgccaacg

SEQ ID NO: 273483 - DNA, 30 bp, Artificial Sequence
  Synthetic oligonucleotide
caatgtagccgcacggcgcccatagcaacg

SEQ ID NO: 273484 - DNA, 30 bp, Artificial Sequence
  Synthetic oligonucleotide
tgaaggctagtatgtgtggccacggcaacg

SEQ ID NO: 273485 - DNA, 30 bp, Artificial Sequence
  Synthetic oligonucleotide
atgctcgcgacttcctatcttacggcaacg

SEQ ID NO: 273486 - DNA, 30 bp, Artificial Sequence
  Synthetic oligonucleotide
tagagtaaatcggagcggaattgggcaacg

SEQ ID NO: 273487 - DNA, 30 bp, Artificial Sequence
  Synthetic oligonucleotide
ataagcatcgtgtcgcaactttatgcaacg

SEQ ID NO: 273488 - DNA, 30 bp, Artificial Sequence
  Synthetic oligonucleotide
ctggcgacctttatgagtaactaatcaacg

SEQ ID NO: 273489 - DNA, 30 bp, Artificial Sequence
  Synthetic oligonucleotide
gaataggctaggagtcacgaaacatcaacg

SEQ ID NO: 273490 - DNA, 30 bp, Artificial Sequence
  Synthetic oligonucleotide
agcggtgcctcacatgcaacccgatcaacg

SEQ ID NO: 273491 - DNA, 30 bp, Artificial Sequence
  Synthetic oligonucleotide
attggcaataagttggtgtccggatcaacg

SEQ ID NO: 273492 - DNA, 30 bp, Artificial Sequence
  Synthetic oligonucleotide
acactaggactacttttcagtgcgtcaacg

SEQ ID NO: 273493 - DNA, 30 bp, Artificial Sequence
  Synthetic oligonucleotide
tcgatgtatggctttccactgtcgtcaacg

SEQ ID NO: 273494 - DNA, 30 bp, Artificial Sequence
  Synthetic oligonucleotide
gtaatgattgactactggctaaggagaacg

SEQ ID NO: 273495 - DNA, 30 bp, Artificial Sequence
  Synthetic oligonucleotide
gggatgttaaccgtatactttctgagaacg

SEQ ID NO: 273496 - DNA, 30 bp, Artificial Sequence
  Synthetic oligonucleotide
catgaaccctcgcgcggacccggtagaacg

SEQ ID NO: 273497 - DNA, 30 bp, Artificial Sequence
  Synthetic oligonucleotide
tgactaaccggccgccggttgggtagaacg

SEQ ID NO: 273498 - DNA, 30 bp, Artificial Sequence
  Synthetic oligonucleotide
gtcggactcgcgccattcgacaaacgaacg

SEQ ID NO: 273499 - DNA, 30 bp, Artificial Sequence
  Synthetic oligonucleotide
acaagtaatggtgagtctgacgaacgaacg

SEQ ID NO: 273500 - DNA, 30 bp, Artificial Sequence
  Synthetic oligonucleotide
caactgaatctatctatagatgtacgaacg

SEQ ID NO: 273501 - DNA, 30 bp, Artificial Sequence
  Synthetic oligonucleotide
gaggaagagaaatatggatgcgtgcgaacg

SEQ ID NO: 273502 - DNA, 30 bp, Artificial Sequence
  Synthetic oligonucleotide
ttacccctcttacgcctagcgaatcgaacg

SEQ ID NO: 273503 - DNA, 30 bp, Artificial Sequence
  Synthetic oligonucleotide
accatatggtaataattgctgggtcgaacg

SEQ ID NO: 273504 - DNA, 30 bp, Artificial Sequence
  Synthetic oligonucleotide
ttaaagagaaattttgagtgtgaaggaacg

SEQ ID NO: 273505 - DNA, 30 bp, Artificial Sequence
  Synthetic oligonucleotide
tcccagttagtccacaggtctaacggaacg

SEQ ID NO: 273506 - DNA, 30 bp, Artificial Sequence
  Synthetic oligonucleotide
cacgggcatccgtctcaactgacctgaacg

SEQ ID NO: 273507 - DNA, 30 bp, Artificial Sequence
  Synthetic oligonucleotide
ccatggaaacatagctcgtacgtctgaacg

SEQ ID NO: 273508 - DNA, 30 bp, Artificial Sequence
  Synthetic oligonucleotide
gttaaatcgaatgttatatgtcgaataacg

SEQ ID NO: 273509 - DNA, 30 bp, Artificial Sequence
  Synthetic oligonucleotide
ttctgttgagtctgtacatccagcataacg

SEQ ID NO: 273510 - DNA, 30 bp, Artificial Sequence
  Synthetic oligonucleotide
tccatggcccggcttataacgttcataacg

SEQ ID NO: 273511 - DNA, 30 bp, Artificial Sequence
  Synthetic oligonucleotide
tggatcggtaaggccgcaaattatataacg

SEQ ID NO: 273512 - DNA, 30 bp, Artificial Sequence
  Synthetic oligonucleotide
agtgcgtatttggcacgaaacaaactaacg

SEQ ID NO: 273513 - DNA, 30 bp, Artificial Sequence
  Synthetic oligonucleotide
gaacatgtacggctactgtaccggctaacg

SEQ ID NO: 273514 - DNA, 30 bp, Artificial Sequence
  Synthetic oligonucleotide
gctagccacacgcatttaatgcttctaacg

SEQ ID NO: 273515 - DNA, 30 bp, Artificial Sequence
  Synthetic oligonucleotide
atggggattcgtgagatgcggtttctaacg

SEQ ID NO: 273516 - DNA, 30 bp, Artificial Sequence
  Synthetic oligonucleotide
cttccgagtaatgcatagttctaagtaacg

SEQ ID NO: 273517 - DNA, 30 bp, Artificial Sequence
  Synthetic oligonucleotide
ggactaaaggttcctgggaaagcagtaacg

SEQ ID NO: 273518 - DNA, 30 bp, Artificial Sequence
  Synthetic oligonucleotide
gtgaagatttggggccgcgtcagagtaacg

SEQ ID NO: 273519 - DNA, 29 bp, Artificial Sequence
  Synthetic oligonucleotide
tctcgacgtggcgattagccggagtaacg

SEQ ID NO: 273520 - DNA, 30 bp, Artificial Sequence
  Synthetic oligonucleotide
tcgtgtggcataacgcgtcgcggagtaacg

SEQ ID NO: 273521 - DNA, 30 bp, Artificial Sequence
  Synthetic oligonucleotide
gcccggaaacatggttataacttagtaacg

SEQ ID NO: 273522 - DNA, 30 bp, Artificial Sequence
  Synthetic oligonucleotide
ggcagatcattaatgggggtcttagtaacg

SEQ ID NO: 273523 - DNA, 30 bp, Artificial Sequence
  Synthetic oligonucleotide
gcagttcacgtccagccggagttagtaacg

SEQ ID NO: 273524 - DNA, 30 bp, Artificial Sequence
  Synthetic oligonucleotide
gatggtcgtctgtcgataacagacgtaacg

SEQ ID NO: 273525 - DNA, 30 bp, Artificial Sequence
  Synthetic oligonucleotide
atgtagatttctgcatgcgtcatcgtaacg

SEQ ID NO: 273526 - DNA, 30 bp, Artificial Sequence
  Synthetic oligonucleotide
acgtcagccgactatggacagcctgtaacg

SEQ ID NO: 273527 - DNA, 30 bp, Artificial Sequence
  Synthetic oligonucleotide
agcattgaaagtaggatacagcctgtaacg

SEQ ID NO: 273528 - DNA, 30 bp, Artificial Sequence
  Synthetic oligonucleotide
aggactacttaacgcatttttagtgtaacg

SEQ ID NO: 273529 - DNA, 30 bp, Artificial Sequence
  Synthetic oligonucleotide
gttttggacctaggtccgaggatattaacg

SEQ ID NO: 273530 - DNA, 30 bp, Artificial Sequence
  Synthetic oligonucleotide
atatgtgtatgatcttctgcagtattaacg

SEQ ID NO: 273531 - DNA, 30 bp, Artificial Sequence
  Synthetic oligonucleotide
ttgccggaagtctgagtagaagacttaacg

SEQ ID NO: 273532 - DNA, 30 bp, Artificial Sequence
  Synthetic oligonucleotide
atagctgtgaactaatgttcctcgttaacg

SEQ ID NO: 273533 - DNA, 30 bp, Artificial Sequence
  Synthetic oligonucleotide
ggtgagctataagagtctaagtagaacacg

SEQ ID NO: 273534 - DNA, 30 bp, Artificial Sequence
  Synthetic oligonucleotide
tggaaagttcgttgcatttgactgaacacg

SEQ ID NO: 273535 - DNA, 30 bp, Artificial Sequence
  Synthetic oligonucleotide
ggttcaaacggtgttcttgaggctaacacg

SEQ ID NO: 273536 - DNA, 30 bp, Artificial Sequence
  Synthetic oligonucleotide
gaggtttatagggtagctagaggtaacacg

SEQ ID NO: 273537 - DNA, 30 bp, Artificial Sequence
  Synthetic oligonucleotide
ctcctgaaagcaatatactccgcacacacg

SEQ ID NO: 273538 - DNA, 30 bp, Artificial Sequence
  Synthetic oligonucleotide
agtcatctggattcaaataatctacacacg

SEQ ID NO: 273539 - DNA, 30 bp, Artificial Sequence
  Synthetic oligonucleotide
gctttcgggaatcacgaagctagccacacg

SEQ ID NO: 273540 - DNA, 30 bp, Artificial Sequence
  Synthetic oligonucleotide
gtgtacgttcctaaacagctgatccacacg

SEQ ID NO: 273541 - DNA, 30 bp, Artificial Sequence
  Synthetic oligonucleotide
tgtgtgactgactttaggtacgtccacacg

SEQ ID NO: 273542 - DNA, 30 bp, Artificial Sequence
  Synthetic oligonucleotide
tcgacaaagtgacggctgtgtacgcacacg

SEQ ID NO: 273543 - DNA, 30 bp, Artificial Sequence
  Synthetic oligonucleotide
tacctccgctggtaatagcgtgcgcacacg

SEQ ID NO: 273544 - DNA, 30 bp, Artificial Sequence
  Synthetic oligonucleotide
cttcaatacagccctttactgctgcacacg

SEQ ID NO: 273545 - DNA, 30 bp, Artificial Sequence
  Synthetic oligonucleotide
aacttagcattcatgcttggcttgcacacg

SEQ ID NO: 273546 - DNA, 30 bp, Artificial Sequence
  Synthetic oligonucleotide
cctccttctgagtcgttcatgttgcacacg

SEQ ID NO: 273547 - DNA, 30 bp, Artificial Sequence
  Synthetic oligonucleotide
gatatcactcatgactactaagctcacacg

SEQ ID NO: 273548 - DNA, 30 bp, Artificial Sequence
  Synthetic oligonucleotide
ccggctctgtggtggctctcctaagacacg

SEQ ID NO: 273549 - DNA, 30 bp, Artificial Sequence
  Synthetic oligonucleotide
tgggtactgcttctcatagtctaagacacg

SEQ ID NO: 273550 - DNA, 30 bp, Artificial Sequence
  Synthetic oligonucleotide
gcaatcctatccgtactaggatgagacacg

SEQ ID NO: 273551 - DNA, 30 bp, Artificial Sequence
  Synthetic oligonucleotide
ggatgtgagtaaattcaacttcccgacacg

SEQ ID NO: 273552 - DNA, 30 bp, Artificial Sequence
  Synthetic oligonucleotide
agcattcgtgctttggcattcggggacacg

SEQ ID NO: 273553 - DNA, 30 bp, Artificial Sequence
  Synthetic oligonucleotide
cgcgtcaaaacgttcaggtcagtggacacg

SEQ ID NO: 273554 - DNA, 30 bp, Artificial Sequence
  Synthetic oligonucleotide
tgagttgaaggagctttctcggtggacacg

SEQ ID NO: 273555 - DNA, 30 bp, Artificial Sequence
  Synthetic oligonucleotide
aacgttatgcgttccacaacaaatgacacg

SEQ ID NO: 273556 - DNA, 30 bp, Artificial Sequence
  Synthetic oligonucleotide
aagaggtgtatgacttattcatatgacacg

SEQ ID NO: 273557 - DNA, 30 bp, Artificial Sequence
  Synthetic oligonucleotide
gccgctgcgactaagaatgacactgacacg

SEQ ID NO: 273558 - DNA, 30 bp, Artificial Sequence
  Synthetic oligonucleotide
agcgaacaatgttatccactacctgacacg

SEQ ID NO: 273559 - DNA, 30 bp, Artificial Sequence
  Synthetic oligonucleotide
ctcaatagcatttaactttaacttgacacg

SEQ ID NO: 273560 - DNA, 30 bp, Artificial Sequence
  Synthetic oligonucleotide
ctgaccaagtaggagataagtttatacacg

SEQ ID NO: 273561 - DNA, 30 bp, Artificial Sequence
  Synthetic oligonucleotide
atgcgcgaatcagacctcggctcctacacg

SEQ ID NO: 273562 - DNA, 30 bp, Artificial Sequence
  Synthetic oligonucleotide
tttcgccttaaaaatcgagttgtctacacg

SEQ ID NO: 273563 - DNA, 30 bp, Artificial Sequence
  Synthetic oligonucleotide
aggtctgactaatcccaagcggtttacacg

SEQ ID NO: 273564 - DNA, 30 bp, Artificial Sequence
  Synthetic oligonucleotide
aggcatcggcctcacgcttcataaaccacg

SEQ ID NO: 273565 - DNA, 30 bp, Artificial Sequence
  Synthetic oligonucleotide
cacccagtagtcgactgcaatgataccacg

SEQ ID NO: 273566 - DNA, 30 bp, Artificial Sequence
  Synthetic oligonucleotide
tctaaaaaggcccaagtgtacactaccacg

SEQ ID NO: 273567 - DNA, 30 bp, Artificial Sequence
  Synthetic oligonucleotide
ttggcgcggaacgaatgttcacgtaccacg

SEQ ID NO: 273568 - DNA, 30 bp, Artificial Sequence
  Synthetic oligonucleotide
tcgtatcctatttgcgatttaacccccacg

SEQ ID NO: 273569 - DNA, 30 bp, Artificial Sequence
  Synthetic oligonucleotide
aagcgacaggcattctctcgggagcccacg

SEQ ID NO: 273570 - DNA, 30 bp, Artificial Sequence
  Synthetic oligonucleotide
gacttatgtaggcctaaatatgcgcccacg

SEQ ID NO: 273571 - DNA, 30 bp, Artificial Sequence
  Synthetic oligonucleotide
ttaatcgcttggtggccagcacatcccacg

SEQ ID NO: 273572 - DNA, 30 bp, Artificial Sequence
  Synthetic oligonucleotide
tttaaatgcagtttccgaccccatcccacg

SEQ ID NO: 273573 - DNA, 29 bp, Artificial Sequence
  Synthetic oligonucleotide
acgttccgttgagggaggaatatcccacg

SEQ ID NO: 273574 - DNA, 30 bp, Artificial Sequence
  Synthetic oligonucleotide
ctcatggtagtccttgtgtttgttcccacg

SEQ ID NO: 273575 - DNA, 30 bp, Artificial Sequence
  Synthetic oligonucleotide
ctgcggagactttgggggttattagccacg

SEQ ID NO: 273576 - DNA, 30 bp, Artificial Sequence
  Synthetic oligonucleotide
attactttcagacaagactacaacgccacg

SEQ ID NO: 273577 - DNA, 30 bp, Artificial Sequence
  Synthetic oligonucleotide
tctttaggtaaacccgcaattcaggccacg

SEQ ID NO: 273578 - DNA, 30 bp, Artificial Sequence
  Synthetic oligonucleotide
aaagcgggactttttgaagccggggccacg

SEQ ID NO: 273579 - DNA, 30 bp, Artificial Sequence
  Synthetic oligonucleotide
gtaggatgtatgggcgggacacatgccacg

SEQ ID NO: 273580 - DNA, 30 bp, Artificial Sequence
  Synthetic oligonucleotide
aaaagcgcacctcagcatagctgtgccacg

SEQ ID NO: 273581 - DNA, 30 bp, Artificial Sequence
  Synthetic oligonucleotide
gaattaggatataaacctggtacctccacg

SEQ ID NO: 273582 - DNA, 30 bp, Artificial Sequence
  Synthetic oligonucleotide
agcgaagttagtagaacgtaaggctccacg

SEQ ID NO: 273583 - DNA, 30 bp, Artificial Sequence
  Synthetic oligonucleotide
ggtgtgagcaggtggaaaacaggctccacg

SEQ ID NO: 273584 - DNA, 30 bp, Artificial Sequence
  Synthetic oligonucleotide
ggtgctggtaatttgctatgtgtctccacg

SEQ ID NO: 273585 - DNA, 30 bp, Artificial Sequence
  Synthetic oligonucleotide
gttcctcgtaggcgaagattcaagtccacg

SEQ ID NO: 273586 - DNA, 30 bp, Artificial Sequence
  Synthetic oligonucleotide
ctgacagtagatctagcataatgttccacg

SEQ ID NO: 273587 - DNA, 30 bp, Artificial Sequence
  Synthetic oligonucleotide
tattctggcgctcctgagccgcacagcacg

SEQ ID NO: 273588 - DNA, 30 bp, Artificial Sequence
  Synthetic oligonucleotide
aaacgggagtggacttcactcggcagcacg

SEQ ID NO: 273589 - DNA, 30 bp, Artificial Sequence
  Synthetic oligonucleotide
ccaaggagtacgtacccagtcgatagcacg

SEQ ID NO: 273590 - DNA, 30 bp, Artificial Sequence
  Synthetic oligonucleotide
aaaaacgcaaacgctgaactttcgcgcacg

SEQ ID NO: 273591 - DNA, 29 bp, Artificial Sequence
  Synthetic oligonucleotide
agaagctaaactcataagaggatcgcacg

SEQ ID NO: 273592 - DNA, 30 bp, Artificial Sequence
  Synthetic oligonucleotide
cgtactgagttccacgtgtggcaaggcacg

SEQ ID NO: 273593 - DNA, 30 bp, Artificial Sequence
  Synthetic oligonucleotide
gaacctaggtaatgttcgcgtcaaggcacg

SEQ ID NO: 273594 - DNA, 30 bp, Artificial Sequence
  Synthetic oligonucleotide
cttcacccgtattgacttcgaaccggcacg

SEQ ID NO: 273595 - DNA, 30 bp, Artificial Sequence
  Synthetic oligonucleotide
actagcaaatctcgggattggatcggcacg

SEQ ID NO: 273596 - DNA, 30 bp, Artificial Sequence
  Synthetic oligonucleotide
cggtcaatgggtatcccactccatggcacg

SEQ ID NO: 273597 - DNA, 30 bp, Artificial Sequence
  Synthetic oligonucleotide
ctaacacattctatcggaagagttggcacg

SEQ ID NO: 273598 - DNA, 30 bp, Artificial Sequence
  Synthetic oligonucleotide
cgaaatcactagccattcatgatatgcacg

SEQ ID NO: 273599 - DNA, 30 bp, Artificial Sequence
  Synthetic oligonucleotide
tatggataaggtgtctattatcgctgcacg

SEQ ID NO: 273600 - DNA, 30 bp, Artificial Sequence
  Synthetic oligonucleotide
aagagctaatcttcgattgactagtgcacg

SEQ ID NO: 273601 - DNA, 30 bp, Artificial Sequence
  Synthetic oligonucleotide
caagcggcaacacaatactttgtgtgcacg

SEQ ID NO: 273602 - DNA, 30 bp, Artificial Sequence
  Synthetic oligonucleotide
cagtagggagtggacaggggtgattgcacg

SEQ ID NO: 273603 - DNA, 30 bp, Artificial Sequence
  Synthetic oligonucleotide
tgcttcagggattgtgcgtcaacaatcacg

SEQ ID NO: 273604 - DNA, 30 bp, Artificial Sequence
  Synthetic oligonucleotide
tgtggcgtgacctcaccctacgcaatcacg

SEQ ID NO: 273605 - DNA, 30 bp, Artificial Sequence
  Synthetic oligonucleotide
gtagatatcgcacgtaatgaatcaatcacg

SEQ ID NO: 273606 - DNA, 30 bp, Artificial Sequence
  Synthetic oligonucleotide
taaaaagcataaaggaccggtaccatcacg

SEQ ID NO: 273607 - DNA, 30 bp, Artificial Sequence
  Synthetic oligonucleotide
taatatgtggtgttcatataggggatcacg

SEQ ID NO: 273608 - DNA, 30 bp, Artificial Sequence
  Synthetic oligonucleotide
gattagtacgtccatgatagggatatcacg

SEQ ID NO: 273609 - DNA, 30 bp, Artificial Sequence
  Synthetic oligonucleotide
ggtgttccaaggcgggctaagactatcacg

SEQ ID NO: 273610 - DNA, 30 bp, Artificial Sequence
  Synthetic oligonucleotide
gcagaagaaaccgacggtctcgctatcacg

SEQ ID NO: 273611 - DNA, 30 bp, Artificial Sequence
  Synthetic oligonucleotide
atcatagattcacgtttagattttatcacg

SEQ ID NO: 273612 - DNA, 29 bp, Artificial Sequence
  Synthetic oligonucleotide
tgtagaccacttaaggtggccgactcacg

SEQ ID NO: 273613 - DNA, 30 bp, Artificial Sequence
  Synthetic oligonucleotide
acacatagaggtgtacgaccgggcctcacg

SEQ ID NO: 273614 - DNA, 30 bp, Artificial Sequence
  Synthetic oligonucleotide
gggtgccatagcactatgggtctcctcacg

SEQ ID NO: 273615 - DNA, 30 bp, Artificial Sequence
  Synthetic oligonucleotide
aacagcgccagcacgcctgtgaatctcacg

SEQ ID NO: 273616 - DNA, 30 bp, Artificial Sequence
  Synthetic oligonucleotide
tttgagacggagtgcctccgttcggtcacg

SEQ ID NO: 273617 - DNA, 30 bp, Artificial Sequence
  Synthetic oligonucleotide
agggccaaatacctggcgtctatggtcacg

SEQ ID NO: 273618 - DNA, 30 bp, Artificial Sequence
  Synthetic oligonucleotide
gatgcacgaatgtagtggagatttgtcacg

SEQ ID NO: 273619 - DNA, 30 bp, Artificial Sequence
  Synthetic oligonucleotide
acatcagtgcctgcacagtagatattcacg

SEQ ID NO: 273620 - DNA, 30 bp, Artificial Sequence
  Synthetic oligonucleotide
cgctggccacgaaaaaaaggttagttcacg

SEQ ID NO: 273621 - DNA, 30 bp, Artificial Sequence
  Synthetic oligonucleotide
ctaaaagcaattactttttgttgtttcacg

SEQ ID NO: 273622 - DNA, 30 bp, Artificial Sequence
  Synthetic oligonucleotide
atatggaacgactctcaaggtgaaaagacg

SEQ ID NO: 273623 - DNA, 30 bp, Artificial Sequence
  Synthetic oligonucleotide
cggttgaggtgcttatatacgagaaagacg

SEQ ID NO: 273624 - DNA, 30 bp, Artificial Sequence
  Synthetic oligonucleotide
gagaatgtgtattgaattctaaacaagacg

SEQ ID NO: 273625 - DNA, 30 bp, Artificial Sequence
  Synthetic oligonucleotide
tactaaggagccgtgccggtctacaagacg

SEQ ID NO: 273626 - DNA, 30 bp, Artificial Sequence
  Synthetic oligonucleotide
gtaaacccgttatatgaacatggtaagacg

SEQ ID NO: 273627 - DNA, 30 bp, Artificial Sequence
  Synthetic oligonucleotide
ggtggtgtctcgtaggggaaccttaagacg

SEQ ID NO: 273628 - DNA, 30 bp, Artificial Sequence
  Synthetic oligonucleotide
cagtcgtgtcgaactcgaacttcccagacg

SEQ ID NO: 273629 - DNA, 30 bp, Artificial Sequence
  Synthetic oligonucleotide
acgagcgtggggaaagcatcgaaggagacg

SEQ ID NO: 273630 - DNA, 30 bp, Artificial Sequence
  Synthetic oligonucleotide
agcctatgtcgcatccggctacgggagacg

SEQ ID NO: 273631 - DNA, 30 bp, Artificial Sequence
  Synthetic oligonucleotide
gagctggttggggcacagacgatggagacg

SEQ ID NO: 273632 - DNA, 30 bp, Artificial Sequence
  Synthetic oligonucleotide
ttgcgaatcattaggtgcggtcgtgagacg

SEQ ID NO: 273633 - DNA, 30 bp, Artificial Sequence
  Synthetic oligonucleotide
gaaagcctacatggtacacgagttgagacg

SEQ ID NO: 273634 - DNA, 30 bp, Artificial Sequence
  Synthetic oligonucleotide
caataaaactttactggttgtaaatagacg

SEQ ID NO: 273635 - DNA, 30 bp, Artificial Sequence
  Synthetic oligonucleotide
aaggggtgatagtgagtcgatgtgtagacg

SEQ ID NO: 273636 - DNA, 30 bp, Artificial Sequence
  Synthetic oligonucleotide
tcgcgcgcgaatagtccttcgtcaacgacg

SEQ ID NO: 273637 - DNA, 30 bp, Artificial Sequence
  Synthetic oligonucleotide
atgggcgcaatgaccgccgctagaacgacg

SEQ ID NO: 273638 - DNA, 30 bp, Artificial Sequence
  Synthetic oligonucleotide
gactggaaattatgggaagtacgcacgacg

SEQ ID NO: 273639 - DNA, 30 bp, Artificial Sequence
  Synthetic oligonucleotide
ctcgccttcctaagtagtagatatacgacg

SEQ ID NO: 273640 - DNA, 30 bp, Artificial Sequence
  Synthetic oligonucleotide
cacgactgcagggtactactggccccgacg

SEQ ID NO: 273641 - DNA, 30 bp, Artificial Sequence
  Synthetic oligonucleotide
atatacgacttcaatttagtacggccgacg

SEQ ID NO: 273642 - DNA, 30 bp, Artificial Sequence
  Synthetic oligonucleotide
gactactcacagtattttgacggtccgacg

SEQ ID NO: 273643 - DNA, 30 bp, Artificial Sequence
  Synthetic oligonucleotide
taccggaaccaccgggaattgcaagcgacg

SEQ ID NO: 273644 - DNA, 30 bp, Artificial Sequence
  Synthetic oligonucleotide
cgtacacggtcagtttcgagtggagcgacg

SEQ ID NO: 273645 - DNA, 30 bp, Artificial Sequence
  Synthetic oligonucleotide
aaaaggcgctagcctcatacgaaggcgacg

SEQ ID NO: 273646 - DNA, 30 bp, Artificial Sequence
  Synthetic oligonucleotide
caatacagggttgatccaccgccggcgacg

SEQ ID NO: 273647 - DNA, 30 bp, Artificial Sequence
  Synthetic oligonucleotide
gaattgttgtcctatctccttctggcgacg

SEQ ID NO: 273648 - DNA, 30 bp, Artificial Sequence
  Synthetic oligonucleotide
aattagaacatcgttgggccagtggcgacg

SEQ ID NO: 273649 - DNA, 30 bp, Artificial Sequence
  Synthetic oligonucleotide
tcgattccggtgacatgcagaagtgcgacg

SEQ ID NO: 273650 - DNA, 30 bp, Artificial Sequence
  Synthetic oligonucleotide
ccagttctaagacttacggttggatcgacg

SEQ ID NO: 273651 - DNA, 30 bp, Artificial Sequence
  Synthetic oligonucleotide
catgggataaactccgttacatcctcgacg

SEQ ID NO: 273652 - DNA, 30 bp, Artificial Sequence
  Synthetic oligonucleotide
cgcaagcagaggtcaatacggcgaaggacg

SEQ ID NO: 273653 - DNA, 31 bp, Artificial Sequence
  Synthetic oligonucleotide
ataaaagaccgatatctgccaagccaggacg

SEQ ID NO: 273654 - DNA, 30 bp, Artificial Sequence
  Synthetic oligonucleotide
ggtttatctgaaaggctgagatccaggacg

SEQ ID NO: 273655 - DNA, 30 bp, Artificial Sequence
  Synthetic oligonucleotide
gcacgacggtgcgagatcggaccgaggacg

SEQ ID NO: 273656 - DNA, 30 bp, Artificial Sequence
  Synthetic oligonucleotide
ctgtattagtaaccatgtatgaataggacg

SEQ ID NO: 273657 - DNA, 30 bp, Artificial Sequence
  Synthetic oligonucleotide
gggggcccaggatcgtttccacgtaggacg

SEQ ID NO: 273658 - DNA, 30 bp, Artificial Sequence
  Synthetic oligonucleotide
atgggctaaccgatgtgtccatttaggacg

SEQ ID NO: 273659 - DNA, 30 bp, Artificial Sequence
  Synthetic oligonucleotide
gtccacacaggagagggaactccacggacg

SEQ ID NO: 273660 - DNA, 30 bp, Artificial Sequence
  Synthetic oligonucleotide
agacgttatggagtaaaactagcacggacg

SEQ ID NO: 273661 - DNA, 30 bp, Artificial Sequence
  Synthetic oligonucleotide
cgccaacaagtcaaggtcgaggaccggacg

SEQ ID NO: 273662 - DNA, 30 bp, Artificial Sequence
  Synthetic oligonucleotide
cctcgccgatatccgtcgtgctgccggacg

SEQ ID NO: 273663 - DNA, 30 bp, Artificial Sequence
  Synthetic oligonucleotide
tagtatcctgacattgatatttcgcggacg

SEQ ID NO: 273664 - DNA, 30 bp, Artificial Sequence
  Synthetic oligonucleotide
agggccgggcgacgagtactggggcggacg

SEQ ID NO: 273665 - DNA, 30 bp, Artificial Sequence
  Synthetic oligonucleotide
acccggcagccaggagagagaactcggacg

SEQ ID NO: 273666 - DNA, 30 bp, Artificial Sequence
  Synthetic oligonucleotide
gatcaaaaacctgtacgtaatgacgggacg

SEQ ID NO: 273667 - DNA, 30 bp, Artificial Sequence
  Synthetic oligonucleotide
ctggaccgtgcgacaagaaagccggggacg

SEQ ID NO: 273668 - DNA, 30 bp, Artificial Sequence
  Synthetic oligonucleotide
cagatccctaccatggcattcgcggggacg

SEQ ID NO: 273669 - DNA, 30 bp, Artificial Sequence
  Synthetic oligonucleotide
catttggtggtttccgagagtgcggggacg

SEQ ID NO: 273670 - DNA, 30 bp, Artificial Sequence
  Synthetic oligonucleotide
gtatatgcgaaatgggtcgcagctgggacg

SEQ ID NO: 273671 - DNA, 30 bp, Artificial Sequence
  Synthetic oligonucleotide
tgaacgaaccaaccatgaggcatctggacg

SEQ ID NO: 273672 - DNA, 30 bp, Artificial Sequence
  Synthetic oligonucleotide
tgggagtattcgttactgcctcagtggacg

SEQ ID NO: 273673 - DNA, 30 bp, Artificial Sequence
  Synthetic oligonucleotide
cgtcatcgccaaatacatgggccgtggacg

SEQ ID NO: 273674 - DNA, 30 bp, Artificial Sequence
  Synthetic oligonucleotide
gaactggatcgctcgttcctctcgtggacg

SEQ ID NO: 273675 - DNA, 30 bp, Artificial Sequence
  Synthetic oligonucleotide
tgtagaatcattatggttggacggtggacg

SEQ ID NO: 273676 - DNA, 30 bp, Artificial Sequence
  Synthetic oligonucleotide
gcatctcctggagagcctagtaattggacg

SEQ ID NO: 273677 - DNA, 32 bp, Artificial Sequence
  Synthetic oligonucleotide
aaggaatgcccgagaacttctcatattggacg

SEQ ID NO: 273678 - DNA, 30 bp, Artificial Sequence
  Synthetic oligonucleotide
aactactactataacctgacgtcaatgacg

SEQ ID NO: 273679 - DNA, 30 bp, Artificial Sequence
  Synthetic oligonucleotide
gggcaacgtggacgctcgtttagaatgacg

SEQ ID NO: 273680 - DNA, 30 bp, Artificial Sequence
  Synthetic oligonucleotide
ggttcaactgttcagtccaagttaatgacg

SEQ ID NO: 273681 - DNA, 30 bp, Artificial Sequence
  Synthetic oligonucleotide
acacattaggcagatcggcaccccatgacg

SEQ ID NO: 273682 - DNA, 30 bp, Artificial Sequence
  Synthetic oligonucleotide
cccccgtgttaaaattcgtggggcatgacg

SEQ ID NO: 273683 - DNA, 30 bp, Artificial Sequence
  Synthetic oligonucleotide
tcagaacacgagttatccgggttcatgacg

SEQ ID NO: 273684 - DNA, 30 bp, Artificial Sequence
  Synthetic oligonucleotide
ggacgtagtggggcctgtagatagatgacg

SEQ ID NO: 273685 - DNA, 30 bp, Artificial Sequence
  Synthetic oligonucleotide
gacgtatatagttctaacgtatggatgacg

SEQ ID NO: 273686 - DNA, 30 bp, Artificial Sequence
  Synthetic oligonucleotide
aagggctttctggcccctagttggatgacg

SEQ ID NO: 273687 - DNA, 30 bp, Artificial Sequence
  Synthetic oligonucleotide
ctgaaaacggcccacgattagctgatgacg

SEQ ID NO: 273688 - DNA, 30 bp, Artificial Sequence
  Synthetic oligonucleotide
ggagtcgtcaagccagacattttgatgacg

SEQ ID NO: 273689 - DNA, 30 bp, Artificial Sequence
  Synthetic oligonucleotide
tcagtagatttcggcaaaactcgtatgacg

SEQ ID NO: 273690 - DNA, 30 bp, Artificial Sequence
  Synthetic oligonucleotide
tcctcgaatgaatatgtcgcggaactgacg

SEQ ID NO: 273691 - DNA, 30 bp, Artificial Sequence
  Synthetic oligonucleotide
aagttttataagggacaacatgcgctgacg

SEQ ID NO: 273692 - DNA, 30 bp, Artificial Sequence
  Synthetic oligonucleotide
gacgacacaacaatggaaagtatgctgacg

SEQ ID NO: 273693 - DNA, 30 bp, Artificial Sequence
  Synthetic oligonucleotide
tttgtcctagctcgtcaggacacagtgacg

SEQ ID NO: 273694 - DNA, 30 bp, Artificial Sequence
  Synthetic oligonucleotide
attgataaatctttggaatcaagggtgacg

SEQ ID NO: 273695 - DNA, 30 bp, Artificial Sequence
  Synthetic oligonucleotide
ggatccgaggctagttcacctatggtgacg

SEQ ID NO: 273696 - DNA, 30 bp, Artificial Sequence
  Synthetic oligonucleotide
ctagcacgtgatggccaattcgtggtgacg

SEQ ID NO: 273697 - DNA, 29 bp, Artificial Sequence
  Synthetic oligonucleotide
ggggtgccggctatatggtcgatgtgacg

SEQ ID NO: 273698 - DNA, 30 bp, Artificial Sequence
  Synthetic oligonucleotide
ctagtatccacagttgcacagagattgacg

SEQ ID NO: 273699 - DNA, 30 bp, Artificial Sequence
  Synthetic oligonucleotide
catctggtccttattctcgtgcgattgacg

SEQ ID NO: 273700 - DNA, 30 bp, Artificial Sequence
  Synthetic oligonucleotide
ctatatgaactggtttattcggacttgacg

SEQ ID NO: 273701 - DNA, 30 bp, Artificial Sequence
  Synthetic oligonucleotide
gacggtcggctaagagagacccgtttgacg

SEQ ID NO: 273702 - DNA, 30 bp, Artificial Sequence
  Synthetic oligonucleotide
aactatagagatgaatcggacccaaatacg

SEQ ID NO: 273703 - DNA, 30 bp, Artificial Sequence
  Synthetic oligonucleotide
acctctggtgaaaatttcatcggaaatacg

SEQ ID NO: 273704 - DNA, 30 bp, Artificial Sequence
  Synthetic oligonucleotide
tatggtgtcttagggttggtcggaaatacg

SEQ ID NO: 273705 - DNA, 30 bp, Artificial Sequence
  Synthetic oligonucleotide
taccttataccgacgggcgccgcgaatacg

SEQ ID NO: 273706 - DNA, 30 bp, Artificial Sequence
  Synthetic oligonucleotide
ccagggtaagacacaggtttatggaatacg

SEQ ID NO: 273707 - DNA, 31 bp, Artificial Sequence
  Synthetic oligonucleotide
aggtattgggtaagatgccaagtctaatacg

SEQ ID NO: 273708 - DNA, 30 bp, Artificial Sequence
  Synthetic oligonucleotide
ttaaactggagcacttccctgattaatacg

SEQ ID NO: 273709 - DNA, 30 bp, Artificial Sequence
  Synthetic oligonucleotide
gtacactggggcattttgcaccttaatacg

SEQ ID NO: 273710 - DNA, 30 bp, Artificial Sequence
  Synthetic oligonucleotide
taacgaattttgaccgataatgaccatacg

SEQ ID NO: 273711 - DNA, 30 bp, Artificial Sequence
  Synthetic oligonucleotide
gcctatcggctccttgccccaaatcatacg

SEQ ID NO: 273712 - DNA, 30 bp, Artificial Sequence
  Synthetic oligonucleotide
atacgcccatgaggaatcagtttagatacg

SEQ ID NO: 273713 - DNA, 30 bp, Artificial Sequence
  Synthetic oligonucleotide
caaacttagctcgattgtgtctacgatacg

SEQ ID NO: 273714 - DNA, 30 bp, Artificial Sequence
  Synthetic oligonucleotide
gggtcaacgtcttttctaggaatcgatacg

SEQ ID NO: 273715 - DNA, 30 bp, Artificial Sequence
  Synthetic oligonucleotide
tttgcttcttgagctatgtcgttggatacg

SEQ ID NO: 273716 - DNA, 30 bp, Artificial Sequence
  Synthetic oligonucleotide
cagttgccataggcactgatacatgatacg

SEQ ID NO: 273717 - DNA, 30 bp, Artificial Sequence
  Synthetic oligonucleotide
agtctaagatcatagcgtctcattgatacg

SEQ ID NO: 273718 - DNA, 30 bp, Artificial Sequence
  Synthetic oligonucleotide
gaacttaccttgtatcttaatacatatacg

SEQ ID NO: 273719 - DNA, 31 bp, Artificial Sequence
  Synthetic oligonucleotide
cagcacccaatcaataatttaactatatacg

SEQ ID NO: 273720 - DNA, 30 bp, Artificial Sequence
  Synthetic oligonucleotide
ggaaggtgttccatagatcgacgctatacg

SEQ ID NO: 273721 - DNA, 30 bp, Artificial Sequence
  Synthetic oligonucleotide
agtaggagagctggcaagcagtggtatacg

SEQ ID NO: 273722 - DNA, 30 bp, Artificial Sequence
  Synthetic oligonucleotide
tctactcacgcggctaaagggaattatacg

SEQ ID NO: 273723 - DNA, 30 bp, Artificial Sequence
  Synthetic oligonucleotide
tccccgtggtgatgcaaaggatattatacg

SEQ ID NO: 273724 - DNA, 30 bp, Artificial Sequence
  Synthetic oligonucleotide
aatagaccagcgagtataaggatttatacg

SEQ ID NO: 273725 - DNA, 30 bp, Artificial Sequence
  Synthetic oligonucleotide
acgcagccaaacggcgattatcagactacg

SEQ ID NO: 273726 - DNA, 30 bp, Artificial Sequence
  Synthetic oligonucleotide
tcccactgcaccctatccgaatagactacg

SEQ ID NO: 273727 - DNA, 30 bp, Artificial Sequence
  Synthetic oligonucleotide
gtatggacctgcgacaatcgcgtgactacg

SEQ ID NO: 273728 - DNA, 30 bp, Artificial Sequence
  Synthetic oligonucleotide
gtgaagtcctaactatttgagggtactacg

SEQ ID NO: 273729 - DNA, 30 bp, Artificial Sequence
  Synthetic oligonucleotide
gcaaagtcagtgacggaacattcacctacg

SEQ ID NO: 273730 - DNA, 30 bp, Artificial Sequence
  Synthetic oligonucleotide
ctctgagaccacctactcctgcagcctacg

SEQ ID NO: 273731 - DNA, 30 bp, Artificial Sequence
  Synthetic oligonucleotide
cgcgtgagaacactcggttcaacgcctacg

SEQ ID NO: 273732 - DNA, 30 bp, Artificial Sequence
  Synthetic oligonucleotide
agtttataacgatcgatctcatggcctacg

SEQ ID NO: 273733 - DNA, 30 bp, Artificial Sequence
  Synthetic oligonucleotide
ttgattggttaccaaggacagcgtgctacg

SEQ ID NO: 273734 - DNA, 30 bp, Artificial Sequence
  Synthetic oligonucleotide
gtcccgcgcaaggtagtacgggaatctacg

SEQ ID NO: 273735 - DNA, 30 bp, Artificial Sequence
  Synthetic oligonucleotide
cccacccagttagggaaaggcagatctacg

SEQ ID NO: 273736 - DNA, 30 bp, Artificial Sequence
  Synthetic oligonucleotide
tgtccgttccaggcatcgtgcaagtctacg

SEQ ID NO: 273737 - DNA, 30 bp, Artificial Sequence
  Synthetic oligonucleotide
catagctaaagtatccatggtcattctacg

SEQ ID NO: 273738 - DNA, 30 bp, Artificial Sequence
  Synthetic oligonucleotide
tgagtgtcccgttattctaggacttctacg

SEQ ID NO: 273739 - DNA, 30 bp, Artificial Sequence
  Synthetic oligonucleotide
gtattagcgcggagaactggcgcttctacg

SEQ ID NO: 273740 - DNA, 30 bp, Artificial Sequence
  Synthetic oligonucleotide
cccggttcaagaaaccacaatttaagtacg

SEQ ID NO: 273741 - DNA, 30 bp, Artificial Sequence
  Synthetic oligonucleotide
ccatatcttcatgatcaggaaaccagtacg

SEQ ID NO: 273742 - DNA, 30 bp, Artificial Sequence
  Synthetic oligonucleotide
cagggatcctgccggctccgggagagtacg

SEQ ID NO: 273743 - DNA, 30 bp, Artificial Sequence
  Synthetic oligonucleotide
gcacgctcctggccaggtgaactgagtacg

SEQ ID NO: 273744 - DNA, 30 bp, Artificial Sequence
  Synthetic oligonucleotide
tcgtgtttacccacgttctagattagtacg

SEQ ID NO: 273745 - DNA, 30 bp, Artificial Sequence
  Synthetic oligonucleotide
agacgagtgtcatcatgttgtcttagtacg

SEQ ID NO: 273746 - DNA, 30 bp, Artificial Sequence
  Synthetic oligonucleotide
gggttttccagcacaggccgaggacgtacg

SEQ ID NO: 273747 - DNA, 30 bp, Artificial Sequence
  Synthetic oligonucleotide
ttgatacgtctaaacatccaatgacgtacg

SEQ ID NO: 273748 - DNA, 30 bp, Artificial Sequence
  Synthetic oligonucleotide
ggggttgagcgggcccccatagaccgtacg

SEQ ID NO: 273749 - DNA, 30 bp, Artificial Sequence
  Synthetic oligonucleotide
taggacggtttggattctgcgccgcgtacg

SEQ ID NO: 273750 - DNA, 30 bp, Artificial Sequence
  Synthetic oligonucleotide
tcctctagaagcagaccggtaacaggtacg

SEQ ID NO: 273751 - DNA, 30 bp, Artificial Sequence
  Synthetic oligonucleotide
cacgatttatcgttgactgcccccggtacg

SEQ ID NO: 273752 - DNA, 30 bp, Artificial Sequence
  Synthetic oligonucleotide
tgactcgccctcatgggaaagttcggtacg

SEQ ID NO: 273753 - DNA, 30 bp, Artificial Sequence
  Synthetic oligonucleotide
ggatgaactgcttaggtacggcagggtacg

SEQ ID NO: 273754 - DNA, 30 bp, Artificial Sequence
  Synthetic oligonucleotide
gaccaactctggaaattgcgtacgggtacg

SEQ ID NO: 273755 - DNA, 30 bp, Artificial Sequence
  Synthetic oligonucleotide
ggaacaaaaccaatgtttcgcttgggtacg

SEQ ID NO: 273756 - DNA, 30 bp, Artificial Sequence
  Synthetic oligonucleotide
tcaccagttgccagccagtgtaatggtacg

SEQ ID NO: 273757 - DNA, 30 bp, Artificial Sequence
  Synthetic oligonucleotide
cgcgaaggcgggcgagctggccctggtacg

SEQ ID NO: 273758 - DNA, 30 bp, Artificial Sequence
  Synthetic oligonucleotide
aaattgatgggtacggaggttacatgtacg

SEQ ID NO: 273759 - DNA, 30 bp, Artificial Sequence
  Synthetic oligonucleotide
ggcgtttcaaagcatagagattgatgtacg

SEQ ID NO: 273760 - DNA, 30 bp, Artificial Sequence
  Synthetic oligonucleotide
gccgtaaatgcggatctaatcaggtgtacg

SEQ ID NO: 273761 - DNA, 30 bp, Artificial Sequence
  Synthetic oligonucleotide
gctcacactagcaacagttattgttgtacg

SEQ ID NO: 273762 - DNA, 30 bp, Artificial Sequence
  Synthetic oligonucleotide
ggtatgggtgtaccagcggtatccattacg

SEQ ID NO: 273763 - DNA, 30 bp, Artificial Sequence
  Synthetic oligonucleotide
gttctgccatgggtacttgatacgattacg

SEQ ID NO: 273764 - DNA, 30 bp, Artificial Sequence
  Synthetic oligonucleotide
tggagtgcataaaatagcttcctgattacg

SEQ ID NO: 273765 - DNA, 30 bp, Artificial Sequence
  Synthetic oligonucleotide
ggacgtactacgggtattctggtgattacg

SEQ ID NO: 273766 - DNA, 30 bp, Artificial Sequence
  Synthetic oligonucleotide
ggatgtctaataagatcaaaggaacttacg

SEQ ID NO: 273767 - DNA, 30 bp, Artificial Sequence
  Synthetic oligonucleotide
ggagatggtagtcagtttaatagccttacg

SEQ ID NO: 273768 - DNA, 30 bp, Artificial Sequence
  Synthetic oligonucleotide
gagggtccaggtaatgtgagaggccttacg

SEQ ID NO: 273769 - DNA, 29 bp, Artificial Sequence
  Synthetic oligonucleotide
tgaattagcaaagacacataatccttacg

SEQ ID NO: 273770 - DNA, 30 bp, Artificial Sequence
  Synthetic oligonucleotide
caagccgagacggacagaagttggcttacg

SEQ ID NO: 273771 - DNA, 30 bp, Artificial Sequence
  Synthetic oligonucleotide
agagcgtaagccatgcgtagagtgcttacg

SEQ ID NO: 273772 - DNA, 30 bp, Artificial Sequence
  Synthetic oligonucleotide
gggaggccaagggagccgcgctcagttacg

SEQ ID NO: 273773 - DNA, 30 bp, Artificial Sequence
  Synthetic oligonucleotide
gaggtaagaatgggcttcgtgcgcgttacg

SEQ ID NO: 273774 - DNA, 30 bp, Artificial Sequence
  Synthetic oligonucleotide
cgaattatgacccaactaaccaaggttacg

SEQ ID NO: 273775 - DNA, 30 bp, Artificial Sequence
  Synthetic oligonucleotide
gccaggaaccgatctcggaacgaggttacg

SEQ ID NO: 273776 - DNA, 30 bp, Artificial Sequence
  Synthetic oligonucleotide
tcaagaatgcggctttgtctgtatgttacg

SEQ ID NO: 273777 - DNA, 30 bp, Artificial Sequence
  Synthetic oligonucleotide
acgctgcgtcagtagagttaaaactttacg

SEQ ID NO: 273778 - DNA, 30 bp, Artificial Sequence
  Synthetic oligonucleotide
gggttaggacgaagctattagcagtttacg

SEQ ID NO: 273779 - DNA, 30 bp, Artificial Sequence
  Synthetic oligonucleotide
ggacgttagacgcgaagtcgtgagtttacg

SEQ ID NO: 273780 - DNA, 30 bp, Artificial Sequence
  Synthetic oligonucleotide
ttgctcataatacactcccgcttgtttacg

SEQ ID NO: 273781 - DNA, 30 bp, Artificial Sequence
  Synthetic oligonucleotide
caggttatcaaatgggtcaaagattttacg

SEQ ID NO: 273782 - DNA, 30 bp, Artificial Sequence
  Synthetic oligonucleotide
atacagttctcgaaaggatgttcttttacg

SEQ ID NO: 273783 - DNA, 30 bp, Artificial Sequence
  Synthetic oligonucleotide
ggagggcctccatagtagcaaagttttacg

SEQ ID NO: 273784 - DNA, 30 bp, Artificial Sequence
  Synthetic oligonucleotide
ttgctgcgtgggagcatatattgttttacg

SEQ ID NO: 273785 - DNA, 30 bp, Artificial Sequence
  Synthetic oligonucleotide
gaggtagattttcccgtcaggtaaaaaccg

SEQ ID NO: 273786 - DNA, 30 bp, Artificial Sequence
  Synthetic oligonucleotide
acattagcgtccgagtgaccgcccaaaccg

SEQ ID NO: 273787 - DNA, 30 bp, Artificial Sequence
  Synthetic oligonucleotide
tcaatgttatagagctaattgccgaaaccg

SEQ ID NO: 273788 - DNA, 30 bp, Artificial Sequence
  Synthetic oligonucleotide
tataaggctatcagttttcagaataaaccg

SEQ ID NO: 273789 - DNA, 30 bp, Artificial Sequence
  Synthetic oligonucleotide
gatcgtcttgtggtggtgtcgagtaaaccg

SEQ ID NO: 273790 - DNA, 30 bp, Artificial Sequence
  Synthetic oligonucleotide
ggataggacctttggtcggcccgtaaaccg

SEQ ID NO: 273791 - DNA, 30 bp, Artificial Sequence
  Synthetic oligonucleotide
gtaagcaatgtgatttgctgcgttaaaccg

SEQ ID NO: 273792 - DNA, 30 bp, Artificial Sequence
  Synthetic oligonucleotide
tttacacgcctcccctgagttcaacaaccg

SEQ ID NO: 273793 - DNA, 30 bp, Artificial Sequence
  Synthetic oligonucleotide
tcgtccatagatgtagtagtcttacaaccg

SEQ ID NO: 273794 - DNA, 30 bp, Artificial Sequence
  Synthetic oligonucleotide
aattaatgtgccctaccagcacagcaaccg

SEQ ID NO: 273795 - DNA, 30 bp, Artificial Sequence
  Synthetic oligonucleotide
tacatcgagttttggcacgtccggcaaccg

SEQ ID NO: 273796 - DNA, 30 bp, Artificial Sequence
  Synthetic oligonucleotide
acaagctgagtccttctactactgcaaccg

SEQ ID NO: 273797 - DNA, 30 bp, Artificial Sequence
  Synthetic oligonucleotide
agtaataagttatacatagggtgtcaaccg

SEQ ID NO: 273798 - DNA, 30 bp, Artificial Sequence
  Synthetic oligonucleotide
cgaaggtgtttttgaggcaggaaagaaccg

SEQ ID NO: 273799 - DNA, 30 bp, Artificial Sequence
  Synthetic oligonucleotide
aactcaccctcgcccatcgggtaagaaccg

SEQ ID NO: 273800 - DNA, 30 bp, Artificial Sequence
  Synthetic oligonucleotide
cgttttcgctgctttaagatgcacgaaccg

SEQ ID NO: 273801 - DNA, 30 bp, Artificial Sequence
  Synthetic oligonucleotide
ttgtagacattaaggattgtaattgaaccg

SEQ ID NO: 273802 - DNA, 30 bp, Artificial Sequence
  Synthetic oligonucleotide
tcattcctacagaaccttttttactaaccg

SEQ ID NO: 273803 - DNA, 30 bp, Artificial Sequence
  Synthetic oligonucleotide
tcgcgagttttggtcggggccatctaaccg

SEQ ID NO: 273804 - DNA, 30 bp, Artificial Sequence
  Synthetic oligonucleotide
taagtcctagaatcatcatctgagtaaccg

SEQ ID NO: 273805 - DNA, 30 bp, Artificial Sequence
  Synthetic oligonucleotide
agtgttgtcctactttttggactgtaaccg

SEQ ID NO: 273806 - DNA, 30 bp, Artificial Sequence
  Synthetic oligonucleotide
aaacgggtggttttatatgagtattaaccg

SEQ ID NO: 273807 - DNA, 30 bp, Artificial Sequence
  Synthetic oligonucleotide
gttagaaggaagctattcgttggttaaccg

SEQ ID NO: 273808 - DNA, 30 bp, Artificial Sequence
  Synthetic oligonucleotide
taagggcggtttgctgacgggttttaaccg

SEQ ID NO: 273809 - DNA, 30 bp, Artificial Sequence
  Synthetic oligonucleotide
tagattgaccgcgtatcgtgacacacaccg

SEQ ID NO: 273810 - DNA, 30 bp, Artificial Sequence
  Synthetic oligonucleotide
cccataggtgcagcatgtatttagacaccg

SEQ ID NO: 273811 - DNA, 30 bp, Artificial Sequence
  Synthetic oligonucleotide
ccatagtcgatgtgtagaccagatacaccg

SEQ ID NO: 273812 - DNA, 30 bp, Artificial Sequence
  Synthetic oligonucleotide
gacctctgacagggcacgtagactacaccg

SEQ ID NO: 273813 - DNA, 30 bp, Artificial Sequence
  Synthetic oligonucleotide
gcgaggtatgaggggcacgcgggcccaccg

SEQ ID NO: 273814 - DNA, 30 bp, Artificial Sequence
  Synthetic oligonucleotide
ttgaccagggacccctacagatggccaccg

SEQ ID NO: 273815 - DNA, 30 bp, Artificial Sequence
  Synthetic oligonucleotide
tgaacgcggtgcgtgggagtaatagcaccg

SEQ ID NO: 273816 - DNA, 30 bp, Artificial Sequence
  Synthetic oligonucleotide
tttgaatgtggagtgccactatgggcaccg

SEQ ID NO: 273817 - DNA, 30 bp, Artificial Sequence
  Synthetic oligonucleotide
gtatatgtcagtcattttgatgtggcaccg

SEQ ID NO: 273818 - DNA, 30 bp, Artificial Sequence
  Synthetic oligonucleotide
gaaccgactataggagaggaccagtcaccg

SEQ ID NO: 273819 - DNA, 30 bp, Artificial Sequence
  Synthetic oligonucleotide
ttcttacaggtcggggtatgtacgtcaccg

SEQ ID NO: 273820 - DNA, 30 bp, Artificial Sequence
  Synthetic oligonucleotide
ctaatagtcaccgcgtggtggttttcaccg

SEQ ID NO: 273821 - DNA, 30 bp, Artificial Sequence
  Synthetic oligonucleotide
acgatggtcaatgcaggctctcgaagaccg

SEQ ID NO: 273822 - DNA, 30 bp, Artificial Sequence
  Synthetic oligonucleotide
cgactttcagacgcctatgggtccagaccg

SEQ ID NO: 273823 - DNA, 30 bp, Artificial Sequence
  Synthetic oligonucleotide
ggtctcataacgtcgggattccgcagaccg

SEQ ID NO: 273824 - DNA, 30 bp, Artificial Sequence
  Synthetic oligonucleotide
ggtgtgcgcactacatatctagtcagaccg

SEQ ID NO: 273825 - DNA, 30 bp, Artificial Sequence
  Synthetic oligonucleotide
acactactagaaacgtagtaccgtagaccg

SEQ ID NO: 273826 - DNA, 30 bp, Artificial Sequence
  Synthetic oligonucleotide
ttcaaggttccatgagatgctaaacgaccg

SEQ ID NO: 273827 - DNA, 30 bp, Artificial Sequence
  Synthetic oligonucleotide
aaatggcattagccgcactgtaagcgaccg

SEQ ID NO: 273828 - DNA, 30 bp, Artificial Sequence
  Synthetic oligonucleotide
cacctggcattgggcagtgatcagcgaccg

SEQ ID NO: 273829 - DNA, 30 bp, Artificial Sequence
  Synthetic oligonucleotide
atcagcagaactttgggaacctggcgaccg

SEQ ID NO: 273830 - DNA, 30 bp, Artificial Sequence
  Synthetic oligonucleotide
cctgtagtcggccgtccaagaagaggaccg

SEQ ID NO: 273831 - DNA, 30 bp, Artificial Sequence
  Synthetic oligonucleotide
gctttagcagtgagcctggaactcggaccg

SEQ ID NO: 273832 - DNA, 30 bp, Artificial Sequence
  Synthetic oligonucleotide
ctcatggcacacgcgggggtaaagggaccg

SEQ ID NO: 273833 - DNA, 30 bp, Artificial Sequence
  Synthetic oligonucleotide
ggtattcggggtgcgcaacaacttggaccg

SEQ ID NO: 273834 - DNA, 30 bp, Artificial Sequence
  Synthetic oligonucleotide
aaggctttcaggagagcgcgcatatgaccg

SEQ ID NO: 273835 - DNA, 30 bp, Artificial Sequence
  Synthetic oligonucleotide
gtcctcacctatgagggtgtactatgaccg

SEQ ID NO: 273836 - DNA, 30 bp, Artificial Sequence
  Synthetic oligonucleotide
attcgaaacgactgaccgtataactgaccg

SEQ ID NO: 273837 - DNA, 30 bp, Artificial Sequence
  Synthetic oligonucleotide
cccaccaccacccttaagtatcggtgaccg

SEQ ID NO: 273838 - DNA, 30 bp, Artificial Sequence
  Synthetic oligonucleotide
gagagcttgctccttagacatgattgaccg

SEQ ID NO: 273839 - DNA, 30 bp, Artificial Sequence
  Synthetic oligonucleotide
tttggacgacagaggattgacgcttgaccg

SEQ ID NO: 273840 - DNA, 30 bp, Artificial Sequence
  Synthetic oligonucleotide
gcgagctggtagtcatgcagctgttgaccg

SEQ ID NO: 273841 - DNA, 30 bp, Artificial Sequence
  Synthetic oligonucleotide
agaaagctttttgcgggtcacctcataccg

SEQ ID NO: 273842 - DNA, 30 bp, Artificial Sequence
  Synthetic oligonucleotide
atgccgtatagggttcggatagatataccg

SEQ ID NO: 273843 - DNA, 30 bp, Artificial Sequence
  Synthetic oligonucleotide
caacggatccaagtataatgtacactaccg

SEQ ID NO: 273844 - DNA, 30 bp, Artificial Sequence
  Synthetic oligonucleotide
atagagtagtagaggcgcgggccactaccg

SEQ ID NO: 273845 - DNA, 30 bp, Artificial Sequence
  Synthetic oligonucleotide
atttgggacatttctcgaacccggctaccg

SEQ ID NO: 273846 - DNA, 30 bp, Artificial Sequence
  Synthetic oligonucleotide
gaaccgatatcaaaataaccgcgtctaccg

SEQ ID NO: 273847 - DNA, 30 bp, Artificial Sequence
  Synthetic oligonucleotide
gggggtcgggtgcttaagggtggtctaccg

SEQ ID NO: 273848 - DNA, 30 bp, Artificial Sequence
  Synthetic oligonucleotide
agataatgatgaggagtgacttttctaccg

SEQ ID NO: 273849 - DNA, 30 bp, Artificial Sequence
  Synthetic oligonucleotide
ttggtggtggcgtgtttcaccgaagtaccg

SEQ ID NO: 273850 - DNA, 30 bp, Artificial Sequence
  Synthetic oligonucleotide
gttcgctctgaaagggccgacggagtaccg

SEQ ID NO: 273851 - DNA, 30 bp, Artificial Sequence
  Synthetic oligonucleotide
accaaggttacagcatcgggcaccgtaccg

SEQ ID NO: 273852 - DNA, 30 bp, Artificial Sequence
  Synthetic oligonucleotide
aattgccgaatgtatctagcttaggtaccg

SEQ ID NO: 273853 - DNA, 30 bp, Artificial Sequence
  Synthetic oligonucleotide
agcagactgcactgttgaggtatgttaccg

SEQ ID NO: 273854 - DNA, 30 bp, Artificial Sequence
  Synthetic oligonucleotide
tgcggattaagctatccacatgatttaccg

SEQ ID NO: 273855 - DNA, 30 bp, Artificial Sequence
  Synthetic oligonucleotide
gatcagtcgtaagcaggggattgtttaccg

SEQ ID NO: 273856 - DNA, 30 bp, Artificial Sequence
  Synthetic oligonucleotide
tgttttgggggtagaactatatcaaacccg

SEQ ID NO: 273857 - DNA, 30 bp, Artificial Sequence
  Synthetic oligonucleotide
aaatgatgctatgcgcccccgggaaacccg

SEQ ID NO: 273858 - DNA, 30 bp, Artificial Sequence
  Synthetic oligonucleotide
ctccagccaggtgctgaaagcttaaacccg

SEQ ID NO: 273859 - DNA, 30 bp, Artificial Sequence
  Synthetic oligonucleotide
tcactgattctttcgacatgcaacaacccg

SEQ ID NO: 273860 - DNA, 30 bp, Artificial Sequence
  Synthetic oligonucleotide
cggccatcggctccaagttacgagaacccg

SEQ ID NO: 273861 - DNA, 30 bp, Artificial Sequence
  Synthetic oligonucleotide
atagtaccagactaggaggactataacccg

SEQ ID NO: 273862 - DNA, 30 bp, Artificial Sequence
  Synthetic oligonucleotide
tcctttgcgcaccgaaaatggcgtaacccg

SEQ ID NO: 273863 - DNA, 30 bp, Artificial Sequence
  Synthetic oligonucleotide
ggggtgtgcctacccaggaaatttaacccg

SEQ ID NO: 273864 - DNA, 30 bp, Artificial Sequence
  Synthetic oligonucleotide
aggtggctcctattgctacgttcacacccg

SEQ ID NO: 273865 - DNA, 30 bp, Artificial Sequence
  Synthetic oligonucleotide
agtgggtagagcgccccacgcagacacccg

SEQ ID NO: 273866 - DNA, 30 bp, Artificial Sequence
  Synthetic oligonucleotide
tcggtagttgtaagggaacctagacacccg

SEQ ID NO: 273867 - DNA, 30 bp, Artificial Sequence
  Synthetic oligonucleotide
ctcgcttgatgaacggtgaattgagacccg

SEQ ID NO: 273868 - DNA, 30 bp, Artificial Sequence
  Synthetic oligonucleotide
cgtcttcacaactgtgactttacggacccg

SEQ ID NO: 273869 - DNA, 30 bp, Artificial Sequence
  Synthetic oligonucleotide
taccgagatcaaatagattttatggacccg

SEQ ID NO: 273870 - DNA, 30 bp, Artificial Sequence
  Synthetic oligonucleotide
accttaagtaatattaactcagtggacccg

SEQ ID NO: 273871 - DNA, 30 bp, Artificial Sequence
  Synthetic oligonucleotide
gtcggaaatactaatgagaatttggacccg

SEQ ID NO: 273872 - DNA, 30 bp, Artificial Sequence
  Synthetic oligonucleotide
tgtgctttttaccaggtgagagtatacccg

SEQ ID NO: 273873 - DNA, 30 bp, Artificial Sequence
  Synthetic oligonucleotide
atcattcagctcctcggcgaatggtacccg

SEQ ID NO: 273874 - DNA, 30 bp, Artificial Sequence
  Synthetic oligonucleotide
gggaaattaaattactatattgaaaccccg

SEQ ID NO: 273875 - DNA, 30 bp, Artificial Sequence
  Synthetic oligonucleotide
gagcggtctaccacccagtcgttaaccccg

SEQ ID NO: 273876 - DNA, 30 bp, Artificial Sequence
  Synthetic oligonucleotide
agccaggtgctctagaccggtctgcccccg

SEQ ID NO: 273877 - DNA, 30 bp, Artificial Sequence
  Synthetic oligonucleotide
tgttgatacaaagcgcgaagcttgcccccg

SEQ ID NO: 273878 - DNA, 30 bp, Artificial Sequence
  Synthetic oligonucleotide
cggggtattcaccagcgtcactatcccccg

SEQ ID NO: 273879 - DNA, 30 bp, Artificial Sequence
  Synthetic oligonucleotide
gcgagtaccatttaaattgtgtatcccccg

SEQ ID NO: 273880 - DNA, 30 bp, Artificial Sequence
  Synthetic oligonucleotide
attcggatggcgtatgatttgtgtcccccg

SEQ ID NO: 273881 - DNA, 30 bp, Artificial Sequence
  Synthetic oligonucleotide
gacaaaaggtacactgatctacttcccccg

SEQ ID NO: 273882 - DNA, 30 bp, Artificial Sequence
  Synthetic oligonucleotide
cgggggaggtaggaggcgactcttcccccg

SEQ ID NO: 273883 - DNA, 30 bp, Artificial Sequence
  Synthetic oligonucleotide
aaattggcggggtaagaatgtttcgccccg

SEQ ID NO: 273884 - DNA, 30 bp, Artificial Sequence
  Synthetic oligonucleotide
tcccttaagtaggagaagactcgggccccg

SEQ ID NO: 273885 - DNA, 30 bp, Artificial Sequence
  Synthetic oligonucleotide
gataggaaggatttgcaccagggatccccg

SEQ ID NO: 273886 - DNA, 30 bp, Artificial Sequence
  Synthetic oligonucleotide
tagatttagagctggaactggatgtccccg

SEQ ID NO: 273887 - DNA, 31 bp, Artificial Sequence
  Synthetic oligonucleotide
aaagggttaaggggtgtagctgtgttccccg

SEQ ID NO: 273888 - DNA, 30 bp, Artificial Sequence
  Synthetic oligonucleotide
aaggcttgactagcgacaagatcaagcccg

SEQ ID NO: 273889 - DNA, 30 bp, Artificial Sequence
  Synthetic oligonucleotide
catagtgtagttgctgatcgtagaagcccg

SEQ ID NO: 273890 - DNA, 30 bp, Artificial Sequence
  Synthetic oligonucleotide
atctacagctgtttcctgaaaataagcccg

SEQ ID NO: 273891 - DNA, 30 bp, Artificial Sequence
  Synthetic oligonucleotide
gaaaaacttcgctccggtaaagtcagcccg

SEQ ID NO: 273892 - DNA, 30 bp, Artificial Sequence
  Synthetic oligonucleotide
caggtcgcttttgtcagaagaaagagcccg

SEQ ID NO: 273893 - DNA, 30 bp, Artificial Sequence
  Synthetic oligonucleotide
ttagctagactatacataggtaagagcccg

SEQ ID NO: 273894 - DNA, 30 bp, Artificial Sequence
  Synthetic oligonucleotide
ggagagggaccatactaattgacgagcccg

SEQ ID NO: 273895 - DNA, 30 bp, Artificial Sequence
  Synthetic oligonucleotide
attagcgaatctgagaacgctacccgcccg

SEQ ID NO: 273896 - DNA, 30 bp, Artificial Sequence
  Synthetic oligonucleotide
aacagcgttacgagacgggtccgaggcccg

SEQ ID NO: 273897 - DNA, 30 bp, Artificial Sequence
  Synthetic oligonucleotide
tgggcccagagaattcgacaacgcggcccg

SEQ ID NO: 273898 - DNA, 30 bp, Artificial Sequence
  Synthetic oligonucleotide
atttggcgctaaccatagtagttcggcccg

SEQ ID NO: 273899 - DNA, 30 bp, Artificial Sequence
  Synthetic oligonucleotide
gggatgacatgtaacgacaatcatggcccg

SEQ ID NO: 273900 - DNA, 30 bp, Artificial Sequence
  Synthetic oligonucleotide
gctgccaagatgttggatcaggaatgcccg

SEQ ID NO: 273901 - DNA, 30 bp, Artificial Sequence
  Synthetic oligonucleotide
gagccacgcctcagaggctggacatgcccg

SEQ ID NO: 273902 - DNA, 30 bp, Artificial Sequence
  Synthetic oligonucleotide
aaagacatacctagtcctgctggcatcccg

SEQ ID NO: 273903 - DNA, 30 bp, Artificial Sequence
  Synthetic oligonucleotide
tgaaatttggaactgcaaacgtgcatcccg

SEQ ID NO: 273904 - DNA, 30 bp, Artificial Sequence
  Synthetic oligonucleotide
ctcttgctgatcgttctctcgcgtatcccg

SEQ ID NO: 273905 - DNA, 30 bp, Artificial Sequence
  Synthetic oligonucleotide
aatgaaccagcatgatcaagattcctcccg

SEQ ID NO: 273906 - DNA, 30 bp, Artificial Sequence
  Synthetic oligonucleotide
gctatgtgcgcgctagaggaggatctcccg

SEQ ID NO: 273907 - DNA, 30 bp, Artificial Sequence
  Synthetic oligonucleotide
gtatacgggggttgactcctctctctcccg

SEQ ID NO: 273908 - DNA, 30 bp, Artificial Sequence
  Synthetic oligonucleotide
gagggaatcccgccggtcgaaagtctcccg

SEQ ID NO: 273909 - DNA, 31 bp, Artificial Sequence
  Synthetic oligonucleotide
ccatctgcgctacctcgcgggttgcgtcccg

SEQ ID NO: 273910 - DNA, 30 bp, Artificial Sequence
  Synthetic oligonucleotide
aaggtcaatgggataattgatctcttcccg

SEQ ID NO: 273911 - DNA, 30 bp, Artificial Sequence
  Synthetic oligonucleotide
cgactatgacttgacttttcattcttcccg

SEQ ID NO: 273912 - DNA, 30 bp, Artificial Sequence
  Synthetic oligonucleotide
ttttggtggtgaggacacgattatttcccg

SEQ ID NO: 273913 - DNA, 30 bp, Artificial Sequence
  Synthetic oligonucleotide
aaggatccgtcaacacgcgctcagaagccg

SEQ ID NO: 273914 - DNA, 30 bp, Artificial Sequence
  Synthetic oligonucleotide
gtactacagggcgctactagttataagccg

SEQ ID NO: 273915 - DNA, 30 bp, Artificial Sequence
  Synthetic oligonucleotide
ccgcataaagtgtaggggctgcaacagccg

SEQ ID NO: 273916 - DNA, 30 bp, Artificial Sequence
  Synthetic oligonucleotide
gttatgagtcggaccttaagataacagccg

SEQ ID NO: 273917 - DNA, 30 bp, Artificial Sequence
  Synthetic oligonucleotide
ctgaagccacagggtcatggtgaccagccg

SEQ ID NO: 273918 - DNA, 30 bp, Artificial Sequence
  Synthetic oligonucleotide
aatcgaatcgatggtatctcttaccagccg

SEQ ID NO: 273919 - DNA, 30 bp, Artificial Sequence
  Synthetic oligonucleotide
cattccagacggcttcagtgatgccagccg

SEQ ID NO: 273920 - DNA, 30 bp, Artificial Sequence
  Synthetic oligonucleotide
ataagtcttaaaagtcctaaccttcagccg

SEQ ID NO: 273921 - DNA, 30 bp, Artificial Sequence
  Synthetic oligonucleotide
tactaccagtgtctgccacactttcagccg

SEQ ID NO: 273922 - DNA, 30 bp, Artificial Sequence
  Synthetic oligonucleotide
aggtcggaataattagtctaataagagccg

SEQ ID NO: 273923 - DNA, 30 bp, Artificial Sequence
  Synthetic oligonucleotide
gccggttggatataggatactcgagagccg

SEQ ID NO: 273924 - DNA, 30 bp, Artificial Sequence
  Synthetic oligonucleotide
accggctgcagtgtgggaagtgaggagccg

SEQ ID NO: 273925 - DNA, 30 bp, Artificial Sequence
  Synthetic oligonucleotide
atggtgttggaatgctggtccaggtagccg

SEQ ID NO: 273926 - DNA, 30 bp, Artificial Sequence
  Synthetic oligonucleotide
tacaccaccttatacatatccaaaacgccg

SEQ ID NO: 273927 - DNA, 30 bp, Artificial Sequence
  Synthetic oligonucleotide
ctgaagcaggtctctaaaagtttcacgccg

SEQ ID NO: 273928 - DNA, 30 bp, Artificial Sequence
  Synthetic oligonucleotide
cgacaccccgcaagttgtacatggacgccg

SEQ ID NO: 273929 - DNA, 30 bp, Artificial Sequence
  Synthetic oligonucleotide
ggctcagaccgacaactaaagcctacgccg

SEQ ID NO: 273930 - DNA, 30 bp, Artificial Sequence
  Synthetic oligonucleotide
ttgctacgagtttgccccacacgtacgccg

SEQ ID NO: 273931 - DNA, 30 bp, Artificial Sequence
  Synthetic oligonucleotide
gacactcctgcaagaaggccgccgccgccg

SEQ ID NO: 273932 - DNA, 30 bp, Artificial Sequence
  Synthetic oligonucleotide
attctacgataatacaaaacagtggcgccg

SEQ ID NO: 273933 - DNA, 30 bp, Artificial Sequence
  Synthetic oligonucleotide
tcaaacatccggtgagtggtaactgcgccg

SEQ ID NO: 273934 - DNA, 30 bp, Artificial Sequence
  Synthetic oligonucleotide
gcgttaacagggtaattttgacgatcgccg

SEQ ID NO: 273935 - DNA, 30 bp, Artificial Sequence
  Synthetic oligonucleotide
gatgcaatttgccgagacaaaggatcgccg

SEQ ID NO: 273936 - DNA, 30 bp, Artificial Sequence
  Synthetic oligonucleotide
cttacataggaaagggacccaggctcgccg

SEQ ID NO: 273937 - DNA, 30 bp, Artificial Sequence
  Synthetic oligonucleotide
gtactctaaaaaacgcgatgtccttcgccg

SEQ ID NO: 273938 - DNA, 30 bp, Artificial Sequence
  Synthetic oligonucleotide
gggcccaaaacgcccccccataacaggccg

SEQ ID NO: 273939 - DNA, 30 bp, Artificial Sequence
  Synthetic oligonucleotide
atgtggccgaacaggtctaattccaggccg

SEQ ID NO: 273940 - DNA, 30 bp, Artificial Sequence
  Synthetic oligonucleotide
gaaaaccaggaacctcgctctgagaggccg

SEQ ID NO: 273941 - DNA, 30 bp, Artificial Sequence
  Synthetic oligonucleotide
tacaggattgaaagtaagcccttgaggccg

SEQ ID NO: 273942 - DNA, 30 bp, Artificial Sequence
  Synthetic oligonucleotide
ctcgtataagcagtacactgtattaggccg

SEQ ID NO: 273943 - DNA, 30 bp, Artificial Sequence
  Synthetic oligonucleotide
taagacttttagccttaaatgcttaggccg

SEQ ID NO: 273944 - DNA, 30 bp, Artificial Sequence
  Synthetic oligonucleotide
caagtggcggtgaggtcaagctttaggccg

SEQ ID NO: 273945 - DNA, 30 bp, Artificial Sequence
  Synthetic oligonucleotide
atagagacggatggatgattcagacggccg

SEQ ID NO: 273946 - DNA, 30 bp, Artificial Sequence
  Synthetic oligonucleotide
caagaggcccttcgtgtggagagccggccg

SEQ ID NO: 273947 - DNA, 30 bp, Artificial Sequence
  Synthetic oligonucleotide
aagcgctgatttgagatatcaacgcggccg

SEQ ID NO: 273948 - DNA, 30 bp, Artificial Sequence
  Synthetic oligonucleotide
tatatgaggaagttgcgtcaacatcggccg

SEQ ID NO: 273949 - DNA, 30 bp, Artificial Sequence
  Synthetic oligonucleotide
ctatggcccgtgagtcagggacttcggccg

SEQ ID NO: 273950 - DNA, 30 bp, Artificial Sequence
  Synthetic oligonucleotide
tacctatgcacatatactcttaacgggccg

SEQ ID NO: 273951 - DNA, 30 bp, Artificial Sequence
  Synthetic oligonucleotide
caggaaatagccatggaatgttatgggccg

SEQ ID NO: 273952 - DNA, 30 bp, Artificial Sequence
  Synthetic oligonucleotide
tgaagagcacattccagttgccctgggccg

SEQ ID NO: 273953 - DNA, 30 bp, Artificial Sequence
  Synthetic oligonucleotide
ttatagtaatatttaaacgactaatggccg

SEQ ID NO: 273954 - DNA, 30 bp, Artificial Sequence
  Synthetic oligonucleotide
gtttgttctcgtaccttcagaaactggccg

SEQ ID NO: 273955 - DNA, 30 bp, Artificial Sequence
  Synthetic oligonucleotide
gaatcacaccttgcatgctattcctggccg

SEQ ID NO: 273956 - DNA, 30 bp, Artificial Sequence
  Synthetic oligonucleotide
ggacatgactcacatcaatagttctggccg

SEQ ID NO: 273957 - DNA, 30 bp, Artificial Sequence
  Synthetic oligonucleotide
cggcaaatccgttagccattaacttggccg

SEQ ID NO: 273958 - DNA, 30 bp, Artificial Sequence
  Synthetic oligonucleotide
aaggcaacttggtagaacgcaatcatgccg

SEQ ID NO: 273959 - DNA, 30 bp, Artificial Sequence
  Synthetic oligonucleotide
tcttcgtatctggccgtgtataggatgccg

SEQ ID NO: 273960 - DNA, 30 bp, Artificial Sequence
  Synthetic oligonucleotide
agtggatttcaccatattagtagtatgccg

SEQ ID NO: 273961 - DNA, 30 bp, Artificial Sequence
  Synthetic oligonucleotide
tgcgttttctgttatgattgtggtatgccg

SEQ ID NO: 273962 - DNA, 30 bp, Artificial Sequence
  Synthetic oligonucleotide
ttggccaatgaaaaccgagaacttatgccg

SEQ ID NO: 273963 - DNA, 30 bp, Artificial Sequence
  Synthetic oligonucleotide
actgacttatttcggtgagtctttatgccg

SEQ ID NO: 273964 - DNA, 30 bp, Artificial Sequence
  Synthetic oligonucleotide
ccagtcggtgagactcgcaggcgcctgccg

SEQ ID NO: 273965 - DNA, 30 bp, Artificial Sequence
  Synthetic oligonucleotide
atggtgctggcttgcaaacgcaatctgccg

SEQ ID NO: 273966 - DNA, 30 bp, Artificial Sequence
  Synthetic oligonucleotide
gtcctgccttcaccggggaatcctctgccg

SEQ ID NO: 273967 - DNA, 30 bp, Artificial Sequence
  Synthetic oligonucleotide
ccaagctctgaggaaagctgctgtctgccg

SEQ ID NO: 273968 - DNA, 30 bp, Artificial Sequence
  Synthetic oligonucleotide
atcagtaatttaccgactgtgtgtctgccg

SEQ ID NO: 273969 - DNA, 30 bp, Artificial Sequence
  Synthetic oligonucleotide
attgagcccatggatggcttgaaagtgccg

SEQ ID NO: 273970 - DNA, 30 bp, Artificial Sequence
  Synthetic oligonucleotide
aaagatgtaaatgaattgcgtagagtgccg

SEQ ID NO: 273971 - DNA, 30 bp, Artificial Sequence
  Synthetic oligonucleotide
atgttccaattaacaagattcggcgtgccg

SEQ ID NO: 273972 - DNA, 30 bp, Artificial Sequence
  Synthetic oligonucleotide
ttgctaatagtcactggggtttctgtgccg

SEQ ID NO: 273973 - DNA, 30 bp, Artificial Sequence
  Synthetic oligonucleotide
agtgggtaaggaggctcatcttgtgtgccg

SEQ ID NO: 273974 - DNA, 30 bp, Artificial Sequence
  Synthetic oligonucleotide
tgccaagaaggggcttaaccgtgattgccg

SEQ ID NO: 273975 - DNA, 30 bp, Artificial Sequence
  Synthetic oligonucleotide
gcctcgacagttttcggagttttcttgccg

SEQ ID NO: 273976 - DNA, 30 bp, Artificial Sequence
  Synthetic oligonucleotide
tatgacgcgtaaaatgccagtcaaaatccg

SEQ ID NO: 273977 - DNA, 30 bp, Artificial Sequence
  Synthetic oligonucleotide
ttcagggggctttgaccttaagaaaatccg

SEQ ID NO: 273978 - DNA, 30 bp, Artificial Sequence
  Synthetic oligonucleotide
atcatcggtttaactagaaggtacaatccg

SEQ ID NO: 273979 - DNA, 30 bp, Artificial Sequence
  Synthetic oligonucleotide
tctggaagtggttccgggcaattcaatccg

SEQ ID NO: 273980 - DNA, 30 bp, Artificial Sequence
  Synthetic oligonucleotide
aacccgaggaacaacaatagggggaatccg

SEQ ID NO: 273981 - DNA, 30 bp, Artificial Sequence
  Synthetic oligonucleotide
tcgcttgcccaaaacgctggaagtaatccg

SEQ ID NO: 273982 - DNA, 30 bp, Artificial Sequence
  Synthetic oligonucleotide
caggccgagtcttacaagcaggtacatccg

SEQ ID NO: 273983 - DNA, 30 bp, Artificial Sequence
  Synthetic oligonucleotide
atgggtatggaatttcagtgtagccatccg

SEQ ID NO: 273984 - DNA, 30 bp, Artificial Sequence
  Synthetic oligonucleotide
aggtgatccatgatgataatatagcatccg

SEQ ID NO: 273985 - DNA, 30 bp, Artificial Sequence
  Synthetic oligonucleotide
gtaggccaagaccgtctatgatccgatccg

SEQ ID NO: 273986 - DNA, 30 bp, Artificial Sequence
  Synthetic oligonucleotide
gctctggacctttgaggtatgttggatccg

SEQ ID NO: 273987 - DNA, 30 bp, Artificial Sequence
  Synthetic oligonucleotide
gtctatactcacaaaacagtgtggtatccg

SEQ ID NO: 273988 - DNA, 30 bp, Artificial Sequence
  Synthetic oligonucleotide
gggacatttgtctatacctggaaaactccg

SEQ ID NO: 273989 - DNA, 30 bp, Artificial Sequence
  Synthetic oligonucleotide
tttcgatggtgcacgtccacagacactccg

SEQ ID NO: 273990 - DNA, 30 bp, Artificial Sequence
  Synthetic oligonucleotide
tatgacttccctatgtgttaccgtactccg

SEQ ID NO: 273991 - DNA, 30 bp, Artificial Sequence
  Synthetic oligonucleotide
tcgacttgctttaggtgcttcggtactccg

SEQ ID NO: 273992 - DNA, 30 bp, Artificial Sequence
  Synthetic oligonucleotide
taaaagagcgttttgacgtaatcacctccg

SEQ ID NO: 273993 - DNA, 30 bp, Artificial Sequence
  Synthetic oligonucleotide
attgggaatcgcacgataggggtacctccg

SEQ ID NO: 273994 - DNA, 30 bp, Artificial Sequence
  Synthetic oligonucleotide
cagttgcgtctgagcatcaataaccctccg

SEQ ID NO: 273995 - DNA, 30 bp, Artificial Sequence
  Synthetic oligonucleotide
atggaggtggcctattccagattccctccg

SEQ ID NO: 273996 - DNA, 30 bp, Artificial Sequence
  Synthetic oligonucleotide
gcgcgcggtaagacactaacgtcgcctccg

SEQ ID NO: 273997 - DNA, 30 bp, Artificial Sequence
  Synthetic oligonucleotide
tacttctagcgtaatgttcaagcagctccg

SEQ ID NO: 273998 - DNA, 30 bp, Artificial Sequence
  Synthetic oligonucleotide
atcgcgcaggttagtagtggccgagctccg

SEQ ID NO: 273999 - DNA, 30 bp, Artificial Sequence
  Synthetic oligonucleotide
gatatcctgtataacctggggagcgctccg

SEQ ID NO: 274000 - DNA, 30 bp, Artificial Sequence
  Synthetic oligonucleotide
atagcatctaatcttatggcacaggctccg

SEQ ID NO: 274001 - DNA, 30 bp, Artificial Sequence
  Synthetic oligonucleotide
gtctcggtacggtgaacaaacacggctccg

SEQ ID NO: 274002 - DNA, 30 bp, Artificial Sequence
  Synthetic oligonucleotide
cgctggggatgtggccgagcgttggctccg

SEQ ID NO: 274003 - DNA, 30 bp, Artificial Sequence
  Synthetic oligonucleotide
aagtgtatactagcgcatagttcatctccg

SEQ ID NO: 274004 - DNA, 30 bp, Artificial Sequence
  Synthetic oligonucleotide
cgtcggcgttaagtgttgatggtctctccg

SEQ ID NO: 274005 - DNA, 30 bp, Artificial Sequence
  Synthetic oligonucleotide
tgtggaccgtatatgcaccaggattctccg

SEQ ID NO: 274006 - DNA, 30 bp, Artificial Sequence
  Synthetic oligonucleotide
ctatggaagcgatttgtgcactcttctccg

SEQ ID NO: 274007 - DNA, 30 bp, Artificial Sequence
  Synthetic oligonucleotide
ggacaggctaagttccgctgtcgttctccg

SEQ ID NO: 274008 - DNA, 30 bp, Artificial Sequence
  Synthetic oligonucleotide
atctagccggtgaaaaagctgtcaagtccg

SEQ ID NO: 274009 - DNA, 30 bp, Artificial Sequence
  Synthetic oligonucleotide
taatgtaactcagggacacattccagtccg

SEQ ID NO: 274010 - DNA, 30 bp, Artificial Sequence
  Synthetic oligonucleotide
attatgcaagtactttagtgactcagtccg

SEQ ID NO: 274011 - DNA, 30 bp, Artificial Sequence
  Synthetic oligonucleotide
tagggtttggggtaccagagtgggagtccg

SEQ ID NO: 274012 - DNA, 30 bp, Artificial Sequence
  Synthetic oligonucleotide
tggatcctcggtcgggcgcattcgcgtccg

SEQ ID NO: 274013 - DNA, 30 bp, Artificial Sequence
  Synthetic oligonucleotide
agatttgttgctaacgcctcctggcgtccg

SEQ ID NO: 274014 - DNA, 30 bp, Artificial Sequence
  Synthetic oligonucleotide
tagtccttgattatgcaatccatgcgtccg

SEQ ID NO: 274015 - DNA, 30 bp, Artificial Sequence
  Synthetic oligonucleotide
gtatatcgcagaagggattcggtgcgtccg

SEQ ID NO: 274016 - DNA, 31 bp, Artificial Sequence
  Synthetic oligonucleotide
ggctgaagttcctaggactatagctcgtccg

SEQ ID NO: 274017 - DNA, 30 bp, Artificial Sequence
  Synthetic oligonucleotide
agccccttattaagcttggttacaggtccg

SEQ ID NO: 274018 - DNA, 30 bp, Artificial Sequence
  Synthetic oligonucleotide
gaggctcccttgatctcaggatcaggtccg

SEQ ID NO: 274019 - DNA, 30 bp, Artificial Sequence
  Synthetic oligonucleotide
tcgtcggtgatgctggccacaaacggtccg

SEQ ID NO: 274020 - DNA, 31 bp, Artificial Sequence
  Synthetic oligonucleotide
agttagtgaacggtggggttagaggggtccg

SEQ ID NO: 274021 - DNA, 30 bp, Artificial Sequence
  Synthetic oligonucleotide
tacagaagttgggaaagttacatgggtccg

SEQ ID NO: 274022 - DNA, 30 bp, Artificial Sequence
  Synthetic oligonucleotide
ctgcagagggtttaagaaagaactggtccg

SEQ ID NO: 274023 - DNA, 30 bp, Artificial Sequence
  Synthetic oligonucleotide
ctcaaaatcccccatggaaaaaagtgtccg

SEQ ID NO: 274024 - DNA, 30 bp, Artificial Sequence
  Synthetic oligonucleotide
gtgcagcatacaggtacgatatacattccg

SEQ ID NO: 274025 - DNA, 30 bp, Artificial Sequence
  Synthetic oligonucleotide
gggggctacgtagtacggttctagattccg

SEQ ID NO: 274026 - DNA, 30 bp, Artificial Sequence
  Synthetic oligonucleotide
cttagtcggtaaggcatgtacgatattccg

SEQ ID NO: 274027 - DNA, 30 bp, Artificial Sequence
  Synthetic oligonucleotide
cgagaagtaccagtaataaatattattccg

SEQ ID NO: 274028 - DNA, 30 bp, Artificial Sequence
  Synthetic oligonucleotide
agttgagctactccgtgtcagcgacttccg

SEQ ID NO: 274029 - DNA, 30 bp, Artificial Sequence
  Synthetic oligonucleotide
atcgtggggtcaaaggtcaatacccttccg

SEQ ID NO: 274030 - DNA, 30 bp, Artificial Sequence
  Synthetic oligonucleotide
tttatttggtcatgcgagatccttcttccg

SEQ ID NO: 274031 - DNA, 30 bp, Artificial Sequence
  Synthetic oligonucleotide
atgtctctagctgtagcatgatttcttccg

SEQ ID NO: 274032 - DNA, 30 bp, Artificial Sequence
  Synthetic oligonucleotide
ggtcgacgcgttaatcgttcataagttccg

SEQ ID NO: 274033 - DNA, 30 bp, Artificial Sequence
  Synthetic oligonucleotide
aaaggcagcccttatcttattcccgttccg

SEQ ID NO: 274034 - DNA, 30 bp, Artificial Sequence
  Synthetic oligonucleotide
ctcaccacgaattgctctcggcgggttccg

SEQ ID NO: 274035 - DNA, 30 bp, Artificial Sequence
  Synthetic oligonucleotide
tgtttttataaagaacagagctatgttccg

SEQ ID NO: 274036 - DNA, 30 bp, Artificial Sequence
  Synthetic oligonucleotide
gaagtgcaacttcgggattcgttatttccg

SEQ ID NO: 274037 - DNA, 30 bp, Artificial Sequence
  Synthetic oligonucleotide
actcattgaccacctccggtcaactttccg

SEQ ID NO: 274038 - DNA, 30 bp, Artificial Sequence
  Synthetic oligonucleotide
attcgtgtcatatattttagtgcctttccg

SEQ ID NO: 274039 - DNA, 30 bp, Artificial Sequence
  Synthetic oligonucleotide
agcgttgaacgaagtatgtcttcgtttccg

SEQ ID NO: 274040 - DNA, 30 bp, Artificial Sequence
  Synthetic oligonucleotide
taggtcccgaactgagtaatgacgaaagcg

SEQ ID NO: 274041 - DNA, 30 bp, Artificial Sequence
  Synthetic oligonucleotide
ctaagatgggcgcaaatactttcgaaagcg

SEQ ID NO: 274042 - DNA, 30 bp, Artificial Sequence
  Synthetic oligonucleotide
gagataggccgacgaagcatttggaaagcg

SEQ ID NO: 274043 - DNA, 30 bp, Artificial Sequence
  Synthetic oligonucleotide
attatgggccctaatatgtcagctaaagcg

SEQ ID NO: 274044 - DNA, 30 bp, Artificial Sequence
  Synthetic oligonucleotide
ccagggtattatttgtcatattttaaagcg

SEQ ID NO: 274045 - DNA, 30 bp, Artificial Sequence
  Synthetic oligonucleotide
agctcgattctcatgcgggttggacaagcg

SEQ ID NO: 274046 - DNA, 30 bp, Artificial Sequence
  Synthetic oligonucleotide
ctatggacctgctagtgtacagggcaagcg

SEQ ID NO: 274047 - DNA, 30 bp, Artificial Sequence
  Synthetic oligonucleotide
gtgttatcatcaaggtttcgatgtcaagcg

SEQ ID NO: 274048 - DNA, 30 bp, Artificial Sequence
  Synthetic oligonucleotide
aagcccgatcgcctccgtgagtgtcaagcg

SEQ ID NO: 274049 - DNA, 30 bp, Artificial Sequence
  Synthetic oligonucleotide
atccgaaacttcactaagagaattcaagcg

SEQ ID NO: 274050 - DNA, 30 bp, Artificial Sequence
  Synthetic oligonucleotide
tgtaagagcgattaccgtctctaagaagcg

SEQ ID NO: 274051 - DNA, 30 bp, Artificial Sequence
  Synthetic oligonucleotide
gatgcgggtaagatccggtctccagaagcg

SEQ ID NO: 274052 - DNA, 30 bp, Artificial Sequence
  Synthetic oligonucleotide
cacattccgcgtggtggccgcacggaagcg

SEQ ID NO: 274053 - DNA, 30 bp, Artificial Sequence
  Synthetic oligonucleotide
agcaagtgctagaaacgttaccgggaagcg

SEQ ID NO: 274054 - DNA, 30 bp, Artificial Sequence
  Synthetic oligonucleotide
cccacttttaagatcgtagggaatgaagcg

SEQ ID NO: 274055 - DNA, 30 bp, Artificial Sequence
  Synthetic oligonucleotide
cctgcggtagaaaagtcttggtctgaagcg

SEQ ID NO: 274056 - DNA, 30 bp, Artificial Sequence
  Synthetic oligonucleotide
caggacggattaatgtcaggtcttgaagcg

SEQ ID NO: 274057 - DNA, 30 bp, Artificial Sequence
  Synthetic oligonucleotide
ggaggacagctatgactttaaaaataagcg

SEQ ID NO: 274058 - DNA, 30 bp, Artificial Sequence
  Synthetic oligonucleotide
gggatgatgatcgcgcctcctaaataagcg

SEQ ID NO: 274059 - DNA, 30 bp, Artificial Sequence
  Synthetic oligonucleotide
tagcttggacgtgaatgcgcggaataagcg

SEQ ID NO: 274060 - DNA, 30 bp, Artificial Sequence
  Synthetic oligonucleotide
ttcgctgctcagatgacatcgtaataagcg

SEQ ID NO: 274061 - DNA, 30 bp, Artificial Sequence
  Synthetic oligonucleotide
taatctagtacctcttgtactctataagcg

SEQ ID NO: 274062 - DNA, 30 bp, Artificial Sequence
  Synthetic oligonucleotide
tcaatcctaggcgttagggtagtataagcg

SEQ ID NO: 274063 - DNA, 30 bp, Artificial Sequence
  Synthetic oligonucleotide
ctaaaggtacggttcgactcagcgtaagcg

SEQ ID NO: 274064 - DNA, 30 bp, Artificial Sequence
  Synthetic oligonucleotide
cctggcctgtgtctcttactagtgtaagcg

SEQ ID NO: 274065 - DNA, 30 bp, Artificial Sequence
  Synthetic oligonucleotide
agccggatagtaggagctgactgttaagcg

SEQ ID NO: 274066 - DNA, 30 bp, Artificial Sequence
  Synthetic oligonucleotide
agagattattaccactagggtgaaacagcg

SEQ ID NO: 274067 - DNA, 30 bp, Artificial Sequence
  Synthetic oligonucleotide
gtgaataccatcaacatgttctggacagcg

SEQ ID NO: 274068 - DNA, 30 bp, Artificial Sequence
  Synthetic oligonucleotide
gtaaagtggctgcaatagtcgggtacagcg

SEQ ID NO: 274069 - DNA, 30 bp, Artificial Sequence
  Synthetic oligonucleotide
caccactgatacggcggtctcgcaccagcg

SEQ ID NO: 274070 - DNA, 30 bp, Artificial Sequence
  Synthetic oligonucleotide
ggctcccactgaagattttggttcccagcg

SEQ ID NO: 274071 - DNA, 30 bp, Artificial Sequence
  Synthetic oligonucleotide
gtggactaggccatatggatcaggccagcg

SEQ ID NO: 274072 - DNA, 30 bp, Artificial Sequence
  Synthetic oligonucleotide
tataagaaattaacagggaagcctccagcg

SEQ ID NO: 274073 - DNA, 30 bp, Artificial Sequence
  Synthetic oligonucleotide
atacgcggttagacgaggagcctagcagcg

SEQ ID NO: 274074 - DNA, 30 bp, Artificial Sequence
  Synthetic oligonucleotide
gaggaaccgtaggtcaaggggagggcagcg

SEQ ID NO: 274075 - DNA, 30 bp, Artificial Sequence
  Synthetic oligonucleotide
ccgtaagggctccggtcaaaggaatcagcg

SEQ ID NO: 274076 - DNA, 30 bp, Artificial Sequence
  Synthetic oligonucleotide
acagtctagaaaagccgccagatgtcagcg

SEQ ID NO: 274077 - DNA, 30 bp, Artificial Sequence
  Synthetic oligonucleotide
gggcggcgcaagttctcgctattgtcagcg

SEQ ID NO: 274078 - DNA, 30 bp, Artificial Sequence
  Synthetic oligonucleotide
cttgacactaattccattgccttgtcagcg

SEQ ID NO: 274079 - DNA, 30 bp, Artificial Sequence
  Synthetic oligonucleotide
tataaattgaaggactgtaaacattcagcg

SEQ ID NO: 274080 - DNA, 30 bp, Artificial Sequence
  Synthetic oligonucleotide
gctgggtcccagggccgcgggacttcagcg

SEQ ID NO: 274081 - DNA, 30 bp, Artificial Sequence
  Synthetic oligonucleotide
gacacgtatatggtggagtggcaaagagcg

SEQ ID NO: 274082 - DNA, 30 bp, Artificial Sequence
  Synthetic oligonucleotide
atcttgcgtacacttggtaaatccagagcg

SEQ ID NO: 274083 - DNA, 30 bp, Artificial Sequence
  Synthetic oligonucleotide
gtttgtccatttaaagggggagtacgagcg

SEQ ID NO: 274084 - DNA, 30 bp, Artificial Sequence
  Synthetic oligonucleotide
atatggtccttatgccacgatttccgagcg

SEQ ID NO: 274085 - DNA, 30 bp, Artificial Sequence
  Synthetic oligonucleotide
gttccaaacgccgctgtataggggcgagcg

SEQ ID NO: 274086 - DNA, 30 bp, Artificial Sequence
  Synthetic oligonucleotide
gtcgaagcctttaaacgacaccatcgagcg

SEQ ID NO: 274087 - DNA, 30 bp, Artificial Sequence
  Synthetic oligonucleotide
ttggccgtactttttcattgctatcgagcg

SEQ ID NO: 274088 - DNA, 30 bp, Artificial Sequence
  Synthetic oligonucleotide
gcacgtctcgtagccggttggaaaggagcg

SEQ ID NO: 274089 - DNA, 30 bp, Artificial Sequence
  Synthetic oligonucleotide
ttggaaaaagtaactgagatacacggagcg

SEQ ID NO: 274090 - DNA, 30 bp, Artificial Sequence
  Synthetic oligonucleotide
ataagctgttacggatctctttccggagcg

SEQ ID NO: 274091 - DNA, 30 bp, Artificial Sequence
  Synthetic oligonucleotide
caccggttggctaaggggtgccgcggagcg

SEQ ID NO: 274092 - DNA, 30 bp, Artificial Sequence
  Synthetic oligonucleotide
acgaccgccgcgttcatagctacgggagcg

SEQ ID NO: 274093 - DNA, 30 bp, Artificial Sequence
  Synthetic oligonucleotide
tacaaggaggcagcccgaagcgggggagcg

SEQ ID NO: 274094 - DNA, 30 bp, Artificial Sequence
  Synthetic oligonucleotide
ctccgacaaccgtaagtaagagttggagcg

SEQ ID NO: 274095 - DNA, 30 bp, Artificial Sequence
  Synthetic oligonucleotide
gtgtgattggaccattattataaatgagcg

SEQ ID NO: 274096 - DNA, 30 bp, Artificial Sequence
  Synthetic oligonucleotide
tcatgattattacagctcgctccctgagcg

SEQ ID NO: 274097 - DNA, 30 bp, Artificial Sequence
  Synthetic oligonucleotide
taaggtatacaagatgcaacatggtgagcg

SEQ ID NO: 274098 - DNA, 30 bp, Artificial Sequence
  Synthetic oligonucleotide
gcgaaactcgcggcaatcccgttttgagcg

SEQ ID NO: 274099 - DNA, 30 bp, Artificial Sequence
  Synthetic oligonucleotide
tttgtccgtaaattgaagtacagcatagcg

SEQ ID NO: 274100 - DNA, 30 bp, Artificial Sequence
  Synthetic oligonucleotide
cagtattatgatggctggggtaagatagcg

SEQ ID NO: 274101 - DNA, 30 bp, Artificial Sequence
  Synthetic oligonucleotide
tatgtgctaacactcgaaatgacgatagcg

SEQ ID NO: 274102 - DNA, 30 bp, Artificial Sequence
  Synthetic oligonucleotide
acaggtgaacactagggcgcgcggatagcg

SEQ ID NO: 274103 - DNA, 30 bp, Artificial Sequence
  Synthetic oligonucleotide
gtagtcggatcagacgggctcagactagcg

SEQ ID NO: 274104 - DNA, 30 bp, Artificial Sequence
  Synthetic oligonucleotide
cgggaatcacgcttacactatgcgctagcg

SEQ ID NO: 274105 - DNA, 30 bp, Artificial Sequence
  Synthetic oligonucleotide
gcagggatatacaatgcactctcgctagcg

SEQ ID NO: 274106 - DNA, 30 bp, Artificial Sequence
  Synthetic oligonucleotide
gaggggtaaggaagggtagaattgctagcg

SEQ ID NO: 274107 - DNA, 30 bp, Artificial Sequence
  Synthetic oligonucleotide
ttttcgaaactcgcgtctgtctctctagcg

SEQ ID NO: 274108 - DNA, 30 bp, Artificial Sequence
  Synthetic oligonucleotide
ctacgtagatctgggtccgagtgagtagcg

SEQ ID NO: 274109 - DNA, 30 bp, Artificial Sequence
  Synthetic oligonucleotide
attttgcgctccttagcactccgggtagcg

SEQ ID NO: 274110 - DNA, 30 bp, Artificial Sequence
  Synthetic oligonucleotide
tctccgcgtggtagaaaatattggttagcg

SEQ ID NO: 274111 - DNA, 30 bp, Artificial Sequence
  Synthetic oligonucleotide
ggagtactaaggcgcacgtacatgttagcg

SEQ ID NO: 274112 - DNA, 30 bp, Artificial Sequence
  Synthetic oligonucleotide
attggcagcaatcatacctggcatttagcg

SEQ ID NO: 274113 - DNA, 30 bp, Artificial Sequence
  Synthetic oligonucleotide
agctaacgaccgaacggctaggcaaacgcg

SEQ ID NO: 274114 - DNA, 30 bp, Artificial Sequence
  Synthetic oligonucleotide
ggataccttggtgcttgtgtgtgaaacgcg

SEQ ID NO: 274115 - DNA, 30 bp, Artificial Sequence
  Synthetic oligonucleotide
tcattcagtattaaaggtatcgtaaacgcg

SEQ ID NO: 274116 - DNA, 30 bp, Artificial Sequence
  Synthetic oligonucleotide
tggctaccgctaggccacttttcgaacgcg

SEQ ID NO: 274117 - DNA, 30 bp, Artificial Sequence
  Synthetic oligonucleotide
ataaggtccgtatactcactcacacacgcg

SEQ ID NO: 274118 - DNA, 30 bp, Artificial Sequence
  Synthetic oligonucleotide
gtacaagtataaatgatagtcgcacacgcg

SEQ ID NO: 274119 - DNA, 30 bp, Artificial Sequence
  Synthetic oligonucleotide
acgcaccaagtattgcctgaacaccacgcg

SEQ ID NO: 274120 - DNA, 30 bp, Artificial Sequence
  Synthetic oligonucleotide
gagcgcagaaaaaacgccgcaggccacgcg

SEQ ID NO: 274121 - DNA, 30 bp, Artificial Sequence
  Synthetic oligonucleotide
cagaaaacgctcggcctactgaggcacgcg

SEQ ID NO: 274122 - DNA, 30 bp, Artificial Sequence
  Synthetic oligonucleotide
tgcaggtgcgccgtatttctgcggcacgcg

SEQ ID NO: 274123 - DNA, 30 bp, Artificial Sequence
  Synthetic oligonucleotide
ggtgatttaaaggggcagcagtggcacgcg

SEQ ID NO: 274124 - DNA, 30 bp, Artificial Sequence
  Synthetic oligonucleotide
gtgtcaatcgttgtcgagtagaatcacgcg

SEQ ID NO: 274125 - DNA, 30 bp, Artificial Sequence
  Synthetic oligonucleotide
gctcagtcaaaacattgttccaaagacgcg

SEQ ID NO: 274126 - DNA, 30 bp, Artificial Sequence
  Synthetic oligonucleotide
tggacaaagatgggggggttcatagacgcg

SEQ ID NO: 274127 - DNA, 30 bp, Artificial Sequence
  Synthetic oligonucleotide
tttcatgggggatgtcgaagccaggacgcg

SEQ ID NO: 274128 - DNA, 30 bp, Artificial Sequence
  Synthetic oligonucleotide
agctcaatatatgagcggtaccctgacgcg

SEQ ID NO: 274129 - DNA, 30 bp, Artificial Sequence
  Synthetic oligonucleotide
cagggataggggagcaatagcattgacgcg

SEQ ID NO: 274130 - DNA, 30 bp, Artificial Sequence
  Synthetic oligonucleotide
ggtaggttgaaggtctacatcggatacgcg

SEQ ID NO: 274131 - DNA, 30 bp, Artificial Sequence
  Synthetic oligonucleotide
ttcgccgcttgctaatagaaatgatacgcg

SEQ ID NO: 274132 - DNA, 30 bp, Artificial Sequence
  Synthetic oligonucleotide
tgtacaaggatcaacgttaccatgtacgcg

SEQ ID NO: 274133 - DNA, 30 bp, Artificial Sequence
  Synthetic oligonucleotide
actaagcggcaatacatccacttgaccgcg

SEQ ID NO: 274134 - DNA, 30 bp, Artificial Sequence
  Synthetic oligonucleotide
cattaaacaaaaggcgccgttaaacccgcg

SEQ ID NO: 274135 - DNA, 30 bp, Artificial Sequence
  Synthetic oligonucleotide
ggatggactaggacacgcgattaccccgcg

SEQ ID NO: 274136 - DNA, 30 bp, Artificial Sequence
  Synthetic oligonucleotide
atctgccacaagaaactatatgttcccgcg

SEQ ID NO: 274137 - DNA, 30 bp, Artificial Sequence
  Synthetic oligonucleotide
atatggtatacgccggactcctcagccgcg

SEQ ID NO: 274138 - DNA, 30 bp, Artificial Sequence
  Synthetic oligonucleotide
cggcattttcttctcagagaacccgccgcg

SEQ ID NO: 274139 - DNA, 30 bp, Artificial Sequence
  Synthetic oligonucleotide
aacgaccccgggcaatgtggattggccgcg

SEQ ID NO: 274140 - DNA, 30 bp, Artificial Sequence
  Synthetic oligonucleotide
ctcgacccgaggttgcattcgtatgccgcg

SEQ ID NO: 274141 - DNA, 30 bp, Artificial Sequence
  Synthetic oligonucleotide
gcgttaatacggcgtctccagcttgccgcg

SEQ ID NO: 274142 - DNA, 30 bp, Artificial Sequence
  Synthetic oligonucleotide
ctactatcaaaccttttagtactctccgcg

SEQ ID NO: 274143 - DNA, 30 bp, Artificial Sequence
  Synthetic oligonucleotide
aatttaaagccgactaatatccgaagcgcg

SEQ ID NO: 274144 - DNA, 30 bp, Artificial Sequence
  Synthetic oligonucleotide
ctatcgtaatggcccgtgcagaccagcgcg

SEQ ID NO: 274145 - DNA, 30 bp, Artificial Sequence
  Synthetic oligonucleotide
gtctctaattcctaccgtcaccccagcgcg

SEQ ID NO: 274146 - DNA, 30 bp, Artificial Sequence
  Synthetic oligonucleotide
ttagctgtcgcataatagtgtacgagcgcg

SEQ ID NO: 274147 - DNA, 30 bp, Artificial Sequence
  Synthetic oligonucleotide
agtgatatggcttaatcctgcgctagcgcg

SEQ ID NO: 274148 - DNA, 30 bp, Artificial Sequence
  Synthetic oligonucleotide
gatattcccgaagacaagagaatacgcgcg

SEQ ID NO: 274149 - DNA, 30 bp, Artificial Sequence
  Synthetic oligonucleotide
ttttgggcgtccatacttgcgttacgcgcg

SEQ ID NO: 274150 - DNA, 30 bp, Artificial Sequence
  Synthetic oligonucleotide
atgtgctagcacctggtccgtggccgcgcg

SEQ ID NO: 274151 - DNA, 30 bp, Artificial Sequence
  Synthetic oligonucleotide
gacggactactgtcggatcgcgttcgcgcg

SEQ ID NO: 274152 - DNA, 30 bp, Artificial Sequence
  Synthetic oligonucleotide
atcggagcttttaaggagacgtggggcgcg

SEQ ID NO: 274153 - DNA, 30 bp, Artificial Sequence
  Synthetic oligonucleotide
atctacatattctcgaaaggcatatgcgcg

SEQ ID NO: 274154 - DNA, 30 bp, Artificial Sequence
  Synthetic oligonucleotide
ataatttccgatacggagattcgaatcgcg

SEQ ID NO: 274155 - DNA, 30 bp, Artificial Sequence
  Synthetic oligonucleotide
gtgccccttgcacaataacggggcatcgcg

SEQ ID NO: 274156 - DNA, 30 bp, Artificial Sequence
  Synthetic oligonucleotide
cgagtcttttggacagtgcggaggatcgcg

SEQ ID NO: 274157 - DNA, 30 bp, Artificial Sequence
  Synthetic oligonucleotide
ggctacggttatttgactatgtacctcgcg

SEQ ID NO: 274158 - DNA, 30 bp, Artificial Sequence
  Synthetic oligonucleotide
gttaaattaatcatatctgtagggctcgcg

SEQ ID NO: 274159 - DNA, 30 bp, Artificial Sequence
  Synthetic oligonucleotide
cccagcaaaagggatttcgttattctcgcg

SEQ ID NO: 274160 - DNA, 30 bp, Artificial Sequence
  Synthetic oligonucleotide
gtacgacgcacggcagtgccggaagtcgcg

SEQ ID NO: 274161 - DNA, 30 bp, Artificial Sequence
  Synthetic oligonucleotide
gcatgtggtggatgtactgccgacgtcgcg

SEQ ID NO: 274162 - DNA, 30 bp, Artificial Sequence
  Synthetic oligonucleotide
cacattagatgggtggtaggaagcgtcgcg

SEQ ID NO: 274163 - DNA, 30 bp, Artificial Sequence
  Synthetic oligonucleotide
ggcgtgtggtatctgatacacccggtcgcg

SEQ ID NO: 274164 - DNA, 30 bp, Artificial Sequence
  Synthetic oligonucleotide
tcgtgcgaatgttttggaaagcctgtcgcg

SEQ ID NO: 274165 - DNA, 30 bp, Artificial Sequence
  Synthetic oligonucleotide
gcaattggaaaatctgggtacattgtcgcg

SEQ ID NO: 274166 - DNA, 30 bp, Artificial Sequence
  Synthetic oligonucleotide
tcacaagtcaataaatgaacatttttcgcg

SEQ ID NO: 274167 - DNA, 30 bp, Artificial Sequence
  Synthetic oligonucleotide
tttggcgtcgcgctggatacgtaaaaggcg

SEQ ID NO: 274168 - DNA, 30 bp, Artificial Sequence
  Synthetic oligonucleotide
gacagaaagattcaggcgagccgaaaggcg

SEQ ID NO: 274169 - DNA, 30 bp, Artificial Sequence
  Synthetic oligonucleotide
catgactactgcgtagcattgggaaaggcg

SEQ ID NO: 274170 - DNA, 30 bp, Artificial Sequence
  Synthetic oligonucleotide
gctgtacttgcgtaacaccggtgaaaggcg

SEQ ID NO: 274171 - DNA, 30 bp, Artificial Sequence
  Synthetic oligonucleotide
agggcgaactacccaatccctgccaaggcg

SEQ ID NO: 274172 - DNA, 31 bp, Artificial Sequence
  Synthetic oligonucleotide
ggcaaaggcggtagcaaagcacggcaaggcg

SEQ ID NO: 274173 - DNA, 30 bp, Artificial Sequence
  Synthetic oligonucleotide
cagtgtaaccagccgccggctcggaaggcg

SEQ ID NO: 274174 - DNA, 30 bp, Artificial Sequence
  Synthetic oligonucleotide
aacgcaacccgaatcaggaactgtaaggcg

SEQ ID NO: 274175 - DNA, 30 bp, Artificial Sequence
  Synthetic oligonucleotide
tacgacttgatccaggctcgagttaaggcg

SEQ ID NO: 274176 - DNA, 30 bp, Artificial Sequence
  Synthetic oligonucleotide
cggagggtgctctccaaatgcccacaggcg

SEQ ID NO: 274177 - DNA, 30 bp, Artificial Sequence
  Synthetic oligonucleotide
gggtcggggtttagggagcgtcaccaggcg

SEQ ID NO: 274178 - DNA, 30 bp, Artificial Sequence
  Synthetic oligonucleotide
ttaggtcgacaccagaaatcttgtcaggcg

SEQ ID NO: 274179 - DNA, 30 bp, Artificial Sequence
  Synthetic oligonucleotide
gttttccactggagataatgaagggaggcg

SEQ ID NO: 274180 - DNA, 30 bp, Artificial Sequence
  Synthetic oligonucleotide
cgtcttgtccgccttatccagctggaggcg

SEQ ID NO: 274181 - DNA, 30 bp, Artificial Sequence
  Synthetic oligonucleotide
gttcggcgacaagacttgtatttggaggcg

SEQ ID NO: 274182 - DNA, 30 bp, Artificial Sequence
  Synthetic oligonucleotide
cggtcgaacgtcgttagtggggatgaggcg

SEQ ID NO: 274183 - DNA, 30 bp, Artificial Sequence
  Synthetic oligonucleotide
tttcagggatctggctacaaggcgtaggcg

SEQ ID NO: 274184 - DNA, 30 bp, Artificial Sequence
  Synthetic oligonucleotide
ggtgagtattgatctaggatcaagacggcg

SEQ ID NO: 274185 - DNA, 31 bp, Artificial Sequence
  Synthetic oligonucleotide
actgattgcccaagtgcttaatcagacggcg

SEQ ID NO: 274186 - DNA, 30 bp, Artificial Sequence
  Synthetic oligonucleotide
agctcatacctaccacttaagaggccggcg

SEQ ID NO: 274187 - DNA, 30 bp, Artificial Sequence
  Synthetic oligonucleotide
ctatggtattcctaggacgcatctccggcg

SEQ ID NO: 274188 - DNA, 30 bp, Artificial Sequence
  Synthetic oligonucleotide
ctagttataacaaagccctgtaaagcggcg

SEQ ID NO: 274189 - DNA, 30 bp, Artificial Sequence
  Synthetic oligonucleotide
cctgctcggcaccaggttctaccggcggcg

SEQ ID NO: 274190 - DNA, 30 bp, Artificial Sequence
  Synthetic oligonucleotide
ccccctcttattgtgattgatagggcggcg

SEQ ID NO: 274191 - DNA, 30 bp, Artificial Sequence
  Synthetic oligonucleotide
cgcaacatagcctcgggactgcgtgcggcg

SEQ ID NO: 274192 - DNA, 30 bp, Artificial Sequence
  Synthetic oligonucleotide
atcgtccagggtctctcaggtggctcggcg

SEQ ID NO: 274193 - DNA, 30 bp, Artificial Sequence
  Synthetic oligonucleotide
gcctgcataccccttcacttggggtcggcg

SEQ ID NO: 274194 - DNA, 30 bp, Artificial Sequence
  Synthetic oligonucleotide
ttcgggtcagtatctgaggcttggtcggcg

SEQ ID NO: 274195 - DNA, 30 bp, Artificial Sequence
  Synthetic oligonucleotide
tcgacacaggtccgcactgccctttcggcg

SEQ ID NO: 274196 - DNA, 30 bp, Artificial Sequence
  Synthetic oligonucleotide
ttctggggcaactgtgctgcattttcggcg

SEQ ID NO: 274197 - DNA, 30 bp, Artificial Sequence
  Synthetic oligonucleotide
tgggtctagcggcaaatcgccagaagggcg

SEQ ID NO: 274198 - DNA, 30 bp, Artificial Sequence
  Synthetic oligonucleotide
cgccttgtgtttggatttgcaggcagggcg

SEQ ID NO: 274199 - DNA, 30 bp, Artificial Sequence
  Synthetic oligonucleotide
tttgccgttgaccgagagtgcggcagggcg

SEQ ID NO: 274200 - DNA, 30 bp, Artificial Sequence
  Synthetic oligonucleotide
gggcgatcgggtttgcagcggggcagggcg

SEQ ID NO: 274201 - DNA, 30 bp, Artificial Sequence
  Synthetic oligonucleotide
gtagcttaaggtcagcaatagaatagggcg

SEQ ID NO: 274202 - DNA, 30 bp, Artificial Sequence
  Synthetic oligonucleotide
ggactccgattcgacaaggcgaaacgggcg

SEQ ID NO: 274203 - DNA, 30 bp, Artificial Sequence
  Synthetic oligonucleotide
actcggcaggctcaaaggaagtaacgggcg

SEQ ID NO: 274204 - DNA, 30 bp, Artificial Sequence
  Synthetic oligonucleotide
gacagttctttacggacaaattcacgggcg

SEQ ID NO: 274205 - DNA, 30 bp, Artificial Sequence
  Synthetic oligonucleotide
cccgctgattgactggattgaagacgggcg

SEQ ID NO: 274206 - DNA, 30 bp, Artificial Sequence
  Synthetic oligonucleotide
tagggaagaatcctgtttctaagacgggcg

SEQ ID NO: 274207 - DNA, 30 bp, Artificial Sequence
  Synthetic oligonucleotide
tctaatagtcggggcgaatccaaccgggcg

SEQ ID NO: 274208 - DNA, 30 bp, Artificial Sequence
  Synthetic oligonucleotide
gagcgccgaaatgggctcacaagccgggcg

SEQ ID NO: 274209 - DNA, 30 bp, Artificial Sequence
  Synthetic oligonucleotide
agggctcgagtccatgctggcgagcgggcg

SEQ ID NO: 274210 - DNA, 30 bp, Artificial Sequence
  Synthetic oligonucleotide
attacccaccgtgaatgaagacggcgggcg

SEQ ID NO: 274211 - DNA, 30 bp, Artificial Sequence
  Synthetic oligonucleotide
ctccgggttatacggtagtttagtcgggcg

SEQ ID NO: 274212 - DNA, 30 bp, Artificial Sequence
  Synthetic oligonucleotide
cagaaggaggttcacctcacacgaggggcg

SEQ ID NO: 274213 - DNA, 30 bp, Artificial Sequence
  Synthetic oligonucleotide
ggatggtggttacggggccatcacggggcg

SEQ ID NO: 274214 - DNA, 30 bp, Artificial Sequence
  Synthetic oligonucleotide
caactccttgaactattaaattacggggcg

SEQ ID NO: 274215 - DNA, 30 bp, Artificial Sequence
  Synthetic oligonucleotide
ctcatacgtccaaaagaccgagatggggcg

SEQ ID NO: 274216 - DNA, 30 bp, Artificial Sequence
  Synthetic oligonucleotide
atcactgacaggcaatagggttatggggcg

SEQ ID NO: 274217 - DNA, 30 bp, Artificial Sequence
  Synthetic oligonucleotide
taccagagcttaggagagggcgttggggcg

SEQ ID NO: 274218 - DNA, 30 bp, Artificial Sequence
  Synthetic oligonucleotide
tgaaagttgattcatctgtaaccatgggcg

SEQ ID NO: 274219 - DNA, 30 bp, Artificial Sequence
  Synthetic oligonucleotide
gcgatatattctcatctggaaatctgggcg

SEQ ID NO: 274220 - DNA, 30 bp, Artificial Sequence
  Synthetic oligonucleotide
cagaagttaatttggagggagatctgggcg

SEQ ID NO: 274221 - DNA, 30 bp, Artificial Sequence
  Synthetic oligonucleotide
agcagagctaccagcgacaataattgggcg

SEQ ID NO: 274222 - DNA, 30 bp, Artificial Sequence
  Synthetic oligonucleotide
ccggtatgttgattccaggagggttgggcg

SEQ ID NO: 274223 - DNA, 30 bp, Artificial Sequence
  Synthetic oligonucleotide
gggtggttagtcatagttttacgcatggcg

SEQ ID NO: 274224 - DNA, 30 bp, Artificial Sequence
  Synthetic oligonucleotide
gggaaaaggcgaggtggggggtgcatggcg

SEQ ID NO: 274225 - DNA, 30 bp, Artificial Sequence
  Synthetic oligonucleotide
cgttgtgtcttgataaacctaatcatggcg

SEQ ID NO: 274226 - DNA, 30 bp, Artificial Sequence
  Synthetic oligonucleotide
acgggcgccaagacgggactgtagatggcg

SEQ ID NO: 274227 - DNA, 30 bp, Artificial Sequence
  Synthetic oligonucleotide
tctgcctagagagtaccacaaggactggcg

SEQ ID NO: 274228 - DNA, 30 bp, Artificial Sequence
  Synthetic oligonucleotide
tctcaacttctacttaaagacgtgctggcg

SEQ ID NO: 274229 - DNA, 30 bp, Artificial Sequence
  Synthetic oligonucleotide
gtaggcagcaggcggcgtaagagtctggcg

SEQ ID NO: 274230 - DNA, 30 bp, Artificial Sequence
  Synthetic oligonucleotide
tatcgggggtaagggtgccgtcaagtggcg

SEQ ID NO: 274231 - DNA, 30 bp, Artificial Sequence
  Synthetic oligonucleotide
catctgagaatgacccctccgaccgtggcg

SEQ ID NO: 274232 - DNA, 30 bp, Artificial Sequence
  Synthetic oligonucleotide
gttcgaggaacgggtggaagtcccgtggcg

SEQ ID NO: 274233 - DNA, 30 bp, Artificial Sequence
  Synthetic oligonucleotide
ttttgcatacgaaatgctatgtctgtggcg

SEQ ID NO: 274234 - DNA, 30 bp, Artificial Sequence
  Synthetic oligonucleotide
tacatctacgaaattagaacatgtgtggcg

SEQ ID NO: 274235 - DNA, 30 bp, Artificial Sequence
  Synthetic oligonucleotide
ttttccgcgcgtggagaggcctgtgtggcg

SEQ ID NO: 274236 - DNA, 30 bp, Artificial Sequence
  Synthetic oligonucleotide
ttatcagctctatggatacagcaattggcg

SEQ ID NO: 274237 - DNA, 30 bp, Artificial Sequence
  Synthetic oligonucleotide
ttcgagtcttaagtagtggacccattggcg

SEQ ID NO: 274238 - DNA, 30 bp, Artificial Sequence
  Synthetic oligonucleotide
gttatgaggtcgacacatggggacttggcg

SEQ ID NO: 274239 - DNA, 30 bp, Artificial Sequence
  Synthetic oligonucleotide
agaacaataacaggagtttggctcttggcg

SEQ ID NO: 274240 - DNA, 30 bp, Artificial Sequence
  Synthetic oligonucleotide
tgtggcggcccacgttatatcgtcttggcg

SEQ ID NO: 274241 - DNA, 30 bp, Artificial Sequence
  Synthetic oligonucleotide
gaaaaataaacactatattcgttcttggcg

SEQ ID NO: 274242 - DNA, 30 bp, Artificial Sequence
  Synthetic oligonucleotide
cgggcaaataagcgcacatttgtgttggcg

SEQ ID NO: 274243 - DNA, 30 bp, Artificial Sequence
  Synthetic oligonucleotide
gacacgtcccaattacgttcgaatttggcg

SEQ ID NO: 274244 - DNA, 30 bp, Artificial Sequence
  Synthetic oligonucleotide
gcacgaatagcagcaaagcggtaaaatgcg

SEQ ID NO: 274245 - DNA, 30 bp, Artificial Sequence
  Synthetic oligonucleotide
acctggtggttagagtacaccataaatgcg

SEQ ID NO: 274246 - DNA, 30 bp, Artificial Sequence
  Synthetic oligonucleotide
acctatttaatcaaggttgccataaatgcg

SEQ ID NO: 274247 - DNA, 30 bp, Artificial Sequence
  Synthetic oligonucleotide
cactacgtgcgacctgtgcatctaaatgcg

SEQ ID NO: 274248 - DNA, 30 bp, Artificial Sequence
  Synthetic oligonucleotide
tgtcgtttgaattgaatggttgggaatgcg

SEQ ID NO: 274249 - DNA, 30 bp, Artificial Sequence
  Synthetic oligonucleotide
ggaatacgctggaccagcccgttgaatgcg

SEQ ID NO: 274250 - DNA, 30 bp, Artificial Sequence
  Synthetic oligonucleotide
gtagttccttacacatctgattataatgcg

SEQ ID NO: 274251 - DNA, 30 bp, Artificial Sequence
  Synthetic oligonucleotide
gtttccatctcgagaaggggaatacatgcg

SEQ ID NO: 274252 - DNA, 30 bp, Artificial Sequence
  Synthetic oligonucleotide
ataactcgaacgagacggctgccccatgcg

SEQ ID NO: 274253 - DNA, 30 bp, Artificial Sequence
  Synthetic oligonucleotide
aagagcttacagaagaagccttggcatgcg

SEQ ID NO: 274254 - DNA, 30 bp, Artificial Sequence
  Synthetic oligonucleotide
catggtatggacaagatataccctcatgcg

SEQ ID NO: 274255 - DNA, 30 bp, Artificial Sequence
  Synthetic oligonucleotide
tggcgcttatatacaggtagttatgatgcg

SEQ ID NO: 274256 - DNA, 30 bp, Artificial Sequence
  Synthetic oligonucleotide
catgcgctaacggctacaggcagtgatgcg

SEQ ID NO: 274257 - DNA, 30 bp, Artificial Sequence
  Synthetic oligonucleotide
agtcaaatgaccggagagttacaatatgcg

SEQ ID NO: 274258 - DNA, 30 bp, Artificial Sequence
  Synthetic oligonucleotide
gttgcggccgcgctctagcaacactatgcg

SEQ ID NO: 274259 - DNA, 30 bp, Artificial Sequence
  Synthetic oligonucleotide
gtcacattttcatttccacttaagtatgcg

SEQ ID NO: 274260 - DNA, 30 bp, Artificial Sequence
  Synthetic oligonucleotide
caacttactttgagatcgaagatgtatgcg

SEQ ID NO: 274261 - DNA, 30 bp, Artificial Sequence
  Synthetic oligonucleotide
gcagcgggtggatcgcttgtccccactgcg

SEQ ID NO: 274262 - DNA, 30 bp, Artificial Sequence
  Synthetic oligonucleotide
tgatagcgcgttatatgcttatgtactgcg

SEQ ID NO: 274263 - DNA, 30 bp, Artificial Sequence
  Synthetic oligonucleotide
cctagtctactctactaggagtttactgcg

SEQ ID NO: 274264 - DNA, 30 bp, Artificial Sequence
  Synthetic oligonucleotide
cgagtttacttttgcaaacgtccacctgcg

SEQ ID NO: 274265 - DNA, 30 bp, Artificial Sequence
  Synthetic oligonucleotide
attacggctggaatgctgggagagcctgcg

SEQ ID NO: 274266 - DNA, 30 bp, Artificial Sequence
  Synthetic oligonucleotide
aacacacagtgaacggatttctatcctgcg

SEQ ID NO: 274267 - DNA, 30 bp, Artificial Sequence
  Synthetic oligonucleotide
ctacaaaattggacttatcctcgtcctgcg

SEQ ID NO: 274268 - DNA, 30 bp, Artificial Sequence
  Synthetic oligonucleotide
tgaactgcggtttggacttgctcagctgcg

SEQ ID NO: 274269 - DNA, 30 bp, Artificial Sequence
  Synthetic oligonucleotide
ccgaaaactgtgcgctacgtaggagctgcg

SEQ ID NO: 274270 - DNA, 30 bp, Artificial Sequence
  Synthetic oligonucleotide
gctaggatcacatgtagtcccgactctgcg

SEQ ID NO: 274271 - DNA, 30 bp, Artificial Sequence
  Synthetic oligonucleotide
ctcggggacgctttatggtggttctctgcg

SEQ ID NO: 274272 - DNA, 30 bp, Artificial Sequence
  Synthetic oligonucleotide
ggtaccggggggctctacgcctagtctgcg

SEQ ID NO: 274273 - DNA, 30 bp, Artificial Sequence
  Synthetic oligonucleotide
gtgtcctgtgaaattcaattagtttctgcg

SEQ ID NO: 274274 - DNA, 30 bp, Artificial Sequence
  Synthetic oligonucleotide
agatgtgtatagcagatcctaagaagtgcg

SEQ ID NO: 274275 - DNA, 30 bp, Artificial Sequence
  Synthetic oligonucleotide
acgcgatgcgttttctcgggtattagtgcg

SEQ ID NO: 274276 - DNA, 30 bp, Artificial Sequence
  Synthetic oligonucleotide
tttggtggccgtgttttacctctccgtgcg

SEQ ID NO: 274277 - DNA, 30 bp, Artificial Sequence
  Synthetic oligonucleotide
ttagttgctgcaacaatcacgtcaggtgcg

SEQ ID NO: 274278 - DNA, 30 bp, Artificial Sequence
  Synthetic oligonucleotide
gttcaccttcagattgggataaccggtgcg

SEQ ID NO: 274279 - DNA, 30 bp, Artificial Sequence
  Synthetic oligonucleotide
tctcagtcggtaccgagcctaggcggtgcg

SEQ ID NO: 274280 - DNA, 30 bp, Artificial Sequence
  Synthetic oligonucleotide
ccttattcgacgaaatgcttgacgggtgcg

SEQ ID NO: 274281 - DNA, 30 bp, Artificial Sequence
  Synthetic oligonucleotide
ccggggtggggaaggactggtccgggtgcg

SEQ ID NO: 274282 - DNA, 30 bp, Artificial Sequence
  Synthetic oligonucleotide
gtttccctgggaccagagccagcgggtgcg

SEQ ID NO: 274283 - DNA, 30 bp, Artificial Sequence
  Synthetic oligonucleotide
ccgcatcgaaacgcgatgtttcactgtgcg

SEQ ID NO: 274284 - DNA, 30 bp, Artificial Sequence
  Synthetic oligonucleotide
cttcgtgccttgcagctaatcagctgtgcg

SEQ ID NO: 274285 - DNA, 30 bp, Artificial Sequence
  Synthetic oligonucleotide
agtaacgaccactgtatgggagtgtgtgcg

SEQ ID NO: 274286 - DNA, 30 bp, Artificial Sequence
  Synthetic oligonucleotide
gcaacaatattagactctgacgaaattgcg

SEQ ID NO: 274287 - DNA, 30 bp, Artificial Sequence
  Synthetic oligonucleotide
taagaataccccgcggttttgacaattgcg

SEQ ID NO: 274288 - DNA, 30 bp, Artificial Sequence
  Synthetic oligonucleotide
agcatttgatggtgtcgcgatccaattgcg

SEQ ID NO: 274289 - DNA, 30 bp, Artificial Sequence
  Synthetic oligonucleotide
cactggacacttttgaatacgggaattgcg

SEQ ID NO: 274290 - DNA, 30 bp, Artificial Sequence
  Synthetic oligonucleotide
aactatggttggattatgcatggaattgcg

SEQ ID NO: 274291 - DNA, 30 bp, Artificial Sequence
  Synthetic oligonucleotide
tcagtcaggggctattatatatacattgcg

SEQ ID NO: 274292 - DNA, 32 bp, Artificial Sequence
  Synthetic oligonucleotide
tatgttgtgtaggtttactcctctaccttgcg

SEQ ID NO: 274293 - DNA, 30 bp, Artificial Sequence
  Synthetic oligonucleotide
aatcctaaaggcattgggaattatcttgcg

SEQ ID NO: 274294 - DNA, 30 bp, Artificial Sequence
  Synthetic oligonucleotide
gaaaagttatggatacggactcttcttgcg

SEQ ID NO: 274295 - DNA, 30 bp, Artificial Sequence
  Synthetic oligonucleotide
ctgggatgctttcattcggcataagttgcg

SEQ ID NO: 274296 - DNA, 30 bp, Artificial Sequence
  Synthetic oligonucleotide
gtgccgggcggataaaccagctaagttgcg

SEQ ID NO: 274297 - DNA, 30 bp, Artificial Sequence
  Synthetic oligonucleotide
ggcctggaacacctgaatacgtaggttgcg

SEQ ID NO: 274298 - DNA, 30 bp, Artificial Sequence
  Synthetic oligonucleotide
ccgattagttttaccccttccaatgttgcg

SEQ ID NO: 274299 - DNA, 30 bp, Artificial Sequence
  Synthetic oligonucleotide
catgaaagcggtctaaagtgaacctttgcg

SEQ ID NO: 274300 - DNA, 30 bp, Artificial Sequence
  Synthetic oligonucleotide
gtccaggaggggggattgggggagtttgcg

SEQ ID NO: 274301 - DNA, 30 bp, Artificial Sequence
  Synthetic oligonucleotide
cagggacgctttcagttacccgcgtttgcg

SEQ ID NO: 274302 - DNA, 30 bp, Artificial Sequence
  Synthetic oligonucleotide
cttggcgcaaggacaggttagaaaaaatcg

SEQ ID NO: 274303 - DNA, 30 bp, Artificial Sequence
  Synthetic oligonucleotide
taagaatcgatgtaagttatcccaaaatcg

SEQ ID NO: 274304 - DNA, 30 bp, Artificial Sequence
  Synthetic oligonucleotide
tgcgaattacggttatcattcgtaaaatcg

SEQ ID NO: 274305 - DNA, 30 bp, Artificial Sequence
  Synthetic oligonucleotide
taccagcgtctgcgattaatggttaaatcg

SEQ ID NO: 274306 - DNA, 30 bp, Artificial Sequence
  Synthetic oligonucleotide
ttgaacgtattgtcatcccaattacaatcg

SEQ ID NO: 274307 - DNA, 30 bp, Artificial Sequence
  Synthetic oligonucleotide
ttatatggaagcaagagcatccagcaatcg

SEQ ID NO: 274308 - DNA, 30 bp, Artificial Sequence
  Synthetic oligonucleotide
gtgaacgataaaatgccggaagcgcaatcg

SEQ ID NO: 274309 - DNA, 30 bp, Artificial Sequence
  Synthetic oligonucleotide
gagccacaaccttgatgtatagcgcaatcg

SEQ ID NO: 274310 - DNA, 30 bp, Artificial Sequence
  Synthetic oligonucleotide
gaacacactatctgacgcgccgtgcaatcg

SEQ ID NO: 274311 - DNA, 30 bp, Artificial Sequence
  Synthetic oligonucleotide
gctaatagataccgcagtgaacatcaatcg

SEQ ID NO: 274312 - DNA, 30 bp, Artificial Sequence
  Synthetic oligonucleotide
ccttgggacagctccattgcctttcaatcg

SEQ ID NO: 274313 - DNA, 30 bp, Artificial Sequence
  Synthetic oligonucleotide
aggactaccttcgggatttctggagaatcg

SEQ ID NO: 274314 - DNA, 30 bp, Artificial Sequence
  Synthetic oligonucleotide
gatgcaagccccctcagtttgacggaatcg

SEQ ID NO: 274315 - DNA, 30 bp, Artificial Sequence
  Synthetic oligonucleotide
acgctggatttaaagtaccggtcggaatcg

SEQ ID NO: 274316 - DNA, 30 bp, Artificial Sequence
  Synthetic oligonucleotide
tatccgtaccaacagatacaatgctaatcg

SEQ ID NO: 274317 - DNA, 30 bp, Artificial Sequence
  Synthetic oligonucleotide
gagacactcatagcgtgcctgatctaatcg

SEQ ID NO: 274318 - DNA, 30 bp, Artificial Sequence
  Synthetic oligonucleotide
atcccgcataagctctaaaatgagtaatcg

SEQ ID NO: 274319 - DNA, 30 bp, Artificial Sequence
  Synthetic oligonucleotide
tcgattccaagtgtcaggtacttgtaatcg

SEQ ID NO: 274320 - DNA, 30 bp, Artificial Sequence
  Synthetic oligonucleotide
taccaatgtttgcaagtgaatagttaatcg

SEQ ID NO: 274321 - DNA, 30 bp, Artificial Sequence
  Synthetic oligonucleotide
ggtatgctacgcgtgtgcgtcaagacatcg

SEQ ID NO: 274322 - DNA, 30 bp, Artificial Sequence
  Synthetic oligonucleotide
ttaaattcggagtaatagtccccgacatcg

SEQ ID NO: 274323 - DNA, 30 bp, Artificial Sequence
  Synthetic oligonucleotide
cagtctaattccaacgcgacgggtacatcg

SEQ ID NO: 274324 - DNA, 30 bp, Artificial Sequence
  Synthetic oligonucleotide
agacaggctagtggtcgcccggttacatcg

SEQ ID NO: 274325 - DNA, 30 bp, Artificial Sequence
  Synthetic oligonucleotide
tttgcagaggggcatatacgacaaccatcg

SEQ ID NO: 274326 - DNA, 30 bp, Artificial Sequence
  Synthetic oligonucleotide
tgattactcttttacgaaatatcaccatcg

SEQ ID NO: 274327 - DNA, 30 bp, Artificial Sequence
  Synthetic oligonucleotide
ggacttacccgacgggccagagtaccatcg

SEQ ID NO: 274328 - DNA, 30 bp, Artificial Sequence
  Synthetic oligonucleotide
gttctggaggctggagctgcggtaccatcg

SEQ ID NO: 274329 - DNA, 30 bp, Artificial Sequence
  Synthetic oligonucleotide
catgagggaatgactcggagatccccatcg

SEQ ID NO: 274330 - DNA, 30 bp, Artificial Sequence
  Synthetic oligonucleotide
catgagttcatcgggcactgtctgccatcg

SEQ ID NO: 274331 - DNA, 30 bp, Artificial Sequence
  Synthetic oligonucleotide
cctatttacggttggtagtaggtcgcatcg

SEQ ID NO: 274332 - DNA, 30 bp, Artificial Sequence
  Synthetic oligonucleotide
cgcaggtctgacacggagtccaaggcatcg

SEQ ID NO: 274333 - DNA, 30 bp, Artificial Sequence
  Synthetic oligonucleotide
gctcagggcatggttgtgccatcggcatcg

SEQ ID NO: 274334 - DNA, 30 bp, Artificial Sequence
  Synthetic oligonucleotide
attcgagcgtcgtaagccgatagggcatcg

SEQ ID NO: 274335 - DNA, 30 bp, Artificial Sequence
  Synthetic oligonucleotide
tagatatagttcaccctgcttcgggcatcg

SEQ ID NO: 274336 - DNA, 30 bp, Artificial Sequence
  Synthetic oligonucleotide
taatatatgtttttagcaaaagctgcatcg

SEQ ID NO: 274337 - DNA, 30 bp, Artificial Sequence
  Synthetic oligonucleotide
cacatcggcagattcggaaagtcatcatcg

SEQ ID NO: 274338 - DNA, 30 bp, Artificial Sequence
  Synthetic oligonucleotide
ttttgacgctttcgcaagaaagtatcatcg

SEQ ID NO: 274339 - DNA, 30 bp, Artificial Sequence
  Synthetic oligonucleotide
ccccgggcaactcgaacctcacactcatcg

SEQ ID NO: 274340 - DNA, 30 bp, Artificial Sequence
  Synthetic oligonucleotide
actacaaagagcatcgatgcatcgtcatcg

SEQ ID NO: 274341 - DNA, 30 bp, Artificial Sequence
  Synthetic oligonucleotide
ggctttggtagcaaagcgttggtgtcatcg

SEQ ID NO: 274342 - DNA, 30 bp, Artificial Sequence
  Synthetic oligonucleotide
gctcttttaactccgtggccttgaagatcg

SEQ ID NO: 274343 - DNA, 30 bp, Artificial Sequence
  Synthetic oligonucleotide
tattgcctcatggtgtgtcttggcagatcg

SEQ ID NO: 274344 - DNA, 30 bp, Artificial Sequence
  Synthetic oligonucleotide
cttagataaagactggctgtcattagatcg

SEQ ID NO: 274345 - DNA, 30 bp, Artificial Sequence
  Synthetic oligonucleotide
tgcagacatctttagcttccctaacgatcg

SEQ ID NO: 274346 - DNA, 30 bp, Artificial Sequence
  Synthetic oligonucleotide
gtagtgacgtgtaagaattagtaccgatcg

SEQ ID NO: 274347 - DNA, 30 bp, Artificial Sequence
  Synthetic oligonucleotide
gtgtaggcgcgttctttaatgaagcgatcg

SEQ ID NO: 274348 - DNA, 31 bp, Artificial Sequence
  Synthetic oligonucleotide
gacgaaaatttatgtcagcggcgcgcgatcg

SEQ ID NO: 274349 - DNA, 30 bp, Artificial Sequence
  Synthetic oligonucleotide
taccgttaaaatgacccccctagtcgatcg

SEQ ID NO: 274350 - DNA, 30 bp, Artificial Sequence
  Synthetic oligonucleotide
agccaaaatggcttgtgagattgaggatcg

SEQ ID NO: 274351 - DNA, 30 bp, Artificial Sequence
  Synthetic oligonucleotide
cctagctagcgatgggcggattgcggatcg

SEQ ID NO: 274352 - DNA, 30 bp, Artificial Sequence
  Synthetic oligonucleotide
ttcggagaatatactgttaaactcggatcg

SEQ ID NO: 274353 - DNA, 30 bp, Artificial Sequence
  Synthetic oligonucleotide
cagaccacatctgcgaagactgagggatcg

SEQ ID NO: 274354 - DNA, 30 bp, Artificial Sequence
  Synthetic oligonucleotide
gtagatagggtgttagagcccctgggatcg

SEQ ID NO: 274355 - DNA, 30 bp, Artificial Sequence
  Synthetic oligonucleotide
tgaatggttgaaaatgttggagactgatcg

SEQ ID NO: 274356 - DNA, 30 bp, Artificial Sequence
  Synthetic oligonucleotide
tcgatatctgcgtcttaagaatagtgatcg

SEQ ID NO: 274357 - DNA, 30 bp, Artificial Sequence
  Synthetic oligonucleotide
ttcgacccacgagccaaatgcttttgatcg

SEQ ID NO: 274358 - DNA, 30 bp, Artificial Sequence
  Synthetic oligonucleotide
cagggtttggcggttttattttatatatcg

SEQ ID NO: 274359 - DNA, 30 bp, Artificial Sequence
  Synthetic oligonucleotide
tatctaacgatggtcaccattcctatatcg

SEQ ID NO: 274360 - DNA, 30 bp, Artificial Sequence
  Synthetic oligonucleotide
agccaagtcgttgcatgtaaatttatatcg

SEQ ID NO: 274361 - DNA, 30 bp, Artificial Sequence
  Synthetic oligonucleotide
ctgcagggtcgagcagtgtgataactatcg

SEQ ID NO: 274362 - DNA, 30 bp, Artificial Sequence
  Synthetic oligonucleotide
ggccggttatattcatagccgaacctatcg

SEQ ID NO: 274363 - DNA, 30 bp, Artificial Sequence
  Synthetic oligonucleotide
cgggatggctcacccgggaaagctctatcg

SEQ ID NO: 274364 - DNA, 29 bp, Artificial Sequence
  Synthetic oligonucleotide
tcctgcagacttaaagttttttcgtatcg

SEQ ID NO: 274365 - DNA, 30 bp, Artificial Sequence
  Synthetic oligonucleotide
gcttcggtggttggccggtagtgggtatcg

SEQ ID NO: 274366 - DNA, 30 bp, Artificial Sequence
  Synthetic oligonucleotide
gagactcagtactgtcctaacgctgtatcg

SEQ ID NO: 274367 - DNA, 30 bp, Artificial Sequence
  Synthetic oligonucleotide
tcttataacctgcgtgcacattctgtatcg

SEQ ID NO: 274368 - DNA, 25 bp, Artificial Sequence
  Synthetic oligonucleotide
ggcacgtaataatccatttgtatcg

SEQ ID NO: 274369 - DNA, 30 bp, Artificial Sequence
  Synthetic oligonucleotide
attggaacatgcggacattcgtgcttatcg

SEQ ID NO: 274370 - DNA, 30 bp, Artificial Sequence
  Synthetic oligonucleotide
atactgattacctactggtgtgggttatcg

SEQ ID NO: 274371 - DNA, 30 bp, Artificial Sequence
  Synthetic oligonucleotide
gtgctgcctttctcctagcaattgttatcg

SEQ ID NO: 274372 - DNA, 30 bp, Artificial Sequence
  Synthetic oligonucleotide
agccggatcatgcgcaccgcacatttatcg

SEQ ID NO: 274373 - DNA, 30 bp, Artificial Sequence
  Synthetic oligonucleotide
cagagatcacacatatctggtcttttatcg

SEQ ID NO: 274374 - DNA, 30 bp, Artificial Sequence
  Synthetic oligonucleotide
ccacatccatttagccagcacatcaactcg

SEQ ID NO: 274375 - DNA, 30 bp, Artificial Sequence
  Synthetic oligonucleotide
tttcaagcgctaggagtggcggcgaactcg

SEQ ID NO: 274376 - DNA, 30 bp, Artificial Sequence
  Synthetic oligonucleotide
cccgaatgcccatgtaaaattgggaactcg

SEQ ID NO: 274377 - DNA, 29 bp, Artificial Sequence
  Synthetic oligonucleotide
atgtatgcctgttatccaattgacactcg

SEQ ID NO: 274378 - DNA, 30 bp, Artificial Sequence
  Synthetic oligonucleotide
gcgtgcatgcaggaagggccctaccactcg

SEQ ID NO: 274379 - DNA, 30 bp, Artificial Sequence
  Synthetic oligonucleotide
actccgtcaaggttatttccctaccactcg

SEQ ID NO: 274380 - DNA, 30 bp, Artificial Sequence
  Synthetic oligonucleotide
aagtgcataggtcctgcttattaccactcg

SEQ ID NO: 274381 - DNA, 30 bp, Artificial Sequence
  Synthetic oligonucleotide
cggcgttctatgcttagccgcccagactcg

SEQ ID NO: 274382 - DNA, 30 bp, Artificial Sequence
  Synthetic oligonucleotide
gtcgcttttattctatgtatttgagactcg

SEQ ID NO: 274383 - DNA, 30 bp, Artificial Sequence
  Synthetic oligonucleotide
atcattagtgaagcatgtactcccgactcg

SEQ ID NO: 274384 - DNA, 30 bp, Artificial Sequence
  Synthetic oligonucleotide
cgccggattatcgcgcggattcctgactcg

SEQ ID NO: 274385 - DNA, 30 bp, Artificial Sequence
  Synthetic oligonucleotide
tggttagctctggggaaatgcagtgactcg

SEQ ID NO: 274386 - DNA, 30 bp, Artificial Sequence
  Synthetic oligonucleotide
gggtatgctctatttcgagttcactactcg

SEQ ID NO: 274387 - DNA, 30 bp, Artificial Sequence
  Synthetic oligonucleotide
ctggatagtcttgtgggtaggtactactcg

SEQ ID NO: 274388 - DNA, 30 bp, Artificial Sequence
  Synthetic oligonucleotide
taaaaatcgactatgctctgtctctactcg

SEQ ID NO: 274389 - DNA, 30 bp, Artificial Sequence
  Synthetic oligonucleotide
tcctttggactcaaattaggaaagtactcg

SEQ ID NO: 274390 - DNA, 30 bp, Artificial Sequence
  Synthetic oligonucleotide
gtacgtgcccatcctacgatatagtactcg

SEQ ID NO: 274391 - DNA, 30 bp, Artificial Sequence
  Synthetic oligonucleotide
cacggataggcttaggccactccgtactcg

SEQ ID NO: 274392 - DNA, 30 bp, Artificial Sequence
  Synthetic oligonucleotide
aggccgtggaacaccatatctttttactcg

SEQ ID NO: 274393 - DNA, 30 bp, Artificial Sequence
  Synthetic oligonucleotide
tctagtgaacacgacattcgctacacctcg

SEQ ID NO: 274394 - DNA, 30 bp, Artificial Sequence
  Synthetic oligonucleotide
tactatttgagcggaatcagacccacctcg

SEQ ID NO: 274395 - DNA, 30 bp, Artificial Sequence
  Synthetic oligonucleotide
tctatccgtttgattaaggtgatgacctcg

SEQ ID NO: 274396 - DNA, 30 bp, Artificial Sequence
  Synthetic oligonucleotide
tgtctgatccagggttactatccaccctcg

SEQ ID NO: 274397 - DNA, 30 bp, Artificial Sequence
  Synthetic oligonucleotide
gtctcttattcccgcaatctttgaccctcg

SEQ ID NO: 274398 - DNA, 30 bp, Artificial Sequence
  Synthetic oligonucleotide
tgggtccgtggcgtgcgggggctaccctcg

SEQ ID NO: 274399 - DNA, 30 bp, Artificial Sequence
  Synthetic oligonucleotide
gatcacataagattgcatgatgttccctcg

SEQ ID NO: 274400 - DNA, 30 bp, Artificial Sequence
  Synthetic oligonucleotide
gagggccttgatcacactctataagcctcg

SEQ ID NO: 274401 - DNA, 30 bp, Artificial Sequence
  Synthetic oligonucleotide
gcgttctctcgtgctcacatccatgcctcg

SEQ ID NO: 274402 - DNA, 31 bp, Artificial Sequence
  Synthetic oligonucleotide
cctactacgggtggaaagcgattcatcctcg

SEQ ID NO: 274403 - DNA, 30 bp, Artificial Sequence
  Synthetic oligonucleotide
caatggtcacaattagatataatctcctcg

SEQ ID NO: 274404 - DNA, 30 bp, Artificial Sequence
  Synthetic oligonucleotide
ctgtagtgagccctgcggtaacattcctcg

SEQ ID NO: 274405 - DNA, 30 bp, Artificial Sequence
  Synthetic oligonucleotide
gatgatacagatacatagttgtgttcctcg

SEQ ID NO: 274406 - DNA, 30 bp, Artificial Sequence
  Synthetic oligonucleotide
taagacatcatgaagataacgggaagctcg

SEQ ID NO: 274407 - DNA, 30 bp, Artificial Sequence
  Synthetic oligonucleotide
ccgatgcggatagagtattggacacgctcg

SEQ ID NO: 274408 - DNA, 30 bp, Artificial Sequence
  Synthetic oligonucleotide
aagtagaatgaattagtaatgcgacgctcg

SEQ ID NO: 274409 - DNA, 30 bp, Artificial Sequence
  Synthetic oligonucleotide
cactcgctccggaggaggacccaccgctcg

SEQ ID NO: 274410 - DNA, 30 bp, Artificial Sequence
  Synthetic oligonucleotide
tacaccgcttccagaatcacggaccgctcg

SEQ ID NO: 274411 - DNA, 30 bp, Artificial Sequence
  Synthetic oligonucleotide
tcgggcgcgccggtttagaagacgcgctcg

SEQ ID NO: 274412 - DNA, 30 bp, Artificial Sequence
  Synthetic oligonucleotide
cacacattagccatggattttgtgcgctcg

SEQ ID NO: 274413 - DNA, 30 bp, Artificial Sequence
  Synthetic oligonucleotide
gggccactagtagacacgactaaaggctcg

SEQ ID NO: 274414 - DNA, 30 bp, Artificial Sequence
  Synthetic oligonucleotide
gcacgacgatgtcgtgtcactacaggctcg

SEQ ID NO: 274415 - DNA, 30 bp, Artificial Sequence
  Synthetic oligonucleotide
tttacgctgcagagtaacggcaccggctcg

SEQ ID NO: 274416 - DNA, 30 bp, Artificial Sequence
  Synthetic oligonucleotide
atagccggtgggtgggggcatgccggctcg

SEQ ID NO: 274417 - DNA, 30 bp, Artificial Sequence
  Synthetic oligonucleotide
tcactttgaggtctggccagttctggctcg

SEQ ID NO: 274418 - DNA, 30 bp, Artificial Sequence
  Synthetic oligonucleotide
tatttaataggttacgtagtttctggctcg

SEQ ID NO: 274419 - DNA, 30 bp, Artificial Sequence
  Synthetic oligonucleotide
gtttagtatgacacttgaataattggctcg

SEQ ID NO: 274420 - DNA, 30 bp, Artificial Sequence
  Synthetic oligonucleotide
ccagcgcggttggaacgcatcacatgctcg

SEQ ID NO: 274421 - DNA, 30 bp, Artificial Sequence
  Synthetic oligonucleotide
ttttacttgtggctcacttattgttgctcg

SEQ ID NO: 274422 - DNA, 30 bp, Artificial Sequence
  Synthetic oligonucleotide
ctgcgatgacgcaaagttggatcgatctcg

SEQ ID NO: 274423 - DNA, 30 bp, Artificial Sequence
  Synthetic oligonucleotide
cactgagtaatcgtctgtcgatacctctcg

SEQ ID NO: 274424 - DNA, 30 bp, Artificial Sequence
  Synthetic oligonucleotide
tagtatgcgtgggagctggatgaagtctcg

SEQ ID NO: 274425 - DNA, 30 bp, Artificial Sequence
  Synthetic oligonucleotide
atctaccatgatccgcttgcgtaagtctcg

SEQ ID NO: 274426 - DNA, 30 bp, Artificial Sequence
  Synthetic oligonucleotide
tagcctgagatggtctcgtaagcagtctcg

SEQ ID NO: 274427 - DNA, 30 bp, Artificial Sequence
  Synthetic oligonucleotide
agtaactcgggatgataacggacggtctcg

SEQ ID NO: 274428 - DNA, 30 bp, Artificial Sequence
  Synthetic oligonucleotide
ggttgattcaagcataaatataatgtctcg

SEQ ID NO: 274429 - DNA, 30 bp, Artificial Sequence
  Synthetic oligonucleotide
tgccgagtagatggatactttgtattctcg

SEQ ID NO: 274430 - DNA, 30 bp, Artificial Sequence
  Synthetic oligonucleotide
gacagaccgtcggtgcgaccgatgttctcg

SEQ ID NO: 274431 - DNA, 30 bp, Artificial Sequence
  Synthetic oligonucleotide
gtaaaactgtccagaaacaacgttttctcg

SEQ ID NO: 274432 - DNA, 30 bp, Artificial Sequence
  Synthetic oligonucleotide
gtcttggcgaatcgggtagaggtaaagtcg

SEQ ID NO: 274433 - DNA, 30 bp, Artificial Sequence
  Synthetic oligonucleotide
cttcaatagaaccggttttcagcgaagtcg

SEQ ID NO: 274434 - DNA, 30 bp, Artificial Sequence
  Synthetic oligonucleotide
tttaacggtatgttgggtacaaggaagtcg

SEQ ID NO: 274435 - DNA, 30 bp, Artificial Sequence
  Synthetic oligonucleotide
ggtagccgtagcgaccaagttattaagtcg

SEQ ID NO: 274436 - DNA, 30 bp, Artificial Sequence
  Synthetic oligonucleotide
ctgtacatccgcaagttggatgttaagtcg

SEQ ID NO: 274437 - DNA, 30 bp, Artificial Sequence
  Synthetic oligonucleotide
aaatccgcggtcaccgccacgcaacagtcg

SEQ ID NO: 274438 - DNA, 30 bp, Artificial Sequence
  Synthetic oligonucleotide
cactacaatcctatggcttttgaacagtcg

SEQ ID NO: 274439 - DNA, 30 bp, Artificial Sequence
  Synthetic oligonucleotide
tatgtccaaaacggttgaatgacccagtcg

SEQ ID NO: 274440 - DNA, 30 bp, Artificial Sequence
  Synthetic oligonucleotide
aacgatgggtcagacacacaatcccagtcg

SEQ ID NO: 274441 - DNA, 30 bp, Artificial Sequence
  Synthetic oligonucleotide
ctcaataagtcgacttaggtgtaagagtcg

SEQ ID NO: 274442 - DNA, 30 bp, Artificial Sequence
  Synthetic oligonucleotide
agacacaagatagtatggtgcagtgagtcg

SEQ ID NO: 274443 - DNA, 30 bp, Artificial Sequence
  Synthetic oligonucleotide
tgttagggacaagtgccacggtgtgagtcg

SEQ ID NO: 274444 - DNA, 30 bp, Artificial Sequence
  Synthetic oligonucleotide
aggcccgaaaacctcttcggcgcatagtcg

SEQ ID NO: 274445 - DNA, 30 bp, Artificial Sequence
  Synthetic oligonucleotide
tatagcgcctctgaagtccacagatagtcg

SEQ ID NO: 274446 - DNA, 30 bp, Artificial Sequence
  Synthetic oligonucleotide
tttaggttggtggcgatggagctatagtcg

SEQ ID NO: 274447 - DNA, 28 bp, Artificial Sequence
  Synthetic oligonucleotide
gacggcgtacctctttagcgtatagtcg

SEQ ID NO: 274448 - DNA, 30 bp, Artificial Sequence
  Synthetic oligonucleotide
accacttgctgtaaaacccctaagtagtcg

SEQ ID NO: 274449 - DNA, 30 bp, Artificial Sequence
  Synthetic oligonucleotide
ggcaataagccgggactgggacagtagtcg

SEQ ID NO: 274450 - DNA, 30 bp, Artificial Sequence
  Synthetic oligonucleotide
cgtatcgactaaggccaaatagtgtagtcg

SEQ ID NO: 274451 - DNA, 30 bp, Artificial Sequence
  Synthetic oligonucleotide
cgattgtgtcatggtgatttcatttagtcg

SEQ ID NO: 274452 - DNA, 30 bp, Artificial Sequence
  Synthetic oligonucleotide
agtggtcgtgtgtttcgcctagggacgtcg

SEQ ID NO: 274453 - DNA, 30 bp, Artificial Sequence
  Synthetic oligonucleotide
gcatcatagtgtggtcgtgtcattacgtcg

SEQ ID NO: 274454 - DNA, 30 bp, Artificial Sequence
  Synthetic oligonucleotide
tagatcacactgttggcaaagattacgtcg

SEQ ID NO: 274455 - DNA, 30 bp, Artificial Sequence
  Synthetic oligonucleotide
cagagaggtccgagcatttagagaccgtcg

SEQ ID NO: 274456 - DNA, 30 bp, Artificial Sequence
  Synthetic oligonucleotide
caggtgagaggagcttggcttaggccgtcg

SEQ ID NO: 274457 - DNA, 30 bp, Artificial Sequence
  Synthetic oligonucleotide
aatctaggacctaatatcgagtggccgtcg

SEQ ID NO: 274458 - DNA, 30 bp, Artificial Sequence
  Synthetic oligonucleotide
ggaaagtcttctggtccggggcctccgtcg

SEQ ID NO: 274459 - DNA, 30 bp, Artificial Sequence
  Synthetic oligonucleotide
cttctacacgcatggggtcaccgagcgtcg

SEQ ID NO: 274460 - DNA, 30 bp, Artificial Sequence
  Synthetic oligonucleotide
tgctggaagcggatggcgcgcctcgcgtcg

SEQ ID NO: 274461 - DNA, 30 bp, Artificial Sequence
  Synthetic oligonucleotide
ataacaggcgatgagcgctagccctcgtcg

SEQ ID NO: 274462 - DNA, 30 bp, Artificial Sequence
  Synthetic oligonucleotide
acgccggtggcacatttcatcatctcgtcg

SEQ ID NO: 274463 - DNA, 30 bp, Artificial Sequence
  Synthetic oligonucleotide
gtggacttgctgtaagggtcaaattcgtcg

SEQ ID NO: 274464 - DNA, 30 bp, Artificial Sequence
  Synthetic oligonucleotide
gcgttccacttctgcccttgtcgttcgtcg

SEQ ID NO: 274465 - DNA, 30 bp, Artificial Sequence
  Synthetic oligonucleotide
ttataaacgcaaaaaatcaagttttcgtcg

SEQ ID NO: 274466 - DNA, 30 bp, Artificial Sequence
  Synthetic oligonucleotide
agtgaaggagacttttaattttcaaggtcg

SEQ ID NO: 274467 - DNA, 30 bp, Artificial Sequence
  Synthetic oligonucleotide
gggctcccgcattgtcggatgatcaggtcg

SEQ ID NO: 274468 - DNA, 30 bp, Artificial Sequence
  Synthetic oligonucleotide
gtactctgttgcggtgatagcgtcaggtcg

SEQ ID NO: 274469 - DNA, 30 bp, Artificial Sequence
  Synthetic oligonucleotide
atctaccggaccgaggtataatagaggtcg

SEQ ID NO: 274470 - DNA, 30 bp, Artificial Sequence
  Synthetic oligonucleotide
tcatcctcccgtgcgaatggatggaggtcg

SEQ ID NO: 274471 - DNA, 30 bp, Artificial Sequence
  Synthetic oligonucleotide
tgtgacgcctggtgaaaagacctgaggtcg

SEQ ID NO: 274472 - DNA, 30 bp, Artificial Sequence
  Synthetic oligonucleotide
atgaatgcaggaaagaactgggtgaggtcg

SEQ ID NO: 274473 - DNA, 30 bp, Artificial Sequence
  Synthetic oligonucleotide
tccgttctactcacagcgtttcataggtcg

SEQ ID NO: 274474 - DNA, 30 bp, Artificial Sequence
  Synthetic oligonucleotide
gacattgatgtttccgacggacctaggtcg

SEQ ID NO: 274475 - DNA, 30 bp, Artificial Sequence
  Synthetic oligonucleotide
agactcctccgctaagtaggcaaccggtcg

SEQ ID NO: 274476 - DNA, 30 bp, Artificial Sequence
  Synthetic oligonucleotide
gaacgactcattgcgtggtaacaccggtcg

SEQ ID NO: 274477 - DNA, 30 bp, Artificial Sequence
  Synthetic oligonucleotide
tgtttgcggttgtgatgatactaccggtcg

SEQ ID NO: 274478 - DNA, 30 bp, Artificial Sequence
  Synthetic oligonucleotide
atgtactaggttgtaagattagtccggtcg

SEQ ID NO: 274479 - DNA, 30 bp, Artificial Sequence
  Synthetic oligonucleotide
ttgtaaggctatgggccgttcccgcggtcg

SEQ ID NO: 274480 - DNA, 30 bp, Artificial Sequence
  Synthetic oligonucleotide
cattggcccttagaaatgttggtgcggtcg

SEQ ID NO: 274481 - DNA, 30 bp, Artificial Sequence
  Synthetic oligonucleotide
cacgcagggcggtctcttggacctcggtcg

SEQ ID NO: 274482 - DNA, 30 bp, Artificial Sequence
  Synthetic oligonucleotide
tgtattaccttataaactaaagctcggtcg

SEQ ID NO: 274483 - DNA, 30 bp, Artificial Sequence
  Synthetic oligonucleotide
aacccgtgtagcccgagaggtacagggtcg

SEQ ID NO: 274484 - DNA, 30 bp, Artificial Sequence
  Synthetic oligonucleotide
tttctgcgtgtaaggcacttctgcgggtcg

SEQ ID NO: 274485 - DNA, 30 bp, Artificial Sequence
  Synthetic oligonucleotide
ggtgtgaaatgcgaaacctttcaggggtcg

SEQ ID NO: 274486 - DNA, 30 bp, Artificial Sequence
  Synthetic oligonucleotide
ttgcattatacgtaccccgactaggggtcg

SEQ ID NO: 274487 - DNA, 30 bp, Artificial Sequence
  Synthetic oligonucleotide
cagtggcacacgcctgcccaagtggggtcg

SEQ ID NO: 274488 - DNA, 30 bp, Artificial Sequence
  Synthetic oligonucleotide
atatttgcgagagatgttaaccaatggtcg

SEQ ID NO: 274489 - DNA, 30 bp, Artificial Sequence
  Synthetic oligonucleotide
cccgcctagggtgctccgggagggtggtcg

SEQ ID NO: 274490 - DNA, 30 bp, Artificial Sequence
  Synthetic oligonucleotide
cagaggtggacgcgaggggtattgtggtcg

SEQ ID NO: 274491 - DNA, 30 bp, Artificial Sequence
  Synthetic oligonucleotide
ttggctagttattggaaagttgtttggtcg

SEQ ID NO: 274492 - DNA, 30 bp, Artificial Sequence
  Synthetic oligonucleotide
aacctagatcccacggcaaatttttggtcg

SEQ ID NO: 274493 - DNA, 30 bp, Artificial Sequence
  Synthetic oligonucleotide
tacagttggggaaaaagtctagaaatgtcg

SEQ ID NO: 274494 - DNA, 30 bp, Artificial Sequence
  Synthetic oligonucleotide
gatttgccgtctcttcgatttggaatgtcg

SEQ ID NO: 274495 - DNA, 30 bp, Artificial Sequence
  Synthetic oligonucleotide
gaattcgatctcattgtgttcaagatgtcg

SEQ ID NO: 274496 - DNA, 30 bp, Artificial Sequence
  Synthetic oligonucleotide
gaggtgcgcttgtgaggctaacacctgtcg

SEQ ID NO: 274497 - DNA, 30 bp, Artificial Sequence
  Synthetic oligonucleotide
gcagaaaaaatagggtgattggggctgtcg

SEQ ID NO: 274498 - DNA, 30 bp, Artificial Sequence
  Synthetic oligonucleotide
gattgaacgcccgccaggctgcgagtgtcg

SEQ ID NO: 274499 - DNA, 30 bp, Artificial Sequence
  Synthetic oligonucleotide
gtgagaatcgcgtttccggagaacgtgtcg

SEQ ID NO: 274500 - DNA, 30 bp, Artificial Sequence
  Synthetic oligonucleotide
aggtgtagataaatgatcggtcacgtgtcg

SEQ ID NO: 274501 - DNA, 30 bp, Artificial Sequence
  Synthetic oligonucleotide
tgtctgttggcacggggtgcaccggtgtcg

SEQ ID NO: 274502 - DNA, 30 bp, Artificial Sequence
  Synthetic oligonucleotide
cccgaagttgggtgggtgaacagggtgtcg

SEQ ID NO: 274503 - DNA, 30 bp, Artificial Sequence
  Synthetic oligonucleotide
tttgctattcacgcaggtacctgtgtgtcg

SEQ ID NO: 274504 - DNA, 30 bp, Artificial Sequence
  Synthetic oligonucleotide
acagtccgtgtcacattactggaattgtcg

SEQ ID NO: 274505 - DNA, 30 bp, Artificial Sequence
  Synthetic oligonucleotide
gaccatagtcgccatctgttgagattgtcg

SEQ ID NO: 274506 - DNA, 30 bp, Artificial Sequence
  Synthetic oligonucleotide
aatgagtaccgacataaagaagtattgtcg

SEQ ID NO: 274507 - DNA, 30 bp, Artificial Sequence
  Synthetic oligonucleotide
agagaggatggccaactgggcttattgtcg

SEQ ID NO: 274508 - DNA, 30 bp, Artificial Sequence
  Synthetic oligonucleotide
tatcacaaattcgatctctgacgcttgtcg

SEQ ID NO: 274509 - DNA, 30 bp, Artificial Sequence
  Synthetic oligonucleotide
gtaagtaacccgacggactgctgcttgtcg

SEQ ID NO: 274510 - DNA, 30 bp, Artificial Sequence
  Synthetic oligonucleotide
caagggggttcctaaagccgcgcgttgtcg

SEQ ID NO: 274511 - DNA, 30 bp, Artificial Sequence
  Synthetic oligonucleotide
aaaatctcgtttacaattcgattgttgtcg

SEQ ID NO: 274512 - DNA, 30 bp, Artificial Sequence
  Synthetic oligonucleotide
cgcaggttgtagttgcaggctagtttgtcg

SEQ ID NO: 274513 - DNA, 30 bp, Artificial Sequence
  Synthetic oligonucleotide
ttgtcagggcagggctatcttcgaaattcg

SEQ ID NO: 274514 - DNA, 30 bp, Artificial Sequence
  Synthetic oligonucleotide
gtaaaccatgccccgaatagtgacaattcg

SEQ ID NO: 274515 - DNA, 30 bp, Artificial Sequence
  Synthetic oligonucleotide
agaggcaagggaaagtgtgcctacaattcg

SEQ ID NO: 274516 - DNA, 30 bp, Artificial Sequence
  Synthetic oligonucleotide
tcaattacggtggggtgatcaggcaattcg

SEQ ID NO: 274517 - DNA, 30 bp, Artificial Sequence
  Synthetic oligonucleotide
gagagtcggaaccaacgcagttggaattcg

SEQ ID NO: 274518 - DNA, 30 bp, Artificial Sequence
  Synthetic oligonucleotide
ttgccctgaataattccgatcgataattcg

SEQ ID NO: 274519 - DNA, 30 bp, Artificial Sequence
  Synthetic oligonucleotide
gactttgtgcaggagttcacaactaattcg

SEQ ID NO: 274520 - DNA, 30 bp, Artificial Sequence
  Synthetic oligonucleotide
atcgtagcacagcgcaggtctctacattcg

SEQ ID NO: 274521 - DNA, 30 bp, Artificial Sequence
  Synthetic oligonucleotide
taaagtaaagacgtaagcgcttaccattcg

SEQ ID NO: 274522 - DNA, 30 bp, Artificial Sequence
  Synthetic oligonucleotide
ttaccatggtacgacgcgtgtacccattcg

SEQ ID NO: 274523 - DNA, 30 bp, Artificial Sequence
  Synthetic oligonucleotide
ctgagtaagtgctacggcttacctcattcg

SEQ ID NO: 274524 - DNA, 30 bp, Artificial Sequence
  Synthetic oligonucleotide
aagttcggactagatatgaagttcgattcg

SEQ ID NO: 274525 - DNA, 30 bp, Artificial Sequence
  Synthetic oligonucleotide
aagattgttattcataggctccgggattcg

SEQ ID NO: 274526 - DNA, 30 bp, Artificial Sequence
  Synthetic oligonucleotide
atctagaacttggcatggtggcgggattcg

SEQ ID NO: 274527 - DNA, 30 bp, Artificial Sequence
  Synthetic oligonucleotide
atctggaactatctcgttcgcacatattcg

SEQ ID NO: 274528 - DNA, 30 bp, Artificial Sequence
  Synthetic oligonucleotide
tgcggagtgtatgagctttttaagtattcg

SEQ ID NO: 274529 - DNA, 30 bp, Artificial Sequence
  Synthetic oligonucleotide
tagctcctgagggttaatacggtgtattcg

SEQ ID NO: 274530 - DNA, 30 bp, Artificial Sequence
  Synthetic oligonucleotide
agccgaacaggttcatacaatgattattcg

SEQ ID NO: 274531 - DNA, 30 bp, Artificial Sequence
  Synthetic oligonucleotide
gcacgcttaaattgtgaagttaaaacttcg

SEQ ID NO: 274532 - DNA, 30 bp, Artificial Sequence
  Synthetic oligonucleotide
cgcttgcataagacagttcgtgaaacttcg

SEQ ID NO: 274533 - DNA, 30 bp, Artificial Sequence
  Synthetic oligonucleotide
atcacttcaccaggtaccctgagcacttcg

SEQ ID NO: 274534 - DNA, 30 bp, Artificial Sequence
  Synthetic oligonucleotide
tccccaacggttccggttccggtcacttcg

SEQ ID NO: 274535 - DNA, 30 bp, Artificial Sequence
  Synthetic oligonucleotide
cttttcggctaacattagttgcctacttcg

SEQ ID NO: 274536 - DNA, 30 bp, Artificial Sequence
  Synthetic oligonucleotide
gtgggggtagataaatcacatagtacttcg

SEQ ID NO: 274537 - DNA, 30 bp, Artificial Sequence
  Synthetic oligonucleotide
agcgaaatagaaatgagatgagacccttcg

SEQ ID NO: 274538 - DNA, 30 bp, Artificial Sequence
  Synthetic oligonucleotide
gtatccctggaaggctactggcgcccttcg

SEQ ID NO: 274539 - DNA, 30 bp, Artificial Sequence
  Synthetic oligonucleotide
cacacgctttcaaccgttccattcccttcg

SEQ ID NO: 274540 - DNA, 30 bp, Artificial Sequence
  Synthetic oligonucleotide
atctagcctggataagattggacgccttcg

SEQ ID NO: 274541 - DNA, 30 bp, Artificial Sequence
  Synthetic oligonucleotide
tgattatatagccgaccacggtatccttcg

SEQ ID NO: 274542 - DNA, 30 bp, Artificial Sequence
  Synthetic oligonucleotide
ggtgcaattccggcgcttgctccagcttcg

SEQ ID NO: 274543 - DNA, 30 bp, Artificial Sequence
  Synthetic oligonucleotide
agctacactgaaatccataggtcagcttcg

SEQ ID NO: 274544 - DNA, 30 bp, Artificial Sequence
  Synthetic oligonucleotide
gtagacgttgaatgaattagtcacgcttcg

SEQ ID NO: 274545 - DNA, 30 bp, Artificial Sequence
  Synthetic oligonucleotide
tccttatgtgatcaacaacgttgcgcttcg

SEQ ID NO: 274546 - DNA, 30 bp, Artificial Sequence
  Synthetic oligonucleotide
cgtcgatccagctgacccatggcggcttcg

SEQ ID NO: 274547 - DNA, 30 bp, Artificial Sequence
  Synthetic oligonucleotide
ttcttcatggacatgcccattcgatcttcg

SEQ ID NO: 274548 - DNA, 30 bp, Artificial Sequence
  Synthetic oligonucleotide
cattgaatgagattcatgccgccctcttcg

SEQ ID NO: 274549 - DNA, 30 bp, Artificial Sequence
  Synthetic oligonucleotide
atggagcacagtttcagtgactggtcttcg

SEQ ID NO: 274550 - DNA, 30 bp, Artificial Sequence
  Synthetic oligonucleotide
ctgataccaagctatagacgtggttcttcg

SEQ ID NO: 274551 - DNA, 30 bp, Artificial Sequence
  Synthetic oligonucleotide
ttctgttgggtgacatctacttcaagttcg

SEQ ID NO: 274552 - DNA, 30 bp, Artificial Sequence
  Synthetic oligonucleotide
ccacgtactgacacagagcgccgaagttcg

SEQ ID NO: 274553 - DNA, 30 bp, Artificial Sequence
  Synthetic oligonucleotide
gggccaaaatgttatttacacggtagttcg

SEQ ID NO: 274554 - DNA, 30 bp, Artificial Sequence
  Synthetic oligonucleotide
gaccatgggtggttataagtaacacgttcg

SEQ ID NO: 274555 - DNA, 30 bp, Artificial Sequence
  Synthetic oligonucleotide
ccaatctcgtcggggaggcgttcacgttcg

SEQ ID NO: 274556 - DNA, 30 bp, Artificial Sequence
  Synthetic oligonucleotide
agaccacttgaatccattaagatacgttcg

SEQ ID NO: 274557 - DNA, 30 bp, Artificial Sequence
  Synthetic oligonucleotide
atcatatgtatctactctgcgctacgttcg

SEQ ID NO: 274558 - DNA, 30 bp, Artificial Sequence
  Synthetic oligonucleotide
gcactatgagtgtgttgatatttccgttcg

SEQ ID NO: 274559 - DNA, 30 bp, Artificial Sequence
  Synthetic oligonucleotide
ctgtatcgtttgccagtggcgcgtcgttcg

SEQ ID NO: 274560 - DNA, 30 bp, Artificial Sequence
  Synthetic oligonucleotide
gccctgctttagaatacagaatagggttcg

SEQ ID NO: 274561 - DNA, 30 bp, Artificial Sequence
  Synthetic oligonucleotide
acagaaggactcacgctcgcaagatgttcg

SEQ ID NO: 274562 - DNA, 30 bp, Artificial Sequence
  Synthetic oligonucleotide
agcgtgaaatcgtctaaacaaggctgttcg

SEQ ID NO: 274563 - DNA, 30 bp, Artificial Sequence
  Synthetic oligonucleotide
taatgcgctagtcttagttgacagtgttcg

SEQ ID NO: 274564 - DNA, 30 bp, Artificial Sequence
  Synthetic oligonucleotide
cgtcctcaagaccatatctgtttttgttcg

SEQ ID NO: 274565 - DNA, 30 bp, Artificial Sequence
  Synthetic oligonucleotide
atcgaacaggagccgttgtttgaaatttcg

SEQ ID NO: 274566 - DNA, 30 bp, Artificial Sequence
  Synthetic oligonucleotide
acaatgccagagcaggtaaccggcatttcg

SEQ ID NO: 274567 - DNA, 30 bp, Artificial Sequence
  Synthetic oligonucleotide
gtagacaagaggtggagcccgttcatttcg

SEQ ID NO: 274568 - DNA, 30 bp, Artificial Sequence
  Synthetic oligonucleotide
ggcgcggcgcgtgttgggccatggatttcg

SEQ ID NO: 274569 - DNA, 30 bp, Artificial Sequence
  Synthetic oligonucleotide
cgagaggacacggcaaagatgctgatttcg

SEQ ID NO: 274570 - DNA, 30 bp, Artificial Sequence
  Synthetic oligonucleotide
gggttgggacagaatctctacgtgatttcg

SEQ ID NO: 274571 - DNA, 30 bp, Artificial Sequence
  Synthetic oligonucleotide
gcttgctcactcatgatgtgacgcctttcg

SEQ ID NO: 274572 - DNA, 30 bp, Artificial Sequence
  Synthetic oligonucleotide
cgcaggattgaagcaaccggtaggctttcg

SEQ ID NO: 274573 - DNA, 30 bp, Artificial Sequence
  Synthetic oligonucleotide
gaatagacgatttagatgtgcttgctttcg

SEQ ID NO: 274574 - DNA, 30 bp, Artificial Sequence
  Synthetic oligonucleotide
ctcgcaggacgtgcgggtgatgaagtttcg

SEQ ID NO: 274575 - DNA, 30 bp, Artificial Sequence
  Synthetic oligonucleotide
attctactcgactctatgcatctagtttcg

SEQ ID NO: 274576 - DNA, 30 bp, Artificial Sequence
  Synthetic oligonucleotide
tgagagtgcgcatattgaaacgatgtttcg

SEQ ID NO: 274577 - DNA, 30 bp, Artificial Sequence
  Synthetic oligonucleotide
atagatgattcgtgtctccacggtgtttcg

SEQ ID NO: 274578 - DNA, 30 bp, Artificial Sequence
  Synthetic oligonucleotide
tgggtggtctattttttaggaggattttcg

SEQ ID NO: 274579 - DNA, 30 bp, Artificial Sequence
  Synthetic oligonucleotide
ggtaggcggccttggtgaacgcgcttttcg

SEQ ID NO: 274580 - DNA, 30 bp, Artificial Sequence
  Synthetic oligonucleotide
ctgaataacattgacgggtttggcttttcg

SEQ ID NO: 274581 - DNA, 30 bp, Artificial Sequence
  Synthetic oligonucleotide
agtatgctagcaggttcgcgccctttttcg

SEQ ID NO: 274582 - DNA, 30 bp, Artificial Sequence
  Synthetic oligonucleotide
tagcgtgtcgcataggcccaggctttttcg

SEQ ID NO: 274583 - DNA, 30 bp, Artificial Sequence
  Synthetic oligonucleotide
gaaggatcgtgggattaatttgaaaaaagg

SEQ ID NO: 274584 - DNA, 30 bp, Artificial Sequence
  Synthetic oligonucleotide
tgcgacgttagtaacaggtgagacaaaagg

SEQ ID NO: 274585 - DNA, 30 bp, Artificial Sequence
  Synthetic oligonucleotide
aggaccctatactgccgattttagaaaagg

SEQ ID NO: 274586 - DNA, 30 bp, Artificial Sequence
  Synthetic oligonucleotide
gacaccggggacctattcccgtcgaaaagg

SEQ ID NO: 274587 - DNA, 30 bp, Artificial Sequence
  Synthetic oligonucleotide
agaacattgcacgtcatattgcctaaaagg

SEQ ID NO: 274588 - DNA, 30 bp, Artificial Sequence
  Synthetic oligonucleotide
atcagtgccggagaaaactcatgtaaaagg

SEQ ID NO: 274589 - DNA, 30 bp, Artificial Sequence
  Synthetic oligonucleotide
ctcggtttacttggtagggacaaacaaagg

SEQ ID NO: 274590 - DNA, 30 bp, Artificial Sequence
  Synthetic oligonucleotide
cgaccccgaaggcctcatgaccaacaaagg

SEQ ID NO: 274591 - DNA, 30 bp, Artificial Sequence
  Synthetic oligonucleotide
aatagggtgggcataggccgagaacaaagg

SEQ ID NO: 274592 - DNA, 30 bp, Artificial Sequence
  Synthetic oligonucleotide
gtcttgatcatacactgcgtcaaccaaagg

SEQ ID NO: 274593 - DNA, 30 bp, Artificial Sequence
  Synthetic oligonucleotide
atccgccacttggtgaacgttcaccaaagg

SEQ ID NO: 274594 - DNA, 30 bp, Artificial Sequence
  Synthetic oligonucleotide
ggggatttgccgctcccggtagggcaaagg

SEQ ID NO: 274595 - DNA, 30 bp, Artificial Sequence
  Synthetic oligonucleotide
tatagcggtcatacaacggtcgggcaaagg

SEQ ID NO: 274596 - DNA, 30 bp, Artificial Sequence
  Synthetic oligonucleotide
ggcaactaaatgctaatcatggatcaaagg

SEQ ID NO: 274597 - DNA, 30 bp, Artificial Sequence
  Synthetic oligonucleotide
ctgctcgtatgttgcatttaaactcaaagg

SEQ ID NO: 274598 - DNA, 30 bp, Artificial Sequence
  Synthetic oligonucleotide
ttcgacaggtgcggccatgaggcagaaagg

SEQ ID NO: 274599 - DNA, 30 bp, Artificial Sequence
  Synthetic oligonucleotide
catcactgacgatatccgcgtcccgaaagg

SEQ ID NO: 274600 - DNA, 30 bp, Artificial Sequence
  Synthetic oligonucleotide
gtaacagaagatttcaccgagtccgaaagg

SEQ ID NO: 274601 - DNA, 30 bp, Artificial Sequence
  Synthetic oligonucleotide
cagtccacgtcagacacattacgcgaaagg

SEQ ID NO: 274602 - DNA, 30 bp, Artificial Sequence
  Synthetic oligonucleotide
caggggatttgaaaaaggaagttcgaaagg

SEQ ID NO: 274603 - DNA, 30 bp, Artificial Sequence
  Synthetic oligonucleotide
agttcaccggcgttatttcaaccggaaagg

SEQ ID NO: 274604 - DNA, 30 bp, Artificial Sequence
  Synthetic oligonucleotide
ctacatgtgccgcataggattcgggaaagg

SEQ ID NO: 274605 - DNA, 30 bp, Artificial Sequence
  Synthetic oligonucleotide
aggtccttgaaacccgtggcgcatgaaagg

SEQ ID NO: 274606 - DNA, 30 bp, Artificial Sequence
  Synthetic oligonucleotide
ggatttagaagcataaagcgtgcataaagg

SEQ ID NO: 274607 - DNA, 30 bp, Artificial Sequence
  Synthetic oligonucleotide
ctatagtaacagaagatttctctataaagg

SEQ ID NO: 274608 - DNA, 30 bp, Artificial Sequence
  Synthetic oligonucleotide
acttacataatcttgtggagtaactaaagg

SEQ ID NO: 274609 - DNA, 30 bp, Artificial Sequence
  Synthetic oligonucleotide
cggtgtactgactcccagaccttctaaagg

SEQ ID NO: 274610 - DNA, 30 bp, Artificial Sequence
  Synthetic oligonucleotide
cccatctaactgatgaaagaatcgtaaagg

SEQ ID NO: 274611 - DNA, 30 bp, Artificial Sequence
  Synthetic oligonucleotide
agttccggagtacttggattttcgtaaagg

SEQ ID NO: 274612 - DNA, 30 bp, Artificial Sequence
  Synthetic oligonucleotide
ctggcgtaaggggagtaagggtggtaaagg

SEQ ID NO: 274613 - DNA, 30 bp, Artificial Sequence
  Synthetic oligonucleotide
gcaccacgaggatggcgtgtagattaaagg

SEQ ID NO: 274614 - DNA, 30 bp, Artificial Sequence
  Synthetic oligonucleotide
tagttgtcggtacctgggagcatttaaagg

SEQ ID NO: 274615 - DNA, 30 bp, Artificial Sequence
  Synthetic oligonucleotide
tcatgaccgcaccgcaacagcaaaacaagg

SEQ ID NO: 274616 - DNA, 30 bp, Artificial Sequence
  Synthetic oligonucleotide
gccttccgcagtcccaagagtcagacaagg

SEQ ID NO: 274617 - DNA, 30 bp, Artificial Sequence
  Synthetic oligonucleotide
gtttagaggcggccgttatgcaggacaagg

SEQ ID NO: 274618 - DNA, 30 bp, Artificial Sequence
  Synthetic oligonucleotide
acgaacggcctgatatgtgcaccaccaagg

SEQ ID NO: 274619 - DNA, 30 bp, Artificial Sequence
  Synthetic oligonucleotide
tgctcgaacgcatcctcgtcgtgaccaagg

SEQ ID NO: 274620 - DNA, 30 bp, Artificial Sequence
  Synthetic oligonucleotide
ttaattgtccgcaaagcggtgcacccaagg

SEQ ID NO: 274621 - DNA, 30 bp, Artificial Sequence
  Synthetic oligonucleotide
cggttgtcggtcgttaactgagccccaagg

SEQ ID NO: 274622 - DNA, 30 bp, Artificial Sequence
  Synthetic oligonucleotide
agttcttaagtgggcgttctaaggccaagg

SEQ ID NO: 274623 - DNA, 26 bp, Artificial Sequence
  Synthetic oligonucleotide
atgacggaaaacggccacaggcaagg

SEQ ID NO: 274624 - DNA, 30 bp, Artificial Sequence
  Synthetic oligonucleotide
tcacggtgtgtccgtctctagaaatcaagg

SEQ ID NO: 274625 - DNA, 30 bp, Artificial Sequence
  Synthetic oligonucleotide
agaggcacgccaggatggtactcatcaagg

SEQ ID NO: 274626 - DNA, 30 bp, Artificial Sequence
  Synthetic oligonucleotide
atttagcacatccgaggtgattactcaagg

SEQ ID NO: 274627 - DNA, 30 bp, Artificial Sequence
  Synthetic oligonucleotide
gggccgaccggtgtgggaacccagtcaagg

SEQ ID NO: 274628 - DNA, 30 bp, Artificial Sequence
  Synthetic oligonucleotide
cgccatggatggcggccccgcccgtcaagg

SEQ ID NO: 274629 - DNA, 30 bp, Artificial Sequence
  Synthetic oligonucleotide
ttaagtaaagtagttatcatacattcaagg

SEQ ID NO: 274630 - DNA, 30 bp, Artificial Sequence
  Synthetic oligonucleotide
ggagccggggctagagggcctatttcaagg

SEQ ID NO: 274631 - DNA, 30 bp, Artificial Sequence
  Synthetic oligonucleotide
tgtcattcacggttggacagcgtttcaagg

SEQ ID NO: 274632 - DNA, 30 bp, Artificial Sequence
  Synthetic oligonucleotide
ggatatcactacagatcctgttcaagaagg

SEQ ID NO: 274633 - DNA, 30 bp, Artificial Sequence
  Synthetic oligonucleotide
atagaattgtgtcgcgactcccgaagaagg

SEQ ID NO: 274634 - DNA, 30 bp, Artificial Sequence
  Synthetic oligonucleotide
atccgttcctgtcggttcttggatagaagg

SEQ ID NO: 274635 - DNA, 30 bp, Artificial Sequence
  Synthetic oligonucleotide
caaatgtcggtaggaggtatccctagaagg

SEQ ID NO: 274636 - DNA, 30 bp, Artificial Sequence
  Synthetic oligonucleotide
gagtagtgccacacaccactacgacgaagg

SEQ ID NO: 274637 - DNA, 30 bp, Artificial Sequence
  Synthetic oligonucleotide
aaccgacttcgacgggcatcccagcgaagg

SEQ ID NO: 274638 - DNA, 30 bp, Artificial Sequence
  Synthetic oligonucleotide
catctggttgagcggtaaggggggcgaagg

SEQ ID NO: 274639 - DNA, 30 bp, Artificial Sequence
  Synthetic oligonucleotide
cgttcgagtatgttgtttgctcttcgaagg

SEQ ID NO: 274640 - DNA, 30 bp, Artificial Sequence
  Synthetic oligonucleotide
aattagtagcccggtggaaatcagggaagg

SEQ ID NO: 274641 - DNA, 30 bp, Artificial Sequence
  Synthetic oligonucleotide
agtgtgggtacgaaagttatacggggaagg

SEQ ID NO: 274642 - DNA, 30 bp, Artificial Sequence
  Synthetic oligonucleotide
gtgtagtacattgcttggcgccctggaagg

SEQ ID NO: 274643 - DNA, 30 bp, Artificial Sequence
  Synthetic oligonucleotide
gtgcagagaatcaaccgaagtccctgaagg

SEQ ID NO: 274644 - DNA, 30 bp, Artificial Sequence
  Synthetic oligonucleotide
tccttcacaggcctatacacataaataagg

SEQ ID NO: 274645 - DNA, 30 bp, Artificial Sequence
  Synthetic oligonucleotide
gtatcatgtgcacagcaaatctcaataagg

SEQ ID NO: 274646 - DNA, 30 bp, Artificial Sequence
  Synthetic oligonucleotide
tactgcactcgcgtcttgctggctataagg

SEQ ID NO: 274647 - DNA, 30 bp, Artificial Sequence
  Synthetic oligonucleotide
attggaaatttacatatcggtgtactaagg

SEQ ID NO: 274648 - DNA, 30 bp, Artificial Sequence
  Synthetic oligonucleotide
aggtatagcgcatgatccagaggcctaagg

SEQ ID NO: 274649 - DNA, 30 bp, Artificial Sequence
  Synthetic oligonucleotide
gtaccagttatgcgactgtgcttcctaagg

SEQ ID NO: 274650 - DNA, 30 bp, Artificial Sequence
  Synthetic oligonucleotide
gtaggtttgttccatgtaaggagcgtaagg

SEQ ID NO: 274651 - DNA, 30 bp, Artificial Sequence
  Synthetic oligonucleotide
gagttggcataagctatcttaggcgtaagg

SEQ ID NO: 274652 - DNA, 30 bp, Artificial Sequence
  Synthetic oligonucleotide
tcgttaccatataatctgggtgtggtaagg

SEQ ID NO: 274653 - DNA, 30 bp, Artificial Sequence
  Synthetic oligonucleotide
ttgtgtcttgaatatcacacacatgtaagg

SEQ ID NO: 274654 - DNA, 30 bp, Artificial Sequence
  Synthetic oligonucleotide
ggccgagtagcttgagaattcggattaagg

SEQ ID NO: 274655 - DNA, 30 bp, Artificial Sequence
  Synthetic oligonucleotide
ccggaacaaacatctcggtgatgattaagg

SEQ ID NO: 274656 - DNA, 30 bp, Artificial Sequence
  Synthetic oligonucleotide
tagtagggggtcccctacgagtacttaagg

SEQ ID NO: 274657 - DNA, 30 bp, Artificial Sequence
  Synthetic oligonucleotide
gcggatatattttgactgatattcttaagg

SEQ ID NO: 274658 - DNA, 30 bp, Artificial Sequence
  Synthetic oligonucleotide
gttcgatcgattcaaaaaaacacgttaagg

SEQ ID NO: 274659 - DNA, 30 bp, Artificial Sequence
  Synthetic oligonucleotide
tgcatccggactccaaggcccaggttaagg

SEQ ID NO: 274660 - DNA, 30 bp, Artificial Sequence
  Synthetic oligonucleotide
actcagaggagagtagtccttcgtttaagg

SEQ ID NO: 274661 - DNA, 30 bp, Artificial Sequence
  Synthetic oligonucleotide
tgggggtatgccactcactccattttaagg

SEQ ID NO: 274662 - DNA, 30 bp, Artificial Sequence
  Synthetic oligonucleotide
cttggcatgcaccttaacaggtggaacagg

SEQ ID NO: 274663 - DNA, 30 bp, Artificial Sequence
  Synthetic oligonucleotide
tacttcccactgtacctctagactaacagg

SEQ ID NO: 274664 - DNA, 30 bp, Artificial Sequence
  Synthetic oligonucleotide
tgtagacgtgtggcttaaggaagacacagg

SEQ ID NO: 274665 - DNA, 30 bp, Artificial Sequence
  Synthetic oligonucleotide
gacggtgctgccggtgcactcgcccacagg

SEQ ID NO: 274666 - DNA, 30 bp, Artificial Sequence
  Synthetic oligonucleotide
taatgtaccaatttcacgccaccgcacagg

SEQ ID NO: 274667 - DNA, 30 bp, Artificial Sequence
  Synthetic oligonucleotide
tgccctattcatattcctgatgatcacagg

SEQ ID NO: 274668 - DNA, 30 bp, Artificial Sequence
  Synthetic oligonucleotide
ctggtagttttcgtaggggtctgtcacagg

SEQ ID NO: 274669 - DNA, 31 bp, Artificial Sequence
  Synthetic oligonucleotide
ataaatgaaatcaccgaagacggttcacagg

SEQ ID NO: 274670 - DNA, 30 bp, Artificial Sequence
  Synthetic oligonucleotide
aaagttagaatattaggacctcaagacagg

SEQ ID NO: 274671 - DNA, 30 bp, Artificial Sequence
  Synthetic oligonucleotide
cttcgtcgatacggaacactctcagacagg

SEQ ID NO: 274672 - DNA, 30 bp, Artificial Sequence
  Synthetic oligonucleotide
ataggtgagatgtggttcatggtagacagg

SEQ ID NO: 274673 - DNA, 30 bp, Artificial Sequence
  Synthetic oligonucleotide
ctttataacatgacgagtgatttagacagg

SEQ ID NO: 274674 - DNA, 30 bp, Artificial Sequence
  Synthetic oligonucleotide
cttttcaagcgggccccaagcaaggacagg

SEQ ID NO: 274675 - DNA, 30 bp, Artificial Sequence
  Synthetic oligonucleotide
taggctacagttttcccacgccaggacagg

SEQ ID NO: 274676 - DNA, 30 bp, Artificial Sequence
  Synthetic oligonucleotide
gtcgaagccccaggagggtaaccatacagg

SEQ ID NO: 274677 - DNA, 30 bp, Artificial Sequence
  Synthetic oligonucleotide
ttggcattgtccacgatctggttatacagg

SEQ ID NO: 274678 - DNA, 30 bp, Artificial Sequence
  Synthetic oligonucleotide
taatttaaaattttcggcaccggctacagg

SEQ ID NO: 274679 - DNA, 30 bp, Artificial Sequence
  Synthetic oligonucleotide
ctaaaccggcttgctgtgcgcaggtacagg

SEQ ID NO: 274680 - DNA, 30 bp, Artificial Sequence
  Synthetic oligonucleotide
atcgcgctcacttatgcctatggttacagg

SEQ ID NO: 274681 - DNA, 30 bp, Artificial Sequence
  Synthetic oligonucleotide
agtggctgctgttagagaggagtcaccagg

SEQ ID NO: 274682 - DNA, 30 bp, Artificial Sequence
  Synthetic oligonucleotide
actcggcaccaacgcacgacttggaccagg

SEQ ID NO: 274683 - DNA, 30 bp, Artificial Sequence
  Synthetic oligonucleotide
gacgcgggattgattgaggctcttaccagg

SEQ ID NO: 274684 - DNA, 30 bp, Artificial Sequence
  Synthetic oligonucleotide
gtgctcagttaaaacaggaacccccccagg

SEQ ID NO: 274685 - DNA, 30 bp, Artificial Sequence
  Synthetic oligonucleotide
acacggggccgagttgtcactgcccccagg

SEQ ID NO: 274686 - DNA, 30 bp, Artificial Sequence
  Synthetic oligonucleotide
atttaggtcgtatgttccgcttctcccagg

SEQ ID NO: 274687 - DNA, 30 bp, Artificial Sequence
  Synthetic oligonucleotide
tagactcgttttgttagctgtacagccagg

SEQ ID NO: 274688 - DNA, 30 bp, Artificial Sequence
  Synthetic oligonucleotide
tcggtttcaccgaggaattgttgagccagg

SEQ ID NO: 274689 - DNA, 30 bp, Artificial Sequence
  Synthetic oligonucleotide
aggaaatttttcgccaaaaaattagccagg

SEQ ID NO: 274690 - DNA, 30 bp, Artificial Sequence
  Synthetic oligonucleotide
gctcctccatgtgttccgaacttagccagg

SEQ ID NO: 274691 - DNA, 30 bp, Artificial Sequence
  Synthetic oligonucleotide
accgcgcattacctttgggtgaatgccagg

SEQ ID NO: 274692 - DNA, 30 bp, Artificial Sequence
  Synthetic oligonucleotide
gtttgcacgtgtactgaactacgtgccagg

SEQ ID NO: 274693 - DNA, 30 bp, Artificial Sequence
  Synthetic oligonucleotide
gttcctcaaagttgtgttgtcgtctccagg

SEQ ID NO: 274694 - DNA, 30 bp, Artificial Sequence
  Synthetic oligonucleotide
ctggtcccatatgcattcattcaaagcagg

SEQ ID NO: 274695 - DNA, 30 bp, Artificial Sequence
  Synthetic oligonucleotide
ttattaggggcatccacagtgtgaagcagg

SEQ ID NO: 274696 - DNA, 30 bp, Artificial Sequence
  Synthetic oligonucleotide
gagagttcgcatccaatcagggcgagcagg

SEQ ID NO: 274697 - DNA, 30 bp, Artificial Sequence
  Synthetic oligonucleotide
ttatctcgattcagatcaatatatagcagg

SEQ ID NO: 274698 - DNA, 30 bp, Artificial Sequence
  Synthetic oligonucleotide
gtttaaacgacctgtgggcgtacgcgcagg

SEQ ID NO: 274699 - DNA, 30 bp, Artificial Sequence
  Synthetic oligonucleotide
aacctgggatatatcttagaaataggcagg

SEQ ID NO: 274700 - DNA, 30 bp, Artificial Sequence
  Synthetic oligonucleotide
atcgaaatatagcgattatagcccggcagg

SEQ ID NO: 274701 - DNA, 30 bp, Artificial Sequence
  Synthetic oligonucleotide
cgcccgcttattattggcagcgagggcagg

SEQ ID NO: 274702 - DNA, 30 bp, Artificial Sequence
  Synthetic oligonucleotide
ttagtaggttaaaatccttcgcggggcagg

SEQ ID NO: 274703 - DNA, 30 bp, Artificial Sequence
  Synthetic oligonucleotide
cggtagtgtttgaggtagtatgtgggcagg

SEQ ID NO: 274704 - DNA, 30 bp, Artificial Sequence
  Synthetic oligonucleotide
gtcatatcagttcggttttaattgggcagg

SEQ ID NO: 274705 - DNA, 30 bp, Artificial Sequence
  Synthetic oligonucleotide
ttgtgttaggcggtaggcgaagctggcagg

SEQ ID NO: 274706 - DNA, 30 bp, Artificial Sequence
  Synthetic oligonucleotide
tgtaggagctcgaatgagatgtctggcagg

SEQ ID NO: 274707 - DNA, 30 bp, Artificial Sequence
  Synthetic oligonucleotide
ctgcacacggaggatgataccgttggcagg

SEQ ID NO: 274708 - DNA, 30 bp, Artificial Sequence
  Synthetic oligonucleotide
attaagcttacggatggcttataatgcagg

SEQ ID NO: 274709 - DNA, 30 bp, Artificial Sequence
  Synthetic oligonucleotide
gtggccgtaactacggtggtgtcctgcagg

SEQ ID NO: 274710 - DNA, 30 bp, Artificial Sequence
  Synthetic oligonucleotide
tccaaactctaaagagagtttgcgtgcagg

SEQ ID NO: 274711 - DNA, 30 bp, Artificial Sequence
  Synthetic oligonucleotide
aacgtgaaaacgcgagacgattggtgcagg

SEQ ID NO: 274712 - DNA, 30 bp, Artificial Sequence
  Synthetic oligonucleotide
gaatagaacattggctgaacccgttgcagg

SEQ ID NO: 274713 - DNA, 30 bp, Artificial Sequence
  Synthetic oligonucleotide
cggacacttttttaacacagtacaatcagg

SEQ ID NO: 274714 - DNA, 30 bp, Artificial Sequence
  Synthetic oligonucleotide
ataccgctaatcggtgtgatggcaatcagg

SEQ ID NO: 274715 - DNA, 30 bp, Artificial Sequence
  Synthetic oligonucleotide
cattgactaattagcggatgaataatcagg

SEQ ID NO: 274716 - DNA, 30 bp, Artificial Sequence
  Synthetic oligonucleotide
catatgtgctggttcgtggcgttaatcagg

SEQ ID NO: 274717 - DNA, 30 bp, Artificial Sequence
  Synthetic oligonucleotide
ggcaatgcacgcgttcttaagctcatcagg

SEQ ID NO: 274718 - DNA, 30 bp, Artificial Sequence
  Synthetic oligonucleotide
gtatttatacggacgatcgttttgatcagg

SEQ ID NO: 274719 - DNA, 31 bp, Artificial Sequence
  Synthetic oligonucleotide
gtcacagaatggtggctgctcgtatatcagg

SEQ ID NO: 274720 - DNA, 30 bp, Artificial Sequence
  Synthetic oligonucleotide
acaccactgtacctcttacatcaactcagg

SEQ ID NO: 274721 - DNA, 30 bp, Artificial Sequence
  Synthetic oligonucleotide
cgacgctcaggaggcacctttcccctcagg

SEQ ID NO: 274722 - DNA, 30 bp, Artificial Sequence
  Synthetic oligonucleotide
agaaataggatccacgcctgagccctcagg

SEQ ID NO: 274723 - DNA, 30 bp, Artificial Sequence
  Synthetic oligonucleotide
acctaattaactatacatgaagctctcagg

SEQ ID NO: 274724 - DNA, 30 bp, Artificial Sequence
  Synthetic oligonucleotide
ggagagcctgcttggttctagcgagtcagg

SEQ ID NO: 274725 - DNA, 30 bp, Artificial Sequence
  Synthetic oligonucleotide
gcacttatacgtgaggagaaaaccgtcagg

SEQ ID NO: 274726 - DNA, 30 bp, Artificial Sequence
  Synthetic oligonucleotide
ctagtcctctacggtcgttagtccttcagg

SEQ ID NO: 274727 - DNA, 30 bp, Artificial Sequence
  Synthetic oligonucleotide
ctgatctgagatctaacagtggagttcagg

SEQ ID NO: 274728 - DNA, 30 bp, Artificial Sequence
  Synthetic oligonucleotide
ataaccgcatatatgagtcacagtttcagg

SEQ ID NO: 274729 - DNA, 30 bp, Artificial Sequence
  Synthetic oligonucleotide
ttaacgtagtgcctcccctaatgtttcagg

SEQ ID NO: 274730 - DNA, 30 bp, Artificial Sequence
  Synthetic oligonucleotide
ttgatagaggctgtgggggcgaaaaagagg

SEQ ID NO: 274731 - DNA, 30 bp, Artificial Sequence
  Synthetic oligonucleotide
taaccggtaaaaccgcttccaggaaagagg

SEQ ID NO: 274732 - DNA, 30 bp, Artificial Sequence
  Synthetic oligonucleotide
aagataaggtcacggtgtaggccgaagagg

SEQ ID NO: 274733 - DNA, 30 bp, Artificial Sequence
  Synthetic oligonucleotide
caccggattcggacgaaccaaagtaagagg

SEQ ID NO: 274734 - DNA, 30 bp, Artificial Sequence
  Synthetic oligonucleotide
ttgtgattagatcgttatggatgtaagagg

SEQ ID NO: 274735 - DNA, 30 bp, Artificial Sequence
  Synthetic oligonucleotide
atcatttttatcatccagacttaacagagg

SEQ ID NO: 274736 - DNA, 29 bp, Artificial Sequence
  Synthetic oligonucleotide
atgatatatgtctcccgagtcgtcagagg

SEQ ID NO: 274737 - DNA, 30 bp, Artificial Sequence
  Synthetic oligonucleotide
tagctgggaggtcatagagtcctcgagagg

SEQ ID NO: 274738 - DNA, 30 bp, Artificial Sequence
  Synthetic oligonucleotide
ggcgtggtacacggctataatgcggagagg

SEQ ID NO: 274739 - DNA, 30 bp, Artificial Sequence
  Synthetic oligonucleotide
gaactgtggtcagatgatatcagggagagg

SEQ ID NO: 274740 - DNA, 30 bp, Artificial Sequence
  Synthetic oligonucleotide
ccgaatctcgcctttcaacacgctgagagg

SEQ ID NO: 274741 - DNA, 30 bp, Artificial Sequence
  Synthetic oligonucleotide
ctgtgtttcagtatagcctttcttgagagg

SEQ ID NO: 274742 - DNA, 30 bp, Artificial Sequence
  Synthetic oligonucleotide
atctgggagccgtatagcgctccgtagagg

SEQ ID NO: 274743 - DNA, 30 bp, Artificial Sequence
  Synthetic oligonucleotide
ttcggggagcgtcagcacagcatgtagagg

SEQ ID NO: 274744 - DNA, 30 bp, Artificial Sequence
  Synthetic oligonucleotide
tagctgggttcagtccagctgatttagagg

SEQ ID NO: 274745 - DNA, 30 bp, Artificial Sequence
  Synthetic oligonucleotide
tctttcatataacatcaagttgtttagagg

SEQ ID NO: 274746 - DNA, 30 bp, Artificial Sequence
  Synthetic oligonucleotide
tctggcggtagcagcattccagaaacgagg

SEQ ID NO: 274747 - DNA, 30 bp, Artificial Sequence
  Synthetic oligonucleotide
agcgtgtatgataacacctctgtcacgagg

SEQ ID NO: 274748 - DNA, 30 bp, Artificial Sequence
  Synthetic oligonucleotide
tcggtactagctgcaccgtgccagacgagg

SEQ ID NO: 274749 - DNA, 30 bp, Artificial Sequence
  Synthetic oligonucleotide
acgccagtacgttaacagccctcgacgagg

SEQ ID NO: 274750 - DNA, 30 bp, Artificial Sequence
  Synthetic oligonucleotide
gctactgacggccaacaagccatgacgagg

SEQ ID NO: 274751 - DNA, 30 bp, Artificial Sequence
  Synthetic oligonucleotide
acttcgggtaaggccttatttattccgagg

SEQ ID NO: 274752 - DNA, 30 bp, Artificial Sequence
  Synthetic oligonucleotide
ttcggggtgcggactggacattaagcgagg

SEQ ID NO: 274753 - DNA, 30 bp, Artificial Sequence
  Synthetic oligonucleotide
gggatggtattgtccgagtgtctagcgagg

SEQ ID NO: 274754 - DNA, 30 bp, Artificial Sequence
  Synthetic oligonucleotide
gtgcgcataaactcactgtatacggcgagg

SEQ ID NO: 274755 - DNA, 30 bp, Artificial Sequence
  Synthetic oligonucleotide
tcaatttggctagttcggaagtatgcgagg

SEQ ID NO: 274756 - DNA, 30 bp, Artificial Sequence
  Synthetic oligonucleotide
tctattggggtgaccgctgaacttgcgagg

SEQ ID NO: 274757 - DNA, 30 bp, Artificial Sequence
  Synthetic oligonucleotide
gttggtccactggtagaggtggcatcgagg

SEQ ID NO: 274758 - DNA, 30 bp, Artificial Sequence
  Synthetic oligonucleotide
atgatatccggtggtcctacctactcgagg

SEQ ID NO: 274759 - DNA, 30 bp, Artificial Sequence
  Synthetic oligonucleotide
tctaagaacttgtcacacccactctcgagg

SEQ ID NO: 274760 - DNA, 30 bp, Artificial Sequence
  Synthetic oligonucleotide
cacgggcagtccttttataacctctcgagg

SEQ ID NO: 274761 - DNA, 30 bp, Artificial Sequence
  Synthetic oligonucleotide
ctaagggctttgcccaaatggaagtcgagg

SEQ ID NO: 274762 - DNA, 30 bp, Artificial Sequence
  Synthetic oligonucleotide
tcagagtcatagtcgtctggcgcgtcgagg

SEQ ID NO: 274763 - DNA, 30 bp, Artificial Sequence
  Synthetic oligonucleotide
taagcacgtcttcaccgttgacgaaggagg

SEQ ID NO: 274764 - DNA, 30 bp, Artificial Sequence
  Synthetic oligonucleotide
tcatttttcgaacgtatgttacccaggagg

SEQ ID NO: 274765 - DNA, 30 bp, Artificial Sequence
  Synthetic oligonucleotide
cacaccacttgtgtacagggtagcaggagg

SEQ ID NO: 274766 - DNA, 30 bp, Artificial Sequence
  Synthetic oligonucleotide
atgcggtcacaagttttgcaactcaggagg

SEQ ID NO: 274767 - DNA, 30 bp, Artificial Sequence
  Synthetic oligonucleotide
tagggatagcctagtcgtctgatgaggagg

SEQ ID NO: 274768 - DNA, 30 bp, Artificial Sequence
  Synthetic oligonucleotide
gacaattcatacagtgtaggtttgaggagg

SEQ ID NO: 274769 - DNA, 30 bp, Artificial Sequence
  Synthetic oligonucleotide
tcactccactatacgaaacgcaataggagg

SEQ ID NO: 274770 - DNA, 30 bp, Artificial Sequence
  Synthetic oligonucleotide
cgaccttcccagttctgggtcttacggagg

SEQ ID NO: 274771 - DNA, 30 bp, Artificial Sequence
  Synthetic oligonucleotide
actgggggaagatcttgttaattccggagg

SEQ ID NO: 274772 - DNA, 30 bp, Artificial Sequence
  Synthetic oligonucleotide
tagtgtttcgccagactagtccagcggagg

SEQ ID NO: 274773 - DNA, 30 bp, Artificial Sequence
  Synthetic oligonucleotide
taggttcaatgattcgtcacttggcggagg

SEQ ID NO: 274774 - DNA, 30 bp, Artificial Sequence
  Synthetic oligonucleotide
catatgtctcttcatcagcactgtcggagg

SEQ ID NO: 274775 - DNA, 30 bp, Artificial Sequence
  Synthetic oligonucleotide
agcagtaggtttatggtaggtgcagggagg

SEQ ID NO: 274776 - DNA, 30 bp, Artificial Sequence
  Synthetic oligonucleotide
tggcctctttgtctaccccgcggagggagg

SEQ ID NO: 274777 - DNA, 30 bp, Artificial Sequence
  Synthetic oligonucleotide
ggtcgagacccatggggaaaatgcgggagg

SEQ ID NO: 274778 - DNA, 30 bp, Artificial Sequence
  Synthetic oligonucleotide
acttagacaaaatgacgcagtcatgggagg

SEQ ID NO: 274779 - DNA, 30 bp, Artificial Sequence
  Synthetic oligonucleotide
gcggcaacgtacatttcagcacaatggagg

SEQ ID NO: 274780 - DNA, 30 bp, Artificial Sequence
  Synthetic oligonucleotide
tgaaaatatatacgcgaggagcaatggagg

SEQ ID NO: 274781 - DNA, 26 bp, Artificial Sequence
  Synthetic oligonucleotide
attagtatatcaactcaccctggagg

SEQ ID NO: 274782 - DNA, 30 bp, Artificial Sequence
  Synthetic oligonucleotide
gcgttgagcacagattgcacccggtggagg

SEQ ID NO: 274783 - DNA, 30 bp, Artificial Sequence
  Synthetic oligonucleotide
gcaaacaacagagccggcagtcattggagg

SEQ ID NO: 274784 - DNA, 30 bp, Artificial Sequence
  Synthetic oligonucleotide
tagtgaccagatcaaccaatcagttggagg

SEQ ID NO: 274785 - DNA, 30 bp, Artificial Sequence
  Synthetic oligonucleotide
attgacaagggagtggtttgggtttggagg

SEQ ID NO: 274786 - DNA, 30 bp, Artificial Sequence
  Synthetic oligonucleotide
tcgcgtcgccaggcttacgggccaatgagg

SEQ ID NO: 274787 - DNA, 30 bp, Artificial Sequence
  Synthetic oligonucleotide
gagccttgtatggatgccgaatcaatgagg

SEQ ID NO: 274788 - DNA, 30 bp, Artificial Sequence
  Synthetic oligonucleotide
aaaaaatgcttataagtaaagctaatgagg

SEQ ID NO: 274789 - DNA, 30 bp, Artificial Sequence
  Synthetic oligonucleotide
cgaagtctcttcaacgccaataagatgagg

SEQ ID NO: 274790 - DNA, 30 bp, Artificial Sequence
  Synthetic oligonucleotide
ataggccccgtcgatagaagcgggatgagg

SEQ ID NO: 274791 - DNA, 30 bp, Artificial Sequence
  Synthetic oligonucleotide
tccgaataccttttgttatacgtgatgagg

SEQ ID NO: 274792 - DNA, 30 bp, Artificial Sequence
  Synthetic oligonucleotide
cgacccaaatcaagtgaggctgacctgagg

SEQ ID NO: 274793 - DNA, 30 bp, Artificial Sequence
  Synthetic oligonucleotide
gcatgtcaagatggaagccggcagctgagg

SEQ ID NO: 274794 - DNA, 30 bp, Artificial Sequence
  Synthetic oligonucleotide
aaggatttctagcacctaaaatcgctgagg

SEQ ID NO: 274795 - DNA, 30 bp, Artificial Sequence
  Synthetic oligonucleotide
gcctggtgtgtattgaggtctgtgctgagg

SEQ ID NO: 274796 - DNA, 30 bp, Artificial Sequence
  Synthetic oligonucleotide
gaagcgacgagtaccccaacagttctgagg

SEQ ID NO: 274797 - DNA, 30 bp, Artificial Sequence
  Synthetic oligonucleotide
cggaacgtctgcggcacgccggaagtgagg

SEQ ID NO: 274798 - DNA, 30 bp, Artificial Sequence
  Synthetic oligonucleotide
ctgacgaactgatctacacttcaggtgagg

SEQ ID NO: 274799 - DNA, 30 bp, Artificial Sequence
  Synthetic oligonucleotide
ttactgtagcacaagggcgagacggtgagg

SEQ ID NO: 274800 - DNA, 33 bp, Artificial Sequence
  Synthetic oligonucleotide
ggtggtagagggcgttatgagggaatggtgagg

SEQ ID NO: 274801 - DNA, 30 bp, Artificial Sequence
  Synthetic oligonucleotide
agtcgagatacttgtcttcagcgtgtgagg

SEQ ID NO: 274802 - DNA, 30 bp, Artificial Sequence
  Synthetic oligonucleotide
ggtacgagagtgatagccacacaattgagg

SEQ ID NO: 274803 - DNA, 30 bp, Artificial Sequence
  Synthetic oligonucleotide
gtacatagcgtgtagtgcataccgttgagg

SEQ ID NO: 274804 - DNA, 30 bp, Artificial Sequence
  Synthetic oligonucleotide
atatcttacactgtctctttagggttgagg

SEQ ID NO: 274805 - DNA, 30 bp, Artificial Sequence
  Synthetic oligonucleotide
ctgaaagtgttgtgcaattgagttttgagg

SEQ ID NO: 274806 - DNA, 30 bp, Artificial Sequence
  Synthetic oligonucleotide
tgaatttaagatcaacccgtgtaaaatagg

SEQ ID NO: 274807 - DNA, 30 bp, Artificial Sequence
  Synthetic oligonucleotide
acatgtccagaatttggagttgacaatagg

SEQ ID NO: 274808 - DNA, 30 bp, Artificial Sequence
  Synthetic oligonucleotide
tccttacaagacgcgggggtccagaatagg

SEQ ID NO: 274809 - DNA, 30 bp, Artificial Sequence
  Synthetic oligonucleotide
gttactcaatgtatttgggccgcgaatagg

SEQ ID NO: 274810 - DNA, 30 bp, Artificial Sequence
  Synthetic oligonucleotide
agcagcttactacttcgtgaaaggaatagg

SEQ ID NO: 274811 - DNA, 30 bp, Artificial Sequence
  Synthetic oligonucleotide
tggcatcaatcgcggaatagtaataatagg

SEQ ID NO: 274812 - DNA, 30 bp, Artificial Sequence
  Synthetic oligonucleotide
accatagcatgctagtacccgagtaatagg

SEQ ID NO: 274813 - DNA, 30 bp, Artificial Sequence
  Synthetic oligonucleotide
tatcgggtaagaggctattaaggacatagg

SEQ ID NO: 274814 - DNA, 30 bp, Artificial Sequence
  Synthetic oligonucleotide
cgattcagcttgccgctggggaaccatagg

SEQ ID NO: 274815 - DNA, 30 bp, Artificial Sequence
  Synthetic oligonucleotide
gcagctactgacaaaaagaagtgccatagg

SEQ ID NO: 274816 - DNA, 30 bp, Artificial Sequence
  Synthetic oligonucleotide
agaaattctgtacggctagagctccatagg

SEQ ID NO: 274817 - DNA, 30 bp, Artificial Sequence
  Synthetic oligonucleotide
cgctgcataaagcatctaagggcgcatagg

SEQ ID NO: 274818 - DNA, 30 bp, Artificial Sequence
  Synthetic oligonucleotide
ttaatatgggtgcgggcgggatcgcatagg

SEQ ID NO: 274819 - DNA, 30 bp, Artificial Sequence
  Synthetic oligonucleotide
ccaacaaccaatttcgctgcagggcatagg

SEQ ID NO: 274820 - DNA, 30 bp, Artificial Sequence
  Synthetic oligonucleotide
tcccgacctctgaggtggaatatgcatagg

SEQ ID NO: 274821 - DNA, 30 bp, Artificial Sequence
  Synthetic oligonucleotide
tcggtaggggtttaaattatattgcatagg

SEQ ID NO: 274822 - DNA, 30 bp, Artificial Sequence
  Synthetic oligonucleotide
tctagcggtaatagtctgccttgtcatagg

SEQ ID NO: 274823 - DNA, 30 bp, Artificial Sequence
  Synthetic oligonucleotide
tagcggtattttagtagcataaaagatagg

SEQ ID NO: 274824 - DNA, 30 bp, Artificial Sequence
  Synthetic oligonucleotide
ggtaatgttcaattccgaattgcagatagg

SEQ ID NO: 274825 - DNA, 30 bp, Artificial Sequence
  Synthetic oligonucleotide
acatgtgctgcctaaacaatgtgagatagg

SEQ ID NO: 274826 - DNA, 30 bp, Artificial Sequence
  Synthetic oligonucleotide
cctgcattatcggtactccaactagatagg

SEQ ID NO: 274827 - DNA, 30 bp, Artificial Sequence
  Synthetic oligonucleotide
cttactcttgacaattctataaccgatagg

SEQ ID NO: 274828 - DNA, 30 bp, Artificial Sequence
  Synthetic oligonucleotide
ggccatacttggtagaataaatgcgatagg

SEQ ID NO: 274829 - DNA, 30 bp, Artificial Sequence
  Synthetic oligonucleotide
tctgtcttgacattattacaatgcgatagg

SEQ ID NO: 274830 - DNA, 30 bp, Artificial Sequence
  Synthetic oligonucleotide
ctacagcgcccctattatgcccgggatagg

SEQ ID NO: 274831 - DNA, 30 bp, Artificial Sequence
  Synthetic oligonucleotide
taagagctcatcgctaactctatggatagg

SEQ ID NO: 274832 - DNA, 30 bp, Artificial Sequence
  Synthetic oligonucleotide
gcagcgtcttcttcccgggtattggatagg

SEQ ID NO: 274833 - DNA, 30 bp, Artificial Sequence
  Synthetic oligonucleotide
tgtatgtacgtgactacgtcagttgatagg

SEQ ID NO: 274834 - DNA, 30 bp, Artificial Sequence
  Synthetic oligonucleotide
tgcgcgattttgacggtacgaggatatagg

SEQ ID NO: 274835 - DNA, 30 bp, Artificial Sequence
  Synthetic oligonucleotide
taacggagcaaactgcagcacttatatagg

SEQ ID NO: 274836 - DNA, 30 bp, Artificial Sequence
  Synthetic oligonucleotide
cgtaggagcaacgacgcgaagctctatagg

SEQ ID NO: 274837 - DNA, 30 bp, Artificial Sequence
  Synthetic oligonucleotide
ttgcaattccgagtatcccctgagtatagg

SEQ ID NO: 274838 - DNA, 30 bp, Artificial Sequence
  Synthetic oligonucleotide
tcctaatgatacaatatatggacttatagg

SEQ ID NO: 274839 - DNA, 30 bp, Artificial Sequence
  Synthetic oligonucleotide
gacatgaacatgcatcgtgctctttatagg

SEQ ID NO: 274840 - DNA, 30 bp, Artificial Sequence
  Synthetic oligonucleotide
agatatcggaatctgacgaaactgactagg

SEQ ID NO: 274841 - DNA, 30 bp, Artificial Sequence
  Synthetic oligonucleotide
gccgcgacgtccaggcggcaaagtactagg

SEQ ID NO: 274842 - DNA, 30 bp, Artificial Sequence
  Synthetic oligonucleotide
agacggactgttctgtcaatacaacctagg

SEQ ID NO: 274843 - DNA, 30 bp, Artificial Sequence
  Synthetic oligonucleotide
aaacaacgtgcgtagccttaaggacctagg

SEQ ID NO: 274844 - DNA, 30 bp, Artificial Sequence
  Synthetic oligonucleotide
gaaaatccaagaggcaagcgctgacctagg

SEQ ID NO: 274845 - DNA, 30 bp, Artificial Sequence
  Synthetic oligonucleotide
ccgcacaacgggtacttggtacggcctagg

SEQ ID NO: 274846 - DNA, 30 bp, Artificial Sequence
  Synthetic oligonucleotide
cgtttttcgattttcaattggggtcctagg

SEQ ID NO: 274847 - DNA, 30 bp, Artificial Sequence
  Synthetic oligonucleotide
tcgacgtgcaagcctggttgagttcctagg

SEQ ID NO: 274848 - DNA, 30 bp, Artificial Sequence
  Synthetic oligonucleotide
gcgtgaaagcctcaatagatgacagctagg

SEQ ID NO: 274849 - DNA, 30 bp, Artificial Sequence
  Synthetic oligonucleotide
gtctcctaactggcatctcaagacgctagg

SEQ ID NO: 274850 - DNA, 30 bp, Artificial Sequence
  Synthetic oligonucleotide
aggtgagttggactcctttctgaggctagg

SEQ ID NO: 274851 - DNA, 30 bp, Artificial Sequence
  Synthetic oligonucleotide
accatgcgaatgctggagtcctaggctagg

SEQ ID NO: 274852 - DNA, 30 bp, Artificial Sequence
  Synthetic oligonucleotide
gcttctcgagttgtttcaaatcgggctagg

SEQ ID NO: 274853 - DNA, 30 bp, Artificial Sequence
  Synthetic oligonucleotide
gtgtcccaatgcaaatggcacggggctagg

SEQ ID NO: 274854 - DNA, 30 bp, Artificial Sequence
  Synthetic oligonucleotide
gtatgttgagttagtccagtgttctctagg

SEQ ID NO: 274855 - DNA, 30 bp, Artificial Sequence
  Synthetic oligonucleotide
gttgcgtttgtatatatgccaatgtctagg

SEQ ID NO: 274856 - DNA, 30 bp, Artificial Sequence
  Synthetic oligonucleotide
tcagcatagggggactcccgagtttctagg

SEQ ID NO: 274857 - DNA, 30 bp, Artificial Sequence
  Synthetic oligonucleotide
cgtaggtccagtcggaatcgtaccagtagg

SEQ ID NO: 274858 - DNA, 30 bp, Artificial Sequence
  Synthetic oligonucleotide
aagtttattgtcctctctatgtcgagtagg

SEQ ID NO: 274859 - DNA, 30 bp, Artificial Sequence
  Synthetic oligonucleotide
tcgattaatagacggctcgcgatacgtagg

SEQ ID NO: 274860 - DNA, 30 bp, Artificial Sequence
  Synthetic oligonucleotide
acgcttagagagcgattcgggtaccgtagg

SEQ ID NO: 274861 - DNA, 30 bp, Artificial Sequence
  Synthetic oligonucleotide
ttacaagattgacaccagaataagcgtagg

SEQ ID NO: 274862 - DNA, 30 bp, Artificial Sequence
  Synthetic oligonucleotide
gggcctgagaactgtaagatttctcgtagg

SEQ ID NO: 274863 - DNA, 30 bp, Artificial Sequence
  Synthetic oligonucleotide
ttttcgggagtaagaggcgaaacaggtagg

SEQ ID NO: 274864 - DNA, 30 bp, Artificial Sequence
  Synthetic oligonucleotide
taatccaattggtgctaagtaccaggtagg

SEQ ID NO: 274865 - DNA, 30 bp, Artificial Sequence
  Synthetic oligonucleotide
gttagactttgaaacactgcatcaggtagg

SEQ ID NO: 274866 - DNA, 30 bp, Artificial Sequence
  Synthetic oligonucleotide
cacggtaaccattccgaggccccgggtagg

SEQ ID NO: 274867 - DNA, 30 bp, Artificial Sequence
  Synthetic oligonucleotide
ctagatcttacggaatgatctagtggtagg

SEQ ID NO: 274868 - DNA, 30 bp, Artificial Sequence
  Synthetic oligonucleotide
aaacacccaaggttcttagtacgtggtagg

SEQ ID NO: 274869 - DNA, 30 bp, Artificial Sequence
  Synthetic oligonucleotide
tcgactttccctagtaagtggattggtagg

SEQ ID NO: 274870 - DNA, 30 bp, Artificial Sequence
  Synthetic oligonucleotide
aaaaataattcacataatgtttttggtagg

SEQ ID NO: 274871 - DNA, 30 bp, Artificial Sequence
  Synthetic oligonucleotide
cgtgcttggttcgtttcaggtcgatgtagg

SEQ ID NO: 274872 - DNA, 30 bp, Artificial Sequence
  Synthetic oligonucleotide
agtggaaaagcggaagctataaagtgtagg

SEQ ID NO: 274873 - DNA, 30 bp, Artificial Sequence
  Synthetic oligonucleotide
gttatatatcgagacatggagaggtgtagg

SEQ ID NO: 274874 - DNA, 30 bp, Artificial Sequence
  Synthetic oligonucleotide
ccatctgcttctctcattagcggttgtagg

SEQ ID NO: 274875 - DNA, 30 bp, Artificial Sequence
  Synthetic oligonucleotide
ccccaaagaccactggttgctgcaattagg

SEQ ID NO: 274876 - DNA, 30 bp, Artificial Sequence
  Synthetic oligonucleotide
accagatacataccaaataggagaattagg

SEQ ID NO: 274877 - DNA, 30 bp, Artificial Sequence
  Synthetic oligonucleotide
tccgagagaatatgatgcatcaacattagg

SEQ ID NO: 274878 - DNA, 30 bp, Artificial Sequence
  Synthetic oligonucleotide
aaacggattttaaggtcggtgcacattagg

SEQ ID NO: 274879 - DNA, 30 bp, Artificial Sequence
  Synthetic oligonucleotide
cttagggaagggttcctaaaaatcattagg

SEQ ID NO: 274880 - DNA, 30 bp, Artificial Sequence
  Synthetic oligonucleotide
tggattaactaaatgggaggaatgattagg

SEQ ID NO: 274881 - DNA, 30 bp, Artificial Sequence
  Synthetic oligonucleotide
ggtcttgccataggctgacccgtgattagg

SEQ ID NO: 274882 - DNA, 30 bp, Artificial Sequence
  Synthetic oligonucleotide
ggagtattacgggaccgatataatattagg

SEQ ID NO: 274883 - DNA, 30 bp, Artificial Sequence
  Synthetic oligonucleotide
gtatactgggtgctgtgtactactattagg

SEQ ID NO: 274884 - DNA, 30 bp, Artificial Sequence
  Synthetic oligonucleotide
gtagagcaacgtacttaacttacgcttagg

SEQ ID NO: 274885 - DNA, 30 bp, Artificial Sequence
  Synthetic oligonucleotide
ccttgggggacgccaggaaccctgcttagg

SEQ ID NO: 274886 - DNA, 30 bp, Artificial Sequence
  Synthetic oligonucleotide
tcaattatctcgagtgcgtgaaatcttagg

SEQ ID NO: 274887 - DNA, 30 bp, Artificial Sequence
  Synthetic oligonucleotide
tggtgtgtagggctttggtcgtacgttagg

SEQ ID NO: 274888 - DNA, 30 bp, Artificial Sequence
  Synthetic oligonucleotide
gctccgaagtggtctaaatagaccgttagg

SEQ ID NO: 274889 - DNA, 30 bp, Artificial Sequence
  Synthetic oligonucleotide
tgaatagaccatagggctagtatcgttagg

SEQ ID NO: 274890 - DNA, 30 bp, Artificial Sequence
  Synthetic oligonucleotide
cgggtacctaaggttaacgtggtcgttagg

SEQ ID NO: 274891 - DNA, 30 bp, Artificial Sequence
  Synthetic oligonucleotide
gtaatgggaatagtagggatacaggttagg

SEQ ID NO: 274892 - DNA, 30 bp, Artificial Sequence
  Synthetic oligonucleotide
ctgtatgagaatagagagttcactgttagg

SEQ ID NO: 274893 - DNA, 30 bp, Artificial Sequence
  Synthetic oligonucleotide
gctcgctgcacaatggttccgtctgttagg

SEQ ID NO: 274894 - DNA, 30 bp, Artificial Sequence
  Synthetic oligonucleotide
ttggtcggcgttatctgtcttggtgttagg

SEQ ID NO: 274895 - DNA, 30 bp, Artificial Sequence
  Synthetic oligonucleotide
ggtaaacagtcgtctattgtttcatttagg

SEQ ID NO: 274896 - DNA, 30 bp, Artificial Sequence
  Synthetic oligonucleotide
ctttcaagtctgtcgaactgctgctttagg

SEQ ID NO: 274897 - DNA, 30 bp, Artificial Sequence
  Synthetic oligonucleotide
ctaggaacaacgtgttacgacgtgtttagg

SEQ ID NO: 274898 - DNA, 30 bp, Artificial Sequence
  Synthetic oligonucleotide
gcggaatccaaatttcttggcaattttagg

SEQ ID NO: 274899 - DNA, 30 bp, Artificial Sequence
  Synthetic oligonucleotide
aaagtaaaggggaataagtctaattttagg

SEQ ID NO: 274900 - DNA, 30 bp, Artificial Sequence
  Synthetic oligonucleotide
cgatataatgaggcagtcctggccaaacgg

SEQ ID NO: 274901 - DNA, 30 bp, Artificial Sequence
  Synthetic oligonucleotide
tgagataactcgagcattagtatcaaacgg

SEQ ID NO: 274902 - DNA, 30 bp, Artificial Sequence
  Synthetic oligonucleotide
tgtatagcttaccatgtgctatagaaacgg

SEQ ID NO: 274903 - DNA, 31 bp, Artificial Sequence
  Synthetic oligonucleotide
gcgcaccattttacactggctcccgaaacgg

SEQ ID NO: 274904 - DNA, 30 bp, Artificial Sequence
  Synthetic oligonucleotide
gagtacaaccaagaactttaatataaacgg

SEQ ID NO: 274905 - DNA, 30 bp, Artificial Sequence
  Synthetic oligonucleotide
aggtgatcccaacgcctgcgaactaaacgg

SEQ ID NO: 274906 - DNA, 30 bp, Artificial Sequence
  Synthetic oligonucleotide
gatcggagccgagtattcttaactaaacgg

SEQ ID NO: 274907 - DNA, 30 bp, Artificial Sequence
  Synthetic oligonucleotide
cgcaaattaaagagctgaaaacctaaacgg

SEQ ID NO: 274908 - DNA, 30 bp, Artificial Sequence
  Synthetic oligonucleotide
aaatgatgatgaaggcaatcaggtaaacgg

SEQ ID NO: 274909 - DNA, 30 bp, Artificial Sequence
  Synthetic oligonucleotide
gggatgcaagtcggaatcagttgtaaacgg

SEQ ID NO: 274910 - DNA, 30 bp, Artificial Sequence
  Synthetic oligonucleotide
gcattttgtggaactcttgatattaaacgg

SEQ ID NO: 274911 - DNA, 30 bp, Artificial Sequence
  Synthetic oligonucleotide
cttccggcggacggggtcaagacacaacgg

SEQ ID NO: 274912 - DNA, 30 bp, Artificial Sequence
  Synthetic oligonucleotide
cggagatccggaccagcgtgattccaacgg

SEQ ID NO: 274913 - DNA, 30 bp, Artificial Sequence
  Synthetic oligonucleotide
gagccggagatccaaccaaggcggcaacgg

SEQ ID NO: 274914 - DNA, 30 bp, Artificial Sequence
  Synthetic oligonucleotide
gaggtgtgcacgcgtccattggggcaacgg

SEQ ID NO: 274915 - DNA, 30 bp, Artificial Sequence
  Synthetic oligonucleotide
tctacgagtcttctaacggtcaaagaacgg

SEQ ID NO: 274916 - DNA, 30 bp, Artificial Sequence
  Synthetic oligonucleotide
ggtcttgcatttccttcacggacagaacgg

SEQ ID NO: 274917 - DNA, 30 bp, Artificial Sequence
  Synthetic oligonucleotide
aaggttcattccgccttttctaccgaacgg

SEQ ID NO: 274918 - DNA, 30 bp, Artificial Sequence
  Synthetic oligonucleotide
cactctggggtcgcataaataagcgaacgg

SEQ ID NO: 274919 - DNA, 30 bp, Artificial Sequence
  Synthetic oligonucleotide
taaggtcacctagatctctatcgcgaacgg

SEQ ID NO: 274920 - DNA, 30 bp, Artificial Sequence
  Synthetic oligonucleotide
gtccaagatgcacaatgtgcggtcgaacgg

SEQ ID NO: 274921 - DNA, 30 bp, Artificial Sequence
  Synthetic oligonucleotide
gtcctgagacgacggattgcacaggaacgg

SEQ ID NO: 274922 - DNA, 30 bp, Artificial Sequence
  Synthetic oligonucleotide
acgatatgattaaattctcaataggaacgg

SEQ ID NO: 274923 - DNA, 30 bp, Artificial Sequence
  Synthetic oligonucleotide
ttgtgtcggtttagtcattgagaataacgg

SEQ ID NO: 274924 - DNA, 30 bp, Artificial Sequence
  Synthetic oligonucleotide
cagacattatttagcgtggagggataacgg

SEQ ID NO: 274925 - DNA, 30 bp, Artificial Sequence
  Synthetic oligonucleotide
cttgctactattaagtaacaatgataacgg

SEQ ID NO: 274926 - DNA, 30 bp, Artificial Sequence
  Synthetic oligonucleotide
tctcaagtgctttagccaccaatataacgg

SEQ ID NO: 274927 - DNA, 30 bp, Artificial Sequence
  Synthetic oligonucleotide
tcgctgcgagccatcgattgccactaacgg

SEQ ID NO: 274928 - DNA, 30 bp, Artificial Sequence
  Synthetic oligonucleotide
gtaacaacataagagtgttgtatctaacgg

SEQ ID NO: 274929 - DNA, 30 bp, Artificial Sequence
  Synthetic oligonucleotide
catattccttctttagttaaggtctaacgg

SEQ ID NO: 274930 - DNA, 30 bp, Artificial Sequence
  Synthetic oligonucleotide
gaaacggccgcaataattctgtagtaacgg

SEQ ID NO: 274931 - DNA, 30 bp, Artificial Sequence
  Synthetic oligonucleotide
cgcacttaacacatagggcaacgttaacgg

SEQ ID NO: 274932 - DNA, 30 bp, Artificial Sequence
  Synthetic oligonucleotide
gtcaagcaccgactaagacattgttaacgg

SEQ ID NO: 274933 - DNA, 30 bp, Artificial Sequence
  Synthetic oligonucleotide
ccagagtggacgggtctaaccctttaacgg

SEQ ID NO: 274934 - DNA, 30 bp, Artificial Sequence
  Synthetic oligonucleotide
accgaaggctagtcagcgcggaaaacacgg

SEQ ID NO: 274935 - DNA, 30 bp, Artificial Sequence
  Synthetic oligonucleotide
ggatagacgtttgatcatcctaaaacacgg

SEQ ID NO: 274936 - DNA, 30 bp, Artificial Sequence
  Synthetic oligonucleotide
ccctcatattgtgaacgcctcagaacacgg

SEQ ID NO: 274937 - DNA, 30 bp, Artificial Sequence
  Synthetic oligonucleotide
aaaattatgtcaggcaagggtataacacgg

SEQ ID NO: 274938 - DNA, 30 bp, Artificial Sequence
  Synthetic oligonucleotide
ccacaccaaatgatagggctcgacacacgg

SEQ ID NO: 274939 - DNA, 30 bp, Artificial Sequence
  Synthetic oligonucleotide
gggatggttcaggagcggtatcctacacgg

SEQ ID NO: 274940 - DNA, 30 bp, Artificial Sequence
  Synthetic oligonucleotide
taagtcatcgtggtccgaccgggtacacgg

SEQ ID NO: 274941 - DNA, 30 bp, Artificial Sequence
  Synthetic oligonucleotide
atcttgtagttgggtatagatgaaccacgg

SEQ ID NO: 274942 - DNA, 30 bp, Artificial Sequence
  Synthetic oligonucleotide
tacacaacattagtggagatccctccacgg

SEQ ID NO: 274943 - DNA, 30 bp, Artificial Sequence
  Synthetic oligonucleotide
gttactccaataagagccaaggttccacgg

SEQ ID NO: 274944 - DNA, 30 bp, Artificial Sequence
  Synthetic oligonucleotide
tcagcaggcatggtagttctaaccgcacgg

SEQ ID NO: 274945 - DNA, 30 bp, Artificial Sequence
  Synthetic oligonucleotide
ttccggcagtcgctaacacaaatcgcacgg

SEQ ID NO: 274946 - DNA, 30 bp, Artificial Sequence
  Synthetic oligonucleotide
atagcgagattatttacgatggaggcacgg

SEQ ID NO: 274947 - DNA, 30 bp, Artificial Sequence
  Synthetic oligonucleotide
aggttatgggggatgtttaagtcggcacgg

SEQ ID NO: 274948 - DNA, 30 bp, Artificial Sequence
  Synthetic oligonucleotide
ggaagtttagctttttgaatacgtgcacgg

SEQ ID NO: 274949 - DNA, 30 bp, Artificial Sequence
  Synthetic oligonucleotide
ataacacattagcatagctggttatcacgg

SEQ ID NO: 274950 - DNA, 30 bp, Artificial Sequence
  Synthetic oligonucleotide
cggcagctcggaccacgcattgactcacgg

SEQ ID NO: 274951 - DNA, 30 bp, Artificial Sequence
  Synthetic oligonucleotide
ttgaattatgtggcgccattcagctcacgg

SEQ ID NO: 274952 - DNA, 30 bp, Artificial Sequence
  Synthetic oligonucleotide
gcgtgcatcaccttagtgtaaaggtcacgg

SEQ ID NO: 274953 - DNA, 30 bp, Artificial Sequence
  Synthetic oligonucleotide
gcaatcggtgtctgcggctctaaaagacgg

SEQ ID NO: 274954 - DNA, 30 bp, Artificial Sequence
  Synthetic oligonucleotide
cacatcagcgaagtataggtctaaagacgg

SEQ ID NO: 274955 - DNA, 30 bp, Artificial Sequence
  Synthetic oligonucleotide
gaaggtgcggtgatacaatcttgtagacgg

SEQ ID NO: 274956 - DNA, 30 bp, Artificial Sequence
  Synthetic oligonucleotide
catagtattcgctccctacacacccgacgg

SEQ ID NO: 274957 - DNA, 30 bp, Artificial Sequence
  Synthetic oligonucleotide
gtatcgagagccatgtgacaagatcgacgg

SEQ ID NO: 274958 - DNA, 30 bp, Artificial Sequence
  Synthetic oligonucleotide
caccagtcgcaccctttagtagaaggacgg

SEQ ID NO: 274959 - DNA, 30 bp, Artificial Sequence
  Synthetic oligonucleotide
tccagcatacctaagagaagtgcaggacgg

SEQ ID NO: 274960 - DNA, 30 bp, Artificial Sequence
  Synthetic oligonucleotide
ctgctcgaagggcctgtttgtccgggacgg

SEQ ID NO: 274961 - DNA, 30 bp, Artificial Sequence
  Synthetic oligonucleotide
atcagctttatctgtagtgaaattggacgg

SEQ ID NO: 274962 - DNA, 30 bp, Artificial Sequence
  Synthetic oligonucleotide
gttaagctcagtcggtgacccattggacgg

SEQ ID NO: 274963 - DNA, 30 bp, Artificial Sequence
  Synthetic oligonucleotide
caggcgccgcctgatcctagaatatgacgg

SEQ ID NO: 274964 - DNA, 30 bp, Artificial Sequence
  Synthetic oligonucleotide
agatgcatgtcatgtgaaatacactgacgg

SEQ ID NO: 274965 - DNA, 30 bp, Artificial Sequence
  Synthetic oligonucleotide
agtctttaaggggagctaaataggtgacgg

SEQ ID NO: 274966 - DNA, 30 bp, Artificial Sequence
  Synthetic oligonucleotide
aagtcattctcgcctcgacggtattgacgg

SEQ ID NO: 274967 - DNA, 30 bp, Artificial Sequence
  Synthetic oligonucleotide
tatccaggtggatatgaaatcggttgacgg

SEQ ID NO: 274968 - DNA, 30 bp, Artificial Sequence
  Synthetic oligonucleotide
cctcgactaaaaacgacctgtgaaatacgg

SEQ ID NO: 274969 - DNA, 30 bp, Artificial Sequence
  Synthetic oligonucleotide
ctaaaaaccaaaatttattcccgaatacgg

SEQ ID NO: 274970 - DNA, 30 bp, Artificial Sequence
  Synthetic oligonucleotide
taggaggatttggcccgattgggcatacgg

SEQ ID NO: 274971 - DNA, 30 bp, Artificial Sequence
  Synthetic oligonucleotide
ttgtggggacgggtaccgctcgtgatacgg

SEQ ID NO: 274972 - DNA, 30 bp, Artificial Sequence
  Synthetic oligonucleotide
ttcggacagcgaatggttaaaattatacgg

SEQ ID NO: 274973 - DNA, 30 bp, Artificial Sequence
  Synthetic oligonucleotide
cctaaactgtgcacgaagagacccctacgg

SEQ ID NO: 274974 - DNA, 30 bp, Artificial Sequence
  Synthetic oligonucleotide
agtaacttgagagtatgcgagcccctacgg

SEQ ID NO: 274975 - DNA, 30 bp, Artificial Sequence
  Synthetic oligonucleotide
agcttcgcaacaaatagaccgaggctacgg

SEQ ID NO: 274976 - DNA, 30 bp, Artificial Sequence
  Synthetic oligonucleotide
gtcaagtactgcacgtaagtgctgctacgg

SEQ ID NO: 274977 - DNA, 30 bp, Artificial Sequence
  Synthetic oligonucleotide
atagagctttctataccggcagtgctacgg

SEQ ID NO: 274978 - DNA, 30 bp, Artificial Sequence
  Synthetic oligonucleotide
atggtttacatcctcaggcattctctacgg

SEQ ID NO: 274979 - DNA, 30 bp, Artificial Sequence
  Synthetic oligonucleotide
aggggcttagccgttccagagagtctacgg

SEQ ID NO: 274980 - DNA, 30 bp, Artificial Sequence
  Synthetic oligonucleotide
ttttgcaaactgacagcgtttatggtacgg

SEQ ID NO: 274981 - DNA, 30 bp, Artificial Sequence
  Synthetic oligonucleotide
caatctaggcgggtcccgcaaattgtacgg

SEQ ID NO: 274982 - DNA, 30 bp, Artificial Sequence
  Synthetic oligonucleotide
ccctaaagtctgcccattggactattacgg

SEQ ID NO: 274983 - DNA, 30 bp, Artificial Sequence
  Synthetic oligonucleotide
aaaacacatgcactgctaggattattacgg

SEQ ID NO: 274984 - DNA, 30 bp, Artificial Sequence
  Synthetic oligonucleotide
tggatggcatagagttatagggggttacgg

SEQ ID NO: 274985 - DNA, 30 bp, Artificial Sequence
  Synthetic oligonucleotide
tcggtaatcatacacgcgagctgtttacgg

SEQ ID NO: 274986 - DNA, 30 bp, Artificial Sequence
  Synthetic oligonucleotide
ccggacgtagacaacggggggggaaaccgg

SEQ ID NO: 274987 - DNA, 30 bp, Artificial Sequence
  Synthetic oligonucleotide
agaatgccccatacaagacgcaacaaccgg

SEQ ID NO: 274988 - DNA, 30 bp, Artificial Sequence
  Synthetic oligonucleotide
gcaatgacacttaccaatggactcaaccgg

SEQ ID NO: 274989 - DNA, 30 bp, Artificial Sequence
  Synthetic oligonucleotide
gactactgaattagtccggaggtgaaccgg

SEQ ID NO: 274990 - DNA, 30 bp, Artificial Sequence
  Synthetic oligonucleotide
ccaacagatccggtaccccaaggccaccgg

SEQ ID NO: 274991 - DNA, 30 bp, Artificial Sequence
  Synthetic oligonucleotide
cccgaggaactatttagtgattgccaccgg

SEQ ID NO: 274992 - DNA, 30 bp, Artificial Sequence
  Synthetic oligonucleotide
gacccaggtcgggccattgaaatccaccgg

SEQ ID NO: 274993 - DNA, 30 bp, Artificial Sequence
  Synthetic oligonucleotide
tacctcggttgttggaactgcgcagaccgg

SEQ ID NO: 274994 - DNA, 30 bp, Artificial Sequence
  Synthetic oligonucleotide
tatgagtaccgcgtccagacagtagaccgg

SEQ ID NO: 274995 - DNA, 30 bp, Artificial Sequence
  Synthetic oligonucleotide
acgggatttataggtaattggacggaccgg

SEQ ID NO: 274996 - DNA, 30 bp, Artificial Sequence
  Synthetic oligonucleotide
cagcgcattataatacttccaatggaccgg

SEQ ID NO: 274997 - DNA, 30 bp, Artificial Sequence
  Synthetic oligonucleotide
tctgttaaaggattatgacaagtggaccgg

SEQ ID NO: 274998 - DNA, 30 bp, Artificial Sequence
  Synthetic oligonucleotide
attcaaaaacgtgcctgctggcttgaccgg

SEQ ID NO: 274999 - DNA, 30 bp, Artificial Sequence
  Synthetic oligonucleotide
cagtaagtagtacatagtatacaataccgg

SEQ ID NO: 275000 - DNA, 30 bp, Artificial Sequence
  Synthetic oligonucleotide
ggtaacggaattcaaggttattcataccgg

SEQ ID NO: 275001 - DNA, 30 bp, Artificial Sequence
  Synthetic oligonucleotide
tatatcgcgcgaccttctatatgttaccgg

SEQ ID NO: 275002 - DNA, 30 bp, Artificial Sequence
  Synthetic oligonucleotide
cacacgggcctatggccacaccgaacccgg

SEQ ID NO: 275003 - DNA, 30 bp, Artificial Sequence
  Synthetic oligonucleotide
ttcttagcacgagatagagtcgacacccgg

SEQ ID NO: 275004 - DNA, 30 bp, Artificial Sequence
  Synthetic oligonucleotide
cactacagcgtcggttgcaaattcacccgg

SEQ ID NO: 275005 - DNA, 30 bp, Artificial Sequence
  Synthetic oligonucleotide
gcccgcaatgaaagaaattcagtgacccgg

SEQ ID NO: 275006 - DNA, 30 bp, Artificial Sequence
  Synthetic oligonucleotide
gtgtagacagtcctcatctctcgtacccgg

SEQ ID NO: 275007 - DNA, 30 bp, Artificial Sequence
  Synthetic oligonucleotide
agtgactataagcgtcatgctacaccccgg

SEQ ID NO: 275008 - DNA, 30 bp, Artificial Sequence
  Synthetic oligonucleotide
accggctagattaaactaggaaacccccgg

SEQ ID NO: 275009 - DNA, 30 bp, Artificial Sequence
  Synthetic oligonucleotide
tgtccgtcgaggctgccgtctgctccccgg

SEQ ID NO: 275010 - DNA, 30 bp, Artificial Sequence
  Synthetic oligonucleotide
agccgagggaaaccacatggaagtccccgg

SEQ ID NO: 275011 - DNA, 30 bp, Artificial Sequence
  Synthetic oligonucleotide
caaaggctgggcgactcgcagaaagcccgg

SEQ ID NO: 275012 - DNA, 30 bp, Artificial Sequence
  Synthetic oligonucleotide
gccgacctcaaactagtatgccaagcccgg

SEQ ID NO: 275013 - DNA, 30 bp, Artificial Sequence
  Synthetic oligonucleotide
catacatagcgccagttgctattagcccgg

SEQ ID NO: 275014 - DNA, 30 bp, Artificial Sequence
  Synthetic oligonucleotide
taaaatcgcgtgactccggtacaggcccgg

SEQ ID NO: 275015 - DNA, 30 bp, Artificial Sequence
  Synthetic oligonucleotide
ccggcgggctgatcaaaaatcgaggcccgg

SEQ ID NO: 275016 - DNA, 30 bp, Artificial Sequence
  Synthetic oligonucleotide
gaacctgggctgagaaaggatggggcccgg

SEQ ID NO: 275017 - DNA, 30 bp, Artificial Sequence
  Synthetic oligonucleotide
cactctgctaacagtcgcaagtttgcccgg

SEQ ID NO: 275018 - DNA, 30 bp, Artificial Sequence
  Synthetic oligonucleotide
cagtttacgcggttacttaggacatcccgg

SEQ ID NO: 275019 - DNA, 30 bp, Artificial Sequence
  Synthetic oligonucleotide
tatgccccggtgtgtaatggactatcccgg

SEQ ID NO: 275020 - DNA, 30 bp, Artificial Sequence
  Synthetic oligonucleotide
atttgtggttaacctgcgccgccctcccgg

SEQ ID NO: 275021 - DNA, 30 bp, Artificial Sequence
  Synthetic oligonucleotide
acgcgtgcacatagatatggcagaagccgg

SEQ ID NO: 275022 - DNA, 31 bp, Artificial Sequence
  Synthetic oligonucleotide
tagcttgcgtgggagtctaaaacggagccgg

SEQ ID NO: 275023 - DNA, 30 bp, Artificial Sequence
  Synthetic oligonucleotide
tgggctttggctcagtccatagtgagccgg

SEQ ID NO: 275024 - DNA, 30 bp, Artificial Sequence
  Synthetic oligonucleotide
tacggtccagctgatgacaggaaaggccgg

SEQ ID NO: 275025 - DNA, 30 bp, Artificial Sequence
  Synthetic oligonucleotide
aatgcatactattagcccagcggaggccgg

SEQ ID NO: 275026 - DNA, 30 bp, Artificial Sequence
  Synthetic oligonucleotide
tagctagagcgcatcaggaagctaggccgg

SEQ ID NO: 275027 - DNA, 30 bp, Artificial Sequence
  Synthetic oligonucleotide
atagctctaaaacgtctcactgacggccgg

SEQ ID NO: 275028 - DNA, 30 bp, Artificial Sequence
  Synthetic oligonucleotide
aataggtgggcgcggcgaatatagggccgg

SEQ ID NO: 275029 - DNA, 30 bp, Artificial Sequence
  Synthetic oligonucleotide
gtagagaaagggatgaggtggcggggccgg

SEQ ID NO: 275030 - DNA, 30 bp, Artificial Sequence
  Synthetic oligonucleotide
gggtggccttacattggtgtcaatggccgg

SEQ ID NO: 275031 - DNA, 30 bp, Artificial Sequence
  Synthetic oligonucleotide
acgcatatctagcgacataaatgatgccgg

SEQ ID NO: 275032 - DNA, 30 bp, Artificial Sequence
  Synthetic oligonucleotide
agtcgtggtgtaggcaagaatttctgccgg

SEQ ID NO: 275033 - DNA, 30 bp, Artificial Sequence
  Synthetic oligonucleotide
tacggtggtgcccgtcaaactgagtgccgg

SEQ ID NO: 275034 - DNA, 30 bp, Artificial Sequence
  Synthetic oligonucleotide
tgaggatgttccaaaaggccgtattgccgg

SEQ ID NO: 275035 - DNA, 30 bp, Artificial Sequence
  Synthetic oligonucleotide
tcaccaggcatcgtaccggactaaatccgg

SEQ ID NO: 275036 - DNA, 30 bp, Artificial Sequence
  Synthetic oligonucleotide
aaatcactagtccataagctgttaatccgg

SEQ ID NO: 275037 - DNA, 30 bp, Artificial Sequence
  Synthetic oligonucleotide
ttgtataaatccttattactcaccatccgg

SEQ ID NO: 275038 - DNA, 30 bp, Artificial Sequence
  Synthetic oligonucleotide
gagattaggtatgcggatgtatccatccgg

SEQ ID NO: 275039 - DNA, 30 bp, Artificial Sequence
  Synthetic oligonucleotide
tgatcaagatgcgacaggaatagcatccgg

SEQ ID NO: 275040 - DNA, 30 bp, Artificial Sequence
  Synthetic oligonucleotide
gtactatcacgaagtaatcgccgtatccgg

SEQ ID NO: 275041 - DNA, 30 bp, Artificial Sequence
  Synthetic oligonucleotide
acggttggccgtcttcgcagtattatccgg

SEQ ID NO: 275042 - DNA, 30 bp, Artificial Sequence
  Synthetic oligonucleotide
actgtacggttttggagcaaacgactccgg

SEQ ID NO: 275043 - DNA, 30 bp, Artificial Sequence
  Synthetic oligonucleotide
ccggagcaacttcgaagttatgtactccgg

SEQ ID NO: 275044 - DNA, 30 bp, Artificial Sequence
  Synthetic oligonucleotide
tgtaagataatgaaggacactaacctccgg

SEQ ID NO: 275045 - DNA, 31 bp, Artificial Sequence
  Synthetic oligonucleotide
aatactccgcgaagccccattgatcctccgg

SEQ ID NO: 275046 - DNA, 30 bp, Artificial Sequence
  Synthetic oligonucleotide
gatacgccaataggtgacaaatcgctccgg

SEQ ID NO: 275047 - DNA, 30 bp, Artificial Sequence
  Synthetic oligonucleotide
accaacgagggtcgctaccggattctccgg

SEQ ID NO: 275048 - DNA, 30 bp, Artificial Sequence
  Synthetic oligonucleotide
agagtgggcggcgacttgcagacagtccgg

SEQ ID NO: 275049 - DNA, 30 bp, Artificial Sequence
  Synthetic oligonucleotide
tcgcagctggcgtgtctgccaatagtccgg

SEQ ID NO: 275050 - DNA, 30 bp, Artificial Sequence
  Synthetic oligonucleotide
gagtggacagtgtttctttggaccgtccgg

SEQ ID NO: 275051 - DNA, 30 bp, Artificial Sequence
  Synthetic oligonucleotide
ggacatttgggttactactaagaggtccgg

SEQ ID NO: 275052 - DNA, 30 bp, Artificial Sequence
  Synthetic oligonucleotide
cgaccctgataataccgcattagggtccgg

SEQ ID NO: 275053 - DNA, 30 bp, Artificial Sequence
  Synthetic oligonucleotide
cttgcgcgttaccaaggtaatccattccgg

SEQ ID NO: 275054 - DNA, 30 bp, Artificial Sequence
  Synthetic oligonucleotide
ttcgtggatggaacttagaccaggttccgg

SEQ ID NO: 275055 - DNA, 29 bp, Artificial Sequence
  Synthetic oligonucleotide
ataccgtaatgtttagagacggtttccgg

SEQ ID NO: 275056 - DNA, 30 bp, Artificial Sequence
  Synthetic oligonucleotide
tctcatgcaacagctagtgcataaaagcgg

SEQ ID NO: 275057 - DNA, 30 bp, Artificial Sequence
  Synthetic oligonucleotide
caacctgtagtgggactcaactaaaagcgg

SEQ ID NO: 275058 - DNA, 30 bp, Artificial Sequence
  Synthetic oligonucleotide
cttagccataacaatagtatttgaaagcgg

SEQ ID NO: 275059 - DNA, 30 bp, Artificial Sequence
  Synthetic oligonucleotide
actatcaggaaaatttgtgggttgaagcgg

SEQ ID NO: 275060 - DNA, 30 bp, Artificial Sequence
  Synthetic oligonucleotide
accaatcgagggtgtccccgatttaagcgg

SEQ ID NO: 275061 - DNA, 30 bp, Artificial Sequence
  Synthetic oligonucleotide
gccgcaggaaactctagggcttcacagcgg

SEQ ID NO: 275062 - DNA, 30 bp, Artificial Sequence
  Synthetic oligonucleotide
gccttaagaacatttcaccgtggacagcgg

SEQ ID NO: 275063 - DNA, 30 bp, Artificial Sequence
  Synthetic oligonucleotide
aatcgggagtcaggtacccaactccagcgg

SEQ ID NO: 275064 - DNA, 29 bp, Artificial Sequence
  Synthetic oligonucleotide
actgcatcgagagctccatggagcagcgg

SEQ ID NO: 275065 - DNA, 30 bp, Artificial Sequence
  Synthetic oligonucleotide
gcgggtgtcctgcgccaggtcgcgcagcgg

SEQ ID NO: 275066 - DNA, 30 bp, Artificial Sequence
  Synthetic oligonucleotide
actaagcggtgcgggtgaaggtcagagcgg

SEQ ID NO: 275067 - DNA, 30 bp, Artificial Sequence
  Synthetic oligonucleotide
aacctagtagtaagagcggccaacgagcgg

SEQ ID NO: 275068 - DNA, 30 bp, Artificial Sequence
  Synthetic oligonucleotide
tactatgcggtcggaacagttaacgagcgg

SEQ ID NO: 275069 - DNA, 30 bp, Artificial Sequence
  Synthetic oligonucleotide
ttcgcatttttggcagtccctcccgagcgg

SEQ ID NO: 275070 - DNA, 30 bp, Artificial Sequence
  Synthetic oligonucleotide
atcacaggcagcgagtgaactgtcgagcgg

SEQ ID NO: 275071 - DNA, 29 bp, Artificial Sequence
  Synthetic oligonucleotide
ctggaggcgatctcctgttaaaggagcgg

SEQ ID NO: 275072 - DNA, 30 bp, Artificial Sequence
  Synthetic oligonucleotide
acattgctggcgccataactggaggagcgg

SEQ ID NO: 275073 - DNA, 30 bp, Artificial Sequence
  Synthetic oligonucleotide
gggatcttaaacccgggtaatagggagcgg

SEQ ID NO: 275074 - DNA, 30 bp, Artificial Sequence
  Synthetic oligonucleotide
cggaccgcgtaaagagcaaagcgtgagcgg

SEQ ID NO: 275075 - DNA, 30 bp, Artificial Sequence
  Synthetic oligonucleotide
acatccacgtacagcgtgtccattgagcgg

SEQ ID NO: 275076 - DNA, 30 bp, Artificial Sequence
  Synthetic oligonucleotide
cccttatgcacgtaaattgataaatagcgg

SEQ ID NO: 275077 - DNA, 30 bp, Artificial Sequence
  Synthetic oligonucleotide
gacccgcgaggggggtagccacaatagcgg

SEQ ID NO: 275078 - DNA, 30 bp, Artificial Sequence
  Synthetic oligonucleotide
atgcgatgacgctgcgtgaaatcctagcgg

SEQ ID NO: 275079 - DNA, 30 bp, Artificial Sequence
  Synthetic oligonucleotide
gtgccggacgtgaaagtattggtgtagcgg

SEQ ID NO: 275080 - DNA, 30 bp, Artificial Sequence
  Synthetic oligonucleotide
aatggcgattattcgcagccgatttagcgg

SEQ ID NO: 275081 - DNA, 30 bp, Artificial Sequence
  Synthetic oligonucleotide
gtgtagtgagtaaaagcaatccgcacgcgg

SEQ ID NO: 275082 - DNA, 30 bp, Artificial Sequence
  Synthetic oligonucleotide
gggaccccgatgcccacctaatcgacgcgg

SEQ ID NO: 275083 - DNA, 30 bp, Artificial Sequence
  Synthetic oligonucleotide
atgggtgcgcagaagaggcgtcatacgcgg

SEQ ID NO: 275084 - DNA, 30 bp, Artificial Sequence
  Synthetic oligonucleotide
ccacttgggttggggtaacgtactacgcgg

SEQ ID NO: 275085 - DNA, 30 bp, Artificial Sequence
  Synthetic oligonucleotide
agcagggcggggttagggtgaattacgcgg

SEQ ID NO: 275086 - DNA, 30 bp, Artificial Sequence
  Synthetic oligonucleotide
ttaaactgctcctagcgctagcggccgcgg

SEQ ID NO: 275087 - DNA, 30 bp, Artificial Sequence
  Synthetic oligonucleotide
ggtataaagaaccgttatatatttccgcgg

SEQ ID NO: 275088 - DNA, 30 bp, Artificial Sequence
  Synthetic oligonucleotide
actctacgctggtggaagacagaagcgcgg

SEQ ID NO: 275089 - DNA, 30 bp, Artificial Sequence
  Synthetic oligonucleotide
tcttcgggttgagcctcacactccgcgcgg

SEQ ID NO: 275090 - DNA, 30 bp, Artificial Sequence
  Synthetic oligonucleotide
ttcctcaggggggggtagtcgagtgcgcgg

SEQ ID NO: 275091 - DNA, 30 bp, Artificial Sequence
  Synthetic oligonucleotide
tttgtacaagggcggcatgtagactcgcgg

SEQ ID NO: 275092 - DNA, 30 bp, Artificial Sequence
  Synthetic oligonucleotide
aacgctatgataatggcaggttgttcgcgg

SEQ ID NO: 275093 - DNA, 30 bp, Artificial Sequence
  Synthetic oligonucleotide
tctcgacacagtaatccacttctttcgcgg

SEQ ID NO: 275094 - DNA, 30 bp, Artificial Sequence
  Synthetic oligonucleotide
tggtttagatactaatgcatggacaggcgg

SEQ ID NO: 275095 - DNA, 30 bp, Artificial Sequence
  Synthetic oligonucleotide
gcctacagtcaacggtagcaatacaggcgg

SEQ ID NO: 275096 - DNA, 30 bp, Artificial Sequence
  Synthetic oligonucleotide
tcccttggaccttgggtgctatccaggcgg

SEQ ID NO: 275097 - DNA, 30 bp, Artificial Sequence
  Synthetic oligonucleotide
gtcgtgtttgacggtcggtgcggcaggcgg

SEQ ID NO: 275098 - DNA, 30 bp, Artificial Sequence
  Synthetic oligonucleotide
cggtaacactgggctaaaaggtagaggcgg

SEQ ID NO: 275099 - DNA, 30 bp, Artificial Sequence
  Synthetic oligonucleotide
caccggtcggcaagtatgatggggaggcgg

SEQ ID NO: 275100 - DNA, 30 bp, Artificial Sequence
  Synthetic oligonucleotide
aattacggtcagcgtactggagataggcgg

SEQ ID NO: 275101 - DNA, 30 bp, Artificial Sequence
  Synthetic oligonucleotide
gaacaccccccggcgatatgtagacggcgg

SEQ ID NO: 275102 - DNA, 30 bp, Artificial Sequence
  Synthetic oligonucleotide
gcccaacaatgagacttaacaggacggcgg

SEQ ID NO: 275103 - DNA, 30 bp, Artificial Sequence
  Synthetic oligonucleotide
ggggcggttcacagccatcatttacggcgg

SEQ ID NO: 275104 - DNA, 30 bp, Artificial Sequence
  Synthetic oligonucleotide
accgactaatatccaacacattcgcggcgg

SEQ ID NO: 275105 - DNA, 30 bp, Artificial Sequence
  Synthetic oligonucleotide
aaaggaaaacaatggaccctggggcggcgg

SEQ ID NO: 275106 - DNA, 30 bp, Artificial Sequence
  Synthetic oligonucleotide
ggggtttcggtgcttggaaggagtcggcgg

SEQ ID NO: 275107 - DNA, 30 bp, Artificial Sequence
  Synthetic oligonucleotide
gggtcgcaggtagagtcgaggcttcggcgg

SEQ ID NO: 275108 - DNA, 30 bp, Artificial Sequence
  Synthetic oligonucleotide
ctgaacgagttaacacttcgatcagggcgg

SEQ ID NO: 275109 - DNA, 30 bp, Artificial Sequence
  Synthetic oligonucleotide
ttaggagatcacgggagcggaaaggggcgg

SEQ ID NO: 275110 - DNA, 30 bp, Artificial Sequence
  Synthetic oligonucleotide
actacaagtggatactggtcagttgggcgg

SEQ ID NO: 275111 - DNA, 30 bp, Artificial Sequence
  Synthetic oligonucleotide
ggcttggatgtattgttctgatgctggcgg

SEQ ID NO: 275112 - DNA, 30 bp, Artificial Sequence
  Synthetic oligonucleotide
ttcagacacaagcatagatcttcgtggcgg

SEQ ID NO: 275113 - DNA, 30 bp, Artificial Sequence
  Synthetic oligonucleotide
catctttgaccttacaataggaggtggcgg

SEQ ID NO: 275114 - DNA, 30 bp, Artificial Sequence
  Synthetic oligonucleotide
cttgcagatcgggaaattgtcgattggcgg

SEQ ID NO: 275115 - DNA, 30 bp, Artificial Sequence
  Synthetic oligonucleotide
aattagggggtggtatcataacaaatgcgg

SEQ ID NO: 275116 - DNA, 30 bp, Artificial Sequence
  Synthetic oligonucleotide
atttgcatgaaccgggccaatacaatgcgg

SEQ ID NO: 275117 - DNA, 30 bp, Artificial Sequence
  Synthetic oligonucleotide
tagtggcaacgccgacatcgtcgaatgcgg

SEQ ID NO: 275118 - DNA, 30 bp, Artificial Sequence
  Synthetic oligonucleotide
tcgggtataggcgactttctatccatgcgg

SEQ ID NO: 275119 - DNA, 30 bp, Artificial Sequence
  Synthetic oligonucleotide
attcccgtcaaggtgtattggcggatgcgg

SEQ ID NO: 275120 - DNA, 30 bp, Artificial Sequence
  Synthetic oligonucleotide
tcgaccgagagccatatatttttgatgcgg

SEQ ID NO: 275121 - DNA, 30 bp, Artificial Sequence
  Synthetic oligonucleotide
aagtccgaaggtattgggacgaatatgcgg

SEQ ID NO: 275122 - DNA, 30 bp, Artificial Sequence
  Synthetic oligonucleotide
aaatacgttggctaccaatggcccctgcgg

SEQ ID NO: 275123 - DNA, 30 bp, Artificial Sequence
  Synthetic oligonucleotide
gttcgactgtaacgacccaaaattctgcgg

SEQ ID NO: 275124 - DNA, 30 bp, Artificial Sequence
  Synthetic oligonucleotide
gacagcacgggacttgtaccattagtgcgg

SEQ ID NO: 275125 - DNA, 30 bp, Artificial Sequence
  Synthetic oligonucleotide
gtgaaaatatacgatccgtggcacgtgcgg

SEQ ID NO: 275126 - DNA, 30 bp, Artificial Sequence
  Synthetic oligonucleotide
acgatgttagtagaggcagttgacgtgcgg

SEQ ID NO: 275127 - DNA, 30 bp, Artificial Sequence
  Synthetic oligonucleotide
tcaccttttgcgaaagttgcacgcgtgcgg

SEQ ID NO: 275128 - DNA, 30 bp, Artificial Sequence
  Synthetic oligonucleotide
gtacaaatcttatcgggtccctaggtgcgg

SEQ ID NO: 275129 - DNA, 30 bp, Artificial Sequence
  Synthetic oligonucleotide
cgaagttgactatattacgaccatgtgcgg

SEQ ID NO: 275130 - DNA, 30 bp, Artificial Sequence
  Synthetic oligonucleotide
tgatgggttgatgaggacctgccattgcgg

SEQ ID NO: 275131 - DNA, 30 bp, Artificial Sequence
  Synthetic oligonucleotide
attgccattaatctccataggctattgcgg

SEQ ID NO: 275132 - DNA, 30 bp, Artificial Sequence
  Synthetic oligonucleotide
aacctaacggcgttacgcgatatgttgcgg

SEQ ID NO: 275133 - DNA, 30 bp, Artificial Sequence
  Synthetic oligonucleotide
gttcgttactagacgagttagcctttgcgg

SEQ ID NO: 275134 - DNA, 30 bp, Artificial Sequence
  Synthetic oligonucleotide
caggttaaagggtaaggtccgtttttgcgg

SEQ ID NO: 275135 - DNA, 30 bp, Artificial Sequence
  Synthetic oligonucleotide
cgcgccctatacatgaccccggaaaatcgg

SEQ ID NO: 275136 - DNA, 30 bp, Artificial Sequence
  Synthetic oligonucleotide
atcgcatcagtcactgttttaaagaatcgg

SEQ ID NO: 275137 - DNA, 30 bp, Artificial Sequence
  Synthetic oligonucleotide
ctctcataaagcgcgcaattgcagaatcgg

SEQ ID NO: 275138 - DNA, 31 bp, Artificial Sequence
  Synthetic oligonucleotide
atggtcaggccggttgcggtacgagaatcgg

SEQ ID NO: 275139 - DNA, 30 bp, Artificial Sequence
  Synthetic oligonucleotide
ataaatggatatcactacattcataatcgg

SEQ ID NO: 275140 - DNA, 30 bp, Artificial Sequence
  Synthetic oligonucleotide
cctccgttacgctataagtcaattaatcgg

SEQ ID NO: 275141 - DNA, 30 bp, Artificial Sequence
  Synthetic oligonucleotide
atactatagccatttttaggccagcatcgg

SEQ ID NO: 275142 - DNA, 30 bp, Artificial Sequence
  Synthetic oligonucleotide
atgtacgtcacaggcaacagacgcgatcgg

SEQ ID NO: 275143 - DNA, 30 bp, Artificial Sequence
  Synthetic oligonucleotide
cgacgtccagcgcccggacgaggcgatcgg

SEQ ID NO: 275144 - DNA, 30 bp, Artificial Sequence
  Synthetic oligonucleotide
caaatcgcgttgccggaactcggggatcgg

SEQ ID NO: 275145 - DNA, 30 bp, Artificial Sequence
  Synthetic oligonucleotide
ctgactggccgcaactcacttattgatcgg

SEQ ID NO: 275146 - DNA, 30 bp, Artificial Sequence
  Synthetic oligonucleotide
tgagatgcacaacgcgtcaattaatatcgg

SEQ ID NO: 275147 - DNA, 30 bp, Artificial Sequence
  Synthetic oligonucleotide
ggggtattgtagaatctatgtcactatcgg

SEQ ID NO: 275148 - DNA, 30 bp, Artificial Sequence
  Synthetic oligonucleotide
agcacgaatatgacactcgatgtctatcgg

SEQ ID NO: 275149 - DNA, 30 bp, Artificial Sequence
  Synthetic oligonucleotide
tgcggctttgacagcttaacttagtatcgg

SEQ ID NO: 275150 - DNA, 30 bp, Artificial Sequence
  Synthetic oligonucleotide
ccaggtgtcgtgtgggacaatctgtatcgg

SEQ ID NO: 275151 - DNA, 30 bp, Artificial Sequence
  Synthetic oligonucleotide
tttcggaaagacaaaggcggtcaaactcgg

SEQ ID NO: 275152 - DNA, 30 bp, Artificial Sequence
  Synthetic oligonucleotide
atcagcccgattcgggagatagaaactcgg

SEQ ID NO: 275153 - DNA, 30 bp, Artificial Sequence
  Synthetic oligonucleotide
taatcaatttagaaatacttcgtcactcgg

SEQ ID NO: 275154 - DNA, 30 bp, Artificial Sequence
  Synthetic oligonucleotide
tcggcgtttgccgagtgagtatagactcgg

SEQ ID NO: 275155 - DNA, 30 bp, Artificial Sequence
  Synthetic oligonucleotide
ataattaccataacacgatgcgcgactcgg

SEQ ID NO: 275156 - DNA, 30 bp, Artificial Sequence
  Synthetic oligonucleotide
tgttagggatatcgtggtcgaaggactcgg

SEQ ID NO: 275157 - DNA, 30 bp, Artificial Sequence
  Synthetic oligonucleotide
gaaactcatgctggtcacattattactcgg

SEQ ID NO: 275158 - DNA, 30 bp, Artificial Sequence
  Synthetic oligonucleotide
tagcaatcaagctctatcagggcccctcgg

SEQ ID NO: 275159 - DNA, 30 bp, Artificial Sequence
  Synthetic oligonucleotide
gactgtcgacatgtagactgcatccctcgg

SEQ ID NO: 275160 - DNA, 30 bp, Artificial Sequence
  Synthetic oligonucleotide
agatttacgggcaccccctccaatgctcgg

SEQ ID NO: 275161 - DNA, 30 bp, Artificial Sequence
  Synthetic oligonucleotide
ctgtttgacaataccgttcgggactctcgg

SEQ ID NO: 275162 - DNA, 30 bp, Artificial Sequence
  Synthetic oligonucleotide
tttgacgctagactacgccgtacttctcgg

SEQ ID NO: 275163 - DNA, 30 bp, Artificial Sequence
  Synthetic oligonucleotide
gtacacgcatatcatattatgccttctcgg

SEQ ID NO: 275164 - DNA, 30 bp, Artificial Sequence
  Synthetic oligonucleotide
gagtccacctgagttagttgggcttctcgg

SEQ ID NO: 275165 - DNA, 30 bp, Artificial Sequence
  Synthetic oligonucleotide
agggaacccttagtgaagcctcgttctcgg

SEQ ID NO: 275166 - DNA, 30 bp, Artificial Sequence
  Synthetic oligonucleotide
caaatacacacttgctcgatcgcaagtcgg

SEQ ID NO: 275167 - DNA, 30 bp, Artificial Sequence
  Synthetic oligonucleotide
ggcttgggggaccctagagacgccagtcgg

SEQ ID NO: 275168 - DNA, 30 bp, Artificial Sequence
  Synthetic oligonucleotide
gaatcctgtgcgcagctgtaaaggagtcgg

SEQ ID NO: 275169 - DNA, 30 bp, Artificial Sequence
  Synthetic oligonucleotide
ttagccggatagtatctggacctgagtcgg

SEQ ID NO: 275170 - DNA, 30 bp, Artificial Sequence
  Synthetic oligonucleotide
gtattgaaatgttgtctgttaaagcgtcgg

SEQ ID NO: 275171 - DNA, 30 bp, Artificial Sequence
  Synthetic oligonucleotide
accataaaactgaatggtgattgtcgtcgg

SEQ ID NO: 275172 - DNA, 30 bp, Artificial Sequence
  Synthetic oligonucleotide
tggtacagcattgctacgaactttcgtcgg

SEQ ID NO: 275173 - DNA, 30 bp, Artificial Sequence
  Synthetic oligonucleotide
gttcgagtgtgcgccatatggtcaggtcgg

SEQ ID NO: 275174 - DNA, 30 bp, Artificial Sequence
  Synthetic oligonucleotide
gcaagttttataagctcctgtcagggtcgg

SEQ ID NO: 275175 - DNA, 30 bp, Artificial Sequence
  Synthetic oligonucleotide
aataaggcggggtttgtctttgagggtcgg

SEQ ID NO: 275176 - DNA, 30 bp, Artificial Sequence
  Synthetic oligonucleotide
agattggtctagctttaatcgtcgggtcgg

SEQ ID NO: 275177 - DNA, 30 bp, Artificial Sequence
  Synthetic oligonucleotide
gaacgcaagcgcgcgctctatcggggtcgg

SEQ ID NO: 275178 - DNA, 30 bp, Artificial Sequence
  Synthetic oligonucleotide
ggatatggcgttctgaggtccaatggtcgg

SEQ ID NO: 275179 - DNA, 30 bp, Artificial Sequence
  Synthetic oligonucleotide
ggaccagaccgaatctttgaaaaatgtcgg

SEQ ID NO: 275180 - DNA, 30 bp, Artificial Sequence
  Synthetic oligonucleotide
gctcccgtccctcagactcacaaatgtcgg

SEQ ID NO: 275181 - DNA, 30 bp, Artificial Sequence
  Synthetic oligonucleotide
tttttatgtaagtcaatctcggtatgtcgg

SEQ ID NO: 275182 - DNA, 30 bp, Artificial Sequence
  Synthetic oligonucleotide
gttatcaattgtcgcgctgcaatctgtcgg

SEQ ID NO: 275183 - DNA, 30 bp, Artificial Sequence
  Synthetic oligonucleotide
tttagtaaccgggaacggtgaaggtgtcgg

SEQ ID NO: 275184 - DNA, 30 bp, Artificial Sequence
  Synthetic oligonucleotide
acaggtagaggacgcatgtagaggtgtcgg

SEQ ID NO: 275185 - DNA, 30 bp, Artificial Sequence
  Synthetic oligonucleotide
tgagaaagtttgtaggacgccatgtgtcgg

SEQ ID NO: 275186 - DNA, 30 bp, Artificial Sequence
  Synthetic oligonucleotide
ggggagatgtatcgacctcgtatgtgtcgg

SEQ ID NO: 275187 - DNA, 30 bp, Artificial Sequence
  Synthetic oligonucleotide
aaggatttgcattccttaaagtccattcgg

SEQ ID NO: 275188 - DNA, 30 bp, Artificial Sequence
  Synthetic oligonucleotide
ttcacacatagtcgcctttcaaggattcgg

SEQ ID NO: 275189 - DNA, 30 bp, Artificial Sequence
  Synthetic oligonucleotide
caagtaatatagtacggtgtcctgattcgg

SEQ ID NO: 275190 - DNA, 30 bp, Artificial Sequence
  Synthetic oligonucleotide
tcaaatcaatctaggcagcataaacttcgg

SEQ ID NO: 275191 - DNA, 30 bp, Artificial Sequence
  Synthetic oligonucleotide
ggtaagataccggcgcactgcagtcttcgg

SEQ ID NO: 275192 - DNA, 30 bp, Artificial Sequence
  Synthetic oligonucleotide
gtactgctcgcccggattaataaagttcgg

SEQ ID NO: 275193 - DNA, 30 bp, Artificial Sequence
  Synthetic oligonucleotide
cctatgcactgacaaaacttcgaagttcgg

SEQ ID NO: 275194 - DNA, 30 bp, Artificial Sequence
  Synthetic oligonucleotide
aggtctgatagtcctagcgttccagttcgg

SEQ ID NO: 275195 - DNA, 30 bp, Artificial Sequence
  Synthetic oligonucleotide
acgtggtgggaggtccttgttagggttcgg

SEQ ID NO: 275196 - DNA, 30 bp, Artificial Sequence
  Synthetic oligonucleotide
tagagcggttagaacacatgtactgttcgg

SEQ ID NO: 275197 - DNA, 30 bp, Artificial Sequence
  Synthetic oligonucleotide
cgcattcagctttctacttcgtaatttcgg

SEQ ID NO: 275198 - DNA, 30 bp, Artificial Sequence
  Synthetic oligonucleotide
taaaacggtgcgcatctcggattatttcgg

SEQ ID NO: 275199 - DNA, 30 bp, Artificial Sequence
  Synthetic oligonucleotide
atcgacatagggttacgttatccctttcgg

SEQ ID NO: 275200 - DNA, 30 bp, Artificial Sequence
  Synthetic oligonucleotide
tagagcggtctttaaggaaggccgtttcgg

SEQ ID NO: 275201 - DNA, 30 bp, Artificial Sequence
  Synthetic oligonucleotide
ccactgcgatttataataattatttttcgg

SEQ ID NO: 275202 - DNA, 30 bp, Artificial Sequence
  Synthetic oligonucleotide
aagcattgaggccaactcccggggaaaggg

SEQ ID NO: 275203 - DNA, 30 bp, Artificial Sequence
  Synthetic oligonucleotide
gcggggagtaaactggagacggataaaggg

SEQ ID NO: 275204 - DNA, 30 bp, Artificial Sequence
  Synthetic oligonucleotide
ctcgtaagggcttccataccggctaaaggg

SEQ ID NO: 275205 - DNA, 30 bp, Artificial Sequence
  Synthetic oligonucleotide
tgaccattaggggcttttcaaacacaaggg

SEQ ID NO: 275206 - DNA, 30 bp, Artificial Sequence
  Synthetic oligonucleotide
ttgacaatcggtcgtattttaacacaaggg

SEQ ID NO: 275207 - DNA, 30 bp, Artificial Sequence
  Synthetic oligonucleotide
acttcgaccagagtcaataaaggacaaggg

SEQ ID NO: 275208 - DNA, 30 bp, Artificial Sequence
  Synthetic oligonucleotide
gagtcggccgagtagcatcatggccaaggg

SEQ ID NO: 275209 - DNA, 30 bp, Artificial Sequence
  Synthetic oligonucleotide
tctagtttaaggctacggcacttgcaaggg

SEQ ID NO: 275210 - DNA, 30 bp, Artificial Sequence
  Synthetic oligonucleotide
acaaagcacctaacccgagagtatcaaggg

SEQ ID NO: 275211 - DNA, 30 bp, Artificial Sequence
  Synthetic oligonucleotide
tttgtgaattagggcaaggtttatcaaggg

SEQ ID NO: 275212 - DNA, 30 bp, Artificial Sequence
  Synthetic oligonucleotide
ctaggggcaatcttagatttctctcaaggg

SEQ ID NO: 275213 - DNA, 30 bp, Artificial Sequence
  Synthetic oligonucleotide
tatggcacatcatggtccttgggagaaggg

SEQ ID NO: 275214 - DNA, 30 bp, Artificial Sequence
  Synthetic oligonucleotide
gttgcccgacagaatatagtttccgaaggg

SEQ ID NO: 275215 - DNA, 30 bp, Artificial Sequence
  Synthetic oligonucleotide
gtgcttaagataggtgcggtgaaggaaggg

SEQ ID NO: 275216 - DNA, 31 bp, Artificial Sequence
  Synthetic oligonucleotide
tgcggaggcggagggggagggcgaggaaggg

SEQ ID NO: 275217 - DNA, 30 bp, Artificial Sequence
  Synthetic oligonucleotide
attattcactaaacatatagtccggaaggg

SEQ ID NO: 275218 - DNA, 30 bp, Artificial Sequence
  Synthetic oligonucleotide
aagtgagatcgcacacacctaggggaaggg

SEQ ID NO: 275219 - DNA, 30 bp, Artificial Sequence
  Synthetic oligonucleotide
cttgcttgtatttgacggtaattggaaggg

SEQ ID NO: 275220 - DNA, 30 bp, Artificial Sequence
  Synthetic oligonucleotide
tgcatacagtgtaggtatgcgtctgaaggg

SEQ ID NO: 275221 - DNA, 30 bp, Artificial Sequence
  Synthetic oligonucleotide
tcccatatacgcaaaggggaaacctaaggg

SEQ ID NO: 275222 - DNA, 30 bp, Artificial Sequence
  Synthetic oligonucleotide
catctgcaaatgggttagcgcgtctaaggg

SEQ ID NO: 275223 - DNA, 30 bp, Artificial Sequence
  Synthetic oligonucleotide
taatactctgcaatattcgtagagtaaggg

SEQ ID NO: 275224 - DNA, 30 bp, Artificial Sequence
  Synthetic oligonucleotide
acccactgacagttacgatgtccttaaggg

SEQ ID NO: 275225 - DNA, 30 bp, Artificial Sequence
  Synthetic oligonucleotide
aaaaagagggccttgctatagtcttaaggg

SEQ ID NO: 275226 - DNA, 30 bp, Artificial Sequence
  Synthetic oligonucleotide
tcagatcggggtaactcgatcgccacaggg

SEQ ID NO: 275227 - DNA, 30 bp, Artificial Sequence
  Synthetic oligonucleotide
agaggggcgcgccatgaacgcgtcacaggg

SEQ ID NO: 275228 - DNA, 30 bp, Artificial Sequence
  Synthetic oligonucleotide
ataggccttggtactacgactaatacaggg

SEQ ID NO: 275229 - DNA, 30 bp, Artificial Sequence
  Synthetic oligonucleotide
tagtactggaccttcaatgtcagtacaggg

SEQ ID NO: 275230 - DNA, 30 bp, Artificial Sequence
  Synthetic oligonucleotide
agactctgcaatagaaaccggcgcccaggg

SEQ ID NO: 275231 - DNA, 31 bp, Artificial Sequence
  Synthetic oligonucleotide
ctatggcagagacgcttgaagggggccaggg

SEQ ID NO: 275232 - DNA, 30 bp, Artificial Sequence
  Synthetic oligonucleotide
ctatttctcaatattcagagcatgccaggg

SEQ ID NO: 275233 - DNA, 30 bp, Artificial Sequence
  Synthetic oligonucleotide
cggagctgtatcggcgtaaccgatccaggg

SEQ ID NO: 275234 - DNA, 30 bp, Artificial Sequence
  Synthetic oligonucleotide
tagcaacaggatggactcaacggtccaggg

SEQ ID NO: 275235 - DNA, 30 bp, Artificial Sequence
  Synthetic oligonucleotide
gccggggggcctgttcctctgtgagcaggg

SEQ ID NO: 275236 - DNA, 30 bp, Artificial Sequence
  Synthetic oligonucleotide
aaactagcacagggcgcaaacctcgcaggg

SEQ ID NO: 275237 - DNA, 30 bp, Artificial Sequence
  Synthetic oligonucleotide
gtatgtacactcatcagttcataggcaggg

SEQ ID NO: 275238 - DNA, 30 bp, Artificial Sequence
  Synthetic oligonucleotide
agtggtagtaccgggcaccacacggcaggg

SEQ ID NO: 275239 - DNA, 30 bp, Artificial Sequence
  Synthetic oligonucleotide
gtacgcaaggcgtttatcccctgggcaggg

SEQ ID NO: 275240 - DNA, 30 bp, Artificial Sequence
  Synthetic oligonucleotide
ggtacgcgttcgaacgcgatacctgcaggg

SEQ ID NO: 275241 - DNA, 30 bp, Artificial Sequence
  Synthetic oligonucleotide
gcggcattgccgggattgagttctgcaggg

SEQ ID NO: 275242 - DNA, 30 bp, Artificial Sequence
  Synthetic oligonucleotide
catctgggaggcggggtttttctgtcaggg

SEQ ID NO: 275243 - DNA, 30 bp, Artificial Sequence
  Synthetic oligonucleotide
cttaggtgataatgttcatgtgaaagaggg

SEQ ID NO: 275244 - DNA, 30 bp, Artificial Sequence
  Synthetic oligonucleotide
aagacttgtgacaccggatctcgaagaggg

SEQ ID NO: 275245 - DNA, 30 bp, Artificial Sequence
  Synthetic oligonucleotide
cccggcctaggactctgcagagacagaggg

SEQ ID NO: 275246 - DNA, 30 bp, Artificial Sequence
  Synthetic oligonucleotide
ggccaggtcactaacacgcatagcagaggg

SEQ ID NO: 275247 - DNA, 30 bp, Artificial Sequence
  Synthetic oligonucleotide
actcggtggagctaggcacggcagagaggg

SEQ ID NO: 275248 - DNA, 30 bp, Artificial Sequence
  Synthetic oligonucleotide
tccccctagcactatctatgtgggagaggg

SEQ ID NO: 275249 - DNA, 30 bp, Artificial Sequence
  Synthetic oligonucleotide
cacgagggcttggcccgatcgttgagaggg

SEQ ID NO: 275250 - DNA, 30 bp, Artificial Sequence
  Synthetic oligonucleotide
ttagacttcagaggtgcataacctagaggg

SEQ ID NO: 275251 - DNA, 30 bp, Artificial Sequence
  Synthetic oligonucleotide
ctcgtggccgtgccataatagtctagaggg

SEQ ID NO: 275252 - DNA, 30 bp, Artificial Sequence
  Synthetic oligonucleotide
gtacggaatgtggcccgtacgggccgaggg

SEQ ID NO: 275253 - DNA, 30 bp, Artificial Sequence
  Synthetic oligonucleotide
acggagaggctggttttctcctatcgaggg

SEQ ID NO: 275254 - DNA, 30 bp, Artificial Sequence
  Synthetic oligonucleotide
gtagagcttgtgtgaaagatcctaggaggg

SEQ ID NO: 275255 - DNA, 30 bp, Artificial Sequence
  Synthetic oligonucleotide
gcacaccaagcgaatcggagcttaggaggg

SEQ ID NO: 275256 - DNA, 30 bp, Artificial Sequence
  Synthetic oligonucleotide
gccgccgagcacataatcccccgctgaggg

SEQ ID NO: 275257 - DNA, 30 bp, Artificial Sequence
  Synthetic oligonucleotide
ctcgtgcaatccttccaaagctaaataggg

SEQ ID NO: 275258 - DNA, 30 bp, Artificial Sequence
  Synthetic oligonucleotide
tagagagccctacaaagatgcaacataggg

SEQ ID NO: 275259 - DNA, 30 bp, Artificial Sequence
  Synthetic oligonucleotide
tagacttctcgtcagagaaggcgcataggg

SEQ ID NO: 275260 - DNA, 30 bp, Artificial Sequence
  Synthetic oligonucleotide
ttcagtaccacattgccataaaggataggg

SEQ ID NO: 275261 - DNA, 30 bp, Artificial Sequence
  Synthetic oligonucleotide
ccgttgtaactatgacggtatatgataggg

SEQ ID NO: 275262 - DNA, 30 bp, Artificial Sequence
  Synthetic oligonucleotide
tatatacaaatacggcaacaatcactaggg

SEQ ID NO: 275263 - DNA, 30 bp, Artificial Sequence
  Synthetic oligonucleotide
ctgcgtatctaccacccggtaagactaggg

SEQ ID NO: 275264 - DNA, 30 bp, Artificial Sequence
  Synthetic oligonucleotide
aaaattttgactgagtaagcaaacctaggg

SEQ ID NO: 275265 - DNA, 30 bp, Artificial Sequence
  Synthetic oligonucleotide
ttgctgatctgcgtgtcgggtgtcctaggg

SEQ ID NO: 275266 - DNA, 30 bp, Artificial Sequence
  Synthetic oligonucleotide
ggcgcagcgttggcctcctcgtagctaggg

SEQ ID NO: 275267 - DNA, 30 bp, Artificial Sequence
  Synthetic oligonucleotide
atcgtacgtttggcaccggactggctaggg

SEQ ID NO: 275268 - DNA, 30 bp, Artificial Sequence
  Synthetic oligonucleotide
gtcataggttatagagtccaccaggtaggg

SEQ ID NO: 275269 - DNA, 30 bp, Artificial Sequence
  Synthetic oligonucleotide
tcgtcactttatcgctcgtaagatgtaggg

SEQ ID NO: 275270 - DNA, 30 bp, Artificial Sequence
  Synthetic oligonucleotide
gcagacccgctatagtgacctcgtgtaggg

SEQ ID NO: 275271 - DNA, 30 bp, Artificial Sequence
  Synthetic oligonucleotide
acaggagtgtcttattctgctgttgtaggg

SEQ ID NO: 275272 - DNA, 30 bp, Artificial Sequence
  Synthetic oligonucleotide
gatgacgggaattctgcgacggcattaggg

SEQ ID NO: 275273 - DNA, 30 bp, Artificial Sequence
  Synthetic oligonucleotide
attttacacgggctgatgctccggttaggg

SEQ ID NO: 275274 - DNA, 30 bp, Artificial Sequence
  Synthetic oligonucleotide
cgtcgggcgcatcagagtacgctgttaggg

SEQ ID NO: 275275 - DNA, 30 bp, Artificial Sequence
  Synthetic oligonucleotide
tgcgtcctgggagttctacgatctttaggg

SEQ ID NO: 275276 - DNA, 30 bp, Artificial Sequence
  Synthetic oligonucleotide
caggacaatgccaatccgcgatttttaggg

SEQ ID NO: 275277 - DNA, 30 bp, Artificial Sequence
  Synthetic oligonucleotide
atccagtctaatctacagaaaccaaacggg

SEQ ID NO: 275278 - DNA, 30 bp, Artificial Sequence
  Synthetic oligonucleotide
gaggtaaatagacttgcctgggcaaacggg

SEQ ID NO: 275279 - DNA, 30 bp, Artificial Sequence
  Synthetic oligonucleotide
atgataggccttctacgcaagggaaacggg

SEQ ID NO: 275280 - DNA, 30 bp, Artificial Sequence
  Synthetic oligonucleotide
tcggcgtttttttatgcctaatgaaacggg

SEQ ID NO: 275281 - DNA, 30 bp, Artificial Sequence
  Synthetic oligonucleotide
gtgtttatctggtaagttagttacaacggg

SEQ ID NO: 275282 - DNA, 30 bp, Artificial Sequence
  Synthetic oligonucleotide
aaccttggtgagaatgttcaaatgaacggg

SEQ ID NO: 275283 - DNA, 30 bp, Artificial Sequence
  Synthetic oligonucleotide
tacgaagccggtaatggtatgattaacggg

SEQ ID NO: 275284 - DNA, 30 bp, Artificial Sequence
  Synthetic oligonucleotide
tgtggctattgtgctcgctgggcacacggg

SEQ ID NO: 275285 - DNA, 30 bp, Artificial Sequence
  Synthetic oligonucleotide
gatacggcaaacctttacttgagacacggg

SEQ ID NO: 275286 - DNA, 30 bp, Artificial Sequence
  Synthetic oligonucleotide
cggaatttttcttgaagccggaagcacggg

SEQ ID NO: 275287 - DNA, 30 bp, Artificial Sequence
  Synthetic oligonucleotide
tgcctcaaggatgagctcctgaagcacggg

SEQ ID NO: 275288 - DNA, 30 bp, Artificial Sequence
  Synthetic oligonucleotide
cgcgagtggctgattttagatcagcacggg

SEQ ID NO: 275289 - DNA, 30 bp, Artificial Sequence
  Synthetic oligonucleotide
ataagtgtaccgcactaggtacggcacggg

SEQ ID NO: 275290 - DNA, 30 bp, Artificial Sequence
  Synthetic oligonucleotide
gtagcgtatcgatgcttttagggtcacggg

SEQ ID NO: 275291 - DNA, 30 bp, Artificial Sequence
  Synthetic oligonucleotide
tgtattctgggttgggtgacgtgtcacggg

SEQ ID NO: 275292 - DNA, 30 bp, Artificial Sequence
  Synthetic oligonucleotide
taccaacttaggctcaaacgacgagacggg

SEQ ID NO: 275293 - DNA, 30 bp, Artificial Sequence
  Synthetic oligonucleotide
tggatacctaagcggtctcgagtagacggg

SEQ ID NO: 275294 - DNA, 30 bp, Artificial Sequence
  Synthetic oligonucleotide
ggatatgagtgtgacaatttcgtagacggg

SEQ ID NO: 275295 - DNA, 30 bp, Artificial Sequence
  Synthetic oligonucleotide
ggtgaaggagcggatgaggtaaatgacggg

SEQ ID NO: 275296 - DNA, 30 bp, Artificial Sequence
  Synthetic oligonucleotide
gtgtagcaaaattacggattttatgacggg

SEQ ID NO: 275297 - DNA, 30 bp, Artificial Sequence
  Synthetic oligonucleotide
aaagaaagtggattggaccgtgctgacggg

SEQ ID NO: 275298 - DNA, 30 bp, Artificial Sequence
  Synthetic oligonucleotide
tacaccgggtgctaattccatcactacggg

SEQ ID NO: 275299 - DNA, 30 bp, Artificial Sequence
  Synthetic oligonucleotide
acttacacccgtaatgaaacggtctacggg

SEQ ID NO: 275300 - DNA, 30 bp, Artificial Sequence
  Synthetic oligonucleotide
acaaagaaacgccctttcttacattacggg

SEQ ID NO: 275301 - DNA, 30 bp, Artificial Sequence
  Synthetic oligonucleotide
gtaatatggtaagtagtacacagaaccggg

SEQ ID NO: 275302 - DNA, 30 bp, Artificial Sequence
  Synthetic oligonucleotide
ataaggcctctatggtagtgcaccaccggg

SEQ ID NO: 275303 - DNA, 30 bp, Artificial Sequence
  Synthetic oligonucleotide
ctttaggggcagattctgaccccgcccggg

SEQ ID NO: 275304 - DNA, 30 bp, Artificial Sequence
  Synthetic oligonucleotide
tacttttgcagagcgtgtcagacagccggg

SEQ ID NO: 275305 - DNA, 30 bp, Artificial Sequence
  Synthetic oligonucleotide
aagtagctcggtccgatttgccccgccggg

SEQ ID NO: 275306 - DNA, 30 bp, Artificial Sequence
  Synthetic oligonucleotide
acctttaccggtttcttcggatccgccggg

SEQ ID NO: 275307 - DNA, 30 bp, Artificial Sequence
  Synthetic oligonucleotide
ctcaatgggagacacgacagacttgccggg

SEQ ID NO: 275308 - DNA, 30 bp, Artificial Sequence
  Synthetic oligonucleotide
tgacaagtacttgtgaggctccttgccggg

SEQ ID NO: 275309 - DNA, 30 bp, Artificial Sequence
  Synthetic oligonucleotide
tttaatggactacacttaacaacctccggg

SEQ ID NO: 275310 - DNA, 30 bp, Artificial Sequence
  Synthetic oligonucleotide
tatatgattacattggaactctagtccggg

SEQ ID NO: 275311 - DNA, 30 bp, Artificial Sequence
  Synthetic oligonucleotide
tcgggtagatggcctgcttttttgtccggg

SEQ ID NO: 275312 - DNA, 30 bp, Artificial Sequence
  Synthetic oligonucleotide
gcagaatgacattgcgggacttgttccggg

SEQ ID NO: 275313 - DNA, 30 bp, Artificial Sequence
  Synthetic oligonucleotide
tcagaccagtttgccccggttcgaagcggg

SEQ ID NO: 275314 - DNA, 30 bp, Artificial Sequence
  Synthetic oligonucleotide
gaaacggactaatatcacctatgaagcggg

SEQ ID NO: 275315 - DNA, 30 bp, Artificial Sequence
  Synthetic oligonucleotide
cctataaacggtccgtggttactaagcggg

SEQ ID NO: 275316 - DNA, 30 bp, Artificial Sequence
  Synthetic oligonucleotide
atcggatcaggaagcccttcatgcagcggg

SEQ ID NO: 275317 - DNA, 30 bp, Artificial Sequence
  Synthetic oligonucleotide
cgggtggttcccgaaatttaagagagcggg

SEQ ID NO: 275318 - DNA, 30 bp, Artificial Sequence
  Synthetic oligonucleotide
aagcaaatgcctctaagtctggtacgcggg

SEQ ID NO: 275319 - DNA, 30 bp, Artificial Sequence
  Synthetic oligonucleotide
gtagggtggtaattgtgtcatgcccgcggg

SEQ ID NO: 275320 - DNA, 30 bp, Artificial Sequence
  Synthetic oligonucleotide
cggttattgattgattgtgtcccaggcggg

SEQ ID NO: 275321 - DNA, 30 bp, Artificial Sequence
  Synthetic oligonucleotide
ggtactgaggtaccacacaaggtaggcggg

SEQ ID NO: 275322 - DNA, 30 bp, Artificial Sequence
  Synthetic oligonucleotide
gtacaggattgttagacttcacgcggcggg

SEQ ID NO: 275323 - DNA, 30 bp, Artificial Sequence
  Synthetic oligonucleotide
caggttatgcatttggatctgcggggcggg

SEQ ID NO: 275324 - DNA, 30 bp, Artificial Sequence
  Synthetic oligonucleotide
aaagctgccggaaacagtactttgggcggg

SEQ ID NO: 275325 - DNA, 30 bp, Artificial Sequence
  Synthetic oligonucleotide
gcgacagggagccagaattgttgtggcggg

SEQ ID NO: 275326 - DNA, 28 bp, Artificial Sequence
  Synthetic oligonucleotide
ctactcataaatgaagaaatactgcggg

SEQ ID NO: 275327 - DNA, 30 bp, Artificial Sequence
  Synthetic oligonucleotide
cgacttcgtggaagggaacgggaaatcggg

SEQ ID NO: 275328 - DNA, 30 bp, Artificial Sequence
  Synthetic oligonucleotide
attgcggtctcgctagtggacataatcggg

SEQ ID NO: 275329 - DNA, 30 bp, Artificial Sequence
  Synthetic oligonucleotide
ttaagccctggcaagagagggctaatcggg

SEQ ID NO: 275330 - DNA, 30 bp, Artificial Sequence
  Synthetic oligonucleotide
ctggtctcttgtccagttgctgtaatcggg

SEQ ID NO: 275331 - DNA, 30 bp, Artificial Sequence
  Synthetic oligonucleotide
gattgaggcagtaacttatcgttaatcggg

SEQ ID NO: 275332 - DNA, 30 bp, Artificial Sequence
  Synthetic oligonucleotide
ggaacaaaaggtgtggtagggttcatcggg

SEQ ID NO: 275333 - DNA, 30 bp, Artificial Sequence
  Synthetic oligonucleotide
cattaatattgtcagagtcgctagatcggg

SEQ ID NO: 275334 - DNA, 30 bp, Artificial Sequence
  Synthetic oligonucleotide
tatcgtcgaaaaattaagaaccatatcggg

SEQ ID NO: 275335 - DNA, 30 bp, Artificial Sequence
  Synthetic oligonucleotide
tatgttaatcaggtatacagagagctcggg

SEQ ID NO: 275336 - DNA, 30 bp, Artificial Sequence
  Synthetic oligonucleotide
gcgtagacacgacgcgcctgagagctcggg

SEQ ID NO: 275337 - DNA, 30 bp, Artificial Sequence
  Synthetic oligonucleotide
ctgagagtcgcgtagaacgcctgcgtcggg

SEQ ID NO: 275338 - DNA, 30 bp, Artificial Sequence
  Synthetic oligonucleotide
ttagagccactcgttagcaaacaggtcggg

SEQ ID NO: 275339 - DNA, 30 bp, Artificial Sequence
  Synthetic oligonucleotide
gcatgcaggggttttgagggtgaggtcggg

SEQ ID NO: 275340 - DNA, 30 bp, Artificial Sequence
  Synthetic oligonucleotide
agtctaaagaactatgtccgagcggtcggg

SEQ ID NO: 275341 - DNA, 30 bp, Artificial Sequence
  Synthetic oligonucleotide
tggtggaaaagaaacatgacttttgtcggg

SEQ ID NO: 275342 - DNA, 30 bp, Artificial Sequence
  Synthetic oligonucleotide
gtgggactcctcaaagcggtgggcttcggg

SEQ ID NO: 275343 - DNA, 30 bp, Artificial Sequence
  Synthetic oligonucleotide
tgaatgtatggtgggaatccatagttcggg

SEQ ID NO: 275344 - DNA, 30 bp, Artificial Sequence
  Synthetic oligonucleotide
gtgcttggctggggaaagcttaggttcggg

SEQ ID NO: 275345 - DNA, 30 bp, Artificial Sequence
  Synthetic oligonucleotide
aacgcgtatctatacttgggatggttcggg

SEQ ID NO: 275346 - DNA, 30 bp, Artificial Sequence
  Synthetic oligonucleotide
acagcacctttcatatccatgccaaagggg

SEQ ID NO: 275347 - DNA, 30 bp, Artificial Sequence
  Synthetic oligonucleotide
gaaatgcctaaactcacgcattgaaagggg

SEQ ID NO: 275348 - DNA, 30 bp, Artificial Sequence
  Synthetic oligonucleotide
tgattttggcctggcaatttagtaaagggg

SEQ ID NO: 275349 - DNA, 30 bp, Artificial Sequence
  Synthetic oligonucleotide
taccttctaattagtaagaaacacaagggg

SEQ ID NO: 275350 - DNA, 30 bp, Artificial Sequence
  Synthetic oligonucleotide
gaatattccgtaaggcaaaattgcaagggg

SEQ ID NO: 275351 - DNA, 30 bp, Artificial Sequence
  Synthetic oligonucleotide
tagagggtatcatacataagggagaagggg

SEQ ID NO: 275352 - DNA, 30 bp, Artificial Sequence
  Synthetic oligonucleotide
ttgttcataaaatcgaaggaacggaagggg

SEQ ID NO: 275353 - DNA, 30 bp, Artificial Sequence
  Synthetic oligonucleotide
gacatctactatgtgtgttgcacacagggg

SEQ ID NO: 275354 - DNA, 30 bp, Artificial Sequence
  Synthetic oligonucleotide
aataaattgttacctaatggccgccagggg

SEQ ID NO: 275355 - DNA, 29 bp, Artificial Sequence
  Synthetic oligonucleotide
cgcctcatactgggggggtgggagagggg

SEQ ID NO: 275356 - DNA, 30 bp, Artificial Sequence
  Synthetic oligonucleotide
ctgcggtcgttcggtaaaaaggtagagggg

SEQ ID NO: 275357 - DNA, 30 bp, Artificial Sequence
  Synthetic oligonucleotide
tttaatgacgtaaagtcattccacgagggg

SEQ ID NO: 275358 - DNA, 30 bp, Artificial Sequence
  Synthetic oligonucleotide
aaaagcgaacgccacgatcaagtggagggg

SEQ ID NO: 275359 - DNA, 30 bp, Artificial Sequence
  Synthetic oligonucleotide
taggctttgtcgtctagcctagtggagggg

SEQ ID NO: 275360 - DNA, 30 bp, Artificial Sequence
  Synthetic oligonucleotide
ttttggcaataagcctttatcagatagggg

SEQ ID NO: 275361 - DNA, 30 bp, Artificial Sequence
  Synthetic oligonucleotide
ccgggctcgttggaacatatcaactagggg

SEQ ID NO: 275362 - DNA, 30 bp, Artificial Sequence
  Synthetic oligonucleotide
cgtattatcagacgatgctaccactagggg

SEQ ID NO: 275363 - DNA, 30 bp, Artificial Sequence
  Synthetic oligonucleotide
gggaacttctccactatttgtttctagggg

SEQ ID NO: 275364 - DNA, 30 bp, Artificial Sequence
  Synthetic oligonucleotide
acttaacagttggttactgcgcattagggg

SEQ ID NO: 275365 - DNA, 30 bp, Artificial Sequence
  Synthetic oligonucleotide
taagatgtaagcgaccaggggtcttagggg

SEQ ID NO: 275366 - DNA, 30 bp, Artificial Sequence
  Synthetic oligonucleotide
gcacctggtacactaagctggtgttagggg

SEQ ID NO: 275367 - DNA, 30 bp, Artificial Sequence
  Synthetic oligonucleotide
tgatttttagttaagggtggtttaacgggg

SEQ ID NO: 275368 - DNA, 30 bp, Artificial Sequence
  Synthetic oligonucleotide
aagcattagctttatattgggaacacgggg

SEQ ID NO: 275369 - DNA, 30 bp, Artificial Sequence
  Synthetic oligonucleotide
gcagcgcaagccttcccaggaaatacgggg

SEQ ID NO: 275370 - DNA, 30 bp, Artificial Sequence
  Synthetic oligonucleotide
ggagtaccaggatgtccccctgcgccgggg

SEQ ID NO: 275371 - DNA, 30 bp, Artificial Sequence
  Synthetic oligonucleotide
ggtaccttacacaaaaaacacctagcgggg

SEQ ID NO: 275372 - DNA, 30 bp, Artificial Sequence
  Synthetic oligonucleotide
gttaacccggcactgcctgcaatggcgggg

SEQ ID NO: 275373 - DNA, 30 bp, Artificial Sequence
  Synthetic oligonucleotide
tttgtcggatgaaggcgtagggctgcgggg

SEQ ID NO: 275374 - DNA, 30 bp, Artificial Sequence
  Synthetic oligonucleotide
acccacgaacatgattaatcctctgcgggg

SEQ ID NO: 275375 - DNA, 30 bp, Artificial Sequence
  Synthetic oligonucleotide
attcaccgactagatgggcatacatcgggg

SEQ ID NO: 275376 - DNA, 30 bp, Artificial Sequence
  Synthetic oligonucleotide
tctaacgagatttgggtggcggcatcgggg

SEQ ID NO: 275377 - DNA, 30 bp, Artificial Sequence
  Synthetic oligonucleotide
tccatggaaccgtgagcccaaggatcgggg

SEQ ID NO: 275378 - DNA, 30 bp, Artificial Sequence
  Synthetic oligonucleotide
cactgctggcaagtcacttaaggatcgggg

SEQ ID NO: 275379 - DNA, 30 bp, Artificial Sequence
  Synthetic oligonucleotide
aaattgagaaagagaatgtgactatcgggg

SEQ ID NO: 275380 - DNA, 30 bp, Artificial Sequence
  Synthetic oligonucleotide
gccaatacggcttcagcgactccctcgggg

SEQ ID NO: 275381 - DNA, 30 bp, Artificial Sequence
  Synthetic oligonucleotide
tgcgttaatcatggttctcgcatctcgggg

SEQ ID NO: 275382 - DNA, 30 bp, Artificial Sequence
  Synthetic oligonucleotide
ccactacgcttgtatagtaagttctcgggg

SEQ ID NO: 275383 - DNA, 30 bp, Artificial Sequence
  Synthetic oligonucleotide
tggccggtgcgtctctcttgttcgtcgggg

SEQ ID NO: 275384 - DNA, 30 bp, Artificial Sequence
  Synthetic oligonucleotide
acttttgagatggtctcaggggggtcgggg

SEQ ID NO: 275385 - DNA, 30 bp, Artificial Sequence
  Synthetic oligonucleotide
atacgaatgatgccaatcaccgttaggggg

SEQ ID NO: 275386 - DNA, 30 bp, Artificial Sequence
  Synthetic oligonucleotide
aggagaccgtcacgccatcgggaacggggg

SEQ ID NO: 275387 - DNA, 30 bp, Artificial Sequence
  Synthetic oligonucleotide
tcagcgtacaacaccggaaagaaccggggg

SEQ ID NO: 275388 - DNA, 30 bp, Artificial Sequence
  Synthetic oligonucleotide
acacaggagcaaggaccaacagtccggggg

SEQ ID NO: 275389 - DNA, 30 bp, Artificial Sequence
  Synthetic oligonucleotide
gtatacttaatcttgatacgcccgcggggg

SEQ ID NO: 275390 - DNA, 30 bp, Artificial Sequence
  Synthetic oligonucleotide
gaggtccgtctatgagcatttacagggggg

SEQ ID NO: 275391 - DNA, 30 bp, Artificial Sequence
  Synthetic oligonucleotide
tgtgcgaattgtacctcgaaaagcgggggg

SEQ ID NO: 275392 - DNA, 30 bp, Artificial Sequence
  Synthetic oligonucleotide
tagatcggtcaaatcttaacctgcgggggg

SEQ ID NO: 275393 - DNA, 30 bp, Artificial Sequence
  Synthetic oligonucleotide
aacctttgctaacggggagaggaggggggg

SEQ ID NO: 275394 - DNA, 30 bp, Artificial Sequence
  Synthetic oligonucleotide
atgaaataattatcccatacaacggggggg

SEQ ID NO: 275395 - DNA, 30 bp, Artificial Sequence
  Synthetic oligonucleotide
gtggtgcataaaaccaagcgggcggggggg

SEQ ID NO: 275396 - DNA, 30 bp, Artificial Sequence
  Synthetic oligonucleotide
agtattaattacacgggatccatggggggg

SEQ ID NO: 275397 - DNA, 30 bp, Artificial Sequence
  Synthetic oligonucleotide
ccttcggcgatggtatgcgaccatgggggg

SEQ ID NO: 275398 - DNA, 30 bp, Artificial Sequence
  Synthetic oligonucleotide
gggtcagcagtctaccttgcccactggggg

SEQ ID NO: 275399 - DNA, 30 bp, Artificial Sequence
  Synthetic oligonucleotide
ataggtcgcgccatggttattccctggggg

SEQ ID NO: 275400 - DNA, 30 bp, Artificial Sequence
  Synthetic oligonucleotide
gtcataaataggctattgggctcctggggg

SEQ ID NO: 275401 - DNA, 30 bp, Artificial Sequence
  Synthetic oligonucleotide
ccttcacgctcccaacaaggccagtggggg

SEQ ID NO: 275402 - DNA, 30 bp, Artificial Sequence
  Synthetic oligonucleotide
cgccggacttttagctttgggtggtggggg

SEQ ID NO: 275403 - DNA, 30 bp, Artificial Sequence
  Synthetic oligonucleotide
acgtctgttgcaccgtacgcaatttggggg

SEQ ID NO: 275404 - DNA, 30 bp, Artificial Sequence
  Synthetic oligonucleotide
caaaagagggtgggaggactgtccatgggg

SEQ ID NO: 275405 - DNA, 30 bp, Artificial Sequence
  Synthetic oligonucleotide
gtgtaagctgactcggagctggctatgggg

SEQ ID NO: 275406 - DNA, 30 bp, Artificial Sequence
  Synthetic oligonucleotide
ggacttgcgctacgatttgcatctatgggg

SEQ ID NO: 275407 - DNA, 30 bp, Artificial Sequence
  Synthetic oligonucleotide
aacctgaaaaacaagcagaggtaactgggg

SEQ ID NO: 275408 - DNA, 30 bp, Artificial Sequence
  Synthetic oligonucleotide
ttacattggctcgcttacgcgacactgggg

SEQ ID NO: 275409 - DNA, 30 bp, Artificial Sequence
  Synthetic oligonucleotide
gcagcagaggcgcatctgcagggactgggg

SEQ ID NO: 275410 - DNA, 30 bp, Artificial Sequence
  Synthetic oligonucleotide
aagaagtaaaagttaggaaaaaagctgggg

SEQ ID NO: 275411 - DNA, 30 bp, Artificial Sequence
  Synthetic oligonucleotide
cacgttataacggagcataccacgctgggg

SEQ ID NO: 275412 - DNA, 30 bp, Artificial Sequence
  Synthetic oligonucleotide
cgtgtcggggagtctagagtttacgtgggg

SEQ ID NO: 275413 - DNA, 30 bp, Artificial Sequence
  Synthetic oligonucleotide
tgcgttactccaccaaaagggcccgtgggg

SEQ ID NO: 275414 - DNA, 30 bp, Artificial Sequence
  Synthetic oligonucleotide
tgtatatggtaaataatggtacgcgtgggg

SEQ ID NO: 275415 - DNA, 30 bp, Artificial Sequence
  Synthetic oligonucleotide
accggataagtgttcattctagaggtgggg

SEQ ID NO: 275416 - DNA, 30 bp, Artificial Sequence
  Synthetic oligonucleotide
tgttgccgggatcaaccgttgtcggtgggg

SEQ ID NO: 275417 - DNA, 30 bp, Artificial Sequence
  Synthetic oligonucleotide
cagtcccaaatcacggtgcacatggtgggg

SEQ ID NO: 275418 - DNA, 30 bp, Artificial Sequence
  Synthetic oligonucleotide
ccatgggatgggccggccggacaattgggg

SEQ ID NO: 275419 - DNA, 30 bp, Artificial Sequence
  Synthetic oligonucleotide
ggtgatctctcgaacgaattgtaattgggg

SEQ ID NO: 275420 - DNA, 30 bp, Artificial Sequence
  Synthetic oligonucleotide
aagtaaataactcatattcggttattgggg

SEQ ID NO: 275421 - DNA, 30 bp, Artificial Sequence
  Synthetic oligonucleotide
acggcatgacgcatcaattgagacttgggg

SEQ ID NO: 275422 - DNA, 30 bp, Artificial Sequence
  Synthetic oligonucleotide
gtagtcctgagagttgatgacttgttgggg

SEQ ID NO: 275423 - DNA, 30 bp, Artificial Sequence
  Synthetic oligonucleotide
ttacacagaaatgctagcaggttgttgggg

SEQ ID NO: 275424 - DNA, 30 bp, Artificial Sequence
  Synthetic oligonucleotide
gtatgcacggagcaagccaaactaaatggg

SEQ ID NO: 275425 - DNA, 30 bp, Artificial Sequence
  Synthetic oligonucleotide
aaatccagtaggtgtggagtcctaaatggg

SEQ ID NO: 275426 - DNA, 30 bp, Artificial Sequence
  Synthetic oligonucleotide
tgacctctcgatagtctattacagaatggg

SEQ ID NO: 275427 - DNA, 30 bp, Artificial Sequence
  Synthetic oligonucleotide
ttctcgtatggtgtattgtcgaggaatggg

SEQ ID NO: 275428 - DNA, 30 bp, Artificial Sequence
  Synthetic oligonucleotide
atccaggtggaggcagtacgaattaatggg

SEQ ID NO: 275429 - DNA, 30 bp, Artificial Sequence
  Synthetic oligonucleotide
gttgattcgttgaaaaaggggtttaatggg

SEQ ID NO: 275430 - DNA, 30 bp, Artificial Sequence
  Synthetic oligonucleotide
tcttatatggtgtatttcagatgccatggg

SEQ ID NO: 275431 - DNA, 30 bp, Artificial Sequence
  Synthetic oligonucleotide
taaggagggagttttgggaaaaagcatggg

SEQ ID NO: 275432 - DNA, 30 bp, Artificial Sequence
  Synthetic oligonucleotide
acagacaacttctgtgtattcattcatggg

SEQ ID NO: 275433 - DNA, 30 bp, Artificial Sequence
  Synthetic oligonucleotide
tagcaagtagatgcgaagtgcgtagatggg

SEQ ID NO: 275434 - DNA, 30 bp, Artificial Sequence
  Synthetic oligonucleotide
agttcggacggaggacaacataacgatggg

SEQ ID NO: 275435 - DNA, 30 bp, Artificial Sequence
  Synthetic oligonucleotide
tgcctgtcggtcgtccatggggccgatggg

SEQ ID NO: 275436 - DNA, 30 bp, Artificial Sequence
  Synthetic oligonucleotide
catttgaaaactgaccgcccgagcgatggg

SEQ ID NO: 275437 - DNA, 30 bp, Artificial Sequence
  Synthetic oligonucleotide
tgggcagcttgatatggtactatcgatggg

SEQ ID NO: 275438 - DNA, 30 bp, Artificial Sequence
  Synthetic oligonucleotide
cgaatggttctgcctcaaggctgggatggg

SEQ ID NO: 275439 - DNA, 29 bp, Artificial Sequence
  Synthetic oligonucleotide
cttaaggaagtctccaggagatggatggg

SEQ ID NO: 275440 - DNA, 30 bp, Artificial Sequence
  Synthetic oligonucleotide
aaatccatagaggagctaaattctgatggg

SEQ ID NO: 275441 - DNA, 30 bp, Artificial Sequence
  Synthetic oligonucleotide
ggcaaagaagtttcttaatgtgttgatggg

SEQ ID NO: 275442 - DNA, 30 bp, Artificial Sequence
  Synthetic oligonucleotide
taatttggcgcccatcgctgtcaatatggg

SEQ ID NO: 275443 - DNA, 30 bp, Artificial Sequence
  Synthetic oligonucleotide
gccagttgagtattctcaagtatatatggg

SEQ ID NO: 275444 - DNA, 30 bp, Artificial Sequence
  Synthetic oligonucleotide
gactgagtccctcaagcgcggttatatggg

SEQ ID NO: 275445 - DNA, 30 bp, Artificial Sequence
  Synthetic oligonucleotide
gccactcgcggtcttttgaaatactatggg

SEQ ID NO: 275446 - DNA, 30 bp, Artificial Sequence
  Synthetic oligonucleotide
agaacgtttcactgtaggcccagctatggg

SEQ ID NO: 275447 - DNA, 30 bp, Artificial Sequence
  Synthetic oligonucleotide
aagttttccgcactgcgatatgggtatggg

SEQ ID NO: 275448 - DNA, 30 bp, Artificial Sequence
  Synthetic oligonucleotide
gttaagacgccaagaaaaatacagactggg

SEQ ID NO: 275449 - DNA, 30 bp, Artificial Sequence
  Synthetic oligonucleotide
gggcgatagatagcgggcgtaatgactggg

SEQ ID NO: 275450 - DNA, 30 bp, Artificial Sequence
  Synthetic oligonucleotide
cagactaatctgttagggtatggtactggg

SEQ ID NO: 275451 - DNA, 30 bp, Artificial Sequence
  Synthetic oligonucleotide
gggcgagtaccagtcggtggagtccctggg

SEQ ID NO: 275452 - DNA, 30 bp, Artificial Sequence
  Synthetic oligonucleotide
catggaataaaaacccgcagagagcctggg

SEQ ID NO: 275453 - DNA, 30 bp, Artificial Sequence
  Synthetic oligonucleotide
atgcccgatacctaggccgcgtcgcctggg

SEQ ID NO: 275454 - DNA, 30 bp, Artificial Sequence
  Synthetic oligonucleotide
atataacaaacgacgcggtgtgggcctggg

SEQ ID NO: 275455 - DNA, 30 bp, Artificial Sequence
  Synthetic oligonucleotide
tatgttccgcgacagcgtgtacgtcctggg

SEQ ID NO: 275456 - DNA, 30 bp, Artificial Sequence
  Synthetic oligonucleotide
atggagtaaacatttgatccgtgtcctggg

SEQ ID NO: 275457 - DNA, 30 bp, Artificial Sequence
  Synthetic oligonucleotide
atacgaagactggcattgtgataagctggg

SEQ ID NO: 275458 - DNA, 30 bp, Artificial Sequence
  Synthetic oligonucleotide
tgtttgaggatccacgtattacgggctggg

SEQ ID NO: 275459 - DNA, 30 bp, Artificial Sequence
  Synthetic oligonucleotide
cgcccagtcattacagattcagatgctggg

SEQ ID NO: 275460 - DNA, 30 bp, Artificial Sequence
  Synthetic oligonucleotide
cggggagtggcggctaaagaattatctggg

SEQ ID NO: 275461 - DNA, 30 bp, Artificial Sequence
  Synthetic oligonucleotide
cttaaccgcagatgtattttatgttctggg

SEQ ID NO: 275462 - DNA, 30 bp, Artificial Sequence
  Synthetic oligonucleotide
gctttcggaaaacagaccgagtgttctggg

SEQ ID NO: 275463 - DNA, 30 bp, Artificial Sequence
  Synthetic oligonucleotide
gcaatagatagcaattaccgctcaagtggg

SEQ ID NO: 275464 - DNA, 30 bp, Artificial Sequence
  Synthetic oligonucleotide
cttgcgcttagaatgggggacatcagtggg

SEQ ID NO: 275465 - DNA, 30 bp, Artificial Sequence
  Synthetic oligonucleotide
gacggtaatcagtgggatcgtgggagtggg

SEQ ID NO: 275466 - DNA, 30 bp, Artificial Sequence
  Synthetic oligonucleotide
acacaatggcagggctggacatcccgtggg

SEQ ID NO: 275467 - DNA, 30 bp, Artificial Sequence
  Synthetic oligonucleotide
tgggcatcagcccttcctttgaagcgtggg

SEQ ID NO: 275468 - DNA, 30 bp, Artificial Sequence
  Synthetic oligonucleotide
cgcatcagcatttatcttagtatgcgtggg

SEQ ID NO: 275469 - DNA, 30 bp, Artificial Sequence
  Synthetic oligonucleotide
ttccgggccgtaccgcgctcaactcgtggg

SEQ ID NO: 275470 - DNA, 30 bp, Artificial Sequence
  Synthetic oligonucleotide
aacgaatcggtatcttccaacccaggtggg

SEQ ID NO: 275471 - DNA, 30 bp, Artificial Sequence
  Synthetic oligonucleotide
cttttgaggcaagaataaaaatgaggtggg

SEQ ID NO: 275472 - DNA, 30 bp, Artificial Sequence
  Synthetic oligonucleotide
aagaactgatatcgaagacgtctaggtggg

SEQ ID NO: 275473 - DNA, 30 bp, Artificial Sequence
  Synthetic oligonucleotide
agctttgttcggcaatataaaatcggtggg

SEQ ID NO: 275474 - DNA, 30 bp, Artificial Sequence
  Synthetic oligonucleotide
atacaaatagctgatgggtgggtcggtggg

SEQ ID NO: 275475 - DNA, 30 bp, Artificial Sequence
  Synthetic oligonucleotide
gatcgctgggattgcgaccacgcgggtggg

SEQ ID NO: 275476 - DNA, 30 bp, Artificial Sequence
  Synthetic oligonucleotide
ctgagaatgctcagggaggttaatggtggg

SEQ ID NO: 275477 - DNA, 29 bp, Artificial Sequence
  Synthetic oligonucleotide
gcgaggggaggtgatgcggatatggtggg

SEQ ID NO: 275478 - DNA, 30 bp, Artificial Sequence
  Synthetic oligonucleotide
ggttgaattgccacgcgttgttgtggtggg

SEQ ID NO: 275479 - DNA, 30 bp, Artificial Sequence
  Synthetic oligonucleotide
gtgacctgcgctgattaattgaaatgtggg

SEQ ID NO: 275480 - DNA, 30 bp, Artificial Sequence
  Synthetic oligonucleotide
tagagtaatcttgtgggcgaatactgtggg

SEQ ID NO: 275481 - DNA, 30 bp, Artificial Sequence
  Synthetic oligonucleotide
gattcaaataccttaatcatcctgtgtggg

SEQ ID NO: 275482 - DNA, 30 bp, Artificial Sequence
  Synthetic oligonucleotide
agggcgtaatctctaataagagcttgtggg

SEQ ID NO: 275483 - DNA, 30 bp, Artificial Sequence
  Synthetic oligonucleotide
gaatttcaggagctgttcgttcaaattggg

SEQ ID NO: 275484 - DNA, 30 bp, Artificial Sequence
  Synthetic oligonucleotide
taagacgctagaacgtcgagcataattggg

SEQ ID NO: 275485 - DNA, 30 bp, Artificial Sequence
  Synthetic oligonucleotide
gcaggaacaaaccgtcttttgcctattggg

SEQ ID NO: 275486 - DNA, 30 bp, Artificial Sequence
  Synthetic oligonucleotide
tgcaacgggattactaagaaacgtattggg

SEQ ID NO: 275487 - DNA, 30 bp, Artificial Sequence
  Synthetic oligonucleotide
gcggtcacctgctatatacgtgcgcttggg

SEQ ID NO: 275488 - DNA, 30 bp, Artificial Sequence
  Synthetic oligonucleotide
gcaggatacggtctagtgccgactcttggg

SEQ ID NO: 275489 - DNA, 30 bp, Artificial Sequence
  Synthetic oligonucleotide
tattcggctgggaaccatcagagggttggg

SEQ ID NO: 275490 - DNA, 30 bp, Artificial Sequence
  Synthetic oligonucleotide
atccgtactcacgcaacctatagggttggg

SEQ ID NO: 275491 - DNA, 30 bp, Artificial Sequence
  Synthetic oligonucleotide
ccttggattcattttggtagagatgttggg

SEQ ID NO: 275492 - DNA, 30 bp, Artificial Sequence
  Synthetic oligonucleotide
actgtgcgccggtgagacagccctgttggg

SEQ ID NO: 275493 - DNA, 30 bp, Artificial Sequence
  Synthetic oligonucleotide
gttgtggcctgcacgaacttatctgttggg

SEQ ID NO: 275494 - DNA, 30 bp, Artificial Sequence
  Synthetic oligonucleotide
tgtgtggcaactggataaggttgtgttggg

SEQ ID NO: 275495 - DNA, 30 bp, Artificial Sequence
  Synthetic oligonucleotide
ataacatcacagtaatgtgacctctttggg

SEQ ID NO: 275496 - DNA, 30 bp, Artificial Sequence
  Synthetic oligonucleotide
atcgcattggatacaaggacccagtttggg

SEQ ID NO: 275497 - DNA, 30 bp, Artificial Sequence
  Synthetic oligonucleotide
tcgctgccatagcaaaaggctgcgtttggg

SEQ ID NO: 275498 - DNA, 30 bp, Artificial Sequence
  Synthetic oligonucleotide
ccctacgtgtggcaaatagaagattttggg

SEQ ID NO: 275499 - DNA, 30 bp, Artificial Sequence
  Synthetic oligonucleotide
gtccgaacattacgaatactacgtaaatgg

SEQ ID NO: 275500 - DNA, 30 bp, Artificial Sequence
  Synthetic oligonucleotide
gaagttacggcttcaccggatgcacaatgg

SEQ ID NO: 275501 - DNA, 30 bp, Artificial Sequence
  Synthetic oligonucleotide
aagcgtcttcaagccgagtgtggacaatgg

SEQ ID NO: 275502 - DNA, 30 bp, Artificial Sequence
  Synthetic oligonucleotide
gtgaaggggcaatcttgatatccccaatgg

SEQ ID NO: 275503 - DNA, 30 bp, Artificial Sequence
  Synthetic oligonucleotide
tactacttcgtagtacttgggtagcaatgg

SEQ ID NO: 275504 - DNA, 30 bp, Artificial Sequence
  Synthetic oligonucleotide
atttgtgtacgttgttatgagatgcaatgg

SEQ ID NO: 275505 - DNA, 30 bp, Artificial Sequence
  Synthetic oligonucleotide
agcacacttagccctagcctattgcaatgg

SEQ ID NO: 275506 - DNA, 30 bp, Artificial Sequence
  Synthetic oligonucleotide
ttgcgtggaggcatctggaacttgcaatgg

SEQ ID NO: 275507 - DNA, 30 bp, Artificial Sequence
  Synthetic oligonucleotide
agtcaggacgcgccagtgtacggtcaatgg

SEQ ID NO: 275508 - DNA, 30 bp, Artificial Sequence
  Synthetic oligonucleotide
tgtttcaatacacacttagattaagaatgg

SEQ ID NO: 275509 - DNA, 30 bp, Artificial Sequence
  Synthetic oligonucleotide
gcgttcgtgtcacggtgaatttgcgaatgg

SEQ ID NO: 275510 - DNA, 30 bp, Artificial Sequence
  Synthetic oligonucleotide
cccccactgaaggggaaggtatcggaatgg

SEQ ID NO: 275511 - DNA, 30 bp, Artificial Sequence
  Synthetic oligonucleotide
tttaccccggatggttgcttaaatgaatgg

SEQ ID NO: 275512 - DNA, 30 bp, Artificial Sequence
  Synthetic oligonucleotide
gcgtaatggttaagaaattaacgtgaatgg

SEQ ID NO: 275513 - DNA, 30 bp, Artificial Sequence
  Synthetic oligonucleotide
acacggtttaaaaaacggccgggataatgg

SEQ ID NO: 275514 - DNA, 30 bp, Artificial Sequence
  Synthetic oligonucleotide
ggcacatcagagcggatttggttataatgg

SEQ ID NO: 275515 - DNA, 30 bp, Artificial Sequence
  Synthetic oligonucleotide
cataaaatcaaccatcctacgaactaatgg

SEQ ID NO: 275516 - DNA, 30 bp, Artificial Sequence
  Synthetic oligonucleotide
cacggggtaccccaccaaattgactaatgg

SEQ ID NO: 275517 - DNA, 30 bp, Artificial Sequence
  Synthetic oligonucleotide
tgggaggtgggtcgtccccgttgctaatgg

SEQ ID NO: 275518 - DNA, 30 bp, Artificial Sequence
  Synthetic oligonucleotide
gtacgagcccccgatatatgtttctaatgg

SEQ ID NO: 275519 - DNA, 30 bp, Artificial Sequence
  Synthetic oligonucleotide
gcattaacacgcctgccctgtgcgtaatgg

SEQ ID NO: 275520 - DNA, 30 bp, Artificial Sequence
  Synthetic oligonucleotide
tacatgagtctctgatgaccatggtaatgg

SEQ ID NO: 275521 - DNA, 30 bp, Artificial Sequence
  Synthetic oligonucleotide
ataggccaaggtctagggcccacaacatgg

SEQ ID NO: 275522 - DNA, 30 bp, Artificial Sequence
  Synthetic oligonucleotide
gcatatacctctaacggcgtgtcaacatgg

SEQ ID NO: 275523 - DNA, 30 bp, Artificial Sequence
  Synthetic oligonucleotide
agatgcggtgttacagtggcgggaacatgg

SEQ ID NO: 275524 - DNA, 30 bp, Artificial Sequence
  Synthetic oligonucleotide
atacgcctctcggttagaggaataacatgg

SEQ ID NO: 275525 - DNA, 30 bp, Artificial Sequence
  Synthetic oligonucleotide
cggcttagacggttgggggcgtacacatgg

SEQ ID NO: 275526 - DNA, 30 bp, Artificial Sequence
  Synthetic oligonucleotide
tccaattgatgcaagaggtggctcacatgg

SEQ ID NO: 275527 - DNA, 30 bp, Artificial Sequence
  Synthetic oligonucleotide
agccttcgtgtaccgcactggttcacatgg

SEQ ID NO: 275528 - DNA, 30 bp, Artificial Sequence
  Synthetic oligonucleotide
atatagggcgccgaaagcccagggacatgg

SEQ ID NO: 275529 - DNA, 30 bp, Artificial Sequence
  Synthetic oligonucleotide
gaggtttctgatcgtgcaagtaatacatgg

SEQ ID NO: 275530 - DNA, 30 bp, Artificial Sequence
  Synthetic oligonucleotide
gtccggcctgaacaggcgtgtagtacatgg

SEQ ID NO: 275531 - DNA, 30 bp, Artificial Sequence
  Synthetic oligonucleotide
agccatggaggctaaaagtgaccaccatgg

SEQ ID NO: 275532 - DNA, 30 bp, Artificial Sequence
  Synthetic oligonucleotide
cttctagtggcgtaatttccacagccatgg

SEQ ID NO: 275533 - DNA, 30 bp, Artificial Sequence
  Synthetic oligonucleotide
ttgcgtattgacgtcattggacgtccatgg

SEQ ID NO: 275534 - DNA, 30 bp, Artificial Sequence
  Synthetic oligonucleotide
attcgcgcgatatactgttggtgtccatgg

SEQ ID NO: 275535 - DNA, 30 bp, Artificial Sequence
  Synthetic oligonucleotide
tttactcggcaaccacgcttgcccgcatgg

SEQ ID NO: 275536 - DNA, 30 bp, Artificial Sequence
  Synthetic oligonucleotide
tatgttcgaacggagtacagtctggcatgg

SEQ ID NO: 275537 - DNA, 30 bp, Artificial Sequence
  Synthetic oligonucleotide
tcaagagattaattgcagccctgtgcatgg

SEQ ID NO: 275538 - DNA, 30 bp, Artificial Sequence
  Synthetic oligonucleotide
aggcggagagtcggaatttttattgcatgg

SEQ ID NO: 275539 - DNA, 30 bp, Artificial Sequence
  Synthetic oligonucleotide
atcaggtcctaaggtcatggacactcatgg

SEQ ID NO: 275540 - DNA, 30 bp, Artificial Sequence
  Synthetic oligonucleotide
gagatataattcctcgcctgtcactcatgg

SEQ ID NO: 275541 - DNA, 30 bp, Artificial Sequence
  Synthetic oligonucleotide
ggtcgatggtaggtactgacggcctcatgg

SEQ ID NO: 275542 - DNA, 30 bp, Artificial Sequence
  Synthetic oligonucleotide
taagctggctatttccccagcctctcatgg

SEQ ID NO: 275543 - DNA, 30 bp, Artificial Sequence
  Synthetic oligonucleotide
ggggtaatggtgtggtatttgtagtcatgg

SEQ ID NO: 275544 - DNA, 30 bp, Artificial Sequence
  Synthetic oligonucleotide
ctccagttcgatttgggatcattgtcatgg

SEQ ID NO: 275545 - DNA, 30 bp, Artificial Sequence
  Synthetic oligonucleotide
cacgagtctctcgggctaggcgtttcatgg

SEQ ID NO: 275546 - DNA, 30 bp, Artificial Sequence
  Synthetic oligonucleotide
ttccaatcggcccttcttagagccagatgg

SEQ ID NO: 275547 - DNA, 30 bp, Artificial Sequence
  Synthetic oligonucleotide
ggtgcggtacggggcgcaaaggccagatgg

SEQ ID NO: 275548 - DNA, 30 bp, Artificial Sequence
  Synthetic oligonucleotide
tacagctcaccgtgctaaaatccgagatgg

SEQ ID NO: 275549 - DNA, 30 bp, Artificial Sequence
  Synthetic oligonucleotide
tttcccattactcgcgtaactatgagatgg

SEQ ID NO: 275550 - DNA, 30 bp, Artificial Sequence
  Synthetic oligonucleotide
agcgactagccttacttgcgtaatagatgg

SEQ ID NO: 275551 - DNA, 30 bp, Artificial Sequence
  Synthetic oligonucleotide
tagtcacgttattagctggacggacgatgg

SEQ ID NO: 275552 - DNA, 30 bp, Artificial Sequence
  Synthetic oligonucleotide
ggatagcgtcttggtgcggctggccgatgg

SEQ ID NO: 275553 - DNA, 30 bp, Artificial Sequence
  Synthetic oligonucleotide
acacctcggtaaatgtatactacgcgatgg

SEQ ID NO: 275554 - DNA, 30 bp, Artificial Sequence
  Synthetic oligonucleotide
gccctagaagccgggccctgagctcgatgg

SEQ ID NO: 275555 - DNA, 30 bp, Artificial Sequence
  Synthetic oligonucleotide
cacggatttattgaccgcctgcttcgatgg

SEQ ID NO: 275556 - DNA, 30 bp, Artificial Sequence
  Synthetic oligonucleotide
tactagcagcagtgtagtatttaaggatgg

SEQ ID NO: 275557 - DNA, 30 bp, Artificial Sequence
  Synthetic oligonucleotide
cctatttatggtgacgtgtacccaggatgg

SEQ ID NO: 275558 - DNA, 30 bp, Artificial Sequence
  Synthetic oligonucleotide
acattggcgttctcaaaaacacgaggatgg

SEQ ID NO: 275559 - DNA, 30 bp, Artificial Sequence
  Synthetic oligonucleotide
attgctcaggcaatttcctgcgtcggatgg

SEQ ID NO: 275560 - DNA, 30 bp, Artificial Sequence
  Synthetic oligonucleotide
gtcaccagaagagtgcccggtacgggatgg

SEQ ID NO: 275561 - DNA, 30 bp, Artificial Sequence
  Synthetic oligonucleotide
taaccctcggagtgcctcaacgcatgatgg

SEQ ID NO: 275562 - DNA, 30 bp, Artificial Sequence
  Synthetic oligonucleotide
acgctaaattcccaagttaggacctgatgg

SEQ ID NO: 275563 - DNA, 30 bp, Artificial Sequence
  Synthetic oligonucleotide
acattggctttagtgacccatttctgatgg

SEQ ID NO: 275564 - DNA, 30 bp, Artificial Sequence
  Synthetic oligonucleotide
aagtccgaataccgcatctacaagtgatgg

SEQ ID NO: 275565 - DNA, 30 bp, Artificial Sequence
  Synthetic oligonucleotide
gactgcgcctattcctggacgtcttgatgg

SEQ ID NO: 275566 - DNA, 30 bp, Artificial Sequence
  Synthetic oligonucleotide
aaccagcggtacctccggtcttgttgatgg

SEQ ID NO: 275567 - DNA, 30 bp, Artificial Sequence
  Synthetic oligonucleotide
caactctactactcaactggaacaatatgg

SEQ ID NO: 275568 - DNA, 30 bp, Artificial Sequence
  Synthetic oligonucleotide
tggaggtggaagaaggcggggtgaatatgg

SEQ ID NO: 275569 - DNA, 30 bp, Artificial Sequence
  Synthetic oligonucleotide
tgaagctgggggcagacattattaatatgg

SEQ ID NO: 275570 - DNA, 30 bp, Artificial Sequence
  Synthetic oligonucleotide
cgcatgacccctgtagccataatcatatgg

SEQ ID NO: 275571 - DNA, 30 bp, Artificial Sequence
  Synthetic oligonucleotide
gatgaactgagtccgggaccgatcatatgg

SEQ ID NO: 275572 - DNA, 30 bp, Artificial Sequence
  Synthetic oligonucleotide
gattaaaagggggagtttaaaggactatgg

SEQ ID NO: 275573 - DNA, 30 bp, Artificial Sequence
  Synthetic oligonucleotide
tagtcacacgggaaccaccccggactatgg

SEQ ID NO: 275574 - DNA, 30 bp, Artificial Sequence
  Synthetic oligonucleotide
ataccttcgtgactcggcttttacctatgg

SEQ ID NO: 275575 - DNA, 30 bp, Artificial Sequence
  Synthetic oligonucleotide
cggggatttggcctatggatcgccctatgg

SEQ ID NO: 275576 - DNA, 30 bp, Artificial Sequence
  Synthetic oligonucleotide
cctagtaaactggatcgcatattcctatgg

SEQ ID NO: 275577 - DNA, 30 bp, Artificial Sequence
  Synthetic oligonucleotide
ctctctagcgttattctggcctcgctatgg

SEQ ID NO: 275578 - DNA, 30 bp, Artificial Sequence
  Synthetic oligonucleotide
gggtgcttaagtgaacatacagggctatgg

SEQ ID NO: 275579 - DNA, 30 bp, Artificial Sequence
  Synthetic oligonucleotide
cacgtaagtttgcccttgaaaatgctatgg

SEQ ID NO: 275580 - DNA, 30 bp, Artificial Sequence
  Synthetic oligonucleotide
agcagcggtcatacctgggggagtctatgg

SEQ ID NO: 275581 - DNA, 30 bp, Artificial Sequence
  Synthetic oligonucleotide
aagatccgcgttttcgaattaagagtatgg

SEQ ID NO: 275582 - DNA, 30 bp, Artificial Sequence
  Synthetic oligonucleotide
agtcgctctttcagactgacacgagtatgg

SEQ ID NO: 275583 - DNA, 30 bp, Artificial Sequence
  Synthetic oligonucleotide
aggatgacagccagcacggggatagtatgg

SEQ ID NO: 275584 - DNA, 30 bp, Artificial Sequence
  Synthetic oligonucleotide
gaaaccgggggggactcataaatcgtatgg

SEQ ID NO: 275585 - DNA, 30 bp, Artificial Sequence
  Synthetic oligonucleotide
tttcgttggtattttcgagggatcgtatgg

SEQ ID NO: 275586 - DNA, 30 bp, Artificial Sequence
  Synthetic oligonucleotide
tacaggtccatagcgaggcacatggtatgg

SEQ ID NO: 275587 - DNA, 30 bp, Artificial Sequence
  Synthetic oligonucleotide
agtctctctgctagttaggaagtggtatgg

SEQ ID NO: 275588 - DNA, 30 bp, Artificial Sequence
  Synthetic oligonucleotide
aacctgtttggtagatgagtggtggtatgg

SEQ ID NO: 275589 - DNA, 30 bp, Artificial Sequence
  Synthetic oligonucleotide
gacgtttggtgggtctggtaccatgtatgg

SEQ ID NO: 275590 - DNA, 30 bp, Artificial Sequence
  Synthetic oligonucleotide
tcataacatgctctggatcgtcatgtatgg

SEQ ID NO: 275591 - DNA, 31 bp, Artificial Sequence
  Synthetic oligonucleotide
gagtcaagctgatgggactgacagtgtatgg

SEQ ID NO: 275592 - DNA, 30 bp, Artificial Sequence
  Synthetic oligonucleotide
acgcggccacgcatcgagcagattgtatgg

SEQ ID NO: 275593 - DNA, 30 bp, Artificial Sequence
  Synthetic oligonucleotide
gcattctgggaagatgtagtgtttgtatgg

SEQ ID NO: 275594 - DNA, 30 bp, Artificial Sequence
  Synthetic oligonucleotide
gtctagaggtgatgggggtgcacattatgg

SEQ ID NO: 275595 - DNA, 30 bp, Artificial Sequence
  Synthetic oligonucleotide
gcatccgcctgttctatgggaccattatgg

SEQ ID NO: 275596 - DNA, 30 bp, Artificial Sequence
  Synthetic oligonucleotide
ccaaaagcgaacgcgggcttcatcttatgg

SEQ ID NO: 275597 - DNA, 30 bp, Artificial Sequence
  Synthetic oligonucleotide
gtgaccaacgaactctttcttccgttatgg

SEQ ID NO: 275598 - DNA, 30 bp, Artificial Sequence
  Synthetic oligonucleotide
gttgatgcaacagagatgtatcatttatgg

SEQ ID NO: 275599 - DNA, 30 bp, Artificial Sequence
  Synthetic oligonucleotide
gaagcccctgcgagtacaaaaagtttatgg

SEQ ID NO: 275600 - DNA, 30 bp, Artificial Sequence
  Synthetic oligonucleotide
tttcagacagattaacccgacagtttatgg

SEQ ID NO: 275601 - DNA, 30 bp, Artificial Sequence
  Synthetic oligonucleotide
atatcgccggaacagagtttatttttatgg

SEQ ID NO: 275602 - DNA, 30 bp, Artificial Sequence
  Synthetic oligonucleotide
aaaagaagccgatcgtgctactttttatgg

SEQ ID NO: 275603 - DNA, 30 bp, Artificial Sequence
  Synthetic oligonucleotide
caattttagcggtatacatatgaaaactgg

SEQ ID NO: 275604 - DNA, 30 bp, Artificial Sequence
  Synthetic oligonucleotide
cgtaaggggatgttgaatatccgaaactgg

SEQ ID NO: 275605 - DNA, 30 bp, Artificial Sequence
  Synthetic oligonucleotide
ccagggtgacttatattagcggtaaactgg

SEQ ID NO: 275606 - DNA, 30 bp, Artificial Sequence
  Synthetic oligonucleotide
gggagtcacggtgaggccactaacaactgg

SEQ ID NO: 275607 - DNA, 30 bp, Artificial Sequence
  Synthetic oligonucleotide
acgcctacaatgtctcatggtacacactgg

SEQ ID NO: 275608 - DNA, 30 bp, Artificial Sequence
  Synthetic oligonucleotide
gacgggcaacactagaaattacgacactgg

SEQ ID NO: 275609 - DNA, 30 bp, Artificial Sequence
  Synthetic oligonucleotide
ggcttaccccccggcgtctacttacactgg

SEQ ID NO: 275610 - DNA, 30 bp, Artificial Sequence
  Synthetic oligonucleotide
tagtggcggaaacggagtaccatccactgg

SEQ ID NO: 275611 - DNA, 29 bp, Artificial Sequence
  Synthetic oligonucleotide
aatcgttctacggggaactggaagactgg

SEQ ID NO: 275612 - DNA, 30 bp, Artificial Sequence
  Synthetic oligonucleotide
tgtgaggggtcacgtaatcttatagactgg

SEQ ID NO: 275613 - DNA, 30 bp, Artificial Sequence
  Synthetic oligonucleotide
tgtcgtaacctcttttgttcttacgactgg

SEQ ID NO: 275614 - DNA, 30 bp, Artificial Sequence
  Synthetic oligonucleotide
aaccttatctagtggagcggatgcgactgg

SEQ ID NO: 275615 - DNA, 30 bp, Artificial Sequence
  Synthetic oligonucleotide
cttctggtacattagaatcagctcgactgg

SEQ ID NO: 275616 - DNA, 30 bp, Artificial Sequence
  Synthetic oligonucleotide
gcttcgttgacagtatgtctattcgactgg

SEQ ID NO: 275617 - DNA, 30 bp, Artificial Sequence
  Synthetic oligonucleotide
ttggctccgtgctattcattctcggactgg

SEQ ID NO: 275618 - DNA, 30 bp, Artificial Sequence
  Synthetic oligonucleotide
gaaatgaaggcgcggggatgtttaacctgg

SEQ ID NO: 275619 - DNA, 30 bp, Artificial Sequence
  Synthetic oligonucleotide
aataaggcacgaccttttatatagacctgg

SEQ ID NO: 275620 - DNA, 30 bp, Artificial Sequence
  Synthetic oligonucleotide
gtatataaagccattacgtatatgacctgg

SEQ ID NO: 275621 - DNA, 31 bp, Artificial Sequence
  Synthetic oligonucleotide
agtctataggaaccaacaagccgaaccctgg

SEQ ID NO: 275622 - DNA, 30 bp, Artificial Sequence
  Synthetic oligonucleotide
tcgaggcacggtgaacttatgtcaccctgg

SEQ ID NO: 275623 - DNA, 30 bp, Artificial Sequence
  Synthetic oligonucleotide
cgggcctagggccagagaaacgccccctgg

SEQ ID NO: 275624 - DNA, 30 bp, Artificial Sequence
  Synthetic oligonucleotide
gtcccagtttaggtgtgccctacgccctgg

SEQ ID NO: 275625 - DNA, 30 bp, Artificial Sequence
  Synthetic oligonucleotide
cagtggcatggaggtcagccttcagcctgg

SEQ ID NO: 275626 - DNA, 30 bp, Artificial Sequence
  Synthetic oligonucleotide
cctcaagttagcacctcctaacgcgcctgg

SEQ ID NO: 275627 - DNA, 30 bp, Artificial Sequence
  Synthetic oligonucleotide
acaagatcgtagatatttgccatcgcctgg

SEQ ID NO: 275628 - DNA, 30 bp, Artificial Sequence
  Synthetic oligonucleotide
caggaccggtcagcctgaagccaggcctgg

SEQ ID NO: 275629 - DNA, 30 bp, Artificial Sequence
  Synthetic oligonucleotide
atactcgggagttggtcacgctaggcctgg

SEQ ID NO: 275630 - DNA, 30 bp, Artificial Sequence
  Synthetic oligonucleotide
tagaatggcttctttagagagcgggcctgg

SEQ ID NO: 275631 - DNA, 30 bp, Artificial Sequence
  Synthetic oligonucleotide
acacgggccttccttaaaactgtggcctgg

SEQ ID NO: 275632 - DNA, 30 bp, Artificial Sequence
  Synthetic oligonucleotide
agaagtcgcctggctcgaatcccatcctgg

SEQ ID NO: 275633 - DNA, 30 bp, Artificial Sequence
  Synthetic oligonucleotide
gagtaaagcgcgatgagtctttgatcctgg

SEQ ID NO: 275634 - DNA, 30 bp, Artificial Sequence
  Synthetic oligonucleotide
gggggttagaacacaccagaactctcctgg

SEQ ID NO: 275635 - DNA, 30 bp, Artificial Sequence
  Synthetic oligonucleotide
catgatagctgggcgcaatatttgtcctgg

SEQ ID NO: 275636 - DNA, 30 bp, Artificial Sequence
  Synthetic oligonucleotide
atctagtttgaatttccaacgaaaagctgg

SEQ ID NO: 275637 - DNA, 30 bp, Artificial Sequence
  Synthetic oligonucleotide
gaatgaggatgttcaacaggagaaagctgg

SEQ ID NO: 275638 - DNA, 30 bp, Artificial Sequence
  Synthetic oligonucleotide
ataaccgaattcacggaggacaagagctgg

SEQ ID NO: 275639 - DNA, 30 bp, Artificial Sequence
  Synthetic oligonucleotide
gaaaatttgcagaaagcaaaaaatagctgg

SEQ ID NO: 275640 - DNA, 30 bp, Artificial Sequence
  Synthetic oligonucleotide
aggttacgttggggtaagtgcgcacgctgg

SEQ ID NO: 275641 - DNA, 30 bp, Artificial Sequence
  Synthetic oligonucleotide
cggacgctcagagggtagctattccgctgg

SEQ ID NO: 275642 - DNA, 30 bp, Artificial Sequence
  Synthetic oligonucleotide
actgggatgacagtaggggattcaggctgg

SEQ ID NO: 275643 - DNA, 30 bp, Artificial Sequence
  Synthetic oligonucleotide
gctaccgaagtactcgttctagacggctgg

SEQ ID NO: 275644 - DNA, 30 bp, Artificial Sequence
  Synthetic oligonucleotide
agttcctagcagtgagcgctagagggctgg

SEQ ID NO: 275645 - DNA, 30 bp, Artificial Sequence
  Synthetic oligonucleotide
tcacggttggccacatgcgtatctggctgg

SEQ ID NO: 275646 - DNA, 30 bp, Artificial Sequence
  Synthetic oligonucleotide
tcgtgggtccacgatcccagaccatgctgg

SEQ ID NO: 275647 - DNA, 31 bp, Artificial Sequence
  Synthetic oligonucleotide
atgctggcaatatatgttaatgatatgctgg

SEQ ID NO: 275648 - DNA, 30 bp, Artificial Sequence
  Synthetic oligonucleotide
atgcagtgtcattgtggcgtgacgtgctgg

SEQ ID NO: 275649 - DNA, 30 bp, Artificial Sequence
  Synthetic oligonucleotide
tcagagggtgggagaacacggctgtgctgg

SEQ ID NO: 275650 - DNA, 30 bp, Artificial Sequence
  Synthetic oligonucleotide
gtgcagggcgactgtccgagggtttgctgg

SEQ ID NO: 275651 - DNA, 30 bp, Artificial Sequence
  Synthetic oligonucleotide
catatcccccggagccttacttgaatctgg

SEQ ID NO: 275652 - DNA, 30 bp, Artificial Sequence
  Synthetic oligonucleotide
aatctagtgtgagcagagtagcagatctgg

SEQ ID NO: 275653 - DNA, 30 bp, Artificial Sequence
  Synthetic oligonucleotide
gtcttgcctgtggatacgaatcagatctgg

SEQ ID NO: 275654 - DNA, 30 bp, Artificial Sequence
  Synthetic oligonucleotide
accgcgccgacattcgatccgatggtctgg

SEQ ID NO: 275655 - DNA, 30 bp, Artificial Sequence
  Synthetic oligonucleotide
aacactttagagtcagggggtatattctgg

SEQ ID NO: 275656 - DNA, 30 bp, Artificial Sequence
  Synthetic oligonucleotide
cggtgagcgcagtgcgtaatagtattctgg

SEQ ID NO: 275657 - DNA, 30 bp, Artificial Sequence
  Synthetic oligonucleotide
accggcaaggcgctagctttattattctgg

SEQ ID NO: 275658 - DNA, 30 bp, Artificial Sequence
  Synthetic oligonucleotide
acatgtaaacaatactacagcaacttctgg

SEQ ID NO: 275659 - DNA, 30 bp, Artificial Sequence
  Synthetic oligonucleotide
cgccggcctaactttcttttaggcttctgg

SEQ ID NO: 275660 - DNA, 30 bp, Artificial Sequence
  Synthetic oligonucleotide
gggtgcgtgtgacgtaataatcggttctgg

SEQ ID NO: 275661 - DNA, 30 bp, Artificial Sequence
  Synthetic oligonucleotide
taaaaattgactagtaaagggcatttctgg

SEQ ID NO: 275662 - DNA, 30 bp, Artificial Sequence
  Synthetic oligonucleotide
cgcggtcatgattagcggaaaactttctgg

SEQ ID NO: 275663 - DNA, 30 bp, Artificial Sequence
  Synthetic oligonucleotide
tgggcctatcaccgacagtaaggcaagtgg

SEQ ID NO: 275664 - DNA, 30 bp, Artificial Sequence
  Synthetic oligonucleotide
cagctaagcatcaggttcgcttggaagtgg

SEQ ID NO: 275665 - DNA, 30 bp, Artificial Sequence
  Synthetic oligonucleotide
aaccttatccaaagcgaccactaacagtgg

SEQ ID NO: 275666 - DNA, 30 bp, Artificial Sequence
  Synthetic oligonucleotide
gccaggtccacatggccaatagcacagtgg

SEQ ID NO: 275667 - DNA, 30 bp, Artificial Sequence
  Synthetic oligonucleotide
catcagagcgcccgtttctaacgacagtgg

SEQ ID NO: 275668 - DNA, 30 bp, Artificial Sequence
  Synthetic oligonucleotide
aattatcatatcacagtattcgagcagtgg

SEQ ID NO: 275669 - DNA, 30 bp, Artificial Sequence
  Synthetic oligonucleotide
agcaggacaaagcaccagaattggcagtgg

SEQ ID NO: 275670 - DNA, 30 bp, Artificial Sequence
  Synthetic oligonucleotide
tcacagtgttgcttgtcacacccagagtgg

SEQ ID NO: 275671 - DNA, 30 bp, Artificial Sequence
  Synthetic oligonucleotide
gcgtgactgatcgatcactacggagagtgg

SEQ ID NO: 275672 - DNA, 30 bp, Artificial Sequence
  Synthetic oligonucleotide
acacaaactccgaggacttcctccgagtgg

SEQ ID NO: 275673 - DNA, 30 bp, Artificial Sequence
  Synthetic oligonucleotide
cgcatcaatctctcctatcatggggagtgg

SEQ ID NO: 275674 - DNA, 30 bp, Artificial Sequence
  Synthetic oligonucleotide
gtgcgggctcaataggaattacttgagtgg

SEQ ID NO: 275675 - DNA, 30 bp, Artificial Sequence
  Synthetic oligonucleotide
cgagttacttttggcatcgtgttatagtgg

SEQ ID NO: 275676 - DNA, 30 bp, Artificial Sequence
  Synthetic oligonucleotide
accaagcaggttgcaaagcagttctagtgg

SEQ ID NO: 275677 - DNA, 30 bp, Artificial Sequence
  Synthetic oligonucleotide
aaataaagtggaaccaacctcgtgtagtgg

SEQ ID NO: 275678 - DNA, 30 bp, Artificial Sequence
  Synthetic oligonucleotide
aggtcgaaatgggccctgattgattagtgg

SEQ ID NO: 275679 - DNA, 30 bp, Artificial Sequence
  Synthetic oligonucleotide
atagagtctgcacgtctggggtattagtgg

SEQ ID NO: 275680 - DNA, 30 bp, Artificial Sequence
  Synthetic oligonucleotide
gggcctcctatgctgtaaggcccttagtgg

SEQ ID NO: 275681 - DNA, 30 bp, Artificial Sequence
  Synthetic oligonucleotide
tgggtcttgcgtaagacgtgtgacacgtgg

SEQ ID NO: 275682 - DNA, 30 bp, Artificial Sequence
  Synthetic oligonucleotide
ttgcctaatagtgtggaagataagacgtgg

SEQ ID NO: 275683 - DNA, 30 bp, Artificial Sequence
  Synthetic oligonucleotide
tctagatttggggacaaggttcggacgtgg

SEQ ID NO: 275684 - DNA, 30 bp, Artificial Sequence
  Synthetic oligonucleotide
cgactaagactttagccgggtcgtacgtgg

SEQ ID NO: 275685 - DNA, 30 bp, Artificial Sequence
  Synthetic oligonucleotide
cgctatgaggttcttaagtattgtacgtgg

SEQ ID NO: 275686 - DNA, 30 bp, Artificial Sequence
  Synthetic oligonucleotide
tcgtaatggtcatatagagaataaccgtgg

SEQ ID NO: 275687 - DNA, 30 bp, Artificial Sequence
  Synthetic oligonucleotide
aacactacagtgtagatactactcccgtgg

SEQ ID NO: 275688 - DNA, 30 bp, Artificial Sequence
  Synthetic oligonucleotide
gtgcgcgtcaagtagtctcttcctccgtgg

SEQ ID NO: 275689 - DNA, 30 bp, Artificial Sequence
  Synthetic oligonucleotide
aatcggattatcgaatagccttacgcgtgg

SEQ ID NO: 275690 - DNA, 30 bp, Artificial Sequence
  Synthetic oligonucleotide
agggaccagttatttaaccagaaggcgtgg

SEQ ID NO: 275691 - DNA, 30 bp, Artificial Sequence
  Synthetic oligonucleotide
cggtaaggcaaagagaaaagccgggcgtgg

SEQ ID NO: 275692 - DNA, 30 bp, Artificial Sequence
  Synthetic oligonucleotide
cctcccaagagcagacgggaaggggcgtgg

SEQ ID NO: 275693 - DNA, 30 bp, Artificial Sequence
  Synthetic oligonucleotide
ctagagcgcgttgtgatgacccatgcgtgg

SEQ ID NO: 275694 - DNA, 30 bp, Artificial Sequence
  Synthetic oligonucleotide
ctacgagtgcgtttccattgaggatcgtgg

SEQ ID NO: 275695 - DNA, 30 bp, Artificial Sequence
  Synthetic oligonucleotide
ttgacgataagagctctcggtaattcgtgg

SEQ ID NO: 275696 - DNA, 30 bp, Artificial Sequence
  Synthetic oligonucleotide
aatcattgcagagtgtggtagagaaggtgg

SEQ ID NO: 275697 - DNA, 30 bp, Artificial Sequence
  Synthetic oligonucleotide
tagggatgtgaccaaggattatccaggtgg

SEQ ID NO: 275698 - DNA, 30 bp, Artificial Sequence
  Synthetic oligonucleotide
agggtcagtcaaccgcgtggacgcaggtgg

SEQ ID NO: 275699 - DNA, 30 bp, Artificial Sequence
  Synthetic oligonucleotide
gagacttgggtgtagcattggatcaggtgg

SEQ ID NO: 275700 - DNA, 30 bp, Artificial Sequence
  Synthetic oligonucleotide
acaagccaaccataaacgtctccacggtgg

SEQ ID NO: 275701 - DNA, 30 bp, Artificial Sequence
  Synthetic oligonucleotide
cttacaacctatagcccaaagatacggtgg

SEQ ID NO: 275702 - DNA, 30 bp, Artificial Sequence
  Synthetic oligonucleotide
ctgctcaggacgacatgtccgtgccggtgg

SEQ ID NO: 275703 - DNA, 30 bp, Artificial Sequence
  Synthetic oligonucleotide
atcatcctggaaccgtgaatcaatcggtgg

SEQ ID NO: 275704 - DNA, 30 bp, Artificial Sequence
  Synthetic oligonucleotide
cgcatcaagaacgatcccggtctagggtgg

SEQ ID NO: 275705 - DNA, 30 bp, Artificial Sequence
  Synthetic oligonucleotide
tgcccttaacgagtacagtatgtagggtgg

SEQ ID NO: 275706 - DNA, 30 bp, Artificial Sequence
  Synthetic oligonucleotide
catatggacggcgggatgcgccccgggtgg

SEQ ID NO: 275707 - DNA, 30 bp, Artificial Sequence
  Synthetic oligonucleotide
agaattgagaggcaacacctgagcgggtgg

SEQ ID NO: 275708 - DNA, 30 bp, Artificial Sequence
  Synthetic oligonucleotide
gcaaggtgcccctgactcgcgggggggtgg

SEQ ID NO: 275709 - DNA, 30 bp, Artificial Sequence
  Synthetic oligonucleotide
cgtagatactatgattacttatgtgggtgg

SEQ ID NO: 275710 - DNA, 30 bp, Artificial Sequence
  Synthetic oligonucleotide
acattatgcaaaagactgatataatggtgg

SEQ ID NO: 275711 - DNA, 30 bp, Artificial Sequence
  Synthetic oligonucleotide
ggactataaacacctagtgaagactggtgg

SEQ ID NO: 275712 - DNA, 30 bp, Artificial Sequence
  Synthetic oligonucleotide
taagcggaatagtcggaacaggtgtggtgg

SEQ ID NO: 275713 - DNA, 30 bp, Artificial Sequence
  Synthetic oligonucleotide
ggtatcgtagatggctatggttattggtgg

SEQ ID NO: 275714 - DNA, 30 bp, Artificial Sequence
  Synthetic oligonucleotide
tgcccttgaactgatctgccggccatgtgg

SEQ ID NO: 275715 - DNA, 30 bp, Artificial Sequence
  Synthetic oligonucleotide
cgcctatacatacccgtcgcgcgcatgtgg

SEQ ID NO: 275716 - DNA, 30 bp, Artificial Sequence
  Synthetic oligonucleotide
caggggttaccggccaacgtctgcatgtgg

SEQ ID NO: 275717 - DNA, 30 bp, Artificial Sequence
  Synthetic oligonucleotide
attcggaaatatgatttatatgggatgtgg

SEQ ID NO: 275718 - DNA, 30 bp, Artificial Sequence
  Synthetic oligonucleotide
agttgacttcacaatataagatatatgtgg

SEQ ID NO: 275719 - DNA, 30 bp, Artificial Sequence
  Synthetic oligonucleotide
cggcatccaattcacacgttccctatgtgg

SEQ ID NO: 275720 - DNA, 30 bp, Artificial Sequence
  Synthetic oligonucleotide
tcgcttactctcttggactgccgtatgtgg

SEQ ID NO: 275721 - DNA, 31 bp, Artificial Sequence
  Synthetic oligonucleotide
tgcccgcgtcaactgacgggacgttatgtgg

SEQ ID NO: 275722 - DNA, 30 bp, Artificial Sequence
  Synthetic oligonucleotide
cacctcagtgctaagtctcgcggactgtgg

SEQ ID NO: 275723 - DNA, 30 bp, Artificial Sequence
  Synthetic oligonucleotide
tcattaagtcacatgaagctgttactgtgg

SEQ ID NO: 275724 - DNA, 30 bp, Artificial Sequence
  Synthetic oligonucleotide
ccgtccaatagacgcacaattgaagtgtgg

SEQ ID NO: 275725 - DNA, 30 bp, Artificial Sequence
  Synthetic oligonucleotide
ggaaattatgcgtcatgtagggcagtgtgg

SEQ ID NO: 275726 - DNA, 30 bp, Artificial Sequence
  Synthetic oligonucleotide
acagtggacttcgttagcccacgagtgtgg

SEQ ID NO: 275727 - DNA, 30 bp, Artificial Sequence
  Synthetic oligonucleotide
ttggttgacgggagagcggtgggagtgtgg

SEQ ID NO: 275728 - DNA, 31 bp, Artificial Sequence
  Synthetic oligonucleotide
cctatcattcttaagtaaatactgagtgtgg

SEQ ID NO: 275729 - DNA, 30 bp, Artificial Sequence
  Synthetic oligonucleotide
tgacgtccaccgcgaagcctccgcgtgtgg

SEQ ID NO: 275730 - DNA, 30 bp, Artificial Sequence
  Synthetic oligonucleotide
gcgggggtcggcggtcggcgcggcgtgtgg

SEQ ID NO: 275731 - DNA, 30 bp, Artificial Sequence
  Synthetic oligonucleotide
gggaaactccagctccaaatactcgtgtgg

SEQ ID NO: 275732 - DNA, 30 bp, Artificial Sequence
  Synthetic oligonucleotide
accaaagcaaactgaagtggtttggtgtgg

SEQ ID NO: 275733 - DNA, 30 bp, Artificial Sequence
  Synthetic oligonucleotide
ccgggtacgctgtcagaggcgcctgtgtgg

SEQ ID NO: 275734 - DNA, 30 bp, Artificial Sequence
  Synthetic oligonucleotide
acagtttcggctatctgatggcgtgtgtgg

SEQ ID NO: 275735 - DNA, 30 bp, Artificial Sequence
  Synthetic oligonucleotide
gggagtccagtgttagtttgcggattgtgg

SEQ ID NO: 275736 - DNA, 30 bp, Artificial Sequence
  Synthetic oligonucleotide
attacataaattgggctgccggtattgtgg

SEQ ID NO: 275737 - DNA, 30 bp, Artificial Sequence
  Synthetic oligonucleotide
ttgattagtcagcctctaaatgtattgtgg

SEQ ID NO: 275738 - DNA, 30 bp, Artificial Sequence
  Synthetic oligonucleotide
attgcaacattttaacttcatttattgtgg

SEQ ID NO: 275739 - DNA, 30 bp, Artificial Sequence
  Synthetic oligonucleotide
agacctcatggctattgaaggcacttgtgg

SEQ ID NO: 275740 - DNA, 30 bp, Artificial Sequence
  Synthetic oligonucleotide
tgaattgtgataaggggtctatacttgtgg

SEQ ID NO: 275741 - DNA, 30 bp, Artificial Sequence
  Synthetic oligonucleotide
acggcggacgctcctccatgttagttgtgg

SEQ ID NO: 275742 - DNA, 30 bp, Artificial Sequence
  Synthetic oligonucleotide
ttttaggatacatggacgggactgttgtgg

SEQ ID NO: 275743 - DNA, 30 bp, Artificial Sequence
  Synthetic oligonucleotide
tcggtttgtttataatttcttattttgtgg

SEQ ID NO: 275744 - DNA, 30 bp, Artificial Sequence
  Synthetic oligonucleotide
gggtaacataatacacactctcttttgtgg

SEQ ID NO: 275745 - DNA, 30 bp, Artificial Sequence
  Synthetic oligonucleotide
tgcctccactacttaaaagtcaacaattgg

SEQ ID NO: 275746 - DNA, 30 bp, Artificial Sequence
  Synthetic oligonucleotide
aaaagggctgcgcccaggctagacaattgg

SEQ ID NO: 275747 - DNA, 30 bp, Artificial Sequence
  Synthetic oligonucleotide
aattcgtttcgcatgaggctttacaattgg

SEQ ID NO: 275748 - DNA, 30 bp, Artificial Sequence
  Synthetic oligonucleotide
aatatccgtgtaaccatattaggcaattgg

SEQ ID NO: 275749 - DNA, 30 bp, Artificial Sequence
  Synthetic oligonucleotide
aaatcgttgaccaggtctcttatcaattgg

SEQ ID NO: 275750 - DNA, 30 bp, Artificial Sequence
  Synthetic oligonucleotide
gttcgcgccttgtcaagatattcgaattgg

SEQ ID NO: 275751 - DNA, 30 bp, Artificial Sequence
  Synthetic oligonucleotide
cgacttcgttagtctgagtccgtgaattgg

SEQ ID NO: 275752 - DNA, 30 bp, Artificial Sequence
  Synthetic oligonucleotide
acacagctggctttaacccagattaattgg

SEQ ID NO: 275753 - DNA, 30 bp, Artificial Sequence
  Synthetic oligonucleotide
aaactgcatagatttgtctcggaacattgg

SEQ ID NO: 275754 - DNA, 30 bp, Artificial Sequence
  Synthetic oligonucleotide
gggtccctaggcaatgagcctgaacattgg

SEQ ID NO: 275755 - DNA, 30 bp, Artificial Sequence
  Synthetic oligonucleotide
gtggttgttagactcatgtgaggacattgg

SEQ ID NO: 275756 - DNA, 30 bp, Artificial Sequence
  Synthetic oligonucleotide
gactccattgcgttgacaagtgtacattgg

SEQ ID NO: 275757 - DNA, 30 bp, Artificial Sequence
  Synthetic oligonucleotide
gtctcgtgcaattacgccccggaccattgg

SEQ ID NO: 275758 - DNA, 30 bp, Artificial Sequence
  Synthetic oligonucleotide
ccgacaatggctgtgactggctgccattgg

SEQ ID NO: 275759 - DNA, 30 bp, Artificial Sequence
  Synthetic oligonucleotide
cactatcgattgtctgagtaaaagcattgg

SEQ ID NO: 275760 - DNA, 30 bp, Artificial Sequence
  Synthetic oligonucleotide
caggcacttggtaaaagggttcggcattgg

SEQ ID NO: 275761 - DNA, 30 bp, Artificial Sequence
  Synthetic oligonucleotide
ttctgtagacctaaaatgaacgatcattgg

SEQ ID NO: 275762 - DNA, 30 bp, Artificial Sequence
  Synthetic oligonucleotide
actaatatgggataggcgtcgcgtcattgg

SEQ ID NO: 275763 - DNA, 30 bp, Artificial Sequence
  Synthetic oligonucleotide
ctgcagagtcggtgcagggtagttcattgg

SEQ ID NO: 275764 - DNA, 30 bp, Artificial Sequence
  Synthetic oligonucleotide
ctagggcgttttctcagggtcgtagattgg

SEQ ID NO: 275765 - DNA, 30 bp, Artificial Sequence
  Synthetic oligonucleotide
taacgggaactcctcaaaatcttagattgg

SEQ ID NO: 275766 - DNA, 30 bp, Artificial Sequence
  Synthetic oligonucleotide
tatagtagcgcctacctaacttaggattgg

SEQ ID NO: 275767 - DNA, 30 bp, Artificial Sequence
  Synthetic oligonucleotide
cctgggctgacccccgcggagagggattgg

SEQ ID NO: 275768 - DNA, 30 bp, Artificial Sequence
  Synthetic oligonucleotide
cgttgtggatcagataccgttgctgattgg

SEQ ID NO: 275769 - DNA, 30 bp, Artificial Sequence
  Synthetic oligonucleotide
ggcgtgttggagtgagtaacacaatattgg

SEQ ID NO: 275770 - DNA, 30 bp, Artificial Sequence
  Synthetic oligonucleotide
cacgtcgctcatactggagcacaatattgg

SEQ ID NO: 275771 - DNA, 30 bp, Artificial Sequence
  Synthetic oligonucleotide
catatacacgcttttaagtgggcatattgg

SEQ ID NO: 275772 - DNA, 30 bp, Artificial Sequence
  Synthetic oligonucleotide
atccactatgcatggttttcagcctattgg

SEQ ID NO: 275773 - DNA, 30 bp, Artificial Sequence
  Synthetic oligonucleotide
ccctgtcttctctgcggaatcggctattgg

SEQ ID NO: 275774 - DNA, 30 bp, Artificial Sequence
  Synthetic oligonucleotide
tgtgattcttaaactggttcccattattgg

SEQ ID NO: 275775 - DNA, 30 bp, Artificial Sequence
  Synthetic oligonucleotide
tggcttaactcaaacacaatggtttattgg

SEQ ID NO: 275776 - DNA, 30 bp, Artificial Sequence
  Synthetic oligonucleotide
tttacgaaatatcaatggaatggaacttgg

SEQ ID NO: 275777 - DNA, 30 bp, Artificial Sequence
  Synthetic oligonucleotide
catacaggagcgtaccgagtacacacttgg

SEQ ID NO: 275778 - DNA, 30 bp, Artificial Sequence
  Synthetic oligonucleotide
tcagccaatgactcgcactagaccacttgg

SEQ ID NO: 275779 - DNA, 30 bp, Artificial Sequence
  Synthetic oligonucleotide
ctcaatgtaatcagtaatgagtgcacttgg

SEQ ID NO: 275780 - DNA, 30 bp, Artificial Sequence
  Synthetic oligonucleotide
cggagttaagacgtcgtaggccatacttgg

SEQ ID NO: 275781 - DNA, 30 bp, Artificial Sequence
  Synthetic oligonucleotide
tataaagggtccacaaacatgcatacttgg

SEQ ID NO: 275782 - DNA, 30 bp, Artificial Sequence
  Synthetic oligonucleotide
accggatagggcgatacagcctatacttgg

SEQ ID NO: 275783 - DNA, 30 bp, Artificial Sequence
  Synthetic oligonucleotide
ggaatatacgacggttcttcactgccttgg

SEQ ID NO: 275784 - DNA, 30 bp, Artificial Sequence
  Synthetic oligonucleotide
cggcttcgcagcagagtagatacggcttgg

SEQ ID NO: 275785 - DNA, 30 bp, Artificial Sequence
  Synthetic oligonucleotide
ccaaaaacaggcttcaagggaggggcttgg

SEQ ID NO: 275786 - DNA, 30 bp, Artificial Sequence
  Synthetic oligonucleotide
ggtgtcgatttagaaccgtgccatgcttgg

SEQ ID NO: 275787 - DNA, 30 bp, Artificial Sequence
  Synthetic oligonucleotide
ttcatgcgactccttccccacttgtcttgg

SEQ ID NO: 275788 - DNA, 30 bp, Artificial Sequence
  Synthetic oligonucleotide
atttgtgcgaccccatcgccgctttcttgg

SEQ ID NO: 275789 - DNA, 30 bp, Artificial Sequence
  Synthetic oligonucleotide
gtaagattcctcgattctatattttcttgg

SEQ ID NO: 275790 - DNA, 30 bp, Artificial Sequence
  Synthetic oligonucleotide
tttggtgtaacgtggattacccaaagttgg

SEQ ID NO: 275791 - DNA, 30 bp, Artificial Sequence
  Synthetic oligonucleotide
ccaatgcgttatgtaaatccaacaagttgg

SEQ ID NO: 275792 - DNA, 30 bp, Artificial Sequence
  Synthetic oligonucleotide
actagcacagacaccggtatcccaagttgg

SEQ ID NO: 275793 - DNA, 30 bp, Artificial Sequence
  Synthetic oligonucleotide
cttcagggaggttgggcatatagaagttgg

SEQ ID NO: 275794 - DNA, 30 bp, Artificial Sequence
  Synthetic oligonucleotide
caaaataaccctgactaggttcgcagttgg

SEQ ID NO: 275795 - DNA, 30 bp, Artificial Sequence
  Synthetic oligonucleotide
atcatgtgtaggacaggccctctcagttgg

SEQ ID NO: 275796 - DNA, 30 bp, Artificial Sequence
  Synthetic oligonucleotide
atattggcaaggggagcgtctgcgagttgg

SEQ ID NO: 275797 - DNA, 30 bp, Artificial Sequence
  Synthetic oligonucleotide
ggccaaccatgtctgtgttgtactagttgg

SEQ ID NO: 275798 - DNA, 30 bp, Artificial Sequence
  Synthetic oligonucleotide
cgtgttgggccaaacgcgcagcctagttgg

SEQ ID NO: 275799 - DNA, 30 bp, Artificial Sequence
  Synthetic oligonucleotide
aagttaattggggcccatctccttagttgg

SEQ ID NO: 275800 - DNA, 30 bp, Artificial Sequence
  Synthetic oligonucleotide
acaactattatctgctatgtaaaacgttgg

SEQ ID NO: 275801 - DNA, 30 bp, Artificial Sequence
  Synthetic oligonucleotide
agatttaaagtccgtaggacaacacgttgg

SEQ ID NO: 275802 - DNA, 30 bp, Artificial Sequence
  Synthetic oligonucleotide
ataaggagagcatgggcgccagcacgttgg

SEQ ID NO: 275803 - DNA, 30 bp, Artificial Sequence
  Synthetic oligonucleotide
agcgtacgtctggcgttccgcaaccgttgg

SEQ ID NO: 275804 - DNA, 30 bp, Artificial Sequence
  Synthetic oligonucleotide
ccaacctgaattagggccttacatcgttgg

SEQ ID NO: 275805 - DNA, 30 bp, Artificial Sequence
  Synthetic oligonucleotide
tccagaatcctatagtcataacctcgttgg

SEQ ID NO: 275806 - DNA, 30 bp, Artificial Sequence
  Synthetic oligonucleotide
atatcgaggcgtcctgagagtagtcgttgg

SEQ ID NO: 275807 - DNA, 30 bp, Artificial Sequence
  Synthetic oligonucleotide
ggtgatccgtcaaacgggtctatgggttgg

SEQ ID NO: 275808 - DNA, 30 bp, Artificial Sequence
  Synthetic oligonucleotide
gtctagattcatccatcggctttgggttgg

SEQ ID NO: 275809 - DNA, 30 bp, Artificial Sequence
  Synthetic oligonucleotide
agtctaagcggttctatgcttggtggttgg

SEQ ID NO: 275810 - DNA, 30 bp, Artificial Sequence
  Synthetic oligonucleotide
cgcttctcgtcgtaagatcagattggttgg

SEQ ID NO: 275811 - DNA, 30 bp, Artificial Sequence
  Synthetic oligonucleotide
ttcgtagtcgaatagatacgccttggttgg

SEQ ID NO: 275812 - DNA, 30 bp, Artificial Sequence
  Synthetic oligonucleotide
ttggagcagacaatagtcgcgagatgttgg

SEQ ID NO: 275813 - DNA, 30 bp, Artificial Sequence
  Synthetic oligonucleotide
cgctccatatttttctcgaacatctgttgg

SEQ ID NO: 275814 - DNA, 30 bp, Artificial Sequence
  Synthetic oligonucleotide
tttttgttcaacgggatagatctctgttgg

SEQ ID NO: 275815 - DNA, 30 bp, Artificial Sequence
  Synthetic oligonucleotide
gttgtcgaaacctcgaaagtagcttgttgg

SEQ ID NO: 275816 - DNA, 30 bp, Artificial Sequence
  Synthetic oligonucleotide
gcataaaagtcggatttgtgtgaaatttgg

SEQ ID NO: 275817 - DNA, 30 bp, Artificial Sequence
  Synthetic oligonucleotide
aaaagtgaaggtcacgaaaatcgaatttgg

SEQ ID NO: 275818 - DNA, 30 bp, Artificial Sequence
  Synthetic oligonucleotide
cctcctcaacacggcgactgattaatttgg

SEQ ID NO: 275819 - DNA, 30 bp, Artificial Sequence
  Synthetic oligonucleotide
ctaactaggtctcagtgggaactcatttgg

SEQ ID NO: 275820 - DNA, 30 bp, Artificial Sequence
  Synthetic oligonucleotide
aggtcgctacttaccgacagcgggatttgg

SEQ ID NO: 275821 - DNA, 30 bp, Artificial Sequence
  Synthetic oligonucleotide
taagaggatcgtgctctgatattgatttgg

SEQ ID NO: 275822 - DNA, 30 bp, Artificial Sequence
  Synthetic oligonucleotide
ggatacagagacaccatagtattgatttgg

SEQ ID NO: 275823 - DNA, 30 bp, Artificial Sequence
  Synthetic oligonucleotide
cacaaccgctcacattcacatttgatttgg

SEQ ID NO: 275824 - DNA, 30 bp, Artificial Sequence
  Synthetic oligonucleotide
ttcggaattcactccgctggatctatttgg

SEQ ID NO: 275825 - DNA, 30 bp, Artificial Sequence
  Synthetic oligonucleotide
tccaggtcccactgcggaaaatgtatttgg

SEQ ID NO: 275826 - DNA, 30 bp, Artificial Sequence
  Synthetic oligonucleotide
gtgagaatacgacccactaggcgcctttgg

SEQ ID NO: 275827 - DNA, 30 bp, Artificial Sequence
  Synthetic oligonucleotide
gggcggacattatcagtgtctgagctttgg

SEQ ID NO: 275828 - DNA, 30 bp, Artificial Sequence
  Synthetic oligonucleotide
ttggaagacaattcggaatgtacgctttgg

SEQ ID NO: 275829 - DNA, 30 bp, Artificial Sequence
  Synthetic oligonucleotide
aaacatgagctccatgataccccgctttgg

SEQ ID NO: 275830 - DNA, 30 bp, Artificial Sequence
  Synthetic oligonucleotide
cctacatctgttccctaaaatgcgctttgg

SEQ ID NO: 275831 - DNA, 30 bp, Artificial Sequence
  Synthetic oligonucleotide
aacaacacgaattgttcaatgcgtctttgg

SEQ ID NO: 275832 - DNA, 30 bp, Artificial Sequence
  Synthetic oligonucleotide
ggaacacagtgaaagggagaaggtctttgg

SEQ ID NO: 275833 - DNA, 30 bp, Artificial Sequence
  Synthetic oligonucleotide
aaaataacctacgattcgcttggtctttgg

SEQ ID NO: 275834 - DNA, 30 bp, Artificial Sequence
  Synthetic oligonucleotide
ggttagaatgggaccgctagcccagtttgg

SEQ ID NO: 275835 - DNA, 30 bp, Artificial Sequence
  Synthetic oligonucleotide
ctctattataaagactcttaaggagtttgg

SEQ ID NO: 275836 - DNA, 30 bp, Artificial Sequence
  Synthetic oligonucleotide
acctagtgtaatacacgatgcatagtttgg

SEQ ID NO: 275837 - DNA, 31 bp, Artificial Sequence
  Synthetic oligonucleotide
gtgcctagttaagctactcagtttagtttgg

SEQ ID NO: 275838 - DNA, 30 bp, Artificial Sequence
  Synthetic oligonucleotide
ccaaagaacttggataggagtgacgtttgg

SEQ ID NO: 275839 - DNA, 30 bp, Artificial Sequence
  Synthetic oligonucleotide
cacggaagaatcaaatccccaatcgtttgg

SEQ ID NO: 275840 - DNA, 30 bp, Artificial Sequence
  Synthetic oligonucleotide
cagggcagtccaaggcgtcgcaaggtttgg

SEQ ID NO: 275841 - DNA, 30 bp, Artificial Sequence
  Synthetic oligonucleotide
cccctggtcaaaggctaaggcttggtttgg

SEQ ID NO: 275842 - DNA, 30 bp, Artificial Sequence
  Synthetic oligonucleotide
tggggttcgatcaggacgtagtatgtttgg

SEQ ID NO: 275843 - DNA, 30 bp, Artificial Sequence
  Synthetic oligonucleotide
atgcggaacgcctctattcaggctgtttgg

SEQ ID NO: 275844 - DNA, 30 bp, Artificial Sequence
  Synthetic oligonucleotide
aacctgcgggtgaacacgcagtctgtttgg

SEQ ID NO: 275845 - DNA, 30 bp, Artificial Sequence
  Synthetic oligonucleotide
atatcctttagccccatcgtcagtgtttgg

SEQ ID NO: 275846 - DNA, 30 bp, Artificial Sequence
  Synthetic oligonucleotide
ggtacgtaatgcaagtaaaaaatattttgg

SEQ ID NO: 275847 - DNA, 30 bp, Artificial Sequence
  Synthetic oligonucleotide
tacatagtgtcgggaagttcagacttttgg

SEQ ID NO: 275848 - DNA, 30 bp, Artificial Sequence
  Synthetic oligonucleotide
tcaatagtgtgtgtcgatccggccttttgg

SEQ ID NO: 275849 - DNA, 30 bp, Artificial Sequence
  Synthetic oligonucleotide
ctttacttgtactcaaaacaagtcttttgg

SEQ ID NO: 275850 - DNA, 30 bp, Artificial Sequence
  Synthetic oligonucleotide
tacaaaaacatgaggcaacagtagttttgg

SEQ ID NO: 275851 - DNA, 30 bp, Artificial Sequence
  Synthetic oligonucleotide
aacgtatgaaatgtccctaagggtttttgg

SEQ ID NO: 275852 - DNA, 30 bp, Artificial Sequence
  Synthetic oligonucleotide
cggtataccatgtccggtagagcaaaaatg

SEQ ID NO: 275853 - DNA, 30 bp, Artificial Sequence
  Synthetic oligonucleotide
tttgcgggaaagttttgagcggtaaaaatg

SEQ ID NO: 275854 - DNA, 30 bp, Artificial Sequence
  Synthetic oligonucleotide
ttcgccttggtaacctgaaggatcaaaatg

SEQ ID NO: 275855 - DNA, 30 bp, Artificial Sequence
  Synthetic oligonucleotide
ttgtaatttagcgtggagatcctcaaaatg

SEQ ID NO: 275856 - DNA, 30 bp, Artificial Sequence
  Synthetic oligonucleotide
tcagtaggaatctgatcgcggtggaaaatg

SEQ ID NO: 275857 - DNA, 30 bp, Artificial Sequence
  Synthetic oligonucleotide
cttgattgtcctaaaggacgctctaaaatg

SEQ ID NO: 275858 - DNA, 30 bp, Artificial Sequence
  Synthetic oligonucleotide
gtccatcgaaggaataatgggtcacaaatg

SEQ ID NO: 275859 - DNA, 30 bp, Artificial Sequence
  Synthetic oligonucleotide
cgtcaatatgaatttgattcatgacaaatg

SEQ ID NO: 275860 - DNA, 30 bp, Artificial Sequence
  Synthetic oligonucleotide
agccgaaaccacggcgcctcatagcaaatg

SEQ ID NO: 275861 - DNA, 30 bp, Artificial Sequence
  Synthetic oligonucleotide
gataagcaagttgagattcgcacgcaaatg

SEQ ID NO: 275862 - DNA, 30 bp, Artificial Sequence
  Synthetic oligonucleotide
ctggatgcaggaaagtcccattggcaaatg

SEQ ID NO: 275863 - DNA, 30 bp, Artificial Sequence
  Synthetic oligonucleotide
gtagtatattacgagaggcttaatcaaatg

SEQ ID NO: 275864 - DNA, 30 bp, Artificial Sequence
  Synthetic oligonucleotide
ttttgcatgcgtcaggggtaagaagaaatg

SEQ ID NO: 275865 - DNA, 30 bp, Artificial Sequence
  Synthetic oligonucleotide
gcaaaattagaatacgcttatacagaaatg

SEQ ID NO: 275866 - DNA, 30 bp, Artificial Sequence
  Synthetic oligonucleotide
gccggacaagcctgtatgtgacccgaaatg

SEQ ID NO: 275867 - DNA, 30 bp, Artificial Sequence
  Synthetic oligonucleotide
gcacctcttgaagtgaaggacgccgaaatg

SEQ ID NO: 275868 - DNA, 30 bp, Artificial Sequence
  Synthetic oligonucleotide
acctcagcacatgcgcggaacggggaaatg

SEQ ID NO: 275869 - DNA, 30 bp, Artificial Sequence
  Synthetic oligonucleotide
gctcaatttgaatcctcatggggggaaatg

SEQ ID NO: 275870 - DNA, 30 bp, Artificial Sequence
  Synthetic oligonucleotide
agcgagtgggatttcccgtggtctgaaatg

SEQ ID NO: 275871 - DNA, 31 bp, Artificial Sequence
  Synthetic oligonucleotide
aatggaattggtaagtctataacgataaatg

SEQ ID NO: 275872 - DNA, 30 bp, Artificial Sequence
  Synthetic oligonucleotide
agaatagtttacgatcctttcgactaaatg

SEQ ID NO: 275873 - DNA, 30 bp, Artificial Sequence
  Synthetic oligonucleotide
gttggtccaaggtcaaagcattgctaaatg

SEQ ID NO: 275874 - DNA, 30 bp, Artificial Sequence
  Synthetic oligonucleotide
caaaattcgggtgatagaaacgagtaaatg

SEQ ID NO: 275875 - DNA, 30 bp, Artificial Sequence
  Synthetic oligonucleotide
gtaaatggcgtaggaccttcctcttaaatg

SEQ ID NO: 275876 - DNA, 30 bp, Artificial Sequence
  Synthetic oligonucleotide
ttctgtaaaacagttcaccgaacaacaatg

SEQ ID NO: 275877 - DNA, 29 bp, Artificial Sequence
  Synthetic oligonucleotide
gacgaaccctttggagacttttaacaatg

SEQ ID NO: 275878 - DNA, 30 bp, Artificial Sequence
  Synthetic oligonucleotide
aacataattgtgtggaatattgaaccaatg

SEQ ID NO: 275879 - DNA, 30 bp, Artificial Sequence
  Synthetic oligonucleotide
gtctgcgtatctgtactgcaggccccaatg

SEQ ID NO: 275880 - DNA, 30 bp, Artificial Sequence
  Synthetic oligonucleotide
acacctgtgagacgctgaatctagccaatg

SEQ ID NO: 275881 - DNA, 30 bp, Artificial Sequence
  Synthetic oligonucleotide
tgggggcaagcaactgtgctccatccaatg

SEQ ID NO: 275882 - DNA, 30 bp, Artificial Sequence
  Synthetic oligonucleotide
agctctagctcgaaacgttaaattccaatg

SEQ ID NO: 275883 - DNA, 30 bp, Artificial Sequence
  Synthetic oligonucleotide
ttaccgggatatgaacggcttcgcgcaatg

SEQ ID NO: 275884 - DNA, 30 bp, Artificial Sequence
  Synthetic oligonucleotide
accggttacggctcaagtgactgcgcaatg

SEQ ID NO: 275885 - DNA, 30 bp, Artificial Sequence
  Synthetic oligonucleotide
tattactcccctaagaaatcgatcgcaatg

SEQ ID NO: 275886 - DNA, 30 bp, Artificial Sequence
  Synthetic oligonucleotide
cacgttcatgcaaccaggggtccggcaatg

SEQ ID NO: 275887 - DNA, 30 bp, Artificial Sequence
  Synthetic oligonucleotide
ccgctaagttgtcctccttaggatgcaatg

SEQ ID NO: 275888 - DNA, 30 bp, Artificial Sequence
  Synthetic oligonucleotide
gccattaactcaatgagcatgtgtgcaatg

SEQ ID NO: 275889 - DNA, 27 bp, Artificial Sequence
  Synthetic oligonucleotide
aagccaagaacgttacacgcatcaatg

SEQ ID NO: 275890 - DNA, 30 bp, Artificial Sequence
  Synthetic oligonucleotide
acccttacagcaaggctcgcacgatcaatg

SEQ ID NO: 275891 - DNA, 30 bp, Artificial Sequence
  Synthetic oligonucleotide
gttcccgtgcgatgggaaggaatatcaatg

SEQ ID NO: 275892 - DNA, 30 bp, Artificial Sequence
  Synthetic oligonucleotide
gtatagtagtcagcggtttaaaactcaatg

SEQ ID NO: 275893 - DNA, 29 bp, Artificial Sequence
  Synthetic oligonucleotide
tccgcaaatcggatcttatggtctcaatg

SEQ ID NO: 275894 - DNA, 30 bp, Artificial Sequence
  Synthetic oligonucleotide
tacctatatccgccggacgcgatgtcaatg

SEQ ID NO: 275895 - DNA, 30 bp, Artificial Sequence
  Synthetic oligonucleotide
ttaaataacactcacagtgagttgtcaatg

SEQ ID NO: 275896 - DNA, 30 bp, Artificial Sequence
  Synthetic oligonucleotide
agggtagacatctcgggtctaatttcaatg

SEQ ID NO: 275897 - DNA, 30 bp, Artificial Sequence
  Synthetic oligonucleotide
ctgacaagcgttaaacgcctatgcagaatg

SEQ ID NO: 275898 - DNA, 30 bp, Artificial Sequence
  Synthetic oligonucleotide
cagtatagcaccaacgagacacggagaatg

SEQ ID NO: 275899 - DNA, 30 bp, Artificial Sequence
  Synthetic oligonucleotide
acggcatacctatattcagcctatagaatg

SEQ ID NO: 275900 - DNA, 30 bp, Artificial Sequence
  Synthetic oligonucleotide
ctacccgctcatctctctcctcaacgaatg

SEQ ID NO: 275901 - DNA, 30 bp, Artificial Sequence
  Synthetic oligonucleotide
tgccgtgatctcgagacatcgggacgaatg

SEQ ID NO: 275902 - DNA, 30 bp, Artificial Sequence
  Synthetic oligonucleotide
gtattgcagggagtaactgacctacgaatg

SEQ ID NO: 275903 - DNA, 30 bp, Artificial Sequence
  Synthetic oligonucleotide
accgaggtctcctcggtagacggccgaatg

SEQ ID NO: 275904 - DNA, 30 bp, Artificial Sequence
  Synthetic oligonucleotide
ctcaggtgtgcgggggcgactccgcgaatg

SEQ ID NO: 275905 - DNA, 30 bp, Artificial Sequence
  Synthetic oligonucleotide
aacaagttgctggaaggacgcccaggaatg

SEQ ID NO: 275906 - DNA, 30 bp, Artificial Sequence
  Synthetic oligonucleotide
gaggagacctttccgctatggataggaatg

SEQ ID NO: 275907 - DNA, 30 bp, Artificial Sequence
  Synthetic oligonucleotide
acatggggtctcgcgtacattaatggaatg

SEQ ID NO: 275908 - DNA, 30 bp, Artificial Sequence
  Synthetic oligonucleotide
atgtttggatgaccctagaacgatggaatg

SEQ ID NO: 275909 - DNA, 30 bp, Artificial Sequence
  Synthetic oligonucleotide
ccagactcaccaactttcattgtatgaatg

SEQ ID NO: 275910 - DNA, 30 bp, Artificial Sequence
  Synthetic oligonucleotide
tgtcgtcggcccctgcagggacgctgaatg

SEQ ID NO: 275911 - DNA, 30 bp, Artificial Sequence
  Synthetic oligonucleotide
cttcgaactgttgcggggacgcgctgaatg

SEQ ID NO: 275912 - DNA, 30 bp, Artificial Sequence
  Synthetic oligonucleotide
gtaacattaaaagaacctagttgctgaatg

SEQ ID NO: 275913 - DNA, 30 bp, Artificial Sequence
  Synthetic oligonucleotide
gtctcatagcgtaggggctatatgtgaatg

SEQ ID NO: 275914 - DNA, 30 bp, Artificial Sequence
  Synthetic oligonucleotide
attaccgccccgattgagcaactgtgaatg

SEQ ID NO: 275915 - DNA, 30 bp, Artificial Sequence
  Synthetic oligonucleotide
ttgatccagaatttctcatctaattgaatg

SEQ ID NO: 275916 - DNA, 30 bp, Artificial Sequence
  Synthetic oligonucleotide
ttagctgcaacggctcgattacattgaatg

SEQ ID NO: 275917 - DNA, 30 bp, Artificial Sequence
  Synthetic oligonucleotide
gaaacctgagtgctacaggccaaaataatg

SEQ ID NO: 275918 - DNA, 30 bp, Artificial Sequence
  Synthetic oligonucleotide
gtattgacaaggatactgaacccaataatg

SEQ ID NO: 275919 - DNA, 30 bp, Artificial Sequence
  Synthetic oligonucleotide
attgttagtcatcaagaaccatgcataatg

SEQ ID NO: 275920 - DNA, 30 bp, Artificial Sequence
  Synthetic oligonucleotide
atcgcgtcagcatcggaagcacatataatg

SEQ ID NO: 275921 - DNA, 30 bp, Artificial Sequence
  Synthetic oligonucleotide
tagcgtacagagggtgcaaaggaactaatg

SEQ ID NO: 275922 - DNA, 30 bp, Artificial Sequence
  Synthetic oligonucleotide
agcacaggtccagcgaagttcggactaatg

SEQ ID NO: 275923 - DNA, 30 bp, Artificial Sequence
  Synthetic oligonucleotide
tctgtaattgtaaaaacgagctgactaatg

SEQ ID NO: 275924 - DNA, 30 bp, Artificial Sequence
  Synthetic oligonucleotide
gcctacgcggctatgagcagtgtactaatg

SEQ ID NO: 275925 - DNA, 30 bp, Artificial Sequence
  Synthetic oligonucleotide
ctacattacatataatataaagggctaatg

SEQ ID NO: 275926 - DNA, 30 bp, Artificial Sequence
  Synthetic oligonucleotide
gagttcgcttctcgtgagtgctggctaatg

SEQ ID NO: 275927 - DNA, 30 bp, Artificial Sequence
  Synthetic oligonucleotide
tctatatggtccttctcgggggtcgtaatg

SEQ ID NO: 275928 - DNA, 30 bp, Artificial Sequence
  Synthetic oligonucleotide
tccactaggttattgagaacccaggtaatg

SEQ ID NO: 275929 - DNA, 30 bp, Artificial Sequence
  Synthetic oligonucleotide
gccacttgaaattgtaagattccggtaatg

SEQ ID NO: 275930 - DNA, 30 bp, Artificial Sequence
  Synthetic oligonucleotide
acgataccgtgctcctattgcgcggtaatg

SEQ ID NO: 275931 - DNA, 30 bp, Artificial Sequence
  Synthetic oligonucleotide
ttcagaaagagtgctgtacattcggtaatg

SEQ ID NO: 275932 - DNA, 30 bp, Artificial Sequence
  Synthetic oligonucleotide
aatgagcagaaggctaggtattgggtaatg

SEQ ID NO: 275933 - DNA, 30 bp, Artificial Sequence
  Synthetic oligonucleotide
ccaccgatagggttacgcctactggtaatg

SEQ ID NO: 275934 - DNA, 30 bp, Artificial Sequence
  Synthetic oligonucleotide
gaaacgatcatcgtgttcaggtgtgtaatg

SEQ ID NO: 275935 - DNA, 30 bp, Artificial Sequence
  Synthetic oligonucleotide
gtatcgattgtctccccgttttttgtaatg

SEQ ID NO: 275936 - DNA, 30 bp, Artificial Sequence
  Synthetic oligonucleotide
tgcatccggattcattctcttcacttaatg

SEQ ID NO: 275937 - DNA, 30 bp, Artificial Sequence
  Synthetic oligonucleotide
ctacaagtcagcgatgcaggatacttaatg

SEQ ID NO: 275938 - DNA, 30 bp, Artificial Sequence
  Synthetic oligonucleotide
atgggtaagtccgcgcggaaaaccttaatg

SEQ ID NO: 275939 - DNA, 30 bp, Artificial Sequence
  Synthetic oligonucleotide
ttctttggggccaaaagtggggccttaatg

SEQ ID NO: 275940 - DNA, 30 bp, Artificial Sequence
  Synthetic oligonucleotide
atacacgctcggccgtgcatgatcttaatg

SEQ ID NO: 275941 - DNA, 30 bp, Artificial Sequence
  Synthetic oligonucleotide
ggattgcctatgatactagcggggttaatg

SEQ ID NO: 275942 - DNA, 30 bp, Artificial Sequence
  Synthetic oligonucleotide
cggacaaaatcaatttgagttttgttaatg

SEQ ID NO: 275943 - DNA, 30 bp, Artificial Sequence
  Synthetic oligonucleotide
ggcatagtgttgtttctgagtgaaaacatg

SEQ ID NO: 275944 - DNA, 30 bp, Artificial Sequence
  Synthetic oligonucleotide
cgatgtaagctcttagtcagctaaaacatg

SEQ ID NO: 275945 - DNA, 30 bp, Artificial Sequence
  Synthetic oligonucleotide
aacggtgtccgttccccgtttagaaacatg

SEQ ID NO: 275946 - DNA, 30 bp, Artificial Sequence
  Synthetic oligonucleotide
tgaaggttagactggcggactagcaacatg

SEQ ID NO: 275947 - DNA, 30 bp, Artificial Sequence
  Synthetic oligonucleotide
cgggttttcacccacctagaaatcaacatg

SEQ ID NO: 275948 - DNA, 30 bp, Artificial Sequence
  Synthetic oligonucleotide
ctttgaatctaggcaaagtaaggacacatg

SEQ ID NO: 275949 - DNA, 30 bp, Artificial Sequence
  Synthetic oligonucleotide
ttatccacgctcgagtgtatagcccacatg

SEQ ID NO: 275950 - DNA, 30 bp, Artificial Sequence
  Synthetic oligonucleotide
tgattcataagggttaagggttagcacatg

SEQ ID NO: 275951 - DNA, 30 bp, Artificial Sequence
  Synthetic oligonucleotide
tatacgcgcccagtctgaatagggcacatg

SEQ ID NO: 275952 - DNA, 30 bp, Artificial Sequence
  Synthetic oligonucleotide
actaggattttcttgtagcattggcacatg

SEQ ID NO: 275953 - DNA, 31 bp, Artificial Sequence
  Synthetic oligonucleotide
tttgtcggtaaaaccagacatcagtcacatg

SEQ ID NO: 275954 - DNA, 30 bp, Artificial Sequence
  Synthetic oligonucleotide
ttgataagggtccggtggagtcgtcacatg

SEQ ID NO: 275955 - DNA, 30 bp, Artificial Sequence
  Synthetic oligonucleotide
tacaaaaaggggcagattggaattcacatg

SEQ ID NO: 275956 - DNA, 30 bp, Artificial Sequence
  Synthetic oligonucleotide
gatgcaacatctagctgtcgcgttcacatg

SEQ ID NO: 275957 - DNA, 30 bp, Artificial Sequence
  Synthetic oligonucleotide
tccgcggttctaggactatccgccgacatg

SEQ ID NO: 275958 - DNA, 30 bp, Artificial Sequence
  Synthetic oligonucleotide
ccccgcgcacgtcccctcaggttcgacatg

SEQ ID NO: 275959 - DNA, 30 bp, Artificial Sequence
  Synthetic oligonucleotide
tgcctttgcgagtcgtattaccttgacatg

SEQ ID NO: 275960 - DNA, 30 bp, Artificial Sequence
  Synthetic oligonucleotide
actacaaaggatgagatcgctcttgacatg

SEQ ID NO: 275961 - DNA, 30 bp, Artificial Sequence
  Synthetic oligonucleotide
ggattgcacacaccgacgactcagtacatg

SEQ ID NO: 275962 - DNA, 30 bp, Artificial Sequence
  Synthetic oligonucleotide
ggagtgtgggcggtgggcaatggcaccatg

SEQ ID NO: 275963 - DNA, 30 bp, Artificial Sequence
  Synthetic oligonucleotide
cgtgcatgtcaacaagccggcattaccatg

SEQ ID NO: 275964 - DNA, 30 bp, Artificial Sequence
  Synthetic oligonucleotide
ggcgacggatatgggcgaaacacacccatg

SEQ ID NO: 275965 - DNA, 30 bp, Artificial Sequence
  Synthetic oligonucleotide
aagccagtgtacgcgcgccgttggcccatg

SEQ ID NO: 275966 - DNA, 30 bp, Artificial Sequence
  Synthetic oligonucleotide
cgtgtagtcttctggtatacagtgcccatg

SEQ ID NO: 275967 - DNA, 30 bp, Artificial Sequence
  Synthetic oligonucleotide
atagatacgaacgacagctaggctcccatg

SEQ ID NO: 275968 - DNA, 30 bp, Artificial Sequence
  Synthetic oligonucleotide
gtctactgctagatataattacacgccatg

SEQ ID NO: 275969 - DNA, 30 bp, Artificial Sequence
  Synthetic oligonucleotide
aaatcggtaaaaatgggtatgcgcgccatg

SEQ ID NO: 275970 - DNA, 30 bp, Artificial Sequence
  Synthetic oligonucleotide
acgcactcgaatttttttggaatcgccatg

SEQ ID NO: 275971 - DNA, 30 bp, Artificial Sequence
  Synthetic oligonucleotide
gaattaagcggcacgttggaatgtgccatg

SEQ ID NO: 275972 - DNA, 30 bp, Artificial Sequence
  Synthetic oligonucleotide
ccgtaatcgaaatattacctgtgttccatg

SEQ ID NO: 275973 - DNA, 30 bp, Artificial Sequence
  Synthetic oligonucleotide
tgcgttgggtcgtgccgttaagtttccatg

SEQ ID NO: 275974 - DNA, 30 bp, Artificial Sequence
  Synthetic oligonucleotide
ttatcgacatcggtggagctacaaagcatg

SEQ ID NO: 275975 - DNA, 30 bp, Artificial Sequence
  Synthetic oligonucleotide
gcggggagtaatcgtgtctatggcagcatg

SEQ ID NO: 275976 - DNA, 30 bp, Artificial Sequence
  Synthetic oligonucleotide
gctagcaaaaaggcctacaggtatagcatg

SEQ ID NO: 275977 - DNA, 30 bp, Artificial Sequence
  Synthetic oligonucleotide
caagtttgacaggtccccgaacgacgcatg

SEQ ID NO: 275978 - DNA, 30 bp, Artificial Sequence
  Synthetic oligonucleotide
cataagcgtcggtacccagaatgacgcatg

SEQ ID NO: 275979 - DNA, 30 bp, Artificial Sequence
  Synthetic oligonucleotide
cctattactttacgcggagccgtacgcatg

SEQ ID NO: 275980 - DNA, 30 bp, Artificial Sequence
  Synthetic oligonucleotide
ggaggtgatagctggtaccactcgcgcatg

SEQ ID NO: 275981 - DNA, 30 bp, Artificial Sequence
  Synthetic oligonucleotide
gaccgtactaataaggatagctcgcgcatg

SEQ ID NO: 275982 - DNA, 30 bp, Artificial Sequence
  Synthetic oligonucleotide
aggggcactcatgggtggttacggcgcatg

SEQ ID NO: 275983 - DNA, 30 bp, Artificial Sequence
  Synthetic oligonucleotide
agtgtacggacgcgaccctgcgggcgcatg

SEQ ID NO: 275984 - DNA, 30 bp, Artificial Sequence
  Synthetic oligonucleotide
ggaaagcgcataaaggtttaggttcgcatg

SEQ ID NO: 275985 - DNA, 30 bp, Artificial Sequence
  Synthetic oligonucleotide
aacacatgataatgcatacaggtcggcatg

SEQ ID NO: 275986 - DNA, 30 bp, Artificial Sequence
  Synthetic oligonucleotide
cgggacgccaaaaacaattttcctggcatg

SEQ ID NO: 275987 - DNA, 30 bp, Artificial Sequence
  Synthetic oligonucleotide
ggtcgtcgaagatggctttggcaatgcatg

SEQ ID NO: 275988 - DNA, 30 bp, Artificial Sequence
  Synthetic oligonucleotide
cacaacggctcaagttcactcgactgcatg

SEQ ID NO: 275989 - DNA, 30 bp, Artificial Sequence
  Synthetic oligonucleotide
caacaccggacgattttctttaagtgcatg

SEQ ID NO: 275990 - DNA, 30 bp, Artificial Sequence
  Synthetic oligonucleotide
cgcatatcttcgggtttgatcctgtgcatg

SEQ ID NO: 275991 - DNA, 30 bp, Artificial Sequence
  Synthetic oligonucleotide
tcctgatggttatggccgttaaaaatcatg

SEQ ID NO: 275992 - DNA, 30 bp, Artificial Sequence
  Synthetic oligonucleotide
atacgttgtggtcatattactgcgatcatg

SEQ ID NO: 275993 - DNA, 30 bp, Artificial Sequence
  Synthetic oligonucleotide
agtaagcaaggcattaggcccgttatcatg

SEQ ID NO: 275994 - DNA, 30 bp, Artificial Sequence
  Synthetic oligonucleotide
gatcggctcataagcttgggcaaactcatg

SEQ ID NO: 275995 - DNA, 30 bp, Artificial Sequence
  Synthetic oligonucleotide
gggttctataagggatactagaaactcatg

SEQ ID NO: 275996 - DNA, 30 bp, Artificial Sequence
  Synthetic oligonucleotide
tcgttgagtagtagtagatggaacctcatg

SEQ ID NO: 275997 - DNA, 30 bp, Artificial Sequence
  Synthetic oligonucleotide
atgctaagctccgggtgcagatacctcatg

SEQ ID NO: 275998 - DNA, 30 bp, Artificial Sequence
  Synthetic oligonucleotide
gccattcaagtatcaaaccaatggctcatg

SEQ ID NO: 275999 - DNA, 30 bp, Artificial Sequence
  Synthetic oligonucleotide
tccatgtttgtggtcgtgtgatgtctcatg

SEQ ID NO: 276000 - DNA, 30 bp, Artificial Sequence
  Synthetic oligonucleotide
cggagtgtcaagctacatacaaacgtcatg

SEQ ID NO: 276001 - DNA, 30 bp, Artificial Sequence
  Synthetic oligonucleotide
acggtatacgtggtcagaccctaggtcatg

SEQ ID NO: 276002 - DNA, 30 bp, Artificial Sequence
  Synthetic oligonucleotide
aggtttgacagggctacttggaatgtcatg

SEQ ID NO: 276003 - DNA, 30 bp, Artificial Sequence
  Synthetic oligonucleotide
gagttaggggtatacggcccggatgtcatg

SEQ ID NO: 276004 - DNA, 30 bp, Artificial Sequence
  Synthetic oligonucleotide
ccatgagggggataaaggtgctttgtcatg

SEQ ID NO: 276005 - DNA, 30 bp, Artificial Sequence
  Synthetic oligonucleotide
ctgtgctgggactcttttattcgattcatg

SEQ ID NO: 276006 - DNA, 30 bp, Artificial Sequence
  Synthetic oligonucleotide
ctctagccgggcacagcaacgcacttcatg

SEQ ID NO: 276007 - DNA, 30 bp, Artificial Sequence
  Synthetic oligonucleotide
acaacagagctacctgagggtagtttcatg

SEQ ID NO: 276008 - DNA, 30 bp, Artificial Sequence
  Synthetic oligonucleotide
agtcgagtatctacatatacaattttcatg

SEQ ID NO: 276009 - DNA, 30 bp, Artificial Sequence
  Synthetic oligonucleotide
gcgttgttgccatctatgtgtataaagatg

SEQ ID NO: 276010 - DNA, 30 bp, Artificial Sequence
  Synthetic oligonucleotide
aatgtaatgtaaatttccggatgcaagatg

SEQ ID NO: 276011 - DNA, 30 bp, Artificial Sequence
  Synthetic oligonucleotide
aatgaagagttggtgataccattgaagatg

SEQ ID NO: 276012 - DNA, 30 bp, Artificial Sequence
  Synthetic oligonucleotide
tgccacatcaacggatccaaatggcagatg

SEQ ID NO: 276013 - DNA, 30 bp, Artificial Sequence
  Synthetic oligonucleotide
acaagctggagtgatcaaatctctcagatg

SEQ ID NO: 276014 - DNA, 30 bp, Artificial Sequence
  Synthetic oligonucleotide
agacaggacggatggtggcatgttcagatg

SEQ ID NO: 276015 - DNA, 30 bp, Artificial Sequence
  Synthetic oligonucleotide
gatgtactggcggacagtgcgtttcagatg

SEQ ID NO: 276016 - DNA, 30 bp, Artificial Sequence
  Synthetic oligonucleotide
ccgtaggtatgcaccttatcagcagagatg

SEQ ID NO: 276017 - DNA, 30 bp, Artificial Sequence
  Synthetic oligonucleotide
tacctatctagcgccctatcccaggagatg

SEQ ID NO: 276018 - DNA, 30 bp, Artificial Sequence
  Synthetic oligonucleotide
agtgagcactcggtcagctacagggagatg

SEQ ID NO: 276019 - DNA, 30 bp, Artificial Sequence
  Synthetic oligonucleotide
tcagcaggttccgattctgaacatgagatg

SEQ ID NO: 276020 - DNA, 30 bp, Artificial Sequence
  Synthetic oligonucleotide
agggagatcaaatagtgcatacatgagatg

SEQ ID NO: 276021 - DNA, 30 bp, Artificial Sequence
  Synthetic oligonucleotide
cgtagagctcggttaaaatattttgagatg

SEQ ID NO: 276022 - DNA, 30 bp, Artificial Sequence
  Synthetic oligonucleotide
tattaaaggttatattcgaagtgatagatg

SEQ ID NO: 276023 - DNA, 30 bp, Artificial Sequence
  Synthetic oligonucleotide
aagagttcaccgggtatttatgtatagatg

SEQ ID NO: 276024 - DNA, 30 bp, Artificial Sequence
  Synthetic oligonucleotide
actctaagtgtaactgtttaagagtagatg

SEQ ID NO: 276025 - DNA, 30 bp, Artificial Sequence
  Synthetic oligonucleotide
gtactagataggaggggacattcgtagatg

SEQ ID NO: 276026 - DNA, 30 bp, Artificial Sequence
  Synthetic oligonucleotide
ttctcagataacctttagaaactttagatg

SEQ ID NO: 276027 - DNA, 30 bp, Artificial Sequence
  Synthetic oligonucleotide
ctgatcaggtaagagcgatttttaacgatg

SEQ ID NO: 276028 - DNA, 30 bp, Artificial Sequence
  Synthetic oligonucleotide
cacaaggggcttgcgcgtagtcccacgatg

SEQ ID NO: 276029 - DNA, 31 bp, Artificial Sequence
  Synthetic oligonucleotide
cacgggctatgtggcaaatatagagacgatg

SEQ ID NO: 276030 - DNA, 30 bp, Artificial Sequence
  Synthetic oligonucleotide
actactgaatccgcagaagaatgtacgatg

SEQ ID NO: 276031 - DNA, 30 bp, Artificial Sequence
  Synthetic oligonucleotide
gaattcagccaggacgaggtgataccgatg

SEQ ID NO: 276032 - DNA, 30 bp, Artificial Sequence
  Synthetic oligonucleotide
cgccctcccttttaatctcggttcccgatg

SEQ ID NO: 276033 - DNA, 30 bp, Artificial Sequence
  Synthetic oligonucleotide
ctgcgctgacgtcagattagtaagccgatg

SEQ ID NO: 276034 - DNA, 30 bp, Artificial Sequence
  Synthetic oligonucleotide
aatgcacaaatgctaagtggatggccgatg

SEQ ID NO: 276035 - DNA, 30 bp, Artificial Sequence
  Synthetic oligonucleotide
tgaagtagcggctccagggtataatcgatg

SEQ ID NO: 276036 - DNA, 30 bp, Artificial Sequence
  Synthetic oligonucleotide
agttcgagcgaataaaagattagctcgatg

SEQ ID NO: 276037 - DNA, 30 bp, Artificial Sequence
  Synthetic oligonucleotide
tttactccagaaggtaggtgaatgtcgatg

SEQ ID NO: 276038 - DNA, 30 bp, Artificial Sequence
  Synthetic oligonucleotide
agttagtcggaaacgaactacaccaggatg

SEQ ID NO: 276039 - DNA, 30 bp, Artificial Sequence
  Synthetic oligonucleotide
cctcagagaagcagctaaccgtggaggatg

SEQ ID NO: 276040 - DNA, 30 bp, Artificial Sequence
  Synthetic oligonucleotide
atgcttcaacaccaaatacctagacggatg

SEQ ID NO: 276041 - DNA, 30 bp, Artificial Sequence
  Synthetic oligonucleotide
tgaggacagagggatggtggtggacggatg

SEQ ID NO: 276042 - DNA, 30 bp, Artificial Sequence
  Synthetic oligonucleotide
ctcattatgtcggccctgtcagggcggatg

SEQ ID NO: 276043 - DNA, 30 bp, Artificial Sequence
  Synthetic oligonucleotide
ttccacggtactacctacaaccttcggatg

SEQ ID NO: 276044 - DNA, 30 bp, Artificial Sequence
  Synthetic oligonucleotide
taaaggccccgtccaaacggggttcggatg

SEQ ID NO: 276045 - DNA, 31 bp, Artificial Sequence
  Synthetic oligonucleotide
tagccgtttagggtaaaaccactacgggatg

SEQ ID NO: 276046 - DNA, 30 bp, Artificial Sequence
  Synthetic oligonucleotide
cgggtcagtgatggggcatcgctcgggatg

SEQ ID NO: 276047 - DNA, 30 bp, Artificial Sequence
  Synthetic oligonucleotide
gtctgtttggggtgcggatgcagggggatg

SEQ ID NO: 276048 - DNA, 30 bp, Artificial Sequence
  Synthetic oligonucleotide
gatactagttagcccaaatcacgatggatg

SEQ ID NO: 276049 - DNA, 30 bp, Artificial Sequence
  Synthetic oligonucleotide
gtacgtatatagggtttccgatgatggatg

SEQ ID NO: 276050 - DNA, 30 bp, Artificial Sequence
  Synthetic oligonucleotide
cttcaccagccaccctagatcgtatggatg

SEQ ID NO: 276051 - DNA, 30 bp, Artificial Sequence
  Synthetic oligonucleotide
caacattgtttgtctaagcggagctggatg

SEQ ID NO: 276052 - DNA, 30 bp, Artificial Sequence
  Synthetic oligonucleotide
gttcacccagatagaaattctagctggatg

SEQ ID NO: 276053 - DNA, 30 bp, Artificial Sequence
  Synthetic oligonucleotide
atatgaagtaattaagatttaatgtggatg

SEQ ID NO: 276054 - DNA, 31 bp, Artificial Sequence
  Synthetic oligonucleotide
tatgcatgggactcctaatggggcttggatg

SEQ ID NO: 276055 - DNA, 30 bp, Artificial Sequence
  Synthetic oligonucleotide
cctcatcctcctgcaagctgcataatgatg

SEQ ID NO: 276056 - DNA, 30 bp, Artificial Sequence
  Synthetic oligonucleotide
gcacgcaacagaggcctctatttcatgatg

SEQ ID NO: 276057 - DNA, 30 bp, Artificial Sequence
  Synthetic oligonucleotide
agcaggtcgcaattattccgtactatgatg

SEQ ID NO: 276058 - DNA, 30 bp, Artificial Sequence
  Synthetic oligonucleotide
gcctccatagtccggtgggctagtatgatg

SEQ ID NO: 276059 - DNA, 30 bp, Artificial Sequence
  Synthetic oligonucleotide
gatctggctactaagggcctgaaactgatg

SEQ ID NO: 276060 - DNA, 30 bp, Artificial Sequence
  Synthetic oligonucleotide
taccgtctatgtataagacggtaactgatg

SEQ ID NO: 276061 - DNA, 30 bp, Artificial Sequence
  Synthetic oligonucleotide
ttgtatcggatcgttagatgggacctgatg

SEQ ID NO: 276062 - DNA, 30 bp, Artificial Sequence
  Synthetic oligonucleotide
aatcgagcttaatctgtacccgggctgatg

SEQ ID NO: 276063 - DNA, 30 bp, Artificial Sequence
  Synthetic oligonucleotide
agctttatttacaggttttaacaagtgatg

SEQ ID NO: 276064 - DNA, 30 bp, Artificial Sequence
  Synthetic oligonucleotide
gttcaaataggagacgagagtccagtgatg

SEQ ID NO: 276065 - DNA, 30 bp, Artificial Sequence
  Synthetic oligonucleotide
gaagaaaatcccgtgaccgcaaacgtgatg

SEQ ID NO: 276066 - DNA, 30 bp, Artificial Sequence
  Synthetic oligonucleotide
ggccgacgcacaaacaagataaccgtgatg

SEQ ID NO: 276067 - DNA, 30 bp, Artificial Sequence
  Synthetic oligonucleotide
cgtctctattgcacgcctccgccggtgatg

SEQ ID NO: 276068 - DNA, 30 bp, Artificial Sequence
  Synthetic oligonucleotide
agtatatctaaatttttaccggcggtgatg

SEQ ID NO: 276069 - DNA, 30 bp, Artificial Sequence
  Synthetic oligonucleotide
gttcggggttgtgtccctttggatgtgatg

SEQ ID NO: 276070 - DNA, 30 bp, Artificial Sequence
  Synthetic oligonucleotide
gtggactccggcgcgtccaaaggtgtgatg

SEQ ID NO: 276071 - DNA, 30 bp, Artificial Sequence
  Synthetic oligonucleotide
tgaccgaaaaggcagagacatagaaatatg

SEQ ID NO: 276072 - DNA, 30 bp, Artificial Sequence
  Synthetic oligonucleotide
ggcccgcacatggcaggcaggggaaatatg

SEQ ID NO: 276073 - DNA, 30 bp, Artificial Sequence
  Synthetic oligonucleotide
gtaaggagttaactatctggcagcaatatg

SEQ ID NO: 276074 - DNA, 30 bp, Artificial Sequence
  Synthetic oligonucleotide
acactattcttatgaacgaggaggaatatg

SEQ ID NO: 276075 - DNA, 30 bp, Artificial Sequence
  Synthetic oligonucleotide
gttgggtaacggtgtgcagagttgaatatg

SEQ ID NO: 276076 - DNA, 30 bp, Artificial Sequence
  Synthetic oligonucleotide
tgtgcactcacagggaataatacacatatg

SEQ ID NO: 276077 - DNA, 30 bp, Artificial Sequence
  Synthetic oligonucleotide
tattgactcgagcgcgcacctggacatatg

SEQ ID NO: 276078 - DNA, 30 bp, Artificial Sequence
  Synthetic oligonucleotide
tatccccccgttatagcactcttacatatg

SEQ ID NO: 276079 - DNA, 30 bp, Artificial Sequence
  Synthetic oligonucleotide
atacgtcacgcaatgggtcaatctcatatg

SEQ ID NO: 276080 - DNA, 30 bp, Artificial Sequence
  Synthetic oligonucleotide
tcggtgaatctgtccgttctatctcatatg

SEQ ID NO: 276081 - DNA, 30 bp, Artificial Sequence
  Synthetic oligonucleotide
acttgctacgtagtagtagtccgtcatatg

SEQ ID NO: 276082 - DNA, 30 bp, Artificial Sequence
  Synthetic oligonucleotide
gagttgataacagattgtgtatttcatatg

SEQ ID NO: 276083 - DNA, 30 bp, Artificial Sequence
  Synthetic oligonucleotide
actcctcgagcatttatccacaacgatatg

SEQ ID NO: 276084 - DNA, 30 bp, Artificial Sequence
  Synthetic oligonucleotide
aacctgtgggtagcggtagactacgatatg

SEQ ID NO: 276085 - DNA, 30 bp, Artificial Sequence
  Synthetic oligonucleotide
ttagggttttgccttgggctgctcgatatg

SEQ ID NO: 276086 - DNA, 30 bp, Artificial Sequence
  Synthetic oligonucleotide
tgagcctggacacttgtatagacggatatg

SEQ ID NO: 276087 - DNA, 30 bp, Artificial Sequence
  Synthetic oligonucleotide
tcccatccggcgactaggtaacatgatatg

SEQ ID NO: 276088 - DNA, 30 bp, Artificial Sequence
  Synthetic oligonucleotide
agctccacataccgtatcgtacatgatatg

SEQ ID NO: 276089 - DNA, 30 bp, Artificial Sequence
  Synthetic oligonucleotide
gctaagtgtataccaataataggtgatatg

SEQ ID NO: 276090 - DNA, 30 bp, Artificial Sequence
  Synthetic oligonucleotide
cgggtatcagtatcgggacagggtgatatg

SEQ ID NO: 276091 - DNA, 30 bp, Artificial Sequence
  Synthetic oligonucleotide
gacccaaaccgtttagttatgcttgatatg

SEQ ID NO: 276092 - DNA, 30 bp, Artificial Sequence
  Synthetic oligonucleotide
gaccattagggtccggcgcggtagtatatg

SEQ ID NO: 276093 - DNA, 30 bp, Artificial Sequence
  Synthetic oligonucleotide
aacgtgtgggacgcaatgggtacgtatatg

SEQ ID NO: 276094 - DNA, 30 bp, Artificial Sequence
  Synthetic oligonucleotide
agatccgatgttattattgatgtgtatatg

SEQ ID NO: 276095 - DNA, 30 bp, Artificial Sequence
  Synthetic oligonucleotide
acagtctctaccgtcatagaaggttatatg

SEQ ID NO: 276096 - DNA, 30 bp, Artificial Sequence
  Synthetic oligonucleotide
ccgacgcctgggaaactatactgttatatg

SEQ ID NO: 276097 - DNA, 30 bp, Artificial Sequence
  Synthetic oligonucleotide
acaatctcatcctcgcttatactttatatg

SEQ ID NO: 276098 - DNA, 30 bp, Artificial Sequence
  Synthetic oligonucleotide
aaagaaggtaaactctcttttctaactatg

SEQ ID NO: 276099 - DNA, 30 bp, Artificial Sequence
  Synthetic oligonucleotide
acccagacgtgcaccatggctaggactatg

SEQ ID NO: 276100 - DNA, 30 bp, Artificial Sequence
  Synthetic oligonucleotide
tctgaggaagaccactgagcacatactatg

SEQ ID NO: 276101 - DNA, 30 bp, Artificial Sequence
  Synthetic oligonucleotide
atatgtgcggcctcccaacctgagcctatg

SEQ ID NO: 276102 - DNA, 30 bp, Artificial Sequence
  Synthetic oligonucleotide
gagggttcaatatagaaaatacctcctatg

SEQ ID NO: 276103 - DNA, 30 bp, Artificial Sequence
  Synthetic oligonucleotide
tctcagcattctgaagtggctattcctatg

SEQ ID NO: 276104 - DNA, 30 bp, Artificial Sequence
  Synthetic oligonucleotide
attagtgattgttgacctagatcagctatg

SEQ ID NO: 276105 - DNA, 30 bp, Artificial Sequence
  Synthetic oligonucleotide
tgtctccgcgggatgctataccgagctatg

SEQ ID NO: 276106 - DNA, 30 bp, Artificial Sequence
  Synthetic oligonucleotide
gtcgtctcacggccggcacgaaaggctatg

SEQ ID NO: 276107 - DNA, 30 bp, Artificial Sequence
  Synthetic oligonucleotide
tcgcttcgagcatgaggatctcctgctatg

SEQ ID NO: 276108 - DNA, 30 bp, Artificial Sequence
  Synthetic oligonucleotide
tcgattttcccgaaatctttaaaatctatg

SEQ ID NO: 276109 - DNA, 30 bp, Artificial Sequence
  Synthetic oligonucleotide
ccgctaaggaaactggccgcactctctatg

SEQ ID NO: 276110 - DNA, 30 bp, Artificial Sequence
  Synthetic oligonucleotide
taatacgctaggacgaataaagagtctatg

SEQ ID NO: 276111 - DNA, 30 bp, Artificial Sequence
  Synthetic oligonucleotide
cctgggagcgcaacccgtttcgggtctatg

SEQ ID NO: 276112 - DNA, 30 bp, Artificial Sequence
  Synthetic oligonucleotide
ttgaaccggtgtgccgacagtgcaagtatg

SEQ ID NO: 276113 - DNA, 30 bp, Artificial Sequence
  Synthetic oligonucleotide
tctggacagggcaacttcgtgcccagtatg

SEQ ID NO: 276114 - DNA, 30 bp, Artificial Sequence
  Synthetic oligonucleotide
atggtggtttgcgaggtactgaggagtatg

SEQ ID NO: 276115 - DNA, 30 bp, Artificial Sequence
  Synthetic oligonucleotide
gggttctcggtcgtcaaacacaatagtatg

SEQ ID NO: 276116 - DNA, 29 bp, Artificial Sequence
  Synthetic oligonucleotide
ggtaccctaacgtccgcaaggatagtatg

SEQ ID NO: 276117 - DNA, 30 bp, Artificial Sequence
  Synthetic oligonucleotide
agttggcgattaacgacgggcgaacgtatg

SEQ ID NO: 276118 - DNA, 30 bp, Artificial Sequence
  Synthetic oligonucleotide
cccatgcgtatgatttcattcccacgtatg

SEQ ID NO: 276119 - DNA, 30 bp, Artificial Sequence
  Synthetic oligonucleotide
ggggattctgtatcaagagttatacgtatg

SEQ ID NO: 276120 - DNA, 30 bp, Artificial Sequence
  Synthetic oligonucleotide
atacgggtgattcgatatacctaccgtatg

SEQ ID NO: 276121 - DNA, 30 bp, Artificial Sequence
  Synthetic oligonucleotide
aaccggccgttgttcaagagtgcgcgtatg

SEQ ID NO: 276122 - DNA, 30 bp, Artificial Sequence
  Synthetic oligonucleotide
gggtgtttggcgctccacttcatgcgtatg

SEQ ID NO: 276123 - DNA, 30 bp, Artificial Sequence
  Synthetic oligonucleotide
aacataggggccgtgccggccattcgtatg

SEQ ID NO: 276124 - DNA, 30 bp, Artificial Sequence
  Synthetic oligonucleotide
ttgttagctgcagaggtaccagttcgtatg

SEQ ID NO: 276125 - DNA, 30 bp, Artificial Sequence
  Synthetic oligonucleotide
atgggccctcatacaaatagtgaaggtatg

SEQ ID NO: 276126 - DNA, 30 bp, Artificial Sequence
  Synthetic oligonucleotide
actgatcgttctctaacaggtcgcggtatg

SEQ ID NO: 276127 - DNA, 30 bp, Artificial Sequence
  Synthetic oligonucleotide
atattttgctcattttattcgctcggtatg

SEQ ID NO: 276128 - DNA, 30 bp, Artificial Sequence
  Synthetic oligonucleotide
tataagtcaaactagctgtctgcgggtatg

SEQ ID NO: 276129 - DNA, 30 bp, Artificial Sequence
  Synthetic oligonucleotide
ggattttagatcataatccaagtgggtatg

SEQ ID NO: 276130 - DNA, 30 bp, Artificial Sequence
  Synthetic oligonucleotide
tatgcacttagtaaatgccttactggtatg

SEQ ID NO: 276131 - DNA, 30 bp, Artificial Sequence
  Synthetic oligonucleotide
atctttactcggaatggatgatctggtatg

SEQ ID NO: 276132 - DNA, 30 bp, Artificial Sequence
  Synthetic oligonucleotide
tgtctgcgcggaaaggcatactctggtatg

SEQ ID NO: 276133 - DNA, 30 bp, Artificial Sequence
  Synthetic oligonucleotide
ctggttggccttactcttagtaactgtatg

SEQ ID NO: 276134 - DNA, 30 bp, Artificial Sequence
  Synthetic oligonucleotide
gtctgcccccactagataccttcctgtatg

SEQ ID NO: 276135 - DNA, 30 bp, Artificial Sequence
  Synthetic oligonucleotide
tataggctgtccgtaataggttcgtgtatg

SEQ ID NO: 276136 - DNA, 30 bp, Artificial Sequence
  Synthetic oligonucleotide
tcggaacatattgacaggtttttgtgtatg

SEQ ID NO: 276137 - DNA, 30 bp, Artificial Sequence
  Synthetic oligonucleotide
cagaatcataggctgcgactgccttgtatg

SEQ ID NO: 276138 - DNA, 30 bp, Artificial Sequence
  Synthetic oligonucleotide
agggtgaaattggcagtcaataaaattatg

SEQ ID NO: 276139 - DNA, 30 bp, Artificial Sequence
  Synthetic oligonucleotide
tgggtacattccatgtatcggtaaattatg

SEQ ID NO: 276140 - DNA, 30 bp, Artificial Sequence
  Synthetic oligonucleotide
atagcatttcgctaagtattcacaattatg

SEQ ID NO: 276141 - DNA, 30 bp, Artificial Sequence
  Synthetic oligonucleotide
cgctagataatgtctggagttttcattatg

SEQ ID NO: 276142 - DNA, 30 bp, Artificial Sequence
  Synthetic oligonucleotide
ttcggatgaccgtcgtctgtctagattatg

SEQ ID NO: 276143 - DNA, 30 bp, Artificial Sequence
  Synthetic oligonucleotide
gccagggtagagtgtgggttcttgattatg

SEQ ID NO: 276144 - DNA, 30 bp, Artificial Sequence
  Synthetic oligonucleotide
cgtagtcaggcctaccttggctcacttatg

SEQ ID NO: 276145 - DNA, 30 bp, Artificial Sequence
  Synthetic oligonucleotide
cgaattggcgataaggctgtcgaccttatg

SEQ ID NO: 276146 - DNA, 31 bp, Artificial Sequence
  Synthetic oligonucleotide
atctttcgaatagaactaacgcatgcttatg

SEQ ID NO: 276147 - DNA, 30 bp, Artificial Sequence
  Synthetic oligonucleotide
gtgttatcgtggtcctaccactatcttatg

SEQ ID NO: 276148 - DNA, 30 bp, Artificial Sequence
  Synthetic oligonucleotide
gtttcttaaccaggagttgtgccagttatg

SEQ ID NO: 276149 - DNA, 30 bp, Artificial Sequence
  Synthetic oligonucleotide
gtcaaggctggcggtcctacgaacgttatg

SEQ ID NO: 276150 - DNA, 30 bp, Artificial Sequence
  Synthetic oligonucleotide
ctacgcatgggagtaatcagatgcgttatg

SEQ ID NO: 276151 - DNA, 30 bp, Artificial Sequence
  Synthetic oligonucleotide
accagagtatctaatggtccttgcgttatg

SEQ ID NO: 276152 - DNA, 30 bp, Artificial Sequence
  Synthetic oligonucleotide
atgtagggcgtaggtaatactttcgttatg

SEQ ID NO: 276153 - DNA, 30 bp, Artificial Sequence
  Synthetic oligonucleotide
aagtaaacaaacacaacatccattgttatg

SEQ ID NO: 276154 - DNA, 30 bp, Artificial Sequence
  Synthetic oligonucleotide
cctcaataaaaaaaatctgagtcatttatg

SEQ ID NO: 276155 - DNA, 30 bp, Artificial Sequence
  Synthetic oligonucleotide
agtgagccaagtaacccgtcgggctttatg

SEQ ID NO: 276156 - DNA, 30 bp, Artificial Sequence
  Synthetic oligonucleotide
gtcccaggggtcaatgacatcagttttatg

SEQ ID NO: 276157 - DNA, 30 bp, Artificial Sequence
  Synthetic oligonucleotide
gcgtgtgagctctatgatgtataaaaactg

SEQ ID NO: 276158 - DNA, 30 bp, Artificial Sequence
  Synthetic oligonucleotide
cacggggttagtttagtataaggcaaactg

SEQ ID NO: 276159 - DNA, 30 bp, Artificial Sequence
  Synthetic oligonucleotide
agcgtcggtgttactagcacattcaaactg

SEQ ID NO: 276160 - DNA, 30 bp, Artificial Sequence
  Synthetic oligonucleotide
caggtgtgttaatgaaggaggaagaaactg

SEQ ID NO: 276161 - DNA, 30 bp, Artificial Sequence
  Synthetic oligonucleotide
ggaatttcagcttgggctcgggataaactg

SEQ ID NO: 276162 - DNA, 30 bp, Artificial Sequence
  Synthetic oligonucleotide
ttcctgcctatcccaatgaggtataaactg

SEQ ID NO: 276163 - DNA, 30 bp, Artificial Sequence
  Synthetic oligonucleotide
cgctacttggtaataatacttagtaaactg

SEQ ID NO: 276164 - DNA, 30 bp, Artificial Sequence
  Synthetic oligonucleotide
tgggtgagcaacctgcccataaggcaactg

SEQ ID NO: 276165 - DNA, 30 bp, Artificial Sequence
  Synthetic oligonucleotide
agaatagatctctcgtattatgggcaactg

SEQ ID NO: 276166 - DNA, 30 bp, Artificial Sequence
  Synthetic oligonucleotide
gtgtgcgtggatggataccggcatcaactg

SEQ ID NO: 276167 - DNA, 30 bp, Artificial Sequence
  Synthetic oligonucleotide
taatgcagcctctgtccagcacgagaactg

SEQ ID NO: 276168 - DNA, 30 bp, Artificial Sequence
  Synthetic oligonucleotide
cgtatcccttcccctagctacgcggaactg

SEQ ID NO: 276169 - DNA, 30 bp, Artificial Sequence
  Synthetic oligonucleotide
agtgcgccgatccaggacaaggcggaactg

SEQ ID NO: 276170 - DNA, 30 bp, Artificial Sequence
  Synthetic oligonucleotide
ggtagcgcggtcgccggaaatagggaactg

SEQ ID NO: 276171 - DNA, 30 bp, Artificial Sequence
  Synthetic oligonucleotide
tatatcctgttccgctacctgggggaactg

SEQ ID NO: 276172 - DNA, 30 bp, Artificial Sequence
  Synthetic oligonucleotide
agttacaggctggcattccgccatgaactg

SEQ ID NO: 276173 - DNA, 30 bp, Artificial Sequence
  Synthetic oligonucleotide
tccaaccgacatagacgggtacctgaactg

SEQ ID NO: 276174 - DNA, 30 bp, Artificial Sequence
  Synthetic oligonucleotide
tgttgatttatcacccgaaggaactaactg

SEQ ID NO: 276175 - DNA, 30 bp, Artificial Sequence
  Synthetic oligonucleotide
gtaaatctctgaggttttgcttactaactg

SEQ ID NO: 276176 - DNA, 30 bp, Artificial Sequence
  Synthetic oligonucleotide
gaaattaacggagttcgtcttccctaactg

SEQ ID NO: 276177 - DNA, 30 bp, Artificial Sequence
  Synthetic oligonucleotide
aggctaatgatttttaagggacagtaactg

SEQ ID NO: 276178 - DNA, 30 bp, Artificial Sequence
  Synthetic oligonucleotide
acatcgtctacatggtcaacagtgtaactg

SEQ ID NO: 276179 - DNA, 30 bp, Artificial Sequence
  Synthetic oligonucleotide
gtcgttttgtggagccttaatgaaacactg

SEQ ID NO: 276180 - DNA, 30 bp, Artificial Sequence
  Synthetic oligonucleotide
ctggaggttctaacatcgcagataacactg

SEQ ID NO: 276181 - DNA, 30 bp, Artificial Sequence
  Synthetic oligonucleotide
taacacaaagggatctaaaggtccacactg

SEQ ID NO: 276182 - DNA, 30 bp, Artificial Sequence
  Synthetic oligonucleotide
aggcacaaggatagccgcgcactcacactg

SEQ ID NO: 276183 - DNA, 30 bp, Artificial Sequence
  Synthetic oligonucleotide
gagtgttgggttgcatataaggatacactg

SEQ ID NO: 276184 - DNA, 30 bp, Artificial Sequence
  Synthetic oligonucleotide
caacggtagggaatatgtgagagaccactg

SEQ ID NO: 276185 - DNA, 30 bp, Artificial Sequence
  Synthetic oligonucleotide
gtgcttgggcggggtagtggtcagccactg

SEQ ID NO: 276186 - DNA, 30 bp, Artificial Sequence
  Synthetic oligonucleotide
ggaagtaccttgagagtctgacggccactg

SEQ ID NO: 276187 - DNA, 30 bp, Artificial Sequence
  Synthetic oligonucleotide
aagactttaattaaattgtgcgctccactg

SEQ ID NO: 276188 - DNA, 30 bp, Artificial Sequence
  Synthetic oligonucleotide
gtagaacggtcaatacctcgacgtccactg

SEQ ID NO: 276189 - DNA, 30 bp, Artificial Sequence
  Synthetic oligonucleotide
gcaaacaacttagccacctccgcagcactg

SEQ ID NO: 276190 - DNA, 30 bp, Artificial Sequence
  Synthetic oligonucleotide
aatcgttcgtcattctcagagtcagcactg

SEQ ID NO: 276191 - DNA, 30 bp, Artificial Sequence
  Synthetic oligonucleotide
tactggcactgtaattactcaagggcactg

SEQ ID NO: 276192 - DNA, 30 bp, Artificial Sequence
  Synthetic oligonucleotide
ggagcaaccggcaatattgcaggggcactg

SEQ ID NO: 276193 - DNA, 30 bp, Artificial Sequence
  Synthetic oligonucleotide
ataggtgtgctccactcaaggggggcactg

SEQ ID NO: 276194 - DNA, 30 bp, Artificial Sequence
  Synthetic oligonucleotide
cctcgcccgcacccgactagatatgcactg

SEQ ID NO: 276195 - DNA, 30 bp, Artificial Sequence
  Synthetic oligonucleotide
gattgctttacggtctcggagagtgcactg

SEQ ID NO: 276196 - DNA, 30 bp, Artificial Sequence
  Synthetic oligonucleotide
gccctcgcacagcaatcgtccgcatcactg

SEQ ID NO: 276197 - DNA, 30 bp, Artificial Sequence
  Synthetic oligonucleotide
attttaatggaccatggattgaactcactg

SEQ ID NO: 276198 - DNA, 30 bp, Artificial Sequence
  Synthetic oligonucleotide
cgccaacgtcagataggcatccatcgactg

SEQ ID NO: 276199 - DNA, 30 bp, Artificial Sequence
  Synthetic oligonucleotide
atcatgtatgtaaaaaagttatttcgactg

SEQ ID NO: 276200 - DNA, 30 bp, Artificial Sequence
  Synthetic oligonucleotide
ggcatctgggcactggaattaaaaggactg

SEQ ID NO: 276201 - DNA, 30 bp, Artificial Sequence
  Synthetic oligonucleotide
ttcacggtcgcgtagccctcatgaggactg

SEQ ID NO: 276202 - DNA, 30 bp, Artificial Sequence
  Synthetic oligonucleotide
tcacgtcggtatctggggggtgtaggactg

SEQ ID NO: 276203 - DNA, 30 bp, Artificial Sequence
  Synthetic oligonucleotide
tcacgttccggcgaggcggttcccggactg

SEQ ID NO: 276204 - DNA, 30 bp, Artificial Sequence
  Synthetic oligonucleotide
aaaggcctttgtatgggccaaggtggactg

SEQ ID NO: 276205 - DNA, 30 bp, Artificial Sequence
  Synthetic oligonucleotide
gtttcagtacccgccaacatcatatgactg

SEQ ID NO: 276206 - DNA, 30 bp, Artificial Sequence
  Synthetic oligonucleotide
aaaaactaaagggggcattgtcagtgactg

SEQ ID NO: 276207 - DNA, 30 bp, Artificial Sequence
  Synthetic oligonucleotide
tagctccgtcgagtcgacttgttttgactg

SEQ ID NO: 276208 - DNA, 30 bp, Artificial Sequence
  Synthetic oligonucleotide
ctccctgcattctccgctctaccaatactg

SEQ ID NO: 276209 - DNA, 30 bp, Artificial Sequence
  Synthetic oligonucleotide
gcatggaatgcttcccttcataggatactg

SEQ ID NO: 276210 - DNA, 30 bp, Artificial Sequence
  Synthetic oligonucleotide
gcgcaaccgtatactatgtgacggatactg

SEQ ID NO: 276211 - DNA, 30 bp, Artificial Sequence
  Synthetic oligonucleotide
gtggtcttacgcacatactcttatatactg

SEQ ID NO: 276212 - DNA, 30 bp, Artificial Sequence
  Synthetic oligonucleotide
tggtgatattatctttgagaatgtatactg

SEQ ID NO: 276213 - DNA, 30 bp, Artificial Sequence
  Synthetic oligonucleotide
actatggtgttcgctaaggaaaatctactg

SEQ ID NO: 276214 - DNA, 30 bp, Artificial Sequence
  Synthetic oligonucleotide
ggggtggggagcgcctggccttgtctactg

SEQ ID NO: 276215 - DNA, 30 bp, Artificial Sequence
  Synthetic oligonucleotide
aagtttatcgaggacagtgaataagtactg

SEQ ID NO: 276216 - DNA, 30 bp, Artificial Sequence
  Synthetic oligonucleotide
ggttactgcaggtaagaaggacaggtactg

SEQ ID NO: 276217 - DNA, 30 bp, Artificial Sequence
  Synthetic oligonucleotide
ggttactcctcagacgtcacatcggtactg

SEQ ID NO: 276218 - DNA, 30 bp, Artificial Sequence
  Synthetic oligonucleotide
accctgagcagcactaactccaatgtactg

SEQ ID NO: 276219 - DNA, 30 bp, Artificial Sequence
  Synthetic oligonucleotide
gagttagacgtgaaggtttattacttactg

SEQ ID NO: 276220 - DNA, 30 bp, Artificial Sequence
  Synthetic oligonucleotide
tagctgcttcggtggtgaagggggttactg

SEQ ID NO: 276221 - DNA, 30 bp, Artificial Sequence
  Synthetic oligonucleotide
agggataccagtgaatcatttgctttactg

SEQ ID NO: 276222 - DNA, 31 bp, Artificial Sequence
  Synthetic oligonucleotide
ggacacgagtactttagcatcctgtttactg

SEQ ID NO: 276223 - DNA, 30 bp, Artificial Sequence
  Synthetic oligonucleotide
ctatgtcaggtaagactgaagtcaaacctg

SEQ ID NO: 276224 - DNA, 30 bp, Artificial Sequence
  Synthetic oligonucleotide
ctaggttgaggaatagttcaccccaacctg

SEQ ID NO: 276225 - DNA, 30 bp, Artificial Sequence
  Synthetic oligonucleotide
gggcttaatgctgtgcagtggatcaacctg

SEQ ID NO: 276226 - DNA, 30 bp, Artificial Sequence
  Synthetic oligonucleotide
agactagcaggagtggtgcaccggaacctg

SEQ ID NO: 276227 - DNA, 30 bp, Artificial Sequence
  Synthetic oligonucleotide
agaaattcttcgatttattcaatgaacctg

SEQ ID NO: 276228 - DNA, 30 bp, Artificial Sequence
  Synthetic oligonucleotide
taggacgaatgtgaccccctatgtaacctg

SEQ ID NO: 276229 - DNA, 30 bp, Artificial Sequence
  Synthetic oligonucleotide
actacgaacggtagactatatcgacacctg

SEQ ID NO: 276230 - DNA, 30 bp, Artificial Sequence
  Synthetic oligonucleotide
gtaccatgggtttggtacttgcggcacctg

SEQ ID NO: 276231 - DNA, 30 bp, Artificial Sequence
  Synthetic oligonucleotide
atatgtgtcacaatgtcttgcaatcacctg

SEQ ID NO: 276232 - DNA, 30 bp, Artificial Sequence
  Synthetic oligonucleotide
ggtgcacagtataactattacgatcacctg

SEQ ID NO: 276233 - DNA, 30 bp, Artificial Sequence
  Synthetic oligonucleotide
acctgcgggggacgaagatccctagacctg

SEQ ID NO: 276234 - DNA, 30 bp, Artificial Sequence
  Synthetic oligonucleotide
gcacgtctctcatattatatggtcgacctg

SEQ ID NO: 276235 - DNA, 30 bp, Artificial Sequence
  Synthetic oligonucleotide
ttgtccaatcccattgtacccttggacctg

SEQ ID NO: 276236 - DNA, 30 bp, Artificial Sequence
  Synthetic oligonucleotide
ctggtgtcacatggcaatcactaatacctg

SEQ ID NO: 276237 - DNA, 30 bp, Artificial Sequence
  Synthetic oligonucleotide
tgcaccaaaagggattcgcaaacatacctg

SEQ ID NO: 276238 - DNA, 30 bp, Artificial Sequence
  Synthetic oligonucleotide
ttttcaaatcatgggcaaggtcgatacctg

SEQ ID NO: 276239 - DNA, 30 bp, Artificial Sequence
  Synthetic oligonucleotide
gctcacaattagtttgagaggcactacctg

SEQ ID NO: 276240 - DNA, 30 bp, Artificial Sequence
  Synthetic oligonucleotide
acgctcaggccgctgccgagcaagtacctg

SEQ ID NO: 276241 - DNA, 30 bp, Artificial Sequence
  Synthetic oligonucleotide
tgagagcgaatcacattttgattaaccctg

SEQ ID NO: 276242 - DNA, 30 bp, Artificial Sequence
  Synthetic oligonucleotide
tagggggatttcatacagcgtcccaccctg

SEQ ID NO: 276243 - DNA, 30 bp, Artificial Sequence
  Synthetic oligonucleotide
accacatagaagcgcacgttatagaccctg

SEQ ID NO: 276244 - DNA, 30 bp, Artificial Sequence
  Synthetic oligonucleotide
tgtagagccatttcttgtcccgcgaccctg

SEQ ID NO: 276245 - DNA, 30 bp, Artificial Sequence
  Synthetic oligonucleotide
accaagacagcaactcaaatggcgaccctg

SEQ ID NO: 276246 - DNA, 30 bp, Artificial Sequence
  Synthetic oligonucleotide
gacggaaatcgaacctaatttgataccctg

SEQ ID NO: 276247 - DNA, 30 bp, Artificial Sequence
  Synthetic oligonucleotide
aacatcgacaccgggcgaaaaaaacccctg

SEQ ID NO: 276248 - DNA, 30 bp, Artificial Sequence
  Synthetic oligonucleotide
aggttgagcctccgggcgacgtcacccctg

SEQ ID NO: 276249 - DNA, 30 bp, Artificial Sequence
  Synthetic oligonucleotide
tgaccacggcggggtcagtactagcccctg

SEQ ID NO: 276250 - DNA, 30 bp, Artificial Sequence
  Synthetic oligonucleotide
gacgtattactctggcttacgagagccctg

SEQ ID NO: 276251 - DNA, 30 bp, Artificial Sequence
  Synthetic oligonucleotide
cacccgaggctgggctcgtgggcggccctg

SEQ ID NO: 276252 - DNA, 30 bp, Artificial Sequence
  Synthetic oligonucleotide
aaccgaattgaattaatagtacctgccctg

SEQ ID NO: 276253 - DNA, 30 bp, Artificial Sequence
  Synthetic oligonucleotide
tcgattctagagaacattggacttgccctg

SEQ ID NO: 276254 - DNA, 30 bp, Artificial Sequence
  Synthetic oligonucleotide
caaacaggtactcagctctatacatccctg

SEQ ID NO: 276255 - DNA, 30 bp, Artificial Sequence
  Synthetic oligonucleotide
catgccaattaacctctcagaccatccctg

SEQ ID NO: 276256 - DNA, 30 bp, Artificial Sequence
  Synthetic oligonucleotide
tgtacaagttggggcgccgcaagatccctg

SEQ ID NO: 276257 - DNA, 30 bp, Artificial Sequence
  Synthetic oligonucleotide
atagcatgtctagatgcactgtactccctg

SEQ ID NO: 276258 - DNA, 30 bp, Artificial Sequence
  Synthetic oligonucleotide
cctgttttaccttcgggctgaatctccctg

SEQ ID NO: 276259 - DNA, 30 bp, Artificial Sequence
  Synthetic oligonucleotide
cagttatatgtattctcacccgagtccctg

SEQ ID NO: 276260 - DNA, 30 bp, Artificial Sequence
  Synthetic oligonucleotide
taagtgagaagggtccggccccgaagcctg

SEQ ID NO: 276261 - DNA, 30 bp, Artificial Sequence
  Synthetic oligonucleotide
ggcccaagctcggagttgtagttgagcctg

SEQ ID NO: 276262 - DNA, 30 bp, Artificial Sequence
  Synthetic oligonucleotide
tatagggaaccagtccctggtaatagcctg

SEQ ID NO: 276263 - DNA, 30 bp, Artificial Sequence
  Synthetic oligonucleotide
gcaggcgcggaacgggtaactgaacgcctg

SEQ ID NO: 276264 - DNA, 30 bp, Artificial Sequence
  Synthetic oligonucleotide
ccgttgacgaggggatgggaatcccgcctg

SEQ ID NO: 276265 - DNA, 30 bp, Artificial Sequence
  Synthetic oligonucleotide
tccatgtgggatatgagtataatccgcctg

SEQ ID NO: 276266 - DNA, 30 bp, Artificial Sequence
  Synthetic oligonucleotide
tggggtggtggagacataggaaggggcctg

SEQ ID NO: 276267 - DNA, 30 bp, Artificial Sequence
  Synthetic oligonucleotide
ccccacactaatgaaataggcgtgggcctg

SEQ ID NO: 276268 - DNA, 30 bp, Artificial Sequence
  Synthetic oligonucleotide
cgactcttgaacaatgcatgtcatggcctg

SEQ ID NO: 276269 - DNA, 30 bp, Artificial Sequence
  Synthetic oligonucleotide
attgtctagttcagggcgcgacaatgcctg

SEQ ID NO: 276270 - DNA, 30 bp, Artificial Sequence
  Synthetic oligonucleotide
ctaggcctgcgtcgctttcaaatatgcctg

SEQ ID NO: 276271 - DNA, 30 bp, Artificial Sequence
  Synthetic oligonucleotide
cccattcttgcgtagtagtgaaggtgcctg

SEQ ID NO: 276272 - DNA, 30 bp, Artificial Sequence
  Synthetic oligonucleotide
gttcgttgactcggacagagggcaatcctg

SEQ ID NO: 276273 - DNA, 30 bp, Artificial Sequence
  Synthetic oligonucleotide
tcctttggggctgcctaatcgtgcatcctg

SEQ ID NO: 276274 - DNA, 30 bp, Artificial Sequence
  Synthetic oligonucleotide
gactgcgctgggtgcatggagtttatcctg

SEQ ID NO: 276275 - DNA, 30 bp, Artificial Sequence
  Synthetic oligonucleotide
tggtttgaacgcactccgtgttccctcctg

SEQ ID NO: 276276 - DNA, 30 bp, Artificial Sequence
  Synthetic oligonucleotide
ggcgggagcggaaccaacccgattctcctg

SEQ ID NO: 276277 - DNA, 30 bp, Artificial Sequence
  Synthetic oligonucleotide
agactccgaactccaggtaggaaagtcctg

SEQ ID NO: 276278 - DNA, 30 bp, Artificial Sequence
  Synthetic oligonucleotide
aaataggcaagcccgtgtaagggcgtcctg

SEQ ID NO: 276279 - DNA, 30 bp, Artificial Sequence
  Synthetic oligonucleotide
tcgcacactgttggatagttgtgcttcctg

SEQ ID NO: 276280 - DNA, 30 bp, Artificial Sequence
  Synthetic oligonucleotide
aacgttgccaatgaacgttgccagttcctg

SEQ ID NO: 276281 - DNA, 30 bp, Artificial Sequence
  Synthetic oligonucleotide
ctctatggcccgcgtcctgattggttcctg

SEQ ID NO: 276282 - DNA, 30 bp, Artificial Sequence
  Synthetic oligonucleotide
gcggtcatatgtttctcgtatactttcctg

SEQ ID NO: 276283 - DNA, 30 bp, Artificial Sequence
  Synthetic oligonucleotide
ccgattccactagattgacgacgtttcctg

SEQ ID NO: 276284 - DNA, 30 bp, Artificial Sequence
  Synthetic oligonucleotide
attctcacatggctgagatgaggcaagctg

SEQ ID NO: 276285 - DNA, 30 bp, Artificial Sequence
  Synthetic oligonucleotide
caaagatgcttagctgtgcgggtcaagctg

SEQ ID NO: 276286 - DNA, 30 bp, Artificial Sequence
  Synthetic oligonucleotide
agacctgcacctctcccaatgcataagctg

SEQ ID NO: 276287 - DNA, 30 bp, Artificial Sequence
  Synthetic oligonucleotide
tttctttaacgccttacttatgtagagctg

SEQ ID NO: 276288 - DNA, 30 bp, Artificial Sequence
  Synthetic oligonucleotide
atatcgccccctagacgcatcgacgagctg

SEQ ID NO: 276289 - DNA, 30 bp, Artificial Sequence
  Synthetic oligonucleotide
agggtatagacgaaagcagactccgagctg

SEQ ID NO: 276290 - DNA, 30 bp, Artificial Sequence
  Synthetic oligonucleotide
accgtatgagcaaaataacgtacggagctg

SEQ ID NO: 276291 - DNA, 30 bp, Artificial Sequence
  Synthetic oligonucleotide
gacatctgtgggtcaggatccactgagctg

SEQ ID NO: 276292 - DNA, 30 bp, Artificial Sequence
  Synthetic oligonucleotide
gtttgaacttagtgtggaattgtctagctg

SEQ ID NO: 276293 - DNA, 30 bp, Artificial Sequence
  Synthetic oligonucleotide
aatgttaacgcgtccttctattcgtagctg

SEQ ID NO: 276294 - DNA, 30 bp, Artificial Sequence
  Synthetic oligonucleotide
ctaagatagcaggctcaatttaaaacgctg

SEQ ID NO: 276295 - DNA, 30 bp, Artificial Sequence
  Synthetic oligonucleotide
tccgatatgaccccacggagagtcacgctg

SEQ ID NO: 276296 - DNA, 30 bp, Artificial Sequence
  Synthetic oligonucleotide
tgagctctcgtcatagacagccatacgctg

SEQ ID NO: 276297 - DNA, 30 bp, Artificial Sequence
  Synthetic oligonucleotide
gcctaggttagcaatgcgaatattacgctg

SEQ ID NO: 276298 - DNA, 30 bp, Artificial Sequence
  Synthetic oligonucleotide
tcgaggtatagaaaacctacctgcccgctg

SEQ ID NO: 276299 - DNA, 30 bp, Artificial Sequence
  Synthetic oligonucleotide
agctgcttagttagaaatcattccgcgctg

SEQ ID NO: 276300 - DNA, 30 bp, Artificial Sequence
  Synthetic oligonucleotide
aaccgatctcgacgcgatctatctgcgctg

SEQ ID NO: 276301 - DNA, 30 bp, Artificial Sequence
  Synthetic oligonucleotide
gacctttcggtagcaacacggtcctcgctg

SEQ ID NO: 276302 - DNA, 30 bp, Artificial Sequence
  Synthetic oligonucleotide
aacggttattgaacggtgggcacaaggctg

SEQ ID NO: 276303 - DNA, 30 bp, Artificial Sequence
  Synthetic oligonucleotide
tatagcaagctgtccggcatcgggaggctg

SEQ ID NO: 276304 - DNA, 30 bp, Artificial Sequence
  Synthetic oligonucleotide
gtcgaacctatacggtactctaataggctg

SEQ ID NO: 276305 - DNA, 30 bp, Artificial Sequence
  Synthetic oligonucleotide
gctctggctgtataggacaactttaggctg

SEQ ID NO: 276306 - DNA, 30 bp, Artificial Sequence
  Synthetic oligonucleotide
aacagttatgggattgatatagaacggctg

SEQ ID NO: 276307 - DNA, 30 bp, Artificial Sequence
  Synthetic oligonucleotide
ggcggttcgtggatacacaccaaccggctg

SEQ ID NO: 276308 - DNA, 30 bp, Artificial Sequence
  Synthetic oligonucleotide
tgtactgtggggatcgcaagcaagcggctg

SEQ ID NO: 276309 - DNA, 30 bp, Artificial Sequence
  Synthetic oligonucleotide
cgcaatgaccacaagatgcgcagtcggctg

SEQ ID NO: 276310 - DNA, 30 bp, Artificial Sequence
  Synthetic oligonucleotide
agactgcgagcaaaagatgctcacgggctg

SEQ ID NO: 276311 - DNA, 30 bp, Artificial Sequence
  Synthetic oligonucleotide
gaagctcctatgacacataatgaggggctg

SEQ ID NO: 276312 - DNA, 30 bp, Artificial Sequence
  Synthetic oligonucleotide
ccacaaaatatggtaccacgctaatggctg

SEQ ID NO: 276313 - DNA, 30 bp, Artificial Sequence
  Synthetic oligonucleotide
tatgaacagtacattgtcaagaactggctg

SEQ ID NO: 276314 - DNA, 30 bp, Artificial Sequence
  Synthetic oligonucleotide
aacttgcgtaatagcatgtgcaggtggctg

SEQ ID NO: 276315 - DNA, 30 bp, Artificial Sequence
  Synthetic oligonucleotide
actaacaccttttgtatctgggtgatgctg

SEQ ID NO: 276316 - DNA, 30 bp, Artificial Sequence
  Synthetic oligonucleotide
aataccactaggcgacaggtccccctgctg

SEQ ID NO: 276317 - DNA, 30 bp, Artificial Sequence
  Synthetic oligonucleotide
cgcgtgatttgccgttccagctccctgctg

SEQ ID NO: 276318 - DNA, 30 bp, Artificial Sequence
  Synthetic oligonucleotide
gctatacgctttgttcagtgggggctgctg

SEQ ID NO: 276319 - DNA, 30 bp, Artificial Sequence
  Synthetic oligonucleotide
ggacgagagttggtcggtataggtctgctg

SEQ ID NO: 276320 - DNA, 30 bp, Artificial Sequence
  Synthetic oligonucleotide
gtgccgaagctccctcattactgtctgctg

SEQ ID NO: 276321 - DNA, 30 bp, Artificial Sequence
  Synthetic oligonucleotide
aataatgaattcctaggcattaccgtgctg

SEQ ID NO: 276322 - DNA, 30 bp, Artificial Sequence
  Synthetic oligonucleotide
cacccacgaatatgtgggggctaggtgctg

SEQ ID NO: 276323 - DNA, 30 bp, Artificial Sequence
  Synthetic oligonucleotide
ctatcagatttggggtcccatttggtgctg

SEQ ID NO: 276324 - DNA, 30 bp, Artificial Sequence
  Synthetic oligonucleotide
gccggagggcacgcatcgaagactgtgctg

SEQ ID NO: 276325 - DNA, 30 bp, Artificial Sequence
  Synthetic oligonucleotide
catatgtgtcgtctcaacacccttgtgctg

SEQ ID NO: 276326 - DNA, 30 bp, Artificial Sequence
  Synthetic oligonucleotide
tcaagatccgttcagaatgatcttgtgctg

SEQ ID NO: 276327 - DNA, 30 bp, Artificial Sequence
  Synthetic oligonucleotide
cctgcacgcgagagggcctcttacttgctg

SEQ ID NO: 276328 - DNA, 30 bp, Artificial Sequence
  Synthetic oligonucleotide
cggctatatcatctgtagaggggaaatctg

SEQ ID NO: 276329 - DNA, 30 bp, Artificial Sequence
  Synthetic oligonucleotide
ttccgcccatctacatgacaagttaatctg

SEQ ID NO: 276330 - DNA, 30 bp, Artificial Sequence
  Synthetic oligonucleotide
atagccggtggacactcaaacggacatctg

SEQ ID NO: 276331 - DNA, 30 bp, Artificial Sequence
  Synthetic oligonucleotide
ttagggagcgggactataattgatcatctg

SEQ ID NO: 276332 - DNA, 30 bp, Artificial Sequence
  Synthetic oligonucleotide
acggctattagaacgggtagcagtcatctg

SEQ ID NO: 276333 - DNA, 30 bp, Artificial Sequence
  Synthetic oligonucleotide
agaggtactaaccttcctttttaagatctg

SEQ ID NO: 276334 - DNA, 30 bp, Artificial Sequence
  Synthetic oligonucleotide
ccacgtcaccgtcgtgttcatcgcgatctg

SEQ ID NO: 276335 - DNA, 30 bp, Artificial Sequence
  Synthetic oligonucleotide
ctccagtcgtcctaagctgagggcgatctg

SEQ ID NO: 276336 - DNA, 30 bp, Artificial Sequence
  Synthetic oligonucleotide
gggcgattagcgcaattaagtgaggatctg

SEQ ID NO: 276337 - DNA, 30 bp, Artificial Sequence
  Synthetic oligonucleotide
tggaatccggcccgacacggttgtgatctg

SEQ ID NO: 276338 - DNA, 30 bp, Artificial Sequence
  Synthetic oligonucleotide
caggggatcctggttggctggcgatatctg

SEQ ID NO: 276339 - DNA, 30 bp, Artificial Sequence
  Synthetic oligonucleotide
ttacgagctacaggtatcagtctatatctg

SEQ ID NO: 276340 - DNA, 30 bp, Artificial Sequence
  Synthetic oligonucleotide
gcggtccaaataaaatcatgcgtgtatctg

SEQ ID NO: 276341 - DNA, 30 bp, Artificial Sequence
  Synthetic oligonucleotide
tggccttggtacaccatcgtaaattatctg

SEQ ID NO: 276342 - DNA, 30 bp, Artificial Sequence
  Synthetic oligonucleotide
ataccgagtttttaaccgaatacttatctg

SEQ ID NO: 276343 - DNA, 31 bp, Artificial Sequence
  Synthetic oligonucleotide
catgggcgtatggggggcgcgataaactctg

SEQ ID NO: 276344 - DNA, 30 bp, Artificial Sequence
  Synthetic oligonucleotide
tattcctgtgatactcatgtaaccactctg

SEQ ID NO: 276345 - DNA, 30 bp, Artificial Sequence
  Synthetic oligonucleotide
gttgaatgtcctcaaactaacagcactctg

SEQ ID NO: 276346 - DNA, 30 bp, Artificial Sequence
  Synthetic oligonucleotide
taggtctgggggatgtcatataggactctg

SEQ ID NO: 276347 - DNA, 30 bp, Artificial Sequence
  Synthetic oligonucleotide
actgattattttatatttcggaatactctg

SEQ ID NO: 276348 - DNA, 30 bp, Artificial Sequence
  Synthetic oligonucleotide
acacgcggtgtacctcacgatgcacctctg

SEQ ID NO: 276349 - DNA, 30 bp, Artificial Sequence
  Synthetic oligonucleotide
ggtttatacgcataatagacattccctctg

SEQ ID NO: 276350 - DNA, 30 bp, Artificial Sequence
  Synthetic oligonucleotide
ccagtgccagctgaggtaggtcagcctctg

SEQ ID NO: 276351 - DNA, 30 bp, Artificial Sequence
  Synthetic oligonucleotide
gacgtgataaacctgtaggatcatcctctg

SEQ ID NO: 276352 - DNA, 30 bp, Artificial Sequence
  Synthetic oligonucleotide
taggcttcgtaggtttctatcagcgctctg

SEQ ID NO: 276353 - DNA, 30 bp, Artificial Sequence
  Synthetic oligonucleotide
caactcgcgaagcaccggtgactggctctg

SEQ ID NO: 276354 - DNA, 30 bp, Artificial Sequence
  Synthetic oligonucleotide
gggtccgtgtaatgggactgggtggctctg

SEQ ID NO: 276355 - DNA, 30 bp, Artificial Sequence
  Synthetic oligonucleotide
gaggaagtttcgaaccagattcgatctctg

SEQ ID NO: 276356 - DNA, 30 bp, Artificial Sequence
  Synthetic oligonucleotide
actggcggatggtgtgcaggagggtctctg

SEQ ID NO: 276357 - DNA, 30 bp, Artificial Sequence
  Synthetic oligonucleotide
ttggttgccaacacttcacgccgttctctg

SEQ ID NO: 276358 - DNA, 30 bp, Artificial Sequence
  Synthetic oligonucleotide
ctaggctcacatagctttgctcaaagtctg

SEQ ID NO: 276359 - DNA, 30 bp, Artificial Sequence
  Synthetic oligonucleotide
tattagacgatagtggggttcacaagtctg

SEQ ID NO: 276360 - DNA, 30 bp, Artificial Sequence
  Synthetic oligonucleotide
ctgtaaaagcaaagagttctgccaagtctg

SEQ ID NO: 276361 - DNA, 30 bp, Artificial Sequence
  Synthetic oligonucleotide
taaggcgcatatcccttgatgtagagtctg

SEQ ID NO: 276362 - DNA, 30 bp, Artificial Sequence
  Synthetic oligonucleotide
gggagatttatatgtttgaggttccgtctg

SEQ ID NO: 276363 - DNA, 30 bp, Artificial Sequence
  Synthetic oligonucleotide
agggctgtactggtaccctataatcgtctg

SEQ ID NO: 276364 - DNA, 30 bp, Artificial Sequence
  Synthetic oligonucleotide
aggcctgggagtccgcgggactgaggtctg

SEQ ID NO: 276365 - DNA, 30 bp, Artificial Sequence
  Synthetic oligonucleotide
aaaatacaccgctacagcaagaacggtctg

SEQ ID NO: 276366 - DNA, 30 bp, Artificial Sequence
  Synthetic oligonucleotide
tcgtaccccatcaccggtgtaagcggtctg

SEQ ID NO: 276367 - DNA, 30 bp, Artificial Sequence
  Synthetic oligonucleotide
ataggaggtatgactgcgggagggggtctg

SEQ ID NO: 276368 - DNA, 30 bp, Artificial Sequence
  Synthetic oligonucleotide
gattccagtatcgcatcagaaaaatgtctg

SEQ ID NO: 276369 - DNA, 30 bp, Artificial Sequence
  Synthetic oligonucleotide
gcgttcacgactaattaacaataatgtctg

SEQ ID NO: 276370 - DNA, 30 bp, Artificial Sequence
  Synthetic oligonucleotide
gggggactaagtcgattagcttgatgtctg

SEQ ID NO: 276371 - DNA, 30 bp, Artificial Sequence
  Synthetic oligonucleotide
acaccgggattccatcatgaatcctgtctg

SEQ ID NO: 276372 - DNA, 30 bp, Artificial Sequence
  Synthetic oligonucleotide
gccgtcctagttcactgcagtggctgtctg

SEQ ID NO: 276373 - DNA, 30 bp, Artificial Sequence
  Synthetic oligonucleotide
cccccgaaaattctattcgaaatctgtctg

SEQ ID NO: 276374 - DNA, 30 bp, Artificial Sequence
  Synthetic oligonucleotide
gagtcatgtgcgcaggaacaaggttgtctg

SEQ ID NO: 276375 - DNA, 30 bp, Artificial Sequence
  Synthetic oligonucleotide
cggcattcttaggaaatgtcaacaattctg

SEQ ID NO: 276376 - DNA, 30 bp, Artificial Sequence
  Synthetic oligonucleotide
caaggtatcgtagttaagtgatacattctg

SEQ ID NO: 276377 - DNA, 30 bp, Artificial Sequence
  Synthetic oligonucleotide
gccacaggaaacatgtagttattcattctg

SEQ ID NO: 276378 - DNA, 30 bp, Artificial Sequence
  Synthetic oligonucleotide
aatctagataacggtcatgccaagattctg

SEQ ID NO: 276379 - DNA, 30 bp, Artificial Sequence
  Synthetic oligonucleotide
gcgaaggcagccggctggattgggattctg

SEQ ID NO: 276380 - DNA, 30 bp, Artificial Sequence
  Synthetic oligonucleotide
cgtttaacttctagggcccgtctgattctg

SEQ ID NO: 276381 - DNA, 30 bp, Artificial Sequence
  Synthetic oligonucleotide
aatggtgtagacaccctgtacaaacttctg

SEQ ID NO: 276382 - DNA, 30 bp, Artificial Sequence
  Synthetic oligonucleotide
gtcggttcgtttccatccagtagacttctg

SEQ ID NO: 276383 - DNA, 30 bp, Artificial Sequence
  Synthetic oligonucleotide
gatgctttgcatttcagcaggatacttctg

SEQ ID NO: 276384 - DNA, 30 bp, Artificial Sequence
  Synthetic oligonucleotide
ttggatatattgagtagagagcaccttctg

SEQ ID NO: 276385 - DNA, 30 bp, Artificial Sequence
  Synthetic oligonucleotide
gttcgaaagtcgactctttatatgcttctg

SEQ ID NO: 276386 - DNA, 30 bp, Artificial Sequence
  Synthetic oligonucleotide
ccaggtacatcgacgtattttggagttctg

SEQ ID NO: 276387 - DNA, 30 bp, Artificial Sequence
  Synthetic oligonucleotide
gcgaccacgtgtacacgagtcattgttctg

SEQ ID NO: 276388 - DNA, 30 bp, Artificial Sequence
  Synthetic oligonucleotide
gaacagatacgtacaggagcaaaatttctg

SEQ ID NO: 276389 - DNA, 30 bp, Artificial Sequence
  Synthetic oligonucleotide
tagggtcgtcgtaccgagcagcgctttctg

SEQ ID NO: 276390 - DNA, 30 bp, Artificial Sequence
  Synthetic oligonucleotide
tttgttcgaggagtgttcaatcggtttctg

SEQ ID NO: 276391 - DNA, 30 bp, Artificial Sequence
  Synthetic oligonucleotide
gctaaggccatgaatcaccatgggtttctg

SEQ ID NO: 276392 - DNA, 30 bp, Artificial Sequence
  Synthetic oligonucleotide
agtttggcattaacatgacataaaaaagtg

SEQ ID NO: 276393 - DNA, 30 bp, Artificial Sequence
  Synthetic oligonucleotide
tttaatcatctgccgtgtgtggaaaaagtg

SEQ ID NO: 276394 - DNA, 30 bp, Artificial Sequence
  Synthetic oligonucleotide
gttaagcgcagtgccctgttttaaaaagtg

SEQ ID NO: 276395 - DNA, 30 bp, Artificial Sequence
  Synthetic oligonucleotide
gattggattagtgactaggaaccaaaagtg

SEQ ID NO: 276396 - DNA, 30 bp, Artificial Sequence
  Synthetic oligonucleotide
tcgccgtgtctctctcaatggtacaaagtg

SEQ ID NO: 276397 - DNA, 30 bp, Artificial Sequence
  Synthetic oligonucleotide
ttccatgggtccagtggtcgccgcaaagtg

SEQ ID NO: 276398 - DNA, 30 bp, Artificial Sequence
  Synthetic oligonucleotide
aacagatgagtatttatattcgttaaagtg

SEQ ID NO: 276399 - DNA, 30 bp, Artificial Sequence
  Synthetic oligonucleotide
taaactctctgaatgtgctgatgacaagtg

SEQ ID NO: 276400 - DNA, 30 bp, Artificial Sequence
  Synthetic oligonucleotide
tgtcggaacacttaggtagtcccccaagtg

SEQ ID NO: 276401 - DNA, 30 bp, Artificial Sequence
  Synthetic oligonucleotide
tctcaggaagttaattcagctgcccaagtg

SEQ ID NO: 276402 - DNA, 30 bp, Artificial Sequence
  Synthetic oligonucleotide
ggtgtacaaactcagtatcccacgcaagtg

SEQ ID NO: 276403 - DNA, 30 bp, Artificial Sequence
  Synthetic oligonucleotide
ccctgtgctcataccactagacctcaagtg

SEQ ID NO: 276404 - DNA, 30 bp, Artificial Sequence
  Synthetic oligonucleotide
agggcgcgcattctgaggttatctcaagtg

SEQ ID NO: 276405 - DNA, 30 bp, Artificial Sequence
  Synthetic oligonucleotide
acctatcgttattccgaggtttaagaagtg

SEQ ID NO: 276406 - DNA, 30 bp, Artificial Sequence
  Synthetic oligonucleotide
ctattactctcaggtattacagcagaagtg

SEQ ID NO: 276407 - DNA, 30 bp, Artificial Sequence
  Synthetic oligonucleotide
cgatttaaggcctaacgttttagagaagtg

SEQ ID NO: 276408 - DNA, 30 bp, Artificial Sequence
  Synthetic oligonucleotide
cgccgactgctagaatcatttatggaagtg

SEQ ID NO: 276409 - DNA, 30 bp, Artificial Sequence
  Synthetic oligonucleotide
tcttgtattgaacttatttgattggaagtg

SEQ ID NO: 276410 - DNA, 30 bp, Artificial Sequence
  Synthetic oligonucleotide
gcaccatcgaaatgttcattgggataagtg

SEQ ID NO: 276411 - DNA, 30 bp, Artificial Sequence
  Synthetic oligonucleotide
caggttacttattattctggtcactaagtg

SEQ ID NO: 276412 - DNA, 30 bp, Artificial Sequence
  Synthetic oligonucleotide
atcttacggtttaaaccggcttgctaagtg

SEQ ID NO: 276413 - DNA, 30 bp, Artificial Sequence
  Synthetic oligonucleotide
gtggaatagtatgaatctagaatctaagtg

SEQ ID NO: 276414 - DNA, 30 bp, Artificial Sequence
  Synthetic oligonucleotide
gcctcttgctcggattcgacagtctaagtg

SEQ ID NO: 276415 - DNA, 30 bp, Artificial Sequence
  Synthetic oligonucleotide
ctaccgttcagcatagtgccattctaagtg

SEQ ID NO: 276416 - DNA, 30 bp, Artificial Sequence
  Synthetic oligonucleotide
ctcattttaggccgatgtacattgtaagtg

SEQ ID NO: 276417 - DNA, 30 bp, Artificial Sequence
  Synthetic oligonucleotide
ctactaagtgcccacccagagggaacagtg

SEQ ID NO: 276418 - DNA, 30 bp, Artificial Sequence
  Synthetic oligonucleotide
atcgacgaacaacaacctaatgacacagtg

SEQ ID NO: 276419 - DNA, 30 bp, Artificial Sequence
  Synthetic oligonucleotide
gtggtagtgaatacgtgtttctcgacagtg

SEQ ID NO: 276420 - DNA, 30 bp, Artificial Sequence
  Synthetic oligonucleotide
agcgcaacctgcacgtatgcaattacagtg

SEQ ID NO: 276421 - DNA, 30 bp, Artificial Sequence
  Synthetic oligonucleotide
ggtaatcgcagtaaagcatctgttacagtg

SEQ ID NO: 276422 - DNA, 30 bp, Artificial Sequence
  Synthetic oligonucleotide
ttgtttaatcccaggtacaaagcaccagtg

SEQ ID NO: 276423 - DNA, 30 bp, Artificial Sequence
  Synthetic oligonucleotide
gcacacaagcgcacgtatagggcaccagtg

SEQ ID NO: 276424 - DNA, 30 bp, Artificial Sequence
  Synthetic oligonucleotide
tttcggacttccagggggacgataccagtg

SEQ ID NO: 276425 - DNA, 30 bp, Artificial Sequence
  Synthetic oligonucleotide
caccccatgtaaggatcgggcctcgcagtg

SEQ ID NO: 276426 - DNA, 30 bp, Artificial Sequence
  Synthetic oligonucleotide
cattgcccagtgcattgcaatgcggcagtg

SEQ ID NO: 276427 - DNA, 30 bp, Artificial Sequence
  Synthetic oligonucleotide
cttaacgatagaaagacatcaggtgcagtg

SEQ ID NO: 276428 - DNA, 30 bp, Artificial Sequence
  Synthetic oligonucleotide
tagatacgggttctcgctcagcgatcagtg

SEQ ID NO: 276429 - DNA, 30 bp, Artificial Sequence
  Synthetic oligonucleotide
tagataaccaactaactaattcagtcagtg

SEQ ID NO: 276430 - DNA, 30 bp, Artificial Sequence
  Synthetic oligonucleotide
tcgcgtggatgggtttatggttagtcagtg

SEQ ID NO: 276431 - DNA, 30 bp, Artificial Sequence
  Synthetic oligonucleotide
atagaaaccaggacgtgtacaacgtcagtg

SEQ ID NO: 276432 - DNA, 30 bp, Artificial Sequence
  Synthetic oligonucleotide
aaattcctggtttcaggacgggacagagtg

SEQ ID NO: 276433 - DNA, 30 bp, Artificial Sequence
  Synthetic oligonucleotide
ctaactcccatattgcaccgcgtcagagtg

SEQ ID NO: 276434 - DNA, 30 bp, Artificial Sequence
  Synthetic oligonucleotide
cttggtaatgataagctgttttagagagtg

SEQ ID NO: 276435 - DNA, 30 bp, Artificial Sequence
  Synthetic oligonucleotide
tctgagcttcgctgagggttaagacgagtg

SEQ ID NO: 276436 - DNA, 30 bp, Artificial Sequence
  Synthetic oligonucleotide
ttaataggttaaataggatgaggacgagtg

SEQ ID NO: 276437 - DNA, 30 bp, Artificial Sequence
  Synthetic oligonucleotide
aatccaaccattaatcatgggtcccgagtg

SEQ ID NO: 276438 - DNA, 30 bp, Artificial Sequence
  Synthetic oligonucleotide
gaatttcattcttggcgtgaaagccgagtg

SEQ ID NO: 276439 - DNA, 30 bp, Artificial Sequence
  Synthetic oligonucleotide
gatggcgaaattccgctggcacagcgagtg

SEQ ID NO: 276440 - DNA, 30 bp, Artificial Sequence
  Synthetic oligonucleotide
ggtctgtagcacagggtgattgatcgagtg

SEQ ID NO: 276441 - DNA, 30 bp, Artificial Sequence
  Synthetic oligonucleotide
accagcacagaacgtgtttcagcaggagtg

SEQ ID NO: 276442 - DNA, 30 bp, Artificial Sequence
  Synthetic oligonucleotide
attgtggtacggtcgtgatcggccggagtg

SEQ ID NO: 276443 - DNA, 30 bp, Artificial Sequence
  Synthetic oligonucleotide
tggttcgtcagttggtacaaatctggagtg

SEQ ID NO: 276444 - DNA, 30 bp, Artificial Sequence
  Synthetic oligonucleotide
ggactaggccaaggttcattctttggagtg

SEQ ID NO: 276445 - DNA, 30 bp, Artificial Sequence
  Synthetic oligonucleotide
gatcggtggccactcgtcaagttatgagtg

SEQ ID NO: 276446 - DNA, 30 bp, Artificial Sequence
  Synthetic oligonucleotide
acgtctcatgcacacaaattctcgtgagtg

SEQ ID NO: 276447 - DNA, 30 bp, Artificial Sequence
  Synthetic oligonucleotide
tggaaaccggtatctactgcggggtgagtg

SEQ ID NO: 276448 - DNA, 30 bp, Artificial Sequence
  Synthetic oligonucleotide
cccggtaactgtgttcacctcttgtgagtg

SEQ ID NO: 276449 - DNA, 30 bp, Artificial Sequence
  Synthetic oligonucleotide
tcacacttccagcagtacaccgcaatagtg

SEQ ID NO: 276450 - DNA, 30 bp, Artificial Sequence
  Synthetic oligonucleotide
ctccttcaagtgtggaccgaaggaatagtg

SEQ ID NO: 276451 - DNA, 30 bp, Artificial Sequence
  Synthetic oligonucleotide
aagtagttcgtggaacatgctgtaatagtg

SEQ ID NO: 276452 - DNA, 30 bp, Artificial Sequence
  Synthetic oligonucleotide
aacacatatttgcgattacagcacatagtg

SEQ ID NO: 276453 - DNA, 30 bp, Artificial Sequence
  Synthetic oligonucleotide
tatcatgccgagacgaaggtagacatagtg

SEQ ID NO: 276454 - DNA, 30 bp, Artificial Sequence
  Synthetic oligonucleotide
gaggatttataaactaggagaaccatagtg

SEQ ID NO: 276455 - DNA, 30 bp, Artificial Sequence
  Synthetic oligonucleotide
atcagattgaaggtccagctttcgatagtg

SEQ ID NO: 276456 - DNA, 30 bp, Artificial Sequence
  Synthetic oligonucleotide
gctaagcatgtttggtgcaggtttatagtg

SEQ ID NO: 276457 - DNA, 30 bp, Artificial Sequence
  Synthetic oligonucleotide
gcgcgagccatttagcgtcatttactagtg

SEQ ID NO: 276458 - DNA, 30 bp, Artificial Sequence
  Synthetic oligonucleotide
ggaaatttcatgtatacgatttacctagtg

SEQ ID NO: 276459 - DNA, 30 bp, Artificial Sequence
  Synthetic oligonucleotide
cattcatatacgagcttaacggccctagtg

SEQ ID NO: 276460 - DNA, 30 bp, Artificial Sequence
  Synthetic oligonucleotide
cttcaacaaacgaagctgatggccctagtg

SEQ ID NO: 276461 - DNA, 30 bp, Artificial Sequence
  Synthetic oligonucleotide
cgggctgaggatctgttgacccggctagtg

SEQ ID NO: 276462 - DNA, 30 bp, Artificial Sequence
  Synthetic oligonucleotide
ggaaactgattaccgtctttgatgctagtg

SEQ ID NO: 276463 - DNA, 30 bp, Artificial Sequence
  Synthetic oligonucleotide
attacgccccatacacgaatactagtagtg

SEQ ID NO: 276464 - DNA, 30 bp, Artificial Sequence
  Synthetic oligonucleotide
cttacctactcgtatacctaacacgtagtg

SEQ ID NO: 276465 - DNA, 30 bp, Artificial Sequence
  Synthetic oligonucleotide
tacctccacataaacaggaaagacgtagtg

SEQ ID NO: 276466 - DNA, 30 bp, Artificial Sequence
  Synthetic oligonucleotide
acacggacgttcacctagcaccccgtagtg

SEQ ID NO: 276467 - DNA, 30 bp, Artificial Sequence
  Synthetic oligonucleotide
gatgcaatgtaagttattttaggcgtagtg

SEQ ID NO: 276468 - DNA, 30 bp, Artificial Sequence
  Synthetic oligonucleotide
tgccataagatagaatctaagggcgtagtg

SEQ ID NO: 276469 - DNA, 30 bp, Artificial Sequence
  Synthetic oligonucleotide
taaccttaactaaggagtacaatcgtagtg

SEQ ID NO: 276470 - DNA, 30 bp, Artificial Sequence
  Synthetic oligonucleotide
cagctgtggggatttctatgacaggtagtg

SEQ ID NO: 276471 - DNA, 30 bp, Artificial Sequence
  Synthetic oligonucleotide
gtagaggcggtatgtatacccacggtagtg

SEQ ID NO: 276472 - DNA, 30 bp, Artificial Sequence
  Synthetic oligonucleotide
gaatgggtgcggcttcttctttcggtagtg

SEQ ID NO: 276473 - DNA, 30 bp, Artificial Sequence
  Synthetic oligonucleotide
aaacgactatgttgagacaggcatgtagtg

SEQ ID NO: 276474 - DNA, 30 bp, Artificial Sequence
  Synthetic oligonucleotide
aaaaagcgcactcgtacactagttgtagtg

SEQ ID NO: 276475 - DNA, 30 bp, Artificial Sequence
  Synthetic oligonucleotide
cagctcgtcccactattatgatttgtagtg

SEQ ID NO: 276476 - DNA, 30 bp, Artificial Sequence
  Synthetic oligonucleotide
cacccggtcgtggtttagtggttattagtg

SEQ ID NO: 276477 - DNA, 30 bp, Artificial Sequence
  Synthetic oligonucleotide
atcttctacatgttatcaatccgcttagtg

SEQ ID NO: 276478 - DNA, 30 bp, Artificial Sequence
  Synthetic oligonucleotide
tgagcccggtatccgcgagtatgcttagtg

SEQ ID NO: 276479 - DNA, 29 bp, Artificial Sequence
  Synthetic oligonucleotide
ttcataaggtgtgtcaacagtgcttagtg

SEQ ID NO: 276480 - DNA, 31 bp, Artificial Sequence
  Synthetic oligonucleotide
caagttgctggctcggcagaagcagttagtg

SEQ ID NO: 276481 - DNA, 30 bp, Artificial Sequence
  Synthetic oligonucleotide
aacagcgcgcctggtatggccatgttagtg

SEQ ID NO: 276482 - DNA, 30 bp, Artificial Sequence
  Synthetic oligonucleotide
ccgacttcttgggagggtccaactttagtg

SEQ ID NO: 276483 - DNA, 30 bp, Artificial Sequence
  Synthetic oligonucleotide
tttaatgatcgagggccgaaacctttagtg

SEQ ID NO: 276484 - DNA, 30 bp, Artificial Sequence
  Synthetic oligonucleotide
gttagaatgaaagcgagcaggtctttagtg

SEQ ID NO: 276485 - DNA, 30 bp, Artificial Sequence
  Synthetic oligonucleotide
agcatacaaggggacatagcgtcaaacgtg

SEQ ID NO: 276486 - DNA, 30 bp, Artificial Sequence
  Synthetic oligonucleotide
tgatccctgaacagtggctccataaacgtg

SEQ ID NO: 276487 - DNA, 30 bp, Artificial Sequence
  Synthetic oligonucleotide
cgcggagcaaagttcgatcttataaacgtg

SEQ ID NO: 276488 - DNA, 30 bp, Artificial Sequence
  Synthetic oligonucleotide
tgcccttgtcatatgatcttgccgaacgtg

SEQ ID NO: 276489 - DNA, 30 bp, Artificial Sequence
  Synthetic oligonucleotide
gttatttacatagaccggccggctaacgtg

SEQ ID NO: 276490 - DNA, 30 bp, Artificial Sequence
  Synthetic oligonucleotide
gagaactgtgcgatctcgtgggcacacgtg

SEQ ID NO: 276491 - DNA, 30 bp, Artificial Sequence
  Synthetic oligonucleotide
accagtagcttgcaaccctggtcacacgtg

SEQ ID NO: 276492 - DNA, 30 bp, Artificial Sequence
  Synthetic oligonucleotide
ggaatagtgcttacgagcggttttcacgtg

SEQ ID NO: 276493 - DNA, 30 bp, Artificial Sequence
  Synthetic oligonucleotide
tacccatgccaggattacctttttcacgtg

SEQ ID NO: 276494 - DNA, 30 bp, Artificial Sequence
  Synthetic oligonucleotide
cgatgggtcgtttaacattccgaagacgtg

SEQ ID NO: 276495 - DNA, 30 bp, Artificial Sequence
  Synthetic oligonucleotide
tcaggatttgtcaatccccttaccgacgtg

SEQ ID NO: 276496 - DNA, 30 bp, Artificial Sequence
  Synthetic oligonucleotide
tagaggcacaggatcgtagacgaggacgtg

SEQ ID NO: 276497 - DNA, 30 bp, Artificial Sequence
  Synthetic oligonucleotide
tcagttcctatgccatggtcaacggacgtg

SEQ ID NO: 276498 - DNA, 30 bp, Artificial Sequence
  Synthetic oligonucleotide
ctcgaaatggttagggtgtggagggacgtg

SEQ ID NO: 276499 - DNA, 30 bp, Artificial Sequence
  Synthetic oligonucleotide
ctcattgatgaagtaaaggaacttgacgtg

SEQ ID NO: 276500 - DNA, 30 bp, Artificial Sequence
  Synthetic oligonucleotide
ctgtagcagtgaattaaaataggctacgtg

SEQ ID NO: 276501 - DNA, 30 bp, Artificial Sequence
  Synthetic oligonucleotide
gatcattctcagtgacaatggttgtacgtg

SEQ ID NO: 276502 - DNA, 30 bp, Artificial Sequence
  Synthetic oligonucleotide
tatgctaggttagaagacatttcttacgtg

SEQ ID NO: 276503 - DNA, 30 bp, Artificial Sequence
  Synthetic oligonucleotide
acaagttaagctactaggaatttcaccgtg

SEQ ID NO: 276504 - DNA, 30 bp, Artificial Sequence
  Synthetic oligonucleotide
aagtagctcttgagcactaggaggaccgtg

SEQ ID NO: 276505 - DNA, 30 bp, Artificial Sequence
  Synthetic oligonucleotide
cggacctgtagtcattatcaccggaccgtg

SEQ ID NO: 276506 - DNA, 30 bp, Artificial Sequence
  Synthetic oligonucleotide
atgtttagtaccccggatcccgtgaccgtg

SEQ ID NO: 276507 - DNA, 30 bp, Artificial Sequence
  Synthetic oligonucleotide
tacacgacaatctaattggtcccacccgtg

SEQ ID NO: 276508 - DNA, 30 bp, Artificial Sequence
  Synthetic oligonucleotide
tcatttggtggggatctatagggacccgtg

SEQ ID NO: 276509 - DNA, 30 bp, Artificial Sequence
  Synthetic oligonucleotide
tacaagactgtatggcgcaatctccccgtg

SEQ ID NO: 276510 - DNA, 30 bp, Artificial Sequence
  Synthetic oligonucleotide
gctattgtactcaacacgttgtttcccgtg

SEQ ID NO: 276511 - DNA, 30 bp, Artificial Sequence
  Synthetic oligonucleotide
cccgctctaagtaagtgctcgaacgccgtg

SEQ ID NO: 276512 - DNA, 30 bp, Artificial Sequence
  Synthetic oligonucleotide
ctgctttacgtatggtaacatggcgccgtg

SEQ ID NO: 276513 - DNA, 30 bp, Artificial Sequence
  Synthetic oligonucleotide
gaagctgcatactaaataaagtctgccgtg

SEQ ID NO: 276514 - DNA, 30 bp, Artificial Sequence
  Synthetic oligonucleotide
tatggtagattagaacgatcgtcatccgtg

SEQ ID NO: 276515 - DNA, 30 bp, Artificial Sequence
  Synthetic oligonucleotide
aaccctaaccgcagaaacaagataagcgtg

SEQ ID NO: 276516 - DNA, 30 bp, Artificial Sequence
  Synthetic oligonucleotide
acgtgccagtccgcgcaggacgtaagcgtg

SEQ ID NO: 276517 - DNA, 30 bp, Artificial Sequence
  Synthetic oligonucleotide
ggaaaagcactgtggggtagattcagcgtg

SEQ ID NO: 276518 - DNA, 30 bp, Artificial Sequence
  Synthetic oligonucleotide
aggcgtccttaccctctacagttcagcgtg

SEQ ID NO: 276519 - DNA, 30 bp, Artificial Sequence
  Synthetic oligonucleotide
tatactgcgtgtaggatgatcccgagcgtg

SEQ ID NO: 276520 - DNA, 30 bp, Artificial Sequence
  Synthetic oligonucleotide
cgtttcgggattttctggatagatagcgtg

SEQ ID NO: 276521 - DNA, 30 bp, Artificial Sequence
  Synthetic oligonucleotide
ctgcgtctatttcctgattcgcaacgcgtg

SEQ ID NO: 276522 - DNA, 30 bp, Artificial Sequence
  Synthetic oligonucleotide
gctatatgcagaattacgttgtcacgcgtg

SEQ ID NO: 276523 - DNA, 30 bp, Artificial Sequence
  Synthetic oligonucleotide
aacggaaaaagcgacgtcgggttacgcgtg

SEQ ID NO: 276524 - DNA, 30 bp, Artificial Sequence
  Synthetic oligonucleotide
ggccctgtggtggcggcattctcgcgcgtg

SEQ ID NO: 276525 - DNA, 30 bp, Artificial Sequence
  Synthetic oligonucleotide
tcggcgcaccagtatagagcgtggcgcgtg

SEQ ID NO: 276526 - DNA, 30 bp, Artificial Sequence
  Synthetic oligonucleotide
atctcagaaagcgccatggtgactcgcgtg

SEQ ID NO: 276527 - DNA, 30 bp, Artificial Sequence
  Synthetic oligonucleotide
gtgcacaagctattacaggtatgaggcgtg

SEQ ID NO: 276528 - DNA, 30 bp, Artificial Sequence
  Synthetic oligonucleotide
tccgatcggatgccagtagctgagggcgtg

SEQ ID NO: 276529 - DNA, 30 bp, Artificial Sequence
  Synthetic oligonucleotide
cggctctagattcgtggaacgtcgggcgtg

SEQ ID NO: 276530 - DNA, 30 bp, Artificial Sequence
  Synthetic oligonucleotide
aactcatcgtatccttatagcgtgggcgtg

SEQ ID NO: 276531 - DNA, 30 bp, Artificial Sequence
  Synthetic oligonucleotide
aacagtgctgatgctatgtcctgtggcgtg

SEQ ID NO: 276532 - DNA, 30 bp, Artificial Sequence
  Synthetic oligonucleotide
gcttaaagtgtaaaagcgcctacatgcgtg

SEQ ID NO: 276533 - DNA, 30 bp, Artificial Sequence
  Synthetic oligonucleotide
cccgggatgtgaagatcagtaggatgcgtg

SEQ ID NO: 276534 - DNA, 30 bp, Artificial Sequence
  Synthetic oligonucleotide
actgttgatagaagtttaaggtgatgcgtg

SEQ ID NO: 276535 - DNA, 30 bp, Artificial Sequence
  Synthetic oligonucleotide
tagcctccatatagcatcctggcctgcgtg

SEQ ID NO: 276536 - DNA, 30 bp, Artificial Sequence
  Synthetic oligonucleotide
ctagcgccaccgggagcacataggtgcgtg

SEQ ID NO: 276537 - DNA, 30 bp, Artificial Sequence
  Synthetic oligonucleotide
gagttcggtggctgcaagagtagttgcgtg

SEQ ID NO: 276538 - DNA, 30 bp, Artificial Sequence
  Synthetic oligonucleotide
cttaacttggaataaataatctgaatcgtg

SEQ ID NO: 276539 - DNA, 30 bp, Artificial Sequence
  Synthetic oligonucleotide
tgattttcccggatgtagactgagatcgtg

SEQ ID NO: 276540 - DNA, 30 bp, Artificial Sequence
  Synthetic oligonucleotide
tgtctccgggtgaagttcagctttatcgtg

SEQ ID NO: 276541 - DNA, 30 bp, Artificial Sequence
  Synthetic oligonucleotide
tcttcacacaatccgagttgagaactcgtg

SEQ ID NO: 276542 - DNA, 30 bp, Artificial Sequence
  Synthetic oligonucleotide
acccgtatggctgctcaagatacactcgtg

SEQ ID NO: 276543 - DNA, 30 bp, Artificial Sequence
  Synthetic oligonucleotide
tttcggcacatgacgaagtgacacctcgtg

SEQ ID NO: 276544 - DNA, 30 bp, Artificial Sequence
  Synthetic oligonucleotide
ggattcacttgtaataaactgaagctcgtg

SEQ ID NO: 276545 - DNA, 30 bp, Artificial Sequence
  Synthetic oligonucleotide
accacgtggcgaatagttggaccgctcgtg

SEQ ID NO: 276546 - DNA, 30 bp, Artificial Sequence
  Synthetic oligonucleotide
gctgccctcgcggcgaatctaaatctcgtg

SEQ ID NO: 276547 - DNA, 30 bp, Artificial Sequence
  Synthetic oligonucleotide
cattgttctatttggtgtttacttctcgtg

SEQ ID NO: 276548 - DNA, 30 bp, Artificial Sequence
  Synthetic oligonucleotide
ttgacggtctctcaaggaaacgcagtcgtg

SEQ ID NO: 276549 - DNA, 30 bp, Artificial Sequence
  Synthetic oligonucleotide
acaggcattagtttgacgggaggcgtcgtg

SEQ ID NO: 276550 - DNA, 30 bp, Artificial Sequence
  Synthetic oligonucleotide
tatggtccggtacactcgtcgctcgtcgtg

SEQ ID NO: 276551 - DNA, 30 bp, Artificial Sequence
  Synthetic oligonucleotide
tcttacgcactacttacacagctggtcgtg

SEQ ID NO: 276552 - DNA, 30 bp, Artificial Sequence
  Synthetic oligonucleotide
aagctgtggcggtcgcaatttctggtcgtg

SEQ ID NO: 276553 - DNA, 30 bp, Artificial Sequence
  Synthetic oligonucleotide
agccccgaacgggggccacagactgtcgtg

SEQ ID NO: 276554 - DNA, 30 bp, Artificial Sequence
  Synthetic oligonucleotide
ttccggcaacagtcatggattcgtgtcgtg

SEQ ID NO: 276555 - DNA, 30 bp, Artificial Sequence
  Synthetic oligonucleotide
cgggtctgacacatgccattatgaaaggtg

SEQ ID NO: 276556 - DNA, 30 bp, Artificial Sequence
  Synthetic oligonucleotide
acaacgcttgtcgtcctggcgtgcaaggtg

SEQ ID NO: 276557 - DNA, 30 bp, Artificial Sequence
  Synthetic oligonucleotide
attgcttacttatacagccagacgaaggtg

SEQ ID NO: 276558 - DNA, 30 bp, Artificial Sequence
  Synthetic oligonucleotide
tgtcgtcggcttgtattttcatggaaggtg

SEQ ID NO: 276559 - DNA, 30 bp, Artificial Sequence
  Synthetic oligonucleotide
ccaggtatatgattggagtagaaacaggtg

SEQ ID NO: 276560 - DNA, 30 bp, Artificial Sequence
  Synthetic oligonucleotide
gaaatattagtggccggcaagcgacaggtg

SEQ ID NO: 276561 - DNA, 30 bp, Artificial Sequence
  Synthetic oligonucleotide
aggggttgcgcaggcggcataacccaggtg

SEQ ID NO: 276562 - DNA, 30 bp, Artificial Sequence
  Synthetic oligonucleotide
ggagtacaccatgaatagtgataagaggtg

SEQ ID NO: 276563 - DNA, 30 bp, Artificial Sequence
  Synthetic oligonucleotide
ggacgcgggacgggtgtcggaggagaggtg

SEQ ID NO: 276564 - DNA, 30 bp, Artificial Sequence
  Synthetic oligonucleotide
ccgagtcgagaagatcgtcatgtcgaggtg

SEQ ID NO: 276565 - DNA, 30 bp, Artificial Sequence
  Synthetic oligonucleotide
gacctgagatcctataggtcttaggaggtg

SEQ ID NO: 276566 - DNA, 30 bp, Artificial Sequence
  Synthetic oligonucleotide
gtgtggtaggcgcgggtcggtgcggaggtg

SEQ ID NO: 276567 - DNA, 30 bp, Artificial Sequence
  Synthetic oligonucleotide
gcgtagcgttgctatagaattctggaggtg

SEQ ID NO: 276568 - DNA, 30 bp, Artificial Sequence
  Synthetic oligonucleotide
ttggaataaaataccgtagaaattgaggtg

SEQ ID NO: 276569 - DNA, 30 bp, Artificial Sequence
  Synthetic oligonucleotide
caagcgccctttattgctccctactaggtg

SEQ ID NO: 276570 - DNA, 30 bp, Artificial Sequence
  Synthetic oligonucleotide
tccgattagaatcggtgtagatgctaggtg

SEQ ID NO: 276571 - DNA, 30 bp, Artificial Sequence
  Synthetic oligonucleotide
gttgtcggtaaatttgggaacatgtaggtg

SEQ ID NO: 276572 - DNA, 30 bp, Artificial Sequence
  Synthetic oligonucleotide
tggagaggactatctaggcgtatttaggtg

SEQ ID NO: 276573 - DNA, 30 bp, Artificial Sequence
  Synthetic oligonucleotide
catcaatggtaattatacgctcgaacggtg

SEQ ID NO: 276574 - DNA, 30 bp, Artificial Sequence
  Synthetic oligonucleotide
tcgatggaacgagaaactattggaacggtg

SEQ ID NO: 276575 - DNA, 30 bp, Artificial Sequence
  Synthetic oligonucleotide
aagcaatgtctagtgcttcccacgacggtg

SEQ ID NO: 276576 - DNA, 30 bp, Artificial Sequence
  Synthetic oligonucleotide
ggcgcactttggagtattaactcgacggtg

SEQ ID NO: 276577 - DNA, 30 bp, Artificial Sequence
  Synthetic oligonucleotide
atcgacaatcccgaaatcgctttgacggtg

SEQ ID NO: 276578 - DNA, 30 bp, Artificial Sequence
  Synthetic oligonucleotide
tcctcgtcactaggccgtgatgatacggtg

SEQ ID NO: 276579 - DNA, 30 bp, Artificial Sequence
  Synthetic oligonucleotide
gtcatcagcacgcttaagtttgaaccggtg

SEQ ID NO: 276580 - DNA, 30 bp, Artificial Sequence
  Synthetic oligonucleotide
gtttcaaccgcgaaagggtatgcaccggtg

SEQ ID NO: 276581 - DNA, 30 bp, Artificial Sequence
  Synthetic oligonucleotide
ggcttagttgccactacaagtgacccggtg

SEQ ID NO: 276582 - DNA, 30 bp, Artificial Sequence
  Synthetic oligonucleotide
gcagtcaaggatacagtcggtcgcccggtg

SEQ ID NO: 276583 - DNA, 30 bp, Artificial Sequence
  Synthetic oligonucleotide
gcatttctgctcagaaaagttaagccggtg

SEQ ID NO: 276584 - DNA, 30 bp, Artificial Sequence
  Synthetic oligonucleotide
cgaccacctgaagtacgttcgacgccggtg

SEQ ID NO: 276585 - DNA, 30 bp, Artificial Sequence
  Synthetic oligonucleotide
tgggaacaagcgtgctcacattggccggtg

SEQ ID NO: 276586 - DNA, 30 bp, Artificial Sequence
  Synthetic oligonucleotide
gtgcgtcaagactgcggtaaataagcggtg

SEQ ID NO: 276587 - DNA, 30 bp, Artificial Sequence
  Synthetic oligonucleotide
tacctgcgtgagaactccgtaggagcggtg

SEQ ID NO: 276588 - DNA, 30 bp, Artificial Sequence
  Synthetic oligonucleotide
ctcatctgtgccttcggcgttaacgcggtg

SEQ ID NO: 276589 - DNA, 30 bp, Artificial Sequence
  Synthetic oligonucleotide
cgaataagattgtgagaccggcacgcggtg

SEQ ID NO: 276590 - DNA, 30 bp, Artificial Sequence
  Synthetic oligonucleotide
tgagagggacctccagagatgcaggcggtg

SEQ ID NO: 276591 - DNA, 30 bp, Artificial Sequence
  Synthetic oligonucleotide
taggtcaagcgcgggagatagacggcggtg

SEQ ID NO: 276592 - DNA, 30 bp, Artificial Sequence
  Synthetic oligonucleotide
ccaaagcccacgcacgtacgatatgcggtg

SEQ ID NO: 276593 - DNA, 30 bp, Artificial Sequence
  Synthetic oligonucleotide
tcgccccatcgtccaacggagcctgcggtg

SEQ ID NO: 276594 - DNA, 30 bp, Artificial Sequence
  Synthetic oligonucleotide
tccacactctgcccggcctatgttgcggtg

SEQ ID NO: 276595 - DNA, 30 bp, Artificial Sequence
  Synthetic oligonucleotide
gggtatcagcaagaaatgtttggatcggtg

SEQ ID NO: 276596 - DNA, 30 bp, Artificial Sequence
  Synthetic oligonucleotide
ccctcaaggctccgcgagacagactcggtg

SEQ ID NO: 276597 - DNA, 30 bp, Artificial Sequence
  Synthetic oligonucleotide
ccgctaccggaatcaagggatgtctcggtg

SEQ ID NO: 276598 - DNA, 30 bp, Artificial Sequence
  Synthetic oligonucleotide
tggaccggccgacaaaggtccgattcggtg

SEQ ID NO: 276599 - DNA, 30 bp, Artificial Sequence
  Synthetic oligonucleotide
tttagtaccaaaccgcattccgtttcggtg

SEQ ID NO: 276600 - DNA, 30 bp, Artificial Sequence
  Synthetic oligonucleotide
ggtcgagggtatgtgccagctacaagggtg

SEQ ID NO: 276601 - DNA, 30 bp, Artificial Sequence
  Synthetic oligonucleotide
atgcattagggggatcattgggcaagggtg

SEQ ID NO: 276602 - DNA, 30 bp, Artificial Sequence
  Synthetic oligonucleotide
gtatattacacggtagcgactttaagggtg

SEQ ID NO: 276603 - DNA, 31 bp, Artificial Sequence
  Synthetic oligonucleotide
cacggatgaccaccgaactgaattcagggtg

SEQ ID NO: 276604 - DNA, 30 bp, Artificial Sequence
  Synthetic oligonucleotide
cccaaattctctaaactgtctcagagggtg

SEQ ID NO: 276605 - DNA, 30 bp, Artificial Sequence
  Synthetic oligonucleotide
acacaacacttcggcttatacacgagggtg

SEQ ID NO: 276606 - DNA, 30 bp, Artificial Sequence
  Synthetic oligonucleotide
cactcgcgcaaagtgcacaaacggagggtg

SEQ ID NO: 276607 - DNA, 30 bp, Artificial Sequence
  Synthetic oligonucleotide
atgaggggtatattcctcagctgtagggtg

SEQ ID NO: 276608 - DNA, 30 bp, Artificial Sequence
  Synthetic oligonucleotide
ggtgtctagcagctccatactagacgggtg

SEQ ID NO: 276609 - DNA, 31 bp, Artificial Sequence
  Synthetic oligonucleotide
tggtattcaaggccttttatttctacgggtg

SEQ ID NO: 276610 - DNA, 30 bp, Artificial Sequence
  Synthetic oligonucleotide
gaagtgtctcgtgagatacgtgcgcgggtg

SEQ ID NO: 276611 - DNA, 30 bp, Artificial Sequence
  Synthetic oligonucleotide
gtccatcaggagagccgttacatgcgggtg

SEQ ID NO: 276612 - DNA, 30 bp, Artificial Sequence
  Synthetic oligonucleotide
ctttaaaggtaagtagggttaataggggtg

SEQ ID NO: 276613 - DNA, 30 bp, Artificial Sequence
  Synthetic oligonucleotide
cttggcggtcttccccggagaaggggggtg

SEQ ID NO: 276614 - DNA, 30 bp, Artificial Sequence
  Synthetic oligonucleotide
atccgtcgtgataaccggatgcggggggtg

SEQ ID NO: 276615 - DNA, 30 bp, Artificial Sequence
  Synthetic oligonucleotide
agtctatagcgatcactgaaatggggggtg

SEQ ID NO: 276616 - DNA, 30 bp, Artificial Sequence
  Synthetic oligonucleotide
agcttttagcttctggaagaagtgggggtg

SEQ ID NO: 276617 - DNA, 30 bp, Artificial Sequence
  Synthetic oligonucleotide
aggcccggaggcggtgcagtttatggggtg

SEQ ID NO: 276618 - DNA, 30 bp, Artificial Sequence
  Synthetic oligonucleotide
tagaaccgataagtatactcacgtggggtg

SEQ ID NO: 276619 - DNA, 30 bp, Artificial Sequence
  Synthetic oligonucleotide
ttaggatcaagaggaattcagtaatgggtg

SEQ ID NO: 276620 - DNA, 30 bp, Artificial Sequence
  Synthetic oligonucleotide
gaatcgtcgtagtgaacaaggccatgggtg

SEQ ID NO: 276621 - DNA, 30 bp, Artificial Sequence
  Synthetic oligonucleotide
agggatgttaggtgctccttccagtgggtg

SEQ ID NO: 276622 - DNA, 30 bp, Artificial Sequence
  Synthetic oligonucleotide
gagttctaaaaaatggaacttccgtgggtg

SEQ ID NO: 276623 - DNA, 30 bp, Artificial Sequence
  Synthetic oligonucleotide
gaaatgctgtggagcggcgatgtgtgggtg

SEQ ID NO: 276624 - DNA, 30 bp, Artificial Sequence
  Synthetic oligonucleotide
aagaaagctaataaaccggatttgtgggtg

SEQ ID NO: 276625 - DNA, 30 bp, Artificial Sequence
  Synthetic oligonucleotide
agactgggggtctcacaaatcatttgggtg

SEQ ID NO: 276626 - DNA, 30 bp, Artificial Sequence
  Synthetic oligonucleotide
ttccgtgtcgctgggttataatcaatggtg

SEQ ID NO: 276627 - DNA, 30 bp, Artificial Sequence
  Synthetic oligonucleotide
gggttaggtggtttaccggcggacatggtg

SEQ ID NO: 276628 - DNA, 30 bp, Artificial Sequence
  Synthetic oligonucleotide
gagcggtgcgcgtgggcaaccggcatggtg

SEQ ID NO: 276629 - DNA, 30 bp, Artificial Sequence
  Synthetic oligonucleotide
agtgcaccatgctacgagtatttcatggtg

SEQ ID NO: 276630 - DNA, 31 bp, Artificial Sequence
  Synthetic oligonucleotide
acggcatcttcgatgcccacaaaggatggtg

SEQ ID NO: 276631 - DNA, 30 bp, Artificial Sequence
  Synthetic oligonucleotide
aagatgtgcgatttgaaaagcaagctggtg

SEQ ID NO: 276632 - DNA, 30 bp, Artificial Sequence
  Synthetic oligonucleotide
gcagtcctgtattgactggagtgtctggtg

SEQ ID NO: 276633 - DNA, 30 bp, Artificial Sequence
  Synthetic oligonucleotide
ggcccacttggataaaaatctgcagtggtg

SEQ ID NO: 276634 - DNA, 30 bp, Artificial Sequence
  Synthetic oligonucleotide
attgtgaagggtaggttttagctggtggtg

SEQ ID NO: 276635 - DNA, 30 bp, Artificial Sequence
  Synthetic oligonucleotide
ccatgcactgtccggaaatcacatgtggtg

SEQ ID NO: 276636 - DNA, 30 bp, Artificial Sequence
  Synthetic oligonucleotide
tcgtcagggagaaaatatttggatgtggtg

SEQ ID NO: 276637 - DNA, 30 bp, Artificial Sequence
  Synthetic oligonucleotide
ttcggaatggagacaataacttctgtggtg

SEQ ID NO: 276638 - DNA, 30 bp, Artificial Sequence
  Synthetic oligonucleotide
tcagtggtcctgacggcattgggtgtggtg

SEQ ID NO: 276639 - DNA, 30 bp, Artificial Sequence
  Synthetic oligonucleotide
tgaactgcctgtatcggctagcacttggtg

SEQ ID NO: 276640 - DNA, 30 bp, Artificial Sequence
  Synthetic oligonucleotide
accctactctataagtctcgaccgttggtg

SEQ ID NO: 276641 - DNA, 30 bp, Artificial Sequence
  Synthetic oligonucleotide
gcaaggggatatatgggggtgctgttggtg

SEQ ID NO: 276642 - DNA, 30 bp, Artificial Sequence
  Synthetic oligonucleotide
aagctgcaattgactataagtctgttggtg

SEQ ID NO: 276643 - DNA, 30 bp, Artificial Sequence
  Synthetic oligonucleotide
tcttgcatgatatgtcgacagtctttggtg

SEQ ID NO: 276644 - DNA, 30 bp, Artificial Sequence
  Synthetic oligonucleotide
caggtcttcatatacattggatttttggtg

SEQ ID NO: 276645 - DNA, 30 bp, Artificial Sequence
  Synthetic oligonucleotide
gattcatagagagcatttgtaaaaaatgtg

SEQ ID NO: 276646 - DNA, 30 bp, Artificial Sequence
  Synthetic oligonucleotide
catctgatacctatctgctctgaaaatgtg

SEQ ID NO: 276647 - DNA, 30 bp, Artificial Sequence
  Synthetic oligonucleotide
tcttcggtgcgggccctaacgagaaatgtg

SEQ ID NO: 276648 - DNA, 30 bp, Artificial Sequence
  Synthetic oligonucleotide
agtgcgggaatgatctgcgcactaaatgtg

SEQ ID NO: 276649 - DNA, 30 bp, Artificial Sequence
  Synthetic oligonucleotide
ccagcgagtgacagcgctgtcatcaatgtg

SEQ ID NO: 276650 - DNA, 30 bp, Artificial Sequence
  Synthetic oligonucleotide
ttttgcgcttagggaaacttgctgaatgtg

SEQ ID NO: 276651 - DNA, 30 bp, Artificial Sequence
  Synthetic oligonucleotide
tggcgtatagaggattcaacgaataatgtg

SEQ ID NO: 276652 - DNA, 30 bp, Artificial Sequence
  Synthetic oligonucleotide
ctccaataataccaaaagctatcacatgtg

SEQ ID NO: 276653 - DNA, 30 bp, Artificial Sequence
  Synthetic oligonucleotide
ttggaaataatatcgcaaaggtaccatgtg

SEQ ID NO: 276654 - DNA, 30 bp, Artificial Sequence
  Synthetic oligonucleotide
tgacttaatgcaaccgtttccccgcatgtg

SEQ ID NO: 276655 - DNA, 30 bp, Artificial Sequence
  Synthetic oligonucleotide
gtgtggtgattcaataatgccgtgcatgtg

SEQ ID NO: 276656 - DNA, 30 bp, Artificial Sequence
  Synthetic oligonucleotide
aaaacggggttcgatactcgatctcatgtg

SEQ ID NO: 276657 - DNA, 30 bp, Artificial Sequence
  Synthetic oligonucleotide
gatcccagctctcaacaacaaaaatatgtg

SEQ ID NO: 276658 - DNA, 30 bp, Artificial Sequence
  Synthetic oligonucleotide
tccgtctttcagtgtactgaccaatatgtg

SEQ ID NO: 276659 - DNA, 30 bp, Artificial Sequence
  Synthetic oligonucleotide
aatgtgattcaaaagaataagggctatgtg

SEQ ID NO: 276660 - DNA, 30 bp, Artificial Sequence
  Synthetic oligonucleotide
tattgccgaggaggtaacaatggctatgtg

SEQ ID NO: 276661 - DNA, 30 bp, Artificial Sequence
  Synthetic oligonucleotide
ttgacgttcggtcacatatgaaggtatgtg

SEQ ID NO: 276662 - DNA, 30 bp, Artificial Sequence
  Synthetic oligonucleotide
gggttgggccagacgagataggtgtatgtg

SEQ ID NO: 276663 - DNA, 30 bp, Artificial Sequence
  Synthetic oligonucleotide
gagagatagcgacacccgctcggcactgtg

SEQ ID NO: 276664 - DNA, 30 bp, Artificial Sequence
  Synthetic oligonucleotide
gctcatgacaggagctacttgccgactgtg

SEQ ID NO: 276665 - DNA, 30 bp, Artificial Sequence
  Synthetic oligonucleotide
atgtgtgatcgtgaaggctcacgacctgtg

SEQ ID NO: 276666 - DNA, 30 bp, Artificial Sequence
  Synthetic oligonucleotide
gtaaaaaggcgcaaaatagaatcccctgtg

SEQ ID NO: 276667 - DNA, 30 bp, Artificial Sequence
  Synthetic oligonucleotide
tggggtgactaaattacaacgatccctgtg

SEQ ID NO: 276668 - DNA, 30 bp, Artificial Sequence
  Synthetic oligonucleotide
atgtcatggagtggcatgttgatccctgtg

SEQ ID NO: 276669 - DNA, 30 bp, Artificial Sequence
  Synthetic oligonucleotide
cgcaacttacgcgcggatagatagcctgtg

SEQ ID NO: 276670 - DNA, 30 bp, Artificial Sequence
  Synthetic oligonucleotide
ggtataaggttcacatgtgcatcagctgtg

SEQ ID NO: 276671 - DNA, 30 bp, Artificial Sequence
  Synthetic oligonucleotide
tcgaacagtgcattgcaggactacgctgtg

SEQ ID NO: 276672 - DNA, 30 bp, Artificial Sequence
  Synthetic oligonucleotide
ctatagtgcgtgaatgtcggccgcgctgtg

SEQ ID NO: 276673 - DNA, 30 bp, Artificial Sequence
  Synthetic oligonucleotide
ggagatacataacgcggatagaactctgtg

SEQ ID NO: 276674 - DNA, 30 bp, Artificial Sequence
  Synthetic oligonucleotide
cagcctgcatggtggtaatgggtgtctgtg

SEQ ID NO: 276675 - DNA, 30 bp, Artificial Sequence
  Synthetic oligonucleotide
cgcgctgcaattgctgtacgacaaagtgtg

SEQ ID NO: 276676 - DNA, 30 bp, Artificial Sequence
  Synthetic oligonucleotide
accagcaaattaatgagaaaaaatagtgtg

SEQ ID NO: 276677 - DNA, 30 bp, Artificial Sequence
  Synthetic oligonucleotide
gtgtcggttcagaccttcggcccacgtgtg

SEQ ID NO: 276678 - DNA, 30 bp, Artificial Sequence
  Synthetic oligonucleotide
tcagcttttgatgaaagttccgaccgtgtg

SEQ ID NO: 276679 - DNA, 30 bp, Artificial Sequence
  Synthetic oligonucleotide
catataaagttaagcgtcgaatcgcgtgtg

SEQ ID NO: 276680 - DNA, 30 bp, Artificial Sequence
  Synthetic oligonucleotide
gcaaactggtgaacggcctattgtcgtgtg

SEQ ID NO: 276681 - DNA, 30 bp, Artificial Sequence
  Synthetic oligonucleotide
gtccaacagttttcgaaaccgaaaggtgtg

SEQ ID NO: 276682 - DNA, 30 bp, Artificial Sequence
  Synthetic oligonucleotide
ggcggagaaggtacaatttcaccaggtgtg

SEQ ID NO: 276683 - DNA, 30 bp, Artificial Sequence
  Synthetic oligonucleotide
cgatccattgagttctagtcggcaggtgtg

SEQ ID NO: 276684 - DNA, 30 bp, Artificial Sequence
  Synthetic oligonucleotide
gatggacaagaaaatttcctaccgggtgtg

SEQ ID NO: 276685 - DNA, 30 bp, Artificial Sequence
  Synthetic oligonucleotide
tatggcgttcgggtcagcgacgggggtgtg

SEQ ID NO: 276686 - DNA, 30 bp, Artificial Sequence
  Synthetic oligonucleotide
tagtcgtgcttttcggtgaagactggtgtg

SEQ ID NO: 276687 - DNA, 30 bp, Artificial Sequence
  Synthetic oligonucleotide
gatgtaagtgaggttatcggatctggtgtg

SEQ ID NO: 276688 - DNA, 30 bp, Artificial Sequence
  Synthetic oligonucleotide
gggcctctcctagcactggagacctgtgtg

SEQ ID NO: 276689 - DNA, 30 bp, Artificial Sequence
  Synthetic oligonucleotide
gtggcagacggccggtttagcctctgtgtg

SEQ ID NO: 276690 - DNA, 30 bp, Artificial Sequence
  Synthetic oligonucleotide
gtatgtggtcttatcgccctatgttgtgtg

SEQ ID NO: 276691 - DNA, 30 bp, Artificial Sequence
  Synthetic oligonucleotide
gggcaggggattggctgtactgtttgtgtg

SEQ ID NO: 276692 - DNA, 30 bp, Artificial Sequence
  Synthetic oligonucleotide
agccatactccgggccggtgtgagattgtg

SEQ ID NO: 276693 - DNA, 30 bp, Artificial Sequence
  Synthetic oligonucleotide
ggaacagctattcgtacagagaggattgtg

SEQ ID NO: 276694 - DNA, 30 bp, Artificial Sequence
  Synthetic oligonucleotide
ttcaacagggagtcaagagcataacttgtg

SEQ ID NO: 276695 - DNA, 30 bp, Artificial Sequence
  Synthetic oligonucleotide
gtctgattaaatggagggataccacttgtg

SEQ ID NO: 276696 - DNA, 30 bp, Artificial Sequence
  Synthetic oligonucleotide
tacctcccgtcgtcccacgacttacttgtg

SEQ ID NO: 276697 - DNA, 30 bp, Artificial Sequence
  Synthetic oligonucleotide
agtaggctttcagagaagtaaacgcttgtg

SEQ ID NO: 276698 - DNA, 30 bp, Artificial Sequence
  Synthetic oligonucleotide
tctggccgtgagccgcgccagaatcttgtg

SEQ ID NO: 276699 - DNA, 30 bp, Artificial Sequence
  Synthetic oligonucleotide
tgactcccgtaggctatggctagagttgtg

SEQ ID NO: 276700 - DNA, 30 bp, Artificial Sequence
  Synthetic oligonucleotide
gaggtggtcattctggagcttggagttgtg

SEQ ID NO: 276701 - DNA, 30 bp, Artificial Sequence
  Synthetic oligonucleotide
gtttcgacagatggtcggtgggacgttgtg

SEQ ID NO: 276702 - DNA, 30 bp, Artificial Sequence
  Synthetic oligonucleotide
caataccttattggcttcttctaggttgtg

SEQ ID NO: 276703 - DNA, 30 bp, Artificial Sequence
  Synthetic oligonucleotide
ccacccacgtccccccgaggcgatgttgtg

SEQ ID NO: 276704 - DNA, 30 bp, Artificial Sequence
  Synthetic oligonucleotide
ggagtgtgctggtgttcgatggttgttgtg

SEQ ID NO: 276705 - DNA, 30 bp, Artificial Sequence
  Synthetic oligonucleotide
ccaaaagttaggtactatcaacaatttgtg

SEQ ID NO: 276706 - DNA, 31 bp, Artificial Sequence
  Synthetic oligonucleotide
tttaagagtacagtggttgggcccctttgtg

SEQ ID NO: 276707 - DNA, 30 bp, Artificial Sequence
  Synthetic oligonucleotide
cgatcgcaaagaaggcttgacgggtttgtg

SEQ ID NO: 276708 - DNA, 30 bp, Artificial Sequence
  Synthetic oligonucleotide
aggttcgccctgcacgtacgtatttttgtg

SEQ ID NO: 276709 - DNA, 30 bp, Artificial Sequence
  Synthetic oligonucleotide
ttaattttagtattgcatctgaaaaaattg

SEQ ID NO: 276710 - DNA, 30 bp, Artificial Sequence
  Synthetic oligonucleotide
ccggtaggtggctggctcaaaagaaaattg

SEQ ID NO: 276711 - DNA, 30 bp, Artificial Sequence
  Synthetic oligonucleotide
gctttgtgcggaggcaacatctgaaaattg

SEQ ID NO: 276712 - DNA, 30 bp, Artificial Sequence
  Synthetic oligonucleotide
gcgttccaagccatttcaaaaaccaaattg

SEQ ID NO: 276713 - DNA, 30 bp, Artificial Sequence
  Synthetic oligonucleotide
gcttcattttagacatgtaggatcaaattg

SEQ ID NO: 276714 - DNA, 30 bp, Artificial Sequence
  Synthetic oligonucleotide
atcctggccctgggaactaatgtcaaattg

SEQ ID NO: 276715 - DNA, 30 bp, Artificial Sequence
  Synthetic oligonucleotide
gtgatagggcggtagcggcggcagaaattg

SEQ ID NO: 276716 - DNA, 30 bp, Artificial Sequence
  Synthetic oligonucleotide
gcgatagtctccatgctaggcttgaaattg

SEQ ID NO: 276717 - DNA, 30 bp, Artificial Sequence
  Synthetic oligonucleotide
gggtagtaaatcatcgggagatataaattg

SEQ ID NO: 276718 - DNA, 30 bp, Artificial Sequence
  Synthetic oligonucleotide
acaggtttccaggcatttcaatcacaattg

SEQ ID NO: 276719 - DNA, 30 bp, Artificial Sequence
  Synthetic oligonucleotide
atacatacgacaagaaccggacgacaattg

SEQ ID NO: 276720 - DNA, 30 bp, Artificial Sequence
  Synthetic oligonucleotide
ttagaactcactgaaatctttcgacaattg

SEQ ID NO: 276721 - DNA, 30 bp, Artificial Sequence
  Synthetic oligonucleotide
ctgcaattggtccgtccatggaatcaattg

SEQ ID NO: 276722 - DNA, 30 bp, Artificial Sequence
  Synthetic oligonucleotide
gctgcgtccaacatcccagatcttcaattg

SEQ ID NO: 276723 - DNA, 30 bp, Artificial Sequence
  Synthetic oligonucleotide
ggataagtttctagcgttattctagaattg

SEQ ID NO: 276724 - DNA, 30 bp, Artificial Sequence
  Synthetic oligonucleotide
gtggaccgccgcgggataccacacgaattg

SEQ ID NO: 276725 - DNA, 30 bp, Artificial Sequence
  Synthetic oligonucleotide
ccctttacaacgatctggcttcgataattg

SEQ ID NO: 276726 - DNA, 30 bp, Artificial Sequence
  Synthetic oligonucleotide
acaatcgaagtcagcgctatgggataattg

SEQ ID NO: 276727 - DNA, 30 bp, Artificial Sequence
  Synthetic oligonucleotide
cagtaaaaaccatcgctatggaagtaattg

SEQ ID NO: 276728 - DNA, 30 bp, Artificial Sequence
  Synthetic oligonucleotide
tagctctgtgagaattaccttgtgtaattg

SEQ ID NO: 276729 - DNA, 30 bp, Artificial Sequence
  Synthetic oligonucleotide
cacggtacaaacattaagtttgagacattg

SEQ ID NO: 276730 - DNA, 30 bp, Artificial Sequence
  Synthetic oligonucleotide
tgaaagcggcgtagtcggagcgatacattg

SEQ ID NO: 276731 - DNA, 30 bp, Artificial Sequence
  Synthetic oligonucleotide
gtattggtcaaacgggattattaaccattg

SEQ ID NO: 276732 - DNA, 30 bp, Artificial Sequence
  Synthetic oligonucleotide
gacctggacacgcggaaattcgcaccattg

SEQ ID NO: 276733 - DNA, 30 bp, Artificial Sequence
  Synthetic oligonucleotide
gaatgtaactcaagataccagcgcccattg

SEQ ID NO: 276734 - DNA, 30 bp, Artificial Sequence
  Synthetic oligonucleotide
aggtggctggtgtgggtacacggcccattg

SEQ ID NO: 276735 - DNA, 30 bp, Artificial Sequence
  Synthetic oligonucleotide
agtactaatagtaatctagagggggcattg

SEQ ID NO: 276736 - DNA, 30 bp, Artificial Sequence
  Synthetic oligonucleotide
tgacctggggtttccagtctgcctgcattg

SEQ ID NO: 276737 - DNA, 30 bp, Artificial Sequence
  Synthetic oligonucleotide
ggtgatgcaaatcacgctctttgtgcattg

SEQ ID NO: 276738 - DNA, 30 bp, Artificial Sequence
  Synthetic oligonucleotide
caattatgaccttaaagtcacattgcattg

SEQ ID NO: 276739 - DNA, 30 bp, Artificial Sequence
  Synthetic oligonucleotide
cagcagttggacgaaaagtaatgctcattg

SEQ ID NO: 276740 - DNA, 30 bp, Artificial Sequence
  Synthetic oligonucleotide
cacgcgatctcggtctatacgaattcattg

SEQ ID NO: 276741 - DNA, 30 bp, Artificial Sequence
  Synthetic oligonucleotide
agttgatgctaaactaaaccggattcattg

SEQ ID NO: 276742 - DNA, 30 bp, Artificial Sequence
  Synthetic oligonucleotide
ggtagtgcgctgacttgtgattcttcattg

SEQ ID NO: 276743 - DNA, 30 bp, Artificial Sequence
  Synthetic oligonucleotide
ctttgcggctttagcatagacggttcattg

SEQ ID NO: 276744 - DNA, 30 bp, Artificial Sequence
  Synthetic oligonucleotide
ttcctactattaccgtcctgagtttcattg

SEQ ID NO: 276745 - DNA, 30 bp, Artificial Sequence
  Synthetic oligonucleotide
aaagctcccctgtgtcaatgatcaagattg

SEQ ID NO: 276746 - DNA, 30 bp, Artificial Sequence
  Synthetic oligonucleotide
tatactcggggataccatttaggaagattg

SEQ ID NO: 276747 - DNA, 30 bp, Artificial Sequence
  Synthetic oligonucleotide
gtgttctgtgatacgtacccgtgaagattg

SEQ ID NO: 276748 - DNA, 30 bp, Artificial Sequence
  Synthetic oligonucleotide
gggcttctggagatgagacgaataagattg

SEQ ID NO: 276749 - DNA, 30 bp, Artificial Sequence
  Synthetic oligonucleotide
gtcggcgtggccttgtttaccttcagattg

SEQ ID NO: 276750 - DNA, 30 bp, Artificial Sequence
  Synthetic oligonucleotide
ggcacgcatggtctaagtgtacagagattg

SEQ ID NO: 276751 - DNA, 30 bp, Artificial Sequence
  Synthetic oligonucleotide
ataataagtccgcctaccccatctagattg

SEQ ID NO: 276752 - DNA, 30 bp, Artificial Sequence
  Synthetic oligonucleotide
aacgcggggcaatcccgttagtgtagattg

SEQ ID NO: 276753 - DNA, 30 bp, Artificial Sequence
  Synthetic oligonucleotide
ctagaacgtgttgggtgttttggacgattg

SEQ ID NO: 276754 - DNA, 30 bp, Artificial Sequence
  Synthetic oligonucleotide
ccttgggtaaggagttagtattgacgattg

SEQ ID NO: 276755 - DNA, 30 bp, Artificial Sequence
  Synthetic oligonucleotide
aatagagggtactctgtaagccggcgattg

SEQ ID NO: 276756 - DNA, 30 bp, Artificial Sequence
  Synthetic oligonucleotide
caaagcggatacagtcacagaataggattg

SEQ ID NO: 276757 - DNA, 30 bp, Artificial Sequence
  Synthetic oligonucleotide
tggggtggcacgatgcccggtcccggattg

SEQ ID NO: 276758 - DNA, 30 bp, Artificial Sequence
  Synthetic oligonucleotide
ttattccgaggcataggttgtggcggattg

SEQ ID NO: 276759 - DNA, 30 bp, Artificial Sequence
  Synthetic oligonucleotide
aacttgaagagggtttaaaactggggattg

SEQ ID NO: 276760 - DNA, 30 bp, Artificial Sequence
  Synthetic oligonucleotide
cagggaacttaattgatcaagttatgattg

SEQ ID NO: 276761 - DNA, 30 bp, Artificial Sequence
  Synthetic oligonucleotide
gagtatgcgttcctgcttatgcactgattg

SEQ ID NO: 276762 - DNA, 30 bp, Artificial Sequence
  Synthetic oligonucleotide
gcatactatgatctctagttgttgtgattg

SEQ ID NO: 276763 - DNA, 30 bp, Artificial Sequence
  Synthetic oligonucleotide
gttggtaccccatcgtcaaaaataatattg

SEQ ID NO: 276764 - DNA, 30 bp, Artificial Sequence
  Synthetic oligonucleotide
atcgtacttttcgctcctacattaatattg

SEQ ID NO: 276765 - DNA, 30 bp, Artificial Sequence
  Synthetic oligonucleotide
ggatggaggccgcagatgtatagcatattg

SEQ ID NO: 276766 - DNA, 30 bp, Artificial Sequence
  Synthetic oligonucleotide
tccttcggctaaaacttatttgatatattg

SEQ ID NO: 276767 - DNA, 30 bp, Artificial Sequence
  Synthetic oligonucleotide
gtttatgtatgtgcattcggtagtatattg

SEQ ID NO: 276768 - DNA, 30 bp, Artificial Sequence
  Synthetic oligonucleotide
gagtatgaggttggtgttgacggagtattg

SEQ ID NO: 276769 - DNA, 30 bp, Artificial Sequence
  Synthetic oligonucleotide
tcccatacctcaacgtcgatcaccgtattg

SEQ ID NO: 276770 - DNA, 30 bp, Artificial Sequence
  Synthetic oligonucleotide
gatggttatcggtccaatctctccgtattg

SEQ ID NO: 276771 - DNA, 30 bp, Artificial Sequence
  Synthetic oligonucleotide
gctaaatatcatggtgcgtcactcgtattg

SEQ ID NO: 276772 - DNA, 30 bp, Artificial Sequence
  Synthetic oligonucleotide
aaagtaacatcgggtaataaacaggtattg

SEQ ID NO: 276773 - DNA, 30 bp, Artificial Sequence
  Synthetic oligonucleotide
tttgtgtactggtatgcaaataatgtattg

SEQ ID NO: 276774 - DNA, 30 bp, Artificial Sequence
  Synthetic oligonucleotide
gaaggaatcgaagtgcattgtttattattg

SEQ ID NO: 276775 - DNA, 30 bp, Artificial Sequence
  Synthetic oligonucleotide
agtgcagccatgttattcctattgttattg

SEQ ID NO: 276776 - DNA, 30 bp, Artificial Sequence
  Synthetic oligonucleotide
tgttcggtgtagcgaggtgccgttttattg

SEQ ID NO: 276777 - DNA, 30 bp, Artificial Sequence
  Synthetic oligonucleotide
ataatctggtcgccaagccttagcaacttg

SEQ ID NO: 276778 - DNA, 30 bp, Artificial Sequence
  Synthetic oligonucleotide
aggaattgaaacgttgtaatgatcaacttg

SEQ ID NO: 276779 - DNA, 30 bp, Artificial Sequence
  Synthetic oligonucleotide
cttcacacggtgagactgaccaagaacttg

SEQ ID NO: 276780 - DNA, 30 bp, Artificial Sequence
  Synthetic oligonucleotide
cattagtccagtggaggaccgtagcacttg

SEQ ID NO: 276781 - DNA, 30 bp, Artificial Sequence
  Synthetic oligonucleotide
gagtatgctttaagtgatgatatgcacttg

SEQ ID NO: 276782 - DNA, 30 bp, Artificial Sequence
  Synthetic oligonucleotide
ttaagtagtgtcccaaatcacagtcacttg

SEQ ID NO: 276783 - DNA, 30 bp, Artificial Sequence
  Synthetic oligonucleotide
gattgcctttagcgctagcttcttcacttg

SEQ ID NO: 276784 - DNA, 30 bp, Artificial Sequence
  Synthetic oligonucleotide
tgactttcatgtggaaccacggttcacttg

SEQ ID NO: 276785 - DNA, 30 bp, Artificial Sequence
  Synthetic oligonucleotide
cgggaccttcgacgaacacccgaagacttg

SEQ ID NO: 276786 - DNA, 30 bp, Artificial Sequence
  Synthetic oligonucleotide
cgtgctcatcctgggtattgcgtagacttg

SEQ ID NO: 276787 - DNA, 30 bp, Artificial Sequence
  Synthetic oligonucleotide
gaagtcgcagaagaataccggaccgacttg

SEQ ID NO: 276788 - DNA, 30 bp, Artificial Sequence
  Synthetic oligonucleotide
gagatttctgcgtgaaaatctaccgacttg

SEQ ID NO: 276789 - DNA, 30 bp, Artificial Sequence
  Synthetic oligonucleotide
ttagtatgttaagtatacagggccgacttg

SEQ ID NO: 276790 - DNA, 30 bp, Artificial Sequence
  Synthetic oligonucleotide
gcacagcagtagcgcacacagatcgacttg

SEQ ID NO: 276791 - DNA, 30 bp, Artificial Sequence
  Synthetic oligonucleotide
gcgcatgtttatgtgctggcgcgtgacttg

SEQ ID NO: 276792 - DNA, 30 bp, Artificial Sequence
  Synthetic oligonucleotide
cggcgtatggtccgtaattggggatacttg

SEQ ID NO: 276793 - DNA, 30 bp, Artificial Sequence
  Synthetic oligonucleotide
tagttgtgcgcgtgttctggccagtacttg

SEQ ID NO: 276794 - DNA, 30 bp, Artificial Sequence
  Synthetic oligonucleotide
agactcaggtttccgaaaactttgtacttg

SEQ ID NO: 276795 - DNA, 30 bp, Artificial Sequence
  Synthetic oligonucleotide
ccggctcctttcacatgcagaagaaccttg

SEQ ID NO: 276796 - DNA, 30 bp, Artificial Sequence
  Synthetic oligonucleotide
ctatcggatcgccggatctgtagaaccttg

SEQ ID NO: 276797 - DNA, 30 bp, Artificial Sequence
  Synthetic oligonucleotide
acaatatagggactaccggaatttaccttg

SEQ ID NO: 276798 - DNA, 30 bp, Artificial Sequence
  Synthetic oligonucleotide
atcagttctacgaaccagcccttgcccttg

SEQ ID NO: 276799 - DNA, 30 bp, Artificial Sequence
  Synthetic oligonucleotide
gcacgggacaagcaagtgagggatcccttg

SEQ ID NO: 276800 - DNA, 40 bp, Artificial Sequence
  Synthetic oligonucleotide
gtcgagtttttataacctaactaaacttcttcctcccttg

SEQ ID NO: 276801 - DNA, 30 bp, Artificial Sequence
  Synthetic oligonucleotide
cgttcatttacttaaagagccggtcccttg

SEQ ID NO: 276802 - DNA, 30 bp, Artificial Sequence
  Synthetic oligonucleotide
gttcacgggatgtcgcagtagcctgccttg

SEQ ID NO: 276803 - DNA, 30 bp, Artificial Sequence
  Synthetic oligonucleotide
ctgggagtttcgatcagggctacctccttg

SEQ ID NO: 276804 - DNA, 30 bp, Artificial Sequence
  Synthetic oligonucleotide
cacggtcccatcgttgtccgtagctccttg

SEQ ID NO: 276805 - DNA, 30 bp, Artificial Sequence
  Synthetic oligonucleotide
aggtaattgtgagtactaagattctccttg

SEQ ID NO: 276806 - DNA, 30 bp, Artificial Sequence
  Synthetic oligonucleotide
agccgtgcctcagtaacacactcttccttg

SEQ ID NO: 276807 - DNA, 30 bp, Artificial Sequence
  Synthetic oligonucleotide
taggtatggagcgctcttggttaaagcttg

SEQ ID NO: 276808 - DNA, 30 bp, Artificial Sequence
  Synthetic oligonucleotide
agaaatcccagaataacattctcaagcttg

SEQ ID NO: 276809 - DNA, 30 bp, Artificial Sequence
  Synthetic oligonucleotide
gtatacttcgttaaccgaagaagaagcttg

SEQ ID NO: 276810 - DNA, 30 bp, Artificial Sequence
  Synthetic oligonucleotide
aggttgtttagtcgaccgagggagagcttg

SEQ ID NO: 276811 - DNA, 31 bp, Artificial Sequence
  Synthetic oligonucleotide
gtgtaaatagacgtagtacagaacgagcttg

SEQ ID NO: 276812 - DNA, 30 bp, Artificial Sequence
  Synthetic oligonucleotide
atatcaatgaaataacaaaaagggagcttg

SEQ ID NO: 276813 - DNA, 30 bp, Artificial Sequence
  Synthetic oligonucleotide
tccattgaactaatgtttgctgtgagcttg

SEQ ID NO: 276814 - DNA, 30 bp, Artificial Sequence
  Synthetic oligonucleotide
tcgtcaatcggcagtgtgcttggtagcttg

SEQ ID NO: 276815 - DNA, 30 bp, Artificial Sequence
  Synthetic oligonucleotide
tgtgagttggcattccccgttacgcgcttg

SEQ ID NO: 276816 - DNA, 30 bp, Artificial Sequence
  Synthetic oligonucleotide
aatcagctggtgtcacgatagcaaggcttg

SEQ ID NO: 276817 - DNA, 30 bp, Artificial Sequence
  Synthetic oligonucleotide
tttcgaatacgtatccccaaaacaggcttg

SEQ ID NO: 276818 - DNA, 30 bp, Artificial Sequence
  Synthetic oligonucleotide
gtggggtaactgtagggaaatggaggcttg

SEQ ID NO: 276819 - DNA, 30 bp, Artificial Sequence
  Synthetic oligonucleotide
gaaacggcataacgtcccgccgtaggcttg

SEQ ID NO: 276820 - DNA, 30 bp, Artificial Sequence
  Synthetic oligonucleotide
caccctgctaagatttaaggggacggcttg

SEQ ID NO: 276821 - DNA, 30 bp, Artificial Sequence
  Synthetic oligonucleotide
agatatggccgttgtggatcaatcggcttg

SEQ ID NO: 276822 - DNA, 30 bp, Artificial Sequence
  Synthetic oligonucleotide
atcgttttggagcaggtaacactgggcttg

SEQ ID NO: 276823 - DNA, 30 bp, Artificial Sequence
  Synthetic oligonucleotide
ctctccagaggctactgagcgcctggcttg

SEQ ID NO: 276824 - DNA, 30 bp, Artificial Sequence
  Synthetic oligonucleotide
caaaggctccgtaactcctcataatgcttg

SEQ ID NO: 276825 - DNA, 30 bp, Artificial Sequence
  Synthetic oligonucleotide
acgtatgagtgtggggactccctatgcttg

SEQ ID NO: 276826 - DNA, 30 bp, Artificial Sequence
  Synthetic oligonucleotide
atcctactccgacgttcaaagaactgcttg

SEQ ID NO: 276827 - DNA, 30 bp, Artificial Sequence
  Synthetic oligonucleotide
gccttctcagatataagtctgaactgcttg

SEQ ID NO: 276828 - DNA, 30 bp, Artificial Sequence
  Synthetic oligonucleotide
actacagccaactaaagtttttattgcttg

SEQ ID NO: 276829 - DNA, 30 bp, Artificial Sequence
  Synthetic oligonucleotide
ctgtccagactaggaaggaatgtttgcttg

SEQ ID NO: 276830 - DNA, 30 bp, Artificial Sequence
  Synthetic oligonucleotide
agccaccccacacgttggagctcaatcttg

SEQ ID NO: 276831 - DNA, 30 bp, Artificial Sequence
  Synthetic oligonucleotide
aagatgattatgcgaggtaactgaatcttg

SEQ ID NO: 276832 - DNA, 30 bp, Artificial Sequence
  Synthetic oligonucleotide
atagaggttcataaccactgagtactcttg

SEQ ID NO: 276833 - DNA, 25 bp, Artificial Sequence
  Synthetic oligonucleotide
cctgtaatccgatagacacctcttg

SEQ ID NO: 276834 - DNA, 30 bp, Artificial Sequence
  Synthetic oligonucleotide
acgaggtggaattttcaggatcacctcttg

SEQ ID NO: 276835 - DNA, 30 bp, Artificial Sequence
  Synthetic oligonucleotide
tcccacctagtggattgaatctgtctcttg

SEQ ID NO: 276836 - DNA, 30 bp, Artificial Sequence
  Synthetic oligonucleotide
cgcacctgttacctcggagagcgagtcttg

SEQ ID NO: 276837 - DNA, 30 bp, Artificial Sequence
  Synthetic oligonucleotide
attgagacggtagaacaccacggagtcttg

SEQ ID NO: 276838 - DNA, 30 bp, Artificial Sequence
  Synthetic oligonucleotide
ggaaatccacctgaggcaagcttagtcttg

SEQ ID NO: 276839 - DNA, 30 bp, Artificial Sequence
  Synthetic oligonucleotide
aggggcatagcgccgtacatatacgtcttg

SEQ ID NO: 276840 - DNA, 30 bp, Artificial Sequence
  Synthetic oligonucleotide
cagatttggcgacaagttgacttcgtcttg

SEQ ID NO: 276841 - DNA, 30 bp, Artificial Sequence
  Synthetic oligonucleotide
gcacccaataaagtctgctagtctgtcttg

SEQ ID NO: 276842 - DNA, 30 bp, Artificial Sequence
  Synthetic oligonucleotide
gttactaagacttaacgttgaattgtcttg

SEQ ID NO: 276843 - DNA, 30 bp, Artificial Sequence
  Synthetic oligonucleotide
gtaatgatgtaaagtgataccgaattcttg

SEQ ID NO: 276844 - DNA, 30 bp, Artificial Sequence
  Synthetic oligonucleotide
gtcatgtccgtttaagttatttgattcttg

SEQ ID NO: 276845 - DNA, 30 bp, Artificial Sequence
  Synthetic oligonucleotide
gttcaggcagttgacttgacaaagttcttg

SEQ ID NO: 276846 - DNA, 30 bp, Artificial Sequence
  Synthetic oligonucleotide
caagttggttgtaatagggaaccgttcttg

SEQ ID NO: 276847 - DNA, 30 bp, Artificial Sequence
  Synthetic oligonucleotide
ggagagcctgctcagcctccagttttcttg

SEQ ID NO: 276848 - DNA, 30 bp, Artificial Sequence
  Synthetic oligonucleotide
aggacttgtcggagaacagcgccaaagttg

SEQ ID NO: 276849 - DNA, 30 bp, Artificial Sequence
  Synthetic oligonucleotide
tttactgtactgctacgaacaaacaagttg

SEQ ID NO: 276850 - DNA, 30 bp, Artificial Sequence
  Synthetic oligonucleotide
gtaatccacgggtgttgatataacaagttg

SEQ ID NO: 276851 - DNA, 30 bp, Artificial Sequence
  Synthetic oligonucleotide
gtaaagttagtagtaacacagaccaagttg

SEQ ID NO: 276852 - DNA, 30 bp, Artificial Sequence
  Synthetic oligonucleotide
gatgggtactagataggtcccgccaagttg

SEQ ID NO: 276853 - DNA, 30 bp, Artificial Sequence
  Synthetic oligonucleotide
gggtaggaaaagttctttgtatggaagttg

SEQ ID NO: 276854 - DNA, 30 bp, Artificial Sequence
  Synthetic oligonucleotide
ttcttcccgggcaggccaatagataagttg

SEQ ID NO: 276855 - DNA, 30 bp, Artificial Sequence
  Synthetic oligonucleotide
atagaaagatccctcacgaaggctaagttg

SEQ ID NO: 276856 - DNA, 30 bp, Artificial Sequence
  Synthetic oligonucleotide
gtgtgcgttcgcaggtctctaagtaagttg

SEQ ID NO: 276857 - DNA, 30 bp, Artificial Sequence
  Synthetic oligonucleotide
gcacatactgatcccaatccataacagttg

SEQ ID NO: 276858 - DNA, 30 bp, Artificial Sequence
  Synthetic oligonucleotide
atggaggatgattttttttggacacagttg

SEQ ID NO: 276859 - DNA, 30 bp, Artificial Sequence
  Synthetic oligonucleotide
actttggcgcgtactgggtagcagcagttg

SEQ ID NO: 276860 - DNA, 30 bp, Artificial Sequence
  Synthetic oligonucleotide
gatctcaaatacttcaggccaagggagttg

SEQ ID NO: 276861 - DNA, 30 bp, Artificial Sequence
  Synthetic oligonucleotide
gagaggtcggtatctcgcttcgtggagttg

SEQ ID NO: 276862 - DNA, 30 bp, Artificial Sequence
  Synthetic oligonucleotide
tatgggcgggtgacgtaccttaaatagttg

SEQ ID NO: 276863 - DNA, 30 bp, Artificial Sequence
  Synthetic oligonucleotide
agtttcacgtgcccgcaagagtaatagttg

SEQ ID NO: 276864 - DNA, 30 bp, Artificial Sequence
  Synthetic oligonucleotide
tgtgacaagcatacttgctcgggctagttg

SEQ ID NO: 276865 - DNA, 30 bp, Artificial Sequence
  Synthetic oligonucleotide
gaggtgcagcgattggcccaaatttagttg

SEQ ID NO: 276866 - DNA, 30 bp, Artificial Sequence
  Synthetic oligonucleotide
ttatctacacacctattgtaaaagacgttg

SEQ ID NO: 276867 - DNA, 30 bp, Artificial Sequence
  Synthetic oligonucleotide
tggagccatttacacgaaaacaatacgttg

SEQ ID NO: 276868 - DNA, 30 bp, Artificial Sequence
  Synthetic oligonucleotide
gccgttcgtgttaacattactaatacgttg

SEQ ID NO: 276869 - DNA, 30 bp, Artificial Sequence
  Synthetic oligonucleotide
gccactgaacacgccactccgtgcccgttg

SEQ ID NO: 276870 - DNA, 30 bp, Artificial Sequence
  Synthetic oligonucleotide
cattctattgatagagaggagacgccgttg

SEQ ID NO: 276871 - DNA, 30 bp, Artificial Sequence
  Synthetic oligonucleotide
tatgccgaagcaataaatcgttttccgttg

SEQ ID NO: 276872 - DNA, 30 bp, Artificial Sequence
  Synthetic oligonucleotide
ggtgggcgaatcaactggcattaagcgttg

SEQ ID NO: 276873 - DNA, 30 bp, Artificial Sequence
  Synthetic oligonucleotide
ctagacatcgcgggcataagtaacgcgttg

SEQ ID NO: 276874 - DNA, 30 bp, Artificial Sequence
  Synthetic oligonucleotide
cggatcccagcacggcaggcaccggcgttg

SEQ ID NO: 276875 - DNA, 30 bp, Artificial Sequence
  Synthetic oligonucleotide
ggtatacgacgttttgcctgcaatgcgttg

SEQ ID NO: 276876 - DNA, 30 bp, Artificial Sequence
  Synthetic oligonucleotide
tatatgtattgtaggtctccgggtgcgttg

SEQ ID NO: 276877 - DNA, 30 bp, Artificial Sequence
  Synthetic oligonucleotide
taattatgtcgagacgcgactggttcgttg

SEQ ID NO: 276878 - DNA, 30 bp, Artificial Sequence
  Synthetic oligonucleotide
attaacgccgaagcccgtaagcagaggttg

SEQ ID NO: 276879 - DNA, 30 bp, Artificial Sequence
  Synthetic oligonucleotide
tggaacggtaagggagctcgaaggaggttg

SEQ ID NO: 276880 - DNA, 30 bp, Artificial Sequence
  Synthetic oligonucleotide
ggcactttccgacttcagtaagaacggttg

SEQ ID NO: 276881 - DNA, 30 bp, Artificial Sequence
  Synthetic oligonucleotide
gctaggtgttgtcatccaatatgacggttg

SEQ ID NO: 276882 - DNA, 30 bp, Artificial Sequence
  Synthetic oligonucleotide
tggttatgcctagtatagacaggccggttg

SEQ ID NO: 276883 - DNA, 30 bp, Artificial Sequence
  Synthetic oligonucleotide
attgtaacctcgcaaatgtgctagcggttg

SEQ ID NO: 276884 - DNA, 30 bp, Artificial Sequence
  Synthetic oligonucleotide
atgaataatccagctgaatcttggcggttg

SEQ ID NO: 276885 - DNA, 30 bp, Artificial Sequence
  Synthetic oligonucleotide
ctgaaaagataaagccgtataggtcggttg

SEQ ID NO: 276886 - DNA, 30 bp, Artificial Sequence
  Synthetic oligonucleotide
tggtgggtgattgcggagatcggtcggttg

SEQ ID NO: 276887 - DNA, 30 bp, Artificial Sequence
  Synthetic oligonucleotide
ccttgcatagagatatgtggtgccgggttg

SEQ ID NO: 276888 - DNA, 30 bp, Artificial Sequence
  Synthetic oligonucleotide
gaatcagcgggggaccggactcgcgggttg

SEQ ID NO: 276889 - DNA, 30 bp, Artificial Sequence
  Synthetic oligonucleotide
atggcaaagggctcgggtcgtttggggttg

SEQ ID NO: 276890 - DNA, 30 bp, Artificial Sequence
  Synthetic oligonucleotide
cggtgcgaaattaagaaagttttggggttg

SEQ ID NO: 276891 - DNA, 30 bp, Artificial Sequence
  Synthetic oligonucleotide
acggaaacgtacaacacgtctcctgggttg

SEQ ID NO: 276892 - DNA, 30 bp, Artificial Sequence
  Synthetic oligonucleotide
atcaaatccgtatgctgatttggtgggttg

SEQ ID NO: 276893 - DNA, 30 bp, Artificial Sequence
  Synthetic oligonucleotide
gatcgattgttcgtatttagataatggttg

SEQ ID NO: 276894 - DNA, 30 bp, Artificial Sequence
  Synthetic oligonucleotide
acggtccgtataggaaatgcaacaatgttg

SEQ ID NO: 276895 - DNA, 30 bp, Artificial Sequence
  Synthetic oligonucleotide
cgagaccgctgaggtttcggtagcatgttg

SEQ ID NO: 276896 - DNA, 30 bp, Artificial Sequence
  Synthetic oligonucleotide
ggtggaatggtcgctcatgcctctatgttg

SEQ ID NO: 276897 - DNA, 30 bp, Artificial Sequence
  Synthetic oligonucleotide
ctccaagccgttttatgtagccgtatgttg

SEQ ID NO: 276898 - DNA, 30 bp, Artificial Sequence
  Synthetic oligonucleotide
ctctacgggtccgatgctgacaaactgttg

SEQ ID NO: 276899 - DNA, 30 bp, Artificial Sequence
  Synthetic oligonucleotide
aaagggaatcctaatggatccggactgttg

SEQ ID NO: 276900 - DNA, 30 bp, Artificial Sequence
  Synthetic oligonucleotide
ttaatgggtcgatgactcggggggctgttg

SEQ ID NO: 276901 - DNA, 30 bp, Artificial Sequence
  Synthetic oligonucleotide
cgtcacccagagccgtgtcccatgctgttg

SEQ ID NO: 276902 - DNA, 30 bp, Artificial Sequence
  Synthetic oligonucleotide
gttatctatgcacgagagtagactctgttg

SEQ ID NO: 276903 - DNA, 30 bp, Artificial Sequence
  Synthetic oligonucleotide
agcgacccctgacagttgagagttctgttg

SEQ ID NO: 276904 - DNA, 30 bp, Artificial Sequence
  Synthetic oligonucleotide
ccgcaggctcgaagctgattgagagtgttg

SEQ ID NO: 276905 - DNA, 30 bp, Artificial Sequence
  Synthetic oligonucleotide
cccctcttgcaaaacaagatgggagtgttg

SEQ ID NO: 276906 - DNA, 30 bp, Artificial Sequence
  Synthetic oligonucleotide
atccagctgcgtattgctatgtacgtgttg

SEQ ID NO: 276907 - DNA, 30 bp, Artificial Sequence
  Synthetic oligonucleotide
gcgatttgaccaaacgagtaatcggtgttg

SEQ ID NO: 276908 - DNA, 30 bp, Artificial Sequence
  Synthetic oligonucleotide
ctacgggcgtcataatactgcgtggtgttg

SEQ ID NO: 276909 - DNA, 30 bp, Artificial Sequence
  Synthetic oligonucleotide
tccaactgcgccaactaccggggtgtgttg

SEQ ID NO: 276910 - DNA, 30 bp, Artificial Sequence
  Synthetic oligonucleotide
accactaaaagggggataggtaccttgttg

SEQ ID NO: 276911 - DNA, 30 bp, Artificial Sequence
  Synthetic oligonucleotide
tagcggaaaagggtgtcttatgcaaatttg

SEQ ID NO: 276912 - DNA, 30 bp, Artificial Sequence
  Synthetic oligonucleotide
actggatgcagtatcttaactggaaatttg

SEQ ID NO: 276913 - DNA, 40 bp, Artificial Sequence
  Synthetic oligonucleotide
actggaagtcacttcatgggcgcgtataatggagaatttg

SEQ ID NO: 276914 - DNA, 30 bp, Artificial Sequence
  Synthetic oligonucleotide
cgcaggaccaaaccggtagattctaatttg

SEQ ID NO: 276915 - DNA, 30 bp, Artificial Sequence
  Synthetic oligonucleotide
ggggcgttcggaatctggagccttaatttg

SEQ ID NO: 276916 - DNA, 30 bp, Artificial Sequence
  Synthetic oligonucleotide
gcacctttacggctgacccgctcacatttg

SEQ ID NO: 276917 - DNA, 30 bp, Artificial Sequence
  Synthetic oligonucleotide
cagcaaatccaccagcagcgatcagatttg

SEQ ID NO: 276918 - DNA, 30 bp, Artificial Sequence
  Synthetic oligonucleotide
ggtgcactgagccagagttagtgagatttg

SEQ ID NO: 276919 - DNA, 30 bp, Artificial Sequence
  Synthetic oligonucleotide
tgttcattacctgggaaagccttagatttg

SEQ ID NO: 276920 - DNA, 30 bp, Artificial Sequence
  Synthetic oligonucleotide
agtattaccatagctaccctggtcgatttg

SEQ ID NO: 276921 - DNA, 30 bp, Artificial Sequence
  Synthetic oligonucleotide
tgcggttccttggtgtgccatgaggatttg

SEQ ID NO: 276922 - DNA, 30 bp, Artificial Sequence
  Synthetic oligonucleotide
gtccgatgctgtcattttgccattgatttg

SEQ ID NO: 276923 - DNA, 30 bp, Artificial Sequence
  Synthetic oligonucleotide
tatggcttactccagataagtgaatatttg

SEQ ID NO: 276924 - DNA, 30 bp, Artificial Sequence
  Synthetic oligonucleotide
agaaagtatccgggggcacgtgaatatttg

SEQ ID NO: 276925 - DNA, 30 bp, Artificial Sequence
  Synthetic oligonucleotide
tctaattggcgatattcgttctcatatttg

SEQ ID NO: 276926 - DNA, 30 bp, Artificial Sequence
  Synthetic oligonucleotide
ggtaacactccgaaattacgacgttatttg

SEQ ID NO: 276927 - DNA, 30 bp, Artificial Sequence
  Synthetic oligonucleotide
gatggtatatgtacaattgtttcaactttg

SEQ ID NO: 276928 - DNA, 30 bp, Artificial Sequence
  Synthetic oligonucleotide
gtcattcgacttaaatactccggaactttg

SEQ ID NO: 276929 - DNA, 30 bp, Artificial Sequence
  Synthetic oligonucleotide
aagtaagccgcaagttcccggtagactttg

SEQ ID NO: 276930 - DNA, 30 bp, Artificial Sequence
  Synthetic oligonucleotide
cgataaaataaaggcgaagcccggactttg

SEQ ID NO: 276931 - DNA, 30 bp, Artificial Sequence
  Synthetic oligonucleotide
ttcaatccgcggctgaagggtccccctttg

SEQ ID NO: 276932 - DNA, 30 bp, Artificial Sequence
  Synthetic oligonucleotide
agtcagactccagtgtaaaagaatcctttg

SEQ ID NO: 276933 - DNA, 30 bp, Artificial Sequence
  Synthetic oligonucleotide
tgctgcccgcgttcagtaggtttggctttg

SEQ ID NO: 276934 - DNA, 30 bp, Artificial Sequence
  Synthetic oligonucleotide
ggatctttgggagccctctattatgctttg

SEQ ID NO: 276935 - DNA, 30 bp, Artificial Sequence
  Synthetic oligonucleotide
ccgtttagtatattactaaagggctctttg

SEQ ID NO: 276936 - DNA, 30 bp, Artificial Sequence
  Synthetic oligonucleotide
cgggtaattaactacatcgaagagtctttg

SEQ ID NO: 276937 - DNA, 30 bp, Artificial Sequence
  Synthetic oligonucleotide
gacgtagggctatatcccgtgaggtctttg

SEQ ID NO: 276938 - DNA, 30 bp, Artificial Sequence
  Synthetic oligonucleotide
tgattcgtcatggtgagcacgatgtctttg

SEQ ID NO: 276939 - DNA, 30 bp, Artificial Sequence
  Synthetic oligonucleotide
gtggaggcaaatgtgagcgaataaagtttg

SEQ ID NO: 276940 - DNA, 30 bp, Artificial Sequence
  Synthetic oligonucleotide
gcaaccatgaaagatactttgacaagtttg

SEQ ID NO: 276941 - DNA, 30 bp, Artificial Sequence
  Synthetic oligonucleotide
tagtcgagcgttctcgtccgtcagagtttg

SEQ ID NO: 276942 - DNA, 30 bp, Artificial Sequence
  Synthetic oligonucleotide
gtactgctctttccaagcacaattagtttg

SEQ ID NO: 276943 - DNA, 30 bp, Artificial Sequence
  Synthetic oligonucleotide
ccgtcagagtgagggcgtattgttagtttg

SEQ ID NO: 276944 - DNA, 30 bp, Artificial Sequence
  Synthetic oligonucleotide
cttgcaaggttggctgaagtgagacgtttg

SEQ ID NO: 276945 - DNA, 30 bp, Artificial Sequence
  Synthetic oligonucleotide
caggttagtagcatgagcgtgagccgtttg

SEQ ID NO: 276946 - DNA, 30 bp, Artificial Sequence
  Synthetic oligonucleotide
ccttcctcggataagcccatcactcgtttg

SEQ ID NO: 276947 - DNA, 30 bp, Artificial Sequence
  Synthetic oligonucleotide
tggaatagattcctggagtcgcctcgtttg

SEQ ID NO: 276948 - DNA, 30 bp, Artificial Sequence
  Synthetic oligonucleotide
gaagtcaagacattgtatgccaaaggtttg

SEQ ID NO: 276949 - DNA, 30 bp, Artificial Sequence
  Synthetic oligonucleotide
aagactgttcctgctaattttaaaggtttg

SEQ ID NO: 276950 - DNA, 30 bp, Artificial Sequence
  Synthetic oligonucleotide
aaagctacactgcgcttttacccaggtttg

SEQ ID NO: 276951 - DNA, 30 bp, Artificial Sequence
  Synthetic oligonucleotide
aaggtccttggtcgactcgtgttaggtttg

SEQ ID NO: 276952 - DNA, 30 bp, Artificial Sequence
  Synthetic oligonucleotide
gtaactcatgaagggaatcctaccggtttg

SEQ ID NO: 276953 - DNA, 30 bp, Artificial Sequence
  Synthetic oligonucleotide
agtagtggcgcgcagggtgtggccggtttg

SEQ ID NO: 276954 - DNA, 30 bp, Artificial Sequence
  Synthetic oligonucleotide
taatttggcaagttaaatttaaagggtttg

SEQ ID NO: 276955 - DNA, 30 bp, Artificial Sequence
  Synthetic oligonucleotide
gccggtcgaccacatggatacgcgggtttg

SEQ ID NO: 276956 - DNA, 30 bp, Artificial Sequence
  Synthetic oligonucleotide
gaatcatcgtgaccccagctggcgggtttg

SEQ ID NO: 276957 - DNA, 30 bp, Artificial Sequence
  Synthetic oligonucleotide
gggtacggctggatccctaactatggtttg

SEQ ID NO: 276958 - DNA, 30 bp, Artificial Sequence
  Synthetic oligonucleotide
acaggacgcggcaagtttagaagtggtttg

SEQ ID NO: 276959 - DNA, 30 bp, Artificial Sequence
  Synthetic oligonucleotide
ggcatgccccctgcaggggtctgtggtttg

SEQ ID NO: 276960 - DNA, 30 bp, Artificial Sequence
  Synthetic oligonucleotide
actacaaatagttgcggcttgcactgtttg

SEQ ID NO: 276961 - DNA, 30 bp, Artificial Sequence
  Synthetic oligonucleotide
tcaatcaatagccgttcacattactgtttg

SEQ ID NO: 276962 - DNA, 30 bp, Artificial Sequence
  Synthetic oligonucleotide
tatattaagctataaaggaacacgtgtttg

SEQ ID NO: 276963 - DNA, 30 bp, Artificial Sequence
  Synthetic oligonucleotide
ctcccggggatgaatcggtatcagattttg

SEQ ID NO: 276964 - DNA, 30 bp, Artificial Sequence
  Synthetic oligonucleotide
tcctctccagaggttagcatagggattttg

SEQ ID NO: 276965 - DNA, 30 bp, Artificial Sequence
  Synthetic oligonucleotide
gaaatagaaaaggtgtgtgtagtgattttg

SEQ ID NO: 276966 - DNA, 30 bp, Artificial Sequence
  Synthetic oligonucleotide
actcacgtcaaggttttcacgttgattttg

SEQ ID NO: 276967 - DNA, 30 bp, Artificial Sequence
  Synthetic oligonucleotide
tagccggtagttaatgcgcgttgtattttg

SEQ ID NO: 276968 - DNA, 30 bp, Artificial Sequence
  Synthetic oligonucleotide
agggatactcctcatgaacataaacttttg

SEQ ID NO: 276969 - DNA, 30 bp, Artificial Sequence
  Synthetic oligonucleotide
ttgtgcgtctagcgcacttcccaacttttg

SEQ ID NO: 276970 - DNA, 30 bp, Artificial Sequence
  Synthetic oligonucleotide
ttaacccccaacctggaactgagccttttg

SEQ ID NO: 276971 - DNA, 30 bp, Artificial Sequence
  Synthetic oligonucleotide
agaagacgattataataatcatcgcttttg

SEQ ID NO: 276972 - DNA, 30 bp, Artificial Sequence
  Synthetic oligonucleotide
caccagcgttacctgcaaatgaggcttttg

SEQ ID NO: 276973 - DNA, 30 bp, Artificial Sequence
  Synthetic oligonucleotide
aaacagggctttgagcatagtgggcttttg

SEQ ID NO: 276974 - DNA, 30 bp, Artificial Sequence
  Synthetic oligonucleotide
agtaaaaggatccaacgagcacaagttttg

SEQ ID NO: 276975 - DNA, 30 bp, Artificial Sequence
  Synthetic oligonucleotide
cctatagacggcatgactgatggagttttg

SEQ ID NO: 276976 - DNA, 30 bp, Artificial Sequence
  Synthetic oligonucleotide
tagagctgtcccatccgcatgtgagttttg

SEQ ID NO: 276977 - DNA, 30 bp, Artificial Sequence
  Synthetic oligonucleotide
ggggagacagaaaggcataagcgcgttttg

SEQ ID NO: 276978 - DNA, 30 bp, Artificial Sequence
  Synthetic oligonucleotide
ggcataacgagtcgtcgtggatgggttttg

SEQ ID NO: 276979 - DNA, 30 bp, Artificial Sequence
  Synthetic oligonucleotide
gtaagactattaacgttactcgatgttttg

SEQ ID NO: 276980 - DNA, 30 bp, Artificial Sequence
  Synthetic oligonucleotide
tagactacgtgcgatgggatgtcctttttg

SEQ ID NO: 276981 - DNA, 30 bp, Artificial Sequence
  Synthetic oligonucleotide
agagtgcagttgagaacaacgagctttttg

SEQ ID NO: 276982 - DNA, 30 bp, Artificial Sequence
  Synthetic oligonucleotide
gagatcacgggccaacataaggtgtttttg

SEQ ID NO: 276983 - DNA, 30 bp, Artificial Sequence
  Synthetic oligonucleotide
tagaattgggggtttagtaaccattttttg

SEQ ID NO: 276984 - DNA, 30 bp, Artificial Sequence
  Synthetic oligonucleotide
tatcgtgccggcgacggacgaagttttttg

SEQ ID NO: 276985 - DNA, 30 bp, Artificial Sequence
  Synthetic oligonucleotide
ccattcaatgttgtagagttaagttttttg

SEQ ID NO: 276986 - DNA, 30 bp, Artificial Sequence
  Synthetic oligonucleotide
ggctgaggggggcaatgtcaatcaaaaaat

SEQ ID NO: 276987 - DNA, 30 bp, Artificial Sequence
  Synthetic oligonucleotide
actgtcctgcgctacgccgtgtcaaaaaat

SEQ ID NO: 276988 - DNA, 30 bp, Artificial Sequence
  Synthetic oligonucleotide
tataggctatctccaatgttgctaaaaaat

SEQ ID NO: 276989 - DNA, 30 bp, Artificial Sequence
  Synthetic oligonucleotide
caatctaagcaagttgaagactagaaaaat

SEQ ID NO: 276990 - DNA, 30 bp, Artificial Sequence
  Synthetic oligonucleotide
gcacaccacgctttacaccttgggaaaaat

SEQ ID NO: 276991 - DNA, 30 bp, Artificial Sequence
  Synthetic oligonucleotide
ttgccaactgaaagctgataatggaaaaat

SEQ ID NO: 276992 - DNA, 30 bp, Artificial Sequence
  Synthetic oligonucleotide
tacagttgcagttggaattgaatgaaaaat

SEQ ID NO: 276993 - DNA, 30 bp, Artificial Sequence
  Synthetic oligonucleotide
ctcgcggacactacatgtaactataaaaat

SEQ ID NO: 276994 - DNA, 30 bp, Artificial Sequence
  Synthetic oligonucleotide
gctgcctggcgaatctgtgatgttaaaaat

SEQ ID NO: 276995 - DNA, 30 bp, Artificial Sequence
  Synthetic oligonucleotide
acacggtgatcctaaatccattgacaaaat

SEQ ID NO: 276996 - DNA, 30 bp, Artificial Sequence
  Synthetic oligonucleotide
taggttaataggtctaccaggcatcaaaat

SEQ ID NO: 276997 - DNA, 30 bp, Artificial Sequence
  Synthetic oligonucleotide
aacgctcattagaatttagatcatcaaaat

SEQ ID NO: 276998 - DNA, 30 bp, Artificial Sequence
  Synthetic oligonucleotide
tctagtcgttcatgtgaggccagtcaaaat

SEQ ID NO: 276999 - DNA, 30 bp, Artificial Sequence
  Synthetic oligonucleotide
gaaggctgtcgtcccgggtaaagagaaaat

SEQ ID NO: 277000 - DNA, 30 bp, Artificial Sequence
  Synthetic oligonucleotide
gaaattttgccatatatcaggccggaaaat

SEQ ID NO: 277001 - DNA, 31 bp, Artificial Sequence
  Synthetic oligonucleotide
cgggctactcgcgaccgtagagatggaaaat

SEQ ID NO: 277002 - DNA, 30 bp, Artificial Sequence
  Synthetic oligonucleotide
ctgtcgggaagttggcagcacctggaaaat

SEQ ID NO: 277003 - DNA, 30 bp, Artificial Sequence
  Synthetic oligonucleotide
catactaggactagcctcagttatgaaaat

SEQ ID NO: 277004 - DNA, 30 bp, Artificial Sequence
  Synthetic oligonucleotide
gtcaattcatctatctcgcgggctgaaaat

SEQ ID NO: 277005 - DNA, 30 bp, Artificial Sequence
  Synthetic oligonucleotide
gaggcgatcctatcagtagtctgtgaaaat

SEQ ID NO: 277006 - DNA, 30 bp, Artificial Sequence
  Synthetic oligonucleotide
gcttgtttacttaacgtagtggtataaaat

SEQ ID NO: 277007 - DNA, 30 bp, Artificial Sequence
  Synthetic oligonucleotide
tttaggaggcattagccctggaggtaaaat

SEQ ID NO: 277008 - DNA, 30 bp, Artificial Sequence
  Synthetic oligonucleotide
gtgaaaagtaacacgttctgtaggtaaaat

SEQ ID NO: 277009 - DNA, 30 bp, Artificial Sequence
  Synthetic oligonucleotide
tgggggagaaaaatctattagggttaaaat

SEQ ID NO: 277010 - DNA, 30 bp, Artificial Sequence
  Synthetic oligonucleotide
agtatgagccgttggtgctacaaaacaaat

SEQ ID NO: 277011 - DNA, 31 bp, Artificial Sequence
  Synthetic oligonucleotide
agtgtcatggccctttactccgtaaacaaat

SEQ ID NO: 277012 - DNA, 30 bp, Artificial Sequence
  Synthetic oligonucleotide
atcagcaaggataataatggcctaacaaat

SEQ ID NO: 277013 - DNA, 30 bp, Artificial Sequence
  Synthetic oligonucleotide
tagccatcgagtgtctcagattagacaaat

SEQ ID NO: 277014 - DNA, 30 bp, Artificial Sequence
  Synthetic oligonucleotide
acctagatagcaggcccgtccattacaaat

SEQ ID NO: 277015 - DNA, 30 bp, Artificial Sequence
  Synthetic oligonucleotide
gttatcgaatcgtctaaagttgttacaaat

SEQ ID NO: 277016 - DNA, 30 bp, Artificial Sequence
  Synthetic oligonucleotide
cggccttatggcccgaaacgggttccaaat

SEQ ID NO: 277017 - DNA, 30 bp, Artificial Sequence
  Synthetic oligonucleotide
ggccgcaccgcctgagtacgggaggcaaat

SEQ ID NO: 277018 - DNA, 30 bp, Artificial Sequence
  Synthetic oligonucleotide
caaggaggatgcatgtgtccgcgggcaaat

SEQ ID NO: 277019 - DNA, 30 bp, Artificial Sequence
  Synthetic oligonucleotide
caccccggtatctgagaaagttgggcaaat

SEQ ID NO: 277020 - DNA, 30 bp, Artificial Sequence
  Synthetic oligonucleotide
ttgcgcattaagtaatgtaatttggcaaat

SEQ ID NO: 277021 - DNA, 30 bp, Artificial Sequence
  Synthetic oligonucleotide
aacaatttaattagtttcactcaatcaaat

SEQ ID NO: 277022 - DNA, 30 bp, Artificial Sequence
  Synthetic oligonucleotide
aagaaaagatcaaagcaaatcttctcaaat

SEQ ID NO: 277023 - DNA, 30 bp, Artificial Sequence
  Synthetic oligonucleotide
aactggggtcaatttcatctccagtcaaat

SEQ ID NO: 277024 - DNA, 30 bp, Artificial Sequence
  Synthetic oligonucleotide
tgggttagtcggtcccaactgcagtcaaat

SEQ ID NO: 277025 - DNA, 30 bp, Artificial Sequence
  Synthetic oligonucleotide
tggtgatcattaagcggaacatagtcaaat

SEQ ID NO: 277026 - DNA, 30 bp, Artificial Sequence
  Synthetic oligonucleotide
tactatatagaccggaggtgtccgtcaaat

SEQ ID NO: 277027 - DNA, 30 bp, Artificial Sequence
  Synthetic oligonucleotide
gacctctccagaggagcctagatgtcaaat

SEQ ID NO: 277028 - DNA, 30 bp, Artificial Sequence
  Synthetic oligonucleotide
taggcttgtctgttcccctgtcaaagaaat

SEQ ID NO: 277029 - DNA, 30 bp, Artificial Sequence
  Synthetic oligonucleotide
ggagattagtaaaacgcccgaaagagaaat

SEQ ID NO: 277030 - DNA, 30 bp, Artificial Sequence
  Synthetic oligonucleotide
cgggcataggtcccaacgtttacgagaaat

SEQ ID NO: 277031 - DNA, 30 bp, Artificial Sequence
  Synthetic oligonucleotide
attaccgtcaacaaaattttgaatagaaat

SEQ ID NO: 277032 - DNA, 30 bp, Artificial Sequence
  Synthetic oligonucleotide
aaatagttcgctgtactcgagggccgaaat

SEQ ID NO: 277033 - DNA, 30 bp, Artificial Sequence
  Synthetic oligonucleotide
cctgcagtaaaatgttgctgtagtcgaaat

SEQ ID NO: 277034 - DNA, 30 bp, Artificial Sequence
  Synthetic oligonucleotide
tcgcgctatattaagcaatgaccaggaaat

SEQ ID NO: 277035 - DNA, 30 bp, Artificial Sequence
  Synthetic oligonucleotide
gattaagtaaggggttattccataggaaat

SEQ ID NO: 277036 - DNA, 30 bp, Artificial Sequence
  Synthetic oligonucleotide
ccgaatggacatcgtgtttgggtaggaaat

SEQ ID NO: 277037 - DNA, 30 bp, Artificial Sequence
  Synthetic oligonucleotide
aaggggggtatacttactcgggggggaaat

SEQ ID NO: 277038 - DNA, 30 bp, Artificial Sequence
  Synthetic oligonucleotide
tattcgcgtgcagaatacccataatgaaat

SEQ ID NO: 277039 - DNA, 30 bp, Artificial Sequence
  Synthetic oligonucleotide
agccatatagggctactccatatctgaaat

SEQ ID NO: 277040 - DNA, 30 bp, Artificial Sequence
  Synthetic oligonucleotide
agcagtagtgttggtttaatcttgtgaaat

SEQ ID NO: 277041 - DNA, 30 bp, Artificial Sequence
  Synthetic oligonucleotide
caagaggatgcaggtattgaccattgaaat

SEQ ID NO: 277042 - DNA, 30 bp, Artificial Sequence
  Synthetic oligonucleotide
tttcgatgacgggccacctcatgttgaaat

SEQ ID NO: 277043 - DNA, 30 bp, Artificial Sequence
  Synthetic oligonucleotide
gactacatgtttgggatcaggacaataaat

SEQ ID NO: 277044 - DNA, 30 bp, Artificial Sequence
  Synthetic oligonucleotide
gtcattgcaattcaacgaagtacaataaat

SEQ ID NO: 277045 - DNA, 30 bp, Artificial Sequence
  Synthetic oligonucleotide
gtcggtccgcagtgttgctcggcaataaat

SEQ ID NO: 277046 - DNA, 30 bp, Artificial Sequence
  Synthetic oligonucleotide
aatcggagcaacgctgaatgtttaataaat

SEQ ID NO: 277047 - DNA, 30 bp, Artificial Sequence
  Synthetic oligonucleotide
tgttagagcgtgaacgtagccaacataaat

SEQ ID NO: 277048 - DNA, 30 bp, Artificial Sequence
  Synthetic oligonucleotide
tcaacccccgttctggaatggaagataaat

SEQ ID NO: 277049 - DNA, 30 bp, Artificial Sequence
  Synthetic oligonucleotide
caacgtatcgtaacacgctaagcgataaat

SEQ ID NO: 277050 - DNA, 30 bp, Artificial Sequence
  Synthetic oligonucleotide
gaacaaaaatatagggcgtccactataaat

SEQ ID NO: 277051 - DNA, 30 bp, Artificial Sequence
  Synthetic oligonucleotide
ggcattactctggacttgtctcaactaaat

SEQ ID NO: 277052 - DNA, 30 bp, Artificial Sequence
  Synthetic oligonucleotide
atccgaagaagaagtgcaacttgactaaat

SEQ ID NO: 277053 - DNA, 30 bp, Artificial Sequence
  Synthetic oligonucleotide
cattaacccacgttcgctacctagctaaat

SEQ ID NO: 277054 - DNA, 30 bp, Artificial Sequence
  Synthetic oligonucleotide
aggggcgctgctctaacacttccgctaaat

SEQ ID NO: 277055 - DNA, 30 bp, Artificial Sequence
  Synthetic oligonucleotide
atcacctggaactgggtggagtggctaaat

SEQ ID NO: 277056 - DNA, 30 bp, Artificial Sequence
  Synthetic oligonucleotide
agttcccagtgcaatacctttaaagtaaat

SEQ ID NO: 277057 - DNA, 30 bp, Artificial Sequence
  Synthetic oligonucleotide
cacatgcaaagtaacagatcgttagtaaat

SEQ ID NO: 277058 - DNA, 30 bp, Artificial Sequence
  Synthetic oligonucleotide
gtacgatatacaatcgagctctgcgtaaat

SEQ ID NO: 277059 - DNA, 30 bp, Artificial Sequence
  Synthetic oligonucleotide
cggcagcgagtgaggggttgcgtcgtaaat

SEQ ID NO: 277060 - DNA, 30 bp, Artificial Sequence
  Synthetic oligonucleotide
tcacgagatatgaataaaccaggggtaaat

SEQ ID NO: 277061 - DNA, 30 bp, Artificial Sequence
  Synthetic oligonucleotide
agcagcacacaattcctgtatttattaaat

SEQ ID NO: 277062 - DNA, 30 bp, Artificial Sequence
  Synthetic oligonucleotide
cccgcacaatagccatgctcgtccttaaat

SEQ ID NO: 277063 - DNA, 30 bp, Artificial Sequence
  Synthetic oligonucleotide
cgtgatggggtcaatctctcgtctttaaat

SEQ ID NO: 277064 - DNA, 30 bp, Artificial Sequence
  Synthetic oligonucleotide
acaccatacccatgaggcaccagtttaaat

SEQ ID NO: 277065 - DNA, 30 bp, Artificial Sequence
  Synthetic oligonucleotide
tacaagtactggagtttatcggggaacaat

SEQ ID NO: 277066 - DNA, 30 bp, Artificial Sequence
  Synthetic oligonucleotide
ggcgtagtggtcccagtacctgggaacaat

SEQ ID NO: 277067 - DNA, 30 bp, Artificial Sequence
  Synthetic oligonucleotide
accaagcgctagcaagatcgctctaacaat

SEQ ID NO: 277068 - DNA, 30 bp, Artificial Sequence
  Synthetic oligonucleotide
taaatatcatactagaaatcggcacacaat

SEQ ID NO: 277069 - DNA, 30 bp, Artificial Sequence
  Synthetic oligonucleotide
gtgcatagtagggggcgtaagcaccacaat

SEQ ID NO: 277070 - DNA, 30 bp, Artificial Sequence
  Synthetic oligonucleotide
cggtattagcgacaggcattaccgcacaat

SEQ ID NO: 277071 - DNA, 30 bp, Artificial Sequence
  Synthetic oligonucleotide
atagcagcttcagggccaaagacagacaat

SEQ ID NO: 277072 - DNA, 30 bp, Artificial Sequence
  Synthetic oligonucleotide
aacatgatcttgacactgagcagagacaat

SEQ ID NO: 277073 - DNA, 30 bp, Artificial Sequence
  Synthetic oligonucleotide
aggatagagcgacaattcaagatagacaat

SEQ ID NO: 277074 - DNA, 30 bp, Artificial Sequence
  Synthetic oligonucleotide
agtggttacgtagaatgtgaggctgacaat

SEQ ID NO: 277075 - DNA, 30 bp, Artificial Sequence
  Synthetic oligonucleotide
cggccgtagtcgtacgtccgtccatacaat

SEQ ID NO: 277076 - DNA, 30 bp, Artificial Sequence
  Synthetic oligonucleotide
tgctattgctacgttagtagcgtatacaat

SEQ ID NO: 277077 - DNA, 30 bp, Artificial Sequence
  Synthetic oligonucleotide
gctacggttactcggaatgacgtctacaat

SEQ ID NO: 277078 - DNA, 30 bp, Artificial Sequence
  Synthetic oligonucleotide
cgaagcgagggtgtacatatggggtacaat

SEQ ID NO: 277079 - DNA, 30 bp, Artificial Sequence
  Synthetic oligonucleotide
ccatatattcaaggctgtacaggttacaat

SEQ ID NO: 277080 - DNA, 30 bp, Artificial Sequence
  Synthetic oligonucleotide
ggaagccggctcccaacgtctgtttacaat

SEQ ID NO: 277081 - DNA, 30 bp, Artificial Sequence
  Synthetic oligonucleotide
cttcagaagttcatcttcgattgcaccaat

SEQ ID NO: 277082 - DNA, 30 bp, Artificial Sequence
  Synthetic oligonucleotide
aagccccagtacattagggtggagaccaat

SEQ ID NO: 277083 - DNA, 30 bp, Artificial Sequence
  Synthetic oligonucleotide
ttgtggtaattgtttcgcggaaggaccaat

SEQ ID NO: 277084 - DNA, 30 bp, Artificial Sequence
  Synthetic oligonucleotide
aacggaacgcttcgtcgtaagcgtaccaat

SEQ ID NO: 277085 - DNA, 30 bp, Artificial Sequence
  Synthetic oligonucleotide
ggggtaagcctggtcaaaaggtgccccaat

SEQ ID NO: 277086 - DNA, 30 bp, Artificial Sequence
  Synthetic oligonucleotide
tagactgaatctgttaagcgcccgcccaat

SEQ ID NO: 277087 - DNA, 30 bp, Artificial Sequence
  Synthetic oligonucleotide
gaaaacactacttgatatgacagtcccaat

SEQ ID NO: 277088 - DNA, 30 bp, Artificial Sequence
  Synthetic oligonucleotide
tacaccgtggaccaatgcagttgtcccaat

SEQ ID NO: 277089 - DNA, 30 bp, Artificial Sequence
  Synthetic oligonucleotide
gaactatgactcttttttcgggcagccaat

SEQ ID NO: 277090 - DNA, 30 bp, Artificial Sequence
  Synthetic oligonucleotide
tcctcctggtatggattcattcaggccaat

SEQ ID NO: 277091 - DNA, 30 bp, Artificial Sequence
  Synthetic oligonucleotide
actttcggcgtggtcgacggataggccaat

SEQ ID NO: 277092 - DNA, 30 bp, Artificial Sequence
  Synthetic oligonucleotide
ctaaggttgatggatgtcctgtgggccaat

SEQ ID NO: 277093 - DNA, 30 bp, Artificial Sequence
  Synthetic oligonucleotide
ctaaccagaagtcgcaactgcgtggccaat

SEQ ID NO: 277094 - DNA, 30 bp, Artificial Sequence
  Synthetic oligonucleotide
tgttggattaatacatggactcgtgccaat

SEQ ID NO: 277095 - DNA, 30 bp, Artificial Sequence
  Synthetic oligonucleotide
cggtccttatatacctaccgctactccaat

SEQ ID NO: 277096 - DNA, 30 bp, Artificial Sequence
  Synthetic oligonucleotide
gttcccagctaggcgcagagggggtccaat

SEQ ID NO: 277097 - DNA, 30 bp, Artificial Sequence
  Synthetic oligonucleotide
aaatcgactcttcagatgtgaaaaagcaat

SEQ ID NO: 277098 - DNA, 30 bp, Artificial Sequence
  Synthetic oligonucleotide
cggaattataggcggccgtctgaaagcaat

SEQ ID NO: 277099 - DNA, 30 bp, Artificial Sequence
  Synthetic oligonucleotide
tgttgatgtgactggctgtgtagaagcaat

SEQ ID NO: 277100 - DNA, 30 bp, Artificial Sequence
  Synthetic oligonucleotide
tcaagcgaaatgtataatcgttacagcaat

SEQ ID NO: 277101 - DNA, 30 bp, Artificial Sequence
  Synthetic oligonucleotide
cttggctgcgtgccgtccgacgatagcaat

SEQ ID NO: 277102 - DNA, 30 bp, Artificial Sequence
  Synthetic oligonucleotide
gacaagccataaacgtttgaagctagcaat

SEQ ID NO: 277103 - DNA, 30 bp, Artificial Sequence
  Synthetic oligonucleotide
tacaacggggctggggtgtccgctagcaat

SEQ ID NO: 277104 - DNA, 30 bp, Artificial Sequence
  Synthetic oligonucleotide
gatactaatgtccatactgtctttagcaat

SEQ ID NO: 277105 - DNA, 30 bp, Artificial Sequence
  Synthetic oligonucleotide
agaaataagggcgtggagttatgacgcaat

SEQ ID NO: 277106 - DNA, 30 bp, Artificial Sequence
  Synthetic oligonucleotide
atgcgccggtaccaactcgaaatacgcaat

SEQ ID NO: 277107 - DNA, 30 bp, Artificial Sequence
  Synthetic oligonucleotide
gaataaaaacgatgtctgcccccccgcaat

SEQ ID NO: 277108 - DNA, 30 bp, Artificial Sequence
  Synthetic oligonucleotide
tataatagagaccacattatgatccgcaat

SEQ ID NO: 277109 - DNA, 30 bp, Artificial Sequence
  Synthetic oligonucleotide
gggatcgggatcttgcggagggggcgcaat

SEQ ID NO: 277110 - DNA, 30 bp, Artificial Sequence
  Synthetic oligonucleotide
ttatgcgattgtagtatatcttctcgcaat

SEQ ID NO: 277111 - DNA, 30 bp, Artificial Sequence
  Synthetic oligonucleotide
atacggtattataataaacataaaggcaat

SEQ ID NO: 277112 - DNA, 30 bp, Artificial Sequence
  Synthetic oligonucleotide
agcggggcctaaggacggcgccagggcaat

SEQ ID NO: 277113 - DNA, 30 bp, Artificial Sequence
  Synthetic oligonucleotide
tttggccagctagaagaatgaatgggcaat

SEQ ID NO: 277114 - DNA, 30 bp, Artificial Sequence
  Synthetic oligonucleotide
catatcattcaaagtagaatactgggcaat

SEQ ID NO: 277115 - DNA, 30 bp, Artificial Sequence
  Synthetic oligonucleotide
cctggacctatctaaggaggccatggcaat

SEQ ID NO: 277116 - DNA, 30 bp, Artificial Sequence
  Synthetic oligonucleotide
ggcgccggggactaggaaacccctggcaat

SEQ ID NO: 277117 - DNA, 30 bp, Artificial Sequence
  Synthetic oligonucleotide
gtctaattgccgggatattgcgctggcaat

SEQ ID NO: 277118 - DNA, 30 bp, Artificial Sequence
  Synthetic oligonucleotide
aaaatacgcgcagtcttggaacttggcaat

SEQ ID NO: 277119 - DNA, 30 bp, Artificial Sequence
  Synthetic oligonucleotide
acggtcaatgcccctagtggaaaatgcaat

SEQ ID NO: 277120 - DNA, 30 bp, Artificial Sequence
  Synthetic oligonucleotide
catgtcatgtccatggtcttggcatgcaat

SEQ ID NO: 277121 - DNA, 30 bp, Artificial Sequence
  Synthetic oligonucleotide
agtcgaagttatccacactagatatgcaat

SEQ ID NO: 277122 - DNA, 30 bp, Artificial Sequence
  Synthetic oligonucleotide
ccttacgtgacatcgtagtgcctctgcaat

SEQ ID NO: 277123 - DNA, 30 bp, Artificial Sequence
  Synthetic oligonucleotide
gaccgcggaatttatcatgcattctgcaat

SEQ ID NO: 277124 - DNA, 30 bp, Artificial Sequence
  Synthetic oligonucleotide
atgatgatgagtcgacgtgtattgtgcaat

SEQ ID NO: 277125 - DNA, 30 bp, Artificial Sequence
  Synthetic oligonucleotide
cggtacacacagttaagccctaattgcaat

SEQ ID NO: 277126 - DNA, 30 bp, Artificial Sequence
  Synthetic oligonucleotide
agggtatgtcactattatcaaccaatcaat

SEQ ID NO: 277127 - DNA, 30 bp, Artificial Sequence
  Synthetic oligonucleotide
ggaagcatgttcatgtcagaggagatcaat

SEQ ID NO: 277128 - DNA, 30 bp, Artificial Sequence
  Synthetic oligonucleotide
ggtggcaccgtatttgatatgtttatcaat

SEQ ID NO: 277129 - DNA, 30 bp, Artificial Sequence
  Synthetic oligonucleotide
cagtacgtcctgcggggagaggaactcaat

SEQ ID NO: 277130 - DNA, 30 bp, Artificial Sequence
  Synthetic oligonucleotide
cctacttttagtatctgaccgagactcaat

SEQ ID NO: 277131 - DNA, 30 bp, Artificial Sequence
  Synthetic oligonucleotide
aatggctaatcgtgtacacacggcctcaat

SEQ ID NO: 277132 - DNA, 30 bp, Artificial Sequence
  Synthetic oligonucleotide
gggtctgcagccgaatactcgggcctcaat

SEQ ID NO: 277133 - DNA, 30 bp, Artificial Sequence
  Synthetic oligonucleotide
gctgaaactacgggttaagggttcctcaat

SEQ ID NO: 277134 - DNA, 30 bp, Artificial Sequence
  Synthetic oligonucleotide
aggaaatcttatcggacataacagctcaat

SEQ ID NO: 277135 - DNA, 30 bp, Artificial Sequence
  Synthetic oligonucleotide
tagcgcccggatttatcgtctagtctcaat

SEQ ID NO: 277136 - DNA, 30 bp, Artificial Sequence
  Synthetic oligonucleotide
aaaagtgttaggagggttcacggagtcaat

SEQ ID NO: 277137 - DNA, 30 bp, Artificial Sequence
  Synthetic oligonucleotide
cccgagtatccacgggcagcgaccgtcaat

SEQ ID NO: 277138 - DNA, 30 bp, Artificial Sequence
  Synthetic oligonucleotide
actagatttgttcgtcgaaagttcgtcaat

SEQ ID NO: 277139 - DNA, 30 bp, Artificial Sequence
  Synthetic oligonucleotide
gtgtgacatagtcaataccaacgggtcaat

SEQ ID NO: 277140 - DNA, 30 bp, Artificial Sequence
  Synthetic oligonucleotide
aatcgtagtaagattcgagagggggtcaat

SEQ ID NO: 277141 - DNA, 30 bp, Artificial Sequence
  Synthetic oligonucleotide
gtagtaggaagggtattgggctgggtcaat

SEQ ID NO: 277142 - DNA, 30 bp, Artificial Sequence
  Synthetic oligonucleotide
tagtgataaagtgctagaggcatggtcaat

SEQ ID NO: 277143 - DNA, 30 bp, Artificial Sequence
  Synthetic oligonucleotide
gaagggtctagggccaggcgtgtggtcaat

SEQ ID NO: 277144 - DNA, 30 bp, Artificial Sequence
  Synthetic oligonucleotide
caaagaacgaggcgatagttttttgtcaat

SEQ ID NO: 277145 - DNA, 30 bp, Artificial Sequence
  Synthetic oligonucleotide
aggtgacgagacgtttttatggaattcaat

SEQ ID NO: 277146 - DNA, 30 bp, Artificial Sequence
  Synthetic oligonucleotide
ttccaaattgggcccgggctgagattcaat

SEQ ID NO: 277147 - DNA, 30 bp, Artificial Sequence
  Synthetic oligonucleotide
caccttagcaacatatccagcagcttcaat

SEQ ID NO: 277148 - DNA, 30 bp, Artificial Sequence
  Synthetic oligonucleotide
gatcagtcgtgatttgataccccgttcaat

SEQ ID NO: 277149 - DNA, 30 bp, Artificial Sequence
  Synthetic oligonucleotide
cgttaatttaagaaaaggaaatcgttcaat

SEQ ID NO: 277150 - DNA, 30 bp, Artificial Sequence
  Synthetic oligonucleotide
agggatgagatttaggactaagctttcaat

SEQ ID NO: 277151 - DNA, 30 bp, Artificial Sequence
  Synthetic oligonucleotide
ttgcgcagattcgcccgaaattgtttcaat

SEQ ID NO: 277152 - DNA, 30 bp, Artificial Sequence
  Synthetic oligonucleotide
acaaatgttacagccgacgactacaagaat

SEQ ID NO: 277153 - DNA, 30 bp, Artificial Sequence
  Synthetic oligonucleotide
ctgaacttggaaccttttccgtccaagaat

SEQ ID NO: 277154 - DNA, 30 bp, Artificial Sequence
  Synthetic oligonucleotide
aaagaacgtccgggttgtggcacgaagaat

SEQ ID NO: 277155 - DNA, 30 bp, Artificial Sequence
  Synthetic oligonucleotide
aatagaccggaccttatcggtaggaagaat

SEQ ID NO: 277156 - DNA, 30 bp, Artificial Sequence
  Synthetic oligonucleotide
ccagaaggggtcaggtagtgccctaagaat

SEQ ID NO: 277157 - DNA, 30 bp, Artificial Sequence
  Synthetic oligonucleotide
taccagcggttccacgtatacagtaagaat

SEQ ID NO: 277158 - DNA, 30 bp, Artificial Sequence
  Synthetic oligonucleotide
tgatccacattttacacaactcttaagaat

SEQ ID NO: 277159 - DNA, 30 bp, Artificial Sequence
  Synthetic oligonucleotide
ttcatagttaaaacaagcaatgtacagaat

SEQ ID NO: 277160 - DNA, 30 bp, Artificial Sequence
  Synthetic oligonucleotide
gataaccaatgcgtagtgcagctccagaat

SEQ ID NO: 277161 - DNA, 30 bp, Artificial Sequence
  Synthetic oligonucleotide
tatagtcaaggtttgataagtgagcagaat

SEQ ID NO: 277162 - DNA, 30 bp, Artificial Sequence
  Synthetic oligonucleotide
tccaagcaaacgttgatccggtggcagaat

SEQ ID NO: 277163 - DNA, 30 bp, Artificial Sequence
  Synthetic oligonucleotide
ataatagaaatcagctgatgcgatcagaat

SEQ ID NO: 277164 - DNA, 30 bp, Artificial Sequence
  Synthetic oligonucleotide
tcgcataggcattgttggttctatcagaat

SEQ ID NO: 277165 - DNA, 30 bp, Artificial Sequence
  Synthetic oligonucleotide
tatacgggtgcgaaaaagtctagtcagaat

SEQ ID NO: 277166 - DNA, 30 bp, Artificial Sequence
  Synthetic oligonucleotide
aggttcaagtcttaatcgggttgtcagaat

SEQ ID NO: 277167 - DNA, 30 bp, Artificial Sequence
  Synthetic oligonucleotide
tgctgcattagatctttgcatccagagaat

SEQ ID NO: 277168 - DNA, 30 bp, Artificial Sequence
  Synthetic oligonucleotide
ttgaattattcaggctcaaacggagagaat

SEQ ID NO: 277169 - DNA, 30 bp, Artificial Sequence
  Synthetic oligonucleotide
gttgggatctcggggcgcgtccacgagaat

SEQ ID NO: 277170 - DNA, 30 bp, Artificial Sequence
  Synthetic oligonucleotide
tcgcggggggtctcagggcatgaggagaat

SEQ ID NO: 277171 - DNA, 30 bp, Artificial Sequence
  Synthetic oligonucleotide
ggcggccttggtaaaaatttgtaggagaat

SEQ ID NO: 277172 - DNA, 30 bp, Artificial Sequence
  Synthetic oligonucleotide
ggccgtgtagcacgtggtctggcggagaat

SEQ ID NO: 277173 - DNA, 30 bp, Artificial Sequence
  Synthetic oligonucleotide
agacgtatcatccaagggtcaactgagaat

SEQ ID NO: 277174 - DNA, 30 bp, Artificial Sequence
  Synthetic oligonucleotide
tgcttaggacgtggtatgacgccatagaat

SEQ ID NO: 277175 - DNA, 30 bp, Artificial Sequence
  Synthetic oligonucleotide
gtgagatgctatcaagtggttgagtagaat

SEQ ID NO: 277176 - DNA, 30 bp, Artificial Sequence
  Synthetic oligonucleotide
tagaacggtcacgatctacatcggtagaat

SEQ ID NO: 277177 - DNA, 30 bp, Artificial Sequence
  Synthetic oligonucleotide
caaaactcattgcgaaattaaccttagaat

SEQ ID NO: 277178 - DNA, 30 bp, Artificial Sequence
  Synthetic oligonucleotide
tccaagcggtgtctagttgaatcttagaat

SEQ ID NO: 277179 - DNA, 30 bp, Artificial Sequence
  Synthetic oligonucleotide
agaattgaagcgtccgcgtaggcaacgaat

SEQ ID NO: 277180 - DNA, 30 bp, Artificial Sequence
  Synthetic oligonucleotide
gctaatgacgtccaactcaggagaacgaat

SEQ ID NO: 277181 - DNA, 30 bp, Artificial Sequence
  Synthetic oligonucleotide
gtgtgataagtccccggagagggaacgaat

SEQ ID NO: 277182 - DNA, 30 bp, Artificial Sequence
  Synthetic oligonucleotide
ccatcagctgcacggaccgggtacacgaat

SEQ ID NO: 277183 - DNA, 30 bp, Artificial Sequence
  Synthetic oligonucleotide
gtgcggaagacttgcacatcttacacgaat

SEQ ID NO: 277184 - DNA, 30 bp, Artificial Sequence
  Synthetic oligonucleotide
cgggcaccgtgcaaggttgattcgacgaat

SEQ ID NO: 277185 - DNA, 30 bp, Artificial Sequence
  Synthetic oligonucleotide
catggacatttagaggaactatggacgaat

SEQ ID NO: 277186 - DNA, 30 bp, Artificial Sequence
  Synthetic oligonucleotide
gccaggtccctaagctagtaagtgacgaat

SEQ ID NO: 277187 - DNA, 30 bp, Artificial Sequence
  Synthetic oligonucleotide
aggaatgacgaagttatgctatatacgaat

SEQ ID NO: 277188 - DNA, 30 bp, Artificial Sequence
  Synthetic oligonucleotide
actgatgtgcgcgctattgaacgaccgaat

SEQ ID NO: 277189 - DNA, 30 bp, Artificial Sequence
  Synthetic oligonucleotide
gaaaagcagtaaaatccatagtgaccgaat

SEQ ID NO: 277190 - DNA, 30 bp, Artificial Sequence
  Synthetic oligonucleotide
actgaatggataagtctagataacccgaat

SEQ ID NO: 277191 - DNA, 30 bp, Artificial Sequence
  Synthetic oligonucleotide
tctgcgataataacaagggtagacccgaat

SEQ ID NO: 277192 - DNA, 30 bp, Artificial Sequence
  Synthetic oligonucleotide
agcttgtgaccggtatcaatttacccgaat

SEQ ID NO: 277193 - DNA, 30 bp, Artificial Sequence
  Synthetic oligonucleotide
gtatcacatcgaaagcccttcccagcgaat

SEQ ID NO: 277194 - DNA, 30 bp, Artificial Sequence
  Synthetic oligonucleotide
gcgtcggcaagatatgggtatgtagcgaat

SEQ ID NO: 277195 - DNA, 30 bp, Artificial Sequence
  Synthetic oligonucleotide
ttactcgatggattgatgctactcgcgaat

SEQ ID NO: 277196 - DNA, 30 bp, Artificial Sequence
  Synthetic oligonucleotide
acatagtatatagctagttgtggggcgaat

SEQ ID NO: 277197 - DNA, 31 bp, Artificial Sequence
  Synthetic oligonucleotide
tagcgatcgagggccaatagagtcatcgaat

SEQ ID NO: 277198 - DNA, 30 bp, Artificial Sequence
  Synthetic oligonucleotide
ctttgggcaggttcaaacgaaagatcgaat

SEQ ID NO: 277199 - DNA, 30 bp, Artificial Sequence
  Synthetic oligonucleotide
agatgcaagctatgtaaatccagatcgaat

SEQ ID NO: 277200 - DNA, 30 bp, Artificial Sequence
  Synthetic oligonucleotide
ggaattttcactcggtttgctgtgtcgaat

SEQ ID NO: 277201 - DNA, 30 bp, Artificial Sequence
  Synthetic oligonucleotide
acctgtcattctgtccgtgtttgttcgaat

SEQ ID NO: 277202 - DNA, 30 bp, Artificial Sequence
  Synthetic oligonucleotide
gcggctcggtaggctgcaccccacaggaat

SEQ ID NO: 277203 - DNA, 30 bp, Artificial Sequence
  Synthetic oligonucleotide
atggggctgactcagcgtactagcaggaat

SEQ ID NO: 277204 - DNA, 30 bp, Artificial Sequence
  Synthetic oligonucleotide
agggctggttttgaacagcggcgcaggaat

SEQ ID NO: 277205 - DNA, 30 bp, Artificial Sequence
  Synthetic oligonucleotide
gcgagatacacatgttgtgatctcaggaat

SEQ ID NO: 277206 - DNA, 30 bp, Artificial Sequence
  Synthetic oligonucleotide
aatgtcaatggaaacacctttgtcaggaat

SEQ ID NO: 277207 - DNA, 30 bp, Artificial Sequence
  Synthetic oligonucleotide
gaaatgaaaggcagaacatcagagaggaat

SEQ ID NO: 277208 - DNA, 30 bp, Artificial Sequence
  Synthetic oligonucleotide
gctgttggcttgagcattttgttgaggaat

SEQ ID NO: 277209 - DNA, 30 bp, Artificial Sequence
  Synthetic oligonucleotide
acaagtcggtaaagccggaagtataggaat

SEQ ID NO: 277210 - DNA, 30 bp, Artificial Sequence
  Synthetic oligonucleotide
gaaaacccatcgcaatagtaaattaggaat

SEQ ID NO: 277211 - DNA, 30 bp, Artificial Sequence
  Synthetic oligonucleotide
tgaggtagcgcaattctgtgttttaggaat

SEQ ID NO: 277212 - DNA, 30 bp, Artificial Sequence
  Synthetic oligonucleotide
gaggcattacggtgacctctaaaacggaat

SEQ ID NO: 277213 - DNA, 30 bp, Artificial Sequence
  Synthetic oligonucleotide
atgcatggttgttaacaacgaccacggaat

SEQ ID NO: 277214 - DNA, 30 bp, Artificial Sequence
  Synthetic oligonucleotide
agaggacgacccggttattgataccggaat

SEQ ID NO: 277215 - DNA, 30 bp, Artificial Sequence
  Synthetic oligonucleotide
actcagggatcatatccccgtgcgcggaat

SEQ ID NO: 277216 - DNA, 30 bp, Artificial Sequence
  Synthetic oligonucleotide
cattgcggacaaaatgcgtggtggcggaat

SEQ ID NO: 277217 - DNA, 30 bp, Artificial Sequence
  Synthetic oligonucleotide
gcactgcatagacccgtttcgcatcggaat

SEQ ID NO: 277218 - DNA, 30 bp, Artificial Sequence
  Synthetic oligonucleotide
ggggtacttagtaacatctgcggtcggaat

SEQ ID NO: 277219 - DNA, 30 bp, Artificial Sequence
  Synthetic oligonucleotide
agattaggtacataattcggttaagggaat

SEQ ID NO: 277220 - DNA, 30 bp, Artificial Sequence
  Synthetic oligonucleotide
gtctggcaatttatcacgtagcgagggaat

SEQ ID NO: 277221 - DNA, 30 bp, Artificial Sequence
  Synthetic oligonucleotide
gtcacctaaggtgaatgatgcggagggaat

SEQ ID NO: 277222 - DNA, 30 bp, Artificial Sequence
  Synthetic oligonucleotide
agagtgctgctgttttcccgaatagggaat

SEQ ID NO: 277223 - DNA, 30 bp, Artificial Sequence
  Synthetic oligonucleotide
ttaaagagcagactcctgttaacggggaat

SEQ ID NO: 277224 - DNA, 30 bp, Artificial Sequence
  Synthetic oligonucleotide
gtttacatattgtcgagccagcatgggaat

SEQ ID NO: 277225 - DNA, 30 bp, Artificial Sequence
  Synthetic oligonucleotide
ccaaattttgtaacggactctgatgggaat

SEQ ID NO: 277226 - DNA, 30 bp, Artificial Sequence
  Synthetic oligonucleotide
gctcgaatcggatttgcctgaggtgggaat

SEQ ID NO: 277227 - DNA, 30 bp, Artificial Sequence
  Synthetic oligonucleotide
cgagcgattcctaattgcgaaattgggaat

SEQ ID NO: 277228 - DNA, 30 bp, Artificial Sequence
  Synthetic oligonucleotide
ttgtgccaactctcctcaagttaatggaat

SEQ ID NO: 277229 - DNA, 30 bp, Artificial Sequence
  Synthetic oligonucleotide
ataggatagaagtatgttataatctggaat

SEQ ID NO: 277230 - DNA, 30 bp, Artificial Sequence
  Synthetic oligonucleotide
cccgtaccgtcatgtgggtgtacgtggaat

SEQ ID NO: 277231 - DNA, 30 bp, Artificial Sequence
  Synthetic oligonucleotide
atcagtagtgcattctacagtgcaatgaat

SEQ ID NO: 277232 - DNA, 30 bp, Artificial Sequence
  Synthetic oligonucleotide
tgggccccctcaggaacgcactgaatgaat

SEQ ID NO: 277233 - DNA, 30 bp, Artificial Sequence
  Synthetic oligonucleotide
tctcagtttgcaagagtatttctaatgaat

SEQ ID NO: 277234 - DNA, 30 bp, Artificial Sequence
  Synthetic oligonucleotide
cgtcgtaatggaattcatagcaagatgaat

SEQ ID NO: 277235 - DNA, 30 bp, Artificial Sequence
  Synthetic oligonucleotide
catgctcccacggaacgggtcaatatgaat

SEQ ID NO: 277236 - DNA, 30 bp, Artificial Sequence
  Synthetic oligonucleotide
gatcagacgtccctggtcataagtatgaat

SEQ ID NO: 277237 - DNA, 30 bp, Artificial Sequence
  Synthetic oligonucleotide
ggacgccgcgccgcaatgatcaaactgaat

SEQ ID NO: 277238 - DNA, 30 bp, Artificial Sequence
  Synthetic oligonucleotide
ttgggcactcggttacaaaagaagctgaat

SEQ ID NO: 277239 - DNA, 30 bp, Artificial Sequence
  Synthetic oligonucleotide
cgcgtggaaaaggggtgggggcggctgaat

SEQ ID NO: 277240 - DNA, 30 bp, Artificial Sequence
  Synthetic oligonucleotide
ggttatgtggatcggaatgggaatctgaat

SEQ ID NO: 277241 - DNA, 30 bp, Artificial Sequence
  Synthetic oligonucleotide
ctctcccgataattccgaggtggagtgaat

SEQ ID NO: 277242 - DNA, 30 bp, Artificial Sequence
  Synthetic oligonucleotide
taaattaagccggccgtagaacacgtgaat

SEQ ID NO: 277243 - DNA, 30 bp, Artificial Sequence
  Synthetic oligonucleotide
gctataaacgggcttaggcactcggtgaat

SEQ ID NO: 277244 - DNA, 30 bp, Artificial Sequence
  Synthetic oligonucleotide
ccatggctccctgaaccgaacgtggtgaat

SEQ ID NO: 277245 - DNA, 30 bp, Artificial Sequence
  Synthetic oligonucleotide
taaccagattaacggaatcgacatgtgaat

SEQ ID NO: 277246 - DNA, 30 bp, Artificial Sequence
  Synthetic oligonucleotide
gggtttcaaagatagttctgcgttgtgaat

SEQ ID NO: 277247 - DNA, 30 bp, Artificial Sequence
  Synthetic oligonucleotide
tctgtataaggtcgaatgcccgcattgaat

SEQ ID NO: 277248 - DNA, 30 bp, Artificial Sequence
  Synthetic oligonucleotide
catgtaaatcatgagagctttctattgaat

SEQ ID NO: 277249 - DNA, 30 bp, Artificial Sequence
  Synthetic oligonucleotide
gcatctccggtaccacgtactcccttgaat

SEQ ID NO: 277250 - DNA, 30 bp, Artificial Sequence
  Synthetic oligonucleotide
gcaagataaacgtaactcactattttgaat

SEQ ID NO: 277251 - DNA, 30 bp, Artificial Sequence
  Synthetic oligonucleotide
gagttaagctgaagagagtggataaataat

SEQ ID NO: 277252 - DNA, 30 bp, Artificial Sequence
  Synthetic oligonucleotide
gaaacaatgtgaatagagcacgacaataat

SEQ ID NO: 277253 - DNA, 30 bp, Artificial Sequence
  Synthetic oligonucleotide
aaagggcctatttatgatacagagaataat

SEQ ID NO: 277254 - DNA, 30 bp, Artificial Sequence
  Synthetic oligonucleotide
cgcgatcagctgccgtagagggagaataat

SEQ ID NO: 277255 - DNA, 30 bp, Artificial Sequence
  Synthetic oligonucleotide
aaagcctaactaatgggtgggcggaataat

SEQ ID NO: 277256 - DNA, 30 bp, Artificial Sequence
  Synthetic oligonucleotide
tcgccatagcccacctattctgttaataat

SEQ ID NO: 277257 - DNA, 30 bp, Artificial Sequence
  Synthetic oligonucleotide
ctatgtaatgccataggatcaagacataat

SEQ ID NO: 277258 - DNA, 30 bp, Artificial Sequence
  Synthetic oligonucleotide
aacgtgcctccgttaattctatgacataat

SEQ ID NO: 277259 - DNA, 30 bp, Artificial Sequence
  Synthetic oligonucleotide
aactctggaacatagagacaaatacataat

SEQ ID NO: 277260 - DNA, 30 bp, Artificial Sequence
  Synthetic oligonucleotide
ctgatatctgtacgagtggtatcccataat

SEQ ID NO: 277261 - DNA, 30 bp, Artificial Sequence
  Synthetic oligonucleotide
cgttgtgtccgcccatcaatctggcataat

SEQ ID NO: 277262 - DNA, 30 bp, Artificial Sequence
  Synthetic oligonucleotide
tttagggttcgggtctaatggatgcataat

SEQ ID NO: 277263 - DNA, 30 bp, Artificial Sequence
  Synthetic oligonucleotide
aaataattgttgggacacttggtgcataat

SEQ ID NO: 277264 - DNA, 30 bp, Artificial Sequence
  Synthetic oligonucleotide
cacacgatacgcgcttgagctaccgataat

SEQ ID NO: 277265 - DNA, 30 bp, Artificial Sequence
  Synthetic oligonucleotide
gtgggaaaactttccacggtacgcgataat

SEQ ID NO: 277266 - DNA, 30 bp, Artificial Sequence
  Synthetic oligonucleotide
cggtagcctcggctaagtttcttcgataat

SEQ ID NO: 277267 - DNA, 30 bp, Artificial Sequence
  Synthetic oligonucleotide
actcgctaagatcataaaatagtggataat

SEQ ID NO: 277268 - DNA, 30 bp, Artificial Sequence
  Synthetic oligonucleotide
ttgcaatcgcacgatcatgagaatgataat

SEQ ID NO: 277269 - DNA, 30 bp, Artificial Sequence
  Synthetic oligonucleotide
accgcaatcgacctgatttgtaatgataat

SEQ ID NO: 277270 - DNA, 30 bp, Artificial Sequence
  Synthetic oligonucleotide
tcaaacctatcttgaaggacacgtgataat

SEQ ID NO: 277271 - DNA, 30 bp, Artificial Sequence
  Synthetic oligonucleotide
agggacctactgaacttcgggattgataat

SEQ ID NO: 277272 - DNA, 30 bp, Artificial Sequence
  Synthetic oligonucleotide
gggtaattgaaacttcgataatttgataat

SEQ ID NO: 277273 - DNA, 30 bp, Artificial Sequence
  Synthetic oligonucleotide
gacccagtgagatcagatcataaatataat

SEQ ID NO: 277274 - DNA, 30 bp, Artificial Sequence
  Synthetic oligonucleotide
agtcggattaaaacgctctatacatataat

SEQ ID NO: 277275 - DNA, 30 bp, Artificial Sequence
  Synthetic oligonucleotide
ctgtccagcatatcccaccacttatataat

SEQ ID NO: 277276 - DNA, 30 bp, Artificial Sequence
  Synthetic oligonucleotide
acccgcgttatatgataacctcactataat

SEQ ID NO: 277277 - DNA, 30 bp, Artificial Sequence
  Synthetic oligonucleotide
ttagttgagcggcgtacaactggctataat

SEQ ID NO: 277278 - DNA, 30 bp, Artificial Sequence
  Synthetic oligonucleotide
cctacaccgcacaaggcgcgccagtataat

SEQ ID NO: 277279 - DNA, 30 bp, Artificial Sequence
  Synthetic oligonucleotide
ataccaggacccacataagacacttataat

SEQ ID NO: 277280 - DNA, 30 bp, Artificial Sequence
  Synthetic oligonucleotide
ggacgatgcgacattttgtaattaactaat

SEQ ID NO: 277281 - DNA, 30 bp, Artificial Sequence
  Synthetic oligonucleotide
ggtctataggtcataggtttatcgactaat

SEQ ID NO: 277282 - DNA, 30 bp, Artificial Sequence
  Synthetic oligonucleotide
gtgactagactgtgaagttagaatactaat

SEQ ID NO: 277283 - DNA, 30 bp, Artificial Sequence
  Synthetic oligonucleotide
caaagacacagcctctatcactgccctaat

SEQ ID NO: 277284 - DNA, 30 bp, Artificial Sequence
  Synthetic oligonucleotide
atgttggtaagcccgctcatcaatcctaat

SEQ ID NO: 277285 - DNA, 30 bp, Artificial Sequence
  Synthetic oligonucleotide
tagcaggcacgctgagaggtgtatcctaat

SEQ ID NO: 277286 - DNA, 30 bp, Artificial Sequence
  Synthetic oligonucleotide
gaatgaattacgcatcacgtccctcctaat

SEQ ID NO: 277287 - DNA, 30 bp, Artificial Sequence
  Synthetic oligonucleotide
cacgtcttttagaaaaggttgattcctaat

SEQ ID NO: 277288 - DNA, 30 bp, Artificial Sequence
  Synthetic oligonucleotide
cgaacgtatgtcagtttaacatgagctaat

SEQ ID NO: 277289 - DNA, 30 bp, Artificial Sequence
  Synthetic oligonucleotide
ctctgagagaattatacccgtggtgctaat

SEQ ID NO: 277290 - DNA, 30 bp, Artificial Sequence
  Synthetic oligonucleotide
gtcaacattatgctgaattttaactctaat

SEQ ID NO: 277291 - DNA, 30 bp, Artificial Sequence
  Synthetic oligonucleotide
cgcgtctttgctagctaaggatactctaat

SEQ ID NO: 277292 - DNA, 30 bp, Artificial Sequence
  Synthetic oligonucleotide
gtaggtggataatggcaatgttgctctaat

SEQ ID NO: 277293 - DNA, 30 bp, Artificial Sequence
  Synthetic oligonucleotide
cggtcttgcaggttttatttaatgtctaat

SEQ ID NO: 277294 - DNA, 30 bp, Artificial Sequence
  Synthetic oligonucleotide
atggcgcggtaggccgggaccgtgtctaat

SEQ ID NO: 277295 - DNA, 30 bp, Artificial Sequence
  Synthetic oligonucleotide
agaggaggggaggaccaattaccttctaat

SEQ ID NO: 277296 - DNA, 30 bp, Artificial Sequence
  Synthetic oligonucleotide
tacgcagcgaacggggtctaggaaagtaat

SEQ ID NO: 277297 - DNA, 30 bp, Artificial Sequence
  Synthetic oligonucleotide
ttcgaccaattcttggggacgtaaagtaat

SEQ ID NO: 277298 - DNA, 30 bp, Artificial Sequence
  Synthetic oligonucleotide
tatcggtcacaataccgttcaggaagtaat

SEQ ID NO: 277299 - DNA, 30 bp, Artificial Sequence
  Synthetic oligonucleotide
tagtgagaaggtcttataagattaagtaat

SEQ ID NO: 277300 - DNA, 30 bp, Artificial Sequence
  Synthetic oligonucleotide
acggtcttgatctgaacattatccagtaat

SEQ ID NO: 277301 - DNA, 30 bp, Artificial Sequence
  Synthetic oligonucleotide
atgcgaattggtacacaaaccggcagtaat

SEQ ID NO: 277302 - DNA, 30 bp, Artificial Sequence
  Synthetic oligonucleotide
aatccaaaacatttgcttcgacagagtaat

SEQ ID NO: 277303 - DNA, 30 bp, Artificial Sequence
  Synthetic oligonucleotide
taggcgtgaaagtccgcacggcagagtaat

SEQ ID NO: 277304 - DNA, 30 bp, Artificial Sequence
  Synthetic oligonucleotide
cagtcgcgcacactgtgggtctagagtaat

SEQ ID NO: 277305 - DNA, 30 bp, Artificial Sequence
  Synthetic oligonucleotide
gatgcgctagggaaaatatcggtgagtaat

SEQ ID NO: 277306 - DNA, 31 bp, Artificial Sequence
  Synthetic oligonucleotide
ttgaaaacggtcccgtgcctcccatagtaat

SEQ ID NO: 277307 - DNA, 30 bp, Artificial Sequence
  Synthetic oligonucleotide
cccgaatgccagtaaacggagcgtagtaat

SEQ ID NO: 277308 - DNA, 30 bp, Artificial Sequence
  Synthetic oligonucleotide
ctggcgatgattagaacaaaagttagtaat

SEQ ID NO: 277309 - DNA, 30 bp, Artificial Sequence
  Synthetic oligonucleotide
gcattgcaactgcttagctggtgacgtaat

SEQ ID NO: 277310 - DNA, 30 bp, Artificial Sequence
  Synthetic oligonucleotide
atgagatcacaggacactggcgggcgtaat

SEQ ID NO: 277311 - DNA, 30 bp, Artificial Sequence
  Synthetic oligonucleotide
ggtcaagttttgtcgctcttcatgcgtaat

SEQ ID NO: 277312 - DNA, 30 bp, Artificial Sequence
  Synthetic oligonucleotide
attattcggtatagcaatagatgtcgtaat

SEQ ID NO: 277313 - DNA, 30 bp, Artificial Sequence
  Synthetic oligonucleotide
gacgtggtataacacgagtaaaaaggtaat

SEQ ID NO: 277314 - DNA, 30 bp, Artificial Sequence
  Synthetic oligonucleotide
tctaaaggacctctagaccacgcaggtaat

SEQ ID NO: 277315 - DNA, 30 bp, Artificial Sequence
  Synthetic oligonucleotide
gggtgtctgaattccataaaatcaggtaat

SEQ ID NO: 277316 - DNA, 30 bp, Artificial Sequence
  Synthetic oligonucleotide
ttgatcttatacagacaaaatggaggtaat

SEQ ID NO: 277317 - DNA, 30 bp, Artificial Sequence
  Synthetic oligonucleotide
tgaccatagttttatcgaatctgcggtaat

SEQ ID NO: 277318 - DNA, 30 bp, Artificial Sequence
  Synthetic oligonucleotide
tgtttcggttgtcctcaggccgagggtaat

SEQ ID NO: 277319 - DNA, 30 bp, Artificial Sequence
  Synthetic oligonucleotide
caacaccgcccattagaaagcgagggtaat

SEQ ID NO: 277320 - DNA, 30 bp, Artificial Sequence
  Synthetic oligonucleotide
catctcgattagaagtagggcacgggtaat

SEQ ID NO: 277321 - DNA, 30 bp, Artificial Sequence
  Synthetic oligonucleotide
gactgtgatccctataggacatcgggtaat

SEQ ID NO: 277322 - DNA, 30 bp, Artificial Sequence
  Synthetic oligonucleotide
attacgacaacggcgacagacgggggtaat

SEQ ID NO: 277323 - DNA, 30 bp, Artificial Sequence
  Synthetic oligonucleotide
agttagatgcgtttttagctgactggtaat

SEQ ID NO: 277324 - DNA, 30 bp, Artificial Sequence
  Synthetic oligonucleotide
atgtattgtataatgacatcccttggtaat

SEQ ID NO: 277325 - DNA, 30 bp, Artificial Sequence
  Synthetic oligonucleotide
gatctgtatggtaaaggaatcccctgtaat

SEQ ID NO: 277326 - DNA, 30 bp, Artificial Sequence
  Synthetic oligonucleotide
tgcaggtactggaactacgttatctgtaat

SEQ ID NO: 277327 - DNA, 30 bp, Artificial Sequence
  Synthetic oligonucleotide
tgaggggggctaagcagtttggcgtgtaat

SEQ ID NO: 277328 - DNA, 30 bp, Artificial Sequence
  Synthetic oligonucleotide
catccatagtttctcaggagcgggtgtaat

SEQ ID NO: 277329 - DNA, 30 bp, Artificial Sequence
  Synthetic oligonucleotide
acccccgcagttcaaacgatcaacattaat

SEQ ID NO: 277330 - DNA, 30 bp, Artificial Sequence
  Synthetic oligonucleotide
cggatgttcgcttgtagggtggagattaat

SEQ ID NO: 277331 - DNA, 30 bp, Artificial Sequence
  Synthetic oligonucleotide
cacgatgttatgggcaggattgagattaat

SEQ ID NO: 277332 - DNA, 30 bp, Artificial Sequence
  Synthetic oligonucleotide
gccatgaatgtaatggtgggggcgattaat

SEQ ID NO: 277333 - DNA, 30 bp, Artificial Sequence
  Synthetic oligonucleotide
gttagtgaggcaaccatactcatgattaat

SEQ ID NO: 277334 - DNA, 30 bp, Artificial Sequence
  Synthetic oligonucleotide
caacggaacgcggagagctaggtgattaat

SEQ ID NO: 277335 - DNA, 30 bp, Artificial Sequence
  Synthetic oligonucleotide
cgggcgcatagtggcactacgcttattaat

SEQ ID NO: 277336 - DNA, 30 bp, Artificial Sequence
  Synthetic oligonucleotide
agcagagtgcgtcctggacagtttattaat

SEQ ID NO: 277337 - DNA, 30 bp, Artificial Sequence
  Synthetic oligonucleotide
cgatagggacacccccccgcagcacttaat

SEQ ID NO: 277338 - DNA, 30 bp, Artificial Sequence
  Synthetic oligonucleotide
ttggaccggcaagagatgcatagacttaat

SEQ ID NO: 277339 - DNA, 30 bp, Artificial Sequence
  Synthetic oligonucleotide
cgcaatcgggtcttagtaccacgacttaat

SEQ ID NO: 277340 - DNA, 30 bp, Artificial Sequence
  Synthetic oligonucleotide
gtgtcatatgaacggtataactcgcttaat

SEQ ID NO: 277341 - DNA, 30 bp, Artificial Sequence
  Synthetic oligonucleotide
ctccttgaaggaccttcatgagctcttaat

SEQ ID NO: 277342 - DNA, 30 bp, Artificial Sequence
  Synthetic oligonucleotide
tgtggcccagctgatctatcaattcttaat

SEQ ID NO: 277343 - DNA, 30 bp, Artificial Sequence
  Synthetic oligonucleotide
cacaacgtaaatccccgcatgtcagttaat

SEQ ID NO: 277344 - DNA, 30 bp, Artificial Sequence
  Synthetic oligonucleotide
tcgaccgagtttttcagcgtattagttaat

SEQ ID NO: 277345 - DNA, 30 bp, Artificial Sequence
  Synthetic oligonucleotide
cctgatgcttaaatagtcaggtacgttaat

SEQ ID NO: 277346 - DNA, 30 bp, Artificial Sequence
  Synthetic oligonucleotide
tgatcccatttgatgagtccgggggttaat

SEQ ID NO: 277347 - DNA, 30 bp, Artificial Sequence
  Synthetic oligonucleotide
tttagttaatatgggcaaaggggggttaat

SEQ ID NO: 277348 - DNA, 30 bp, Artificial Sequence
  Synthetic oligonucleotide
cgtaattccgtttgagtatggggggttaat

SEQ ID NO: 277349 - DNA, 31 bp, Artificial Sequence
  Synthetic oligonucleotide
agtagggcaagagccaaagcaaagctttaat

SEQ ID NO: 277350 - DNA, 30 bp, Artificial Sequence
  Synthetic oligonucleotide
cagactcgagtcctctgacttatctttaat

SEQ ID NO: 277351 - DNA, 30 bp, Artificial Sequence
  Synthetic oligonucleotide
acgtagggtcaggaggggacatggtttaat

SEQ ID NO: 277352 - DNA, 30 bp, Artificial Sequence
  Synthetic oligonucleotide
cgacgacccccacactcaggagtgtttaat

SEQ ID NO: 277353 - DNA, 30 bp, Artificial Sequence
  Synthetic oligonucleotide
ccacgcactcgatcgagttcttattttaat

SEQ ID NO: 277354 - DNA, 30 bp, Artificial Sequence
  Synthetic oligonucleotide
cctgtcctctaattggctatgctaaaacat

SEQ ID NO: 277355 - DNA, 30 bp, Artificial Sequence
  Synthetic oligonucleotide
ttaactgtgcggcccgcagagcgcaaacat

SEQ ID NO: 277356 - DNA, 30 bp, Artificial Sequence
  Synthetic oligonucleotide
gaaggcttcgatggaaatgccgcgaaacat

SEQ ID NO: 277357 - DNA, 30 bp, Artificial Sequence
  Synthetic oligonucleotide
aggcttaccacaaaatgacctctgaaacat

SEQ ID NO: 277358 - DNA, 30 bp, Artificial Sequence
  Synthetic oligonucleotide
caggttgtcacatgttcgttggtgaaacat

SEQ ID NO: 277359 - DNA, 30 bp, Artificial Sequence
  Synthetic oligonucleotide
gcaggaaagcatgcttttgtttgtaaacat

SEQ ID NO: 277360 - DNA, 30 bp, Artificial Sequence
  Synthetic oligonucleotide
gtaggctgcagcaagggcagtgaacaacat

SEQ ID NO: 277361 - DNA, 30 bp, Artificial Sequence
  Synthetic oligonucleotide
ttgatggactgccacgacctagagcaacat

SEQ ID NO: 277362 - DNA, 30 bp, Artificial Sequence
  Synthetic oligonucleotide
gtgttcaaattgcgactagaaaggcaacat

SEQ ID NO: 277363 - DNA, 30 bp, Artificial Sequence
  Synthetic oligonucleotide
cgcaagacatagccaggagctgggcaacat

SEQ ID NO: 277364 - DNA, 30 bp, Artificial Sequence
  Synthetic oligonucleotide
tgtgatcgttaaggggagcacttagaacat

SEQ ID NO: 277365 - DNA, 30 bp, Artificial Sequence
  Synthetic oligonucleotide
agagactttcatgtcatgactggcgaacat

SEQ ID NO: 277366 - DNA, 30 bp, Artificial Sequence
  Synthetic oligonucleotide
aacgccgggttgagacgggactaggaacat

SEQ ID NO: 277367 - DNA, 30 bp, Artificial Sequence
  Synthetic oligonucleotide
gcggcctattcataggcaagaccggaacat

SEQ ID NO: 277368 - DNA, 30 bp, Artificial Sequence
  Synthetic oligonucleotide
ggctaaagttttgtggacaaatcggaacat

SEQ ID NO: 277369 - DNA, 30 bp, Artificial Sequence
  Synthetic oligonucleotide
acaatggggtgtttacagagcttggaacat

SEQ ID NO: 277370 - DNA, 30 bp, Artificial Sequence
  Synthetic oligonucleotide
aaaagcctagaagggcattgtcatgaacat

SEQ ID NO: 277371 - DNA, 30 bp, Artificial Sequence
  Synthetic oligonucleotide
gatcgagatgagacgctgcctcgataacat

SEQ ID NO: 277372 - DNA, 30 bp, Artificial Sequence
  Synthetic oligonucleotide
ggacctgccacttatctgcatatataacat

SEQ ID NO: 277373 - DNA, 30 bp, Artificial Sequence
  Synthetic oligonucleotide
ctagcaaagtatcctacccatcactaacat

SEQ ID NO: 277374 - DNA, 30 bp, Artificial Sequence
  Synthetic oligonucleotide
tctctgacgagtatccattcaatctaacat

SEQ ID NO: 277375 - DNA, 30 bp, Artificial Sequence
  Synthetic oligonucleotide
gtcgagtgcggggttaccgtcgtgtaacat

SEQ ID NO: 277376 - DNA, 30 bp, Artificial Sequence
  Synthetic oligonucleotide
ctgaactgcaccgcgtagaggtattaacat

SEQ ID NO: 277377 - DNA, 30 bp, Artificial Sequence
  Synthetic oligonucleotide
agaccatgtctcggacggaaaggttaacat

SEQ ID NO: 277378 - DNA, 30 bp, Artificial Sequence
  Synthetic oligonucleotide
ccttgcagcataggctcaaaggagacacat

SEQ ID NO: 277379 - DNA, 30 bp, Artificial Sequence
  Synthetic oligonucleotide
actggatatggtcccaaaactgatacacat

SEQ ID NO: 277380 - DNA, 30 bp, Artificial Sequence
  Synthetic oligonucleotide
ggattaagtcctgatgaccgcaacccacat

SEQ ID NO: 277381 - DNA, 30 bp, Artificial Sequence
  Synthetic oligonucleotide
aaatgggtacttagagacctagacccacat

SEQ ID NO: 277382 - DNA, 30 bp, Artificial Sequence
  Synthetic oligonucleotide
tgaagcaggatcactatcgctgaagcacat

SEQ ID NO: 277383 - DNA, 30 bp, Artificial Sequence
  Synthetic oligonucleotide
ggttacgggggagataccttcccagcacat

SEQ ID NO: 277384 - DNA, 30 bp, Artificial Sequence
  Synthetic oligonucleotide
ctgcagggtattgtaccgagatccgcacat

SEQ ID NO: 277385 - DNA, 30 bp, Artificial Sequence
  Synthetic oligonucleotide
aatgataattcgggaaggtcataggcacat

SEQ ID NO: 277386 - DNA, 30 bp, Artificial Sequence
  Synthetic oligonucleotide
gtgggtaacacgattccccttctggcacat

SEQ ID NO: 277387 - DNA, 30 bp, Artificial Sequence
  Synthetic oligonucleotide
gcgtaaatctatcaaaaagacgactcacat

SEQ ID NO: 277388 - DNA, 30 bp, Artificial Sequence
  Synthetic oligonucleotide
cctcgctttttgctcactatagattcacat

SEQ ID NO: 277389 - DNA, 30 bp, Artificial Sequence
  Synthetic oligonucleotide
tactgcgtatcatttaacgaagcttcacat

SEQ ID NO: 277390 - DNA, 30 bp, Artificial Sequence
  Synthetic oligonucleotide
cactaacgggtgcgtcacgcgcgcagacat

SEQ ID NO: 277391 - DNA, 30 bp, Artificial Sequence
  Synthetic oligonucleotide
atgaaggtgacacagactccgtgcagacat

SEQ ID NO: 277392 - DNA, 30 bp, Artificial Sequence
  Synthetic oligonucleotide
aatatagcgagctaaacacttctcagacat

SEQ ID NO: 277393 - DNA, 30 bp, Artificial Sequence
  Synthetic oligonucleotide
agctaatatagggcgggattatctagacat

SEQ ID NO: 277394 - DNA, 30 bp, Artificial Sequence
  Synthetic oligonucleotide
cccgattctcatggcaggaacagacgacat

SEQ ID NO: 277395 - DNA, 30 bp, Artificial Sequence
  Synthetic oligonucleotide
tagacattatgattagtagttttacgacat

SEQ ID NO: 277396 - DNA, 30 bp, Artificial Sequence
  Synthetic oligonucleotide
attcgtcaactgcctgaaagcccccgacat

SEQ ID NO: 277397 - DNA, 30 bp, Artificial Sequence
  Synthetic oligonucleotide
ggggcgcgttaatgacctaaggagcgacat

SEQ ID NO: 277398 - DNA, 30 bp, Artificial Sequence
  Synthetic oligonucleotide
gggttaatttttggctcctacacgcgacat

SEQ ID NO: 277399 - DNA, 30 bp, Artificial Sequence
  Synthetic oligonucleotide
taggttgtgaacgcataacctacgcgacat

SEQ ID NO: 277400 - DNA, 30 bp, Artificial Sequence
  Synthetic oligonucleotide
actctgacatactaaagaaaggtgcgacat

SEQ ID NO: 277401 - DNA, 30 bp, Artificial Sequence
  Synthetic oligonucleotide
ggcagtagtattgtaggggggtatcgacat

SEQ ID NO: 277402 - DNA, 30 bp, Artificial Sequence
  Synthetic oligonucleotide
ttcgatgttacgagatgttcagttcgacat

SEQ ID NO: 277403 - DNA, 30 bp, Artificial Sequence
  Synthetic oligonucleotide
gccgcctcaaggcactcaataaaaggacat

SEQ ID NO: 277404 - DNA, 30 bp, Artificial Sequence
  Synthetic oligonucleotide
taacgttaaaggtagtcgacatcaggacat

SEQ ID NO: 277405 - DNA, 30 bp, Artificial Sequence
  Synthetic oligonucleotide
accccctggtaggcgtacagatcgggacat

SEQ ID NO: 277406 - DNA, 30 bp, Artificial Sequence
  Synthetic oligonucleotide
tttttgtgttatcgaaaagtaggtggacat

SEQ ID NO: 277407 - DNA, 30 bp, Artificial Sequence
  Synthetic oligonucleotide
ggcgttttgctgaaaatcgtaggtggacat

SEQ ID NO: 277408 - DNA, 30 bp, Artificial Sequence
  Synthetic oligonucleotide
cgtatagtctggactcagattagatgacat

SEQ ID NO: 277409 - DNA, 30 bp, Artificial Sequence
  Synthetic oligonucleotide
agatgtcagaagtggacacgattttgacat

SEQ ID NO: 277410 - DNA, 30 bp, Artificial Sequence
  Synthetic oligonucleotide
ttgacaagaatgaagcaatcgcaaatacat

SEQ ID NO: 277411 - DNA, 30 bp, Artificial Sequence
  Synthetic oligonucleotide
cgatgtacagctgcatggtgccgaatacat

SEQ ID NO: 277412 - DNA, 30 bp, Artificial Sequence
  Synthetic oligonucleotide
aaaaaaacatcttaaacggactccatacat

SEQ ID NO: 277413 - DNA, 30 bp, Artificial Sequence
  Synthetic oligonucleotide
actttaaattccatttcacacaagatacat

SEQ ID NO: 277414 - DNA, 30 bp, Artificial Sequence
  Synthetic oligonucleotide
tagcgtggatgtgtcattaaggagatacat

SEQ ID NO: 277415 - DNA, 30 bp, Artificial Sequence
  Synthetic oligonucleotide
gcgtgtggatcgttacgaagccctatacat

SEQ ID NO: 277416 - DNA, 30 bp, Artificial Sequence
  Synthetic oligonucleotide
ctcagataacgatgtgcgttcctgctacat

SEQ ID NO: 277417 - DNA, 30 bp, Artificial Sequence
  Synthetic oligonucleotide
agtattagcagctggtagcttctagtacat

SEQ ID NO: 277418 - DNA, 30 bp, Artificial Sequence
  Synthetic oligonucleotide
gggaaccctacactattttcgatcgtacat

SEQ ID NO: 277419 - DNA, 30 bp, Artificial Sequence
  Synthetic oligonucleotide
ctccaaaagaatgaaggaagtttcgtacat

SEQ ID NO: 277420 - DNA, 30 bp, Artificial Sequence
  Synthetic oligonucleotide
gggtaaaatgaaccggagggtaaggtacat

SEQ ID NO: 277421 - DNA, 30 bp, Artificial Sequence
  Synthetic oligonucleotide
gagccccgacatttaaagcggtaggtacat

SEQ ID NO: 277422 - DNA, 30 bp, Artificial Sequence
  Synthetic oligonucleotide
gccgttttattgagggggggggatgtacat

SEQ ID NO: 277423 - DNA, 30 bp, Artificial Sequence
  Synthetic oligonucleotide
tctagcgtcaaaacgataatttctgtacat

SEQ ID NO: 277424 - DNA, 30 bp, Artificial Sequence
  Synthetic oligonucleotide
gtaactaatgagtcgggcgcccgtgtacat

SEQ ID NO: 277425 - DNA, 30 bp, Artificial Sequence
  Synthetic oligonucleotide
ggaggcattccaatcgtagacctattacat

SEQ ID NO: 277426 - DNA, 30 bp, Artificial Sequence
  Synthetic oligonucleotide
taccggtaatatagagtgtgctccttacat

SEQ ID NO: 277427 - DNA, 30 bp, Artificial Sequence
  Synthetic oligonucleotide
tgcgcgttccttaccgatgggggcttacat

SEQ ID NO: 277428 - DNA, 30 bp, Artificial Sequence
  Synthetic oligonucleotide
accagacgcggggcatcaacgctcttacat

SEQ ID NO: 277429 - DNA, 30 bp, Artificial Sequence
  Synthetic oligonucleotide
aactgacttaaagaggaatattagttacat

SEQ ID NO: 277430 - DNA, 30 bp, Artificial Sequence
  Synthetic oligonucleotide
gatcacatagttttggtaatatggttacat

SEQ ID NO: 277431 - DNA, 30 bp, Artificial Sequence
  Synthetic oligonucleotide
cggttatcatgagtgcggcacggtttacat

SEQ ID NO: 277432 - DNA, 30 bp, Artificial Sequence
  Synthetic oligonucleotide
tagccactgaggattgtcggcattttacat

SEQ ID NO: 277433 - DNA, 30 bp, Artificial Sequence
  Synthetic oligonucleotide
caacctattctcactttacccaaaaaccat

SEQ ID NO: 277434 - DNA, 30 bp, Artificial Sequence
  Synthetic oligonucleotide
gctgacaggtagacgcgtgtgcaaaaccat

SEQ ID NO: 277435 - DNA, 30 bp, Artificial Sequence
  Synthetic oligonucleotide
agtatccagagataactgtgattaaaccat

SEQ ID NO: 277436 - DNA, 30 bp, Artificial Sequence
  Synthetic oligonucleotide
gacagtgccagcggttggcgagtgaaccat

SEQ ID NO: 277437 - DNA, 30 bp, Artificial Sequence
  Synthetic oligonucleotide
gaacttaattgttgtgatatccgtaaccat

SEQ ID NO: 277438 - DNA, 30 bp, Artificial Sequence
  Synthetic oligonucleotide
agcattcctactaaaactctcggtaaccat

SEQ ID NO: 277439 - DNA, 30 bp, Artificial Sequence
  Synthetic oligonucleotide
cgatagatagggacgtaggtctgacaccat

SEQ ID NO: 277440 - DNA, 30 bp, Artificial Sequence
  Synthetic oligonucleotide
acagccagcgaatagtctattagccaccat

SEQ ID NO: 277441 - DNA, 30 bp, Artificial Sequence
  Synthetic oligonucleotide
tcctcagtctatcgctgatctaagcaccat

SEQ ID NO: 277442 - DNA, 30 bp, Artificial Sequence
  Synthetic oligonucleotide
taagtggccgagataataccgccgcaccat

SEQ ID NO: 277443 - DNA, 30 bp, Artificial Sequence
  Synthetic oligonucleotide
ggtttatagtctcaacgtacatatcaccat

SEQ ID NO: 277444 - DNA, 30 bp, Artificial Sequence
  Synthetic oligonucleotide
ggattggcttaacctggtaagtttcaccat

SEQ ID NO: 277445 - DNA, 30 bp, Artificial Sequence
  Synthetic oligonucleotide
gaggagctgatcaaggagatgtttcaccat

SEQ ID NO: 277446 - DNA, 30 bp, Artificial Sequence
  Synthetic oligonucleotide
ctctaaggctcacacgtgcaagcagaccat

SEQ ID NO: 277447 - DNA, 30 bp, Artificial Sequence
  Synthetic oligonucleotide
tttatggaaacgcaaccgaaggtagaccat

SEQ ID NO: 277448 - DNA, 30 bp, Artificial Sequence
  Synthetic oligonucleotide
ttgcatggtataagggagttcaacgaccat

SEQ ID NO: 277449 - DNA, 30 bp, Artificial Sequence
  Synthetic oligonucleotide
ggttatagaaattccacttgtgccgaccat

SEQ ID NO: 277450 - DNA, 30 bp, Artificial Sequence
  Synthetic oligonucleotide
tgcactaaataaatgtttagcgattaccat

SEQ ID NO: 277451 - DNA, 30 bp, Artificial Sequence
  Synthetic oligonucleotide
tagcgcaaattgtgacaatcatgttaccat

SEQ ID NO: 277452 - DNA, 30 bp, Artificial Sequence
  Synthetic oligonucleotide
acaaaaaagtaggggagtggcgtttaccat

SEQ ID NO: 277453 - DNA, 30 bp, Artificial Sequence
  Synthetic oligonucleotide
ctgcatcaactagccattggcaaaacccat

SEQ ID NO: 277454 - DNA, 28 bp, Artificial Sequence
  Synthetic oligonucleotide
ccacaggttgtttaagagattaacccat

SEQ ID NO: 277455 - DNA, 30 bp, Artificial Sequence
  Synthetic oligonucleotide
ttatcgtgcgttctcacatatgctacccat

SEQ ID NO: 277456 - DNA, 30 bp, Artificial Sequence
  Synthetic oligonucleotide
agaggtttcctcgggtcctcgcgtacccat

SEQ ID NO: 277457 - DNA, 30 bp, Artificial Sequence
  Synthetic oligonucleotide
atgctacacttggtaggtagaacaccccat

SEQ ID NO: 277458 - DNA, 30 bp, Artificial Sequence
  Synthetic oligonucleotide
ggcatcaaccttattaaagaattaccccat

SEQ ID NO: 277459 - DNA, 30 bp, Artificial Sequence
  Synthetic oligonucleotide
caatctaggcgaacgtggagaagtccccat

SEQ ID NO: 277460 - DNA, 30 bp, Artificial Sequence
  Synthetic oligonucleotide
ctgcttgttcaagcacaaatttaggcccat

SEQ ID NO: 277461 - DNA, 30 bp, Artificial Sequence
  Synthetic oligonucleotide
acgtaacgagttatcaacctgttggcccat

SEQ ID NO: 277462 - DNA, 30 bp, Artificial Sequence
  Synthetic oligonucleotide
tggaaaatcagtattctcattgtctcccat

SEQ ID NO: 277463 - DNA, 30 bp, Artificial Sequence
  Synthetic oligonucleotide
gcccttatctattaggtaccgaggtcccat

SEQ ID NO: 277464 - DNA, 30 bp, Artificial Sequence
  Synthetic oligonucleotide
tccttagagttaacatcgtcgatgtcccat

SEQ ID NO: 277465 - DNA, 30 bp, Artificial Sequence
  Synthetic oligonucleotide
gcgtgagtacaccggctctccttgtcccat

SEQ ID NO: 277466 - DNA, 30 bp, Artificial Sequence
  Synthetic oligonucleotide
agtttagcttgttgtccgtttcaaagccat

SEQ ID NO: 277467 - DNA, 30 bp, Artificial Sequence
  Synthetic oligonucleotide
aacagggacagttgcacggaatcaagccat

SEQ ID NO: 277468 - DNA, 30 bp, Artificial Sequence
  Synthetic oligonucleotide
gccaaaaaaagtttgacgagagtaagccat

SEQ ID NO: 277469 - DNA, 30 bp, Artificial Sequence
  Synthetic oligonucleotide
ccgggcgaatagtcgttgtcggtcagccat

SEQ ID NO: 277470 - DNA, 30 bp, Artificial Sequence
  Synthetic oligonucleotide
ggagcccattttcaacccgtaataggccat

SEQ ID NO: 277471 - DNA, 30 bp, Artificial Sequence
  Synthetic oligonucleotide
gattcggtccgcccagtcagttacggccat

SEQ ID NO: 277472 - DNA, 30 bp, Artificial Sequence
  Synthetic oligonucleotide
tacagtaaagggtcctgctctgtgggccat

SEQ ID NO: 277473 - DNA, 30 bp, Artificial Sequence
  Synthetic oligonucleotide
ctgtagcacgttcttgtcgtacaatgccat

SEQ ID NO: 277474 - DNA, 30 bp, Artificial Sequence
  Synthetic oligonucleotide
ggccaaaatggccacggcagtgcatgccat

SEQ ID NO: 277475 - DNA, 30 bp, Artificial Sequence
  Synthetic oligonucleotide
gtaccaggcgtggtatcgctggcctgccat

SEQ ID NO: 277476 - DNA, 30 bp, Artificial Sequence
  Synthetic oligonucleotide
ccgcgggtatctcagagagggaagtgccat

SEQ ID NO: 277477 - DNA, 30 bp, Artificial Sequence
  Synthetic oligonucleotide
gtgcatccgttcttgtgagtagattgccat

SEQ ID NO: 277478 - DNA, 30 bp, Artificial Sequence
  Synthetic oligonucleotide
cattgcctccgatcataggggtattgccat

SEQ ID NO: 277479 - DNA, 30 bp, Artificial Sequence
  Synthetic oligonucleotide
cacaaggataacgtcggaatgagaatccat

SEQ ID NO: 277480 - DNA, 29 bp, Artificial Sequence
  Synthetic oligonucleotide
aagggggtgcccatggtggatgaatccat

SEQ ID NO: 277481 - DNA, 30 bp, Artificial Sequence
  Synthetic oligonucleotide
cataaatggtatccagcctgttacatccat

SEQ ID NO: 277482 - DNA, 30 bp, Artificial Sequence
  Synthetic oligonucleotide
gctcgggaaagataggtcgttgatatccat

SEQ ID NO: 277483 - DNA, 30 bp, Artificial Sequence
  Synthetic oligonucleotide
cagtgcggaccgaggtataagtttatccat

SEQ ID NO: 277484 - DNA, 30 bp, Artificial Sequence
  Synthetic oligonucleotide
gaaggctcgggacaagtcagccgactccat

SEQ ID NO: 277485 - DNA, 30 bp, Artificial Sequence
  Synthetic oligonucleotide
cacgtgtacttgaaccaagacgcgctccat

SEQ ID NO: 277486 - DNA, 30 bp, Artificial Sequence
  Synthetic oligonucleotide
gtcagccgatccaggtggaccagcgtccat

SEQ ID NO: 277487 - DNA, 30 bp, Artificial Sequence
  Synthetic oligonucleotide
tagaccgtccacatgttcggagtcgtccat

SEQ ID NO: 277488 - DNA, 30 bp, Artificial Sequence
  Synthetic oligonucleotide
acgaccatgttacgtgtgtcacgcttccat

SEQ ID NO: 277489 - DNA, 30 bp, Artificial Sequence
  Synthetic oligonucleotide
ctaagtggggaattttacacgcagttccat

SEQ ID NO: 277490 - DNA, 30 bp, Artificial Sequence
  Synthetic oligonucleotide
ttgcgtgtcatgatagaaaggcaaaagcat

SEQ ID NO: 277491 - DNA, 30 bp, Artificial Sequence
  Synthetic oligonucleotide
gaaagtactggatgacctgcgtaaaagcat

SEQ ID NO: 277492 - DNA, 30 bp, Artificial Sequence
  Synthetic oligonucleotide
aacgaagagggctgtactttttaaaagcat

SEQ ID NO: 277493 - DNA, 30 bp, Artificial Sequence
  Synthetic oligonucleotide
ccagtaatgatcttaacgcactgaaagcat

SEQ ID NO: 277494 - DNA, 30 bp, Artificial Sequence
  Synthetic oligonucleotide
gcggaaagtcttttggggcaaggcaagcat

SEQ ID NO: 277495 - DNA, 30 bp, Artificial Sequence
  Synthetic oligonucleotide
ggaagttccgaaatagccgacggcaagcat

SEQ ID NO: 277496 - DNA, 30 bp, Artificial Sequence
  Synthetic oligonucleotide
ggagaacctcagtccttccgggtcaagcat

SEQ ID NO: 277497 - DNA, 30 bp, Artificial Sequence
  Synthetic oligonucleotide
gtgaggggcctggatcgtaccccgaagcat

SEQ ID NO: 277498 - DNA, 30 bp, Artificial Sequence
  Synthetic oligonucleotide
ttcagagcagctatagaagaactgaagcat

SEQ ID NO: 277499 - DNA, 30 bp, Artificial Sequence
  Synthetic oligonucleotide
acagtacatgttaagggccctgaccagcat

SEQ ID NO: 277500 - DNA, 30 bp, Artificial Sequence
  Synthetic oligonucleotide
aaacgccgggatggcaaaccataccagcat

SEQ ID NO: 277501 - DNA, 30 bp, Artificial Sequence
  Synthetic oligonucleotide
ggggcgggcatatgatgcccactccagcat

SEQ ID NO: 277502 - DNA, 30 bp, Artificial Sequence
  Synthetic oligonucleotide
gggagttgtacctaggataattggcagcat

SEQ ID NO: 277503 - DNA, 30 bp, Artificial Sequence
  Synthetic oligonucleotide
gcgttccagcccatcctaatgttgcagcat

SEQ ID NO: 277504 - DNA, 30 bp, Artificial Sequence
  Synthetic oligonucleotide
ttagccgcatgttagacccaatgtcagcat

SEQ ID NO: 277505 - DNA, 30 bp, Artificial Sequence
  Synthetic oligonucleotide
gacctttaagggagcgtggaggttcagcat

SEQ ID NO: 277506 - DNA, 30 bp, Artificial Sequence
  Synthetic oligonucleotide
tttgagcgcgttgtgagaatcatagagcat

SEQ ID NO: 277507 - DNA, 30 bp, Artificial Sequence
  Synthetic oligonucleotide
atatacgatttgtggtaacgtcttgagcat

SEQ ID NO: 277508 - DNA, 30 bp, Artificial Sequence
  Synthetic oligonucleotide
gcgagtgcgacgagattatgtttatagcat

SEQ ID NO: 277509 - DNA, 30 bp, Artificial Sequence
  Synthetic oligonucleotide
gcgatagtacccagtctaaggaggtagcat

SEQ ID NO: 277510 - DNA, 30 bp, Artificial Sequence
  Synthetic oligonucleotide
ggcgacgtaggtgccttgactgattagcat

SEQ ID NO: 277511 - DNA, 30 bp, Artificial Sequence
  Synthetic oligonucleotide
atacagtgactggtcacatccgcttagcat

SEQ ID NO: 277512 - DNA, 30 bp, Artificial Sequence
  Synthetic oligonucleotide
gtattccgtttccttcgcgcgagttagcat

SEQ ID NO: 277513 - DNA, 30 bp, Artificial Sequence
  Synthetic oligonucleotide
tccctactttcagaaatctctttttagcat

SEQ ID NO: 277514 - DNA, 30 bp, Artificial Sequence
  Synthetic oligonucleotide
ttcagtattgatctactcaacgtaacgcat

SEQ ID NO: 277515 - DNA, 30 bp, Artificial Sequence
  Synthetic oligonucleotide
ttgtgggttaggaccgcggtgttaacgcat

SEQ ID NO: 277516 - DNA, 30 bp, Artificial Sequence
  Synthetic oligonucleotide
ctatgtccggaggcagggttacaaccgcat

SEQ ID NO: 277517 - DNA, 30 bp, Artificial Sequence
  Synthetic oligonucleotide
actctctggctagcccacagtaacccgcat

SEQ ID NO: 277518 - DNA, 30 bp, Artificial Sequence
  Synthetic oligonucleotide
ctacaaactactattctgggtatcccgcat

SEQ ID NO: 277519 - DNA, 30 bp, Artificial Sequence
  Synthetic oligonucleotide
gcagatcgccgacggtatttctagccgcat

SEQ ID NO: 277520 - DNA, 30 bp, Artificial Sequence
  Synthetic oligonucleotide
atgtggattgggcgaatgatgaggccgcat

SEQ ID NO: 277521 - DNA, 30 bp, Artificial Sequence
  Synthetic oligonucleotide
ggatagattaatttgctcgtccggccgcat

SEQ ID NO: 277522 - DNA, 30 bp, Artificial Sequence
  Synthetic oligonucleotide
ccagggtaatggagtgtcccatatccgcat

SEQ ID NO: 277523 - DNA, 30 bp, Artificial Sequence
  Synthetic oligonucleotide
tgttgattctgtagatggagtgtagcgcat

SEQ ID NO: 277524 - DNA, 30 bp, Artificial Sequence
  Synthetic oligonucleotide
tcgcggtaggagacgtgccctgacgcgcat

SEQ ID NO: 277525 - DNA, 30 bp, Artificial Sequence
  Synthetic oligonucleotide
aagcgctcgtacacatccattttcgcgcat

SEQ ID NO: 277526 - DNA, 30 bp, Artificial Sequence
  Synthetic oligonucleotide
cattgcatcaatacttcagtaagggcgcat

SEQ ID NO: 277527 - DNA, 30 bp, Artificial Sequence
  Synthetic oligonucleotide
gccacacgtcttgccggatgttagtcgcat

SEQ ID NO: 277528 - DNA, 30 bp, Artificial Sequence
  Synthetic oligonucleotide
gataatctgggtaaacaaccactaaggcat

SEQ ID NO: 277529 - DNA, 30 bp, Artificial Sequence
  Synthetic oligonucleotide
agataattcgatgagcccgtgctaaggcat

SEQ ID NO: 277530 - DNA, 30 bp, Artificial Sequence
  Synthetic oligonucleotide
caaacttcacgaccgacatgtaacaggcat

SEQ ID NO: 277531 - DNA, 30 bp, Artificial Sequence
  Synthetic oligonucleotide
catgtgacaagtagctcgcattataggcat

SEQ ID NO: 277532 - DNA, 30 bp, Artificial Sequence
  Synthetic oligonucleotide
aacacccaggacggcgagggttttaggcat

SEQ ID NO: 277533 - DNA, 30 bp, Artificial Sequence
  Synthetic oligonucleotide
tgtggaccctcaaatagtcataaacggcat

SEQ ID NO: 277534 - DNA, 30 bp, Artificial Sequence
  Synthetic oligonucleotide
agagcgtaaactacgtgccagaaccggcat

SEQ ID NO: 277535 - DNA, 30 bp, Artificial Sequence
  Synthetic oligonucleotide
ccaatgcagatcaccgcagtaaagcggcat

SEQ ID NO: 277536 - DNA, 30 bp, Artificial Sequence
  Synthetic oligonucleotide
agtgcaatacgcattgtttgagggcggcat

SEQ ID NO: 277537 - DNA, 30 bp, Artificial Sequence
  Synthetic oligonucleotide
tctcgctcttaacctcatggcccagggcat

SEQ ID NO: 277538 - DNA, 30 bp, Artificial Sequence
  Synthetic oligonucleotide
cgtagtgaaggaatactaagccacgggcat

SEQ ID NO: 277539 - DNA, 30 bp, Artificial Sequence
  Synthetic oligonucleotide
aacgtgacgggttaccttgttgaggggcat

SEQ ID NO: 277540 - DNA, 30 bp, Artificial Sequence
  Synthetic oligonucleotide
aagaccatgcgcgcaaagttttaggggcat

SEQ ID NO: 277541 - DNA, 30 bp, Artificial Sequence
  Synthetic oligonucleotide
catagaattcatgagtctgcgtgggggcat

SEQ ID NO: 277542 - DNA, 30 bp, Artificial Sequence
  Synthetic oligonucleotide
tcggacgtccgtcttatgggaatggggcat

SEQ ID NO: 277543 - DNA, 30 bp, Artificial Sequence
  Synthetic oligonucleotide
tggcttagatatagggatccgagatggcat

SEQ ID NO: 277544 - DNA, 30 bp, Artificial Sequence
  Synthetic oligonucleotide
aaatacagctccttcttacgagcgtggcat

SEQ ID NO: 277545 - DNA, 30 bp, Artificial Sequence
  Synthetic oligonucleotide
agcgttagtaatcagagcagttcgtggcat

SEQ ID NO: 277546 - DNA, 30 bp, Artificial Sequence
  Synthetic oligonucleotide
ggctatatagttagcgaggcgaggtggcat

SEQ ID NO: 277547 - DNA, 30 bp, Artificial Sequence
  Synthetic oligonucleotide
gggtgagaccagatcgttttttaaatgcat

SEQ ID NO: 277548 - DNA, 30 bp, Artificial Sequence
  Synthetic oligonucleotide
atgagcaaaagtgttggttgagacatgcat

SEQ ID NO: 277549 - DNA, 30 bp, Artificial Sequence
  Synthetic oligonucleotide
accggcgatacggaactcagtgacatgcat

SEQ ID NO: 277550 - DNA, 30 bp, Artificial Sequence
  Synthetic oligonucleotide
gaccaagttaatggccactgtaggatgcat

SEQ ID NO: 277551 - DNA, 30 bp, Artificial Sequence
  Synthetic oligonucleotide
tcccacaagccattacgaagggggatgcat

SEQ ID NO: 277552 - DNA, 30 bp, Artificial Sequence
  Synthetic oligonucleotide
gtcttgcgagatggaacctgtcgtatgcat

SEQ ID NO: 277553 - DNA, 31 bp, Artificial Sequence
  Synthetic oligonucleotide
ttgaaccagttggtcgcagggcggtatgcat

SEQ ID NO: 277554 - DNA, 30 bp, Artificial Sequence
  Synthetic oligonucleotide
gggagaaactagtgtgccctgtcactgcat

SEQ ID NO: 277555 - DNA, 30 bp, Artificial Sequence
  Synthetic oligonucleotide
caccatggcaatatcgcgacaaacctgcat

SEQ ID NO: 277556 - DNA, 30 bp, Artificial Sequence
  Synthetic oligonucleotide
atccgcatatgcctaaagaccagtctgcat

SEQ ID NO: 277557 - DNA, 30 bp, Artificial Sequence
  Synthetic oligonucleotide
tacttctaaatcagacagaggggtctgcat

SEQ ID NO: 277558 - DNA, 30 bp, Artificial Sequence
  Synthetic oligonucleotide
aatcgggaaagttggcgaagttaagtgcat

SEQ ID NO: 277559 - DNA, 30 bp, Artificial Sequence
  Synthetic oligonucleotide
tcgggtgtttttaggaggcaacacgtgcat

SEQ ID NO: 277560 - DNA, 30 bp, Artificial Sequence
  Synthetic oligonucleotide
agtagctgtgtctacgcatacatcgtgcat

SEQ ID NO: 277561 - DNA, 30 bp, Artificial Sequence
  Synthetic oligonucleotide
tacttccgccaaaccggcatcaaggtgcat

SEQ ID NO: 277562 - DNA, 30 bp, Artificial Sequence
  Synthetic oligonucleotide
atatgacacgccgagcaaccacaattgcat

SEQ ID NO: 277563 - DNA, 30 bp, Artificial Sequence
  Synthetic oligonucleotide
taatctaaagaatatcgattgagattgcat

SEQ ID NO: 277564 - DNA, 30 bp, Artificial Sequence
  Synthetic oligonucleotide
ctcgagaatctcacgagggccgcgttgcat

SEQ ID NO: 277565 - DNA, 30 bp, Artificial Sequence
  Synthetic oligonucleotide
gaggtcgaggtggccacaggccatttgcat

SEQ ID NO: 277566 - DNA, 30 bp, Artificial Sequence
  Synthetic oligonucleotide
acactcgcgtctgtggaggtggacaatcat

SEQ ID NO: 277567 - DNA, 30 bp, Artificial Sequence
  Synthetic oligonucleotide
aatcggccctgggtgcaccagagcaatcat

SEQ ID NO: 277568 - DNA, 30 bp, Artificial Sequence
  Synthetic oligonucleotide
cgcatcttcccagcggttactagcaatcat

SEQ ID NO: 277569 - DNA, 30 bp, Artificial Sequence
  Synthetic oligonucleotide
gtaacacgccctggcccccctttcaatcat

SEQ ID NO: 277570 - DNA, 30 bp, Artificial Sequence
  Synthetic oligonucleotide
gtaccaggagtatacgaagatgagaatcat

SEQ ID NO: 277571 - DNA, 30 bp, Artificial Sequence
  Synthetic oligonucleotide
tagtgcggtatttaattacagtttaatcat

SEQ ID NO: 277572 - DNA, 30 bp, Artificial Sequence
  Synthetic oligonucleotide
tgatgtaatttgaacaaatagatacatcat

SEQ ID NO: 277573 - DNA, 30 bp, Artificial Sequence
  Synthetic oligonucleotide
ctggatgcgtggcgcgggagagcccatcat

SEQ ID NO: 277574 - DNA, 30 bp, Artificial Sequence
  Synthetic oligonucleotide
aatcacctgcctgtcatttcttcccatcat

SEQ ID NO: 277575 - DNA, 30 bp, Artificial Sequence
  Synthetic oligonucleotide
tagtgtcactggtgcgcccatgcgcatcat

SEQ ID NO: 277576 - DNA, 30 bp, Artificial Sequence
  Synthetic oligonucleotide
tagcagacatttaggatggtatctcatcat

SEQ ID NO: 277577 - DNA, 30 bp, Artificial Sequence
  Synthetic oligonucleotide
aacctagaggacggcaggtggggagatcat

SEQ ID NO: 277578 - DNA, 31 bp, Artificial Sequence
  Synthetic oligonucleotide
tacaacttcattcacagcccacgccgatcat

SEQ ID NO: 277579 - DNA, 30 bp, Artificial Sequence
  Synthetic oligonucleotide
gcgaaggctggtttcgctactggcgatcat

SEQ ID NO: 277580 - DNA, 30 bp, Artificial Sequence
  Synthetic oligonucleotide
ccaggcgtttattagaaagggttcgatcat

SEQ ID NO: 277581 - DNA, 30 bp, Artificial Sequence
  Synthetic oligonucleotide
tacaccgcggaatagggcaaccaggatcat

SEQ ID NO: 277582 - DNA, 30 bp, Artificial Sequence
  Synthetic oligonucleotide
caacgcgcgaaattcgacaactcatatcat

SEQ ID NO: 277583 - DNA, 30 bp, Artificial Sequence
  Synthetic oligonucleotide
aaacattgtgaggtatcacactgatatcat

SEQ ID NO: 277584 - DNA, 30 bp, Artificial Sequence
  Synthetic oligonucleotide
tccagccaaagaagacttcgactatatcat

SEQ ID NO: 277585 - DNA, 30 bp, Artificial Sequence
  Synthetic oligonucleotide
ggtcatgtaacgagacctgaaaagtatcat

SEQ ID NO: 277586 - DNA, 30 bp, Artificial Sequence
  Synthetic oligonucleotide
agctgtacgggaaatgctttaacgtatcat

SEQ ID NO: 277587 - DNA, 30 bp, Artificial Sequence
  Synthetic oligonucleotide
cttaccgaagtggggatttatgcgtatcat

SEQ ID NO: 277588 - DNA, 30 bp, Artificial Sequence
  Synthetic oligonucleotide
gaagaggtcgacgtaagccccgtcactcat

SEQ ID NO: 277589 - DNA, 30 bp, Artificial Sequence
  Synthetic oligonucleotide
aatcaacagcggagcattcatcatactcat

SEQ ID NO: 277590 - DNA, 30 bp, Artificial Sequence
  Synthetic oligonucleotide
ccgacgcccgagcgatggcacattactcat

SEQ ID NO: 277591 - DNA, 30 bp, Artificial Sequence
  Synthetic oligonucleotide
aatcaaggtagcattgacaagggacctcat

SEQ ID NO: 277592 - DNA, 30 bp, Artificial Sequence
  Synthetic oligonucleotide
cagataacaggggaaagggttcggcctcat

SEQ ID NO: 277593 - DNA, 30 bp, Artificial Sequence
  Synthetic oligonucleotide
tcagtcaggctaaagggatactctcctcat

SEQ ID NO: 277594 - DNA, 30 bp, Artificial Sequence
  Synthetic oligonucleotide
aaatctccaaaaactagacagccagctcat

SEQ ID NO: 277595 - DNA, 30 bp, Artificial Sequence
  Synthetic oligonucleotide
cttcgtcatgtgcgacagaataccgctcat

SEQ ID NO: 277596 - DNA, 30 bp, Artificial Sequence
  Synthetic oligonucleotide
ggaaatggcgcggtgtgaggaacggctcat

SEQ ID NO: 277597 - DNA, 30 bp, Artificial Sequence
  Synthetic oligonucleotide
aagacccgccaatgagtcttgagatctcat

SEQ ID NO: 277598 - DNA, 30 bp, Artificial Sequence
  Synthetic oligonucleotide
gtaaagaagtgtgtcttgggctgatctcat

SEQ ID NO: 277599 - DNA, 30 bp, Artificial Sequence
  Synthetic oligonucleotide
tgcgtcgtacgcctataatgtatatctcat

SEQ ID NO: 277600 - DNA, 30 bp, Artificial Sequence
  Synthetic oligonucleotide
attcagtggtcctaatccaggccgtctcat

SEQ ID NO: 277601 - DNA, 30 bp, Artificial Sequence
  Synthetic oligonucleotide
aaacagtctgcgtccagtgtacggtctcat

SEQ ID NO: 277602 - DNA, 30 bp, Artificial Sequence
  Synthetic oligonucleotide
aagaccgcccggtgcacgtggaattctcat

SEQ ID NO: 277603 - DNA, 30 bp, Artificial Sequence
  Synthetic oligonucleotide
ctctctctgagattaagaaaaggcagtcat

SEQ ID NO: 277604 - DNA, 30 bp, Artificial Sequence
  Synthetic oligonucleotide
gtaaggaacagtcatttagctaagagtcat

SEQ ID NO: 277605 - DNA, 30 bp, Artificial Sequence
  Synthetic oligonucleotide
atgacagatatcaagtggtaaaggagtcat

SEQ ID NO: 277606 - DNA, 30 bp, Artificial Sequence
  Synthetic oligonucleotide
tcagtcctagcatgtgcgaacatgagtcat

SEQ ID NO: 277607 - DNA, 30 bp, Artificial Sequence
  Synthetic oligonucleotide
ggatagatccgaatcataagggtgagtcat

SEQ ID NO: 277608 - DNA, 30 bp, Artificial Sequence
  Synthetic oligonucleotide
atgactgatcacttaatctacactagtcat

SEQ ID NO: 277609 - DNA, 30 bp, Artificial Sequence
  Synthetic oligonucleotide
atgggagttctaataatgaggcctagtcat

SEQ ID NO: 277610 - DNA, 30 bp, Artificial Sequence
  Synthetic oligonucleotide
agagcaaacgctcacgaatctcttagtcat

SEQ ID NO: 277611 - DNA, 30 bp, Artificial Sequence
  Synthetic oligonucleotide
ctcgcaacggaaccttctcttaaccgtcat

SEQ ID NO: 277612 - DNA, 30 bp, Artificial Sequence
  Synthetic oligonucleotide
tgtcaagctgcctcgatgcatttccgtcat

SEQ ID NO: 277613 - DNA, 30 bp, Artificial Sequence
  Synthetic oligonucleotide
taactcagatttacaggacgtaagcgtcat

SEQ ID NO: 277614 - DNA, 30 bp, Artificial Sequence
  Synthetic oligonucleotide
ccgctttagaaaatattcgtcgagcgtcat

SEQ ID NO: 277615 - DNA, 30 bp, Artificial Sequence
  Synthetic oligonucleotide
ggcatacgccgcgaacctatcatgcgtcat

SEQ ID NO: 277616 - DNA, 30 bp, Artificial Sequence
  Synthetic oligonucleotide
tatacatggcttggctagtttcagggtcat

SEQ ID NO: 277617 - DNA, 30 bp, Artificial Sequence
  Synthetic oligonucleotide
ttggcgcgatggtcacatgctaatggtcat

SEQ ID NO: 277618 - DNA, 30 bp, Artificial Sequence
  Synthetic oligonucleotide
cgtagttactcttggcagagatatggtcat

SEQ ID NO: 277619 - DNA, 30 bp, Artificial Sequence
  Synthetic oligonucleotide
ctaatgattcccatagtatacggatgtcat

SEQ ID NO: 277620 - DNA, 30 bp, Artificial Sequence
  Synthetic oligonucleotide
cgttatcgcgtccgcactagtaggtgtcat

SEQ ID NO: 277621 - DNA, 30 bp, Artificial Sequence
  Synthetic oligonucleotide
ggaaatatacgagatagagaagtgtgtcat

SEQ ID NO: 277622 - DNA, 30 bp, Artificial Sequence
  Synthetic oligonucleotide
agatacggattgtagacagctcgttgtcat

SEQ ID NO: 277623 - DNA, 30 bp, Artificial Sequence
  Synthetic oligonucleotide
cacaagcgaatatttagtaaataaattcat

SEQ ID NO: 277624 - DNA, 30 bp, Artificial Sequence
  Synthetic oligonucleotide
gtaccttcttggaacactgattaaattcat

SEQ ID NO: 277625 - DNA, 30 bp, Artificial Sequence
  Synthetic oligonucleotide
acttgcgagatagagacggctacaattcat

SEQ ID NO: 277626 - DNA, 30 bp, Artificial Sequence
  Synthetic oligonucleotide
acccttactgtaactgccagtggtattcat

SEQ ID NO: 277627 - DNA, 30 bp, Artificial Sequence
  Synthetic oligonucleotide
taggctactgacataaatcattgacttcat

SEQ ID NO: 277628 - DNA, 30 bp, Artificial Sequence
  Synthetic oligonucleotide
cataggttgacgggtggcatttcgcttcat

SEQ ID NO: 277629 - DNA, 30 bp, Artificial Sequence
  Synthetic oligonucleotide
ggacctgtctacaatttgatcgggcttcat

SEQ ID NO: 277630 - DNA, 30 bp, Artificial Sequence
  Synthetic oligonucleotide
tagtgggctcctaaggaaaagggagttcat

SEQ ID NO: 277631 - DNA, 30 bp, Artificial Sequence
  Synthetic oligonucleotide
cgacgttctcggaggcaccagtgcgttcat

SEQ ID NO: 277632 - DNA, 30 bp, Artificial Sequence
  Synthetic oligonucleotide
actttggtttagctcgccaccggggttcat

SEQ ID NO: 277633 - DNA, 30 bp, Artificial Sequence
  Synthetic oligonucleotide
aaagagctcaatgccaatcgtcatgttcat

SEQ ID NO: 277634 - DNA, 30 bp, Artificial Sequence
  Synthetic oligonucleotide
ggccgaaaagggagtctttagagtgttcat

SEQ ID NO: 277635 - DNA, 30 bp, Artificial Sequence
  Synthetic oligonucleotide
tgtctaggtcggcggggcattaactttcat

SEQ ID NO: 277636 - DNA, 30 bp, Artificial Sequence
  Synthetic oligonucleotide
ccttatcggtaaagaagagatatctttcat

SEQ ID NO: 277637 - DNA, 30 bp, Artificial Sequence
  Synthetic oligonucleotide
cacgttgtttgtatttgtgatctgtttcat

SEQ ID NO: 277638 - DNA, 30 bp, Artificial Sequence
  Synthetic oligonucleotide
gctgcggctcagtactcacggcgttttcat

SEQ ID NO: 277639 - DNA, 30 bp, Artificial Sequence
  Synthetic oligonucleotide
ccaggtaaagctgcgatattatgttttcat

SEQ ID NO: 277640 - DNA, 30 bp, Artificial Sequence
  Synthetic oligonucleotide
gagactgccttggcacggtattcaaaagat

SEQ ID NO: 277641 - DNA, 30 bp, Artificial Sequence
  Synthetic oligonucleotide
taatttaaggtggtcgtgagcaccaaagat

SEQ ID NO: 277642 - DNA, 30 bp, Artificial Sequence
  Synthetic oligonucleotide
tagaatctggtgatgcgtacagccaaagat

SEQ ID NO: 277643 - DNA, 30 bp, Artificial Sequence
  Synthetic oligonucleotide
gtccggacaatcaggaccgcttgcaaagat

SEQ ID NO: 277644 - DNA, 30 bp, Artificial Sequence
  Synthetic oligonucleotide
acactcgccgcttgagcttatatcaaagat

SEQ ID NO: 277645 - DNA, 30 bp, Artificial Sequence
  Synthetic oligonucleotide
ggaagtggcgcactgcgatagccgaaagat

SEQ ID NO: 277646 - DNA, 30 bp, Artificial Sequence
  Synthetic oligonucleotide
tccgattcataacttcagcctaggaaagat

SEQ ID NO: 277647 - DNA, 30 bp, Artificial Sequence
  Synthetic oligonucleotide
gctttgaccgtccttacggtggggaaagat

SEQ ID NO: 277648 - DNA, 30 bp, Artificial Sequence
  Synthetic oligonucleotide
cgacatgtaaattaaatttcgcataaagat

SEQ ID NO: 277649 - DNA, 30 bp, Artificial Sequence
  Synthetic oligonucleotide
cttatgaggcagaacccgcgcactaaagat

SEQ ID NO: 277650 - DNA, 30 bp, Artificial Sequence
  Synthetic oligonucleotide
ataaaaagtaagtcgtggtagagtaaagat

SEQ ID NO: 277651 - DNA, 30 bp, Artificial Sequence
  Synthetic oligonucleotide
gctgtggcgcaaccgcagccaagccaagat

SEQ ID NO: 277652 - DNA, 30 bp, Artificial Sequence
  Synthetic oligonucleotide
aataatgtcaaaaggccgaagtttcaagat

SEQ ID NO: 277653 - DNA, 30 bp, Artificial Sequence
  Synthetic oligonucleotide
acgatggcagtccaggtggttatagaagat

SEQ ID NO: 277654 - DNA, 30 bp, Artificial Sequence
  Synthetic oligonucleotide
gctggtgataagcatgcatggcgcgaagat

SEQ ID NO: 277655 - DNA, 30 bp, Artificial Sequence
  Synthetic oligonucleotide
atgcgggttgcacagattgcagtcgaagat

SEQ ID NO: 277656 - DNA, 30 bp, Artificial Sequence
  Synthetic oligonucleotide
ttataggatgggacttcgatctttgaagat

SEQ ID NO: 277657 - DNA, 30 bp, Artificial Sequence
  Synthetic oligonucleotide
ggtcaaaaagtgtaggaaacttcataagat

SEQ ID NO: 277658 - DNA, 30 bp, Artificial Sequence
  Synthetic oligonucleotide
acggattgtctgttataggggtattaagat

SEQ ID NO: 277659 - DNA, 30 bp, Artificial Sequence
  Synthetic oligonucleotide
gcaaagccctgcatttgtctttattaagat

SEQ ID NO: 277660 - DNA, 30 bp, Artificial Sequence
  Synthetic oligonucleotide
ccatcacaactaggtatgttgtgttaagat

SEQ ID NO: 277661 - DNA, 30 bp, Artificial Sequence
  Synthetic oligonucleotide
ctattgaccgtggaatactgcccaacagat

SEQ ID NO: 277662 - DNA, 30 bp, Artificial Sequence
  Synthetic oligonucleotide
gccaggcggcgcccggggtcgcgaacagat

SEQ ID NO: 277663 - DNA, 29 bp, Artificial Sequence
  Synthetic oligonucleotide
aactaatgtgaggtttcattcgaacagat

SEQ ID NO: 277664 - DNA, 30 bp, Artificial Sequence
  Synthetic oligonucleotide
gggaataaatcagcaactttttacacagat

SEQ ID NO: 277665 - DNA, 30 bp, Artificial Sequence
  Synthetic oligonucleotide
tctcatgccgctatgtgactcgccacagat

SEQ ID NO: 277666 - DNA, 30 bp, Artificial Sequence
  Synthetic oligonucleotide
acttagtagttactcggaaaatccacagat

SEQ ID NO: 277667 - DNA, 30 bp, Artificial Sequence
  Synthetic oligonucleotide
ccagagaccacgtacgtcctgtccacagat

SEQ ID NO: 277668 - DNA, 30 bp, Artificial Sequence
  Synthetic oligonucleotide
gaaacgaagggcactagttagtggacagat

SEQ ID NO: 277669 - DNA, 30 bp, Artificial Sequence
  Synthetic oligonucleotide
atggcaatattggtatggggagtgacagat

SEQ ID NO: 277670 - DNA, 30 bp, Artificial Sequence
  Synthetic oligonucleotide
cattcatacggctagcccatctatacagat

SEQ ID NO: 277671 - DNA, 30 bp, Artificial Sequence
  Synthetic oligonucleotide
agcgagagccggtacaaccggcaaccagat

SEQ ID NO: 277672 - DNA, 30 bp, Artificial Sequence
  Synthetic oligonucleotide
ataagcggtattactggggaaagaccagat

SEQ ID NO: 277673 - DNA, 30 bp, Artificial Sequence
  Synthetic oligonucleotide
aatagttacgatcccacctctgtagcagat

SEQ ID NO: 277674 - DNA, 30 bp, Artificial Sequence
  Synthetic oligonucleotide
tcgaatcgccggactgtttctggcgcagat

SEQ ID NO: 277675 - DNA, 30 bp, Artificial Sequence
  Synthetic oligonucleotide
tccggcccatcgaagtagttgtgcgcagat

SEQ ID NO: 277676 - DNA, 30 bp, Artificial Sequence
  Synthetic oligonucleotide
cgtacttgaagaagagtcgttgtcgcagat

SEQ ID NO: 277677 - DNA, 30 bp, Artificial Sequence
  Synthetic oligonucleotide
tgatccaccgatgcccgagcgcgggcagat

SEQ ID NO: 277678 - DNA, 30 bp, Artificial Sequence
  Synthetic oligonucleotide
tcccgaggcgcatgacaggcgcatgcagat

SEQ ID NO: 277679 - DNA, 30 bp, Artificial Sequence
  Synthetic oligonucleotide
attgaacttcttgtgagtcccgttgcagat

SEQ ID NO: 277680 - DNA, 30 bp, Artificial Sequence
  Synthetic oligonucleotide
ccagtccattttttacgaaactattcagat

SEQ ID NO: 277681 - DNA, 30 bp, Artificial Sequence
  Synthetic oligonucleotide
ccagcatactaaaacgacggaaaaagagat

SEQ ID NO: 277682 - DNA, 30 bp, Artificial Sequence
  Synthetic oligonucleotide
gcgcgtggaggcggattctttacaagagat

SEQ ID NO: 277683 - DNA, 30 bp, Artificial Sequence
  Synthetic oligonucleotide
gtcttacgagcattcgtacacagaagagat

SEQ ID NO: 277684 - DNA, 30 bp, Artificial Sequence
  Synthetic oligonucleotide
agtgagaagcgcagtagctaacgcagagat

SEQ ID NO: 277685 - DNA, 30 bp, Artificial Sequence
  Synthetic oligonucleotide
ataaacattactgcgccgtccttcagagat

SEQ ID NO: 277686 - DNA, 30 bp, Artificial Sequence
  Synthetic oligonucleotide
gtgggacgggcgggctgtcggggtagagat

SEQ ID NO: 277687 - DNA, 30 bp, Artificial Sequence
  Synthetic oligonucleotide
ggagggttagtcgttccccagaaacgagat

SEQ ID NO: 277688 - DNA, 30 bp, Artificial Sequence
  Synthetic oligonucleotide
tgtacgtcctccctaatctgtgcccgagat

SEQ ID NO: 277689 - DNA, 30 bp, Artificial Sequence
  Synthetic oligonucleotide
gcgtaacgcttcgattaggactcgcgagat

SEQ ID NO: 277690 - DNA, 30 bp, Artificial Sequence
  Synthetic oligonucleotide
aatttagtccgccttgagcaaaggcgagat

SEQ ID NO: 277691 - DNA, 30 bp, Artificial Sequence
  Synthetic oligonucleotide
aaacatcgtgacgtgatgatgattcgagat

SEQ ID NO: 277692 - DNA, 30 bp, Artificial Sequence
  Synthetic oligonucleotide
gcgagcgtttctacctataatgttcgagat

SEQ ID NO: 277693 - DNA, 30 bp, Artificial Sequence
  Synthetic oligonucleotide
ttatatacggtcctctagatctcgggagat

SEQ ID NO: 277694 - DNA, 30 bp, Artificial Sequence
  Synthetic oligonucleotide
atgaagtgacaacgaacgctggatggagat

SEQ ID NO: 277695 - DNA, 30 bp, Artificial Sequence
  Synthetic oligonucleotide
gtagcggcaagcataccggactatggagat

SEQ ID NO: 277696 - DNA, 30 bp, Artificial Sequence
  Synthetic oligonucleotide
ggtaatgggatacgtggctttccatgagat

SEQ ID NO: 277697 - DNA, 30 bp, Artificial Sequence
  Synthetic oligonucleotide
ccaaagtccagtcactggctacgatgagat

SEQ ID NO: 277698 - DNA, 30 bp, Artificial Sequence
  Synthetic oligonucleotide
ggctctaatacggatattggggagtgagat

SEQ ID NO: 277699 - DNA, 30 bp, Artificial Sequence
  Synthetic oligonucleotide
gactctgggatgggggacccgtggtgagat

SEQ ID NO: 277700 - DNA, 30 bp, Artificial Sequence
  Synthetic oligonucleotide
actttgtcaccagggggcgaatattgagat

SEQ ID NO: 277701 - DNA, 27 bp, Artificial Sequence
  Synthetic oligonucleotide
caaacccgttacatggccagaatagat

SEQ ID NO: 277702 - DNA, 30 bp, Artificial Sequence
  Synthetic oligonucleotide
gggttagatgaatactgtataataatagat

SEQ ID NO: 277703 - DNA, 30 bp, Artificial Sequence
  Synthetic oligonucleotide
taaatgacgtacaattgggcggtaatagat

SEQ ID NO: 277704 - DNA, 30 bp, Artificial Sequence
  Synthetic oligonucleotide
atacacttaacgttgtatgccagcatagat

SEQ ID NO: 277705 - DNA, 30 bp, Artificial Sequence
  Synthetic oligonucleotide
ggccccggtgatagtgaggatcagatagat

SEQ ID NO: 277706 - DNA, 30 bp, Artificial Sequence
  Synthetic oligonucleotide
atttctggtaggtagggtgcactgatagat

SEQ ID NO: 277707 - DNA, 30 bp, Artificial Sequence
  Synthetic oligonucleotide
tagttgacacggcaacacggcgcactagat

SEQ ID NO: 277708 - DNA, 30 bp, Artificial Sequence
  Synthetic oligonucleotide
acatttaaaggatctcacggggcactagat

SEQ ID NO: 277709 - DNA, 29 bp, Artificial Sequence
  Synthetic oligonucleotide
ataggtcgaaggtaaagccttcactagat

SEQ ID NO: 277710 - DNA, 31 bp, Artificial Sequence
  Synthetic oligonucleotide
ctcgcattacgacaatttcatttcactagat

SEQ ID NO: 277711 - DNA, 30 bp, Artificial Sequence
  Synthetic oligonucleotide
tccgtttgaggtgaaagatatagactagat

SEQ ID NO: 277712 - DNA, 30 bp, Artificial Sequence
  Synthetic oligonucleotide
gtcaaaccgtctgctacggtgggactagat

SEQ ID NO: 277713 - DNA, 30 bp, Artificial Sequence
  Synthetic oligonucleotide
gtatggcacttttagtacaaatgcctagat

SEQ ID NO: 277714 - DNA, 30 bp, Artificial Sequence
  Synthetic oligonucleotide
atgtcttgggacagggcttgaatcctagat

SEQ ID NO: 277715 - DNA, 30 bp, Artificial Sequence
  Synthetic oligonucleotide
gcatgggacaagtgcgcacaacctctagat

SEQ ID NO: 277716 - DNA, 30 bp, Artificial Sequence
  Synthetic oligonucleotide
cgtggtttctgccacatgggccctctagat

SEQ ID NO: 277717 - DNA, 30 bp, Artificial Sequence
  Synthetic oligonucleotide
gggatgtaccggaaatgagagcctctagat

SEQ ID NO: 277718 - DNA, 30 bp, Artificial Sequence
  Synthetic oligonucleotide
tgaaccggtacctttcactgtaaagtagat

SEQ ID NO: 277719 - DNA, 30 bp, Artificial Sequence
  Synthetic oligonucleotide
ttcggtgtacttcgacacaattaagtagat

SEQ ID NO: 277720 - DNA, 30 bp, Artificial Sequence
  Synthetic oligonucleotide
ctgcattatctagtattcatgatagtagat

SEQ ID NO: 277721 - DNA, 30 bp, Artificial Sequence
  Synthetic oligonucleotide
atcattgaattggccagttgaatcgtagat

SEQ ID NO: 277722 - DNA, 30 bp, Artificial Sequence
  Synthetic oligonucleotide
actcttggtgacgaatgacaaaaggtagat

SEQ ID NO: 277723 - DNA, 30 bp, Artificial Sequence
  Synthetic oligonucleotide
gagtatcagttcgccttgcgccaggtagat

SEQ ID NO: 277724 - DNA, 30 bp, Artificial Sequence
  Synthetic oligonucleotide
ctcaagtcttgagagcatcttgtggtagat

SEQ ID NO: 277725 - DNA, 30 bp, Artificial Sequence
  Synthetic oligonucleotide
ttggttcggaatgacgcataggctgtagat

SEQ ID NO: 277726 - DNA, 30 bp, Artificial Sequence
  Synthetic oligonucleotide
gaactcacttagctgggaattaagttagat

SEQ ID NO: 277727 - DNA, 30 bp, Artificial Sequence
  Synthetic oligonucleotide
cgcagggcaaaaatttttgtcaggttagat

SEQ ID NO: 277728 - DNA, 30 bp, Artificial Sequence
  Synthetic oligonucleotide
tgcctctcaaaaggccatctatggttagat

SEQ ID NO: 277729 - DNA, 30 bp, Artificial Sequence
  Synthetic oligonucleotide
gggctgaccagttaaagcttcattttagat

SEQ ID NO: 277730 - DNA, 30 bp, Artificial Sequence
  Synthetic oligonucleotide
tagttagcgtcctacagttgagcaaacgat

SEQ ID NO: 277731 - DNA, 30 bp, Artificial Sequence
  Synthetic oligonucleotide
tgtgaaagagatacttatgacaacaacgat

SEQ ID NO: 277732 - DNA, 30 bp, Artificial Sequence
  Synthetic oligonucleotide
atgacagctcctcgcactacgaacaacgat

SEQ ID NO: 277733 - DNA, 30 bp, Artificial Sequence
  Synthetic oligonucleotide
cttgctccattctgctaggaagccaacgat

SEQ ID NO: 277734 - DNA, 30 bp, Artificial Sequence
  Synthetic oligonucleotide
tagacgttatccgagctgaactccaacgat

SEQ ID NO: 277735 - DNA, 30 bp, Artificial Sequence
  Synthetic oligonucleotide
ggaatccggcctttttgcatcttcaacgat

SEQ ID NO: 277736 - DNA, 30 bp, Artificial Sequence
  Synthetic oligonucleotide
gtcttggagaatagatgataagagaacgat

SEQ ID NO: 277737 - DNA, 30 bp, Artificial Sequence
  Synthetic oligonucleotide
cactagcgcgagtcccaggtcattaacgat

SEQ ID NO: 277738 - DNA, 30 bp, Artificial Sequence
  Synthetic oligonucleotide
agatgcctgcatgataagtttaaacacgat

SEQ ID NO: 277739 - DNA, 30 bp, Artificial Sequence
  Synthetic oligonucleotide
accaggagcccgaccttgaaagcacacgat

SEQ ID NO: 277740 - DNA, 30 bp, Artificial Sequence
  Synthetic oligonucleotide
ggagtctgcgtaaagcgactcttacacgat

SEQ ID NO: 277741 - DNA, 30 bp, Artificial Sequence
  Synthetic oligonucleotide
attcgtgcatgtagggcggagttacacgat

SEQ ID NO: 277742 - DNA, 30 bp, Artificial Sequence
  Synthetic oligonucleotide
aagtgcgtgcagtgggtgtctttacacgat

SEQ ID NO: 277743 - DNA, 30 bp, Artificial Sequence
  Synthetic oligonucleotide
gatcgaacttaactagaacatgctcacgat

SEQ ID NO: 277744 - DNA, 30 bp, Artificial Sequence
  Synthetic oligonucleotide
ccgccggtttgggcaaaaattcaggacgat

SEQ ID NO: 277745 - DNA, 30 bp, Artificial Sequence
  Synthetic oligonucleotide
ctagccttagtcggttagcgtaaatacgat

SEQ ID NO: 277746 - DNA, 30 bp, Artificial Sequence
  Synthetic oligonucleotide
cgaaagcgacggcgtataggtacatacgat

SEQ ID NO: 277747 - DNA, 30 bp, Artificial Sequence
  Synthetic oligonucleotide
gcttctaggtataccaactgtggctacgat

SEQ ID NO: 277748 - DNA, 30 bp, Artificial Sequence
  Synthetic oligonucleotide
gtaataaataagcacccgtcccagtacgat

SEQ ID NO: 277749 - DNA, 30 bp, Artificial Sequence
  Synthetic oligonucleotide
cgaccgttccatagatggacgatttacgat

SEQ ID NO: 277750 - DNA, 30 bp, Artificial Sequence
  Synthetic oligonucleotide
ggctgtggaatcgaaagggggacaaccgat

SEQ ID NO: 277751 - DNA, 30 bp, Artificial Sequence
  Synthetic oligonucleotide
agtcacgagcggacggtgctggtgaccgat

SEQ ID NO: 277752 - DNA, 30 bp, Artificial Sequence
  Synthetic oligonucleotide
gctatctcagatatcttaagataacccgat

SEQ ID NO: 277753 - DNA, 30 bp, Artificial Sequence
  Synthetic oligonucleotide
atcatgtatcgtatatgttttccccccgat

SEQ ID NO: 277754 - DNA, 30 bp, Artificial Sequence
  Synthetic oligonucleotide
agtatcacttagaaaactacatcatccgat

SEQ ID NO: 277755 - DNA, 30 bp, Artificial Sequence
  Synthetic oligonucleotide
aagactcataataaggcgtaaatatccgat

SEQ ID NO: 277756 - DNA, 30 bp, Artificial Sequence
  Synthetic oligonucleotide
aaacgggatcaaccccggctatcttccgat

SEQ ID NO: 277757 - DNA, 30 bp, Artificial Sequence
  Synthetic oligonucleotide
cagaaagaaacgtatgtcatcggacgcgat

SEQ ID NO: 277758 - DNA, 30 bp, Artificial Sequence
  Synthetic oligonucleotide
acaatgcgcctggtgaccaataaccgcgat

SEQ ID NO: 277759 - DNA, 30 bp, Artificial Sequence
  Synthetic oligonucleotide
taggttgacaggtttgatcatataggcgat

SEQ ID NO: 277760 - DNA, 30 bp, Artificial Sequence
  Synthetic oligonucleotide
gttagctcgtccactcctataatcggcgat

SEQ ID NO: 277761 - DNA, 31 bp, Artificial Sequence
  Synthetic oligonucleotide
caacctccggggtccaacacacttcggcgat

SEQ ID NO: 277762 - DNA, 30 bp, Artificial Sequence
  Synthetic oligonucleotide
gggttctggttctcttataacaggggcgat

SEQ ID NO: 277763 - DNA, 30 bp, Artificial Sequence
  Synthetic oligonucleotide
aggggtctatgggatatggagacatgcgat

SEQ ID NO: 277764 - DNA, 30 bp, Artificial Sequence
  Synthetic oligonucleotide
ccgttaacttggcacgtataactatgcgat

SEQ ID NO: 277765 - DNA, 30 bp, Artificial Sequence
  Synthetic oligonucleotide
acaatgttctgcaaagacattcactgcgat

SEQ ID NO: 277766 - DNA, 30 bp, Artificial Sequence
  Synthetic oligonucleotide
atgaagtctctatcacggctctactgcgat

SEQ ID NO: 277767 - DNA, 30 bp, Artificial Sequence
  Synthetic oligonucleotide
gtacgctattatattgagtctttctgcgat

SEQ ID NO: 277768 - DNA, 30 bp, Artificial Sequence
  Synthetic oligonucleotide
atccgaaatttcggtaaactccggtgcgat

SEQ ID NO: 277769 - DNA, 30 bp, Artificial Sequence
  Synthetic oligonucleotide
gtaaaggtaaacaggtattctaattgcgat

SEQ ID NO: 277770 - DNA, 30 bp, Artificial Sequence
  Synthetic oligonucleotide
agacgcaatgatgcggtgtcaggttgcgat

SEQ ID NO: 277771 - DNA, 30 bp, Artificial Sequence
  Synthetic oligonucleotide
ggttctgcgacgcggagaataggttgcgat

SEQ ID NO: 277772 - DNA, 30 bp, Artificial Sequence
  Synthetic oligonucleotide
ggatgcgcaaatttagtcacggtttgcgat

SEQ ID NO: 277773 - DNA, 30 bp, Artificial Sequence
  Synthetic oligonucleotide
gtgaaatgtgtggtatgcaagtcaatcgat

SEQ ID NO: 277774 - DNA, 30 bp, Artificial Sequence
  Synthetic oligonucleotide
ctccagaaaatagatgctccacgaatcgat

SEQ ID NO: 277775 - DNA, 30 bp, Artificial Sequence
  Synthetic oligonucleotide
agcaccgagagttttaaaactttgatcgat

SEQ ID NO: 277776 - DNA, 30 bp, Artificial Sequence
  Synthetic oligonucleotide
caaagcggagtctgaggctgtttactcgat

SEQ ID NO: 277777 - DNA, 30 bp, Artificial Sequence
  Synthetic oligonucleotide
gtcttacgttaatttgcgaaaaagctcgat

SEQ ID NO: 277778 - DNA, 30 bp, Artificial Sequence
  Synthetic oligonucleotide
atcgcacgctgtgcaggtccagtgctcgat

SEQ ID NO: 277779 - DNA, 30 bp, Artificial Sequence
  Synthetic oligonucleotide
cttgcggttgaaatgaaccggatagtcgat

SEQ ID NO: 277780 - DNA, 30 bp, Artificial Sequence
  Synthetic oligonucleotide
gctaccgctcagagaatattcgacgtcgat

SEQ ID NO: 277781 - DNA, 30 bp, Artificial Sequence
  Synthetic oligonucleotide
gaccctgaatcggtggtattccgcgtcgat

SEQ ID NO: 277782 - DNA, 30 bp, Artificial Sequence
  Synthetic oligonucleotide
ctcactagcgactaatagaggttcgtcgat

SEQ ID NO: 277783 - DNA, 30 bp, Artificial Sequence
  Synthetic oligonucleotide
atcgcagcacggtgaggggctaatgtcgat

SEQ ID NO: 277784 - DNA, 30 bp, Artificial Sequence
  Synthetic oligonucleotide
ttctatcagtacgcacggagggttgtcgat

SEQ ID NO: 277785 - DNA, 30 bp, Artificial Sequence
  Synthetic oligonucleotide
ttactatgacagtgcacttccacattcgat

SEQ ID NO: 277786 - DNA, 30 bp, Artificial Sequence
  Synthetic oligonucleotide
aacgatgtggtacaaggtatatagttcgat

SEQ ID NO: 277787 - DNA, 30 bp, Artificial Sequence
  Synthetic oligonucleotide
actaaggcaggttcgagccgagggttcgat

SEQ ID NO: 277788 - DNA, 30 bp, Artificial Sequence
  Synthetic oligonucleotide
cgccaaaggcctgatactgaccatttcgat

SEQ ID NO: 277789 - DNA, 30 bp, Artificial Sequence
  Synthetic oligonucleotide
cagtttgttcgatcccatcagcgtttcgat

SEQ ID NO: 277790 - DNA, 30 bp, Artificial Sequence
  Synthetic oligonucleotide
tcggtgacccagccgaatttttgtttcgat

SEQ ID NO: 277791 - DNA, 30 bp, Artificial Sequence
  Synthetic oligonucleotide
gtgtgtatgcgttcgtattaccaaaaggat

SEQ ID NO: 277792 - DNA, 30 bp, Artificial Sequence
  Synthetic oligonucleotide
tcattcgggcacggaatacaaagtaaggat

SEQ ID NO: 277793 - DNA, 30 bp, Artificial Sequence
  Synthetic oligonucleotide
tactggctcgcgttctctgaacagcaggat

SEQ ID NO: 277794 - DNA, 30 bp, Artificial Sequence
  Synthetic oligonucleotide
acgcacccaataagaaactacacgcaggat

SEQ ID NO: 277795 - DNA, 30 bp, Artificial Sequence
  Synthetic oligonucleotide
tggatatgtcggacgagcacagtgcaggat

SEQ ID NO: 277796 - DNA, 31 bp, Artificial Sequence
  Synthetic oligonucleotide
cctctacggcagaggttggaaagctcaggat

SEQ ID NO: 277797 - DNA, 30 bp, Artificial Sequence
  Synthetic oligonucleotide
gtatattatgtcatgatcacagttcaggat

SEQ ID NO: 277798 - DNA, 30 bp, Artificial Sequence
  Synthetic oligonucleotide
caaggtttttgaatttatactagagaggat

SEQ ID NO: 277799 - DNA, 30 bp, Artificial Sequence
  Synthetic oligonucleotide
agtacccgatagtttacctgatacgaggat

SEQ ID NO: 277800 - DNA, 30 bp, Artificial Sequence
  Synthetic oligonucleotide
ctctcgtaggaagaattaggtttggaggat

SEQ ID NO: 277801 - DNA, 30 bp, Artificial Sequence
  Synthetic oligonucleotide
taaggggcagatggaatcaatgatgaggat

SEQ ID NO: 277802 - DNA, 30 bp, Artificial Sequence
  Synthetic oligonucleotide
taggcctctactgtggggtgatttgaggat

SEQ ID NO: 277803 - DNA, 30 bp, Artificial Sequence
  Synthetic oligonucleotide
gtgtgtaaacgctcgccacgaccataggat

SEQ ID NO: 277804 - DNA, 30 bp, Artificial Sequence
  Synthetic oligonucleotide
acttcgattcgctaatcgcataactaggat

SEQ ID NO: 277805 - DNA, 30 bp, Artificial Sequence
  Synthetic oligonucleotide
cccaggtctcaacaagacgtgggctaggat

SEQ ID NO: 277806 - DNA, 30 bp, Artificial Sequence
  Synthetic oligonucleotide
cgccgtattgtatcggtcttgccgtaggat

SEQ ID NO: 277807 - DNA, 30 bp, Artificial Sequence
  Synthetic oligonucleotide
ccttgaccaaaaaattaggatgggtaggat

SEQ ID NO: 277808 - DNA, 30 bp, Artificial Sequence
  Synthetic oligonucleotide
atgatacccaggatgtttccaagttaggat

SEQ ID NO: 277809 - DNA, 30 bp, Artificial Sequence
  Synthetic oligonucleotide
cgctcgatggcttgcttggaaggttaggat

SEQ ID NO: 277810 - DNA, 30 bp, Artificial Sequence
  Synthetic oligonucleotide
aatggctgactgcgccaaaggtcaacggat

SEQ ID NO: 277811 - DNA, 30 bp, Artificial Sequence
  Synthetic oligonucleotide
accggatttcccaagagattagtaacggat

SEQ ID NO: 277812 - DNA, 30 bp, Artificial Sequence
  Synthetic oligonucleotide
ggtccaacaagctgaaatcgctcgacggat

SEQ ID NO: 277813 - DNA, 30 bp, Artificial Sequence
  Synthetic oligonucleotide
tcccgttgttgcacaatagaattgacggat

SEQ ID NO: 277814 - DNA, 30 bp, Artificial Sequence
  Synthetic oligonucleotide
tgaagtcgcgagggttgtgaaaagccggat

SEQ ID NO: 277815 - DNA, 30 bp, Artificial Sequence
  Synthetic oligonucleotide
gtttaaggctcgtcaggcgcgtggccggat

SEQ ID NO: 277816 - DNA, 30 bp, Artificial Sequence
  Synthetic oligonucleotide
aaccaccgtacaatataactgagtccggat

SEQ ID NO: 277817 - DNA, 30 bp, Artificial Sequence
  Synthetic oligonucleotide
cttcagaacatggttacgtctattccggat

SEQ ID NO: 277818 - DNA, 30 bp, Artificial Sequence
  Synthetic oligonucleotide
cggagccagtggagtaacttacctgcggat

SEQ ID NO: 277819 - DNA, 30 bp, Artificial Sequence
  Synthetic oligonucleotide
caggaggctatgttctcaggggggtcggat

SEQ ID NO: 277820 - DNA, 30 bp, Artificial Sequence
  Synthetic oligonucleotide
tctcgggcgctgaaccttaacagttcggat

SEQ ID NO: 277821 - DNA, 30 bp, Artificial Sequence
  Synthetic oligonucleotide
aatcagaaagcgtaatagaggttttcggat

SEQ ID NO: 277822 - DNA, 30 bp, Artificial Sequence
  Synthetic oligonucleotide
cattcgatgcatggaagatagaaaagggat

SEQ ID NO: 277823 - DNA, 30 bp, Artificial Sequence
  Synthetic oligonucleotide
atctggcgcttaaatcgtggaccaagggat

SEQ ID NO: 277824 - DNA, 30 bp, Artificial Sequence
  Synthetic oligonucleotide
accataaccacgagtttctgggcaagggat

SEQ ID NO: 277825 - DNA, 30 bp, Artificial Sequence
  Synthetic oligonucleotide
taagcttcaagttagaatacaagaagggat

SEQ ID NO: 277826 - DNA, 30 bp, Artificial Sequence
  Synthetic oligonucleotide
accaatcgtcagaccaataaaataagggat

SEQ ID NO: 277827 - DNA, 30 bp, Artificial Sequence
  Synthetic oligonucleotide
gagactgtactgtttatcgtcgtaagggat

SEQ ID NO: 277828 - DNA, 30 bp, Artificial Sequence
  Synthetic oligonucleotide
ttaaactctgaacctaaagtgaacagggat

SEQ ID NO: 277829 - DNA, 30 bp, Artificial Sequence
  Synthetic oligonucleotide
cagactgatactacggtaataggcagggat

SEQ ID NO: 277830 - DNA, 30 bp, Artificial Sequence
  Synthetic oligonucleotide
atggtacttggatctataccagtcagggat

SEQ ID NO: 277831 - DNA, 30 bp, Artificial Sequence
  Synthetic oligonucleotide
tgttagaggcttaacggacctatgagggat

SEQ ID NO: 277832 - DNA, 30 bp, Artificial Sequence
  Synthetic oligonucleotide
gtacagggtatttcgaggggcaaccgggat

SEQ ID NO: 277833 - DNA, 30 bp, Artificial Sequence
  Synthetic oligonucleotide
cgatcagtattaggacaggagacccgggat

SEQ ID NO: 277834 - DNA, 30 bp, Artificial Sequence
  Synthetic oligonucleotide
tagtgtattcggacatcgggatcccgggat

SEQ ID NO: 277835 - DNA, 30 bp, Artificial Sequence
  Synthetic oligonucleotide
tctgcatcgctagcgtggacaagccgggat

SEQ ID NO: 277836 - DNA, 30 bp, Artificial Sequence
  Synthetic oligonucleotide
tcagggcctggttggctaattccaggggat

SEQ ID NO: 277837 - DNA, 30 bp, Artificial Sequence
  Synthetic oligonucleotide
tgatgtatcaaggtgagggaatacggggat

SEQ ID NO: 277838 - DNA, 30 bp, Artificial Sequence
  Synthetic oligonucleotide
cctatttaaatgttaaatgaagccggggat

SEQ ID NO: 277839 - DNA, 30 bp, Artificial Sequence
  Synthetic oligonucleotide
catgcccaaacacgcatcgattcgggggat

SEQ ID NO: 277840 - DNA, 30 bp, Artificial Sequence
  Synthetic oligonucleotide
gccgcatcgttaccgtaaaatatgggggat

SEQ ID NO: 277841 - DNA, 30 bp, Artificial Sequence
  Synthetic oligonucleotide
taaaaaatccgtgactcagcgacatgggat

SEQ ID NO: 277842 - DNA, 30 bp, Artificial Sequence
  Synthetic oligonucleotide
taacagcgagcgcttccttggaactgggat

SEQ ID NO: 277843 - DNA, 30 bp, Artificial Sequence
  Synthetic oligonucleotide
cttgtgtctgtattggaccgggactgggat

SEQ ID NO: 277844 - DNA, 30 bp, Artificial Sequence
  Synthetic oligonucleotide
ggaggccttcgccctggaaagtactgggat

SEQ ID NO: 277845 - DNA, 30 bp, Artificial Sequence
  Synthetic oligonucleotide
gacaggagattatagtctttccagtgggat

SEQ ID NO: 277846 - DNA, 30 bp, Artificial Sequence
  Synthetic oligonucleotide
ggcgcccacgcctgacttaacgagtgggat

SEQ ID NO: 277847 - DNA, 30 bp, Artificial Sequence
  Synthetic oligonucleotide
gtgaggcggaaattaatctgcgggtgggat

SEQ ID NO: 277848 - DNA, 30 bp, Artificial Sequence
  Synthetic oligonucleotide
taaacaggctaattgcgtgctctgtgggat

SEQ ID NO: 277849 - DNA, 30 bp, Artificial Sequence
  Synthetic oligonucleotide
agcttggtaagccccgaaaggccttgggat

SEQ ID NO: 277850 - DNA, 30 bp, Artificial Sequence
  Synthetic oligonucleotide
aggtcgccgaatattggtttttcttgggat

SEQ ID NO: 277851 - DNA, 30 bp, Artificial Sequence
  Synthetic oligonucleotide
caccgagtgagccttgttgtacgttgggat

SEQ ID NO: 277852 - DNA, 30 bp, Artificial Sequence
  Synthetic oligonucleotide
aaggtaaagcctcaattttgattttgggat

SEQ ID NO: 277853 - DNA, 30 bp, Artificial Sequence
  Synthetic oligonucleotide
acattcataccaccgcacgtcaggatggat

SEQ ID NO: 277854 - DNA, 30 bp, Artificial Sequence
  Synthetic oligonucleotide
cgcatgatgtaaaaatacaaagggatggat

SEQ ID NO: 277855 - DNA, 30 bp, Artificial Sequence
  Synthetic oligonucleotide
aatcaccaaaagatcggtagtgtgatggat

SEQ ID NO: 277856 - DNA, 30 bp, Artificial Sequence
  Synthetic oligonucleotide
gacattgtcgcttttgttgcctatatggat

SEQ ID NO: 277857 - DNA, 30 bp, Artificial Sequence
  Synthetic oligonucleotide
gttttgtggaagatctcgaatgaactggat

SEQ ID NO: 277858 - DNA, 30 bp, Artificial Sequence
  Synthetic oligonucleotide
ggcggtaagaatataataccataactggat

SEQ ID NO: 277859 - DNA, 30 bp, Artificial Sequence
  Synthetic oligonucleotide
taccgttgcggatgtcatcgatctctggat

SEQ ID NO: 277860 - DNA, 30 bp, Artificial Sequence
  Synthetic oligonucleotide
attgggcgcatgatatcaccagaagtggat

SEQ ID NO: 277861 - DNA, 30 bp, Artificial Sequence
  Synthetic oligonucleotide
tatacgtgacagaggcctcgcacagtggat

SEQ ID NO: 277862 - DNA, 30 bp, Artificial Sequence
  Synthetic oligonucleotide
ggcacaagggaatcttttacgacagtggat

SEQ ID NO: 277863 - DNA, 30 bp, Artificial Sequence
  Synthetic oligonucleotide
tacaagtccgggagcgccgtaaacgtggat

SEQ ID NO: 277864 - DNA, 30 bp, Artificial Sequence
  Synthetic oligonucleotide
tagaagaagaaattatctgtcatcgtggat

SEQ ID NO: 277865 - DNA, 30 bp, Artificial Sequence
  Synthetic oligonucleotide
gacggtagtaaacgggcacgcccggtggat

SEQ ID NO: 277866 - DNA, 30 bp, Artificial Sequence
  Synthetic oligonucleotide
tagagggaattcgtatgatcactggtggat

SEQ ID NO: 277867 - DNA, 30 bp, Artificial Sequence
  Synthetic oligonucleotide
taggctctcctacatagataaagtgtggat

SEQ ID NO: 277868 - DNA, 30 bp, Artificial Sequence
  Synthetic oligonucleotide
ttcttggacattccgctttggtttgtggat

SEQ ID NO: 277869 - DNA, 30 bp, Artificial Sequence
  Synthetic oligonucleotide
accttaatgatggggggactatgattggat

SEQ ID NO: 277870 - DNA, 30 bp, Artificial Sequence
  Synthetic oligonucleotide
cagtgcgctagggcaacggtagacttggat

SEQ ID NO: 277871 - DNA, 30 bp, Artificial Sequence
  Synthetic oligonucleotide
gcaatgcggtgtgctccaacgtccttggat

SEQ ID NO: 277872 - DNA, 30 bp, Artificial Sequence
  Synthetic oligonucleotide
ggtcatcttctatcagcaactggtttggat

SEQ ID NO: 277873 - DNA, 30 bp, Artificial Sequence
  Synthetic oligonucleotide
gctcattgtcgttggggacataaaaatgat

SEQ ID NO: 277874 - DNA, 30 bp, Artificial Sequence
  Synthetic oligonucleotide
tgtattgattgactcccacattgcaatgat

SEQ ID NO: 277875 - DNA, 30 bp, Artificial Sequence
  Synthetic oligonucleotide
ttggccctatccccgagtatcgggaatgat

SEQ ID NO: 277876 - DNA, 30 bp, Artificial Sequence
  Synthetic oligonucleotide
cttcaatggatggcactcaggtggaatgat

SEQ ID NO: 277877 - DNA, 30 bp, Artificial Sequence
  Synthetic oligonucleotide
tttccggtccacgaaaataaaactaatgat

SEQ ID NO: 277878 - DNA, 30 bp, Artificial Sequence
  Synthetic oligonucleotide
taacaaggtatacggcggttaggtaatgat

SEQ ID NO: 277879 - DNA, 30 bp, Artificial Sequence
  Synthetic oligonucleotide
attaaatacacgtatagccggtcacatgat

SEQ ID NO: 277880 - DNA, 30 bp, Artificial Sequence
  Synthetic oligonucleotide
ttaatactggagggctattgaggacatgat

SEQ ID NO: 277881 - DNA, 30 bp, Artificial Sequence
  Synthetic oligonucleotide
cgggggaggggcttatcgaccttacatgat

SEQ ID NO: 277882 - DNA, 30 bp, Artificial Sequence
  Synthetic oligonucleotide
actattgtttaatatcaactgcaccatgat

SEQ ID NO: 277883 - DNA, 30 bp, Artificial Sequence
  Synthetic oligonucleotide
tgcgcggatatgcgtgaagatgcccatgat

SEQ ID NO: 277884 - DNA, 30 bp, Artificial Sequence
  Synthetic oligonucleotide
cttgagcgctggtccccggttcagcatgat

SEQ ID NO: 277885 - DNA, 30 bp, Artificial Sequence
  Synthetic oligonucleotide
ccgacagtactctgtggaacgttgcatgat

SEQ ID NO: 277886 - DNA, 30 bp, Artificial Sequence
  Synthetic oligonucleotide
gctcactttttttacgggacccaagatgat

SEQ ID NO: 277887 - DNA, 30 bp, Artificial Sequence
  Synthetic oligonucleotide
cacaaagcatagatccctcaagcggatgat

SEQ ID NO: 277888 - DNA, 30 bp, Artificial Sequence
  Synthetic oligonucleotide
gaggcgtccgttctaccgcatcgatatgat

SEQ ID NO: 277889 - DNA, 30 bp, Artificial Sequence
  Synthetic oligonucleotide
tcgaaaagatattcgaaattgtgctatgat

SEQ ID NO: 277890 - DNA, 30 bp, Artificial Sequence
  Synthetic oligonucleotide
ctctgcggccggaccacagatcggtatgat

SEQ ID NO: 277891 - DNA, 30 bp, Artificial Sequence
  Synthetic oligonucleotide
cggttcccatgctcgcttaacaattatgat

SEQ ID NO: 277892 - DNA, 30 bp, Artificial Sequence
  Synthetic oligonucleotide
acactcctccttgtcaccgataattatgat

SEQ ID NO: 277893 - DNA, 30 bp, Artificial Sequence
  Synthetic oligonucleotide
ccgaccgttcgaccatatgtgccttatgat

SEQ ID NO: 277894 - DNA, 30 bp, Artificial Sequence
  Synthetic oligonucleotide
gcacttaccaacgtatgggcaaagactgat

SEQ ID NO: 277895 - DNA, 30 bp, Artificial Sequence
  Synthetic oligonucleotide
gggtacaccgctcgtattgaagcgactgat

SEQ ID NO: 277896 - DNA, 30 bp, Artificial Sequence
  Synthetic oligonucleotide
atgacgccgagtaacgcgctgcggactgat

SEQ ID NO: 277897 - DNA, 30 bp, Artificial Sequence
  Synthetic oligonucleotide
taaatgcgcttccgagctcaactgactgat

SEQ ID NO: 277898 - DNA, 30 bp, Artificial Sequence
  Synthetic oligonucleotide
ttcgtggtttaatgccttagacctactgat

SEQ ID NO: 277899 - DNA, 30 bp, Artificial Sequence
  Synthetic oligonucleotide
aaaattacagtgaatctcagaagtactgat

SEQ ID NO: 277900 - DNA, 31 bp, Artificial Sequence
  Synthetic oligonucleotide
ccggaaaagacctttatactttcgtcctgat

SEQ ID NO: 277901 - DNA, 30 bp, Artificial Sequence
  Synthetic oligonucleotide
tcgtttcagagagcgccataagcagctgat

SEQ ID NO: 277902 - DNA, 30 bp, Artificial Sequence
  Synthetic oligonucleotide
atactacagataaatcgatgatgagctgat

SEQ ID NO: 277903 - DNA, 30 bp, Artificial Sequence
  Synthetic oligonucleotide
acctttatgcggagatatctggtcgctgat

SEQ ID NO: 277904 - DNA, 30 bp, Artificial Sequence
  Synthetic oligonucleotide
cgtctggctcaagatgttctatcggctgat

SEQ ID NO: 277905 - DNA, 30 bp, Artificial Sequence
  Synthetic oligonucleotide
gccgatatccgtggtaaaattaatgctgat

SEQ ID NO: 277906 - DNA, 30 bp, Artificial Sequence
  Synthetic oligonucleotide
atgccggcatgtcgccgttacaactctgat

SEQ ID NO: 277907 - DNA, 30 bp, Artificial Sequence
  Synthetic oligonucleotide
aagtcacgatgggttcctcgactctctgat

SEQ ID NO: 277908 - DNA, 30 bp, Artificial Sequence
  Synthetic oligonucleotide
gcctgcgtcgtgccgtgcatagtctctgat

SEQ ID NO: 277909 - DNA, 30 bp, Artificial Sequence
  Synthetic oligonucleotide
gttaccgagacgggggaaggtagaagtgat

SEQ ID NO: 277910 - DNA, 31 bp, Artificial Sequence
  Synthetic oligonucleotide
atgtacgaactctatttcagcgcccagtgat

SEQ ID NO: 277911 - DNA, 30 bp, Artificial Sequence
  Synthetic oligonucleotide
atagcaaatgcacctccgcggtgtagtgat

SEQ ID NO: 277912 - DNA, 30 bp, Artificial Sequence
  Synthetic oligonucleotide
gcatataaaactgaaaagcggactcgtgat

SEQ ID NO: 277913 - DNA, 30 bp, Artificial Sequence
  Synthetic oligonucleotide
ggatatgacatcctaacagtcttaggtgat

SEQ ID NO: 277914 - DNA, 30 bp, Artificial Sequence
  Synthetic oligonucleotide
gagctcgaactacttttggtaatcggtgat

SEQ ID NO: 277915 - DNA, 30 bp, Artificial Sequence
  Synthetic oligonucleotide
cacatgctcaatcgttggctaactggtgat

SEQ ID NO: 277916 - DNA, 30 bp, Artificial Sequence
  Synthetic oligonucleotide
cttttcagtcaaggtttgtatactggtgat

SEQ ID NO: 277917 - DNA, 30 bp, Artificial Sequence
  Synthetic oligonucleotide
atggttagggtatctgggggtcttggtgat

SEQ ID NO: 277918 - DNA, 30 bp, Artificial Sequence
  Synthetic oligonucleotide
tatgcccgctatgtgagccaaagatgtgat

SEQ ID NO: 277919 - DNA, 30 bp, Artificial Sequence
  Synthetic oligonucleotide
tccgaccaagggacactgcgacgctgtgat

SEQ ID NO: 277920 - DNA, 30 bp, Artificial Sequence
  Synthetic oligonucleotide
aataagatcaagggtcccatgatctgtgat

SEQ ID NO: 277921 - DNA, 30 bp, Artificial Sequence
  Synthetic oligonucleotide
tgggttcataaaccgcttttcttctgtgat

SEQ ID NO: 277922 - DNA, 30 bp, Artificial Sequence
  Synthetic oligonucleotide
cttacatatgaatgaaccatagcttgtgat

SEQ ID NO: 277923 - DNA, 30 bp, Artificial Sequence
  Synthetic oligonucleotide
gtttcgactaccatatcactagtaattgat

SEQ ID NO: 277924 - DNA, 30 bp, Artificial Sequence
  Synthetic oligonucleotide
agaaatgtggaattgaacaaacttattgat

SEQ ID NO: 277925 - DNA, 30 bp, Artificial Sequence
  Synthetic oligonucleotide
cgtagacctcaagaccaaagtacacttgat

SEQ ID NO: 277926 - DNA, 30 bp, Artificial Sequence
  Synthetic oligonucleotide
tagcaaatgtgatcgcgctgtcgacttgat

SEQ ID NO: 277927 - DNA, 30 bp, Artificial Sequence
  Synthetic oligonucleotide
ggagtccgaatggaattccttacgcttgat

SEQ ID NO: 277928 - DNA, 30 bp, Artificial Sequence
  Synthetic oligonucleotide
atcatgcccgaaactgtttccgggcttgat

SEQ ID NO: 277929 - DNA, 30 bp, Artificial Sequence
  Synthetic oligonucleotide
gtcctcgtcacctcgcatctgtggcttgat

SEQ ID NO: 277930 - DNA, 30 bp, Artificial Sequence
  Synthetic oligonucleotide
caaaataccataaacgctccgctagttgat

SEQ ID NO: 277931 - DNA, 30 bp, Artificial Sequence
  Synthetic oligonucleotide
tatttcgggtgtgtacatgattccgttgat

SEQ ID NO: 277932 - DNA, 30 bp, Artificial Sequence
  Synthetic oligonucleotide
gatgagccggaaggggaataatgcgttgat

SEQ ID NO: 277933 - DNA, 30 bp, Artificial Sequence
  Synthetic oligonucleotide
acagctacattcgtgcaaccgtaggttgat

SEQ ID NO: 277934 - DNA, 30 bp, Artificial Sequence
  Synthetic oligonucleotide
attaaacgtggattagcggctcgtgttgat

SEQ ID NO: 277935 - DNA, 30 bp, Artificial Sequence
  Synthetic oligonucleotide
cttaccctcagtatcacaggaatgtttgat
